United States Patent Application Publication US 2005/0287570 A1 - sequence listing, part 13

SEQ ID NO: 320630 - DNA, 25 bp, Artificial
  Probe
ctaatcgaggagcaacaagacccaa

SEQ ID NO: 320631 - DNA, 25 bp, Artificial
  Probe
aggagcaacaagacccaacgggcca

SEQ ID NO: 320632 - DNA, 25 bp, Artificial
  Probe
aaactgtgtgtcttgatgacacaac

SEQ ID NO: 320633 - DNA, 25 bp, Artificial
  Probe
ctcgtcatggtagaagttcggaagg

SEQ ID NO: 320634 - DNA, 25 bp, Artificial
  Probe
tactataagcctctcctgtctgctg

SEQ ID NO: 320635 - DNA, 25 bp, Artificial
  Probe
acctgccttcagcactcgcgtgttg

SEQ ID NO: 320636 - DNA, 25 bp, Artificial
  Probe
tgccttcagcactcgcgtgttgcca

SEQ ID NO: 320637 - DNA, 25 bp, Artificial
  Probe
caatagagagatcctgccatccacc

SEQ ID NO: 320638 - DNA, 25 bp, Artificial
  Probe
tgcccccatgtcactctgcagtttg

SEQ ID NO: 320639 - DNA, 25 bp, Artificial
  Probe
aggtctgggcccactatgaggagca

SEQ ID NO: 320640 - DNA, 25 bp, Artificial
  Probe
agaagcagttccagaaagtgatcac

SEQ ID NO: 320641 - DNA, 25 bp, Artificial
  Probe
acccagctggaaaaactgatggaga

SEQ ID NO: 320642 - DNA, 25 bp, Artificial
  Probe
gaaggactcgtcatggtagaagttc

SEQ ID NO: 320643 - DNA, 25 bp, Artificial
  Probe
ctatgtgcaagatgtggagactggc

SEQ ID NO: 320644 - DNA, 25 bp, Artificial
  Probe
gtgccaggctgaacctgtggcgcta

SEQ ID NO: 320645 - DNA, 25 bp, Artificial
  Probe
tcgactatggcaatagagagatcct

SEQ ID NO: 320646 - DNA, 25 bp, Artificial
  Probe
aagtgatcacagagtacctgaatgc

SEQ ID NO: 320647 - DNA, 25 bp, Artificial
  Probe
aggaagctgccaagcagaggaaaga

SEQ ID NO: 320648 - DNA, 25 bp, Artificial
  Probe
gagaaggagcgctcggccagctaca

SEQ ID NO: 320649 - DNA, 25 bp, Artificial
  Probe
ggagaacttgcctggctcccagcac

SEQ ID NO: 320650 - DNA, 25 bp, Artificial
  Probe
cacagagtacctgaatgcccaggaa

SEQ ID NO: 320651 - DNA, 25 bp, Artificial
  Probe
ctgcatttctatgtgcaagatgtgg

SEQ ID NO: 320652 - DNA, 25 bp, Artificial
  Probe
tccagtggccccaagatgaggacgc

SEQ ID NO: 320653 - DNA, 25 bp, Artificial
  Probe
gccaagagtgccaggctgaacctgt

SEQ ID NO: 320654 - DNA, 25 bp, Artificial
  Probe
agctgccaagcagaggaaagagaag

SEQ ID NO: 320655 - DNA, 25 bp, Artificial
  Probe
ccactatgaggagcagcctgtggag

SEQ ID NO: 320656 - DNA, 25 bp, Artificial
  Probe
tctccaaggtccacttcactgctga

SEQ ID NO: 320657 - DNA, 25 bp, Artificial
  Probe
acatgcgcagtgacatctccagcca

SEQ ID NO: 320658 - DNA, 25 bp, Artificial
  Probe
ctgcattgccaaatttgtagatgga

SEQ ID NO: 320659 - DNA, 25 bp, Artificial
  Probe
ttccagaaagtgatcacagagtacc

SEQ ID NO: 320660 - DNA, 25 bp, Artificial
  Probe
gccttcatccagtggccccaagatg

SEQ ID NO: 320661 - DNA, 25 bp, Artificial
  Probe
atagagagatcctgccatccacccg

SEQ ID NO: 320662 - DNA, 25 bp, Artificial
  Probe
gagaacatgcgcagtgacatctcca

SEQ ID NO: 320663 - DNA, 25 bp, Artificial
  Probe
agatgaggacgctcgcacagatgct

SEQ ID NO: 320664 - DNA, 25 bp, Artificial
  Probe
gtggagactggcacccagctggaaa

SEQ ID NO: 320665 - DNA, 25 bp, Artificial
  Probe
acactcagtgcctgctcaacgtgga

SEQ ID NO: 320666 - DNA, 25 bp, Artificial
  Probe
cagtttgcggattccaaaggtgatg

SEQ ID NO: 320667 - DNA, 25 bp, Artificial
  Probe
caggctgaacctgtggcgctatggc

SEQ ID NO: 320668 - DNA, 25 bp, Artificial
  Probe
tatgccttcgccttcatccagtggc

SEQ ID NO: 320669 - DNA, 25 bp, Artificial
  Probe
tcctgttgagggtctacgcccacgc

SEQ ID NO: 320670 - DNA, 25 bp, Artificial
  Probe
gacatccaaaacactcagtgcctgc

SEQ ID NO: 320671 - DNA, 25 bp, Artificial
  Probe
ttctgcattgccaaatttgtagatg

SEQ ID NO: 320672 - DNA, 25 bp, Artificial
  Probe
atgcctgtactggaagagaaggagc

SEQ ID NO: 320673 - DNA, 25 bp, Artificial
  Probe
tggagcacctgagtgccagctgccc

SEQ ID NO: 320674 - DNA, 25 bp, Artificial
  Probe
tggagcacgcgctctccaaggtcca

SEQ ID NO: 320675 - DNA, 25 bp, Artificial
  Probe
aacctgtggcgctatggcgacttcc

SEQ ID NO: 320676 - DNA, 25 bp, Artificial
  Probe
ccctgccaaagtgcatgtcttctac

SEQ ID NO: 320677 - DNA, 25 bp, Artificial
  Probe
aggtccacttcactgctgagcgcag

SEQ ID NO: 320678 - DNA, 25 bp, Artificial
  Probe
ctgctgaggaagctgccaagcagag

SEQ ID NO: 320679 - DNA, 25 bp, Artificial
  Probe
ctgttctgaggacttcttgcagttg

SEQ ID NO: 320680 - DNA, 25 bp, Artificial
  Probe
aaagcccttggtctctgttctgagg

SEQ ID NO: 320681 - DNA, 25 bp, Artificial
  Probe
tctctgttctgaggacttcttgcag

SEQ ID NO: 320682 - DNA, 25 bp, Artificial
  Probe
cttgcagttggatcatccggtttat

SEQ ID NO: 320683 - DNA, 25 bp, Artificial
  Probe
cgaaagcccttggtctctgttctga

SEQ ID NO: 320684 - DNA, 25 bp, Artificial
  Probe
ggtctctgttctgaggacttcttgc

SEQ ID NO: 320685 - DNA, 25 bp, Artificial
  Probe
ccttggtctctgttctgaggacttc

SEQ ID NO: 320686 - DNA, 25 bp, Artificial
  Probe
ggcgccagatgctgacccaggactc

SEQ ID NO: 320687 - DNA, 25 bp, Artificial
  Probe
tctgttctgaggacttcttgcagtt

SEQ ID NO: 320688 - DNA, 25 bp, Artificial
  Probe
tggtctctgttctgaggacttcttg

SEQ ID NO: 320689 - DNA, 25 bp, Artificial
  Probe
gaaagcccttggtctctgttctgag

SEQ ID NO: 320690 - DNA, 25 bp, Artificial
  Probe
tgttctgaggacttcttgcagttgg

SEQ ID NO: 320691 - DNA, 25 bp, Artificial
  Probe
tgaggacttcttgcagttggatcat

SEQ ID NO: 320692 - DNA, 25 bp, Artificial
  Probe
ttgcagttggatcatccggtttatt

SEQ ID NO: 320693 - DNA, 25 bp, Artificial
  Probe
acttcttgcagttggatcatccggt

SEQ ID NO: 320694 - DNA, 25 bp, Artificial
  Probe
ttcttgcagttggatcatccggttt

SEQ ID NO: 320695 - DNA, 25 bp, Artificial
  Probe
gaggacttcttgcagttggatcatc

SEQ ID NO: 320696 - DNA, 25 bp, Artificial
  Probe
cagttggatcatccggtttatttat

SEQ ID NO: 320697 - DNA, 25 bp, Artificial
  Probe
gatgctgacccaggactccccgaaa

SEQ ID NO: 320698 - DNA, 25 bp, Artificial
  Probe
gcaatttccttttccctctttctgc

SEQ ID NO: 320699 - DNA, 25 bp, Artificial
  Probe
gttctgaggacttcttgcagttgga

SEQ ID NO: 320700 - DNA, 25 bp, Artificial
  Probe
gacttcttgcagttggatcatccgg

SEQ ID NO: 320701 - DNA, 25 bp, Artificial
  Probe
gtctctgttctgaggacttcttgca

SEQ ID NO: 320702 - DNA, 25 bp, Artificial
  Probe
tcttgcagttggatcatccggttta

SEQ ID NO: 320703 - DNA, 25 bp, Artificial
  Probe
cttcttgcagttggatcatccggtt

SEQ ID NO: 320704 - DNA, 25 bp, Artificial
  Probe
ctgaggacttcttgcagttggatca

SEQ ID NO: 320705 - DNA, 25 bp, Artificial
  Probe
ctctgttctgaggacttcttgcagt

SEQ ID NO: 320706 - DNA, 25 bp, Artificial
  Probe
tccccgaaagcccttggtctctgtt

SEQ ID NO: 320707 - DNA, 25 bp, Artificial
  Probe
ttctgaggacttcttgcagttggat

SEQ ID NO: 320708 - DNA, 25 bp, Artificial
  Probe
agatgctgacccaggactccccgaa

SEQ ID NO: 320709 - DNA, 25 bp, Artificial
  Probe
aaggcgccagatgctgacccaggac

SEQ ID NO: 320710 - DNA, 25 bp, Artificial
  Probe
tctgaggacttcttgcagttggatc

SEQ ID NO: 320711 - DNA, 25 bp, Artificial
  Probe
ggacttcttgcagttggatcatccg

SEQ ID NO: 320712 - DNA, 25 bp, Artificial
  Probe
cttggtctctgttctgaggacttct

SEQ ID NO: 320713 - DNA, 25 bp, Artificial
  Probe
cccttggtctctgttctgaggactt

SEQ ID NO: 320714 - DNA, 25 bp, Artificial
  Probe
tgcagttggatcatccggtttattt

SEQ ID NO: 320715 - DNA, 25 bp, Artificial
  Probe
atgctgacccaggactccccgaaag

SEQ ID NO: 320716 - DNA, 25 bp, Artificial
  Probe
ttggtctctgttctgaggacttctt

SEQ ID NO: 320717 - DNA, 25 bp, Artificial
  Probe
gcccttggtctctgttctgaggact

SEQ ID NO: 320718 - DNA, 25 bp, Artificial
  Probe
agcccttggtctctgttctgaggac

SEQ ID NO: 320719 - DNA, 25 bp, Artificial
  Probe
ccgaaagcccttggtctctgttctg

SEQ ID NO: 320720 - DNA, 25 bp, Artificial
  Probe
aggacttcttgcagttggatcatcc

SEQ ID NO: 320721 - DNA, 25 bp, Artificial
  Probe
aggcgccagatgctgacccaggact

SEQ ID NO: 320722 - DNA, 25 bp, Artificial
  Probe
cccgaaagcccttggtctctgttct

SEQ ID NO: 320723 - DNA, 25 bp, Artificial
  Probe
aagcccttggtctctgttctgagga

SEQ ID NO: 320724 - DNA, 25 bp, Artificial
  Probe
gcagttggatcatccggtttattta

SEQ ID NO: 320725 - DNA, 25 bp, Artificial
  Probe
ctgcacacgccctaggcttgaggaa

SEQ ID NO: 320726 - DNA, 25 bp, Artificial
  Probe
cgacaaagcgccagttggacgcgca

SEQ ID NO: 320727 - DNA, 25 bp, Artificial
  Probe
gggccctagcctcactgaggaccag

SEQ ID NO: 320728 - DNA, 25 bp, Artificial
  Probe
gcccagagtatgttccagatcccag

SEQ ID NO: 320729 - DNA, 25 bp, Artificial
  Probe
ccccaggtctcctggggagcatcgt

SEQ ID NO: 320730 - DNA, 25 bp, Artificial
  Probe
ggtctcctggggagcatcgttcagc

SEQ ID NO: 320731 - DNA, 25 bp, Artificial
  Probe
cacgccctaggcttgaggaagtccg

SEQ ID NO: 320732 - DNA, 25 bp, Artificial
  Probe
tcctggggagcatcgttcagcagca

SEQ ID NO: 320733 - DNA, 25 bp, Artificial
  Probe
tgaggaagtccgatcccggaatccg

SEQ ID NO: 320734 - DNA, 25 bp, Artificial
  Probe
ggtggagaccagcagcccagagtat

SEQ ID NO: 320735 - DNA, 25 bp, Artificial
  Probe
cagatgcgacaaagcgccagttgga

SEQ ID NO: 320736 - DNA, 25 bp, Artificial
  Probe
agtactacagataggggcctgggcc

SEQ ID NO: 320737 - DNA, 25 bp, Artificial
  Probe
gtatgttccagatcccagagtttga

SEQ ID NO: 320738 - DNA, 25 bp, Artificial
  Probe
ccgatcccggaatccggagcctggg

SEQ ID NO: 320739 - DNA, 25 bp, Artificial
  Probe
tcccagagtttgagccgagtgagca

SEQ ID NO: 320740 - DNA, 25 bp, Artificial
  Probe
aatgggaaccccaaagcagccctcg

SEQ ID NO: 320741 - DNA, 25 bp, Artificial
  Probe
gaccagcagcccagagtatgttcca

SEQ ID NO: 320742 - DNA, 25 bp, Artificial
  Probe
atccaaatgggaaccccaaagcagc

SEQ ID NO: 320743 - DNA, 25 bp, Artificial
  Probe
tgagggttccttcaagggacttcct

SEQ ID NO: 320744 - DNA, 25 bp, Artificial
  Probe
ctagcctcactgaggaccagccagg

SEQ ID NO: 320745 - DNA, 25 bp, Artificial
  Probe
gcgcaggcactgcaacacagatgcg

SEQ ID NO: 320746 - DNA, 25 bp, Artificial
  Probe
tgcacacgccctaggcttgaggaag

SEQ ID NO: 320747 - DNA, 25 bp, Artificial
  Probe
ggaggacttatcagccgaagcaggc

SEQ ID NO: 320748 - DNA, 25 bp, Artificial
  Probe
ctaggcttgaggaagtccgatcccg

SEQ ID NO: 320749 - DNA, 25 bp, Artificial
  Probe
gaggaccagccaggtccctacctgg

SEQ ID NO: 320750 - DNA, 25 bp, Artificial
  Probe
gccccaggtctcctggggagcatcg

SEQ ID NO: 320751 - DNA, 25 bp, Artificial
  Probe
tgaggaccagccaggtccctacctg

SEQ ID NO: 320752 - DNA, 25 bp, Artificial
  Probe
tccaggatccaaatgggaaccccaa

SEQ ID NO: 320753 - DNA, 25 bp, Artificial
  Probe
tcactgaggaccagccaggtcccta

SEQ ID NO: 320754 - DNA, 25 bp, Artificial
  Probe
aacacagatgcgacaaagcgccagt

SEQ ID NO: 320755 - DNA, 25 bp, Artificial
  Probe
cagataggggcctgggccctagcct

SEQ ID NO: 320756 - DNA, 25 bp, Artificial
  Probe
gaggaagtccgatcccggaatccgg

SEQ ID NO: 320757 - DNA, 25 bp, Artificial
  Probe
gatccaaatgggaaccccaaagcag

SEQ ID NO: 320758 - DNA, 25 bp, Artificial
  Probe
ggaagacgctagtactacagatagg

SEQ ID NO: 320759 - DNA, 25 bp, Artificial
  Probe
tgggccctagcctcactgaggacca

SEQ ID NO: 320760 - DNA, 25 bp, Artificial
  Probe
ctgcaacacagatgcgacaaagcgc

SEQ ID NO: 320761 - DNA, 25 bp, Artificial
  Probe
tacctggccccaggtctcctgggga

SEQ ID NO: 320762 - DNA, 25 bp, Artificial
  Probe
cagcagcccagagtatgttccagat

SEQ ID NO: 320763 - DNA, 25 bp, Artificial
  Probe
gttccagatcccagagtttgagccg

SEQ ID NO: 320764 - DNA, 25 bp, Artificial
  Probe
atcagccgaagcaggcctccaggat

SEQ ID NO: 320765 - DNA, 25 bp, Artificial
  Probe
gtccgatcccggaatccggagcctg

SEQ ID NO: 320766 - DNA, 25 bp, Artificial
  Probe
cggtggagaccagcagcccagagta

SEQ ID NO: 320767 - DNA, 25 bp, Artificial
  Probe
ggcctgggccctagcctcactgagg

SEQ ID NO: 320768 - DNA, 25 bp, Artificial
  Probe
ccgaagcaggcctccaggatccaaa

SEQ ID NO: 320769 - DNA, 25 bp, Artificial
  Probe
acttatcagccgaagcaggcctcca

SEQ ID NO: 320770 - DNA, 25 bp, Artificial
  Probe
tagcctcactgaggaccagccaggt

SEQ ID NO: 320771 - DNA, 25 bp, Artificial
  Probe
cagcttgcatctgaagacatcagcc

SEQ ID NO: 320772 - DNA, 25 bp, Artificial
  Probe
attttgcgcaaattgaaaagtgcac

SEQ ID NO: 320773 - DNA, 25 bp, Artificial
  Probe
tacagtcacaaggttttaaactgaa

SEQ ID NO: 320774 - DNA, 25 bp, Artificial
  Probe
gtgtacagtcacaaggttttaaact

SEQ ID NO: 320775 - DNA, 25 bp, Artificial
  Probe
actcggcttgaggatgggcttgctc

SEQ ID NO: 320776 - DNA, 25 bp, Artificial
  Probe
tgaaaagtgcaccagaccaggaggt

SEQ ID NO: 320777 - DNA, 25 bp, Artificial
  Probe
agaccatactggagaagctattttg

SEQ ID NO: 320778 - DNA, 25 bp, Artificial
  Probe
gctggcaagacgaccctgctgaagc

SEQ ID NO: 320779 - DNA, 25 bp, Artificial
  Probe
tgctctctattttgcgcaaattgaa

SEQ ID NO: 320780 - DNA, 25 bp, Artificial
  Probe
agcagcttgcatctgaagacatcag

SEQ ID NO: 320781 - DNA, 25 bp, Artificial
  Probe
ggacattggcggacagaggaaaatc

SEQ ID NO: 320782 - DNA, 25 bp, Artificial
  Probe
acgaccctgctgaagcagcttgcat

SEQ ID NO: 320783 - DNA, 25 bp, Artificial
  Probe
aggaaaatcagaccatactggagaa

SEQ ID NO: 320784 - DNA, 25 bp, Artificial
  Probe
ggcgccgcagcagttacccctggta

SEQ ID NO: 320785 - DNA, 25 bp, Artificial
  Probe
caagacgaccctgctgaagcagctt

SEQ ID NO: 320786 - DNA, 25 bp, Artificial
  Probe
gcatctgaagacatcagccacatca

SEQ ID NO: 320787 - DNA, 25 bp, Artificial
  Probe
ttgaggatgggcttgctctctattt

SEQ ID NO: 320788 - DNA, 25 bp, Artificial
  Probe
ctcggcttgaggatgggcttgctct

SEQ ID NO: 320789 - DNA, 25 bp, Artificial
  Probe
tcggcttgaggatgggcttgctctc

SEQ ID NO: 320790 - DNA, 25 bp, Artificial
  Probe
gaccctgctgaagcagcttgcatct

SEQ ID NO: 320791 - DNA, 25 bp, Artificial
  Probe
ccgttcctccgctgtgcatgcgagg

SEQ ID NO: 320792 - DNA, 25 bp, Artificial
  Probe
atatacgtaattgacagtgcagaca

SEQ ID NO: 320793 - DNA, 25 bp, Artificial
  Probe
aaagtgcaccagaccaggaggtgcg

SEQ ID NO: 320794 - DNA, 25 bp, Artificial
  Probe
tacgtaattgacagtgcagacagaa

SEQ ID NO: 320795 - DNA, 25 bp, Artificial
  Probe
aacgctggcaagacgaccctgctga

SEQ ID NO: 320796 - DNA, 25 bp, Artificial
  Probe
cattggcggacagaggaaaatcaga

SEQ ID NO: 320797 - DNA, 25 bp, Artificial
  Probe
cttatatacgtaattgacagtgcag

SEQ ID NO: 320798 - DNA, 25 bp, Artificial
  Probe
gtgcaccagaccaggaggtgcgaat

SEQ ID NO: 320799 - DNA, 25 bp, Artificial
  Probe
gacgaccctgctgaagcagcttgca

SEQ ID NO: 320800 - DNA, 25 bp, Artificial
  Probe
acattggcggacagaggaaaatcag

SEQ ID NO: 320801 - DNA, 25 bp, Artificial
  Probe
gcgccgcagcagttacccctggtaa

SEQ ID NO: 320802 - DNA, 25 bp, Artificial
  Probe
accatactggagaagctattttgaa

SEQ ID NO: 320803 - DNA, 25 bp, Artificial
  Probe
gatttaacatcaaaagtgtacagtc

SEQ ID NO: 320804 - DNA, 25 bp, Artificial
  Probe
ttgctctctattttgcgcaaattga

SEQ ID NO: 320805 - DNA, 25 bp, Artificial
  Probe
aaatcagaccatactggagaagcta

SEQ ID NO: 320806 - DNA, 25 bp, Artificial
  Probe
cagaccaggaggtgcgaatcctcct

SEQ ID NO: 320807 - DNA, 25 bp, Artificial
  Probe
tatatacgtaattgacagtgcagac

SEQ ID NO: 320808 - DNA, 25 bp, Artificial
  Probe
ttcttatatacgtaattgacagtgc

SEQ ID NO: 320809 - DNA, 25 bp, Artificial
  Probe
gccgcagcagttacccctggtaacg

SEQ ID NO: 320810 - DNA, 25 bp, Artificial
  Probe
ctattttgcgcaaattgaaaagtgc

SEQ ID NO: 320811 - DNA, 25 bp, Artificial
  Probe
cctccgctgtgcatgcgagggacgt

SEQ ID NO: 320812 - DNA, 25 bp, Artificial
  Probe
ctccgctgtgcatgcgagggacgtc

SEQ ID NO: 320813 - DNA, 25 bp, Artificial
  Probe
ggaaaatcagaccatactggagaag

SEQ ID NO: 320814 - DNA, 25 bp, Artificial
  Probe
acatcaaaagtgtacagtcacaagg

SEQ ID NO: 320815 - DNA, 25 bp, Artificial
  Probe
ttgaaaagtgcaccagaccaggagg

SEQ ID NO: 320816 - DNA, 25 bp, Artificial
  Probe
aagacgaccctgctgaagcagcttg

SEQ ID NO: 320817 - DNA, 25 bp, Artificial
  Probe
ccactcgctggaacacagatgcgtg

SEQ ID NO: 320818 - DNA, 25 bp, Artificial
  Probe
aggaagtacttggtcccatctgaca

SEQ ID NO: 320819 - DNA, 25 bp, Artificial
  Probe
tgtttaaggaggaccactcgctgga

SEQ ID NO: 320820 - DNA, 25 bp, Artificial
  Probe
cctaactatgggacagctttacgag

SEQ ID NO: 320821 - DNA, 25 bp, Artificial
  Probe
agtcccacagtccagcctaactatg

SEQ ID NO: 320822 - DNA, 25 bp, Artificial
  Probe
aaggaggaccactcgctggaacaca

SEQ ID NO: 320823 - DNA, 25 bp, Artificial
  Probe
aaggccatcttcttgtttgtggaca

SEQ ID NO: 320824 - DNA, 25 bp, Artificial
  Probe
ttccttctgagaaggccatcttctt

SEQ ID NO: 320825 - DNA, 25 bp, Artificial
  Probe
ttgtttgtggacaagacagtcccac

SEQ ID NO: 320826 - DNA, 25 bp, Artificial
  Probe
ccagcctaactatgggacagcttta

SEQ ID NO: 320827 - DNA, 25 bp, Artificial
  Probe
agagaacacttttggcttctgagcc

SEQ ID NO: 320828 - DNA, 25 bp, Artificial
  Probe
tctgagaaggccatcttcttgtttg

SEQ ID NO: 320829 - DNA, 25 bp, Artificial
  Probe
ttcgccgaagtctgcggctcaaaga

SEQ ID NO: 320830 - DNA, 25 bp, Artificial
  Probe
ctactagtgcatttgtaactggatt

SEQ ID NO: 320831 - DNA, 25 bp, Artificial
  Probe
aagacagtcccacagtccagcctaa

SEQ ID NO: 320832 - DNA, 25 bp, Artificial
  Probe
agatgcgtggaatccgcgaagatca

SEQ ID NO: 320833 - DNA, 25 bp, Artificial
  Probe
gtacttggtcccatctgacatcact

SEQ ID NO: 320834 - DNA, 25 bp, Artificial
  Probe
gcttctgagcccttgctgggctagg

SEQ ID NO: 320835 - DNA, 25 bp, Artificial
  Probe
aacacttttggcttctgagcccttg

SEQ ID NO: 320836 - DNA, 25 bp, Artificial
  Probe
gaccactcgctggaacacagatgcg

SEQ ID NO: 320837 - DNA, 25 bp, Artificial
  Probe
tgtggacaagacagtcccacagtcc

SEQ ID NO: 320838 - DNA, 25 bp, Artificial
  Probe
ccgccatgaagtggatgtttaagga

SEQ ID NO: 320839 - DNA, 25 bp, Artificial
  Probe
cgctggaacacagatgcgtggaatc

SEQ ID NO: 320840 - DNA, 25 bp, Artificial
  Probe
ctgagcccttgctgggctaggtgca

SEQ ID NO: 320841 - DNA, 25 bp, Artificial
  Probe
cccatctgacatcactgtggctcag

SEQ ID NO: 320842 - DNA, 25 bp, Artificial
  Probe
ctggaacacagatgcgtggaatccg

SEQ ID NO: 320843 - DNA, 25 bp, Artificial
  Probe
aggaccactcgctggaacacagatg

SEQ ID NO: 320844 - DNA, 25 bp, Artificial
  Probe
catcactgtggctcagttcatgtgg

SEQ ID NO: 320845 - DNA, 25 bp, Artificial
  Probe
tccgcgaagatcagagcgaaatacc

SEQ ID NO: 320846 - DNA, 25 bp, Artificial
  Probe
ccaaggaacctgtcctccggaatca

SEQ ID NO: 320847 - DNA, 25 bp, Artificial
  Probe
cttgtttgtggacaagacagtccca

SEQ ID NO: 320848 - DNA, 25 bp, Artificial
  Probe
ggttccggtgatcgttgagaaagtc

SEQ ID NO: 320849 - DNA, 25 bp, Artificial
  Probe
aaaggatccagcttccttctgagaa

SEQ ID NO: 320850 - DNA, 25 bp, Artificial
  Probe
cgccgccatgaagtggatgtttaag

SEQ ID NO: 320851 - DNA, 25 bp, Artificial
  Probe
ctatgggacagctttacgagaagga

SEQ ID NO: 320852 - DNA, 25 bp, Artificial
  Probe
cacagtccagcctaactatgggaca

SEQ ID NO: 320853 - DNA, 25 bp, Artificial
  Probe
cagttcatgtggatcatcaggaaaa

SEQ ID NO: 320854 - DNA, 25 bp, Artificial
  Probe
aacacagatgcgtggaatccgcgaa

SEQ ID NO: 320855 - DNA, 25 bp, Artificial
  Probe
tggacaagacagtcccacagtccag

SEQ ID NO: 320856 - DNA, 25 bp, Artificial
  Probe
tccggtgatcgttgagaaagtctct

SEQ ID NO: 320857 - DNA, 25 bp, Artificial
  Probe
ccacacagacctactagtgcatttg

SEQ ID NO: 320858 - DNA, 25 bp, Artificial
  Probe
tttaaggaggaccactcgctggaac

SEQ ID NO: 320859 - DNA, 25 bp, Artificial
  Probe
ggaagtacttggtcccatctgacat

SEQ ID NO: 320860 - DNA, 25 bp, Artificial
  Probe
gtggaatccgcgaagatcagagcga

SEQ ID NO: 320861 - DNA, 25 bp, Artificial
  Probe
ttcctgcttgtgtatcctgtaaata

SEQ ID NO: 320862 - DNA, 25 bp, Artificial
  Probe
ttttggcttctgagcccttgctggg

SEQ ID NO: 320863 - DNA, 25 bp, Artificial
  Probe
agtcctgggaatgaacaggaagagc

SEQ ID NO: 320864 - DNA, 25 bp, Artificial
  Probe
gatgtcaaacaacaaccagactcag

SEQ ID NO: 320865 - DNA, 25 bp, Artificial
  Probe
tcatgaatcagcaccagcagcaaat

SEQ ID NO: 320866 - DNA, 25 bp, Artificial
  Probe
aaggccattcggatcactttttcca

SEQ ID NO: 320867 - DNA, 25 bp, Artificial
  Probe
tggaataaggccattcggatcactt

SEQ ID NO: 320868 - DNA, 25 bp, Artificial
  Probe
cctcctgagactctacatcacagag

SEQ ID NO: 320869 - DNA, 25 bp, Artificial
  Probe
cagcaatgctgagatatctgatgtc

SEQ ID NO: 320870 - DNA, 25 bp, Artificial
  Probe
cgcaaatatatcgtcagtttggaat

SEQ ID NO: 320871 - DNA, 25 bp, Artificial
  Probe
cctatcgttttcaaccatgggcttg

SEQ ID NO: 320872 - DNA, 25 bp, Artificial
  Probe
actcccagtagagaatcaagagcct

SEQ ID NO: 320873 - DNA, 25 bp, Artificial
  Probe
gaataaggccattcggatcactttt

SEQ ID NO: 320874 - DNA, 25 bp, Artificial
  Probe
tcatgaccttcagacacagggtcaa

SEQ ID NO: 320875 - DNA, 25 bp, Artificial
  Probe
tcagatctcccgtctgatgatgtaa

SEQ ID NO: 320876 - DNA, 25 bp, Artificial
  Probe
aagatcatgaatcagcaccagcagc

SEQ ID NO: 320877 - DNA, 25 bp, Artificial
  Probe
agcaatgctgagatatctgatgtca

SEQ ID NO: 320878 - DNA, 25 bp, Artificial
  Probe
gccattcggatcactttttccagaa

SEQ ID NO: 320879 - DNA, 25 bp, Artificial
  Probe
ttcaagatcatgaatcagcaccagc

SEQ ID NO: 320880 - DNA, 25 bp, Artificial
  Probe
gagaaaatcatgaccttcagacaca

SEQ ID NO: 320881 - DNA, 25 bp, Artificial
  Probe
ttctgtgagtcctgggaatgaacag

SEQ ID NO: 320882 - DNA, 25 bp, Artificial
  Probe
accagactcagattcagatctcccg

SEQ ID NO: 320883 - DNA, 25 bp, Artificial
  Probe
ccttctgacaaagaaagacatcgaa

SEQ ID NO: 320884 - DNA, 25 bp, Artificial
  Probe
gaatcaagagccttctgacaaagaa

SEQ ID NO: 320885 - DNA, 25 bp, Artificial
  Probe
tatatcgtcagtttggaataaggcc

SEQ ID NO: 320886 - DNA, 25 bp, Artificial
  Probe
tcagacacagggtcaatgaatcact

SEQ ID NO: 320887 - DNA, 25 bp, Artificial
  Probe
cagattcagatctcccgtctgatga

SEQ ID NO: 320888 - DNA, 25 bp, Artificial
  Probe
agccttctgacaaagaaagacatcg

SEQ ID NO: 320889 - DNA, 25 bp, Artificial
  Probe
caatgctgagatatctgatgtcaaa

SEQ ID NO: 320890 - DNA, 25 bp, Artificial
  Probe
gtaaatccagggaatgttcaagatc

SEQ ID NO: 320891 - DNA, 25 bp, Artificial
  Probe
agaaccctatcgttttcaaccatgg

SEQ ID NO: 320892 - DNA, 25 bp, Artificial
  Probe
atcgtcagtttggaataaggccatt

SEQ ID NO: 320893 - DNA, 25 bp, Artificial
  Probe
cagacacagggtcaatgaatcactg

SEQ ID NO: 320894 - DNA, 25 bp, Artificial
  Probe
aaatcatgaccttcagacacagggt

SEQ ID NO: 320895 - DNA, 25 bp, Artificial
  Probe
aagagccttctgtgagtcctgggaa

SEQ ID NO: 320896 - DNA, 25 bp, Artificial
  Probe
ctgttgatcgtctatactctttcag

SEQ ID NO: 320897 - DNA, 25 bp, Artificial
  Probe
tcgttttcaaccatgggcttgaata

SEQ ID NO: 320898 - DNA, 25 bp, Artificial
  Probe
tcccgtctgatgatgtaaatccagg

SEQ ID NO: 320899 - DNA, 25 bp, Artificial
  Probe
atttaaggccgcaaatatatcgtca

SEQ ID NO: 320900 - DNA, 25 bp, Artificial
  Probe
taaggccgcaaatatatcgtcagtt

SEQ ID NO: 320901 - DNA, 25 bp, Artificial
  Probe
ctcctgagactctacatcacagaga

SEQ ID NO: 320902 - DNA, 25 bp, Artificial
  Probe
aggtcagcaatgctgagatatctga

SEQ ID NO: 320903 - DNA, 25 bp, Artificial
  Probe
aatccagggaatgttcaagatcatg

SEQ ID NO: 320904 - DNA, 25 bp, Artificial
  Probe
gagactctacatcacagagaaaatt

SEQ ID NO: 320905 - DNA, 25 bp, Artificial
  Probe
ctcagattcagatctcccgtctgat

SEQ ID NO: 320906 - DNA, 25 bp, Artificial
  Probe
aagagccttctgacaaagaaagaca

SEQ ID NO: 320907 - DNA, 25 bp, Artificial
  Probe
cactcccagtagagaatcaagagcc

SEQ ID NO: 320908 - DNA, 25 bp, Artificial
  Probe
gaaccctatcgttttcaaccatggg

SEQ ID NO: 320909 - DNA, 25 bp, Artificial
  Probe
tgcctctggactccctccttggcca

SEQ ID NO: 320910 - DNA, 25 bp, Artificial
  Probe
gtcattgtgcccatcccttgcctct

SEQ ID NO: 320911 - DNA, 25 bp, Artificial
  Probe
gctgcctacaatctggaggggaggg

SEQ ID NO: 320912 - DNA, 25 bp, Artificial
  Probe
cccttgcctctggactccctccttg

SEQ ID NO: 320913 - DNA, 25 bp, Artificial
  Probe
agtggtcattgtgcccatcccttgc

SEQ ID NO: 320914 - DNA, 25 bp, Artificial
  Probe
caggctgcctacaatctggagggga

SEQ ID NO: 320915 - DNA, 25 bp, Artificial
  Probe
catcccttgcctctggactccctcc

SEQ ID NO: 320916 - DNA, 25 bp, Artificial
  Probe
cttgcctctggactccctccttggc

SEQ ID NO: 320917 - DNA, 25 bp, Artificial
  Probe
ccttgcctctggactccctccttgg

SEQ ID NO: 320918 - DNA, 25 bp, Artificial
  Probe
cccccagtggtcattgtgcccatcc

SEQ ID NO: 320919 - DNA, 25 bp, Artificial
  Probe
tcccttgcctctggactccctcctt

SEQ ID NO: 320920 - DNA, 25 bp, Artificial
  Probe
tctggaggggagggtctgagacgcc

SEQ ID NO: 320921 - DNA, 25 bp, Artificial
  Probe
gtggtcattgtgcccatcccttgcc

SEQ ID NO: 320922 - DNA, 25 bp, Artificial
  Probe
attgtgcccatcccttgcctctgga

SEQ ID NO: 320923 - DNA, 25 bp, Artificial
  Probe
ctgcaggctgcctacaatctggagg

SEQ ID NO: 320924 - DNA, 25 bp, Artificial
  Probe
ggctgcctacaatctggaggggagg

SEQ ID NO: 320925 - DNA, 25 bp, Artificial
  Probe
gggtctgagacgccagccccctggg

SEQ ID NO: 320926 - DNA, 25 bp, Artificial
  Probe
atcccttgcctctggactccctcct

SEQ ID NO: 320927 - DNA, 25 bp, Artificial
  Probe
cctacaatctggaggggagggtctg

SEQ ID NO: 320928 - DNA, 25 bp, Artificial
  Probe
tacaatctggaggggagggtctgag

SEQ ID NO: 320929 - DNA, 25 bp, Artificial
  Probe
aggctgcctacaatctggaggggag

SEQ ID NO: 320930 - DNA, 25 bp, Artificial
  Probe
ggtcattgtgcccatcccttgcctc

SEQ ID NO: 320931 - DNA, 25 bp, Artificial
  Probe
acaatctggaggggagggtctgaga

SEQ ID NO: 320932 - DNA, 25 bp, Artificial
  Probe
ccatcccttgcctctggactccctc

SEQ ID NO: 320933 - DNA, 25 bp, Artificial
  Probe
tggtcattgtgcccatcccttgcct

SEQ ID NO: 320934 - DNA, 25 bp, Artificial
  Probe
ccccagtggtcattgtgcccatccc

SEQ ID NO: 320935 - DNA, 25 bp, Artificial
  Probe
ttgcctctggactccctccttggcc

SEQ ID NO: 320936 - DNA, 25 bp, Artificial
  Probe
tgcctacaatctggaggggagggtc

SEQ ID NO: 320937 - DNA, 25 bp, Artificial
  Probe
gcccccagtggtcattgtgcccatc

SEQ ID NO: 320938 - DNA, 25 bp, Artificial
  Probe
ccagtggtcattgtgcccatccctt

SEQ ID NO: 320939 - DNA, 25 bp, Artificial
  Probe
ctgcctacaatctggaggggagggt

SEQ ID NO: 320940 - DNA, 25 bp, Artificial
  Probe
gcctacaatctggaggggagggtct

SEQ ID NO: 320941 - DNA, 25 bp, Artificial
  Probe
tgcaggctgcctacaatctggaggg

SEQ ID NO: 320942 - DNA, 25 bp, Artificial
  Probe
aatctggaggggagggtctgagacg

SEQ ID NO: 320943 - DNA, 25 bp, Artificial
  Probe
gcaggctgcctacaatctggagggg

SEQ ID NO: 320944 - DNA, 25 bp, Artificial
  Probe
caatctggaggggagggtctgagac

SEQ ID NO: 320945 - DNA, 25 bp, Artificial
  Probe
atctggaggggagggtctgagacgc

SEQ ID NO: 320946 - DNA, 25 bp, Artificial
  Probe
cagtggtcattgtgcccatcccttg

SEQ ID NO: 320947 - DNA, 25 bp, Artificial
  Probe
cccagtggtcattgtgcccatccct

SEQ ID NO: 320948 - DNA, 25 bp, Artificial
  Probe
ctacaatctggaggggagggtctga

SEQ ID NO: 320949 - DNA, 25 bp, Artificial
  Probe
tccacagcatcaagcagacagctgc

SEQ ID NO: 320950 - DNA, 25 bp, Artificial
  Probe
caatcctggagaggacgacctgtca

SEQ ID NO: 320951 - DNA, 25 bp, Artificial
  Probe
gctcctcatcaattttgtgtttctg

SEQ ID NO: 320952 - DNA, 25 bp, Artificial
  Probe
aattttgtgtttctgttcaacatcg

SEQ ID NO: 320953 - DNA, 25 bp, Artificial
  Probe
acagctgccgtgtgatcccctgtca

SEQ ID NO: 320954 - DNA, 25 bp, Artificial
  Probe
cggtggcaccgttggcaggaccacc

SEQ ID NO: 320955 - DNA, 25 bp, Artificial
  Probe
tctcctgccggaagaaaggaaaact

SEQ ID NO: 320956 - DNA, 25 bp, Artificial
  Probe
ctttcctgcagtcctttcagggttt

SEQ ID NO: 320957 - DNA, 25 bp, Artificial
  Probe
tcctgccggaagaaaggaaaactat

SEQ ID NO: 320958 - DNA, 25 bp, Artificial
  Probe
cttcaatggagaggtgcgctccgcc

SEQ ID NO: 320959 - DNA, 25 bp, Artificial
  Probe
cacagcatcaagcagacagctgccg

SEQ ID NO: 320960 - DNA, 25 bp, Artificial
  Probe
cgttttctactgcttcttcaatgga

SEQ ID NO: 320961 - DNA, 25 bp, Artificial
  Probe
atcgtcaggatcctgatgacaaaac

SEQ ID NO: 320962 - DNA, 25 bp, Artificial
  Probe
tgcagtcctttcagggtttctttgt

SEQ ID NO: 320963 - DNA, 25 bp, Artificial
  Probe
tctgttcaacatcgtcaggatcctg

SEQ ID NO: 320964 - DNA, 25 bp, Artificial
  Probe
gcttcttcaatggagaggtgcgctc

SEQ ID NO: 320965 - DNA, 25 bp, Artificial
  Probe
gtttctgttcaacatcgtcaggatc

SEQ ID NO: 320966 - DNA, 25 bp, Artificial
  Probe
tcctggagaggacgacctgtcacag

SEQ ID NO: 320967 - DNA, 25 bp, Artificial
  Probe
caagcagacagctgccgtgtgatcc

SEQ ID NO: 320968 - DNA, 25 bp, Artificial
  Probe
accgaggcggcttcctcattcttca

SEQ ID NO: 320969 - DNA, 25 bp, Artificial
  Probe
cctgatgacaaaactgcgagcctcc

SEQ ID NO: 320970 - DNA, 25 bp, Artificial
  Probe
ccgccctgagaaagcggtggcaccg

SEQ ID NO: 320971 - DNA, 25 bp, Artificial
  Probe
tcaggatcctgatgacaaaactgcg

SEQ ID NO: 320972 - DNA, 25 bp, Artificial
  Probe
caacatcgtcaggatcctgatgaca

SEQ ID NO: 320973 - DNA, 25 bp, Artificial
  Probe
gtcacagattgtgttcatctacttc

SEQ ID NO: 320974 - DNA, 25 bp, Artificial
  Probe
ctccttgctacactgacccttgggt

SEQ ID NO: 320975 - DNA, 25 bp, Artificial
  Probe
tttgtgtttctgttcaacatcgtca

SEQ ID NO: 320976 - DNA, 25 bp, Artificial
  Probe
cttgctacactgacccttgggtgca

SEQ ID NO: 320977 - DNA, 25 bp, Artificial
  Probe
catcaagcagacagctgccgtgtga

SEQ ID NO: 320978 - DNA, 25 bp, Artificial
  Probe
tccgagtgcctgtggcccgggccat

SEQ ID NO: 320979 - DNA, 25 bp, Artificial
  Probe
aggcggcttcctcattcttcacagc

SEQ ID NO: 320980 - DNA, 25 bp, Artificial
  Probe
gagaggacgacctgtcacagattgt

SEQ ID NO: 320981 - DNA, 25 bp, Artificial
  Probe
gtggatgaactctcctgccggaaga

SEQ ID NO: 320982 - DNA, 25 bp, Artificial
  Probe
gtgtccgttttctactgcttcttca

SEQ ID NO: 320983 - DNA, 25 bp, Artificial
  Probe
cgaggcggcttcctcattcttcaca

SEQ ID NO: 320984 - DNA, 25 bp, Artificial
  Probe
gtacaggaaggcagtgaaggccacc

SEQ ID NO: 320985 - DNA, 25 bp, Artificial
  Probe
gttttctactgcttcttcaatggag

SEQ ID NO: 320986 - DNA, 25 bp, Artificial
  Probe
gttcaacatcgtcaggatcctgatg

SEQ ID NO: 320987 - DNA, 25 bp, Artificial
  Probe
tcctttcagggtttctttgtgtccg

SEQ ID NO: 320988 - DNA, 25 bp, Artificial
  Probe
ggatcctgatgacaaaactgcgagc

SEQ ID NO: 320989 - DNA, 25 bp, Artificial
  Probe
atccgagaccatccagtacaggaag

SEQ ID NO: 320990 - DNA, 25 bp, Artificial
  Probe
cttccacagcatcaagcagacagct

SEQ ID NO: 320991 - DNA, 25 bp, Artificial
  Probe
agacagctgccgtgtgatcccctgt

SEQ ID NO: 320992 - DNA, 25 bp, Artificial
  Probe
tccgccctgagaaagcggtggcacc

SEQ ID NO: 320993 - DNA, 25 bp, Artificial
  Probe
tgtcaatcctggagaggacgacctg

SEQ ID NO: 320994 - DNA, 25 bp, Artificial
  Probe
atccagtacaggaaggcagtgaagg

SEQ ID NO: 320995 - DNA, 25 bp, Artificial
  Probe
tcctacactgcagtgtttggaataa

SEQ ID NO: 320996 - DNA, 25 bp, Artificial
  Probe
cccttatttgtgacccttcagtgat

SEQ ID NO: 320997 - DNA, 25 bp, Artificial
  Probe
aaatgatcatctgaccccagactgt

SEQ ID NO: 320998 - DNA, 25 bp, Artificial
  Probe
tcacccatcctgagagcaagggggc

SEQ ID NO: 320999 - DNA, 25 bp, Artificial
  Probe
atggccctcacatcactgtgcagct

SEQ ID NO: 321000 - DNA, 25 bp, Artificial
  Probe
actatgagccagagggacttggtcg

SEQ ID NO: 321001 - DNA, 25 bp, Artificial
  Probe
ttttaacgtcacctgattggcggga

SEQ ID NO: 321002 - DNA, 25 bp, Artificial
  Probe
tcatcaggactcaaaactgtgagac

SEQ ID NO: 321003 - DNA, 25 bp, Artificial
  Probe
tcaaaggagggtctgggagcccaca

SEQ ID NO: 321004 - DNA, 25 bp, Artificial
  Probe
tctcacccatcctgagagcaagggg

SEQ ID NO: 321005 - DNA, 25 bp, Artificial
  Probe
agactgtgacccttcatgtcagacc

SEQ ID NO: 321006 - DNA, 25 bp, Artificial
  Probe
ttagatccttgttggctctgaccta

SEQ ID NO: 321007 - DNA, 25 bp, Artificial
  Probe
ccaggtctcctttcccagatttcag

SEQ ID NO: 321008 - DNA, 25 bp, Artificial
  Probe
gaccagactgtgacccttcatgtca

SEQ ID NO: 321009 - DNA, 25 bp, Artificial
  Probe
ccttcttttagatccttgttggctc

SEQ ID NO: 321010 - DNA, 25 bp, Artificial
  Probe
gtctgggagcccacacttgaccttt

SEQ ID NO: 321011 - DNA, 25 bp, Artificial
  Probe
ttcttggagcccaccgactcttttt

SEQ ID NO: 321012 - DNA, 25 bp, Artificial
  Probe
cactcctacactgcagtgtttggaa

SEQ ID NO: 321013 - DNA, 25 bp, Artificial
  Probe
ccgaccagactgtgacccttcatgt

SEQ ID NO: 321014 - DNA, 25 bp, Artificial
  Probe
tcattcatcaggactcaaaactgtg

SEQ ID NO: 321015 - DNA, 25 bp, Artificial
  Probe
ccagatttcagcagggtctgaggct

SEQ ID NO: 321016 - DNA, 25 bp, Artificial
  Probe
aatgatcatctgaccccagactgtg

SEQ ID NO: 321017 - DNA, 25 bp, Artificial
  Probe
acccttcatgtcagacctcgatgac

SEQ ID NO: 321018 - DNA, 25 bp, Artificial
  Probe
gtctcctttcccagatttcagcagg

SEQ ID NO: 321019 - DNA, 25 bp, Artificial
  Probe
agggctttttaacgtcacctgattg

SEQ ID NO: 321020 - DNA, 25 bp, Artificial
  Probe
atccttgttggctctgacctatgac

SEQ ID NO: 321021 - DNA, 25 bp, Artificial
  Probe
cccttcttttagatccttgttggct

SEQ ID NO: 321022 - DNA, 25 bp, Artificial
  Probe
gaccccttcttttagatccttgttg

SEQ ID NO: 321023 - DNA, 25 bp, Artificial
  Probe
gtgatgatccagcagacactccacc

SEQ ID NO: 321024 - DNA, 25 bp, Artificial
  Probe
gatgaccccttcttttagatccttg

SEQ ID NO: 321025 - DNA, 25 bp, Artificial
  Probe
cgccttgggggaactatgagccaga

SEQ ID NO: 321026 - DNA, 25 bp, Artificial
  Probe
aaactgtgactccagaccttggccc

SEQ ID NO: 321027 - DNA, 25 bp, Artificial
  Probe
tcttttagatccttgttggctctga

SEQ ID NO: 321028 - DNA, 25 bp, Artificial
  Probe
tgagccagagggacttggtcgccca

SEQ ID NO: 321029 - DNA, 25 bp, Artificial
  Probe
tcatgtcagacctcgatgacccctt

SEQ ID NO: 321030 - DNA, 25 bp, Artificial
  Probe
agagggacttggtcgcccaaatctc

SEQ ID NO: 321031 - DNA, 25 bp, Artificial
  Probe
tatttgtgacccttcagtgatgatc

SEQ ID NO: 321032 - DNA, 25 bp, Artificial
  Probe
gccaaactgtgactccagaccttgg

SEQ ID NO: 321033 - DNA, 25 bp, Artificial
  Probe
cagacacacctctcggggagcctgt

SEQ ID NO: 321034 - DNA, 25 bp, Artificial
  Probe
ttggctctgacctatgacctctcct

SEQ ID NO: 321035 - DNA, 25 bp, Artificial
  Probe
caagtccagcccttatttgtgaccc

SEQ ID NO: 321036 - DNA, 25 bp, Artificial
  Probe
gtatgccaaactgtgactccagacc

SEQ ID NO: 321037 - DNA, 25 bp, Artificial
  Probe
gggagcccacacttgacctttcctt

SEQ ID NO: 321038 - DNA, 25 bp, Artificial
  Probe
ctcaaaggagggtctgggagcccac

SEQ ID NO: 321039 - DNA, 25 bp, Artificial
  Probe
ttcatgtcagacctcgatgacccct

SEQ ID NO: 321040 - DNA, 25 bp, Artificial
  Probe
gaactatgagccagagggacttggt

SEQ ID NO: 321041 - DNA, 25 bp, Artificial
  Probe
aagtgttttgtgcacccatattttg

SEQ ID NO: 321042 - DNA, 25 bp, Artificial
  Probe
tgtgtctttataatgtccttctgaa

SEQ ID NO: 321043 - DNA, 25 bp, Artificial
  Probe
ggtgtgtcattttgtctcagtcagg

SEQ ID NO: 321044 - DNA, 25 bp, Artificial
  Probe
ttttgtgcacccatattttgagagt

SEQ ID NO: 321045 - DNA, 25 bp, Artificial
  Probe
gtgtctttataatgtccttctgaaa

SEQ ID NO: 321046 - DNA, 25 bp, Artificial
  Probe
gtctcagtcaggacagtcagctctg

SEQ ID NO: 321047 - DNA, 25 bp, Artificial
  Probe
atcacactgtaaacttaggagaaaa

SEQ ID NO: 321048 - DNA, 25 bp, Artificial
  Probe
tcagtcaggacagtcagctctgtgt

SEQ ID NO: 321049 - DNA, 25 bp, Artificial
  Probe
tctcagtcaggacagtcagctctgt

SEQ ID NO: 321050 - DNA, 25 bp, Artificial
  Probe
tgtctttataatgtccttctgaaag

SEQ ID NO: 321051 - DNA, 25 bp, Artificial
  Probe
ttgtgcacccatattttgagagttt

SEQ ID NO: 321052 - DNA, 25 bp, Artificial
  Probe
gtcattttgtctcagtcaggacagt

SEQ ID NO: 321053 - DNA, 25 bp, Artificial
  Probe
tcagctctgtgtctttataatgtcc

SEQ ID NO: 321054 - DNA, 25 bp, Artificial
  Probe
cttctgaaagccttacgtgtataca

SEQ ID NO: 321055 - DNA, 25 bp, Artificial
  Probe
aatgtccttctgaaagccttacgtg

SEQ ID NO: 321056 - DNA, 25 bp, Artificial
  Probe
agtgttttgtgcacccatattttga

SEQ ID NO: 321057 - DNA, 25 bp, Artificial
  Probe
tcctctgcaaaaattgaattttgtg

SEQ ID NO: 321058 - DNA, 25 bp, Artificial
  Probe
gtgtcattttgtctcagtcaggaca

SEQ ID NO: 321059 - DNA, 25 bp, Artificial
  Probe
ttctgaaagccttacgtgtatacat

SEQ ID NO: 321060 - DNA, 25 bp, Artificial
  Probe
tgtgcacccatattttgagagttta

SEQ ID NO: 321061 - DNA, 25 bp, Artificial
  Probe
attttgtctcagtcaggacagtcag

SEQ ID NO: 321062 - DNA, 25 bp, Artificial
  Probe
acccatattttgagagtttacatgg

SEQ ID NO: 321063 - DNA, 25 bp, Artificial
  Probe
tcattttgtctcagtcaggacagtc

SEQ ID NO: 321064 - DNA, 25 bp, Artificial
  Probe
tgtgtcattttgtctcagtcaggac

SEQ ID NO: 321065 - DNA, 25 bp, Artificial
  Probe
gcacccatattttgagagtttacat

SEQ ID NO: 321066 - DNA, 25 bp, Artificial
  Probe
cagtcagctctgtgtctttataatg

SEQ ID NO: 321067 - DNA, 25 bp, Artificial
  Probe
cagctctgtgtctttataatgtcct

SEQ ID NO: 321068 - DNA, 25 bp, Artificial
  Probe
atatcacactgtaaacttaggagaa

SEQ ID NO: 321069 - DNA, 25 bp, Artificial
  Probe
taatgtccttctgaaagccttacgt

SEQ ID NO: 321070 - DNA, 25 bp, Artificial
  Probe
ttttgtctcagtcaggacagtcagc

SEQ ID NO: 321071 - DNA, 25 bp, Artificial
  Probe
tgtccttctgaaagccttacgtgta

SEQ ID NO: 321072 - DNA, 25 bp, Artificial
  Probe
acatatcacactgtaaacttaggag

SEQ ID NO: 321073 - DNA, 25 bp, Artificial
  Probe
tcaggacagtcagctctgtgtcttt

SEQ ID NO: 321074 - DNA, 25 bp, Artificial
  Probe
gacagtcagctctgtgtctttataa

SEQ ID NO: 321075 - DNA, 25 bp, Artificial
  Probe
tgcacccatattttgagagtttaca

SEQ ID NO: 321076 - DNA, 25 bp, Artificial
  Probe
cagtcaggacagtcagctctgtgtc

SEQ ID NO: 321077 - DNA, 25 bp, Artificial
  Probe
gaaagccttacgtgtatacatatca

SEQ ID NO: 321078 - DNA, 25 bp, Artificial
  Probe
tgaaagccttacgtgtatacatatc

SEQ ID NO: 321079 - DNA, 25 bp, Artificial
  Probe
gctctgtgtctttataatgtccttc

SEQ ID NO: 321080 - DNA, 25 bp, Artificial
  Probe
caggacagtcagctctgtgtcttta

SEQ ID NO: 321081 - DNA, 25 bp, Artificial
  Probe
tggtgtgtcattttgtctcagtcag

SEQ ID NO: 321082 - DNA, 25 bp, Artificial
  Probe
tttgtctcagtcaggacagtcagct

SEQ ID NO: 321083 - DNA, 25 bp, Artificial
  Probe
ggacagtcagctctgtgtctttata

SEQ ID NO: 321084 - DNA, 25 bp, Artificial
  Probe
tatcacactgtaaacttaggagaaa

SEQ ID NO: 321085 - DNA, 25 bp, Artificial
  Probe
gtcaggacagtcagctctgtgtctt

SEQ ID NO: 321086 - DNA, 25 bp, Artificial
  Probe
ataatgtccttctgaaagccttacg

SEQ ID NO: 321087 - DNA, 25 bp, Artificial
  Probe
actttcacagcgtggcgctcaaaca

SEQ ID NO: 321088 - DNA, 25 bp, Artificial
  Probe
ggactcgacaacagagcgtatgaga

SEQ ID NO: 321089 - DNA, 25 bp, Artificial
  Probe
agtacttacatcctcccagccaagg

SEQ ID NO: 321090 - DNA, 25 bp, Artificial
  Probe
gactaaccacgcttgagacctaaac

SEQ ID NO: 321091 - DNA, 25 bp, Artificial
  Probe
ccgataacggacttcaaactctatg

SEQ ID NO: 321092 - DNA, 25 bp, Artificial
  Probe
gctacggctgacgaaaaaatccatt

SEQ ID NO: 321093 - DNA, 25 bp, Artificial
  Probe
ggtacctgagtacttacatcctccc

SEQ ID NO: 321094 - DNA, 25 bp, Artificial
  Probe
acagcgtggcgctcaaacagcacct

SEQ ID NO: 321095 - DNA, 25 bp, Artificial
  Probe
gaaaggccaattacagcttacagat

SEQ ID NO: 321096 - DNA, 25 bp, Artificial
  Probe
agatgaccaagctggcacacagagt

SEQ ID NO: 321097 - DNA, 25 bp, Artificial
  Probe
gagtacttacatcctcccagccaag

SEQ ID NO: 321098 - DNA, 25 bp, Artificial
  Probe
gaccagatggaagctgtgagaacca

SEQ ID NO: 321099 - DNA, 25 bp, Artificial
  Probe
gatatacccagatgaaagtcactac

SEQ ID NO: 321100 - DNA, 25 bp, Artificial
  Probe
gatgaaagtcactactttcacagcg

SEQ ID NO: 321101 - DNA, 25 bp, Artificial
  Probe
ttatggtgggtacctgagtacttac

SEQ ID NO: 321102 - DNA, 25 bp, Artificial
  Probe
acaagactcgggtagctgtgtttgg

SEQ ID NO: 321103 - DNA, 25 bp, Artificial
  Probe
aaccatgctgaaggagcagtacatt

SEQ ID NO: 321104 - DNA, 25 bp, Artificial
  Probe
gtgagaaccatgctgaaggagcagt

SEQ ID NO: 321105 - DNA, 25 bp, Artificial
  Probe
aaaccaaggccagactttcacctgc

SEQ ID NO: 321106 - DNA, 25 bp, Artificial
  Probe
atcatccatgctacggctgacgaaa

SEQ ID NO: 321107 - DNA, 25 bp, Artificial
  Probe
ttctttgtggaatgtttcaggatcc

SEQ ID NO: 321108 - DNA, 25 bp, Artificial
  Probe
ggacttcaaactctatgcctcagca

SEQ ID NO: 321109 - DNA, 25 bp, Artificial
  Probe
cgagaggtaccttggcctccatgga

SEQ ID NO: 321110 - DNA, 25 bp, Artificial
  Probe
acaacagagcgtatgagatgaccaa

SEQ ID NO: 321111 - DNA, 25 bp, Artificial
  Probe
caacagagcgtatgagatgaccaag

SEQ ID NO: 321112 - DNA, 25 bp, Artificial
  Probe
tcctcccagccaagggagaaaacca

SEQ ID NO: 321113 - DNA, 25 bp, Artificial
  Probe
ctttgtggaatgtttcaggatccag

SEQ ID NO: 321114 - DNA, 25 bp, Artificial
  Probe
cattgacaagactcgggtagctgtg

SEQ ID NO: 321115 - DNA, 25 bp, Artificial
  Probe
catcggattctttgtggaatgtttc

SEQ ID NO: 321116 - DNA, 25 bp, Artificial
  Probe
tggaatgtttcaggatccaggacaa

SEQ ID NO: 321117 - DNA, 25 bp, Artificial
  Probe
aggaggactaaccacgcttgagacc

SEQ ID NO: 321118 - DNA, 25 bp, Artificial
  Probe
gcactctctccgataacggacttca

SEQ ID NO: 321119 - DNA, 25 bp, Artificial
  Probe
tacagcttacagatatacccagatg

SEQ ID NO: 321120 - DNA, 25 bp, Artificial
  Probe
gtatgagatgaccaagctggcacac

SEQ ID NO: 321121 - DNA, 25 bp, Artificial
  Probe
ggtaccttggcctccatggactcga

SEQ ID NO: 321122 - DNA, 25 bp, Artificial
  Probe
gctctgcactctctccgataacgga

SEQ ID NO: 321123 - DNA, 25 bp, Artificial
  Probe
cagccacagcgaaagaggacgagga

SEQ ID NO: 321124 - DNA, 25 bp, Artificial
  Probe
actctatgcctcagcattttccgag

SEQ ID NO: 321125 - DNA, 25 bp, Artificial
  Probe
tgcggctctgcactctctccgataa

SEQ ID NO: 321126 - DNA, 25 bp, Artificial
  Probe
cagtacattgacaagactcgggtag

SEQ ID NO: 321127 - DNA, 25 bp, Artificial
  Probe
aatccatttccagcacacagcagag

SEQ ID NO: 321128 - DNA, 25 bp, Artificial
  Probe
acgcagctaatcaagggaaaggcca

SEQ ID NO: 321129 - DNA, 25 bp, Artificial
  Probe
ccatgctacggctgacgaaaaaatc

SEQ ID NO: 321130 - DNA, 25 bp, Artificial
  Probe
ggccaattacagcttacagatatac

SEQ ID NO: 321131 - DNA, 25 bp, Artificial
  Probe
ggaggactaaccacgcttgagacct

SEQ ID NO: 321132 - DNA, 25 bp, Artificial
  Probe
ggccagactttcacctgcggctctg

SEQ ID NO: 321133 - DNA, 25 bp, Artificial
  Probe
aaaccgtgaggtaattcacaagatg

SEQ ID NO: 321134 - DNA, 25 bp, Artificial
  Probe
acttccatagtgacctgtcagatgg

SEQ ID NO: 321135 - DNA, 25 bp, Artificial
  Probe
tcgagtaaaccgtgaggtaattcac

SEQ ID NO: 321136 - DNA, 25 bp, Artificial
  Probe
gcctttaaagtcatcaagcttgttt

SEQ ID NO: 321137 - DNA, 25 bp, Artificial
  Probe
cttctgagtagtcgagtaaaccgtg

SEQ ID NO: 321138 - DNA, 25 bp, Artificial
  Probe
catgtttccagagcaagtcatgact

SEQ ID NO: 321139 - DNA, 25 bp, Artificial
  Probe
tgttgaggggtagttacgtgccctt

SEQ ID NO: 321140 - DNA, 25 bp, Artificial
  Probe
tactctgttctccacttctgagtag

SEQ ID NO: 321141 - DNA, 25 bp, Artificial
  Probe
tcatgactattagcaggaaacgaga

SEQ ID NO: 321142 - DNA, 25 bp, Artificial
  Probe
tccagagcaagtcatgactattagc

SEQ ID NO: 321143 - DNA, 25 bp, Artificial
  Probe
tctgttctccacttctgagtagtcg

SEQ ID NO: 321144 - DNA, 25 bp, Artificial
  Probe
tgacctgtcagatggattgaatacc

SEQ ID NO: 321145 - DNA, 25 bp, Artificial
  Probe
tttcaaagactggtattagcaacat

SEQ ID NO: 321146 - DNA, 25 bp, Artificial
  Probe
cacttctgagtagtcgagtaaaccg

SEQ ID NO: 321147 - DNA, 25 bp, Artificial
  Probe
agatcataagcctagcataattgca

SEQ ID NO: 321148 - DNA, 25 bp, Artificial
  Probe
attagcaacattgagctaaaagttc

SEQ ID NO: 321149 - DNA, 25 bp, Artificial
  Probe
ggctttattctaccaaagtcagtct

SEQ ID NO: 321150 - DNA, 25 bp, Artificial
  Probe
tctgccagtgttgctttctttcaaa

SEQ ID NO: 321151 - DNA, 25 bp, Artificial
  Probe
aagtcagtctaaacacttctgccag

SEQ ID NO: 321152 - DNA, 25 bp, Artificial
  Probe
tacgtgccctttgagatcataagcc

SEQ ID NO: 321153 - DNA, 25 bp, Artificial
  Probe
aaacttccatagtgacctgtcagat

SEQ ID NO: 321154 - DNA, 25 bp, Artificial
  Probe
aattgctaggcctttaaagtcatca

SEQ ID NO: 321155 - DNA, 25 bp, Artificial
  Probe
cataattgcagcatgtttccagagc

SEQ ID NO: 321156 - DNA, 25 bp, Artificial
  Probe
tctaaacacttctgccagtgttgct

SEQ ID NO: 321157 - DNA, 25 bp, Artificial
  Probe
gagattagttactactctgttctcc

SEQ ID NO: 321158 - DNA, 25 bp, Artificial
  Probe
cttgtttcctctgatgttgaggggt

SEQ ID NO: 321159 - DNA, 25 bp, Artificial
  Probe
agtgttgctttctttcaaagactgg

SEQ ID NO: 321160 - DNA, 25 bp, Artificial
  Probe
agcatgtttccagagcaagtcatga

SEQ ID NO: 321161 - DNA, 25 bp, Artificial
  Probe
tttgaaaatgcagactccttaactg

SEQ ID NO: 321162 - DNA, 25 bp, Artificial
  Probe
cctctgatgttgaggggtagttacg

SEQ ID NO: 321163 - DNA, 25 bp, Artificial
  Probe
agcaagtcatgactattagcaggaa

SEQ ID NO: 321164 - DNA, 25 bp, Artificial
  Probe
aacacttctgccagtgttgctttct

SEQ ID NO: 321165 - DNA, 25 bp, Artificial
  Probe
ccatagtgacctgtcagatggattg

SEQ ID NO: 321166 - DNA, 25 bp, Artificial
  Probe
aatggctttattctaccaaagtcag

SEQ ID NO: 321167 - DNA, 25 bp, Artificial
  Probe
agttacgtgccctttgagatcataa

SEQ ID NO: 321168 - DNA, 25 bp, Artificial
  Probe
aaagtcatcaagcttgtttcctctg

SEQ ID NO: 321169 - DNA, 25 bp, Artificial
  Probe
ttagcaacattgagctaaaagttct

SEQ ID NO: 321170 - DNA, 25 bp, Artificial
  Probe
ccattgttatatcttatctgttagg

SEQ ID NO: 321171 - DNA, 25 bp, Artificial
  Probe
tttctttcaaagactggtattagca

SEQ ID NO: 321172 - DNA, 25 bp, Artificial
  Probe
cgagattagttactactctgttctc

SEQ ID NO: 321173 - DNA, 25 bp, Artificial
  Probe
ggggtagttacgtgccctttgagat

SEQ ID NO: 321174 - DNA, 25 bp, Artificial
  Probe
tcctctgatgttgaggggtagttac

SEQ ID NO: 321175 - DNA, 25 bp, Artificial
  Probe
tgctttctttcaaagactggtatta

SEQ ID NO: 321176 - DNA, 25 bp, Artificial
  Probe
catagtgacctgtcagatggattga

SEQ ID NO: 321177 - DNA, 25 bp, Artificial
  Probe
tgaaaatgcagactccttaactgca

SEQ ID NO: 321178 - DNA, 25 bp, Artificial
  Probe
ctttgagatcataagcctagcataa

SEQ ID NO: 321179 - DNA, 25 bp, Artificial
  Probe
aactttacagaggatcaaagctgtt

SEQ ID NO: 321180 - DNA, 25 bp, Artificial
  Probe
tttctaactttacagaggatcaaag

SEQ ID NO: 321181 - DNA, 25 bp, Artificial
  Probe
ctaactttacagaggatcaaagctg

SEQ ID NO: 321182 - DNA, 25 bp, Artificial
  Probe
agacgctgctagcttgacaggagct

SEQ ID NO: 321183 - DNA, 25 bp, Artificial
  Probe
tttgtcttttctaactttacagagg

SEQ ID NO: 321184 - DNA, 25 bp, Artificial
  Probe
gagacgctgctagcttgacaggagc

SEQ ID NO: 321185 - DNA, 25 bp, Artificial
  Probe
tgtcttttctaactttacagaggat

SEQ ID NO: 321186 - DNA, 25 bp, Artificial
  Probe
ccttttgtcatggagggcacctttt

SEQ ID NO: 321187 - DNA, 25 bp, Artificial
  Probe
gagcaccttttgtcatggagggcac

SEQ ID NO: 321188 - DNA, 25 bp, Artificial
  Probe
gtcttttctaactttacagaggatc

SEQ ID NO: 321189 - DNA, 25 bp, Artificial
  Probe
aacttagtccagaatagttcctttg

SEQ ID NO: 321190 - DNA, 25 bp, Artificial
  Probe
gctgctagcttgacaggagcttgga

SEQ ID NO: 321191 - DNA, 25 bp, Artificial
  Probe
ttgtcttttctaactttacagagga

SEQ ID NO: 321192 - DNA, 25 bp, Artificial
  Probe
cttagtccagaatagttcctttgtc

SEQ ID NO: 321193 - DNA, 25 bp, Artificial
  Probe
ggtccgcacctgtcctaccgggtgg

SEQ ID NO: 321194 - DNA, 25 bp, Artificial
  Probe
cttttgtcatggagggcaccttttg

SEQ ID NO: 321195 - DNA, 25 bp, Artificial
  Probe
gggtccgcacctgtcctaccgggtg

SEQ ID NO: 321196 - DNA, 25 bp, Artificial
  Probe
tggagacgctgctagcttgacagga

SEQ ID NO: 321197 - DNA, 25 bp, Artificial
  Probe
tccagggctgtgcactttccacctt

SEQ ID NO: 321198 - DNA, 25 bp, Artificial
  Probe
gcaccttttgtcatggagggcacct

SEQ ID NO: 321199 - DNA, 25 bp, Artificial
  Probe
agtccagaatagttcctttgtcttt

SEQ ID NO: 321200 - DNA, 25 bp, Artificial
  Probe
ggctccagggctgtgcactttccac

SEQ ID NO: 321201 - DNA, 25 bp, Artificial
  Probe
ttgggagcaccttttgtcatggagg

SEQ ID NO: 321202 - DNA, 25 bp, Artificial
  Probe
agttgggagcaccttttgtcatgga

SEQ ID NO: 321203 - DNA, 25 bp, Artificial
  Probe
tgttcttttctatttcatggccagg

SEQ ID NO: 321204 - DNA, 25 bp, Artificial
  Probe
gcttgacaggagcttggagctctgc

SEQ ID NO: 321205 - DNA, 25 bp, Artificial
  Probe
ccctcctattgtgttgcaccttctg

SEQ ID NO: 321206 - DNA, 25 bp, Artificial
  Probe
ctgctagcttgacaggagcttggag

SEQ ID NO: 321207 - DNA, 25 bp, Artificial
  Probe
gagttgggagcaccttttgtcatgg

SEQ ID NO: 321208 - DNA, 25 bp, Artificial
  Probe
aggatcaaagctgttcttttctatt

SEQ ID NO: 321209 - DNA, 25 bp, Artificial
  Probe
ttctaactttacagaggatcaaagc

SEQ ID NO: 321210 - DNA, 25 bp, Artificial
  Probe
ctagcttgacaggagcttggagctc

SEQ ID NO: 321211 - DNA, 25 bp, Artificial
  Probe
tcccaagtgttttaacttagtccag

SEQ ID NO: 321212 - DNA, 25 bp, Artificial
  Probe
gtccgcacctgtcctaccgggtgga

SEQ ID NO: 321213 - DNA, 25 bp, Artificial
  Probe
gtactctcccgcaaagaggctttcc

SEQ ID NO: 321214 - DNA, 25 bp, Artificial
  Probe
ggatcaaagctgttcttttctattt

SEQ ID NO: 321215 - DNA, 25 bp, Artificial
  Probe
ttgacaggagcttggagctctgctg

SEQ ID NO: 321216 - DNA, 25 bp, Artificial
  Probe
aatgcgggctccagggctgtgcact

SEQ ID NO: 321217 - DNA, 25 bp, Artificial
  Probe
gttgggagcaccttttgtcatggag

SEQ ID NO: 321218 - DNA, 25 bp, Artificial
  Probe
gggctccagggctgtgcactttcca

SEQ ID NO: 321219 - DNA, 25 bp, Artificial
  Probe
ggagttgggagcaccttttgtcatg

SEQ ID NO: 321220 - DNA, 25 bp, Artificial
  Probe
tagcttgacaggagcttggagctct

SEQ ID NO: 321221 - DNA, 25 bp, Artificial
  Probe
ttagtccagaatagttcctttgtct

SEQ ID NO: 321222 - DNA, 25 bp, Artificial
  Probe
tgctagcttgacaggagcttggagc

SEQ ID NO: 321223 - DNA, 25 bp, Artificial
  Probe
gtccagaatagttcctttgtctttt

SEQ ID NO: 321224 - DNA, 25 bp, Artificial
  Probe
tactctcccgcaaagaggctttcct

SEQ ID NO: 321225 - DNA, 25 bp, Artificial
  Probe
agcctctggtgtctgcaaaatacag

SEQ ID NO: 321226 - DNA, 25 bp, Artificial
  Probe
atccacatggacgacacggggctca

SEQ ID NO: 321227 - DNA, 25 bp, Artificial
  Probe
tcgtcaagctcaagtccgacacgcg

SEQ ID NO: 321228 - DNA, 25 bp, Artificial
  Probe
ctgcgtatcctgtcgcagcgcagca

SEQ ID NO: 321229 - DNA, 25 bp, Artificial
  Probe
tgggtcgcagcctctggtgtctgca

SEQ ID NO: 321230 - DNA, 25 bp, Artificial
  Probe
gccgcatccacatggacgacacggg

SEQ ID NO: 321231 - DNA, 25 bp, Artificial
  Probe
agcgcagcaatgacgaggtggccaa

SEQ ID NO: 321232 - DNA, 25 bp, Artificial
  Probe
ggggctcacagtgctgcgtatcctg

SEQ ID NO: 321233 - DNA, 25 bp, Artificial
  Probe
tgcccctggaaaagccatagagggt

SEQ ID NO: 321234 - DNA, 25 bp, Artificial
  Probe
ctggtgtctgcaaaatacagggcgg

SEQ ID NO: 321235 - DNA, 25 bp, Artificial
  Probe
cctctggtgtctgcaaaatacaggg

SEQ ID NO: 321236 - DNA, 25 bp, Artificial
  Probe
acggggctcacagtgctgcgtatcc

SEQ ID NO: 321237 - DNA, 25 bp, Artificial
  Probe
gttcgtcaagctcaagtccgacacg

SEQ ID NO: 321238 - DNA, 25 bp, Artificial
  Probe
acagtgctgcgtatcctgtcgcagc

SEQ ID NO: 321239 - DNA, 25 bp, Artificial
  Probe
tctggtgtctgcaaaatacagggcg

SEQ ID NO: 321240 - DNA, 25 bp, Artificial
  Probe
gtggccaaggagttcgtcaagctca

SEQ ID NO: 321241 - DNA, 25 bp, Artificial
  Probe
cacggggctcacagtgctgcgtatc

SEQ ID NO: 321242 - DNA, 25 bp, Artificial
  Probe
cgcatccacatggacgacacggggc

SEQ ID NO: 321243 - DNA, 25 bp, Artificial
  Probe
aggtggccaaggagttcgtcaagct

SEQ ID NO: 321244 - DNA, 25 bp, Artificial
  Probe
tccacatggacgacacggggctcac

SEQ ID NO: 321245 - DNA, 25 bp, Artificial
  Probe
ggctcacagtgctgcgtatcctgtc

SEQ ID NO: 321246 - DNA, 25 bp, Artificial
  Probe
gtcgcagcctctggtgtctgcaaaa

SEQ ID NO: 321247 - DNA, 25 bp, Artificial
  Probe
tggccaaggagttcgtcaagctcaa

SEQ ID NO: 321248 - DNA, 25 bp, Artificial
  Probe
ctgcccctggaaaagccatagaggg

SEQ ID NO: 321249 - DNA, 25 bp, Artificial
  Probe
ggatggactctcaaaagcacaccgg

SEQ ID NO: 321250 - DNA, 25 bp, Artificial
  Probe
ggtggccaaggagttcgtcaagctc

SEQ ID NO: 321251 - DNA, 25 bp, Artificial
  Probe
tcgcagcctctggtgtctgcaaaat

SEQ ID NO: 321252 - DNA, 25 bp, Artificial
  Probe
gggtcgcagcctctggtgtctgcaa

SEQ ID NO: 321253 - DNA, 25 bp, Artificial
  Probe
ccgcatccacatggacgacacgggg

SEQ ID NO: 321254 - DNA, 25 bp, Artificial
  Probe
cggggctcacagtgctgcgtatcct

SEQ ID NO: 321255 - DNA, 25 bp, Artificial
  Probe
ccacatggacgacacggggctcaca

SEQ ID NO: 321256 - DNA, 25 bp, Artificial
  Probe
gcatccacatggacgacacggggct

SEQ ID NO: 321257 - DNA, 25 bp, Artificial
  Probe
gcagcctctggtgtctgcaaaatac

SEQ ID NO: 321258 - DNA, 25 bp, Artificial
  Probe
acgacacggggctcacagtgctgcg

SEQ ID NO: 321259 - DNA, 25 bp, Artificial
  Probe
cacatggacgacacggggctcacag

SEQ ID NO: 321260 - DNA, 25 bp, Artificial
  Probe
gcctctggtgtctgcaaaatacagg

SEQ ID NO: 321261 - DNA, 25 bp, Artificial
  Probe
gatggactctcaaaagcacaccggc

SEQ ID NO: 321262 - DNA, 25 bp, Artificial
  Probe
cgcagcctctggtgtctgcaaaata

SEQ ID NO: 321263 - DNA, 25 bp, Artificial
  Probe
cctggaaaagccatagagggtccgg

SEQ ID NO: 321264 - DNA, 25 bp, Artificial
  Probe
cgacacggggctcacagtgctgcgt

SEQ ID NO: 321265 - DNA, 25 bp, Artificial
  Probe
gtcaagctcaagtccgacacgcgct

SEQ ID NO: 321266 - DNA, 25 bp, Artificial
  Probe
cacagtgctgcgtatcctgtcgcag

SEQ ID NO: 321267 - DNA, 25 bp, Artificial
  Probe
cagcgcagcaatgacgaggtggcca

SEQ ID NO: 321268 - DNA, 25 bp, Artificial
  Probe
atggactctcaaaagcacaccggcc

SEQ ID NO: 321269 - DNA, 25 bp, Artificial
  Probe
gtatcctgtcgcagcgcagcaatga

SEQ ID NO: 321270 - DNA, 25 bp, Artificial
  Probe
ctctggtgtctgcaaaatacagggc

SEQ ID NO: 321271 - DNA, 25 bp, Artificial
  Probe
tccacatggatgagacaggcatgac

SEQ ID NO: 321272 - DNA, 25 bp, Artificial
  Probe
gttcgtgaagctcaagtcagagtct

SEQ ID NO: 321273 - DNA, 25 bp, Artificial
  Probe
tagtcaaaaagctgactctcccagt

SEQ ID NO: 321274 - DNA, 25 bp, Artificial
  Probe
ccgttgggccggaagatccacatgg

SEQ ID NO: 321275 - DNA, 25 bp, Artificial
  Probe
agctgaccatctctgccatctttgc

SEQ ID NO: 321276 - DNA, 25 bp, Artificial
  Probe
gccttgtgtgccatccagacagcac

SEQ ID NO: 321277 - DNA, 25 bp, Artificial
  Probe
tgcccctgagggatgtggcagctaa

SEQ ID NO: 321278 - DNA, 25 bp, Artificial
  Probe
agcaatgatgaggtagcccgagagt

SEQ ID NO: 321279 - DNA, 25 bp, Artificial
  Probe
accattctccggattctgtctcaga

SEQ ID NO: 321280 - DNA, 25 bp, Artificial
  Probe
cctcgtagtcaaaaagctgactctc

SEQ ID NO: 321281 - DNA, 25 bp, Artificial
  Probe
tctgtctcagaggagcaatgatgag

SEQ ID NO: 321282 - DNA, 25 bp, Artificial
  Probe
aaatgaagagggtcccgaggcctat

SEQ ID NO: 321283 - DNA, 25 bp, Artificial
  Probe
cggccttttgtggaagtgaccatgg

SEQ ID NO: 321284 - DNA, 25 bp, Artificial
  Probe
cagcaggtatgttccggccttttgt

SEQ ID NO: 321285 - DNA, 25 bp, Artificial
  Probe
taggactggcagtgatgcccctgag

SEQ ID NO: 321286 - DNA, 25 bp, Artificial
  Probe
ctttgcccgggaggatcgtgtgata

SEQ ID NO: 321287 - DNA, 25 bp, Artificial
  Probe
ccatctctgccatctttgccttgtg

SEQ ID NO: 321288 - DNA, 25 bp, Artificial
  Probe
tttcctcctgggaaatgaagagggt

SEQ ID NO: 321289 - DNA, 25 bp, Artificial
  Probe
aagggagctgaccatctctgccatc

SEQ ID NO: 321290 - DNA, 25 bp, Artificial
  Probe
aggtagcccgagagttcgtgaagct

SEQ ID NO: 321291 - DNA, 25 bp, Artificial
  Probe
ggaagtgaccatggttggcccacac

SEQ ID NO: 321292 - DNA, 25 bp, Artificial
  Probe
cgatccatagaggaagggagctgac

SEQ ID NO: 321293 - DNA, 25 bp, Artificial
  Probe
ttgtgtgccatccagacagcaccca

SEQ ID NO: 321294 - DNA, 25 bp, Artificial
  Probe
agtctaaaagtaacagctggactcc

SEQ ID NO: 321295 - DNA, 25 bp, Artificial
  Probe
gataggactggcagtgatgcccctg

SEQ ID NO: 321296 - DNA, 25 bp, Artificial
  Probe
cagctgtgcctgctggtgcccgttg

SEQ ID NO: 321297 - DNA, 25 bp, Artificial
  Probe
gtcaaaaagctgactctcccagtta

SEQ ID NO: 321298 - DNA, 25 bp, Artificial
  Probe
ctcctgggaaatgaagagggtcccg

SEQ ID NO: 321299 - DNA, 25 bp, Artificial
  Probe
cgaggcctatgaattgcagatatgc

SEQ ID NO: 321300 - DNA, 25 bp, Artificial
  Probe
gaagttcacaaccaagtctaaaagt

SEQ ID NO: 321301 - DNA, 25 bp, Artificial
  Probe
gccatctttgccttgtgtgccatcc

SEQ ID NO: 321302 - DNA, 25 bp, Artificial
  Probe
agagttagctgtgtagccagcttag

SEQ ID NO: 321303 - DNA, 25 bp, Artificial
  Probe
gactcccaagtacaacgagactttt

SEQ ID NO: 321304 - DNA, 25 bp, Artificial
  Probe
ctcagatcagtcagggagagttagc

SEQ ID NO: 321305 - DNA, 25 bp, Artificial
  Probe
gcagctgtgcctgctggtgcccgtt

SEQ ID NO: 321306 - DNA, 25 bp, Artificial
  Probe
aacgagacttttcatttcctcctgg

SEQ ID NO: 321307 - DNA, 25 bp, Artificial
  Probe
acttttcatttcctcctgggaaatg

SEQ ID NO: 321308 - DNA, 25 bp, Artificial
  Probe
atgagacaggcatgaccattctccg

SEQ ID NO: 321309 - DNA, 25 bp, Artificial
  Probe
atctctgccatctttgccttgtgtg

SEQ ID NO: 321310 - DNA, 25 bp, Artificial
  Probe
agcccgagagttcgtgaagctcaag

SEQ ID NO: 321311 - DNA, 25 bp, Artificial
  Probe
gctgactctcccagttaaggatgac

SEQ ID NO: 321312 - DNA, 25 bp, Artificial
  Probe
aagagggtcccgaggcctatgaatt

SEQ ID NO: 321313 - DNA, 25 bp, Artificial
  Probe
agcacccactgctcagatcagtcag

SEQ ID NO: 321314 - DNA, 25 bp, Artificial
  Probe
agaggaagttcacaaccaagtctaa

SEQ ID NO: 321315 - DNA, 25 bp, Artificial
  Probe
aaagtaacagctggactcccaagta

SEQ ID NO: 321316 - DNA, 25 bp, Artificial
  Probe
caatgatgaggtagcccgagagttc

SEQ ID NO: 321317 - DNA, 25 bp, Artificial
  Probe
agttcaccattcctacagagcctgc

SEQ ID NO: 321318 - DNA, 25 bp, Artificial
  Probe
gcatactttgtccagctgtctcttt

SEQ ID NO: 321319 - DNA, 25 bp, Artificial
  Probe
cctgtttctggacttgttggacctg

SEQ ID NO: 321320 - DNA, 25 bp, Artificial
  Probe
atttgctctgtcttcctgtctgtga

SEQ ID NO: 321321 - DNA, 25 bp, Artificial
  Probe
tctgtgagctaccaccctagtcttc

SEQ ID NO: 321322 - DNA, 25 bp, Artificial
  Probe
tggacttgttggacctgctggacca

SEQ ID NO: 321323 - DNA, 25 bp, Artificial
  Probe
acacacttggagtcccttgacgtgg

SEQ ID NO: 321324 - DNA, 25 bp, Artificial
  Probe
catccttgcctttcggtggttggac

SEQ ID NO: 321325 - DNA, 25 bp, Artificial
  Probe
ccagtcagggcctaaactcaggagc

SEQ ID NO: 321326 - DNA, 25 bp, Artificial
  Probe
tttctggacttgttggacctgctgg

SEQ ID NO: 321327 - DNA, 25 bp, Artificial
  Probe
ccctgtttctggacttgttggacct

SEQ ID NO: 321328 - DNA, 25 bp, Artificial
  Probe
ggtgggctcgacacacttggagtcc

SEQ ID NO: 321329 - DNA, 25 bp, Artificial
  Probe
acttggagtcccttgacgtggtctg

SEQ ID NO: 321330 - DNA, 25 bp, Artificial
  Probe
ggcttaagaattccacagccagagg

SEQ ID NO: 321331 - DNA, 25 bp, Artificial
  Probe
tgtccagctgtctctttctctgttg

SEQ ID NO: 321332 - DNA, 25 bp, Artificial
  Probe
ctctgtcttcctgtctgtgagctac

SEQ ID NO: 321333 - DNA, 25 bp, Artificial
  Probe
gtgctgtgcatccttgcctttcggt

SEQ ID NO: 321334 - DNA, 25 bp, Artificial
  Probe
ttcctgtctgtgagctaccacccta

SEQ ID NO: 321335 - DNA, 25 bp, Artificial
  Probe
gctgtgcatccttgcctttcggtgg

SEQ ID NO: 321336 - DNA, 25 bp, Artificial
  Probe
tcctacagagcctgcccaaggtcag

SEQ ID NO: 321337 - DNA, 25 bp, Artificial
  Probe
aagttcaccattcctacagagcctg

SEQ ID NO: 321338 - DNA, 25 bp, Artificial
  Probe
accaggcaagggtgtgcccctcagg

SEQ ID NO: 321339 - DNA, 25 bp, Artificial
  Probe
gaaacacagcaatagagctggagtg

SEQ ID NO: 321340 - DNA, 25 bp, Artificial
  Probe
gtccattgcccctgtttctggactt

SEQ ID NO: 321341 - DNA, 25 bp, Artificial
  Probe
ctttgtccagctgtctctttctctg

SEQ ID NO: 321342 - DNA, 25 bp, Artificial
  Probe
gtccagctgtctctttctctgttgc

SEQ ID NO: 321343 - DNA, 25 bp, Artificial
  Probe
atgggtggccaccagtcagggccta

SEQ ID NO: 321344 - DNA, 25 bp, Artificial
  Probe
cagcagcccttgcatactttgtcca

SEQ ID NO: 321345 - DNA, 25 bp, Artificial
  Probe
ttccctgagtccattgcccctgttt

SEQ ID NO: 321346 - DNA, 25 bp, Artificial
  Probe
gccatagtcctagatctatcctgcc

SEQ ID NO: 321347 - DNA, 25 bp, Artificial
  Probe
tttggcttaagaattccacagccag

SEQ ID NO: 321348 - DNA, 25 bp, Artificial
  Probe
gcccctgtttctggacttgttggac

SEQ ID NO: 321349 - DNA, 25 bp, Artificial
  Probe
ctgtcttcctgtctgtgagctacca

SEQ ID NO: 321350 - DNA, 25 bp, Artificial
  Probe
ctgtctgtgagctaccaccctagtc

SEQ ID NO: 321351 - DNA, 25 bp, Artificial
  Probe
cacagccagaggaaacacagcaata

SEQ ID NO: 321352 - DNA, 25 bp, Artificial
  Probe
tagtcctagatctatcctgcccatg

SEQ ID NO: 321353 - DNA, 25 bp, Artificial
  Probe
taagaattccacagccagaggaaac

SEQ ID NO: 321354 - DNA, 25 bp, Artificial
  Probe
gtcctagatctatcctgcccatgtc

SEQ ID NO: 321355 - DNA, 25 bp, Artificial
  Probe
tggccaccagtcagggcctaaactc

SEQ ID NO: 321356 - DNA, 25 bp, Artificial
  Probe
cccctggatgggtggccaccagtca

SEQ ID NO: 321357 - DNA, 25 bp, Artificial
  Probe
agtcagggcctaaactcaggagcac

SEQ ID NO: 321358 - DNA, 25 bp, Artificial
  Probe
aattccacagccagaggaaacacag

SEQ ID NO: 321359 - DNA, 25 bp, Artificial
  Probe
tgcatccttgcctttcggtggttgg

SEQ ID NO: 321360 - DNA, 25 bp, Artificial
  Probe
actcaggagcacagccatagtgggg

SEQ ID NO: 321361 - DNA, 25 bp, Artificial
  Probe
ctctgcaaggtttggcttaagaatt

SEQ ID NO: 321362 - DNA, 25 bp, Artificial
  Probe
gtcttcctgtctgtgagctaccacc

SEQ ID NO: 321363 - DNA, 25 bp, Artificial
  Probe
cttgaggaagtctgcatggtcaaag

SEQ ID NO: 321364 - DNA, 25 bp, Artificial
  Probe
gcatatctgggtgatagtggcgctt

SEQ ID NO: 321365 - DNA, 25 bp, Artificial
  Probe
tccctggtttggtttccatggtcac

SEQ ID NO: 321366 - DNA, 25 bp, Artificial
  Probe
tataaagccgtaagatttgaccatt

SEQ ID NO: 321367 - DNA, 25 bp, Artificial
  Probe
agaagagcaccctggctaacctggt

SEQ ID NO: 321368 - DNA, 25 bp, Artificial
  Probe
ctccatcaaggcaggaagtgaatga

SEQ ID NO: 321369 - DNA, 25 bp, Artificial
  Probe
gtgcctgtggcagctccttgaggaa

SEQ ID NO: 321370 - DNA, 25 bp, Artificial
  Probe
taccattcaaggacagagtgtgatc

SEQ ID NO: 321371 - DNA, 25 bp, Artificial
  Probe
ggagcctccctggtttggtttccat

SEQ ID NO: 321372 - DNA, 25 bp, Artificial
  Probe
attcaaggacagagtgtgatctcca

SEQ ID NO: 321373 - DNA, 25 bp, Artificial
  Probe
gaccattggcagagctcagccagag

SEQ ID NO: 321374 - DNA, 25 bp, Artificial
  Probe
cctacctgagcctctgggtgaagta

SEQ ID NO: 321375 - DNA, 25 bp, Artificial
  Probe
gagcaccctggctaacctggtgaga

SEQ ID NO: 321376 - DNA, 25 bp, Artificial
  Probe
cggtggatagatcctgggcacctgc

SEQ ID NO: 321377 - DNA, 25 bp, Artificial
  Probe
tcctgggcacctgcagtgaggagca

SEQ ID NO: 321378 - DNA, 25 bp, Artificial
  Probe
tagatcctgggcacctgcagtgagg

SEQ ID NO: 321379 - DNA, 25 bp, Artificial
  Probe
taacctggtgagaacagacacggag

SEQ ID NO: 321380 - DNA, 25 bp, Artificial
  Probe
atatctgggtgatagtggcgcttac

SEQ ID NO: 321381 - DNA, 25 bp, Artificial
  Probe
ttggtttccatggtcacctggtaac

SEQ ID NO: 321382 - DNA, 25 bp, Artificial
  Probe
attataaagccgtaagatttgacca

SEQ ID NO: 321383 - DNA, 25 bp, Artificial
  Probe
gtttccatggtcacctggtaacctg

SEQ ID NO: 321384 - DNA, 25 bp, Artificial
  Probe
ctggctaacctggtgagaacagaca

SEQ ID NO: 321385 - DNA, 25 bp, Artificial
  Probe
ccgtaagatttgaccattggcagag

SEQ ID NO: 321386 - DNA, 25 bp, Artificial
  Probe
tgatctccatcaaggcaggaagtga

SEQ ID NO: 321387 - DNA, 25 bp, Artificial
  Probe
tgtggcagctccttgaggaagtctg

SEQ ID NO: 321388 - DNA, 25 bp, Artificial
  Probe
cccctcaaagggatcacatgggagt

SEQ ID NO: 321389 - DNA, 25 bp, Artificial
  Probe
tacctgagcctctgggtgaagtagg

SEQ ID NO: 321390 - DNA, 25 bp, Artificial
  Probe
agacacggagcctccctggtttggt

SEQ ID NO: 321391 - DNA, 25 bp, Artificial
  Probe
caccctggctaacctggtgagaaca

SEQ ID NO: 321392 - DNA, 25 bp, Artificial
  Probe
gtggatagatcctgggcacctgcag

SEQ ID NO: 321393 - DNA, 25 bp, Artificial
  Probe
aggtctgggcaggaccgttctgtct

SEQ ID NO: 321394 - DNA, 25 bp, Artificial
  Probe
aggaccgttctgtctggatccctcc

SEQ ID NO: 321395 - DNA, 25 bp, Artificial
  Probe
ccatcaaggcaggaagtgaatgagc

SEQ ID NO: 321396 - DNA, 25 bp, Artificial
  Probe
gtacggtggatagatcctgggcacc

SEQ ID NO: 321397 - DNA, 25 bp, Artificial
  Probe
agatttgaccattggcagagctcag

SEQ ID NO: 321398 - DNA, 25 bp, Artificial
  Probe
gggcaggaccgttctgtctggatcc

SEQ ID NO: 321399 - DNA, 25 bp, Artificial
  Probe
acagagtgtgatctccatcaaggca

SEQ ID NO: 321400 - DNA, 25 bp, Artificial
  Probe
gaacagacacggagcctccctggtt

SEQ ID NO: 321401 - DNA, 25 bp, Artificial
  Probe
aggaagtctgcatggtcaaagttct

SEQ ID NO: 321402 - DNA, 25 bp, Artificial
  Probe
attggcagagctcagccagagtgag

SEQ ID NO: 321403 - DNA, 25 bp, Artificial
  Probe
atcctgggcacctgcagtgaggagc

SEQ ID NO: 321404 - DNA, 25 bp, Artificial
  Probe
ccctcaaagggatcacatgggagtg

SEQ ID NO: 321405 - DNA, 25 bp, Artificial
  Probe
ttgaccattggcagagctcagccag

SEQ ID NO: 321406 - DNA, 25 bp, Artificial
  Probe
tacggtggatagatcctgggcacct

SEQ ID NO: 321407 - DNA, 25 bp, Artificial
  Probe
atgacctacctgagcctctgggtga

SEQ ID NO: 321408 - DNA, 25 bp, Artificial
  Probe
cagctccttgaggaagtctgcatgg

SEQ ID NO: 321409 - DNA, 25 bp, Artificial
  Probe
ggatcctcattgcaaaatcacagaa

SEQ ID NO: 321410 - DNA, 25 bp, Artificial
  Probe
tttgtcatgaagagcccctacaacc

SEQ ID NO: 321411 - DNA, 25 bp, Artificial
  Probe
cctgcccattgtagagcgaccagtg

SEQ ID NO: 321412 - DNA, 25 bp, Artificial
  Probe
agcgtcctgcaggtggtgaacctgc

SEQ ID NO: 321413 - DNA, 25 bp, Artificial
  Probe
ctggcttcaaggtgaatgacaccaa

SEQ ID NO: 321414 - DNA, 25 bp, Artificial
  Probe
tctgttctcaataaaagtgattgtc

SEQ ID NO: 321415 - DNA, 25 bp, Artificial
  Probe
tacaaccaccgctggtaccaaatgg

SEQ ID NO: 321416 - DNA, 25 bp, Artificial
  Probe
tcaacgagatacagcccagcgtcct

SEQ ID NO: 321417 - DNA, 25 bp, Artificial
  Probe
agacccacagtatgggatcctcatt

SEQ ID NO: 321418 - DNA, 25 bp, Artificial
  Probe
gcaaccttcgggagacgtggacaac

SEQ ID NO: 321419 - DNA, 25 bp, Artificial
  Probe
ggtgagagacccacagtatgggatc

SEQ ID NO: 321420 - DNA, 25 bp, Artificial
  Probe
accaagcgaggagatgcttgtgaag

SEQ ID NO: 321421 - DNA, 25 bp, Artificial
  Probe
gtgcttgccagacaagcagacagta

SEQ ID NO: 321422 - DNA, 25 bp, Artificial
  Probe
attcaccccgtgtgcttgccagaca

SEQ ID NO: 321423 - DNA, 25 bp, Artificial
  Probe
caggtggtgaacctgcccattgtag

SEQ ID NO: 321424 - DNA, 25 bp, Artificial
  Probe
aggtgaatgacaccaagcgaggaga

SEQ ID NO: 321425 - DNA, 25 bp, Artificial
  Probe
caaccaccgctggtaccaaatgggt

SEQ ID NO: 321426 - DNA, 25 bp, Artificial
  Probe
gtgactacattcaccccgtgtgctt

SEQ ID NO: 321427 - DNA, 25 bp, Artificial
  Probe
tacagcccagcgtcctgcaggtggt

SEQ ID NO: 321428 - DNA, 25 bp, Artificial
  Probe
ccacagtatgggatcctcattgcaa

SEQ ID NO: 321429 - DNA, 25 bp, Artificial
  Probe
aggtggtgaacctgcccattgtaga

SEQ ID NO: 321430 - DNA, 25 bp, Artificial
  Probe
tgccagacaagcagacagtaaccag

SEQ ID NO: 321431 - DNA, 25 bp, Artificial
  Probe
gtgaacctgcccattgtagagcgac

SEQ ID NO: 321432 - DNA, 25 bp, Artificial
  Probe
tcaccccgtgtgcttgccagacaag

SEQ ID NO: 321433 - DNA, 25 bp, Artificial
  Probe
caagcagacagtaaccagtttgctc

SEQ ID NO: 321434 - DNA, 25 bp, Artificial
  Probe
tggcttcaaggtgaatgacaccaag

SEQ ID NO: 321435 - DNA, 25 bp, Artificial
  Probe
aacctgcccattgtagagcgaccag

SEQ ID NO: 321436 - DNA, 25 bp, Artificial
  Probe
accaccgctggtaccaaatgggtat

SEQ ID NO: 321437 - DNA, 25 bp, Artificial
  Probe
ccagcgtcctgcaggtggtgaacct

SEQ ID NO: 321438 - DNA, 25 bp, Artificial
  Probe
cgctggtaccaaatgggtattgtct

SEQ ID NO: 321439 - DNA, 25 bp, Artificial
  Probe
tgggggaccttttgtcatgaagagc

SEQ ID NO: 321440 - DNA, 25 bp, Artificial
  Probe
cttcagtgactacattcaccccgtg

SEQ ID NO: 321441 - DNA, 25 bp, Artificial
  Probe
caaatgggtattgtctcctggggtg

SEQ ID NO: 321442 - DNA, 25 bp, Artificial
  Probe
tgacaccaagcgaggagatgcttgt

SEQ ID NO: 321443 - DNA, 25 bp, Artificial
  Probe
acattcaccccgtgtgcttgccaga

SEQ ID NO: 321444 - DNA, 25 bp, Artificial
  Probe
accccgtgtgcttgccagacaagca

SEQ ID NO: 321445 - DNA, 25 bp, Artificial
  Probe
gtagagcgaccagtgtgcaaggcct

SEQ ID NO: 321446 - DNA, 25 bp, Artificial
  Probe
tgcccattgtagagcgaccagtgtg

SEQ ID NO: 321447 - DNA, 25 bp, Artificial
  Probe
tgaatgacaccaagcgaggagatgc

SEQ ID NO: 321448 - DNA, 25 bp, Artificial
  Probe
ctgcaggtggtgaacctgcccattg

SEQ ID NO: 321449 - DNA, 25 bp, Artificial
  Probe
gtgcccttcagtgactacattcacc

SEQ ID NO: 321450 - DNA, 25 bp, Artificial
  Probe
cattgtagagcgaccagtgtgcaag

SEQ ID NO: 321451 - DNA, 25 bp, Artificial
  Probe
gacaagcagacagtaaccagtttgc

SEQ ID NO: 321452 - DNA, 25 bp, Artificial
  Probe
aacatcaacgagatacagcccagcg

SEQ ID NO: 321453 - DNA, 25 bp, Artificial
  Probe
gagatacagcccagcgtcctgcagg

SEQ ID NO: 321454 - DNA, 25 bp, Artificial
  Probe
gacaccaagcgaggagatgcttgtg

SEQ ID NO: 321455 - DNA, 25 bp, Artificial
  Probe
catatatggactagtagctgaactg

SEQ ID NO: 321456 - DNA, 25 bp, Artificial
  Probe
taaaggaggtcatcagcccgtctgt

SEQ ID NO: 321457 - DNA, 25 bp, Artificial
  Probe
tgcctcactgactgggctgactgtt

SEQ ID NO: 321458 - DNA, 25 bp, Artificial
  Probe
ccaaagattacaacaggaggataga

SEQ ID NO: 321459 - DNA, 25 bp, Artificial
  Probe
attatccctcttgcttctgaattgg

SEQ ID NO: 321460 - DNA, 25 bp, Artificial
  Probe
tcagaagatggactctttggatgcc

SEQ ID NO: 321461 - DNA, 25 bp, Artificial
  Probe
atcttcttacaccagtgcattctgg

SEQ ID NO: 321462 - DNA, 25 bp, Artificial
  Probe
gtgcattctggatcttttatcaaat

SEQ ID NO: 321463 - DNA, 25 bp, Artificial
  Probe
gttttcattgctctggaccacttaa

SEQ ID NO: 321464 - DNA, 25 bp, Artificial
  Probe
ggaaatctttatgcttcccggacca

SEQ ID NO: 321465 - DNA, 25 bp, Artificial
  Probe
gcacataaataaccatgactttgtg

SEQ ID NO: 321466 - DNA, 25 bp, Artificial
  Probe
ggcacagtacatcttcttacaccag

SEQ ID NO: 321467 - DNA, 25 bp, Artificial
  Probe
ctagtagctgaactgaggagcgaga

SEQ ID NO: 321468 - DNA, 25 bp, Artificial
  Probe
tggtgcagaacctggcacagtacat

SEQ ID NO: 321469 - DNA, 25 bp, Artificial
  Probe
atagaattttcagatcccaggagcc

SEQ ID NO: 321470 - DNA, 25 bp, Artificial
  Probe
gagaatgtgcatggtgcagaacctg

SEQ ID NO: 321471 - DNA, 25 bp, Artificial
  Probe
taaataaccatgactttgtggacat

SEQ ID NO: 321472 - DNA, 25 bp, Artificial
  Probe
catgactttgtggacatatatggac

SEQ ID NO: 321473 - DNA, 25 bp, Artificial
  Probe
ataaccatgactttgtggacatata

SEQ ID NO: 321474 - DNA, 25 bp, Artificial
  Probe
cacttcagaagatggactctttgga

SEQ ID NO: 321475 - DNA, 25 bp, Artificial
  Probe
aaggaggtcatcagcccgtctgttt

SEQ ID NO: 321476 - DNA, 25 bp, Artificial
  Probe
gactagtagctgaactgaggagcga

SEQ ID NO: 321477 - DNA, 25 bp, Artificial
  Probe
cattgctctggaccacttaacacag

SEQ ID NO: 321478 - DNA, 25 bp, Artificial
  Probe
tggactagtagctgaactgaggagc

SEQ ID NO: 321479 - DNA, 25 bp, Artificial
  Probe
gtcatcagcccgtctgttttgttaa

SEQ ID NO: 321480 - DNA, 25 bp, Artificial
  Probe
gaacctggcacagtacatcttctta

SEQ ID NO: 321481 - DNA, 25 bp, Artificial
  Probe
caaattttcgaggtcctcaagtctt

SEQ ID NO: 321482 - DNA, 25 bp, Artificial
  Probe
cttctgaattggactgggcaaagga

SEQ ID NO: 321483 - DNA, 25 bp, Artificial
  Probe
agaattttcagatcccaggagccaa

SEQ ID NO: 321484 - DNA, 25 bp, Artificial
  Probe
aatctttatgcttcccggaccatgc

SEQ ID NO: 321485 - DNA, 25 bp, Artificial
  Probe
accaaagattacaacaggaggatag

SEQ ID NO: 321486 - DNA, 25 bp, Artificial
  Probe
ttcagaagatggactctttggatgc

SEQ ID NO: 321487 - DNA, 25 bp, Artificial
  Probe
ttttcagatcccaggagccaacatt

SEQ ID NO: 321488 - DNA, 25 bp, Artificial
  Probe
actactccacacttcagaagatgga

SEQ ID NO: 321489 - DNA, 25 bp, Artificial
  Probe
atgtgcatggtgcagaacctggcac

SEQ ID NO: 321490 - DNA, 25 bp, Artificial
  Probe
ggactctttggatgccatggaaggt

SEQ ID NO: 321491 - DNA, 25 bp, Artificial
  Probe
tcagatcccaggagccaacattatc

SEQ ID NO: 321492 - DNA, 25 bp, Artificial
  Probe
ctgggctgactgttttatggacgga

SEQ ID NO: 321493 - DNA, 25 bp, Artificial
  Probe
cactgactgggctgactgttttatg

SEQ ID NO: 321494 - DNA, 25 bp, Artificial
  Probe
ggagccaacattatccctcttgctt

SEQ ID NO: 321495 - DNA, 25 bp, Artificial
  Probe
cggaccatgcctcactgactgggct

SEQ ID NO: 321496 - DNA, 25 bp, Artificial
  Probe
catacaaattttcgaggtcctcaag

SEQ ID NO: 321497 - DNA, 25 bp, Artificial
  Probe
gcagaacctggcacagtacatcttc

SEQ ID NO: 321498 - DNA, 25 bp, Artificial
  Probe
acataaataaccatgactttgtgga

SEQ ID NO: 321499 - DNA, 25 bp, Artificial
  Probe
cagcccgtctgttttgttaactact

SEQ ID NO: 321500 - DNA, 25 bp, Artificial
  Probe
ccaggagccaacattatccctcttg

SEQ ID NO: 321501 - DNA, 25 bp, Artificial
  Probe
agggagccaacagaacactgaccat

SEQ ID NO: 321502 - DNA, 25 bp, Artificial
  Probe
agataaaggtctgtcaccacttgaa

SEQ ID NO: 321503 - DNA, 25 bp, Artificial
  Probe
gtaccacatttacaacctgggcaat

SEQ ID NO: 321504 - DNA, 25 bp, Artificial
  Probe
ttgaagtaccacatttacaacctgg

SEQ ID NO: 321505 - DNA, 25 bp, Artificial
  Probe
ttcttccatagactcttcagaagag

SEQ ID NO: 321506 - DNA, 25 bp, Artificial
  Probe
ctctgagaggttttcagagaatgcc

SEQ ID NO: 321507 - DNA, 25 bp, Artificial
  Probe
gaacacattcagacaatacagagtt

SEQ ID NO: 321508 - DNA, 25 bp, Artificial
  Probe
gggacattctccattcagaaaatat

SEQ ID NO: 321509 - DNA, 25 bp, Artificial
  Probe
agaagagcggcctgcctgaacattg

SEQ ID NO: 321510 - DNA, 25 bp, Artificial
  Probe
gtcacatacccagtgtcttgtcctt

SEQ ID NO: 321511 - DNA, 25 bp, Artificial
  Probe
ccttgatgatcatggacacatccga

SEQ ID NO: 321512 - DNA, 25 bp, Artificial
  Probe
tacacttatgaaaccaaggatgctt

SEQ ID NO: 321513 - DNA, 25 bp, Artificial
  Probe
ggttttcagagaatgccaagtccat

SEQ ID NO: 321514 - DNA, 25 bp, Artificial
  Probe
caagtgcgagctacaggaaaaatgt

SEQ ID NO: 321515 - DNA, 25 bp, Artificial
  Probe
tctgcagcatgttacttaccaagga

SEQ ID NO: 321516 - DNA, 25 bp, Artificial
  Probe
tccagaaattatcagtcatgaaaag

SEQ ID NO: 321517 - DNA, 25 bp, Artificial
  Probe
actctgagaggttttcagagaatgc

SEQ ID NO: 321518 - DNA, 25 bp, Artificial
  Probe
cctccttgatgatcatggacacatc

SEQ ID NO: 321519 - DNA, 25 bp, Artificial
  Probe
gtgtcttgtcctttccataaattgt

SEQ ID NO: 321520 - DNA, 25 bp, Artificial
  Probe
taataaacggtctgtaacactgttt

SEQ ID NO: 321521 - DNA, 25 bp, Artificial
  Probe
aaggaatctgtcacatacccagtgt

SEQ ID NO: 321522 - DNA, 25 bp, Artificial
  Probe
ggtttgtgcctgtcaagtgcgagct

SEQ ID NO: 321523 - DNA, 25 bp, Artificial
  Probe
catctgcagcatgttacttaccaag

SEQ ID NO: 321524 - DNA, 25 bp, Artificial
  Probe
aagccatggctctgaatgaaaaaag

SEQ ID NO: 321525 - DNA, 25 bp, Artificial
  Probe
ggatgctttgtgtttggtgctaacc

SEQ ID NO: 321526 - DNA, 25 bp, Artificial
  Probe
agctgtgttctatgctgcagagctg

SEQ ID NO: 321527 - DNA, 25 bp, Artificial
  Probe
gattgcgggacattctccattcaga

SEQ ID NO: 321528 - DNA, 25 bp, Artificial
  Probe
gcgtccagtaacaaagaacacattc

SEQ ID NO: 321529 - DNA, 25 bp, Artificial
  Probe
acaagatatgttcctgtattcttag

SEQ ID NO: 321530 - DNA, 25 bp, Artificial
  Probe
agtgtcttgtcctttccataaattg

SEQ ID NO: 321531 - DNA, 25 bp, Artificial
  Probe
gaccctggtgttaagaaggaatctg

SEQ ID NO: 321532 - DNA, 25 bp, Artificial
  Probe
gcagagagctgtgttctatgctgca

SEQ ID NO: 321533 - DNA, 25 bp, Artificial
  Probe
gtattcttagaccaaagagaaactt

SEQ ID NO: 321534 - DNA, 25 bp, Artificial
  Probe
ctttgaggagcagagagctgtgttc

SEQ ID NO: 321535 - DNA, 25 bp, Artificial
  Probe
ctttgtgtttggtgctaaccattat

SEQ ID NO: 321536 - DNA, 25 bp, Artificial
  Probe
ctgaggagtactctgagaggttttc

SEQ ID NO: 321537 - DNA, 25 bp, Artificial
  Probe
gttagtttagcctacacttatgaaa

SEQ ID NO: 321538 - DNA, 25 bp, Artificial
  Probe
ctacatggctccagaaattatcagt

SEQ ID NO: 321539 - DNA, 25 bp, Artificial
  Probe
gttttcagagaatgccaagtccatc

SEQ ID NO: 321540 - DNA, 25 bp, Artificial
  Probe
aaaggtgaagccatggctctgaatg

SEQ ID NO: 321541 - DNA, 25 bp, Artificial
  Probe
cattcagacaatacagagttttagg

SEQ ID NO: 321542 - DNA, 25 bp, Artificial
  Probe
gaacattgcccacagtgaggagagg

SEQ ID NO: 321543 - DNA, 25 bp, Artificial
  Probe
atgctgcagagctgtgctgtggctt

SEQ ID NO: 321544 - DNA, 25 bp, Artificial
  Probe
tttgtgcctgtcaagtgcgagctac

SEQ ID NO: 321545 - DNA, 25 bp, Artificial
  Probe
ggtctgtcaccacttgaaaaacaca

SEQ ID NO: 321546 - DNA, 25 bp, Artificial
  Probe
acttatgaaaccaaggatgctttgt

SEQ ID NO: 321547 - DNA, 25 bp, Artificial
  Probe
gtccagaatgcctgtgaaatgctgt

SEQ ID NO: 321548 - DNA, 25 bp, Artificial
  Probe
gcttaccatgaaaatactgggagag

SEQ ID NO: 321549 - DNA, 25 bp, Artificial
  Probe
gaacaagtcttttaacacatccagg

SEQ ID NO: 321550 - DNA, 25 bp, Artificial
  Probe
tgaaccaaatgtgcaccatcctccg

SEQ ID NO: 321551 - DNA, 25 bp, Artificial
  Probe
gatggcctcccaagccaatgtgcct

SEQ ID NO: 321552 - DNA, 25 bp, Artificial
  Probe
catccaggagggaaaccgctgccca

SEQ ID NO: 321553 - DNA, 25 bp, Artificial
  Probe
tgctgccctgtggaaggcccctctg

SEQ ID NO: 321554 - DNA, 25 bp, Artificial
  Probe
cagcactgcatgtctctcccggaag

SEQ ID NO: 321555 - DNA, 25 bp, Artificial
  Probe
tctccatgctgctgctgccctgtgg

SEQ ID NO: 321556 - DNA, 25 bp, Artificial
  Probe
aatgtgcaccatcctccgatggcct

SEQ ID NO: 321557 - DNA, 25 bp, Artificial
  Probe
gaaggtccagaatgcctgtgaaatg

SEQ ID NO: 321558 - DNA, 25 bp, Artificial
  Probe
taagtcaggcagaccctgatcaatc

SEQ ID NO: 321559 - DNA, 25 bp, Artificial
  Probe
gggactaataattctcccacactag

SEQ ID NO: 321560 - DNA, 25 bp, Artificial
  Probe
gaccctgatcaatctgaaccaaatg

SEQ ID NO: 321561 - DNA, 25 bp, Artificial
  Probe
gcagaccctgatcaatctgaaccaa

SEQ ID NO: 321562 - DNA, 25 bp, Artificial
  Probe
gagaggcagcacctaacacatgtag

SEQ ID NO: 321563 - DNA, 25 bp, Artificial
  Probe
actgcatgtctctcccggaaggtcc

SEQ ID NO: 321564 - DNA, 25 bp, Artificial
  Probe
tgtctctcccggaaggtccagaatg

SEQ ID NO: 321565 - DNA, 25 bp, Artificial
  Probe
gatcaatctgaaccaaatgtgcacc

SEQ ID NO: 321566 - DNA, 25 bp, Artificial
  Probe
cagttttctgcgtatacagatcccc

SEQ ID NO: 321567 - DNA, 25 bp, Artificial
  Probe
ggaagcatgcccatctctccatgct

SEQ ID NO: 321568 - DNA, 25 bp, Artificial
  Probe
aacacatccaggagggaaaccgctg

SEQ ID NO: 321569 - DNA, 25 bp, Artificial
  Probe
tctaagtcaggcagaccctgatcaa

SEQ ID NO: 321570 - DNA, 25 bp, Artificial
  Probe
tgctcaagcccagcactgcatgtct

SEQ ID NO: 321571 - DNA, 25 bp, Artificial
  Probe
tgcctctaagtcaggcagaccctga

SEQ ID NO: 321572 - DNA, 25 bp, Artificial
  Probe
agaacgctctacagagcacttagag

SEQ ID NO: 321573 - DNA, 25 bp, Artificial
  Probe
gttttctgcgtatacagatccccaa

SEQ ID NO: 321574 - DNA, 25 bp, Artificial
  Probe
gttttggaagcatgcccatctctcc

SEQ ID NO: 321575 - DNA, 25 bp, Artificial
  Probe
tcctctggtgggaagaaagaacgct

SEQ ID NO: 321576 - DNA, 25 bp, Artificial
  Probe
gagggaaaccgctgcccagtggtct

SEQ ID NO: 321577 - DNA, 25 bp, Artificial
  Probe
gtggaaggcccctctgcttgagctt

SEQ ID NO: 321578 - DNA, 25 bp, Artificial
  Probe
caactcactgcctctaagtcaggca

SEQ ID NO: 321579 - DNA, 25 bp, Artificial
  Probe
ctgcttctcttcctctggtgggaag

SEQ ID NO: 321580 - DNA, 25 bp, Artificial
  Probe
gaaagaacgctctacagagcactta

SEQ ID NO: 321581 - DNA, 25 bp, Artificial
  Probe
tgcttgagcttaaacagtagtgcac

SEQ ID NO: 321582 - DNA, 25 bp, Artificial
  Probe
agcttaaacagtagtgcacagtttt

SEQ ID NO: 321583 - DNA, 25 bp, Artificial
  Probe
tcaggcagaccctgatcaatctgaa

SEQ ID NO: 321584 - DNA, 25 bp, Artificial
  Probe
gaagcatgcccatctctccatgctg

SEQ ID NO: 321585 - DNA, 25 bp, Artificial
  Probe
ctaacacatgtagaataggactgaa

SEQ ID NO: 321586 - DNA, 25 bp, Artificial
  Probe
tccatgctgctgctgccctgtggaa

SEQ ID NO: 321587 - DNA, 25 bp, Artificial
  Probe
tgcacagttttctgcgtatacagat

SEQ ID NO: 321588 - DNA, 25 bp, Artificial
  Probe
gcacctacgatcatagaacaagtct

SEQ ID NO: 321589 - DNA, 25 bp, Artificial
  Probe
ctagcacctacgatcatagaacaag

SEQ ID NO: 321590 - DNA, 25 bp, Artificial
  Probe
agccaatgtgcctgcttctcttcct

SEQ ID NO: 321591 - DNA, 25 bp, Artificial
  Probe
tgctgctgccctgtggaaggcccct

SEQ ID NO: 321592 - DNA, 25 bp, Artificial
  Probe
atccaggagggaaaccgctgcccag

SEQ ID NO: 321593 - DNA, 25 bp, Artificial
  Probe
aaccctgaaaagattgcagctccag

SEQ ID NO: 321594 - DNA, 25 bp, Artificial
  Probe
tttgcagatatcaatactttcatgg

SEQ ID NO: 321595 - DNA, 25 bp, Artificial
  Probe
atgcaaagctgatgggcctgctagc

SEQ ID NO: 321596 - DNA, 25 bp, Artificial
  Probe
gaagatgcggtccatgtagggttcc

SEQ ID NO: 321597 - DNA, 25 bp, Artificial
  Probe
gattgatcagctgcaggaagaggtc

SEQ ID NO: 321598 - DNA, 25 bp, Artificial
  Probe
gttcaccaaggatctgccccttttc

SEQ ID NO: 321599 - DNA, 25 bp, Artificial
  Probe
catgtagggttccagtacgagtttt

SEQ ID NO: 321600 - DNA, 25 bp, Artificial
  Probe
tgcgctcatggctgccatggctctc

SEQ ID NO: 321601 - DNA, 25 bp, Artificial
  Probe
ctggggttacccaaagagaagagat

SEQ ID NO: 321602 - DNA, 25 bp, Artificial
  Probe
tgcaggaagaggtcgcgctgatcct

SEQ ID NO: 321603 - DNA, 25 bp, Artificial
  Probe
tcctgacaggcctggggttacccaa

SEQ ID NO: 321604 - DNA, 25 bp, Artificial
  Probe
ccgagtatgcgctcatggctgccat

SEQ ID NO: 321605 - DNA, 25 bp, Artificial
  Probe
gcgcatactcatatgaaatccatcg

SEQ ID NO: 321606 - DNA, 25 bp, Artificial
  Probe
ctgcaggaagaggtcgcgctgatcc

SEQ ID NO: 321607 - DNA, 25 bp, Artificial
  Probe
ttatggagcaacagtcaagactcca

SEQ ID NO: 321608 - DNA, 25 bp, Artificial
  Probe
tctgcgggcccctttgctacaagat

SEQ ID NO: 321609 - DNA, 25 bp, Artificial
  Probe
ctcatggctgccatggctctcttct

SEQ ID NO: 321610 - DNA, 25 bp, Artificial
  Probe
aaccacattatggagcaacagtcaa

SEQ ID NO: 321611 - DNA, 25 bp, Artificial
  Probe
atggctctcttctctcctgacaggc

SEQ ID NO: 321612 - DNA, 25 bp, Artificial
  Probe
ccagtacgagtttttggagttgatc

SEQ ID NO: 321613 - DNA, 25 bp, Artificial
  Probe
ttctctcctgacaggcctggggtta

SEQ ID NO: 321614 - DNA, 25 bp, Artificial
  Probe
ctatgatgccgctgcttggggagat

SEQ ID NO: 321615 - DNA, 25 bp, Artificial
  Probe
tcatatgaaatccatcgcatccagg

SEQ ID NO: 321616 - DNA, 25 bp, Artificial
  Probe
gagcggctgtggaaatcttgcatat

SEQ ID NO: 321617 - DNA, 25 bp, Artificial
  Probe
ggagttgatcatccacttccacaaa

SEQ ID NO: 321618 - DNA, 25 bp, Artificial
  Probe
tgcggtccatgtagggttccagtac

SEQ ID NO: 321619 - DNA, 25 bp, Artificial
  Probe
gattgcagctccaggagcccgagta

SEQ ID NO: 321620 - DNA, 25 bp, Artificial
  Probe
ttgctacaagatggaagatgcggtc

SEQ ID NO: 321621 - DNA, 25 bp, Artificial
  Probe
tctcttctctcctgacaggcctggg

SEQ ID NO: 321622 - DNA, 25 bp, Artificial
  Probe
atcagctgcaggaagaggtcgcgct

SEQ ID NO: 321623 - DNA, 25 bp, Artificial
  Probe
actgtctgctatgatgccgctgctt

SEQ ID NO: 321624 - DNA, 25 bp, Artificial
  Probe
ttcaaacacagaatttcttctgcgg

SEQ ID NO: 321625 - DNA, 25 bp, Artificial
  Probe
agctgatgggcctgctagctgagct

SEQ ID NO: 321626 - DNA, 25 bp, Artificial
  Probe
cagattatcaagttcaccaaggatc

SEQ ID NO: 321627 - DNA, 25 bp, Artificial
  Probe
ccacaaaaccctgaaaagattgcag

SEQ ID NO: 321628 - DNA, 25 bp, Artificial
  Probe
catggctctcttctctcctgacagg

SEQ ID NO: 321629 - DNA, 25 bp, Artificial
  Probe
tttttggagttgatcatccacttcc

SEQ ID NO: 321630 - DNA, 25 bp, Artificial
  Probe
tgaaaagattgcagctccaggagcc

SEQ ID NO: 321631 - DNA, 25 bp, Artificial
  Probe
tccaggagcccgagtatgcgctcat

SEQ ID NO: 321632 - DNA, 25 bp, Artificial
  Probe
tggtgcagcagattatcaagttcac

SEQ ID NO: 321633 - DNA, 25 bp, Artificial
  Probe
ttgcagctccaggagcccgagtatg

SEQ ID NO: 321634 - DNA, 25 bp, Artificial
  Probe
ctgagcttcggagtataaacagcgc

SEQ ID NO: 321635 - DNA, 25 bp, Artificial
  Probe
gtgttgcctctgctcacacactttg

SEQ ID NO: 321636 - DNA, 25 bp, Artificial
  Probe
ggagcccgagtatgcgctcatggct

SEQ ID NO: 321637 - DNA, 25 bp, Artificial
  Probe
cagaatttcttctgcgggccccttt

SEQ ID NO: 321638 - DNA, 25 bp, Artificial
  Probe
gagcaacagtcaagactccaaagtc

SEQ ID NO: 321639 - DNA, 25 bp, Artificial
  Probe
ggacctcggccttaaaatgccagtt

SEQ ID NO: 321640 - DNA, 25 bp, Artificial
  Probe
actcagaaaggttgccggcttgatg

SEQ ID NO: 321641 - DNA, 25 bp, Artificial
  Probe
ggcctgaactccaggggaagagttc

SEQ ID NO: 321642 - DNA, 25 bp, Artificial
  Probe
gcaccagaagacagtgcttttgcag

SEQ ID NO: 321643 - DNA, 25 bp, Artificial
  Probe
aagacagtgcttttgcagtttatcc

SEQ ID NO: 321644 - DNA, 25 bp, Artificial
  Probe
cccatcttgggcactcagaaaggtt

SEQ ID NO: 321645 - DNA, 25 bp, Artificial
  Probe
gtttatcccatcttgggcactcaga

SEQ ID NO: 321646 - DNA, 25 bp, Artificial
  Probe
cagaagacagtgcttttgcagttta

SEQ ID NO: 321647 - DNA, 25 bp, Artificial
  Probe
ccagaagacagtgcttttgcagttt

SEQ ID NO: 321648 - DNA, 25 bp, Artificial
  Probe
aggacctcggccttaaaatgccagt

SEQ ID NO: 321649 - DNA, 25 bp, Artificial
  Probe
tgccggcttgatgtcttcaataaat

SEQ ID NO: 321650 - DNA, 25 bp, Artificial
  Probe
ctcggccttaaaatgccagtttgcc

SEQ ID NO: 321651 - DNA, 25 bp, Artificial
  Probe
gaagaagcgctcttgcccagggaat

SEQ ID NO: 321652 - DNA, 25 bp, Artificial
  Probe
tcttgcccagggaatgcgtggcagc

SEQ ID NO: 321653 - DNA, 25 bp, Artificial
  Probe
ggcactcagaaaggttgccggcttg

SEQ ID NO: 321654 - DNA, 25 bp, Artificial
  Probe
ggttgccccggcaccagaagacagt

SEQ ID NO: 321655 - DNA, 25 bp, Artificial
  Probe
ctctggttcgaagaagcgctcttgc

SEQ ID NO: 321656 - DNA, 25 bp, Artificial
  Probe
tcgaagaagcgctcttgcccaggga

SEQ ID NO: 321657 - DNA, 25 bp, Artificial
  Probe
gaagacagtgcttttgcagtttatc

SEQ ID NO: 321658 - DNA, 25 bp, Artificial
  Probe
ccatcttgggcactcagaaaggttg

SEQ ID NO: 321659 - DNA, 25 bp, Artificial
  Probe
atggttgggcacatctgggtcctca

SEQ ID NO: 321660 - DNA, 25 bp, Artificial
  Probe
gttgggcacatctgggtcctcactt

SEQ ID NO: 321661 - DNA, 25 bp, Artificial
  Probe
tccgtccggaaatgaaggaagagcc

SEQ ID NO: 321662 - DNA, 25 bp, Artificial
  Probe
ggctgttcctctggttcgaagaagc

SEQ ID NO: 321663 - DNA, 25 bp, Artificial
  Probe
agtttgcctagttctggctgttcct

SEQ ID NO: 321664 - DNA, 25 bp, Artificial
  Probe
tcggccttaaaatgccagtttgcct

SEQ ID NO: 321665 - DNA, 25 bp, Artificial
  Probe
tgccagtttgcctagttctggctgt

SEQ ID NO: 321666 - DNA, 25 bp, Artificial
  Probe
gcagtttatcccatcttgggcactc

SEQ ID NO: 321667 - DNA, 25 bp, Artificial
  Probe
aaggttgccggcttgatgtcttcaa

SEQ ID NO: 321668 - DNA, 25 bp, Artificial
  Probe
ttgccccggcaccagaagacagtgc

SEQ ID NO: 321669 - DNA, 25 bp, Artificial
  Probe
cagtttgcctagttctggctgttcc

SEQ ID NO: 321670 - DNA, 25 bp, Artificial
  Probe
tgggcactcagaaaggttgccggct

SEQ ID NO: 321671 - DNA, 25 bp, Artificial
  Probe
cgtccgtccggaaatgaaggaagag

SEQ ID NO: 321672 - DNA, 25 bp, Artificial
  Probe
agttctggctgttcctctggttcga

SEQ ID NO: 321673 - DNA, 25 bp, Artificial
  Probe
cttgggcactcagaaaggttgccgg

SEQ ID NO: 321674 - DNA, 25 bp, Artificial
  Probe
ttaaaatgccagtttgcctagttct

SEQ ID NO: 321675 - DNA, 25 bp, Artificial
  Probe
cccggcaccagaagacagtgctttt

SEQ ID NO: 321676 - DNA, 25 bp, Artificial
  Probe
gcttttgcagtttatcccatcttgg

SEQ ID NO: 321677 - DNA, 25 bp, Artificial
  Probe
ctggttcgaagaagcgctcttgccc

SEQ ID NO: 321678 - DNA, 25 bp, Artificial
  Probe
aggttgccggcttgatgtcttcaat

SEQ ID NO: 321679 - DNA, 25 bp, Artificial
  Probe
tagttctggctgttcctctggttcg

SEQ ID NO: 321680 - DNA, 25 bp, Artificial
  Probe
tcctctggttcgaagaagcgctctt

SEQ ID NO: 321681 - DNA, 25 bp, Artificial
  Probe
ttttgcagtttatcccatcttgggc

SEQ ID NO: 321682 - DNA, 25 bp, Artificial
  Probe
ccttaaaatgccagtttgcctagtt

SEQ ID NO: 321683 - DNA, 25 bp, Artificial
  Probe
cttgcccagggaatgcgtggcagcc

SEQ ID NO: 321684 - DNA, 25 bp, Artificial
  Probe
acagtgcttttgcagtttatcccat

SEQ ID NO: 321685 - DNA, 25 bp, Artificial
  Probe
tcgtggcgtagttgtccacctcgca

SEQ ID NO: 321686 - DNA, 25 bp, Artificial
  Probe
agttctctcaagctagtgtgcccct

SEQ ID NO: 321687 - DNA, 25 bp, Artificial
  Probe
tccagtgccaaagaagccggcgaag

SEQ ID NO: 321688 - DNA, 25 bp, Artificial
  Probe
ccaagcaaacttgtgtagaaacgac

SEQ ID NO: 321689 - DNA, 25 bp, Artificial
  Probe
cgtagttgtccacctcgcaggagcc

SEQ ID NO: 321690 - DNA, 25 bp, Artificial
  Probe
aacagatggatcctcttgacaagaa

SEQ ID NO: 321691 - DNA, 25 bp, Artificial
  Probe
tagttgtccacctcgcaggagccgt

SEQ ID NO: 321692 - DNA, 25 bp, Artificial
  Probe
ttgtgtagaaacgacacctgtaggt

SEQ ID NO: 321693 - DNA, 25 bp, Artificial
  Probe
tggcgtagttgtccacctcgcagga

SEQ ID NO: 321694 - DNA, 25 bp, Artificial
  Probe
agtcctgaagcctcatgcagacatc

SEQ ID NO: 321695 - DNA, 25 bp, Artificial
  Probe
ctcttgacaagaaggagcgaagggc

SEQ ID NO: 321696 - DNA, 25 bp, Artificial
  Probe
ccgtcgtggcgtagttgtccacctc

SEQ ID NO: 321697 - DNA, 25 bp, Artificial
  Probe
gtggcgtagttgtccacctcgcagg

SEQ ID NO: 321698 - DNA, 25 bp, Artificial
  Probe
ccagtgccaaagaagccggcgaagg

SEQ ID NO: 321699 - DNA, 25 bp, Artificial
  Probe
ttttctgggccaagcaaacttgtgt

SEQ ID NO: 321700 - DNA, 25 bp, Artificial
  Probe
ctgggccaagcaaacttgtgtagaa

SEQ ID NO: 321701 - DNA, 25 bp, Artificial
  Probe
gatcctcttgacaagaaggagcgaa

SEQ ID NO: 321702 - DNA, 25 bp, Artificial
  Probe
attttctgggccaagcaaacttgtg

SEQ ID NO: 321703 - DNA, 25 bp, Artificial
  Probe
tctgggccaagcaaacttgtgtaga

SEQ ID NO: 321704 - DNA, 25 bp, Artificial
  Probe
gaaacagatggatcctcttgacaag

SEQ ID NO: 321705 - DNA, 25 bp, Artificial
  Probe
cctcctcagttctctcaagctagtg

SEQ ID NO: 321706 - DNA, 25 bp, Artificial
  Probe
gttctctcaagctagtgtgccccta

SEQ ID NO: 321707 - DNA, 25 bp, Artificial
  Probe
acagatggatcctcttgacaagaag

SEQ ID NO: 321708 - DNA, 25 bp, Artificial
  Probe
atcctcttgacaagaaggagcgaag

SEQ ID NO: 321709 - DNA, 25 bp, Artificial
  Probe
gcgtagttgtccacctcgcaggagc

SEQ ID NO: 321710 - DNA, 25 bp, Artificial
  Probe
ctcctcagttctctcaagctagtgt

SEQ ID NO: 321711 - DNA, 25 bp, Artificial
  Probe
tcctccagtgccaaagaagccggcg

SEQ ID NO: 321712 - DNA, 25 bp, Artificial
  Probe
ctcagttctctcaagctagtgtgcc

SEQ ID NO: 321713 - DNA, 25 bp, Artificial
  Probe
ttcatcagttaaaggccaataattg

SEQ ID NO: 321714 - DNA, 25 bp, Artificial
  Probe
ggccaagcaaacttgtgtagaaacg

SEQ ID NO: 321715 - DNA, 25 bp, Artificial
  Probe
gtagttgtccacctcgcaggagccg

SEQ ID NO: 321716 - DNA, 25 bp, Artificial
  Probe
accgtcgtggcgtagttgtccacct

SEQ ID NO: 321717 - DNA, 25 bp, Artificial
  Probe
cgtcgtggcgtagttgtccacctcg

SEQ ID NO: 321718 - DNA, 25 bp, Artificial
  Probe
ctctcaagctagtgtgcccctagaa

SEQ ID NO: 321719 - DNA, 25 bp, Artificial
  Probe
aaacgacacctgtaggtcactcacc

SEQ ID NO: 321720 - DNA, 25 bp, Artificial
  Probe
tgtgtagaaacgacacctgtaggtc

SEQ ID NO: 321721 - DNA, 25 bp, Artificial
  Probe
ggatcctcttgacaagaaggagcga

SEQ ID NO: 321722 - DNA, 25 bp, Artificial
  Probe
tagaaacgacacctgtaggtcactc

SEQ ID NO: 321723 - DNA, 25 bp, Artificial
  Probe
tcctcagttctctcaagctagtgtg

SEQ ID NO: 321724 - DNA, 25 bp, Artificial
  Probe
gaaacgacacctgtaggtcactcac

SEQ ID NO: 321725 - DNA, 25 bp, Artificial
  Probe
tgatgaacttcatcagttaaaggcc

SEQ ID NO: 321726 - DNA, 25 bp, Artificial
  Probe
ctcaagctagtgtgcccctagaact

SEQ ID NO: 321727 - DNA, 25 bp, Artificial
  Probe
ctgaagcctcatgcagacatccaaa

SEQ ID NO: 321728 - DNA, 25 bp, Artificial
  Probe
gaacttcatcagttaaaggccaata

SEQ ID NO: 321729 - DNA, 25 bp, Artificial
  Probe
gaagcctcatgcagacatccaaacc

SEQ ID NO: 321730 - DNA, 25 bp, Artificial
  Probe
tggatcctcttgacaagaaggagcg

SEQ ID NO: 321731 - DNA, 25 bp, Artificial
  Probe
ttccccagctgatgaggagccggcc

SEQ ID NO: 321732 - DNA, 25 bp, Artificial
  Probe
tgctctccacatgcacacggaactg

SEQ ID NO: 321733 - DNA, 25 bp, Artificial
  Probe
gtattagccccgatgcctgagaacc

SEQ ID NO: 321734 - DNA, 25 bp, Artificial
  Probe
actggactgctgagacggctggctt

SEQ ID NO: 321735 - DNA, 25 bp, Artificial
  Probe
tcagttcccacctggttgggtttct

SEQ ID NO: 321736 - DNA, 25 bp, Artificial
  Probe
tgttacttcccaggtcatcgtgggt

SEQ ID NO: 321737 - DNA, 25 bp, Artificial
  Probe
tgatgtacatattccctccagtctg

SEQ ID NO: 321738 - DNA, 25 bp, Artificial
  Probe
tggagacctctgctctccacatgca

SEQ ID NO: 321739 - DNA, 25 bp, Artificial
  Probe
catcgaggccacgaccatcgagggc

SEQ ID NO: 321740 - DNA, 25 bp, Artificial
  Probe
aagctcattatcttcacagggtgag

SEQ ID NO: 321741 - DNA, 25 bp, Artificial
  Probe
gaaaccgtccaagctaagctcatta

SEQ ID NO: 321742 - DNA, 25 bp, Artificial
  Probe
atgaagggcaactgccgctatgaga

SEQ ID NO: 321743 - DNA, 25 bp, Artificial
  Probe
ttcagtgatggcacattcatatctg

SEQ ID NO: 321744 - DNA, 25 bp, Artificial
  Probe
acatgacgtccctagccatcgaggc

SEQ ID NO: 321745 - DNA, 25 bp, Artificial
  Probe
aggagacatgtcaaaccgccctgtc

SEQ ID NO: 321746 - DNA, 25 bp, Artificial
  Probe
tggacacgggggaccccatggccac

SEQ ID NO: 321747 - DNA, 25 bp, Artificial
  Probe
ggcatcagttgttttctatgaaaac

SEQ ID NO: 321748 - DNA, 25 bp, Artificial
  Probe
tgagaacaactgtgccttctaccac

SEQ ID NO: 321749 - DNA, 25 bp, Artificial
  Probe
tgctgagacggctggcttcactttg

SEQ ID NO: 321750 - DNA, 25 bp, Artificial
  Probe
tgtgccttctaccacccaggggtca

SEQ ID NO: 321751 - DNA, 25 bp, Artificial
  Probe
gctcaagctggctgaagctgagttc

SEQ ID NO: 321752 - DNA, 25 bp, Artificial
  Probe
ggagatttgccctgtgccccaaacc

SEQ ID NO: 321753 - DNA, 25 bp, Artificial
  Probe
atattccctccagtctggagcggag

SEQ ID NO: 321754 - DNA, 25 bp, Artificial
  Probe
tcggtctcatgaaggccctggacac

SEQ ID NO: 321755 - DNA, 25 bp, Artificial
  Probe
aagctaagctcattatcttcacagg

SEQ ID NO: 321756 - DNA, 25 bp, Artificial
  Probe
cagtcacggaggagacatgtcaaac

SEQ ID NO: 321757 - DNA, 25 bp, Artificial
  Probe
ggtttctgggggtttctgattcctg

SEQ ID NO: 321758 - DNA, 25 bp, Artificial
  Probe
ttatggcttctgtgaggcccacttt

SEQ ID NO: 321759 - DNA, 25 bp, Artificial
  Probe
tcctggtgtgcattgatgtacatat

SEQ ID NO: 321760 - DNA, 25 bp, Artificial
  Probe
tcgaggccacgaccatcgagggcca

SEQ ID NO: 321761 - DNA, 25 bp, Artificial
  Probe
cagttcccacctggttgggtttctg

SEQ ID NO: 321762 - DNA, 25 bp, Artificial
  Probe
cactgagggctcaagctggctgaag

SEQ ID NO: 321763 - DNA, 25 bp, Artificial
  Probe
tgcctgagaacctgaagccggccac

SEQ ID NO: 321764 - DNA, 25 bp, Artificial
  Probe
ccctgtctgccgacacttcatgatg

SEQ ID NO: 321765 - DNA, 25 bp, Artificial
  Probe
cttttccccagctgatgaggagccg

SEQ ID NO: 321766 - DNA, 25 bp, Artificial
  Probe
ttgtgccccacatgggccagtcact

SEQ ID NO: 321767 - DNA, 25 bp, Artificial
  Probe
catcggtctcatgagggccctggag

SEQ ID NO: 321768 - DNA, 25 bp, Artificial
  Probe
tgaagctgagttctggaactacccc

SEQ ID NO: 321769 - DNA, 25 bp, Artificial
  Probe
gaggccacagtcacggaggagacat

SEQ ID NO: 321770 - DNA, 25 bp, Artificial
  Probe
ccaccgagggcatgatggaggccac

SEQ ID NO: 321771 - DNA, 25 bp, Artificial
  Probe
caccgagggcatgatggaggccaca

SEQ ID NO: 321772 - DNA, 25 bp, Artificial
  Probe
gcatgggcagtggacatcggtctca

SEQ ID NO: 321773 - DNA, 25 bp, Artificial
  Probe
gagacatgtcaaaccgccctgtctg

SEQ ID NO: 321774 - DNA, 25 bp, Artificial
  Probe
aggggtaccatatatcccactgcac

SEQ ID NO: 321775 - DNA, 25 bp, Artificial
  Probe
gcacccctgtggactgcagctttgc

SEQ ID NO: 321776 - DNA, 25 bp, Artificial
  Probe
gtgtccagtggaagttgtatctggc

SEQ ID NO: 321777 - DNA, 25 bp, Artificial
  Probe
cgcccactgtcatgggtggaatgcc

SEQ ID NO: 321778 - DNA, 25 bp, Artificial
  Probe
ctcgggggctctgtgcaaccaggtc

SEQ ID NO: 321779 - DNA, 25 bp, Artificial
  Probe
gttgcatccggaatctatacatcaa

SEQ ID NO: 321780 - DNA, 25 bp, Artificial
  Probe
tcaacgatgggcagttccacacagt

SEQ ID NO: 321781 - DNA, 25 bp, Artificial
  Probe
gcagaactggcctcgggccaacatc

SEQ ID NO: 321782 - DNA, 25 bp, Artificial
  Probe
ggctgcgagccctgccgaaaactct

SEQ ID NO: 321783 - DNA, 25 bp, Artificial
  Probe
ccatggacaactttggaaagcacta

SEQ ID NO: 321784 - DNA, 25 bp, Artificial
  Probe
ctgtgccccgtgtgcgtaacgtgcg

SEQ ID NO: 321785 - DNA, 25 bp, Artificial
  Probe
gtgaccagccagtggacggcccctg

SEQ ID NO: 321786 - DNA, 25 bp, Artificial
  Probe
ggggcctgcactgtgaccagccagt

SEQ ID NO: 321787 - DNA, 25 bp, Artificial
  Probe
gagaagcccaccaagtgcggctgtg

SEQ ID NO: 321788 - DNA, 25 bp, Artificial
  Probe
caagacacagatgaagccgggcgtg

SEQ ID NO: 321789 - DNA, 25 bp, Artificial
  Probe
gaggtcccgaatgtgagaagttgct

SEQ ID NO: 321790 - DNA, 25 bp, Artificial
  Probe
gcagcgatgggacctcgtttgctga

SEQ ID NO: 321791 - DNA, 25 bp, Artificial
  Probe
ctgcatggtcactgccaggcctcgg

SEQ ID NO: 321792 - DNA, 25 bp, Artificial
  Probe
caccgggtccagaggggctatgcca

SEQ ID NO: 321793 - DNA, 25 bp, Artificial
  Probe
tgtggcagatcctcaatggcaccag

SEQ ID NO: 321794 - DNA, 25 bp, Artificial
  Probe
cggggacactgagctgcctttccag

SEQ ID NO: 321795 - DNA, 25 bp, Artificial
  Probe
tactcgggggctctgtgcaaccagg

SEQ ID NO: 321796 - DNA, 25 bp, Artificial
  Probe
tgtgaactcagctgccttccgcctg

SEQ ID NO: 321797 - DNA, 25 bp, Artificial
  Probe
ccacgcgcccactgtcatgggtgga

SEQ ID NO: 321798 - DNA, 25 bp, Artificial
  Probe
gggataatgaccacattgcagttga

SEQ ID NO: 321799 - DNA, 25 bp, Artificial
  Probe
acctttgaccagatggtgaacctct

SEQ ID NO: 321800 - DNA, 25 bp, Artificial
  Probe
atcctcctctacaatggggataatg

SEQ ID NO: 321801 - DNA, 25 bp, Artificial
  Probe
gtggagaagcccaccaagtgcggct

SEQ ID NO: 321802 - DNA, 25 bp, Artificial
  Probe
ctcgggccaacatcactcttcaggt

SEQ ID NO: 321803 - DNA, 25 bp, Artificial
  Probe
ctacatggcatttgccagcccaacg

SEQ ID NO: 321804 - DNA, 25 bp, Artificial
  Probe
agctggtgacctttgaccagatggt

SEQ ID NO: 321805 - DNA, 25 bp, Artificial
  Probe
tgtccgggactttcaccgggtccag

SEQ ID NO: 321806 - DNA, 25 bp, Artificial
  Probe
agccccatgaccatggacaactttg

SEQ ID NO: 321807 - DNA, 25 bp, Artificial
  Probe
cctgccatggccacaagtgtgtcca

SEQ ID NO: 321808 - DNA, 25 bp, Artificial
  Probe
aatgcgtgcccctcgatgcacttgc

SEQ ID NO: 321809 - DNA, 25 bp, Artificial
  Probe
ctgtgtgagcaagagtccgagtgcc

SEQ ID NO: 321810 - DNA, 25 bp, Artificial
  Probe
taccccagctctgctatctacagtg

SEQ ID NO: 321811 - DNA, 25 bp, Artificial
  Probe
ggcccgtatgccagtgcctaccagg

SEQ ID NO: 321812 - DNA, 25 bp, Artificial
  Probe
atgtgagaagttgctcagtgtcaac

SEQ ID NO: 321813 - DNA, 25 bp, Artificial
  Probe
ctatacatcaacaacgaactgcagg

SEQ ID NO: 321814 - DNA, 25 bp, Artificial
  Probe
ggatgcccgtggatgtgaactcagc

SEQ ID NO: 321815 - DNA, 25 bp, Artificial
  Probe
tttcaggcgagctgtgtgagcaaga

SEQ ID NO: 321816 - DNA, 25 bp, Artificial
  Probe
gctgtgccccgtgtgcgtaacgtgc

SEQ ID NO: 321817 - DNA, 25 bp, Artificial
  Probe
atgggaaatgcgtgcccctcgatgc

SEQ ID NO: 321818 - DNA, 25 bp, Artificial
  Probe
cggaggaagctcaccttcgagtgca

SEQ ID NO: 321819 - DNA, 25 bp, Artificial
  Probe
cccgtgtgccactgcgaggctggct

SEQ ID NO: 321820 - DNA, 25 bp, Artificial
  Probe
gtgttagctacgacccaggcagcta

SEQ ID NO: 321821 - DNA, 25 bp, Artificial
  Probe
caccagaggggcacactgtgtgtgc

SEQ ID NO: 321822 - DNA, 25 bp, Artificial
  Probe
gtagaccagggcagccggcccgtat

SEQ ID NO: 321823 - DNA, 25 bp, Artificial
  Probe
gcaccaaaccaacaggaatagaggc

SEQ ID NO: 321824 - DNA, 25 bp, Artificial
  Probe
atactgaccccactgaaagtgcaac

SEQ ID NO: 321825 - DNA, 25 bp, Artificial
  Probe
tccccaacagtgtgactggagaaaa

SEQ ID NO: 321826 - DNA, 25 bp, Artificial
  Probe
agtgcaaccagtaagtgaaaacacc

SEQ ID NO: 321827 - DNA, 25 bp, Artificial
  Probe
gaaagtgcaaccagtaagtgaaaac

SEQ ID NO: 321828 - DNA, 25 bp, Artificial
  Probe
cacccaagcctgctggggagcatgg

SEQ ID NO: 321829 - DNA, 25 bp, Artificial
  Probe
cgcaccaaaccaacaggaatagagg

SEQ ID NO: 321830 - DNA, 25 bp, Artificial
  Probe
acccaagcctgctggggagcatgga

SEQ ID NO: 321831 - DNA, 25 bp, Artificial
  Probe
tacagcagcatgtaccgaactcctc

SEQ ID NO: 321832 - DNA, 25 bp, Artificial
  Probe
cggccgcggcaatgtacagcagcat

SEQ ID NO: 321833 - DNA, 25 bp, Artificial
  Probe
gggccgcaaagctccccaacagtgt

SEQ ID NO: 321834 - DNA, 25 bp, Artificial
  Probe
tgcagaggatgtttccgtcgcctta

SEQ ID NO: 321835 - DNA, 25 bp, Artificial
  Probe
ggagaaaatactgaccccactgaaa

SEQ ID NO: 321836 - DNA, 25 bp, Artificial
  Probe
caatgtacagcagcatgtaccgaac

SEQ ID NO: 321837 - DNA, 25 bp, Artificial
  Probe
aagctccccaacagtgtgactggag

SEQ ID NO: 321838 - DNA, 25 bp, Artificial
  Probe
ccaaaccaacaggaatagaggcaga

SEQ ID NO: 321839 - DNA, 25 bp, Artificial
  Probe
tgtacagcagcatgtaccgaactcc

SEQ ID NO: 321840 - DNA, 25 bp, Artificial
  Probe
agctccccaacagtgtgactggaga

SEQ ID NO: 321841 - DNA, 25 bp, Artificial
  Probe
atccgcagctgcagcggccactggt

SEQ ID NO: 321842 - DNA, 25 bp, Artificial
  Probe
tactgaccccactgaaagtgcaacc

SEQ ID NO: 321843 - DNA, 25 bp, Artificial
  Probe
ccaacagtgtgactggagaaaatac

SEQ ID NO: 321844 - DNA, 25 bp, Artificial
  Probe
ccgcggcaatgtacagcagcatgta

SEQ ID NO: 321845 - DNA, 25 bp, Artificial
  Probe
gagaaaatactgaccccactgaaag

SEQ ID NO: 321846 - DNA, 25 bp, Artificial
  Probe
atgtacagcagcatgtaccgaactc

SEQ ID NO: 321847 - DNA, 25 bp, Artificial
  Probe
cgcggcaatgtacagcagcatgtac

SEQ ID NO: 321848 - DNA, 25 bp, Artificial
  Probe
ggcaatgtacagcagcatgtaccga

SEQ ID NO: 321849 - DNA, 25 bp, Artificial
  Probe
aaaccaacaggaatagaggcagacg

SEQ ID NO: 321850 - DNA, 25 bp, Artificial
  Probe
gcggccgcggcaatgtacagcagca

SEQ ID NO: 321851 - DNA, 25 bp, Artificial
  Probe
caaaccaacaggaatagaggcagac

SEQ ID NO: 321852 - DNA, 25 bp, Artificial
  Probe
ctgaaagtgcaaccagtaagtgaaa

SEQ ID NO: 321853 - DNA, 25 bp, Artificial
  Probe
caccaaaccaacaggaatagaggca

SEQ ID NO: 321854 - DNA, 25 bp, Artificial
  Probe
caacagtgtgactggagaaaatact

SEQ ID NO: 321855 - DNA, 25 bp, Artificial
  Probe
ccgcaccaaaccaacaggaatagag

SEQ ID NO: 321856 - DNA, 25 bp, Artificial
  Probe
ccccaacagtgtgactggagaaaat

SEQ ID NO: 321857 - DNA, 25 bp, Artificial
  Probe
aagtgcaaccagtaagtgaaaacac

SEQ ID NO: 321858 - DNA, 25 bp, Artificial
  Probe
cggcaatgtacagcagcatgtaccg

SEQ ID NO: 321859 - DNA, 25 bp, Artificial
  Probe
aaagctccccaacagtgtgactgga

SEQ ID NO: 321860 - DNA, 25 bp, Artificial
  Probe
ggccgcggcaatgtacagcagcatg

SEQ ID NO: 321861 - DNA, 25 bp, Artificial
  Probe
gcaaagctccccaacagtgtgactg

SEQ ID NO: 321862 - DNA, 25 bp, Artificial
  Probe
aatgtacagcagcatgtaccgaact

SEQ ID NO: 321863 - DNA, 25 bp, Artificial
  Probe
aggatgtttccgtcgccttatttct

SEQ ID NO: 321864 - DNA, 25 bp, Artificial
  Probe
ccacccaagcctgctggggagcatg

SEQ ID NO: 321865 - DNA, 25 bp, Artificial
  Probe
ctccccaacagtgtgactggagaaa

SEQ ID NO: 321866 - DNA, 25 bp, Artificial
  Probe
gctgcagaggatgtttccgtcgcct

SEQ ID NO: 321867 - DNA, 25 bp, Artificial
  Probe
actgaccccactgaaagtgcaacca

SEQ ID NO: 321868 - DNA, 25 bp, Artificial
  Probe
agggccgcaaagctccccaacagtg

SEQ ID NO: 321869 - DNA, 25 bp, Artificial
  Probe
tgaggaactggcttaagatgttcac

SEQ ID NO: 321870 - DNA, 25 bp, Artificial
  Probe
tagccatggttgatgtaagaactca

SEQ ID NO: 321871 - DNA, 25 bp, Artificial
  Probe
gatggtacacaaatccatggtggag

SEQ ID NO: 321872 - DNA, 25 bp, Artificial
  Probe
aaatgaaaatgttcctctctgcctg

SEQ ID NO: 321873 - DNA, 25 bp, Artificial
  Probe
ctgggcatccaggacatcttcacca

SEQ ID NO: 321874 - DNA, 25 bp, Artificial
  Probe
gtcaggaacaacagcagctgcctcc

SEQ ID NO: 321875 - DNA, 25 bp, Artificial
  Probe
ggaattctcttcacactcagatctg

SEQ ID NO: 321876 - DNA, 25 bp, Artificial
  Probe
agacctcagacctctcttgctcagt

SEQ ID NO: 321877 - DNA, 25 bp, Artificial
  Probe
catacttgagcaatcagggtaaaag

SEQ ID NO: 321878 - DNA, 25 bp, Artificial
  Probe
gcaaagtgattcagccctgaggtgg

SEQ ID NO: 321879 - DNA, 25 bp, Artificial
  Probe
gctgcctccacaggaattctcttca

SEQ ID NO: 321880 - DNA, 25 bp, Artificial
  Probe
gttccaccatgaacaaaggtatcaa

SEQ ID NO: 321881 - DNA, 25 bp, Artificial
  Probe
ctccccaagttctccattgagggta

SEQ ID NO: 321882 - DNA, 25 bp, Artificial
  Probe
aggtgggactccttctgaaactcac

SEQ ID NO: 321883 - DNA, 25 bp, Artificial
  Probe
tagataaaggccaccaggaagcacg

SEQ ID NO: 321884 - DNA, 25 bp, Artificial
  Probe
atgttcacaaagagacagttagatc

SEQ ID NO: 321885 - DNA, 25 bp, Artificial
  Probe
ctcgaccaaaacatttcctgcacgg

SEQ ID NO: 321886 - DNA, 25 bp, Artificial
  Probe
tcagtttaatagcatacttgagcaa

SEQ ID NO: 321887 - DNA, 25 bp, Artificial
  Probe
ggatggtacaaacctctatttcatt

SEQ ID NO: 321888 - DNA, 25 bp, Artificial
  Probe
ggttataaacctggtctcacaccta

SEQ ID NO: 321889 - DNA, 25 bp, Artificial
  Probe
gtggggatcccttaccaaggcaata

SEQ ID NO: 321890 - DNA, 25 bp, Artificial
  Probe
tccattgagggtacctataaactgg

SEQ ID NO: 321891 - DNA, 25 bp, Artificial
  Probe
ctcttggtagctagtgattttcata

SEQ ID NO: 321892 - DNA, 25 bp, Artificial
  Probe
cccaagctgggcatccaggacatct

SEQ ID NO: 321893 - DNA, 25 bp, Artificial
  Probe
agaagatcaatatcctggtggaagc

SEQ ID NO: 321894 - DNA, 25 bp, Artificial
  Probe
ccaaaacatttcctgcacggtggtg

SEQ ID NO: 321895 - DNA, 25 bp, Artificial
  Probe
cacccatgctgacttgtctggcctt

SEQ ID NO: 321896 - DNA, 25 bp, Artificial
  Probe
ggtaaaagtgttccaccatgaacaa

SEQ ID NO: 321897 - DNA, 25 bp, Artificial
  Probe
aattgttacacaagggttggctact

SEQ ID NO: 321898 - DNA, 25 bp, Artificial
  Probe
tgccaatgatgaaccgcgaagatat

SEQ ID NO: 321899 - DNA, 25 bp, Artificial
  Probe
ccattcagtgatctgtgaaattgtt

SEQ ID NO: 321900 - DNA, 25 bp, Artificial
  Probe
cagtagcaccaacacccacaagatg

SEQ ID NO: 321901 - DNA, 25 bp, Artificial
  Probe
cctttctggtggtcattatggatgg

SEQ ID NO: 321902 - DNA, 25 bp, Artificial
  Probe
caccaatattaagttgtctgagatg

SEQ ID NO: 321903 - DNA, 25 bp, Artificial
  Probe
ttcattattgacactgatgctaaag

SEQ ID NO: 321904 - DNA, 25 bp, Artificial
  Probe
ttcttcccagcgagggcaagatgaa

SEQ ID NO: 321905 - DNA, 25 bp, Artificial
  Probe
ctggctgactgcagttggatgttag

SEQ ID NO: 321906 - DNA, 25 bp, Artificial
  Probe
gaccacaccaatattaagttgtctg

SEQ ID NO: 321907 - DNA, 25 bp, Artificial
  Probe
aggtatcaaatcacaaacctggctg

SEQ ID NO: 321908 - DNA, 25 bp, Artificial
  Probe
acatagattgcagactgacttgttg

SEQ ID NO: 321909 - DNA, 25 bp, Artificial
  Probe
ctaatagctatgtaactcgaaaatg

SEQ ID NO: 321910 - DNA, 25 bp, Artificial
  Probe
caagatgtgctcttgctctattttt

SEQ ID NO: 321911 - DNA, 25 bp, Artificial
  Probe
gttcacaaagagacagttagatctt

SEQ ID NO: 321912 - DNA, 25 bp, Artificial
  Probe
gctaatagctatgtaactcgaaaat

SEQ ID NO: 321913 - DNA, 25 bp, Artificial
  Probe
aggctggtcagcatagataaaggcc

SEQ ID NO: 321914 - DNA, 25 bp, Artificial
  Probe
gtctggccttactgaccacaccaat

SEQ ID NO: 321915 - DNA, 25 bp, Artificial
  Probe
ggaggccgtgcattacatgcagagt

SEQ ID NO: 321916 - DNA, 25 bp, Artificial
  Probe
agctgctgctgtagcgtaggcctca

SEQ ID NO: 321917 - DNA, 25 bp, Artificial
  Probe
ttcaggataagttccgtctggacct

SEQ ID NO: 321918 - DNA, 25 bp, Artificial
  Probe
gttccgtctggacctgtcagatgag

SEQ ID NO: 321919 - DNA, 25 bp, Artificial
  Probe
cacatgagaaaccactgctgtgtac

SEQ ID NO: 321920 - DNA, 25 bp, Artificial
  Probe
gggtttgtctaaagctgctgctgta

SEQ ID NO: 321921 - DNA, 25 bp, Artificial
  Probe
cggccgagagggtttgtctaaagct

SEQ ID NO: 321922 - DNA, 25 bp, Artificial
  Probe
agttgtgaagccatcctcagctgca

SEQ ID NO: 321923 - DNA, 25 bp, Artificial
  Probe
gtgtccaggagttacggcatgctca

SEQ ID NO: 321924 - DNA, 25 bp, Artificial
  Probe
cctgtcagatgaggaggccgtgcat

SEQ ID NO: 321925 - DNA, 25 bp, Artificial
  Probe
aaggtgtccaggagttacggcatgc

SEQ ID NO: 321926 - DNA, 25 bp, Artificial
  Probe
aaccactgctgtgtactgaggacat

SEQ ID NO: 321927 - DNA, 25 bp, Artificial
  Probe
tctggacctgtcagatgaggaggcc

SEQ ID NO: 321928 - DNA, 25 bp, Artificial
  Probe
tgagaaaccactgctgtgtactgag

SEQ ID NO: 321929 - DNA, 25 bp, Artificial
  Probe
ataagttccgtctggacctgtcaga

SEQ ID NO: 321930 - DNA, 25 bp, Artificial
  Probe
ataagtttgcccagtactggagaaa

SEQ ID NO: 321931 - DNA, 25 bp, Artificial
  Probe
ggataagttccgtctggacctgtca

SEQ ID NO: 321932 - DNA, 25 bp, Artificial
  Probe
agaaggtgtccaggagttacggcat

SEQ ID NO: 321933 - DNA, 25 bp, Artificial
  Probe
tgaggaggccgtgcattacatgcag

SEQ ID NO: 321934 - DNA, 25 bp, Artificial
  Probe
tgaagccatcctcagctgcaaatga

SEQ ID NO: 321935 - DNA, 25 bp, Artificial
  Probe
ttgcccagtactggagaaaatgaaa

SEQ ID NO: 321936 - DNA, 25 bp, Artificial
  Probe
aaagctgctgctgtagcgtaggcct

SEQ ID NO: 321937 - DNA, 25 bp, Artificial
  Probe
aagccatcctcagctgcaaatgact

SEQ ID NO: 321938 - DNA, 25 bp, Artificial
  Probe
gagaaaccactgctgtgtactgagg

SEQ ID NO: 321939 - DNA, 25 bp, Artificial
  Probe
atcgacgaaagtgttcacgccctgt

SEQ ID NO: 321940 - DNA, 25 bp, Artificial
  Probe
tctaaagctgctgctgtagcgtagg

SEQ ID NO: 321941 - DNA, 25 bp, Artificial
  Probe
gcccagtactggagaaaatgaaagt

SEQ ID NO: 321942 - DNA, 25 bp, Artificial
  Probe
gtgaagccatcctcagctgcaaatg

SEQ ID NO: 321943 - DNA, 25 bp, Artificial
  Probe
acacatgagaaaccactgctgtgta

SEQ ID NO: 321944 - DNA, 25 bp, Artificial
  Probe
ccgtctggacctgtcagatgaggag

SEQ ID NO: 321945 - DNA, 25 bp, Artificial
  Probe
ctgctgtgtactgaggacattagag

SEQ ID NO: 321946 - DNA, 25 bp, Artificial
  Probe
ggtttgtctaaagctgctgctgtag

SEQ ID NO: 321947 - DNA, 25 bp, Artificial
  Probe
tcgacgaaagtgttcacgccctgtt

SEQ ID NO: 321948 - DNA, 25 bp, Artificial
  Probe
acctgtcagatgaggaggccgtgca

SEQ ID NO: 321949 - DNA, 25 bp, Artificial
  Probe
gaaaccactgctgtgtactgaggac

SEQ ID NO: 321950 - DNA, 25 bp, Artificial
  Probe
tgtcagatgaggaggccgtgcatta

SEQ ID NO: 321951 - DNA, 25 bp, Artificial
  Probe
gacgaaagtgttcacgccctgttcg

SEQ ID NO: 321952 - DNA, 25 bp, Artificial
  Probe
aaaccactgctgtgtactgaggaca

SEQ ID NO: 321953 - DNA, 25 bp, Artificial
  Probe
ggtgtccaggagttacggcatgctc

SEQ ID NO: 321954 - DNA, 25 bp, Artificial
  Probe
ttccgtctggacctgtcagatgagg

SEQ ID NO: 321955 - DNA, 25 bp, Artificial
  Probe
gtttgcccagtactggagaaaatga

SEQ ID NO: 321956 - DNA, 25 bp, Artificial
  Probe
tgtccaggagttacggcatgctcaa

SEQ ID NO: 321957 - DNA, 25 bp, Artificial
  Probe
ccactgctgaaatccggccgagagg

SEQ ID NO: 321958 - DNA, 25 bp, Artificial
  Probe
gaaatccggccgagagggtttgtct

SEQ ID NO: 321959 - DNA, 25 bp, Artificial
  Probe
ctaaagctgctgctgtagcgtaggc

SEQ ID NO: 321960 - DNA, 25 bp, Artificial
  Probe
atgaggaggccgtgcattacatgca

SEQ ID NO: 321961 - DNA, 25 bp, Artificial
  Probe
gttggttcttctgctccttcgagtt

SEQ ID NO: 321962 - DNA, 25 bp, Artificial
  Probe
ctgctccttcgagttcatgcagctg

SEQ ID NO: 321963 - DNA, 25 bp, Artificial
  Probe
ctccttcgagttcatgcagctgtct

SEQ ID NO: 321964 - DNA, 25 bp, Artificial
  Probe
gatcctattttctgtctcaaaaaaa

SEQ ID NO: 321965 - DNA, 25 bp, Artificial
  Probe
tgctccttcgagttcatgcagctgt

SEQ ID NO: 321966 - DNA, 25 bp, Artificial
  Probe
tgtctcagtggaaactgccacatgc

SEQ ID NO: 321967 - DNA, 25 bp, Artificial
  Probe
agttcatgcagctgtctcagtggaa

SEQ ID NO: 321968 - DNA, 25 bp, Artificial
  Probe
gtcctctgtggttggttcttctgct

SEQ ID NO: 321969 - DNA, 25 bp, Artificial
  Probe
gtggttggttcttctgctccttcga

SEQ ID NO: 321970 - DNA, 25 bp, Artificial
  Probe
tctcagtggaaactgccacatgcac

SEQ ID NO: 321971 - DNA, 25 bp, Artificial
  Probe
tccttcgagttcatgcagctgtctc

SEQ ID NO: 321972 - DNA, 25 bp, Artificial
  Probe
ggttcttctgctccttcgagttcat

SEQ ID NO: 321973 - DNA, 25 bp, Artificial
  Probe
gagttcatgcagctgtctcagtgga

SEQ ID NO: 321974 - DNA, 25 bp, Artificial
  Probe
gttcatgcagctgtctcagtggaaa

SEQ ID NO: 321975 - DNA, 25 bp, Artificial
  Probe
ttcgagttcatgcagctgtctcagt

SEQ ID NO: 321976 - DNA, 25 bp, Artificial
  Probe
tcgagttcatgcagctgtctcagtg

SEQ ID NO: 321977 - DNA, 25 bp, Artificial
  Probe
ttggttcttctgctccttcgagttc

SEQ ID NO: 321978 - DNA, 25 bp, Artificial
  Probe
cctctgtggttggttcttctgctcc

SEQ ID NO: 321979 - DNA, 25 bp, Artificial
  Probe
tctgctccttcgagttcatgcagct

SEQ ID NO: 321980 - DNA, 25 bp, Artificial
  Probe
cgagttcatgcagctgtctcagtgg

SEQ ID NO: 321981 - DNA, 25 bp, Artificial
  Probe
tcctctgtggttggttcttctgctc

SEQ ID NO: 321982 - DNA, 25 bp, Artificial
  Probe
tcatgcagctgtctcagtggaaact

SEQ ID NO: 321983 - DNA, 25 bp, Artificial
  Probe
tcttctgctccttcgagttcatgca

SEQ ID NO: 321984 - DNA, 25 bp, Artificial
  Probe
ggaaactgccacatgcacctctcta

SEQ ID NO: 321985 - DNA, 25 bp, Artificial
  Probe
gtctcagtggaaactgccacatgca

SEQ ID NO: 321986 - DNA, 25 bp, Artificial
  Probe
catgcagctgtctcagtggaaactg

SEQ ID NO: 321987 - DNA, 25 bp, Artificial
  Probe
gaaactgccacatgcacctctctag

SEQ ID NO: 321988 - DNA, 25 bp, Artificial
  Probe
cttctgctccttcgagttcatgcag

SEQ ID NO: 321989 - DNA, 25 bp, Artificial
  Probe
cttcgagttcatgcagctgtctcag

SEQ ID NO: 321990 - DNA, 25 bp, Artificial
  Probe
ctgtctcagtggaaactgccacatg

SEQ ID NO: 321991 - DNA, 25 bp, Artificial
  Probe
gctccttcgagttcatgcagctgtc

SEQ ID NO: 321992 - DNA, 25 bp, Artificial
  Probe
tgtggttggttcttctgctccttcg

SEQ ID NO: 321993 - DNA, 25 bp, Artificial
  Probe
atgcagctgtctcagtggaaactgc

SEQ ID NO: 321994 - DNA, 25 bp, Artificial
  Probe
gttcttctgctccttcgagttcatg

SEQ ID NO: 321995 - DNA, 25 bp, Artificial
  Probe
gtggaaactgccacatgcacctctc

SEQ ID NO: 321996 - DNA, 25 bp, Artificial
  Probe
tggttggttcttctgctccttcgag

SEQ ID NO: 321997 - DNA, 25 bp, Artificial
  Probe
tggttcttctgctccttcgagttca

SEQ ID NO: 321998 - DNA, 25 bp, Artificial
  Probe
ctctgtggttggttcttctgctcct

SEQ ID NO: 321999 - DNA, 25 bp, Artificial
  Probe
ccttcgagttcatgcagctgtctca

SEQ ID NO: 322000 - DNA, 25 bp, Artificial
  Probe
ctgtggttggttcttctgctccttc

SEQ ID NO: 322001 - DNA, 25 bp, Artificial
  Probe
ggttggttcttctgctccttcgagt

SEQ ID NO: 322002 - DNA, 25 bp, Artificial
  Probe
ctcagtggaaactgccacatgcacc

SEQ ID NO: 322003 - DNA, 25 bp, Artificial
  Probe
tggaaactgccacatgcacctctct

SEQ ID NO: 322004 - DNA, 25 bp, Artificial
  Probe
ttcatgcagctgtctcagtggaaac

SEQ ID NO: 322005 - DNA, 25 bp, Artificial
  Probe
ttcttctgctccttcgagttcatgc

SEQ ID NO: 322006 - DNA, 25 bp, Artificial
  Probe
ttctgctccttcgagttcatgcagc

SEQ ID NO: 322007 - DNA, 25 bp, Artificial
  Probe
ggaactttctctgaagctcctttct

SEQ ID NO: 322008 - DNA, 25 bp, Artificial
  Probe
gtggaactttctctgaagctccttt

SEQ ID NO: 322009 - DNA, 25 bp, Artificial
  Probe
actcttcttcgtccaccagaaagga

SEQ ID NO: 322010 - DNA, 25 bp, Artificial
  Probe
cttggggtgactcctgatgaagcac

SEQ ID NO: 322011 - DNA, 25 bp, Artificial
  Probe
catgctacagttccttgcttcttgg

SEQ ID NO: 322012 - DNA, 25 bp, Artificial
  Probe
ccacttttgaggtggccgaagcctt

SEQ ID NO: 322013 - DNA, 25 bp, Artificial
  Probe
ttccttgcttcttggagactgggcc

SEQ ID NO: 322014 - DNA, 25 bp, Artificial
  Probe
caacccactgcagtggccatatttg

SEQ ID NO: 322015 - DNA, 25 bp, Artificial
  Probe
ggggtgactcctgatgaagcacaac

SEQ ID NO: 322016 - DNA, 25 bp, Artificial
  Probe
caggatacaccctatctgctgctca

SEQ ID NO: 322017 - DNA, 25 bp, Artificial
  Probe
ctgcagtggccatatttgggcagtt

SEQ ID NO: 322018 - DNA, 25 bp, Artificial
  Probe
aacccactgcagtggccatatttgg

SEQ ID NO: 322019 - DNA, 25 bp, Artificial
  Probe
cttcttcgtccaccagaaaggagca

SEQ ID NO: 322020 - DNA, 25 bp, Artificial
  Probe
ccaacccactgcagtggccatattt

SEQ ID NO: 322021 - DNA, 25 bp, Artificial
  Probe
tggccacttttgaggtggccgaagc

SEQ ID NO: 322022 - DNA, 25 bp, Artificial
  Probe
tccttgcttcttggagactgggcct

SEQ ID NO: 322023 - DNA, 25 bp, Artificial
  Probe
cagtggccatatttgggcagttccc

SEQ ID NO: 322024 - DNA, 25 bp, Artificial
  Probe
attggtccctatctcccgagcaagc

SEQ ID NO: 322025 - DNA, 25 bp, Artificial
  Probe
actgcagtggccatatttgggcagt

SEQ ID NO: 322026 - DNA, 25 bp, Artificial
  Probe
ataaggcttccctaggtgtacaggg

SEQ ID NO: 322027 - DNA, 25 bp, Artificial
  Probe
tcttcttcgtccaccagaaaggagc

SEQ ID NO: 322028 - DNA, 25 bp, Artificial
  Probe
taaggcttccctaggtgtacagggg

SEQ ID NO: 322029 - DNA, 25 bp, Artificial
  Probe
cttgcaggatacaccctatctgctg

SEQ ID NO: 322030 - DNA, 25 bp, Artificial
  Probe
gccgaagccttgcaggatacaccct

SEQ ID NO: 322031 - DNA, 25 bp, Artificial
  Probe
ccatatttgggcagttcccagtcct

SEQ ID NO: 322032 - DNA, 25 bp, Artificial
  Probe
gtccttccatgctacagttccttgc

SEQ ID NO: 322033 - DNA, 25 bp, Artificial
  Probe
gtggccgaagccttgcaggatacac

SEQ ID NO: 322034 - DNA, 25 bp, Artificial
  Probe
ccatgctacagttccttgcttcttg

SEQ ID NO: 322035 - DNA, 25 bp, Artificial
  Probe
ggccgaagccttgcaggatacaccc

SEQ ID NO: 322036 - DNA, 25 bp, Artificial
  Probe
tggtggaactttctctgaagctcct

SEQ ID NO: 322037 - DNA, 25 bp, Artificial
  Probe
gggtccttccatgctacagttcctt

SEQ ID NO: 322038 - DNA, 25 bp, Artificial
  Probe
taaacccccagagtgcacccaatga

SEQ ID NO: 322039 - DNA, 25 bp, Artificial
  Probe
tgactcctgatgaagcacaactccc

SEQ ID NO: 322040 - DNA, 25 bp, Artificial
  Probe
tggaactttctctgaagctcctttc

SEQ ID NO: 322041 - DNA, 25 bp, Artificial
  Probe
gaagctcctttctcccttgctattg

SEQ ID NO: 322042 - DNA, 25 bp, Artificial
  Probe
ggacagggtccttccatgctacagt

SEQ ID NO: 322043 - DNA, 25 bp, Artificial
  Probe
ccttgcaggatacaccctatctgct

SEQ ID NO: 322044 - DNA, 25 bp, Artificial
  Probe
atggacagggtccttccatgctaca

SEQ ID NO: 322045 - DNA, 25 bp, Artificial
  Probe
gctacagttccttgcttcttggaga

SEQ ID NO: 322046 - DNA, 25 bp, Artificial
  Probe
agtggccatatttgggcagttccca

SEQ ID NO: 322047 - DNA, 25 bp, Artificial
  Probe
gggtgactcctgatgaagcacaact

SEQ ID NO: 322048 - DNA, 25 bp, Artificial
  Probe
acatcctgagagagcccaggcccag

SEQ ID NO: 322049 - DNA, 25 bp, Artificial
  Probe
cctcccttggggtgactcctgatga

SEQ ID NO: 322050 - DNA, 25 bp, Artificial
  Probe
ggatacaccctatctgctgctcact

SEQ ID NO: 322051 - DNA, 25 bp, Artificial
  Probe
gctattggtccctatctcccgagca

SEQ ID NO: 322052 - DNA, 25 bp, Artificial
  Probe
ttaatggtggaactttctctgaagc

SEQ ID NO: 322053 - DNA, 25 bp, Artificial
  Probe
atgagtggacactggcttggacctc

SEQ ID NO: 322054 - DNA, 25 bp, Artificial
  Probe
cttggacctcccatggcagtggggt

SEQ ID NO: 322055 - DNA, 25 bp, Artificial
  Probe
ggcagccatgagtggacactggctt

SEQ ID NO: 322056 - DNA, 25 bp, Artificial
  Probe
atggcagtggggttactatggtcac

SEQ ID NO: 322057 - DNA, 25 bp, Artificial
  Probe
tcatcaaaagtcctttctgctgtgc

SEQ ID NO: 322058 - DNA, 25 bp, Artificial
  Probe
agaagcttcagtcaccgcaggccgg

SEQ ID NO: 322059 - DNA, 25 bp, Artificial
  Probe
gctatgtaccgaaggactgagctca

SEQ ID NO: 322060 - DNA, 25 bp, Artificial
  Probe
tgaataaatcacctcaagatgccag

SEQ ID NO: 322061 - DNA, 25 bp, Artificial
  Probe
tgcccggggtccaagatgctaggaa

SEQ ID NO: 322062 - DNA, 25 bp, Artificial
  Probe
aggccatcatcaaaagtcctttctg

SEQ ID NO: 322063 - DNA, 25 bp, Artificial
  Probe
ggtccaagatgctaggaagaagctt

SEQ ID NO: 322064 - DNA, 25 bp, Artificial
  Probe
acctcccatggcagtggggttacta

SEQ ID NO: 322065 - DNA, 25 bp, Artificial
  Probe
gtggatccacgttgagatgcatgga

SEQ ID NO: 322066 - DNA, 25 bp, Artificial
  Probe
tggcagtggggttactatggtcacc

SEQ ID NO: 322067 - DNA, 25 bp, Artificial
  Probe
cgcaggccggcctcgctgaaggaac

SEQ ID NO: 322068 - DNA, 25 bp, Artificial
  Probe
tcaaaagtcctttctgctgtgctgc

SEQ ID NO: 322069 - DNA, 25 bp, Artificial
  Probe
gggtccaagatgctaggaagaagct

SEQ ID NO: 322070 - DNA, 25 bp, Artificial
  Probe
tactcaggacccacagaagaatcag

SEQ ID NO: 322071 - DNA, 25 bp, Artificial
  Probe
cgaaggactgagctcaaggacatcc

SEQ ID NO: 322072 - DNA, 25 bp, Artificial
  Probe
ctggcttggacctcccatggcagtg

SEQ ID NO: 322073 - DNA, 25 bp, Artificial
  Probe
gctgctgttcatgacccctcaagct

SEQ ID NO: 322074 - DNA, 25 bp, Artificial
  Probe
gccggcctcgctgaaggaaccaggt

SEQ ID NO: 322075 - DNA, 25 bp, Artificial
  Probe
actgagctcaaggacatcctccctg

SEQ ID NO: 322076 - DNA, 25 bp, Artificial
  Probe
attctactcaggacccacagaagaa

SEQ ID NO: 322077 - DNA, 25 bp, Artificial
  Probe
gttatcgatctacattctactcagg

SEQ ID NO: 322078 - DNA, 25 bp, Artificial
  Probe
agccatgagtggacactggcttgga

SEQ ID NO: 322079 - DNA, 25 bp, Artificial
  Probe
cctcccatggcagtggggttactat

SEQ ID NO: 322080 - DNA, 25 bp, Artificial
  Probe
agaatcaggctatgtaccgaaggac

SEQ ID NO: 322081 - DNA, 25 bp, Artificial
  Probe
ccggggtccaagatgctaggaagaa

SEQ ID NO: 322082 - DNA, 25 bp, Artificial
  Probe
atcaggctatgtaccgaaggactga

SEQ ID NO: 322083 - DNA, 25 bp, Artificial
  Probe
gtggacactggcttggacctcccat

SEQ ID NO: 322084 - DNA, 25 bp, Artificial
  Probe
ctcaagctctgttggaagaggaggt

SEQ ID NO: 322085 - DNA, 25 bp, Artificial
  Probe
ttggacctcccatggcagtggggtt

SEQ ID NO: 322086 - DNA, 25 bp, Artificial
  Probe
aaagtcctttctgctgtgctgctgc

SEQ ID NO: 322087 - DNA, 25 bp, Artificial
  Probe
catgacccctcaagctctgttggaa

SEQ ID NO: 322088 - DNA, 25 bp, Artificial
  Probe
gaataaatcacctcaagatgccagg

SEQ ID NO: 322089 - DNA, 25 bp, Artificial
  Probe
cccagaatgcggaaactgcgcggga

SEQ ID NO: 322090 - DNA, 25 bp, Artificial
  Probe
ccacgttgagatgcatggactctgg

SEQ ID NO: 322091 - DNA, 25 bp, Artificial
  Probe
ggactgagctcaaggacatcctccc

SEQ ID NO: 322092 - DNA, 25 bp, Artificial
  Probe
ggccatcatcaaaagtcctttctgc

SEQ ID NO: 322093 - DNA, 25 bp, Artificial
  Probe
acattctactcaggacccacagaag

SEQ ID NO: 322094 - DNA, 25 bp, Artificial
  Probe
gctgcctgttatcgatctacattct

SEQ ID NO: 322095 - DNA, 25 bp, Artificial
  Probe
cccacagaagaatcaggctatgtac

SEQ ID NO: 322096 - DNA, 25 bp, Artificial
  Probe
ctcgctgaaggaaccaggtccgagc

SEQ ID NO: 322097 - DNA, 25 bp, Artificial
  Probe
gaagcttcagtcaccgcaggccggc

SEQ ID NO: 322098 - DNA, 25 bp, Artificial
  Probe
tggcagccatgagtggacactggct

SEQ ID NO: 322099 - DNA, 25 bp, Artificial
  Probe
gcaccgcatctgtgctgtccctaga

SEQ ID NO: 322100 - DNA, 25 bp, Artificial
  Probe
actcctagaatgatggcctcttgat

SEQ ID NO: 322101 - DNA, 25 bp, Artificial
  Probe
tgagcctgaagttcagaaatggcct

SEQ ID NO: 322102 - DNA, 25 bp, Artificial
  Probe
aagcatctgggcttgctcaagtgag

SEQ ID NO: 322103 - DNA, 25 bp, Artificial
  Probe
ttatgagctcagtggcgtgcctttg

SEQ ID NO: 322104 - DNA, 25 bp, Artificial
  Probe
aaattgaagcaaactcctagaatga

SEQ ID NO: 322105 - DNA, 25 bp, Artificial
  Probe
cccagatgtgttcaacccagagcac

SEQ ID NO: 322106 - DNA, 25 bp, Artificial
  Probe
ctgtgctgtccctagagaatgatgc

SEQ ID NO: 322107 - DNA, 25 bp, Artificial
  Probe
agcaaactcctagaatgatggcctc

SEQ ID NO: 322108 - DNA, 25 bp, Artificial
  Probe
agcatctgggcttgctcaagtgaga

SEQ ID NO: 322109 - DNA, 25 bp, Artificial
  Probe
aactcctagaatgatggcctcttga

SEQ ID NO: 322110 - DNA, 25 bp, Artificial
  Probe
atcacttatgagctcagtggcgtgc

SEQ ID NO: 322111 - DNA, 25 bp, Artificial
  Probe
tggtgggcacatcacttatgagctc

SEQ ID NO: 322112 - DNA, 25 bp, Artificial
  Probe
tgtccctagagaatgatgctggaga

SEQ ID NO: 322113 - DNA, 25 bp, Artificial
  Probe
caaactcctagaatgatggcctctt

SEQ ID NO: 322114 - DNA, 25 bp, Artificial
  Probe
tccctagagaatgatgctggagaag

SEQ ID NO: 322115 - DNA, 25 bp, Artificial
  Probe
ccaaccaatgagaagctgagcctga

SEQ ID NO: 322116 - DNA, 25 bp, Artificial
  Probe
cgcatctgtgctgtccctagagaat

SEQ ID NO: 322117 - DNA, 25 bp, Artificial
  Probe
gcctttgcatctaaaagttaggagg

SEQ ID NO: 322118 - DNA, 25 bp, Artificial
  Probe
tgtgctgtccctagagaatgatgct

SEQ ID NO: 322119 - DNA, 25 bp, Artificial
  Probe
agctcagtggcgtgcctttgcatct

SEQ ID NO: 322120 - DNA, 25 bp, Artificial
  Probe
atctgggcttgctcaagtgagagga

SEQ ID NO: 322121 - DNA, 25 bp, Artificial
  Probe
ttgaagcaaactcctagaatgatgg

SEQ ID NO: 322122 - DNA, 25 bp, Artificial
  Probe
ggcacatcacttatgagctcagtgg

SEQ ID NO: 322123 - DNA, 25 bp, Artificial
  Probe
gaagcaaactcctagaatgatggcc

SEQ ID NO: 322124 - DNA, 25 bp, Artificial
  Probe
gcatctgtgctgtccctagagaatg

SEQ ID NO: 322125 - DNA, 25 bp, Artificial
  Probe
tcacttatgagctcagtggcgtgcc

SEQ ID NO: 322126 - DNA, 25 bp, Artificial
  Probe
accccagatgtgttcaacccagagc

SEQ ID NO: 322127 - DNA, 25 bp, Artificial
  Probe
caccgcatctgtgctgtccctagag

SEQ ID NO: 322128 - DNA, 25 bp, Artificial
  Probe
gcgtgcctttgcatctaaaagttag

SEQ ID NO: 322129 - DNA, 25 bp, Artificial
  Probe
agcctgaagttcagaaatggcctca

SEQ ID NO: 322130 - DNA, 25 bp, Artificial
  Probe
cagtggcgtgcctttgcatctaaaa

SEQ ID NO: 322131 - DNA, 25 bp, Artificial
  Probe
tgctgtccctagagaatgatgctgg

SEQ ID NO: 322132 - DNA, 25 bp, Artificial
  Probe
acatcacttatgagctcagtggcgt

SEQ ID NO: 322133 - DNA, 25 bp, Artificial
  Probe
ctgagcctgaagttcagaaatggcc

SEQ ID NO: 322134 - DNA, 25 bp, Artificial
  Probe
cgtgcctttgcatctaaaagttagg

SEQ ID NO: 322135 - DNA, 25 bp, Artificial
  Probe
ctcctagaatgatggcctcttgatt

SEQ ID NO: 322136 - DNA, 25 bp, Artificial
  Probe
tgggcacatcacttatgagctcagt

SEQ ID NO: 322137 - DNA, 25 bp, Artificial
  Probe
caatgagaagctgagcctgaagttc

SEQ ID NO: 322138 - DNA, 25 bp, Artificial
  Probe
acttatgagctcagtggcgtgcctt

SEQ ID NO: 322139 - DNA, 25 bp, Artificial
  Probe
tggcgtgcctttgcatctaaaagtt

SEQ ID NO: 322140 - DNA, 25 bp, Artificial
  Probe
gaaatggcctcacactttctccagt

SEQ ID NO: 322141 - DNA, 25 bp, Artificial
  Probe
agtggcgtgcctttgcatctaaaag

SEQ ID NO: 322142 - DNA, 25 bp, Artificial
  Probe
ctttgcatctaaaagttaggaggac

SEQ ID NO: 322143 - DNA, 25 bp, Artificial
  Probe
cagatgtgttcaacccagagcactt

SEQ ID NO: 322144 - DNA, 25 bp, Artificial
  Probe
ctgtccctagagaatgatgctggag

SEQ ID NO: 322145 - DNA, 25 bp, Artificial
  Probe
ccaatgttggacaccgggagctccg

SEQ ID NO: 322146 - DNA, 25 bp, Artificial
  Probe
ttcagctgcttctactcctgtagct

SEQ ID NO: 322147 - DNA, 25 bp, Artificial
  Probe
tcgaggcagtgattctgagaaacgg

SEQ ID NO: 322148 - DNA, 25 bp, Artificial
  Probe
gtaatgggggccacactagcgacta

SEQ ID NO: 322149 - DNA, 25 bp, Artificial
  Probe
ttttgcgaaccgtcgaggcagtgat

SEQ ID NO: 322150 - DNA, 25 bp, Artificial
  Probe
catcttcacccaatgttggacaccg

SEQ ID NO: 322151 - DNA, 25 bp, Artificial
  Probe
agccagcatcaatgggttggtcagg

SEQ ID NO: 322152 - DNA, 25 bp, Artificial
  Probe
gattacatccacagtacacacggca

SEQ ID NO: 322153 - DNA, 25 bp, Artificial
  Probe
agaagaaatacgtgaccttgtccag

SEQ ID NO: 322154 - DNA, 25 bp, Artificial
  Probe
gaacaacagtcaaagtcccaggcaa

SEQ ID NO: 322155 - DNA, 25 bp, Artificial
  Probe
gcttctactcctgtagctgggcagg

SEQ ID NO: 322156 - DNA, 25 bp, Artificial
  Probe
agtcaaagtcccaggcaagcggccc

SEQ ID NO: 322157 - DNA, 25 bp, Artificial
  Probe
gcccctcagccagcatcaatgggtt

SEQ ID NO: 322158 - DNA, 25 bp, Artificial
  Probe
caacagtcaaagtcccaggcaagcg

SEQ ID NO: 322159 - DNA, 25 bp, Artificial
  Probe
aagcggcggaccagcctttttgcga

SEQ ID NO: 322160 - DNA, 25 bp, Artificial
  Probe
atgattacatccacagtacacacgg

SEQ ID NO: 322161 - DNA, 25 bp, Artificial
  Probe
agggctatctctgctttcggcccct

SEQ ID NO: 322162 - DNA, 25 bp, Artificial
  Probe
accccagggtccttacatcgagcag

SEQ ID NO: 322163 - DNA, 25 bp, Artificial
  Probe
agctgcttctactcctgtagctggg

SEQ ID NO: 322164 - DNA, 25 bp, Artificial
  Probe
atcgagcagccaagcggcggaccag

SEQ ID NO: 322165 - DNA, 25 bp, Artificial
  Probe
gaccagcctttttgcgaaccgtcga

SEQ ID NO: 322166 - DNA, 25 bp, Artificial
  Probe
catcgagcagccaagcggcggacca

SEQ ID NO: 322167 - DNA, 25 bp, Artificial
  Probe
caattccttgaacaaagagtggaag

SEQ ID NO: 322168 - DNA, 25 bp, Artificial
  Probe
cgaagtggcaattccttgaacaaag

SEQ ID NO: 322169 - DNA, 25 bp, Artificial
  Probe
agtacacacggcaaagagatggact

SEQ ID NO: 322170 - DNA, 25 bp, Artificial
  Probe
cgtgaccttgtccagcaatggcttt

SEQ ID NO: 322171 - DNA, 25 bp, Artificial
  Probe
gcctttttgcgaaccgtcgaggcag

SEQ ID NO: 322172 - DNA, 25 bp, Artificial
  Probe
agcctttttgcgaaccgtcgaggca

SEQ ID NO: 322173 - DNA, 25 bp, Artificial
  Probe
tccacagtacacacggcaaagagat

SEQ ID NO: 322174 - DNA, 25 bp, Artificial
  Probe
tgcgaaccgtcgaggcagtgattct

SEQ ID NO: 322175 - DNA, 25 bp, Artificial
  Probe
gaaatacgtgaccttgtccagcaat

SEQ ID NO: 322176 - DNA, 25 bp, Artificial
  Probe
ggaccagcctttttgcgaaccgtcg

SEQ ID NO: 322177 - DNA, 25 bp, Artificial
  Probe
tacatccacagtacacacggcaaag

SEQ ID NO: 322178 - DNA, 25 bp, Artificial
  Probe
tactcctgtagctgggcaggctagt

SEQ ID NO: 322179 - DNA, 25 bp, Artificial
  Probe
cttacatcgagcagccaagcggcgg

SEQ ID NO: 322180 - DNA, 25 bp, Artificial
  Probe
ccagggtccttacatcgagcagcca

SEQ ID NO: 322181 - DNA, 25 bp, Artificial
  Probe
acacacggcaaagagatggacttgt

SEQ ID NO: 322182 - DNA, 25 bp, Artificial
  Probe
agcgaagtggcaattccttgaacaa

SEQ ID NO: 322183 - DNA, 25 bp, Artificial
  Probe
ggcggaccagcctttttgcgaaccg

SEQ ID NO: 322184 - DNA, 25 bp, Artificial
  Probe
ggacttgttacgaacaacagtcaaa

SEQ ID NO: 322185 - DNA, 25 bp, Artificial
  Probe
gggggccacactagcgactactctt

SEQ ID NO: 322186 - DNA, 25 bp, Artificial
  Probe
gccaagcggcggaccagcctttttg

SEQ ID NO: 322187 - DNA, 25 bp, Artificial
  Probe
aatacgtgaccttgtccagcaatgg

SEQ ID NO: 322188 - DNA, 25 bp, Artificial
  Probe
aaccgtcgaggcagtgattctgaga

SEQ ID NO: 322189 - DNA, 25 bp, Artificial
  Probe
ctgaagcctcaactccaatgccaag

SEQ ID NO: 322190 - DNA, 25 bp, Artificial
  Probe
ccccaagggctatctctgctttcgg

SEQ ID NO: 322191 - DNA, 25 bp, Artificial
  Probe
tcaggaagtatttctgcatggttcc

SEQ ID NO: 322192 - DNA, 25 bp, Artificial
  Probe
tcaccatggccacactgggtacctt

SEQ ID NO: 322193 - DNA, 25 bp, Artificial
  Probe
tcgtgtctcctatctcacagctttg

SEQ ID NO: 322194 - DNA, 25 bp, Artificial
  Probe
gttctcaggaagtatttctgcatgg

SEQ ID NO: 322195 - DNA, 25 bp, Artificial
  Probe
aagagggttaccagtggtctccaag

SEQ ID NO: 322196 - DNA, 25 bp, Artificial
  Probe
gtgcttctgtactctactagagttc

SEQ ID NO: 322197 - DNA, 25 bp, Artificial
  Probe
tttccaaccaatagccgtgctaatg

SEQ ID NO: 322198 - DNA, 25 bp, Artificial
  Probe
ctcacagctttggacttctatattg

SEQ ID NO: 322199 - DNA, 25 bp, Artificial
  Probe
ctcgtaagaatttccctcgtgtctc

SEQ ID NO: 322200 - DNA, 25 bp, Artificial
  Probe
taatattgaacgacaggcttctcca

SEQ ID NO: 322201 - DNA, 25 bp, Artificial
  Probe
atgcacgtactcgtgctcgtgcccg

SEQ ID NO: 322202 - DNA, 25 bp, Artificial
  Probe
gatcaagaagacctcagtgtccctg

SEQ ID NO: 322203 - DNA, 25 bp, Artificial
  Probe
cagttctgtgctcaccatggccaca

SEQ ID NO: 322204 - DNA, 25 bp, Artificial
  Probe
cctcagtgtccctggaggcgatgtg

SEQ ID NO: 322205 - DNA, 25 bp, Artificial
  Probe
ttctgtactctactagagttcactg

SEQ ID NO: 322206 - DNA, 25 bp, Artificial
  Probe
cgtcagcagcaggaagtgtttgtgt

SEQ ID NO: 322207 - DNA, 25 bp, Artificial
  Probe
ctttggacttctatattgcaatttg

SEQ ID NO: 322208 - DNA, 25 bp, Artificial
  Probe
gacaggcttctccaaagttctacca

SEQ ID NO: 322209 - DNA, 25 bp, Artificial
  Probe
tgtgcttcagggttctcaggaagta

SEQ ID NO: 322210 - DNA, 25 bp, Artificial
  Probe
tatgtgtgcttcagggttctcagga

SEQ ID NO: 322211 - DNA, 25 bp, Artificial
  Probe
cacactgggtaccttttctcgtaag

SEQ ID NO: 322212 - DNA, 25 bp, Artificial
  Probe
agggttctcaggaagtatttctgca

SEQ ID NO: 322213 - DNA, 25 bp, Artificial
  Probe
aagacctcagtgtccctggaggcga

SEQ ID NO: 322214 - DNA, 25 bp, Artificial
  Probe
aaccaatagccgtgctaatgcacgt

SEQ ID NO: 322215 - DNA, 25 bp, Artificial
  Probe
tcgtgcccgtgctcgtcagcagcag

SEQ ID NO: 322216 - DNA, 25 bp, Artificial
  Probe
ttttctcgtaagaatttccctcgtg

SEQ ID NO: 322217 - DNA, 25 bp, Artificial
  Probe
gaagacctcagtgtccctggaggcg

SEQ ID NO: 322218 - DNA, 25 bp, Artificial
  Probe
ttcgtcttgtgcttctgtactctac

SEQ ID NO: 322219 - DNA, 25 bp, Artificial
  Probe
ggccacactgggtaccttttctcgt

SEQ ID NO: 322220 - DNA, 25 bp, Artificial
  Probe
gacttctatattgcaatttgtttcg

SEQ ID NO: 322221 - DNA, 25 bp, Artificial
  Probe
gcttctgtactctactagagttcac

SEQ ID NO: 322222 - DNA, 25 bp, Artificial
  Probe
tgtactctactagagttcactgtgc

SEQ ID NO: 322223 - DNA, 25 bp, Artificial
  Probe
gtctcctatctcacagctttggact

SEQ ID NO: 322224 - DNA, 25 bp, Artificial
  Probe
ccatggccacactgggtaccttttc

SEQ ID NO: 322225 - DNA, 25 bp, Artificial
  Probe
ttctcaggaagtatttctgcatggt

SEQ ID NO: 322226 - DNA, 25 bp, Artificial
  Probe
tgaacgacaggcttctccaaagttc

SEQ ID NO: 322227 - DNA, 25 bp, Artificial
  Probe
gttcactgtgctcaacttcctgacc

SEQ ID NO: 322228 - DNA, 25 bp, Artificial
  Probe
cgatgtggccgaagctatgtgtgct

SEQ ID NO: 322229 - DNA, 25 bp, Artificial
  Probe
tagagttcactgtgctcaacttcct

SEQ ID NO: 322230 - DNA, 25 bp, Artificial
  Probe
gcttcagggttctcaggaagtattt

SEQ ID NO: 322231 - DNA, 25 bp, Artificial
  Probe
ggacttctatattgcaatttgtttc

SEQ ID NO: 322232 - DNA, 25 bp, Artificial
  Probe
ggaagtatttctgcatggttcctgg

SEQ ID NO: 322233 - DNA, 25 bp, Artificial
  Probe
tgctcgtgcccgtgctcgtcagcag

SEQ ID NO: 322234 - DNA, 25 bp, Artificial
  Probe
gccacactgggtaccttttctcgta

SEQ ID NO: 322235 - DNA, 25 bp, Artificial
  Probe
atattgaacgacaggcttctccaaa

SEQ ID NO: 322236 - DNA, 25 bp, Artificial
  Probe
ctgaagagggttaccagtggtctcc

SEQ ID NO: 322237 - DNA, 25 bp, Artificial
  Probe
tacctgaggatgttcagaaaatcta

SEQ ID NO: 322238 - DNA, 25 bp, Artificial
  Probe
tgctttcccccgagaagcgctctgt

SEQ ID NO: 322239 - DNA, 25 bp, Artificial
  Probe
gtaactcagacaactccagcacagc

SEQ ID NO: 322240 - DNA, 25 bp, Artificial
  Probe
ggattggaccagagggcccactcac

SEQ ID NO: 322241 - DNA, 25 bp, Artificial
  Probe
tccagcacagccatgctgacagagt

SEQ ID NO: 322242 - DNA, 25 bp, Artificial
  Probe
cgcttctgaggacaacatcatcaac

SEQ ID NO: 322243 - DNA, 25 bp, Artificial
  Probe
gaacagctcaacaaacacgggcagg

SEQ ID NO: 322244 - DNA, 25 bp, Artificial
  Probe
tgttaaagacactggagctggacta

SEQ ID NO: 322245 - DNA, 25 bp, Artificial
  Probe
aagaccttacctgaggatgttcaga

SEQ ID NO: 322246 - DNA, 25 bp, Artificial
  Probe
ctggacatgctttcccccgagaagc

SEQ ID NO: 322247 - DNA, 25 bp, Artificial
  Probe
agatctcaaaaagaccttacctgag

SEQ ID NO: 322248 - DNA, 25 bp, Artificial
  Probe
ggacacaggccgtttcaaggcctca

SEQ ID NO: 322249 - DNA, 25 bp, Artificial
  Probe
acagcagcaagctgagatggagaat

SEQ ID NO: 322250 - DNA, 25 bp, Artificial
  Probe
ccttaaggggccagaacagctcaac

SEQ ID NO: 322251 - DNA, 25 bp, Artificial
  Probe
ttacctgaggatgttcagaaaatct

SEQ ID NO: 322252 - DNA, 25 bp, Artificial
  Probe
gaacaattctttacttgaagacaga

SEQ ID NO: 322253 - DNA, 25 bp, Artificial
  Probe
tcatcaacaagtttgggtccacctc

SEQ ID NO: 322254 - DNA, 25 bp, Artificial
  Probe
gggcccactcactggacatgctttc

SEQ ID NO: 322255 - DNA, 25 bp, Artificial
  Probe
tctgaggacaacatcatcaacaagt

SEQ ID NO: 322256 - DNA, 25 bp, Artificial
  Probe
tctttgcagccctggacacaggccg

SEQ ID NO: 322257 - DNA, 25 bp, Artificial
  Probe
atgtgtaactcagacaactccagca

SEQ ID NO: 322258 - DNA, 25 bp, Artificial
  Probe
tgacaagctgcaacgggcagccacc

SEQ ID NO: 322259 - DNA, 25 bp, Artificial
  Probe
cggaattactctctggatgaagaga

SEQ ID NO: 322260 - DNA, 25 bp, Artificial
  Probe
agccaccatccgaagtatggagcgc

SEQ ID NO: 322261 - DNA, 25 bp, Artificial
  Probe
ctctgtctttgcagccctggacaca

SEQ ID NO: 322262 - DNA, 25 bp, Artificial
  Probe
tccgaagtatggagcgccggagact

SEQ ID NO: 322263 - DNA, 25 bp, Artificial
  Probe
gacaactccagcacagccatgctga

SEQ ID NO: 322264 - DNA, 25 bp, Artificial
  Probe
caacgggcagccaccatccgaagta

SEQ ID NO: 322265 - DNA, 25 bp, Artificial
  Probe
aaccttccggaattactctctggat

SEQ ID NO: 322266 - DNA, 25 bp, Artificial
  Probe
ggaatggtacccatggacaccaaag

SEQ ID NO: 322267 - DNA, 25 bp, Artificial
  Probe
tttcccccgagaagcgctctgtctt

SEQ ID NO: 322268 - DNA, 25 bp, Artificial
  Probe
atcccaggagagtatcaacaacaga

SEQ ID NO: 322269 - DNA, 25 bp, Artificial
  Probe
cgtttcaaggcctcatcccaggaga

SEQ ID NO: 322270 - DNA, 25 bp, Artificial
  Probe
ttcaaggcctcatcccaggagagta

SEQ ID NO: 322271 - DNA, 25 bp, Artificial
  Probe
tcactggacatgctttcccccgaga

SEQ ID NO: 322272 - DNA, 25 bp, Artificial
  Probe
agccctggacacaggccgtttcaag

SEQ ID NO: 322273 - DNA, 25 bp, Artificial
  Probe
catggacaccaaagaccaggggctg

SEQ ID NO: 322274 - DNA, 25 bp, Artificial
  Probe
aggcctcatcccaggagagtatcaa

SEQ ID NO: 322275 - DNA, 25 bp, Artificial
  Probe
tcaaaaagaccttacctgaggatgt

SEQ ID NO: 322276 - DNA, 25 bp, Artificial
  Probe
agacaactccagcacagccatgctg

SEQ ID NO: 322277 - DNA, 25 bp, Artificial
  Probe
ggcagggcgcttctgaggacaacat

SEQ ID NO: 322278 - DNA, 25 bp, Artificial
  Probe
acacaggccgtttcaaggcctcatc

SEQ ID NO: 322279 - DNA, 25 bp, Artificial
  Probe
gaatggaatggtacccatggacacc

SEQ ID NO: 322280 - DNA, 25 bp, Artificial
  Probe
ggagaacaattctttacttgaagac

SEQ ID NO: 322281 - DNA, 25 bp, Artificial
  Probe
accagagggcccactcactggacat

SEQ ID NO: 322282 - DNA, 25 bp, Artificial
  Probe
cccgagaagcgctctgtctttgcag

SEQ ID NO: 322283 - DNA, 25 bp, Artificial
  Probe
aggccggcatcaaccccgtggtgtg

SEQ ID NO: 322284 - DNA, 25 bp, Artificial
  Probe
agctgagggactgtttcagagccca

SEQ ID NO: 322285 - DNA, 25 bp, Artificial
  Probe
tgacagcctcggtgtggctgacatt

SEQ ID NO: 322286 - DNA, 25 bp, Artificial
  Probe
gagctgagggactgtttcagagccc

SEQ ID NO: 322287 - DNA, 25 bp, Artificial
  Probe
gctgacattcgcacaggccggcatc

SEQ ID NO: 322288 - DNA, 25 bp, Artificial
  Probe
gcaagatgttctacgccatcacgct

SEQ ID NO: 322289 - DNA, 25 bp, Artificial
  Probe
tgacattcgcacaggccggcatcaa

SEQ ID NO: 322290 - DNA, 25 bp, Artificial
  Probe
acaggccggcatcaaccccgtggtg

SEQ ID NO: 322291 - DNA, 25 bp, Artificial
  Probe
gtttcagagcccagttcccctgttg

SEQ ID NO: 322292 - DNA, 25 bp, Artificial
  Probe
ttcctgctcctctgggggccctatg

SEQ ID NO: 322293 - DNA, 25 bp, Artificial
  Probe
ttgccagttacctgcgcgtcctggt

SEQ ID NO: 322294 - DNA, 25 bp, Artificial
  Probe
tcaaccccgtggtgtgtttcctctt

SEQ ID NO: 322295 - DNA, 25 bp, Artificial
  Probe
ctgacattcgcacaggccggcatca

SEQ ID NO: 322296 - DNA, 25 bp, Artificial
  Probe
gtttcctcttcaaccgggagctgag

SEQ ID NO: 322297 - DNA, 25 bp, Artificial
  Probe
cgtggtgtgtttcctcttcaaccgg

SEQ ID NO: 322298 - DNA, 25 bp, Artificial
  Probe
aggcattggtttgtgaagcgagctc

SEQ ID NO: 322299 - DNA, 25 bp, Artificial
  Probe
gggccctatgtggttgccagttacc

SEQ ID NO: 322300 - DNA, 25 bp, Artificial
  Probe
cattggtttgtgaagcgagctctgc

SEQ ID NO: 322301 - DNA, 25 bp, Artificial
  Probe
tgttctacgccatcacgctgctctt

SEQ ID NO: 322302 - DNA, 25 bp, Artificial
  Probe
agggactgtttcagagcccagttcc

SEQ ID NO: 322303 - DNA, 25 bp, Artificial
  Probe
gttacctgcgcgtcctggtgcggcc

SEQ ID NO: 322304 - DNA, 25 bp, Artificial
  Probe
ctctgggggccctatgtggttgcca

SEQ ID NO: 322305 - DNA, 25 bp, Artificial
  Probe
cctcggtgtggctgacattcgcaca

SEQ ID NO: 322306 - DNA, 25 bp, Artificial
  Probe
ctgagggactgtttcagagcccagt

SEQ ID NO: 322307 - DNA, 25 bp, Artificial
  Probe
tgtggctgacattcgcacaggccgg

SEQ ID NO: 322308 - DNA, 25 bp, Artificial
  Probe
ctcccctgcgacctgaaaggcattg

SEQ ID NO: 322309 - DNA, 25 bp, Artificial
  Probe
ctgcgacctgaaaggcattggtttg

SEQ ID NO: 322310 - DNA, 25 bp, Artificial
  Probe
atgttctacgccatcacgctgctct

SEQ ID NO: 322311 - DNA, 25 bp, Artificial
  Probe
acagcctcggtgtggctgacattcg

SEQ ID NO: 322312 - DNA, 25 bp, Artificial
  Probe
tatgtggttgccagttacctgcgcg

SEQ ID NO: 322313 - DNA, 25 bp, Artificial
  Probe
gccacctgcgctcgtgggcatcagg

SEQ ID NO: 322314 - DNA, 25 bp, Artificial
  Probe
ccgtggtgtgtttcctcttcaaccg

SEQ ID NO: 322315 - DNA, 25 bp, Artificial
  Probe
gccctatgtggttgccagttacctg

SEQ ID NO: 322316 - DNA, 25 bp, Artificial
  Probe
tttcagagcccagttcccctgttgc

SEQ ID NO: 322317 - DNA, 25 bp, Artificial
  Probe
gcatcaaccccgtggtgtgtttcct

SEQ ID NO: 322318 - DNA, 25 bp, Artificial
  Probe
ggggccctatgtggttgccagttac

SEQ ID NO: 322319 - DNA, 25 bp, Artificial
  Probe
ggactgtttcagagcccagttcccc

SEQ ID NO: 322320 - DNA, 25 bp, Artificial
  Probe
ctcgtgggcatcaggcctgcaggcc

SEQ ID NO: 322321 - DNA, 25 bp, Artificial
  Probe
gcgcctcctggtgctggaggaattc

SEQ ID NO: 322322 - DNA, 25 bp, Artificial
  Probe
aggcctacctgacagcctcggtgtg

SEQ ID NO: 322323 - DNA, 25 bp, Artificial
  Probe
attcaagacggagaagaggctgtgc

SEQ ID NO: 322324 - DNA, 25 bp, Artificial
  Probe
gcaggcctacctgacagcctcggtg

SEQ ID NO: 322325 - DNA, 25 bp, Artificial
  Probe
ggcctacctgacagcctcggtgtgg

SEQ ID NO: 322326 - DNA, 25 bp, Artificial
  Probe
gtttgtgaagcgagctctgccaccc

SEQ ID NO: 322327 - DNA, 25 bp, Artificial
  Probe
gctgtgcaagatgttctacgccatc

SEQ ID NO: 322328 - DNA, 25 bp, Artificial
  Probe
cctggtgctggaggaattcaagacg

SEQ ID NO: 322329 - DNA, 25 bp, Artificial
  Probe
ttgtacctcggctcagcggctaacc

SEQ ID NO: 322330 - DNA, 25 bp, Artificial
  Probe
agcaagagacagaccctcctgaata

SEQ ID NO: 322331 - DNA, 25 bp, Artificial
  Probe
atagggaacgcagacaggtgaccaa

SEQ ID NO: 322332 - DNA, 25 bp, Artificial
  Probe
ccatggtcaccatcagtgtgctgta

SEQ ID NO: 322333 - DNA, 25 bp, Artificial
  Probe
gacacggtgctgtcatcgccaccaa

SEQ ID NO: 322334 - DNA, 25 bp, Artificial
  Probe
tccagggtgtgagcaagagacagac

SEQ ID NO: 322335 - DNA, 25 bp, Artificial
  Probe
tttggcacctgctgggttccattcc

SEQ ID NO: 322336 - DNA, 25 bp, Artificial
  Probe
gaccatactgctcttcttctgtctg

SEQ ID NO: 322337 - DNA, 25 bp, Artificial
  Probe
ctcatgtggagtatggtgtcccatt

SEQ ID NO: 322338 - DNA, 25 bp, Artificial
  Probe
cgcagacaggtgaccaagatgctaa

SEQ ID NO: 322339 - DNA, 25 bp, Artificial
  Probe
ttctgtctgcccatggtcaccatca

SEQ ID NO: 322340 - DNA, 25 bp, Artificial
  Probe
tcccatagccaccttaggttgacca

SEQ ID NO: 322341 - DNA, 25 bp, Artificial
  Probe
ggactgacggcctgcgcctggcctt

SEQ ID NO: 322342 - DNA, 25 bp, Artificial
  Probe
gtacctgctcattgggctgaggctg

SEQ ID NO: 322343 - DNA, 25 bp, Artificial
  Probe
tgtccactcgcttccgagagtcctt

SEQ ID NO: 322344 - DNA, 25 bp, Artificial
  Probe
gggatgtacccctggctgagaacag

SEQ ID NO: 322345 - DNA, 25 bp, Artificial
  Probe
acaggtgaccaagatgctaattgct

SEQ ID NO: 322346 - DNA, 25 bp, Artificial
  Probe
tgacaggaacagcagggatgtaccc

SEQ ID NO: 322347 - DNA, 25 bp, Artificial
  Probe
cagcttcgagatagggaacgcagac

SEQ ID NO: 322348 - DNA, 25 bp, Artificial
  Probe
ccaagatgctaattgctctggttat

SEQ ID NO: 322349 - DNA, 25 bp, Artificial
  Probe
actgctcttcttctgtctgcccatg

SEQ ID NO: 322350 - DNA, 25 bp, Artificial
  Probe
actcccatagccaccttaggttgac

SEQ ID NO: 322351 - DNA, 25 bp, Artificial
  Probe
tcgcttccgagagtccttccgggaa

SEQ ID NO: 322352 - DNA, 25 bp, Artificial
  Probe
tcttcttctgtctgcccatggtcac

SEQ ID NO: 322353 - DNA, 25 bp, Artificial
  Probe
gatatctgcagcagccaggcaggcc

SEQ ID NO: 322354 - DNA, 25 bp, Artificial
  Probe
tgcgcctggccttccagtctgtgca

SEQ ID NO: 322355 - DNA, 25 bp, Artificial
  Probe
tagccaccttaggttgaccacagtc

SEQ ID NO: 322356 - DNA, 25 bp, Artificial
  Probe
gtcccattggactgacggcctgcgc

SEQ ID NO: 322357 - DNA, 25 bp, Artificial
  Probe
atccagggtgtgagcaagagacaga

SEQ ID NO: 322358 - DNA, 25 bp, Artificial
  Probe
actcgcttccgagagtccttccggg

SEQ ID NO: 322359 - DNA, 25 bp, Artificial
  Probe
ccctggctgagaacagggatccagg

SEQ ID NO: 322360 - DNA, 25 bp, Artificial
  Probe
ctcccacagaagtattcagcttcga

SEQ ID NO: 322361 - DNA, 25 bp, Artificial
  Probe
ctggccttccagtctgtgcaccttg

SEQ ID NO: 322362 - DNA, 25 bp, Artificial
  Probe
ggcaggatatctgcagcagccaggc

SEQ ID NO: 322363 - DNA, 25 bp, Artificial
  Probe
atgtccactcgcttccgagagtcct

SEQ ID NO: 322364 - DNA, 25 bp, Artificial
  Probe
ttgctctggttatagtatttggcac

SEQ ID NO: 322365 - DNA, 25 bp, Artificial
  Probe
caccctgtgtgacaggaacagcagg

SEQ ID NO: 322366 - DNA, 25 bp, Artificial
  Probe
gctctggttatagtatttggcacct

SEQ ID NO: 322367 - DNA, 25 bp, Artificial
  Probe
caagatgctaattgctctggttata

SEQ ID NO: 322368 - DNA, 25 bp, Artificial
  Probe
tcttcttgtacctcggctcagcggc

SEQ ID NO: 322369 - DNA, 25 bp, Artificial
  Probe
ggtgaccaagatgctaattgctctg

SEQ ID NO: 322370 - DNA, 25 bp, Artificial
  Probe
ttgctccaagaggaggtcaagggca

SEQ ID NO: 322371 - DNA, 25 bp, Artificial
  Probe
tggagtatggtgtcccattggactg

SEQ ID NO: 322372 - DNA, 25 bp, Artificial
  Probe
tgtgacaggaacagcagggatgtac

SEQ ID NO: 322373 - DNA, 25 bp, Artificial
  Probe
cttgggacacggtgctgtcatcgcc

SEQ ID NO: 322374 - DNA, 25 bp, Artificial
  Probe
atagtatttggcacctgctgggttc

SEQ ID NO: 322375 - DNA, 25 bp, Artificial
  Probe
agagcttcccggaggagatggccac

SEQ ID NO: 322376 - DNA, 25 bp, Artificial
  Probe
accaggcgctgaactccaccaatgg

SEQ ID NO: 322377 - DNA, 25 bp, Artificial
  Probe
acttgcgctatgtgcggcgcctaga

SEQ ID NO: 322378 - DNA, 25 bp, Artificial
  Probe
gagaaaatcgctgcagcgacataag

SEQ ID NO: 322379 - DNA, 25 bp, Artificial
  Probe
ggactttggcggaaatctctacacc

SEQ ID NO: 322380 - DNA, 25 bp, Artificial
  Probe
cgctaccagaagattggtgatacca

SEQ ID NO: 322381 - DNA, 25 bp, Artificial
  Probe
acttctttgagaagccagactacga

SEQ ID NO: 322382 - DNA, 25 bp, Artificial
  Probe
ctcttcgaccgcagcggctacgtgt

SEQ ID NO: 322383 - DNA, 25 bp, Artificial
  Probe
acgactacctgaggaagctcttcac

SEQ ID NO: 322384 - DNA, 25 bp, Artificial
  Probe
atcgctgcagcgacataagtgaggg

SEQ ID NO: 322385 - DNA, 25 bp, Artificial
  Probe
cgtgtctcgtcatccccttcgagag

SEQ ID NO: 322386 - DNA, 25 bp, Artificial
  Probe
aggaagctcttcaccgacctcttcg

SEQ ID NO: 322387 - DNA, 25 bp, Artificial
  Probe
ggaaatctctacacccgtgtctcgt

SEQ ID NO: 322388 - DNA, 25 bp, Artificial
  Probe
gctgaactccaccaatggagagctg

SEQ ID NO: 322389 - DNA, 25 bp, Artificial
  Probe
tccacaccaagaaccaggcgctgaa

SEQ ID NO: 322390 - DNA, 25 bp, Artificial
  Probe
catcgcggcccctgcagaagtagag

SEQ ID NO: 322391 - DNA, 25 bp, Artificial
  Probe
agattggtgataccaagcgtgccac

SEQ ID NO: 322392 - DNA, 25 bp, Artificial
  Probe
acaccaagaaccaggcgctgaactc

SEQ ID NO: 322393 - DNA, 25 bp, Artificial
  Probe
agccgccacatcgtgacaaagctca

SEQ ID NO: 322394 - DNA, 25 bp, Artificial
  Probe
gtcatccccttcgagagcattaact

SEQ ID NO: 322395 - DNA, 25 bp, Artificial
  Probe
ctatcggcaccgtccatcctgatgt

SEQ ID NO: 322396 - DNA, 25 bp, Artificial
  Probe
ggcggaaatctctacacccgtgtct

SEQ ID NO: 322397 - DNA, 25 bp, Artificial
  Probe
gcgtgccacgccaatcgaggtgctg

SEQ ID NO: 322398 - DNA, 25 bp, Artificial
  Probe
tgctgcttcttcaagaggaggaaga

SEQ ID NO: 322399 - DNA, 25 bp, Artificial
  Probe
gaccgcagcggctacgtgtttgact

SEQ ID NO: 322400 - DNA, 25 bp, Artificial
  Probe
tgataccaagcgtgccacgccaatc

SEQ ID NO: 322401 - DNA, 25 bp, Artificial
  Probe
accaagcgtgccacgccaatcgagg

SEQ ID NO: 322402 - DNA, 25 bp, Artificial
  Probe
cgactacctgaggaagctcttcacc

SEQ ID NO: 322403 - DNA, 25 bp, Artificial
  Probe
atgtgcggcgcctagacttctttga

SEQ ID NO: 322404 - DNA, 25 bp, Artificial
  Probe
tcgcggcccctgcagaagtagaggt

SEQ ID NO: 322405 - DNA, 25 bp, Artificial
  Probe
tcgaggtgctgtgtgagagcttccc

SEQ ID NO: 322406 - DNA, 25 bp, Artificial
  Probe
tacgagtatgactgggccggcaagc

SEQ ID NO: 322407 - DNA, 25 bp, Artificial
  Probe
ctgctgcttcttcaagaggaggaag

SEQ ID NO: 322408 - DNA, 25 bp, Artificial
  Probe
ttggtgataccaagcgtgccacgcc

SEQ ID NO: 322409 - DNA, 25 bp, Artificial
  Probe
acctacttgcgctatgtgcggcgcc

SEQ ID NO: 322410 - DNA, 25 bp, Artificial
  Probe
agtgagggactttggcggaaatctc

SEQ ID NO: 322411 - DNA, 25 bp, Artificial
  Probe
tcccggaggagatggccacctactt

SEQ ID NO: 322412 - DNA, 25 bp, Artificial
  Probe
ctccaccaatggagagctgaacaca

SEQ ID NO: 322413 - DNA, 25 bp, Artificial
  Probe
ccagactacgactacctgaggaagc

SEQ ID NO: 322414 - DNA, 25 bp, Artificial
  Probe
ctttgagaagccagactacgactac

SEQ ID NO: 322415 - DNA, 25 bp, Artificial
  Probe
atcggcaccgtccatcctgatgtgc

SEQ ID NO: 322416 - DNA, 25 bp, Artificial
  Probe
aggagatggccacctacttgcgcta

SEQ ID NO: 322417 - DNA, 25 bp, Artificial
  Probe
agagaaaatcgctgcagcgacataa

SEQ ID NO: 322418 - DNA, 25 bp, Artificial
  Probe
gacaaagctcagctccacaccaaga

SEQ ID NO: 322419 - DNA, 25 bp, Artificial
  Probe
tggccacctacttgcgctatgtgcg

SEQ ID NO: 322420 - DNA, 25 bp, Artificial
  Probe
tgcagcgacataagtgagggacttt

SEQ ID NO: 322421 - DNA, 25 bp, Artificial
  Probe
gcactgcttcctctggccggtggtg

SEQ ID NO: 322422 - DNA, 25 bp, Artificial
  Probe
gcttgtatcccgtgtgctgtagcaa

SEQ ID NO: 322423 - DNA, 25 bp, Artificial
  Probe
gtgccaagagcctggcagtcaaggc

SEQ ID NO: 322424 - DNA, 25 bp, Artificial
  Probe
atcgtggtcctcaccatctgtgcca

SEQ ID NO: 322425 - DNA, 25 bp, Artificial
  Probe
tttaatcaacatcaaagaccagagg

SEQ ID NO: 322426 - DNA, 25 bp, Artificial
  Probe
gcgcacacatgacgagattgtcctc

SEQ ID NO: 322427 - DNA, 25 bp, Artificial
  Probe
accatctgtgccaagagcctggcag

SEQ ID NO: 322428 - DNA, 25 bp, Artificial
  Probe
tgtagcaatggctaaagggtcaagc

SEQ ID NO: 322429 - DNA, 25 bp, Artificial
  Probe
ctcctgcagcgcacacatgacgaga

SEQ ID NO: 322430 - DNA, 25 bp, Artificial
  Probe
tggtcctcaccatctgtgccaagag

SEQ ID NO: 322431 - DNA, 25 bp, Artificial
  Probe
acgttctcctgcagcgcacacatga

SEQ ID NO: 322432 - DNA, 25 bp, Artificial
  Probe
tgggtgtcctcatcgtggtcctcac

SEQ ID NO: 322433 - DNA, 25 bp, Artificial
  Probe
agaagcaggcacagctggaagactg

SEQ ID NO: 322434 - DNA, 25 bp, Artificial
  Probe
ctgcactgcttcctctggccggtgg

SEQ ID NO: 322435 - DNA, 25 bp, Artificial
  Probe
caagagcctggcagtcaaggcagaa

SEQ ID NO: 322436 - DNA, 25 bp, Artificial
  Probe
ctcatcgtggtcctcaccatctgtg

SEQ ID NO: 322437 - DNA, 25 bp, Artificial
  Probe
agtcaaggcagaagccatgaagaaa

SEQ ID NO: 322438 - DNA, 25 bp, Artificial
  Probe
tcatcgtggtcctcaccatctgtgc

SEQ ID NO: 322439 - DNA, 25 bp, Artificial
  Probe
gcccacatttggtggcgcaggagat

SEQ ID NO: 322440 - DNA, 25 bp, Artificial
  Probe
ggttcccagccattcacttgctatt

SEQ ID NO: 322441 - DNA, 25 bp, Artificial
  Probe
ccagaggctgcctcatgggcactcg

SEQ ID NO: 322442 - DNA, 25 bp, Artificial
  Probe
gcagaagcaggcacagctggaagac

SEQ ID NO: 322443 - DNA, 25 bp, Artificial
  Probe
agaggctgcctcatgggcactcgcc

SEQ ID NO: 322444 - DNA, 25 bp, Artificial
  Probe
agaggacgttctcctgcagcgcaca

SEQ ID NO: 322445 - DNA, 25 bp, Artificial
  Probe
gcagtcaaggcagaagccatgaaga

SEQ ID NO: 322446 - DNA, 25 bp, Artificial
  Probe
tccctcaacggcagcagaagcaggc

SEQ ID NO: 322447 - DNA, 25 bp, Artificial
  Probe
ccagaggacgttctcctgcagcgca

SEQ ID NO: 322448 - DNA, 25 bp, Artificial
  Probe
tggagtgactgtttgggaaaccctc

SEQ ID NO: 322449 - DNA, 25 bp, Artificial
  Probe
tgactgtttgggaaaccctctaaga

SEQ ID NO: 322450 - DNA, 25 bp, Artificial
  Probe
agattgtcctcctgcactgcttcct

SEQ ID NO: 322451 - DNA, 25 bp, Artificial
  Probe
agaccagaggacgttctcctgcagc

SEQ ID NO: 322452 - DNA, 25 bp, Artificial
  Probe
aagaccagaggacgttctcctgcag

SEQ ID NO: 322453 - DNA, 25 bp, Artificial
  Probe
gcctggcagtcaaggcagaagccat

SEQ ID NO: 322454 - DNA, 25 bp, Artificial
  Probe
gtgtagtatacaaaccattatgact

SEQ ID NO: 322455 - DNA, 25 bp, Artificial
  Probe
tcccttggaaagttacagtctatta

SEQ ID NO: 322456 - DNA, 25 bp, Artificial
  Probe
aacggcagcagaagcaggcacagct

SEQ ID NO: 322457 - DNA, 25 bp, Artificial
  Probe
aagaccagaggctgcctcatgggca

SEQ ID NO: 322458 - DNA, 25 bp, Artificial
  Probe
cgtgtgctgtagcaatggctaaagg

SEQ ID NO: 322459 - DNA, 25 bp, Artificial
  Probe
tttcccttggaaagttacagtctat

SEQ ID NO: 322460 - DNA, 25 bp, Artificial
  Probe
caaagaccagaggacgttctcctgc

SEQ ID NO: 322461 - DNA, 25 bp, Artificial
  Probe
atctgtgccaagagcctggcagtca

SEQ ID NO: 322462 - DNA, 25 bp, Artificial
  Probe
ttgtgggaagccaagaccagaggct

SEQ ID NO: 322463 - DNA, 25 bp, Artificial
  Probe
ttgttgcttgtatcccgtgtgctgt

SEQ ID NO: 322464 - DNA, 25 bp, Artificial
  Probe
ctatggagtgactgtttgggaaacc

SEQ ID NO: 322465 - DNA, 25 bp, Artificial
  Probe
cctgcagagcccacatttggtggcg

SEQ ID NO: 322466 - DNA, 25 bp, Artificial
  Probe
gtgtcctcatcgtggtcctcaccat

SEQ ID NO: 322467 - DNA, 25 bp, Artificial
  Probe
cacttaacaaagacgggactccaag

SEQ ID NO: 322468 - DNA, 25 bp, Artificial
  Probe
agctttatggctcagagaaattgac

SEQ ID NO: 322469 - DNA, 25 bp, Artificial
  Probe
ccggcaggatcacagcctcttcggt

SEQ ID NO: 322470 - DNA, 25 bp, Artificial
  Probe
acatatacaaacacggagacacagg

SEQ ID NO: 322471 - DNA, 25 bp, Artificial
  Probe
ccttggcatgaatggcaaaggagag

SEQ ID NO: 322472 - DNA, 25 bp, Artificial
  Probe
gttccgtggagctggcgcacctgca

SEQ ID NO: 322473 - DNA, 25 bp, Artificial
  Probe
gacacaggtcgcaggtattttgtag

SEQ ID NO: 322474 - DNA, 25 bp, Artificial
  Probe
gtgccaggtccaaaagacaccaaaa

SEQ ID NO: 322475 - DNA, 25 bp, Artificial
  Probe
ggagctggcgcacctgcacggcatc

SEQ ID NO: 322476 - DNA, 25 bp, Artificial
  Probe
aacacggagacacaggtcgcaggta

SEQ ID NO: 322477 - DNA, 25 bp, Artificial
  Probe
caaacacggagacacaggtcgcagg

SEQ ID NO: 322478 - DNA, 25 bp, Artificial
  Probe
agtcccagagttatacaaagaccta

SEQ ID NO: 322479 - DNA, 25 bp, Artificial
  Probe
tgtaccttggcatgaatggcaaagg

SEQ ID NO: 322480 - DNA, 25 bp, Artificial
  Probe
cggagacacaggtcgcaggtatttt

SEQ ID NO: 322481 - DNA, 25 bp, Artificial
  Probe
agatcctgcccgacggcagtgtgca

SEQ ID NO: 322482 - DNA, 25 bp, Artificial
  Probe
cggcctgtaccttggcatgaatggc

SEQ ID NO: 322483 - DNA, 25 bp, Artificial
  Probe
aggtcgcaggtattttgtagcactt

SEQ ID NO: 322484 - DNA, 25 bp, Artificial
  Probe
gggacggtgccaggtccaaaagaca

SEQ ID NO: 322485 - DNA, 25 bp, Artificial
  Probe
tccaagggacggtgccaggtccaaa

SEQ ID NO: 322486 - DNA, 25 bp, Artificial
  Probe
tggagctggcgcacctgcacggcat

SEQ ID NO: 322487 - DNA, 25 bp, Artificial
  Probe
agggcacccggcaggatcacagcct

SEQ ID NO: 322488 - DNA, 25 bp, Artificial
  Probe
acccagagagagtcccagagttata

SEQ ID NO: 322489 - DNA, 25 bp, Artificial
  Probe
acggagacacaggtcgcaggtattt

SEQ ID NO: 322490 - DNA, 25 bp, Artificial
  Probe
accttggcatgaatggcaaaggaga

SEQ ID NO: 322491 - DNA, 25 bp, Artificial
  Probe
agttatacaaagacctactggtgta

SEQ ID NO: 322492 - DNA, 25 bp, Artificial
  Probe
cagcggcctgtaccttggcatgaat

SEQ ID NO: 322493 - DNA, 25 bp, Artificial
  Probe
ccagtggacccagagagagtcccag

SEQ ID NO: 322494 - DNA, 25 bp, Artificial
  Probe
atacaaacacggagacacaggtcgc

SEQ ID NO: 322495 - DNA, 25 bp, Artificial
  Probe
ctgtaccttggcatgaatggcaaag

SEQ ID NO: 322496 - DNA, 25 bp, Artificial
  Probe
acaggtcgcaggtattttgtagcac

SEQ ID NO: 322497 - DNA, 25 bp, Artificial
  Probe
agagagagtcccagagttatacaaa

SEQ ID NO: 322498 - DNA, 25 bp, Artificial
  Probe
cttcttgctgcctcctgcaggggag

SEQ ID NO: 322499 - DNA, 25 bp, Artificial
  Probe
caaagacctactggtgtacactgga

SEQ ID NO: 322500 - DNA, 25 bp, Artificial
  Probe
tattttgtagcacttaacaaagacg

SEQ ID NO: 322501 - DNA, 25 bp, Artificial
  Probe
cctggaattcatcagtgtggcggtg

SEQ ID NO: 322502 - DNA, 25 bp, Artificial
  Probe
ggatcacagcctcttcggtatcctg

SEQ ID NO: 322503 - DNA, 25 bp, Artificial
  Probe
ttatggctcagagaaattgacttct

SEQ ID NO: 322504 - DNA, 25 bp, Artificial
  Probe
acacaggtcgcaggtattttgtagc

SEQ ID NO: 322505 - DNA, 25 bp, Artificial
  Probe
gggtcgcacttcttgctgcctcctg

SEQ ID NO: 322506 - DNA, 25 bp, Artificial
  Probe
tacaaacacggagacacaggtcgca

SEQ ID NO: 322507 - DNA, 25 bp, Artificial
  Probe
tacaaagacctactggtgtacactg

SEQ ID NO: 322508 - DNA, 25 bp, Artificial
  Probe
aattgacttctgaatgcatcttcag

SEQ ID NO: 322509 - DNA, 25 bp, Artificial
  Probe
ttcttgctgcctcctgcaggggagc

SEQ ID NO: 322510 - DNA, 25 bp, Artificial
  Probe
cggcaggatcacagcctcttcggta

SEQ ID NO: 322511 - DNA, 25 bp, Artificial
  Probe
ttcggtatcctggaattcatcagtg

SEQ ID NO: 322512 - DNA, 25 bp, Artificial
  Probe
gaatgcatcttcagggaacaatttg

SEQ ID NO: 322513 - DNA, 25 bp, Artificial
  Probe
agctggccatcctgcctcaggggca

SEQ ID NO: 322514 - DNA, 25 bp, Artificial
  Probe
aatgccagagccaacctggacttcc

SEQ ID NO: 322515 - DNA, 25 bp, Artificial
  Probe
cagagctgctgtaggctgaatgtat

SEQ ID NO: 322516 - DNA, 25 bp, Artificial
  Probe
aaagccttctggatccatgggtaga

SEQ ID NO: 322517 - DNA, 25 bp, Artificial
  Probe
ctggattgaccgaagtctgcagaac

SEQ ID NO: 322518 - DNA, 25 bp, Artificial
  Probe
ccagaggcagctaagacagaaagct

SEQ ID NO: 322519 - DNA, 25 bp, Artificial
  Probe
ttacttgagccagaggcagctaaga

SEQ ID NO: 322520 - DNA, 25 bp, Artificial
  Probe
gcctgtcaccagagctgctgtaggc

SEQ ID NO: 322521 - DNA, 25 bp, Artificial
  Probe
ttctctgtccacagatcaggaaggg

SEQ ID NO: 322522 - DNA, 25 bp, Artificial
  Probe
aaagctggattgaccgaagtctgca

SEQ ID NO: 322523 - DNA, 25 bp, Artificial
  Probe
tgcgacaagggcttgtttagaaagc

SEQ ID NO: 322524 - DNA, 25 bp, Artificial
  Probe
tctgagaaccagctggccatcctgc

SEQ ID NO: 322525 - DNA, 25 bp, Artificial
  Probe
gtggttagccaactccaggcccctg

SEQ ID NO: 322526 - DNA, 25 bp, Artificial
  Probe
caccagagctgctgtaggctgaatg

SEQ ID NO: 322527 - DNA, 25 bp, Artificial
  Probe
tacttgagccagaggcagctaagac

SEQ ID NO: 322528 - DNA, 25 bp, Artificial
  Probe
gatatctgaacacagttgactttta

SEQ ID NO: 322529 - DNA, 25 bp, Artificial
  Probe
agaagaccggaattgctgctgttcg

SEQ ID NO: 322530 - DNA, 25 bp, Artificial
  Probe
ctggtctgtgtaacaagccaaacaa

SEQ ID NO: 322531 - DNA, 25 bp, Artificial
  Probe
cccctcaggtggtctgtgctttctt

SEQ ID NO: 322532 - DNA, 25 bp, Artificial
  Probe
tttcttctctgtccacagatcagga

SEQ ID NO: 322533 - DNA, 25 bp, Artificial
  Probe
gctgctgtaggctgaatgtatgtct

SEQ ID NO: 322534 - DNA, 25 bp, Artificial
  Probe
gcccctgcgacaagggcttgtttag

SEQ ID NO: 322535 - DNA, 25 bp, Artificial
  Probe
tttggctgaagaagaccggaattgc

SEQ ID NO: 322536 - DNA, 25 bp, Artificial
  Probe
gaaagctggattgaccgaagtctgc

SEQ ID NO: 322537 - DNA, 25 bp, Artificial
  Probe
aaagcctgtcaccagagctgctgta

SEQ ID NO: 322538 - DNA, 25 bp, Artificial
  Probe
ctgtgtcgtaaatgccagagccaac

SEQ ID NO: 322539 - DNA, 25 bp, Artificial
  Probe
ttccctcgtctttggctgaagaaga

SEQ ID NO: 322540 - DNA, 25 bp, Artificial
  Probe
tgagccagaggcagctaagacagaa

SEQ ID NO: 322541 - DNA, 25 bp, Artificial
  Probe
gactgttgaaacttacttgagccag

SEQ ID NO: 322542 - DNA, 25 bp, Artificial
  Probe
gccagagccaacctggacttcctgt

SEQ ID NO: 322543 - DNA, 25 bp, Artificial
  Probe
tgaccgaagtctgcagaaccttccc

SEQ ID NO: 322544 - DNA, 25 bp, Artificial
  Probe
gaaacttacttgagccagaggcagc

SEQ ID NO: 322545 - DNA, 25 bp, Artificial
  Probe
aggagctttacagatttcagatcct

SEQ ID NO: 322546 - DNA, 25 bp, Artificial
  Probe
caggcccctgcgacaagggcttgtt

SEQ ID NO: 322547 - DNA, 25 bp, Artificial
  Probe
cttctggatccatgggtagagagag

SEQ ID NO: 322548 - DNA, 25 bp, Artificial
  Probe
ccttccctcgtctttggctgaagaa

SEQ ID NO: 322549 - DNA, 25 bp, Artificial
  Probe
ctcgtctttggctgaagaagaccgg

SEQ ID NO: 322550 - DNA, 25 bp, Artificial
  Probe
gtgtaacaagccaaacaagcctttt

SEQ ID NO: 322551 - DNA, 25 bp, Artificial
  Probe
ctgctgtaggctgaatgtatgtctg

SEQ ID NO: 322552 - DNA, 25 bp, Artificial
  Probe
tagaaagcctgtcaccagagctgct

SEQ ID NO: 322553 - DNA, 25 bp, Artificial
  Probe
cgacaagggcttgtttagaaagcct

SEQ ID NO: 322554 - DNA, 25 bp, Artificial
  Probe
aatgtatgtctgtgtcgtaaatgcc

SEQ ID NO: 322555 - DNA, 25 bp, Artificial
  Probe
ttaaaaagccttctggatccatggg

SEQ ID NO: 322556 - DNA, 25 bp, Artificial
  Probe
ggatatctgaacacagttgactttt

SEQ ID NO: 322557 - DNA, 25 bp, Artificial
  Probe
ggtggttagccaactccaggcccct

SEQ ID NO: 322558 - DNA, 25 bp, Artificial
  Probe
tttaaaaagccttctggatccatgg

SEQ ID NO: 322559 - DNA, 25 bp, Artificial
  Probe
gcagacctgctgcagctcctggaga

SEQ ID NO: 322560 - DNA, 25 bp, Artificial
  Probe
tgattacaggcctaaaacagaagac

SEQ ID NO: 322561 - DNA, 25 bp, Artificial
  Probe
gcctaaaacagaagactctgtatgg

SEQ ID NO: 322562 - DNA, 25 bp, Artificial
  Probe
ctgtgcagggacacgcatgcttttg

SEQ ID NO: 322563 - DNA, 25 bp, Artificial
  Probe
taccttactggctgggatgaatctc

SEQ ID NO: 322564 - DNA, 25 bp, Artificial
  Probe
gaatctcaggccaatcactttgctg

SEQ ID NO: 322565 - DNA, 25 bp, Artificial
  Probe
caagtctgtctggtacaaatattgt

SEQ ID NO: 322566 - DNA, 25 bp, Artificial
  Probe
gctaaaactctcagtaaacagagca

SEQ ID NO: 322567 - DNA, 25 bp, Artificial
  Probe
tacaggcctaaaacagaagactctg

SEQ ID NO: 322568 - DNA, 25 bp, Artificial
  Probe
agtaaacagagcatctccaactctg

SEQ ID NO: 322569 - DNA, 25 bp, Artificial
  Probe
cccaactgggataacgagttcaaga

SEQ ID NO: 322570 - DNA, 25 bp, Artificial
  Probe
cagtctgagactcaaaaagatctac

SEQ ID NO: 322571 - DNA, 25 bp, Artificial
  Probe
ggcccacgtggagtccacttcatct

SEQ ID NO: 322572 - DNA, 25 bp, Artificial
  Probe
cgaagccttggctaaaactctcagt

SEQ ID NO: 322573 - DNA, 25 bp, Artificial
  Probe
gccccgaagccttggctaaaactct

SEQ ID NO: 322574 - DNA, 25 bp, Artificial
  Probe
gttgatgggccctttggtacagcca

SEQ ID NO: 322575 - DNA, 25 bp, Artificial
  Probe
aagatctacttctactggctgtgca

SEQ ID NO: 322576 - DNA, 25 bp, Artificial
  Probe
cttttgagtggttcgcagacctgct

SEQ ID NO: 322577 - DNA, 25 bp, Artificial
  Probe
tatggacggcccaactgggataacg

SEQ ID NO: 322578 - DNA, 25 bp, Artificial
  Probe
ataggagtttttctgtgtggccccg

SEQ ID NO: 322579 - DNA, 25 bp, Artificial
  Probe
ataacgagttcaagaccattgcaag

SEQ ID NO: 322580 - DNA, 25 bp, Artificial
  Probe
gccctttggtacagccagtgaagat

SEQ ID NO: 322581 - DNA, 25 bp, Artificial
  Probe
aacagaagactctgtatggacggcc

SEQ ID NO: 322582 - DNA, 25 bp, Artificial
  Probe
gctacaacatctaccttactggctg

SEQ ID NO: 322583 - DNA, 25 bp, Artificial
  Probe
atattgtgacaatgccaccagtctg

SEQ ID NO: 322584 - DNA, 25 bp, Artificial
  Probe
acagccagtgaagatgtgttcagct

SEQ ID NO: 322585 - DNA, 25 bp, Artificial
  Probe
ggctgtgcagggacacgcatgcttt

SEQ ID NO: 322586 - DNA, 25 bp, Artificial
  Probe
gagtttttctgtgtggccccgaagc

SEQ ID NO: 322587 - DNA, 25 bp, Artificial
  Probe
gggatgaatctcaggccaatcactt

SEQ ID NO: 322588 - DNA, 25 bp, Artificial
  Probe
tgtgacaatgccaccagtctgagac

SEQ ID NO: 322589 - DNA, 25 bp, Artificial
  Probe
tgcctccattctcaagtctgtctgg

SEQ ID NO: 322590 - DNA, 25 bp, Artificial
  Probe
aatattgtgacaatgccaccagtct

SEQ ID NO: 322591 - DNA, 25 bp, Artificial
  Probe
tggtacagccagtgaagatgtgttc

SEQ ID NO: 322592 - DNA, 25 bp, Artificial
  Probe
tactggctgggatgaatctcaggcc

SEQ ID NO: 322593 - DNA, 25 bp, Artificial
  Probe
caccacgatgaggagaaagatgtga

SEQ ID NO: 322594 - DNA, 25 bp, Artificial
  Probe
gagcatctccaactctgagtccggc

SEQ ID NO: 322595 - DNA, 25 bp, Artificial
  Probe
gatagcagttgatgggccctttggt

SEQ ID NO: 322596 - DNA, 25 bp, Artificial
  Probe
gactctgtatggacggcccaactgg

SEQ ID NO: 322597 - DNA, 25 bp, Artificial
  Probe
gcagggacacgcatgcttttgagtg

SEQ ID NO: 322598 - DNA, 25 bp, Artificial
  Probe
ctgtctggtacaaatattgtgacaa

SEQ ID NO: 322599 - DNA, 25 bp, Artificial
  Probe
gttcaagaccattgcaagtcaacac

SEQ ID NO: 322600 - DNA, 25 bp, Artificial
  Probe
ggacggcccaactgggataacgagt

SEQ ID NO: 322601 - DNA, 25 bp, Artificial
  Probe
tgtgtggccccgaagccttggctaa

SEQ ID NO: 322602 - DNA, 25 bp, Artificial
  Probe
aacaccagaataggagtttttctgt

SEQ ID NO: 322603 - DNA, 25 bp, Artificial
  Probe
acaccccaacaccagaataggagtt

SEQ ID NO: 322604 - DNA, 25 bp, Artificial
  Probe
gtgtggccccgaagccttggctaaa

SEQ ID NO: 322605 - DNA, 25 bp, Artificial
  Probe
tgctcttgctctacctctcggtggg

SEQ ID NO: 322606 - DNA, 25 bp, Artificial
  Probe
ccagaagcaacttgagagcgccatg

SEQ ID NO: 322607 - DNA, 25 bp, Artificial
  Probe
caatttaagggactactatgctcat

SEQ ID NO: 322608 - DNA, 25 bp, Artificial
  Probe
tatggagacgtggtcccagggacca

SEQ ID NO: 322609 - DNA, 25 bp, Artificial
  Probe
ggggccaccctgaagtacagctaca

SEQ ID NO: 322610 - DNA, 25 bp, Artificial
  Probe
gtggtcttgcccatcactttgatct

SEQ ID NO: 322611 - DNA, 25 bp, Artificial
  Probe
cgaattctcaagctggccagacact

SEQ ID NO: 322612 - DNA, 25 bp, Artificial
  Probe
tcccagggaccacagctgggaagct

SEQ ID NO: 322613 - DNA, 25 bp, Artificial
  Probe
agctacaaggaagtggggttgctct

SEQ ID NO: 322614 - DNA, 25 bp, Artificial
  Probe
gggccacggtcagcatgactaccgt

SEQ ID NO: 322615 - DNA, 25 bp, Artificial
  Probe
ctcataaagttaagtccctcatggc

SEQ ID NO: 322616 - DNA, 25 bp, Artificial
  Probe
ctccgtcaatttaagggactactat

SEQ ID NO: 322617 - DNA, 25 bp, Artificial
  Probe
ggagttcacccagtgaactgagttt

SEQ ID NO: 322618 - DNA, 25 bp, Artificial
  Probe
ggggatttccatcttctctgtggtg

SEQ ID NO: 322619 - DNA, 25 bp, Artificial
  Probe
ctacaccattgaaaaggaagagaac

SEQ ID NO: 322620 - DNA, 25 bp, Artificial
  Probe
gcctaccttggctaacttgggcagg

SEQ ID NO: 322621 - DNA, 25 bp, Artificial
  Probe
ctgagtttagacgactctctacatt

SEQ ID NO: 322622 - DNA, 25 bp, Artificial
  Probe
tatcggcgccagaagcaacttgaga

SEQ ID NO: 322623 - DNA, 25 bp, Artificial
  Probe
gagtaggagttcacccagtgaactg

SEQ ID NO: 322624 - DNA, 25 bp, Artificial
  Probe
tggccaccattcctgcctgctggtg

SEQ ID NO: 322625 - DNA, 25 bp, Artificial
  Probe
agaacgagggcctggccaccattcc

SEQ ID NO: 322626 - DNA, 25 bp, Artificial
  Probe
tacagctacaaggaagtggggttgc

SEQ ID NO: 322627 - DNA, 25 bp, Artificial
  Probe
tccttgggggccaccctgaagtaca

SEQ ID NO: 322628 - DNA, 25 bp, Artificial
  Probe
ctgatgagaatcttccgaattctca

SEQ ID NO: 322629 - DNA, 25 bp, Artificial
  Probe
actgcctctgcctgcatcttggcag

SEQ ID NO: 322630 - DNA, 25 bp, Artificial
  Probe
aggaagtggggttgctcttgctcta

SEQ ID NO: 322631 - DNA, 25 bp, Artificial
  Probe
caagcctgacaaatatgagtaggag

SEQ ID NO: 322632 - DNA, 25 bp, Artificial
  Probe
atggagacgtggtcccagggaccac

SEQ ID NO: 322633 - DNA, 25 bp, Artificial
  Probe
accctgaagtacagctacaaggaag

SEQ ID NO: 322634 - DNA, 25 bp, Artificial
  Probe
agcgccatgcgcagctgtgactttg

SEQ ID NO: 322635 - DNA, 25 bp, Artificial
  Probe
atgagtaggagttcacccagtgaac

SEQ ID NO: 322636 - DNA, 25 bp, Artificial
  Probe
tgggaagctgactgcctctgcctgc

SEQ ID NO: 322637 - DNA, 25 bp, Artificial
  Probe
tcttctctgtggtggcctacaccat

SEQ ID NO: 322638 - DNA, 25 bp, Artificial
  Probe
ggactactatgctcataaagttaag

SEQ ID NO: 322639 - DNA, 25 bp, Artificial
  Probe
tcctgaggctgatgagaatcttccg

SEQ ID NO: 322640 - DNA, 25 bp, Artificial
  Probe
cttccgaattctcaagctggccaga

SEQ ID NO: 322641 - DNA, 25 bp, Artificial
  Probe
cttgagagcgccatgcgcagctgtg

SEQ ID NO: 322642 - DNA, 25 bp, Artificial
  Probe
cccagtgaactgagtttagacgact

SEQ ID NO: 322643 - DNA, 25 bp, Artificial
  Probe
gtggctcaagtcctgaggctgatga

SEQ ID NO: 322644 - DNA, 25 bp, Artificial
  Probe
ggtcttgcccatcactttgatcttc

SEQ ID NO: 322645 - DNA, 25 bp, Artificial
  Probe
catgcgcagctgtgactttggggat

SEQ ID NO: 322646 - DNA, 25 bp, Artificial
  Probe
ctgcctgcatcttggcaggtatcct

SEQ ID NO: 322647 - DNA, 25 bp, Artificial
  Probe
gtcagcatgactaccgttgggtatg

SEQ ID NO: 322648 - DNA, 25 bp, Artificial
  Probe
aagcaacttgagagcgccatgcgca

SEQ ID NO: 322649 - DNA, 25 bp, Artificial
  Probe
ttgagagcgccatgcgcagctgtga

SEQ ID NO: 322650 - DNA, 25 bp, Artificial
  Probe
catcttggcaggtatcctggtggtg

SEQ ID NO: 322651 - DNA, 25 bp, Artificial
  Probe
tcctacacccggatctggagtaagc

SEQ ID NO: 322652 - DNA, 25 bp, Artificial
  Probe
aggttggatgccattcactcggagg

SEQ ID NO: 322653 - DNA, 25 bp, Artificial
  Probe
tggcctcactgactctttttcagag

SEQ ID NO: 322654 - DNA, 25 bp, Artificial
  Probe
gcctctgggcatcatatctttctcc

SEQ ID NO: 322655 - DNA, 25 bp, Artificial
  Probe
tagtggtgtttgcagtcagctggct

SEQ ID NO: 322656 - DNA, 25 bp, Artificial
  Probe
cccggatctggagtaagctaaagaa

SEQ ID NO: 322657 - DNA, 25 bp, Artificial
  Probe
ttttcagaggccaccaacgtgtaag

SEQ ID NO: 322658 - DNA, 25 bp, Artificial
  Probe
tcagccttccgctgtgagcagaggt

SEQ ID NO: 322659 - DNA, 25 bp, Artificial
  Probe
gaacagcaactacagaaaagctttc

SEQ ID NO: 322660 - DNA, 25 bp, Artificial
  Probe
ctttgagattgtagcctgtactgag

SEQ ID NO: 322661 - DNA, 25 bp, Artificial
  Probe
cacattattgcgatgtgctccacct

SEQ ID NO: 322662 - DNA, 25 bp, Artificial
  Probe
tgactctttttcagaggccaccaac

SEQ ID NO: 322663 - DNA, 25 bp, Artificial
  Probe
tgtcctggacctgaaggagtacaaa

SEQ ID NO: 322664 - DNA, 25 bp, Artificial
  Probe
tggatgaacagcaactacagaaaag

SEQ ID NO: 322665 - DNA, 25 bp, Artificial
  Probe
gaacaatggcctcactgactctttt

SEQ ID NO: 322666 - DNA, 25 bp, Artificial
  Probe
gagtacaaactcatcttcaccgtgt

SEQ ID NO: 322667 - DNA, 25 bp, Artificial
  Probe
tctttctcctacacccggatctgga

SEQ ID NO: 322668 - DNA, 25 bp, Artificial
  Probe
ctccatgccttccaacttgctgtgg

SEQ ID NO: 322669 - DNA, 25 bp, Artificial
  Probe
ctgactctttttcagaggccaccaa

SEQ ID NO: 322670 - DNA, 25 bp, Artificial
  Probe
acatcgacagccatgtcctggacct

SEQ ID NO: 322671 - DNA, 25 bp, Artificial
  Probe
attgtagcctgtactgagaaatggc

SEQ ID NO: 322672 - DNA, 25 bp, Artificial
  Probe
gtttgcagtcagctggctgcccctc

SEQ ID NO: 322673 - DNA, 25 bp, Artificial
  Probe
ctgtgagcagaggttggatgccatt

SEQ ID NO: 322674 - DNA, 25 bp, Artificial
  Probe
cttcaccgtgttccacattattgcg

SEQ ID NO: 322675 - DNA, 25 bp, Artificial
  Probe
ccattcactcggaggtgtccatgac

SEQ ID NO: 322676 - DNA, 25 bp, Artificial
  Probe
acgttttgcctctgggcatcatatc

SEQ ID NO: 322677 - DNA, 25 bp, Artificial
  Probe
aaggagtacaaactcatcttcaccg

SEQ ID NO: 322678 - DNA, 25 bp, Artificial
  Probe
attgcgatgtgctccaccttcgcca

SEQ ID NO: 322679 - DNA, 25 bp, Artificial
  Probe
acggtacagtctacagcctttccac

SEQ ID NO: 322680 - DNA, 25 bp, Artificial
  Probe
ttgcctctgggcatcatatctttct

SEQ ID NO: 322681 - DNA, 25 bp, Artificial
  Probe
ccaaaatgctcgtgtgcgtggtagt

SEQ ID NO: 322682 - DNA, 25 bp, Artificial
  Probe
ttagtcctggagctgcaagtgacca

SEQ ID NO: 322683 - DNA, 25 bp, Artificial
  Probe
agcctgtactgagaaatggcccggg

SEQ ID NO: 322684 - DNA, 25 bp, Artificial
  Probe
gctaatcctctacgttttgcctctg

SEQ ID NO: 322685 - DNA, 25 bp, Artificial
  Probe
agtgtgtacggtacagtctacagcc

SEQ ID NO: 322686 - DNA, 25 bp, Artificial
  Probe
taagctaaagaaccacgttagtcct

SEQ ID NO: 322687 - DNA, 25 bp, Artificial
  Probe
cttccgctgtgagcagaggttggat

SEQ ID NO: 322688 - DNA, 25 bp, Artificial
  Probe
gttccacattattgcgatgtgctcc

SEQ ID NO: 322689 - DNA, 25 bp, Artificial
  Probe
gactttgagattgtagcctgtactg

SEQ ID NO: 322690 - DNA, 25 bp, Artificial
  Probe
agaacaatggcctcactgactcttt

SEQ ID NO: 322691 - DNA, 25 bp, Artificial
  Probe
tccatgaccttcaaggctaaaaaga

SEQ ID NO: 322692 - DNA, 25 bp, Artificial
  Probe
cttctctatggctggatgaacagca

SEQ ID NO: 322693 - DNA, 25 bp, Artificial
  Probe
ctatggctggatgaacagcaactac

SEQ ID NO: 322694 - DNA, 25 bp, Artificial
  Probe
cgaaggcacaaaacgaccaaaatgc

SEQ ID NO: 322695 - DNA, 25 bp, Artificial
  Probe
actcactgattgagattattcctga

SEQ ID NO: 322696 - DNA, 25 bp, Artificial
  Probe
taccatcagcgaaggcacaaaacga

SEQ ID NO: 322697 - DNA, 25 bp, Artificial
  Probe
aagagaggctgcacaagctagtatg

SEQ ID NO: 322698 - DNA, 25 bp, Artificial
  Probe
catgtgcgaagagaggctgcacaag

SEQ ID NO: 322699 - DNA, 25 bp, Artificial
  Probe
ctggagtatccatgtgcgaagagag

SEQ ID NO: 322700 - DNA, 25 bp, Artificial
  Probe
aaacttggtgtataaccacgtgact

SEQ ID NO: 322701 - DNA, 25 bp, Artificial
  Probe
ataatggtacctgagcctccatgtg

SEQ ID NO: 322702 - DNA, 25 bp, Artificial
  Probe
cttcaaggcaggtactatggtattt

SEQ ID NO: 322703 - DNA, 25 bp, Artificial
  Probe
tgaacagtgggctcctgctcgtcgt

SEQ ID NO: 322704 - DNA, 25 bp, Artificial
  Probe
agcccttaagagtcctcgcctgtct

SEQ ID NO: 322705 - DNA, 25 bp, Artificial
  Probe
cagctctcgcgcaaagcatgctggg

SEQ ID NO: 322706 - DNA, 25 bp, Artificial
  Probe
ccttgtaagttttcattgtcaagga

SEQ ID NO: 322707 - DNA, 25 bp, Artificial
  Probe
catcttgccgccatggtctgtgtgt

SEQ ID NO: 322708 - DNA, 25 bp, Artificial
  Probe
aagcagctcctaagccagggacgcc

SEQ ID NO: 322709 - DNA, 25 bp, Artificial
  Probe
gggctcctgctcgtcgtctgcgaac

SEQ ID NO: 322710 - DNA, 25 bp, Artificial
  Probe
tactgcatttagtaagagtgcacag

SEQ ID NO: 322711 - DNA, 25 bp, Artificial
  Probe
agaataacttcaaggcaggtactat

SEQ ID NO: 322712 - DNA, 25 bp, Artificial
  Probe
cagggccaggtgtgcaataaaagca

SEQ ID NO: 322713 - DNA, 25 bp, Artificial
  Probe
atccggaactagatgtattgcagaa

SEQ ID NO: 322714 - DNA, 25 bp, Artificial
  Probe
ctctgctgttgtgatgtaacattta

SEQ ID NO: 322715 - DNA, 25 bp, Artificial
  Probe
cacaaagcacatggacagggttgtt

SEQ ID NO: 322716 - DNA, 25 bp, Artificial
  Probe
ttgtttgagggctccatgaatcact

SEQ ID NO: 322717 - DNA, 25 bp, Artificial
  Probe
ctctctctgctgttgtgatgtaaca

SEQ ID NO: 322718 - DNA, 25 bp, Artificial
  Probe
attttagcagtggacttggatttcc

SEQ ID NO: 322719 - DNA, 25 bp, Artificial
  Probe
gaagctcttctggagtggaaagagc

SEQ ID NO: 322720 - DNA, 25 bp, Artificial
  Probe
gactattctgacgtaaagaataact

SEQ ID NO: 322721 - DNA, 25 bp, Artificial
  Probe
agacctatggagaggcagatcagtg

SEQ ID NO: 322722 - DNA, 25 bp, Artificial
  Probe
ctatgcgtacttgtggagctgaagg

SEQ ID NO: 322723 - DNA, 25 bp, Artificial
  Probe
acagcatcagccagggccaggtgtg

SEQ ID NO: 322724 - DNA, 25 bp, Artificial
  Probe
acatttagagactattctgacgtaa

SEQ ID NO: 322725 - DNA, 25 bp, Artificial
  Probe
ttagaccggagctggccagcatact

SEQ ID NO: 322726 - DNA, 25 bp, Artificial
  Probe
ggaaagagcccttaagagtcctcgc

SEQ ID NO: 322727 - DNA, 25 bp, Artificial
  Probe
tgcaataaaagcagctcctaagcca

SEQ ID NO: 322728 - DNA, 25 bp, Artificial
  Probe
gtgcacaaactacttgtaataaaag

SEQ ID NO: 322729 - DNA, 25 bp, Artificial
  Probe
gccagcatactctatgcgtacttgt

SEQ ID NO: 322730 - DNA, 25 bp, Artificial
  Probe
gagtgctggagtatccatgtgcgaa

SEQ ID NO: 322731 - DNA, 25 bp, Artificial
  Probe
tagtttgcaaacgtttacatgttct

SEQ ID NO: 322732 - DNA, 25 bp, Artificial
  Probe
acctggaggacagcatcagccaggg

SEQ ID NO: 322733 - DNA, 25 bp, Artificial
  Probe
tgactttctgaggaaagagaacact

SEQ ID NO: 322734 - DNA, 25 bp, Artificial
  Probe
ccagtgttttctatgtgagacattt

SEQ ID NO: 322735 - DNA, 25 bp, Artificial
  Probe
gatcttgcatttggttttctccgtc

SEQ ID NO: 322736 - DNA, 25 bp, Artificial
  Probe
agagtcctcgcctgtctcacaaagc

SEQ ID NO: 322737 - DNA, 25 bp, Artificial
  Probe
gtttgcaaacgtttacatgttctct

SEQ ID NO: 322738 - DNA, 25 bp, Artificial
  Probe
catgctgggctctgccaccatcttg

SEQ ID NO: 322739 - DNA, 25 bp, Artificial
  Probe
gactctagttgtttccgcgtgggtt

SEQ ID NO: 322740 - DNA, 25 bp, Artificial
  Probe
ccatggtctgtgtgttttcaaagat

SEQ ID NO: 322741 - DNA, 25 bp, Artificial
  Probe
gatactgcatttagtaagagtgcac

SEQ ID NO: 322742 - DNA, 25 bp, Artificial
  Probe
aatagtgtttcatacacataggcta

SEQ ID NO: 322743 - DNA, 25 bp, Artificial
  Probe
agctgaggcgcctgaaatggcagca

SEQ ID NO: 322744 - DNA, 25 bp, Artificial
  Probe
agcacgaagaagcagtcgaggcacc

SEQ ID NO: 322745 - DNA, 25 bp, Artificial
  Probe
tcacagaccgagagccggcctttgg

SEQ ID NO: 322746 - DNA, 25 bp, Artificial
  Probe
agagtcaggatgtcagccatagctt

SEQ ID NO: 322747 - DNA, 25 bp, Artificial
  Probe
ctaccctagctgagggctctgctga

SEQ ID NO: 322748 - DNA, 25 bp, Artificial
  Probe
ttcttcagggagagctgaggcgcct

SEQ ID NO: 322749 - DNA, 25 bp, Artificial
  Probe
caatggctctgcaggctcatcccta

SEQ ID NO: 322750 - DNA, 25 bp, Artificial
  Probe
catccccgggagaagggacagacta

SEQ ID NO: 322751 - DNA, 25 bp, Artificial
  Probe
gatgagaaccggattcttcagggag

SEQ ID NO: 322752 - DNA, 25 bp, Artificial
  Probe
tggcccatttagaagatgagaaccg

SEQ ID NO: 322753 - DNA, 25 bp, Artificial
  Probe
gggctctgctgaagcaaccccagac

SEQ ID NO: 322754 - DNA, 25 bp, Artificial
  Probe
acatcatggagaagctccgccacgc

SEQ ID NO: 322755 - DNA, 25 bp, Artificial
  Probe
gtcagaaggcagtcatccccgggag

SEQ ID NO: 322756 - DNA, 25 bp, Artificial
  Probe
tggacagcaggctccgtgcagcatg

SEQ ID NO: 322757 - DNA, 25 bp, Artificial
  Probe
tcagccatagcttagaagacatcat

SEQ ID NO: 322758 - DNA, 25 bp, Artificial
  Probe
tcgagaagattctggcccatttaga

SEQ ID NO: 322759 - DNA, 25 bp, Artificial
  Probe
ccagaccaccgcaatgaagagcttc

SEQ ID NO: 322760 - DNA, 25 bp, Artificial
  Probe
gcagcatggccacagaaagcaaggg

SEQ ID NO: 322761 - DNA, 25 bp, Artificial
  Probe
agagccggcctttggacagcaggct

SEQ ID NO: 322762 - DNA, 25 bp, Artificial
  Probe
agacactgaggctgcagatgatgtg

SEQ ID NO: 322763 - DNA, 25 bp, Artificial
  Probe
cactgaatcagatggcaatggctct

SEQ ID NO: 322764 - DNA, 25 bp, Artificial
  Probe
attcttcagggagagctgaggcgcc

SEQ ID NO: 322765 - DNA, 25 bp, Artificial
  Probe
gtcatccccgggagaagggacagac

SEQ ID NO: 322766 - DNA, 25 bp, Artificial
  Probe
tggagacacgcatgcagatccttga

SEQ ID NO: 322767 - DNA, 25 bp, Artificial
  Probe
gcacgaagaagcagtcgaggcacct

SEQ ID NO: 322768 - DNA, 25 bp, Artificial
  Probe
gccacagaaagcaagggggaactcg

SEQ ID NO: 322769 - DNA, 25 bp, Artificial
  Probe
ggaactcgagaagattctggcccat

SEQ ID NO: 322770 - DNA, 25 bp, Artificial
  Probe
cctgaaatggcagcacgaagaagca

SEQ ID NO: 322771 - DNA, 25 bp, Artificial
  Probe
cacccactgaatcagatggcaatgg

SEQ ID NO: 322772 - DNA, 25 bp, Artificial
  Probe
caagcagttagagtctcagctgcaa

SEQ ID NO: 322773 - DNA, 25 bp, Artificial
  Probe
gaagggacagactactccagacact

SEQ ID NO: 322774 - DNA, 25 bp, Artificial
  Probe
ctccgtgcagcatggccacagaaag

SEQ ID NO: 322775 - DNA, 25 bp, Artificial
  Probe
agagcttctagctgaagccaggatc

SEQ ID NO: 322776 - DNA, 25 bp, Artificial
  Probe
agaaggcagtcatccccgggagaag

SEQ ID NO: 322777 - DNA, 25 bp, Artificial
  Probe
accggattcttcagggagagctgag

SEQ ID NO: 322778 - DNA, 25 bp, Artificial
  Probe
aatcagatggcaatggctctgcagg

SEQ ID NO: 322779 - DNA, 25 bp, Artificial
  Probe
gctgcaacgcctgagagagctgctc

SEQ ID NO: 322780 - DNA, 25 bp, Artificial
  Probe
acgccagtcagaaggcagtcatccc

SEQ ID NO: 322781 - DNA, 25 bp, Artificial
  Probe
tcatggagaagctccgccacgcctt

SEQ ID NO: 322782 - DNA, 25 bp, Artificial
  Probe
ccacgccagtcagaaggcagtcatc

SEQ ID NO: 322783 - DNA, 25 bp, Artificial
  Probe
agcagtcgaggcacctaccctagct

SEQ ID NO: 322784 - DNA, 25 bp, Artificial
  Probe
ccccagtgtgcgaagctctgacgtg

SEQ ID NO: 322785 - DNA, 25 bp, Artificial
  Probe
ccacaacaagcagttagagtctcag

SEQ ID NO: 322786 - DNA, 25 bp, Artificial
  Probe
agattctggcccatttagaagatga

SEQ ID NO: 322787 - DNA, 25 bp, Artificial
  Probe
tgagagagctgctcctgcagccacc

SEQ ID NO: 322788 - DNA, 25 bp, Artificial
  Probe
ctagctgagggctctgctgaagcaa

SEQ ID NO: 322789 - DNA, 25 bp, Artificial
  Probe
tggcccggctcatctggacttccaa

SEQ ID NO: 322790 - DNA, 25 bp, Artificial
  Probe
atccggactgggaaatgtcagacaa

SEQ ID NO: 322791 - DNA, 25 bp, Artificial
  Probe
ggttggcccggctcatctggacttc

SEQ ID NO: 322792 - DNA, 25 bp, Artificial
  Probe
tttcccagccatctgcaggttctac

SEQ ID NO: 322793 - DNA, 25 bp, Artificial
  Probe
gaaatgtcagacaatccacggacac

SEQ ID NO: 322794 - DNA, 25 bp, Artificial
  Probe
ctaaaggcgaaatcctgagagtcat

SEQ ID NO: 322795 - DNA, 25 bp, Artificial
  Probe
cggagtcacagaattgcagttggag

SEQ ID NO: 322796 - DNA, 25 bp, Artificial
  Probe
tccggactgggaaatgtcagacaat

SEQ ID NO: 322797 - DNA, 25 bp, Artificial
  Probe
gatgcctacggatgttgtggatctt

SEQ ID NO: 322798 - DNA, 25 bp, Artificial
  Probe
tcagctattatgagcggagtcacag

SEQ ID NO: 322799 - DNA, 25 bp, Artificial
  Probe
cactgacagccacatttctttctgg

SEQ ID NO: 322800 - DNA, 25 bp, Artificial
  Probe
cgaaaagatgcctacggatgttgtg

SEQ ID NO: 322801 - DNA, 25 bp, Artificial
  Probe
tcctgatgggcgttaccttgccacc

SEQ ID NO: 322802 - DNA, 25 bp, Artificial
  Probe
attatgagcggagtcacagaattgc

SEQ ID NO: 322803 - DNA, 25 bp, Artificial
  Probe
atcactgcagtgtcctttgctcctg

SEQ ID NO: 322804 - DNA, 25 bp, Artificial
  Probe
tctggacttccaaccggaatgttat

SEQ ID NO: 322805 - DNA, 25 bp, Artificial
  Probe
ttccaaccggaatgttatcctcatg

SEQ ID NO: 322806 - DNA, 25 bp, Artificial
  Probe
gccatggctcagtggccctgtatga

SEQ ID NO: 322807 - DNA, 25 bp, Artificial
  Probe
aattcttatcgaaaagatgcctacg

SEQ ID NO: 322808 - DNA, 25 bp, Artificial
  Probe
ccctgtatgacatccggactgggaa

SEQ ID NO: 322809 - DNA, 25 bp, Artificial
  Probe
ggatcttcttgtggaggtcatggac

SEQ ID NO: 322810 - DNA, 25 bp, Artificial
  Probe
ctcagctgcgctgcatcaagaccta

SEQ ID NO: 322811 - DNA, 25 bp, Artificial
  Probe
gctcagtggccctgtatgacatccg

SEQ ID NO: 322812 - DNA, 25 bp, Artificial
  Probe
atgttatcctcatggcccacgatgg

SEQ ID NO: 322813 - DNA, 25 bp, Artificial
  Probe
ttggagcacgccatggctcagtggc

SEQ ID NO: 322814 - DNA, 25 bp, Artificial
  Probe
ctttgctcctgatgggcgttacctt

SEQ ID NO: 322815 - DNA, 25 bp, Artificial
  Probe
gacctaccaggtacctccagtgcag

SEQ ID NO: 322816 - DNA, 25 bp, Artificial
  Probe
tatgacatccggactgggaaatgtc

SEQ ID NO: 322817 - DNA, 25 bp, Artificial
  Probe
gaagggtcttcaggagtgtttccca

SEQ ID NO: 322818 - DNA, 25 bp, Artificial
  Probe
ggaagcattggcatgctgaactcag

SEQ ID NO: 322819 - DNA, 25 bp, Artificial
  Probe
gcccacgatgggaaggagcaccgct

SEQ ID NO: 322820 - DNA, 25 bp, Artificial
  Probe
catgctgaactcagcacctcagctg

SEQ ID NO: 322821 - DNA, 25 bp, Artificial
  Probe
ctgcctggaaggatctttagttaag

SEQ ID NO: 322822 - DNA, 25 bp, Artificial
  Probe
tggacatcatcatgtactgcctgga

SEQ ID NO: 322823 - DNA, 25 bp, Artificial
  Probe
atcctgagagtcattgaaattctta

SEQ ID NO: 322824 - DNA, 25 bp, Artificial
  Probe
tgaactcagcacctcagctgcgctg

SEQ ID NO: 322825 - DNA, 25 bp, Artificial
  Probe
gcattggcatgctgaactcagcacc

SEQ ID NO: 322826 - DNA, 25 bp, Artificial
  Probe
ggagtgtttcccagccatctgcagg

SEQ ID NO: 322827 - DNA, 25 bp, Artificial
  Probe
cctcatggcccacgatgggaaggag

SEQ ID NO: 322828 - DNA, 25 bp, Artificial
  Probe
ctggcaagggctaaaggcgaaatcc

SEQ ID NO: 322829 - DNA, 25 bp, Artificial
  Probe
cagtgtcctttgctcctgatgggcg

SEQ ID NO: 322830 - DNA, 25 bp, Artificial
  Probe
cttgtggaggtcatggacatcatca

SEQ ID NO: 322831 - DNA, 25 bp, Artificial
  Probe
tgggcgttaccttgccacctactca

SEQ ID NO: 322832 - DNA, 25 bp, Artificial
  Probe
ttatgagcggagtcacagaattgca

SEQ ID NO: 322833 - DNA, 25 bp, Artificial
  Probe
acaccaccacactggcaagggctaa

SEQ ID NO: 322834 - DNA, 25 bp, Artificial
  Probe
ctacggatgttgtggatcttcttgt

SEQ ID NO: 322835 - DNA, 25 bp, Artificial
  Probe
ttatgtctacccttttgcccactgg

SEQ ID NO: 322836 - DNA, 25 bp, Artificial
  Probe
tggcctaagagctaaacgcaacctg

SEQ ID NO: 322837 - DNA, 25 bp, Artificial
  Probe
caaaccccaggaagcctatggccta

SEQ ID NO: 322838 - DNA, 25 bp, Artificial
  Probe
ccctcattgttatcatgtatgcaag

SEQ ID NO: 322839 - DNA, 25 bp, Artificial
  Probe
gctctttgccactatctacctggct

SEQ ID NO: 322840 - DNA, 25 bp, Artificial
  Probe
aaattttcgcagtggtttccaagat

SEQ ID NO: 322841 - DNA, 25 bp, Artificial
  Probe
atgtctacccttttgcccactggct

SEQ ID NO: 322842 - DNA, 25 bp, Artificial
  Probe
cgcaacctggacataaacacatctg

SEQ ID NO: 322843 - DNA, 25 bp, Artificial
  Probe
cctggcttcccctgtggactctgat

SEQ ID NO: 322844 - DNA, 25 bp, Artificial
  Probe
gaacctgcatctcaaaacccaagtg

SEQ ID NO: 322845 - DNA, 25 bp, Artificial
  Probe
tcatgtatgcaaggattggggcttc

SEQ ID NO: 322846 - DNA, 25 bp, Artificial
  Probe
acacatctggcctgttggtccatga

SEQ ID NO: 322847 - DNA, 25 bp, Artificial
  Probe
tgctgctgactgtggccctcctttt

SEQ ID NO: 322848 - DNA, 25 bp, Artificial
  Probe
gacctgtcacctaacaaactacgtg

SEQ ID NO: 322849 - DNA, 25 bp, Artificial
  Probe
aagcctatggcctaagagctaaacg

SEQ ID NO: 322850 - DNA, 25 bp, Artificial
  Probe
ttctgcaatagcagtgtcaacccca

SEQ ID NO: 322851 - DNA, 25 bp, Artificial
  Probe
ttcaagacctcagcacacagcacag

SEQ ID NO: 322852 - DNA, 25 bp, Artificial
  Probe
aagtcaaaccccaggaagcctatgg

SEQ ID NO: 322853 - DNA, 25 bp, Artificial
  Probe
ccacacaggaatccttgatggagga

SEQ ID NO: 322854 - DNA, 25 bp, Artificial
  Probe
aagtgcagacaatcccacacaggaa

SEQ ID NO: 322855 - DNA, 25 bp, Artificial
  Probe
taagcagcgcctggagcagtggcat

SEQ ID NO: 322856 - DNA, 25 bp, Artificial
  Probe
ccccaggaagcctatggcctaagag

SEQ ID NO: 322857 - DNA, 25 bp, Artificial
  Probe
ggagaagctaccaacagtactgaga

SEQ ID NO: 322858 - DNA, 25 bp, Artificial
  Probe
aaagtgcagacaatcccacacagga

SEQ ID NO: 322859 - DNA, 25 bp, Artificial
  Probe
gcagacaatcccacacaggaatcct

SEQ ID NO: 322860 - DNA, 25 bp, Artificial
  Probe
aatcccacacaggaatccttgatgg

SEQ ID NO: 322861 - DNA, 25 bp, Artificial
  Probe
aaggtcatcaagatgctgctgactg

SEQ ID NO: 322862 - DNA, 25 bp, Artificial
  Probe
ggtccatgaacctgcatctcaaaac

SEQ ID NO: 322863 - DNA, 25 bp, Artificial
  Probe
gactatgctgacctgtcacctaaca

SEQ ID NO: 322864 - DNA, 25 bp, Artificial
  Probe
gcacaggtaagcagcgcctggagca

SEQ ID NO: 322865 - DNA, 25 bp, Artificial
  Probe
cataaacacatctggcctgttggtc

SEQ ID NO: 322866 - DNA, 25 bp, Artificial
  Probe
cactggctcgccttctgcaatagca

SEQ ID NO: 322867 - DNA, 25 bp, Artificial
  Probe
aggattggggcttccctcttcaaga

SEQ ID NO: 322868 - DNA, 25 bp, Artificial
  Probe
atgctttccagttctgccaaaagaa

SEQ ID NO: 322869 - DNA, 25 bp, Artificial
  Probe
ctgcatctcaaaacccaagtgggga

SEQ ID NO: 322870 - DNA, 25 bp, Artificial
  Probe
tgactgtggccctccttttcatcct

SEQ ID NO: 322871 - DNA, 25 bp, Artificial
  Probe
ttggggcttccctcttcaagacctc

SEQ ID NO: 322872 - DNA, 25 bp, Artificial
  Probe
cagcgcctggagcagtggcatgtat

SEQ ID NO: 322873 - DNA, 25 bp, Artificial
  Probe
gactgtggccctccttttcatcctt

SEQ ID NO: 322874 - DNA, 25 bp, Artificial
  Probe
tgtatgcaaggattggggcttccct

SEQ ID NO: 322875 - DNA, 25 bp, Artificial
  Probe
ccaggaagcctatggcctaagagct

SEQ ID NO: 322876 - DNA, 25 bp, Artificial
  Probe
agagctaaacgcaacctggacataa

SEQ ID NO: 322877 - DNA, 25 bp, Artificial
  Probe
gctaaacgcaacctggacataaaca

SEQ ID NO: 322878 - DNA, 25 bp, Artificial
  Probe
ggggcttccctcttcaagacctcag

SEQ ID NO: 322879 - DNA, 25 bp, Artificial
  Probe
caggaatccttgatggaggaaacgg

SEQ ID NO: 322880 - DNA, 25 bp, Artificial
  Probe
agtggcatgtatccaagaagaaaca

SEQ ID NO: 322881 - DNA, 25 bp, Artificial
  Probe
ccaaaatggtcaggagcaggggtcc

SEQ ID NO: 322882 - DNA, 25 bp, Artificial
  Probe
gaaagatgccacagggccagggaat

SEQ ID NO: 322883 - DNA, 25 bp, Artificial
  Probe
acatcgccctggaagacagtgccac

SEQ ID NO: 322884 - DNA, 25 bp, Artificial
  Probe
agagtcatcgggtggaaccacacct

SEQ ID NO: 322885 - DNA, 25 bp, Artificial
  Probe
gtctcttcctctgttagcccaagtc

SEQ ID NO: 322886 - DNA, 25 bp, Artificial
  Probe
agagcacaaccctgggagacccaag

SEQ ID NO: 322887 - DNA, 25 bp, Artificial
  Probe
ccctgcatagccacatagccagtgt

SEQ ID NO: 322888 - DNA, 25 bp, Artificial
  Probe
cctctgattcccaaaatggtcagga

SEQ ID NO: 322889 - DNA, 25 bp, Artificial
  Probe
ccagttcagtgtctcttcctctgtt

SEQ ID NO: 322890 - DNA, 25 bp, Artificial
  Probe
agatggacagactactccctctctc

SEQ ID NO: 322891 - DNA, 25 bp, Artificial
  Probe
gagtcatcgggtggaaccacacctg

SEQ ID NO: 322892 - DNA, 25 bp, Artificial
  Probe
ctgccctgaagaaggctccgacatc

SEQ ID NO: 322893 - DNA, 25 bp, Artificial
  Probe
ttgaccacaacagaaaggcctccac

SEQ ID NO: 322894 - DNA, 25 bp, Artificial
  Probe
cagatggacagactactccctctct

SEQ ID NO: 322895 - DNA, 25 bp, Artificial
  Probe
acaaccagagtctggcctgcctcag

SEQ ID NO: 322896 - DNA, 25 bp, Artificial
  Probe
ctgcctcagagcacaaccctgggag

SEQ ID NO: 322897 - DNA, 25 bp, Artificial
  Probe
agggccagggaatccctcgtgttgc

SEQ ID NO: 322898 - DNA, 25 bp, Artificial
  Probe
gcagccagatggacagactactccc

SEQ ID NO: 322899 - DNA, 25 bp, Artificial
  Probe
tgcatagccacatagccagtgtggg

SEQ ID NO: 322900 - DNA, 25 bp, Artificial
  Probe
tggagctggcccacagagagctgct

SEQ ID NO: 322901 - DNA, 25 bp, Artificial
  Probe
ccctggaagacagtgccactgacac

SEQ ID NO: 322902 - DNA, 25 bp, Artificial
  Probe
gggagttttcacacagaggcagcca

SEQ ID NO: 322903 - DNA, 25 bp, Artificial
  Probe
gcctcagagcacaaccctgggagac

SEQ ID NO: 322904 - DNA, 25 bp, Artificial
  Probe
gtgtgctgtgtgcacagtgccctca

SEQ ID NO: 322905 - DNA, 25 bp, Artificial
  Probe
tcacacagaggcagccagatggaca

SEQ ID NO: 322906 - DNA, 25 bp, Artificial
  Probe
agaaggctccgacatcgccctggaa

SEQ ID NO: 322907 - DNA, 25 bp, Artificial
  Probe
catggcttttgtctcctgagcatgt

SEQ ID NO: 322908 - DNA, 25 bp, Artificial
  Probe
actgaaggacatggagctggcccac

SEQ ID NO: 322909 - DNA, 25 bp, Artificial
  Probe
ggggtcctgccctgaagaaggctcc

SEQ ID NO: 322910 - DNA, 25 bp, Artificial
  Probe
gccactgacacagctgtgtcaccag

SEQ ID NO: 322911 - DNA, 25 bp, Artificial
  Probe
ctccccttgaaagatgccacagggc

SEQ ID NO: 322912 - DNA, 25 bp, Artificial
  Probe
acagaggcagccagatggacagact

SEQ ID NO: 322913 - DNA, 25 bp, Artificial
  Probe
aggacatggagctggcccacagaga

SEQ ID NO: 322914 - DNA, 25 bp, Artificial
  Probe
aagtcccttggaggagagtcatcgg

SEQ ID NO: 322915 - DNA, 25 bp, Artificial
  Probe
gctcaccatcaagcttcacagactg

SEQ ID NO: 322916 - DNA, 25 bp, Artificial
  Probe
tgccacagggccagggaatccctcg

SEQ ID NO: 322917 - DNA, 25 bp, Artificial
  Probe
acagactgaaggacatggagctggc

SEQ ID NO: 322918 - DNA, 25 bp, Artificial
  Probe
gaagccctggcctctgattcccaaa

SEQ ID NO: 322919 - DNA, 25 bp, Artificial
  Probe
cagggaatccctcgtgttgcctggt

SEQ ID NO: 322920 - DNA, 25 bp, Artificial
  Probe
aaggctccgacatcgccctggaaga

SEQ ID NO: 322921 - DNA, 25 bp, Artificial
  Probe
ctctgttagcccaagtctccatggc

SEQ ID NO: 322922 - DNA, 25 bp, Artificial
  Probe
ccaaggaagccctggcctctgattc

SEQ ID NO: 322923 - DNA, 25 bp, Artificial
  Probe
ccgacatcgccctggaagacagtgc

SEQ ID NO: 322924 - DNA, 25 bp, Artificial
  Probe
taccatcgagcagctcaccatcaag

SEQ ID NO: 322925 - DNA, 25 bp, Artificial
  Probe
cccaagtctccatggcttttgtctc

SEQ ID NO: 322926 - DNA, 25 bp, Artificial
  Probe
cagagtctggcctgcctcagagcac

SEQ ID NO: 322927 - DNA, 25 bp, Artificial
  Probe
gctccaggagaccagggagagaaat

SEQ ID NO: 322928 - DNA, 25 bp, Artificial
  Probe
tggctctccttcagggcagcaacgg

SEQ ID NO: 322929 - DNA, 25 bp, Artificial
  Probe
tacgctggtgcttgctgtactgggc

SEQ ID NO: 322930 - DNA, 25 bp, Artificial
  Probe
agcaacggtgacaagagggctccag

SEQ ID NO: 322931 - DNA, 25 bp, Artificial
  Probe
gatccttactcaactgccctgtaga

SEQ ID NO: 322932 - DNA, 25 bp, Artificial
  Probe
tcatcgtggctgtgatagtatgtac

SEQ ID NO: 322933 - DNA, 25 bp, Artificial
  Probe
ctccttcagggcagcaacggtgaca

SEQ ID NO: 322934 - DNA, 25 bp, Artificial
  Probe
tgcagaatgtacagcctccaactcc

SEQ ID NO: 322935 - DNA, 25 bp, Artificial
  Probe
ctcccagaagagatggctctccttc

SEQ ID NO: 322936 - DNA, 25 bp, Artificial
  Probe
gggaagatccttactcaactgccct

SEQ ID NO: 322937 - DNA, 25 bp, Artificial
  Probe
agtcctcacagcagagccaacagca

SEQ ID NO: 322938 - DNA, 25 bp, Artificial
  Probe
cctctattacttctacaagaagggc

SEQ ID NO: 322939 - DNA, 25 bp, Artificial
  Probe
tgtactgggcgctaccctctattac

SEQ ID NO: 322940 - DNA, 25 bp, Artificial
  Probe
ggcattagccggttcaccaatgttt

SEQ ID NO: 322941 - DNA, 25 bp, Artificial
  Probe
ctaaagcctccagagggacagcggg

SEQ ID NO: 322942 - DNA, 25 bp, Artificial
  Probe
gcagcaacggtgacaagagggctcc

SEQ ID NO: 322943 - DNA, 25 bp, Artificial
  Probe
ccgactcgtaagagtgaatttgtag

SEQ ID NO: 322944 - DNA, 25 bp, Artificial
  Probe
ttaagtcagataagctcccagaaga

SEQ ID NO: 322945 - DNA, 25 bp, Artificial
  Probe
acagcacctccacagagaaaaagct

SEQ ID NO: 322946 - DNA, 25 bp, Artificial
  Probe
ctgggctcatacaccacggtcatca

SEQ ID NO: 322947 - DNA, 25 bp, Artificial
  Probe
tgacaagagggctccaggagaccag

SEQ ID NO: 322948 - DNA, 25 bp, Artificial
  Probe
atctgaggcattagccggttcacca

SEQ ID NO: 322949 - DNA, 25 bp, Artificial
  Probe
actcaactgccctgtagaccaggtc

SEQ ID NO: 322950 - DNA, 25 bp, Artificial
  Probe
ttcagggcagcaacggtgacaagag

SEQ ID NO: 322951 - DNA, 25 bp, Artificial
  Probe
tttgggctccctgctcagtcttcac

SEQ ID NO: 322952 - DNA, 25 bp, Artificial
  Probe
agagctgcaacaagagtcacctgga

SEQ ID NO: 322953 - DNA, 25 bp, Artificial
  Probe
gtcatcattctgaagctcgtcactt

SEQ ID NO: 322954 - DNA, 25 bp, Artificial
  Probe
acttctacaagaagggcaaactgcc

SEQ ID NO: 322955 - DNA, 25 bp, Artificial
  Probe
acagtcagtcctcacagcagagcca

SEQ ID NO: 322956 - DNA, 25 bp, Artificial
  Probe
gagaaatacatcgatctgaggcatt

SEQ ID NO: 322957 - DNA, 25 bp, Artificial
  Probe
atcgtggctgtgatagtatgtacgc

SEQ ID NO: 322958 - DNA, 25 bp, Artificial
  Probe
aaagctgccacagcaggagagcaaa

SEQ ID NO: 322959 - DNA, 25 bp, Artificial
  Probe
accccaagctaaagcctccagaggg

SEQ ID NO: 322960 - DNA, 25 bp, Artificial
  Probe
ggacgctcaggaaaacaggagatca

SEQ ID NO: 322961 - DNA, 25 bp, Artificial
  Probe
agaagggcaaactgccttgtggacg

SEQ ID NO: 322962 - DNA, 25 bp, Artificial
  Probe
ctccaggagaccagggagagaaata

SEQ ID NO: 322963 - DNA, 25 bp, Artificial
  Probe
tgccacagcaggagagcaaaggtgt

SEQ ID NO: 322964 - DNA, 25 bp, Artificial
  Probe
aatgtacagcctccaactccctggg

SEQ ID NO: 322965 - DNA, 25 bp, Artificial
  Probe
cctccacagagaaaaagctgccaca

SEQ ID NO: 322966 - DNA, 25 bp, Artificial
  Probe
tagtatgtacgctggtgcttgctgt

SEQ ID NO: 322967 - DNA, 25 bp, Artificial
  Probe
aatgttttgggctccctgctcagtc

SEQ ID NO: 322968 - DNA, 25 bp, Artificial
  Probe
tgcttgctgtactgggcgctaccct

SEQ ID NO: 322969 - DNA, 25 bp, Artificial
  Probe
gggcgctaccctctattacttctac

SEQ ID NO: 322970 - DNA, 25 bp, Artificial
  Probe
tcaccaatgttttgggctccctgct

SEQ ID NO: 322971 - DNA, 25 bp, Artificial
  Probe
agagccaacagcacctccacagaga

SEQ ID NO: 322972 - DNA, 25 bp, Artificial
  Probe
ccccgactcgtaagagtgaatttgt

SEQ ID NO: 322973 - DNA, 25 bp, Artificial
  Probe
tgcaggaaatcgaccctgggttgta

SEQ ID NO: 322974 - DNA, 25 bp, Artificial
  Probe
gatggtccacggttgtgaccccagc

SEQ ID NO: 322975 - DNA, 25 bp, Artificial
  Probe
ccctctctgaggaagtgtcccatct

SEQ ID NO: 322976 - DNA, 25 bp, Artificial
  Probe
tcaagggcacagtgcgcacatttct

SEQ ID NO: 322977 - DNA, 25 bp, Artificial
  Probe
tgtctaaactcaaagaatggattac

SEQ ID NO: 322978 - DNA, 25 bp, Artificial
  Probe
tcagaaactccctgcaggaaatcga

SEQ ID NO: 322979 - DNA, 25 bp, Artificial
  Probe
ggcacagtgcgcacatttctctcct

SEQ ID NO: 322980 - DNA, 25 bp, Artificial
  Probe
aggagtcttcccacagatgacattg

SEQ ID NO: 322981 - DNA, 25 bp, Artificial
  Probe
cattaggagtcttcccacagatgac

SEQ ID NO: 322982 - DNA, 25 bp, Artificial
  Probe
tctaccgatggaagaacagttgcgg

SEQ ID NO: 322983 - DNA, 25 bp, Artificial
  Probe
ccctgggttgtacagagatatattt

SEQ ID NO: 322984 - DNA, 25 bp, Artificial
  Probe
tttgtgcgacagaacattaggagtc

SEQ ID NO: 322985 - DNA, 25 bp, Artificial
  Probe
cactcccagctccataaggaacttg

SEQ ID NO: 322986 - DNA, 25 bp, Artificial
  Probe
gacatgagacactgcctctaaatag

SEQ ID NO: 322987 - DNA, 25 bp, Artificial
  Probe
atcgaccctgggttgtacagagata

SEQ ID NO: 322988 - DNA, 25 bp, Artificial
  Probe
tcccaactcagagaactgttttcag

SEQ ID NO: 322989 - DNA, 25 bp, Artificial
  Probe
tcattcagaaactccctgcaggaaa

SEQ ID NO: 322990 - DNA, 25 bp, Artificial
  Probe
gtccctcgtgttcattccctgtggc

SEQ ID NO: 322991 - DNA, 25 bp, Artificial
  Probe
aggccggcctggatgacatgagaca

SEQ ID NO: 322992 - DNA, 25 bp, Artificial
  Probe
gtctaaactcaaagaatggattact

SEQ ID NO: 322993 - DNA, 25 bp, Artificial
  Probe
tgagacactgcctctaaatagtgta

SEQ ID NO: 322994 - DNA, 25 bp, Artificial
  Probe
atgacatgagacactgcctctaaat

SEQ ID NO: 322995 - DNA, 25 bp, Artificial
  Probe
actgcctctaaatagtgtaaaaatg

SEQ ID NO: 322996 - DNA, 25 bp, Artificial
  Probe
ggccggcctggatgacatgagacac

SEQ ID NO: 322997 - DNA, 25 bp, Artificial
  Probe
agcgacctcattcagaaactccctg

SEQ ID NO: 322998 - DNA, 25 bp, Artificial
  Probe
ttcccacagatgacattgcagctct

SEQ ID NO: 322999 - DNA, 25 bp, Artificial
  Probe
aggaagtgtcccatctgcagaggga

SEQ ID NO: 323000 - DNA, 25 bp, Artificial
  Probe
ttgtgcgacagaacattaggagtct

SEQ ID NO: 323001 - DNA, 25 bp, Artificial
  Probe
gactgatggtccacggttgtgaccc

SEQ ID NO: 323002 - DNA, 25 bp, Artificial
  Probe
gaacattaggagtcttcccacagat

SEQ ID NO: 323003 - DNA, 25 bp, Artificial
  Probe
tctgaggaagtgtcccatctgcaga

SEQ ID NO: 323004 - DNA, 25 bp, Artificial
  Probe
ctgcctctaaatagtgtaaaaatga

SEQ ID NO: 323005 - DNA, 25 bp, Artificial
  Probe
ggaaatcgaccctgggttgtacaga

SEQ ID NO: 323006 - DNA, 25 bp, Artificial
  Probe
cattgcagctctaccgatggaagaa

SEQ ID NO: 323007 - DNA, 25 bp, Artificial
  Probe
cccagccaggaggagcagaagttca

SEQ ID NO: 323008 - DNA, 25 bp, Artificial
  Probe
ataaggaacttgaggccggcctgga

SEQ ID NO: 323009 - DNA, 25 bp, Artificial
  Probe
agaagttcaatgtcactcccagctc

SEQ ID NO: 323010 - DNA, 25 bp, Artificial
  Probe
cctcgtgttcattccctgtggccat

SEQ ID NO: 323011 - DNA, 25 bp, Artificial
  Probe
tatcaagggcacagtgcgcacattt

SEQ ID NO: 323012 - DNA, 25 bp, Artificial
  Probe
gacctcattcagaaactccctgcag

SEQ ID NO: 323013 - DNA, 25 bp, Artificial
  Probe
gcagctctaccgatggaagaacagt

SEQ ID NO: 323014 - DNA, 25 bp, Artificial
  Probe
agtgctatttattcccaactcagag

SEQ ID NO: 323015 - DNA, 25 bp, Artificial
  Probe
cacagatgacattgcagctctaccg

SEQ ID NO: 323016 - DNA, 25 bp, Artificial
  Probe
cttttgtctaaactcaaagaatgga

SEQ ID NO: 323017 - DNA, 25 bp, Artificial
  Probe
gaagttcaatgtcactcccagctcc

SEQ ID NO: 323018 - DNA, 25 bp, Artificial
  Probe
ccttttgtctaaactcaaagaatgg

SEQ ID NO: 323019 - DNA, 25 bp, Artificial
  Probe
aatcaaacctttatcggcatcagag

SEQ ID NO: 323020 - DNA, 25 bp, Artificial
  Probe
taaagcactagtttcacaagagacc

SEQ ID NO: 323021 - DNA, 25 bp, Artificial
  Probe
ccatccctggctgagcatcagagac

SEQ ID NO: 323022 - DNA, 25 bp, Artificial
  Probe
gctgagcatcagagactccatactg

SEQ ID NO: 323023 - DNA, 25 bp, Artificial
  Probe
ggagaagcctgaggaccttaattca

SEQ ID NO: 323024 - DNA, 25 bp, Artificial
  Probe
tccacactcatcaaacacctgaggg

SEQ ID NO: 323025 - DNA, 25 bp, Artificial
  Probe
ttctagagcacaagaggattcacac

SEQ ID NO: 323026 - DNA, 25 bp, Artificial
  Probe
ccacctgaaagaaaggctctataaa

SEQ ID NO: 323027 - DNA, 25 bp, Artificial
  Probe
ttcagccatagatcttccctcctgg

SEQ ID NO: 323028 - DNA, 25 bp, Artificial
  Probe
aacgaacatcggaagattcacactg

SEQ ID NO: 323029 - DNA, 25 bp, Artificial
  Probe
cccttgttcatgaataaagcactag

SEQ ID NO: 323030 - DNA, 25 bp, Artificial
  Probe
aggctagagacagcacaggagcaag

SEQ ID NO: 323031 - DNA, 25 bp, Artificial
  Probe
agtcaccagtgaagatggaattccc

SEQ ID NO: 323032 - DNA, 25 bp, Artificial
  Probe
ttcccccaaggaagtcaccagtgaa

SEQ ID NO: 323033 - DNA, 25 bp, Artificial
  Probe
atcaatgcaacgaatgtgggaagac

SEQ ID NO: 323034 - DNA, 25 bp, Artificial
  Probe
ctggaaaatcagctttggagagctt

SEQ ID NO: 323035 - DNA, 25 bp, Artificial
  Probe
gcacacctttcatgtacggctcatc

SEQ ID NO: 323036 - DNA, 25 bp, Artificial
  Probe
agaatacggcacacctttcatgtac

SEQ ID NO: 323037 - DNA, 25 bp, Artificial
  Probe
tttatcggcatcagaggatccatac

SEQ ID NO: 323038 - DNA, 25 bp, Artificial
  Probe
ttcaaccctcactgtgcaccagagg

SEQ ID NO: 323039 - DNA, 25 bp, Artificial
  Probe
tctacaaatgtgctgagtgtgacaa

SEQ ID NO: 323040 - DNA, 25 bp, Artificial
  Probe
gtattcctccttcaacgaacatcgg

SEQ ID NO: 323041 - DNA, 25 bp, Artificial
  Probe
ggaaagcctatagttacaggtcaaa

SEQ ID NO: 323042 - DNA, 25 bp, Artificial
  Probe
tgacaaagccttcaactgcagagca

SEQ ID NO: 323043 - DNA, 25 bp, Artificial
  Probe
cggagagaaaccttaccgctgccgg

SEQ ID NO: 323044 - DNA, 25 bp, Artificial
  Probe
gatggaattcccacagaccctgagc

SEQ ID NO: 323045 - DNA, 25 bp, Artificial
  Probe
ggaagaccttcaaccagtattcctc

SEQ ID NO: 323046 - DNA, 25 bp, Artificial
  Probe
taacggaacacgagcgaatccatac

SEQ ID NO: 323047 - DNA, 25 bp, Artificial
  Probe
aaagctccacagacatcagaggatc

SEQ ID NO: 323048 - DNA, 25 bp, Artificial
  Probe
cagccagtgttcaaccctcactgtg

SEQ ID NO: 323049 - DNA, 25 bp, Artificial
  Probe
gtatcacacttcagagaaagattta

SEQ ID NO: 323050 - DNA, 25 bp, Artificial
  Probe
agctcacgagccaggggcagcttcc

SEQ ID NO: 323051 - DNA, 25 bp, Artificial
  Probe
tatccgggacaaaaaccttatgtct

SEQ ID NO: 323052 - DNA, 25 bp, Artificial
  Probe
ggaaaagctctacaaatgtgctgag

SEQ ID NO: 323053 - DNA, 25 bp, Artificial
  Probe
tccacatcagaggtgtctgaagggg

SEQ ID NO: 323054 - DNA, 25 bp, Artificial
  Probe
agcctttggctgtaaatcaaacctt

SEQ ID NO: 323055 - DNA, 25 bp, Artificial
  Probe
ggttttagccaaagtcttcatcttc

SEQ ID NO: 323056 - DNA, 25 bp, Artificial
  Probe
ggcaaggccttcagccagtattcat

SEQ ID NO: 323057 - DNA, 25 bp, Artificial
  Probe
tgtctacccttatcgaacaccagag

SEQ ID NO: 323058 - DNA, 25 bp, Artificial
  Probe
cctcgctccacatcagaggtgtctg

SEQ ID NO: 323059 - DNA, 25 bp, Artificial
  Probe
gacaaaaaccttatgtctgcagtga

SEQ ID NO: 323060 - DNA, 25 bp, Artificial
  Probe
gaaactttcagatttatccgggaca

SEQ ID NO: 323061 - DNA, 25 bp, Artificial
  Probe
ctagagacagcacaggagcaagaaa

SEQ ID NO: 323062 - DNA, 25 bp, Artificial
  Probe
caatgcaacgaatgtgggaagacct

SEQ ID NO: 323063 - DNA, 25 bp, Artificial
  Probe
gggaagaccttcaaccagtattcct

SEQ ID NO: 323064 - DNA, 25 bp, Artificial
  Probe
aacacctgagggtgcacaccggaga

SEQ ID NO: 323065 - DNA, 25 bp, Artificial
  Probe
tgcgggaatggtacctgcaggatcc

SEQ ID NO: 323066 - DNA, 25 bp, Artificial
  Probe
tccctagaacaaaccgaaatcagga

SEQ ID NO: 323067 - DNA, 25 bp, Artificial
  Probe
acactggcacttctatcctctcggt

SEQ ID NO: 323068 - DNA, 25 bp, Artificial
  Probe
cctgctgcgggaatggtacctgcag

SEQ ID NO: 323069 - DNA, 25 bp, Artificial
  Probe
gaccaccagtgtgtccagcctgacg

SEQ ID NO: 323070 - DNA, 25 bp, Artificial
  Probe
cggagcgcgcggacactggcacttc

SEQ ID NO: 323071 - DNA, 25 bp, Artificial
  Probe
accccagcaagaaacgagaactggc

SEQ ID NO: 323072 - DNA, 25 bp, Artificial
  Probe
actggcacttctatcctctcggtaa

SEQ ID NO: 323073 - DNA, 25 bp, Artificial
  Probe
tactccatccctagaacaaaccgaa

SEQ ID NO: 323074 - DNA, 25 bp, Artificial
  Probe
caaccccagcaagaaacgagaactg

SEQ ID NO: 323075 - DNA, 25 bp, Artificial
  Probe
acacacacacaagtccatacacact

SEQ ID NO: 323076 - DNA, 25 bp, Artificial
  Probe
ccagcgactcggaatgtgatgtatg

SEQ ID NO: 323077 - DNA, 25 bp, Artificial
  Probe
gcgcgcggacactggcacttctatc

SEQ ID NO: 323078 - DNA, 25 bp, Artificial
  Probe
ggacactggcacttctatcctctcg

SEQ ID NO: 323079 - DNA, 25 bp, Artificial
  Probe
accaccagtgtgtccagcctgacgg

SEQ ID NO: 323080 - DNA, 25 bp, Artificial
  Probe
acctccagcgactcggaatgtgatg

SEQ ID NO: 323081 - DNA, 25 bp, Artificial
  Probe
atccctagaacaaaccgaaatcagg

SEQ ID NO: 323082 - DNA, 25 bp, Artificial
  Probe
accgaaatcaggatacacagccaca

SEQ ID NO: 323083 - DNA, 25 bp, Artificial
  Probe
gacactggcacttctatcctctcgg

SEQ ID NO: 323084 - DNA, 25 bp, Artificial
  Probe
agcgcgcggacactggcacttctat

SEQ ID NO: 323085 - DNA, 25 bp, Artificial
  Probe
ctggcacttctatcctctcggtaac

SEQ ID NO: 323086 - DNA, 25 bp, Artificial
  Probe
gccatcgggccgagcgggatgcgct

SEQ ID NO: 323087 - DNA, 25 bp, Artificial
  Probe
cactggcacttctatcctctcggta

SEQ ID NO: 323088 - DNA, 25 bp, Artificial
  Probe
accagtgtgtccagcctgacggagc

SEQ ID NO: 323089 - DNA, 25 bp, Artificial
  Probe
gcggacactggcacttctatcctct

SEQ ID NO: 323090 - DNA, 25 bp, Artificial
  Probe
ggcacttctatcctctcggtaacct

SEQ ID NO: 323091 - DNA, 25 bp, Artificial
  Probe
gggaatggtacctgcaggatcccta

SEQ ID NO: 323092 - DNA, 25 bp, Artificial
  Probe
cccacacaagtaggcaactggttta

SEQ ID NO: 323093 - DNA, 25 bp, Artificial
  Probe
caccagtgtgtccagcctgacggag

SEQ ID NO: 323094 - DNA, 25 bp, Artificial
  Probe
ccaccagtgtgtccagcctgacgga

SEQ ID NO: 323095 - DNA, 25 bp, Artificial
  Probe
ggaatggtacctgcaggatccctac

SEQ ID NO: 323096 - DNA, 25 bp, Artificial
  Probe
atagccaaggccgccctcctcctcc

SEQ ID NO: 323097 - DNA, 25 bp, Artificial
  Probe
gcgggaatggtacctgcaggatccc

SEQ ID NO: 323098 - DNA, 25 bp, Artificial
  Probe
taacctccagcgactcggaatgtga

SEQ ID NO: 323099 - DNA, 25 bp, Artificial
  Probe
caaaccgaaatcaggatacacagcc

SEQ ID NO: 323100 - DNA, 25 bp, Artificial
  Probe
tggcacttctatcctctcggtaacc

SEQ ID NO: 323101 - DNA, 25 bp, Artificial
  Probe
cagcgactcggaatgtgatgtatga

SEQ ID NO: 323102 - DNA, 25 bp, Artificial
  Probe
ctcggtaacctccagcgactcggaa

SEQ ID NO: 323103 - DNA, 25 bp, Artificial
  Probe
gcagccagtccgaccaccagtgtgt

SEQ ID NO: 323104 - DNA, 25 bp, Artificial
  Probe
gagcgcgcggacactggcacttcta

SEQ ID NO: 323105 - DNA, 25 bp, Artificial
  Probe
gagaactggcgcaggccaccggcct

SEQ ID NO: 323106 - DNA, 25 bp, Artificial
  Probe
aaccgaaatcaggatacacagccac

SEQ ID NO: 323107 - DNA, 25 bp, Artificial
  Probe
tcggtaacctccagcgactcggaat

SEQ ID NO: 323108 - DNA, 25 bp, Artificial
  Probe
gaatggtacctgcaggatccctacc

SEQ ID NO: 323109 - DNA, 25 bp, Artificial
  Probe
aacctccagcgactcggaatgtgat

SEQ ID NO: 323110 - DNA, 25 bp, Artificial
  Probe
aaccccagcaagaaacgagaactgg

SEQ ID NO: 323111 - DNA, 25 bp, Artificial
  Probe
ttcagacaggccttctgccgcgtgt

SEQ ID NO: 323112 - DNA, 25 bp, Artificial
  Probe
tgctctatgccttcctgggttccca

SEQ ID NO: 323113 - DNA, 25 bp, Artificial
  Probe
agccgtgccctggagcgcgctttcg

SEQ ID NO: 323114 - DNA, 25 bp, Artificial
  Probe
tcctgggttcccacttcagacaggc

SEQ ID NO: 323115 - DNA, 25 bp, Artificial
  Probe
agctgctagcacagcgcgctggagc

SEQ ID NO: 323116 - DNA, 25 bp, Artificial
  Probe
ctggtggccgctgtcgtcctgctct

SEQ ID NO: 323117 - DNA, 25 bp, Artificial
  Probe
caagatctgggctcactgcatgtcc

SEQ ID NO: 323118 - DNA, 25 bp, Artificial
  Probe
gcgctcaagatctgggctcactgca

SEQ ID NO: 323119 - DNA, 25 bp, Artificial
  Probe
aagctatgcgcctacgcgctcaaga

SEQ ID NO: 323120 - DNA, 25 bp, Artificial
  Probe
ctggggcccgatccagctgttcctg

SEQ ID NO: 323121 - DNA, 25 bp, Artificial
  Probe
ctctgttcaggatgaacacactgcc

SEQ ID NO: 323122 - DNA, 25 bp, Artificial
  Probe
tgctggggcccgatccagctgttcc

SEQ ID NO: 323123 - DNA, 25 bp, Artificial
  Probe
atagtgtgccgcacagccgggctgc

SEQ ID NO: 323124 - DNA, 25 bp, Artificial
  Probe
agtgcgcaccaaggtctcccggctg

SEQ ID NO: 323125 - DNA, 25 bp, Artificial
  Probe
cccgagcctgggaaccctgtggtgc

SEQ ID NO: 323126 - DNA, 25 bp, Artificial
  Probe
tgccttcctgggttcccacttcaga

SEQ ID NO: 323127 - DNA, 25 bp, Artificial
  Probe
tctcccggctggtggccgctgtcgt

SEQ ID NO: 323128 - DNA, 25 bp, Artificial
  Probe
agcgcgctggagcagtgcgcaccaa

SEQ ID NO: 323129 - DNA, 25 bp, Artificial
  Probe
cactgcatgtcctacagcaattctg

SEQ ID NO: 323130 - DNA, 25 bp, Artificial
  Probe
tgttcaggatgaacacactgcccca

SEQ ID NO: 323131 - DNA, 25 bp, Artificial
  Probe
agcagtgcgcaccaaggtctcccgg

SEQ ID NO: 323132 - DNA, 25 bp, Artificial
  Probe
agacaggccttctgccgcgtgtgcc

SEQ ID NO: 323133 - DNA, 25 bp, Artificial
  Probe
ggagcagtgcgcaccaaggtctccc

SEQ ID NO: 323134 - DNA, 25 bp, Artificial
  Probe
gctttcgcgctctacaacctgctgg

SEQ ID NO: 323135 - DNA, 25 bp, Artificial
  Probe
gctcactgcatgtcctacagcaatt

SEQ ID NO: 323136 - DNA, 25 bp, Artificial
  Probe
cacagcgcgctggagcagtgcgcac

SEQ ID NO: 323137 - DNA, 25 bp, Artificial
  Probe
gctgcgcaccctgtccgggtcagga

SEQ ID NO: 323138 - DNA, 25 bp, Artificial
  Probe
ctcgccctctgttcaggatgaacac

SEQ ID NO: 323139 - DNA, 25 bp, Artificial
  Probe
agctatgcgcctacgcgctcaagat

SEQ ID NO: 323140 - DNA, 25 bp, Artificial
  Probe
tgttcctggtgcttcaagccctgcc

SEQ ID NO: 323141 - DNA, 25 bp, Artificial
  Probe
tctatgccttcctgggttcccactt

SEQ ID NO: 323142 - DNA, 25 bp, Artificial
  Probe
gcgcctacgcgctcaagatctgggc

SEQ ID NO: 323143 - DNA, 25 bp, Artificial
  Probe
gcagctgctagcacagcgcgctgga

SEQ ID NO: 323144 - DNA, 25 bp, Artificial
  Probe
ccctgcaggggcagctgctagcaca

SEQ ID NO: 323145 - DNA, 25 bp, Artificial
  Probe
ggcctggcaccctcgaagctatgcg

SEQ ID NO: 323146 - DNA, 25 bp, Artificial
  Probe
gtcctacagcaattctgcgctcaac

SEQ ID NO: 323147 - DNA, 25 bp, Artificial
  Probe
gttcccacttcagacaggccttctg

SEQ ID NO: 323148 - DNA, 25 bp, Artificial
  Probe
ttcaggatgaacacactgccccact

SEQ ID NO: 323149 - DNA, 25 bp, Artificial
  Probe
ctgcaggggcagctgctagcacagc

SEQ ID NO: 323150 - DNA, 25 bp, Artificial
  Probe
tggtggccgctgtcgtcctgctctt

SEQ ID NO: 323151 - DNA, 25 bp, Artificial
  Probe
ctgggttcccacttcagacaggcct

SEQ ID NO: 323152 - DNA, 25 bp, Artificial
  Probe
tacggtgccatgctgcgccacctgg

SEQ ID NO: 323153 - DNA, 25 bp, Artificial
  Probe
gcgcaccaaggtctcccggctggtg

SEQ ID NO: 323154 - DNA, 25 bp, Artificial
  Probe
acggtgccatgctgcgccacctggg

SEQ ID NO: 323155 - DNA, 25 bp, Artificial
  Probe
gtggccgctgtcgtcctgctcttcg

SEQ ID NO: 323156 - DNA, 25 bp, Artificial
  Probe
tggcaccctcgaagctatgcgccta

SEQ ID NO: 323157 - DNA, 25 bp, Artificial
  Probe
cccctggcagatgggatgccagccc

SEQ ID NO: 323158 - DNA, 25 bp, Artificial
  Probe
tgcgggttatttttgggttgtgtgt

SEQ ID NO: 323159 - DNA, 25 bp, Artificial
  Probe
ctgactttggatttatgcgagattt

SEQ ID NO: 323160 - DNA, 25 bp, Artificial
  Probe
gattttgttttttgtgtttctggtg

SEQ ID NO: 323161 - DNA, 25 bp, Artificial
  Probe
tggatttatgcgagattttgttttt

SEQ ID NO: 323162 - DNA, 25 bp, Artificial
  Probe
tcccctggcagatgggatgccagcc

SEQ ID NO: 323163 - DNA, 25 bp, Artificial
  Probe
tcctgactttggatttatgcgagat

SEQ ID NO: 323164 - DNA, 25 bp, Artificial
  Probe
ccctcctgactttggatttatgcga

SEQ ID NO: 323165 - DNA, 25 bp, Artificial
  Probe
cagatgggatgccagcccctccccc

SEQ ID NO: 323166 - DNA, 25 bp, Artificial
  Probe
ctcccctggcagatgggatgccagc

SEQ ID NO: 323167 - DNA, 25 bp, Artificial
  Probe
tccctcctgactttggatttatgcg

SEQ ID NO: 323168 - DNA, 25 bp, Artificial
  Probe
ggtgtcgcatctgggtttttctcct

SEQ ID NO: 323169 - DNA, 25 bp, Artificial
  Probe
ttccctcctgactttggatttatgc

SEQ ID NO: 323170 - DNA, 25 bp, Artificial
  Probe
ttatttttgggttgtgtgtggtggt

SEQ ID NO: 323171 - DNA, 25 bp, Artificial
  Probe
tcttccctcctgactttggatttat

SEQ ID NO: 323172 - DNA, 25 bp, Artificial
  Probe
atgggatgccagcccctccccccag

SEQ ID NO: 323173 - DNA, 25 bp, Artificial
  Probe
tgtggtggtgggtgggggtgtcgca

SEQ ID NO: 323174 - DNA, 25 bp, Artificial
  Probe
tgtgtgtggtggtgggtgggggtgt

SEQ ID NO: 323175 - DNA, 25 bp, Artificial
  Probe
cgagattttgttttttgtgtttctg

SEQ ID NO: 323176 - DNA, 25 bp, Artificial
  Probe
ccccaggagagggggcagagtgccg

SEQ ID NO: 323177 - DNA, 25 bp, Artificial
  Probe
tgggtttttctcctcccctggcaga

SEQ ID NO: 323178 - DNA, 25 bp, Artificial
  Probe
ccaggagagggggcagagtgccggg

SEQ ID NO: 323179 - DNA, 25 bp, Artificial
  Probe
cctgactttggatttatgcgagatt

SEQ ID NO: 323180 - DNA, 25 bp, Artificial
  Probe
gtgtgtagggggctgcgggttattt

SEQ ID NO: 323181 - DNA, 25 bp, Artificial
  Probe
ttttgtgtttctggtgtgtaggggg

SEQ ID NO: 323182 - DNA, 25 bp, Artificial
  Probe
ctggcagatgggatgccagcccctc

SEQ ID NO: 323183 - DNA, 25 bp, Artificial
  Probe
ggttatttttgggttgtgtgtggtg

SEQ ID NO: 323184 - DNA, 25 bp, Artificial
  Probe
ctcctcccctggcagatgggatgcc

SEQ ID NO: 323185 - DNA, 25 bp, Artificial
  Probe
actttggatttatgcgagattttgt

SEQ ID NO: 323186 - DNA, 25 bp, Artificial
  Probe
catctgggtttttctcctcccctgg

SEQ ID NO: 323187 - DNA, 25 bp, Artificial
  Probe
gttttttgtgtttctggtgtgtagg

SEQ ID NO: 323188 - DNA, 25 bp, Artificial
  Probe
cctcctgactttggatttatgcgag

SEQ ID NO: 323189 - DNA, 25 bp, Artificial
  Probe
atttatgcgagattttgttttttgt

SEQ ID NO: 323190 - DNA, 25 bp, Artificial
  Probe
ctcctgactttggatttatgcgaga

SEQ ID NO: 323191 - DNA, 25 bp, Artificial
  Probe
ctccccccaggagagggggcagagt

SEQ ID NO: 323192 - DNA, 25 bp, Artificial
  Probe
cctccccccaggagagggggcagag

SEQ ID NO: 323193 - DNA, 25 bp, Artificial
  Probe
ggggtgtcgcatctgggtttttctc

SEQ ID NO: 323194 - DNA, 25 bp, Artificial
  Probe
cttccctcctgactttggatttatg

SEQ ID NO: 323195 - DNA, 25 bp, Artificial
  Probe
gtgggtgggggtgtcgcatctgggt

SEQ ID NO: 323196 - DNA, 25 bp, Artificial
  Probe
gagagggggcagagtgccgggtcag

SEQ ID NO: 323197 - DNA, 25 bp, Artificial
  Probe
ggctgcgggttatttttgggttgtg

SEQ ID NO: 323198 - DNA, 25 bp, Artificial
  Probe
gggtgtcgcatctgggtttttctcc

SEQ ID NO: 323199 - DNA, 25 bp, Artificial
  Probe
cctcccctggcagatgggatgccag

SEQ ID NO: 323200 - DNA, 25 bp, Artificial
  Probe
gtgggggtgtcgcatctgggttttt

SEQ ID NO: 323201 - DNA, 25 bp, Artificial
  Probe
gggggtgtcgcatctgggtttttct

SEQ ID NO: 323202 - DNA, 25 bp, Artificial
  Probe
tgtagggggctgcgggttatttttg

SEQ ID NO: 323203 - DNA, 25 bp, Artificial
  Probe
atcacaatggaaggatcctgcctta

SEQ ID NO: 323204 - DNA, 25 bp, Artificial
  Probe
gggaaagtcgctacatggatcagtg

SEQ ID NO: 323205 - DNA, 25 bp, Artificial
  Probe
gaacccacattcatcacaatggaag

SEQ ID NO: 323206 - DNA, 25 bp, Artificial
  Probe
tgccagtgattaatctccccgaacg

SEQ ID NO: 323207 - DNA, 25 bp, Artificial
  Probe
gagaacgacaagagccccgctgaga

SEQ ID NO: 323208 - DNA, 25 bp, Artificial
  Probe
tcaccctcattcgtgctttctgttg

SEQ ID NO: 323209 - DNA, 25 bp, Artificial
  Probe
acattcatcacaatggaaggatcct

SEQ ID NO: 323210 - DNA, 25 bp, Artificial
  Probe
ggacttacactgtgtgctggtgacg

SEQ ID NO: 323211 - DNA, 25 bp, Artificial
  Probe
tcctgcgggtcagcaacccgggtcg

SEQ ID NO: 323212 - DNA, 25 bp, Artificial
  Probe
acgtggctctgcagatccatttcac

SEQ ID NO: 323213 - DNA, 25 bp, Artificial
  Probe
atggaaggatcctgccttaagtcaa

SEQ ID NO: 323214 - DNA, 25 bp, Artificial
  Probe
cgcagaccccggacttacactgtgt

SEQ ID NO: 323215 - DNA, 25 bp, Artificial
  Probe
ttcatcacaatggaaggatcctgcc

SEQ ID NO: 323216 - DNA, 25 bp, Artificial
  Probe
tcatcacaatggaaggatcctgcct

SEQ ID NO: 323217 - DNA, 25 bp, Artificial
  Probe
caatggaaggatcctgccttaagtc

SEQ ID NO: 323218 - DNA, 25 bp, Artificial
  Probe
tctgttgcgagaacgacatcaacat

SEQ ID NO: 323219 - DNA, 25 bp, Artificial
  Probe
tcgtgctttctgttgcgagaacgac

SEQ ID NO: 323220 - DNA, 25 bp, Artificial
  Probe
gaccccggacttacactgtgtgctg

SEQ ID NO: 323221 - DNA, 25 bp, Artificial
  Probe
acgaccgggacgtggctctgcagat

SEQ ID NO: 323222 - DNA, 25 bp, Artificial
  Probe
aaggatcctgccttaagtcaactta

SEQ ID NO: 323223 - DNA, 25 bp, Artificial
  Probe
cggacttacactgtgtgctggtgac

SEQ ID NO: 323224 - DNA, 25 bp, Artificial
  Probe
ctggctgcggatgaagatgacgacc

SEQ ID NO: 323225 - DNA, 25 bp, Artificial
  Probe
agctgttgctactggagaacgacaa

SEQ ID NO: 323226 - DNA, 25 bp, Artificial
  Probe
acatcctgcgggtcagcaacccggg

SEQ ID NO: 323227 - DNA, 25 bp, Artificial
  Probe
tggctctgcagatccatttcaccct

SEQ ID NO: 323228 - DNA, 25 bp, Artificial
  Probe
gtttttgccgggaaagtcgctacat

SEQ ID NO: 323229 - DNA, 25 bp, Artificial
  Probe
ctactggagaacgacaagagccccg

SEQ ID NO: 323230 - DNA, 25 bp, Artificial
  Probe
ttgccgggaaagtcgctacatggat

SEQ ID NO: 323231 - DNA, 25 bp, Artificial
  Probe
tcagtgggtgccagtgattaatctc

SEQ ID NO: 323232 - DNA, 25 bp, Artificial
  Probe
ttgctactggagaacgacaagagcc

SEQ ID NO: 323233 - DNA, 25 bp, Artificial
  Probe
tgcgagaacgacatcaacatcctgc

SEQ ID NO: 323234 - DNA, 25 bp, Artificial
  Probe
cgtgctttctgttgcgagaacgaca

SEQ ID NO: 323235 - DNA, 25 bp, Artificial
  Probe
tacatggatcagtgggtgccagtga

SEQ ID NO: 323236 - DNA, 25 bp, Artificial
  Probe
ggatcctgccttaagtcaacttatt

SEQ ID NO: 323237 - DNA, 25 bp, Artificial
  Probe
cctcattcgtgctttctgttgcgag

SEQ ID NO: 323238 - DNA, 25 bp, Artificial
  Probe
atgacgaccgggacgtggctctgca

SEQ ID NO: 323239 - DNA, 25 bp, Artificial
  Probe
ccgggacgtggctctgcagatccat

SEQ ID NO: 323240 - DNA, 25 bp, Artificial
  Probe
acatcaacatcctgcgggtcagcaa

SEQ ID NO: 323241 - DNA, 25 bp, Artificial
  Probe
gtcgctacatggatcagtgggtgcc

SEQ ID NO: 323242 - DNA, 25 bp, Artificial
  Probe
tttttgccgggaaagtcgctacatg

SEQ ID NO: 323243 - DNA, 25 bp, Artificial
  Probe
ctttctgttgcgagaacgacatcaa

SEQ ID NO: 323244 - DNA, 25 bp, Artificial
  Probe
ctgttgcgagaacgacatcaacatc

SEQ ID NO: 323245 - DNA, 25 bp, Artificial
  Probe
gctacatggatcagtgggtgccagt

SEQ ID NO: 323246 - DNA, 25 bp, Artificial
  Probe
agtgggtgccagtgattaatctccc

SEQ ID NO: 323247 - DNA, 25 bp, Artificial
  Probe
tgctactggagaacgacaagagccc

SEQ ID NO: 323248 - DNA, 25 bp, Artificial
  Probe
catcctgcgggtcagcaacccgggt

SEQ ID NO: 323249 - DNA, 25 bp, Artificial
  Probe
accccagttcctaggagatgctgtc

SEQ ID NO: 323250 - DNA, 25 bp, Artificial
  Probe
gaaaccccagttcctaggagatgct

SEQ ID NO: 323251 - DNA, 25 bp, Artificial
  Probe
gtcagggtctcctctgcctatctgg

SEQ ID NO: 323252 - DNA, 25 bp, Artificial
  Probe
ctgtccgtgaaatcagatgatttag

SEQ ID NO: 323253 - DNA, 25 bp, Artificial
  Probe
gcattggatctctttctgtgttagc

SEQ ID NO: 323254 - DNA, 25 bp, Artificial
  Probe
ccccagttcctaggagatgctgtcc

SEQ ID NO: 323255 - DNA, 25 bp, Artificial
  Probe
tctggaaaccccagttcctaggaga

SEQ ID NO: 323256 - DNA, 25 bp, Artificial
  Probe
gttcctaggagatgctgtccgtgaa

SEQ ID NO: 323257 - DNA, 25 bp, Artificial
  Probe
tagcattggatctctttctgtgtta

SEQ ID NO: 323258 - DNA, 25 bp, Artificial
  Probe
agcattggatctctttctgtgttag

SEQ ID NO: 323259 - DNA, 25 bp, Artificial
  Probe
ctaggagatgctgtccgtgaaatca

SEQ ID NO: 323260 - DNA, 25 bp, Artificial
  Probe
cagggtctcctctgcctatctggaa

SEQ ID NO: 323261 - DNA, 25 bp, Artificial
  Probe
aaccccagttcctaggagatgctgt

SEQ ID NO: 323262 - DNA, 25 bp, Artificial
  Probe
tctgcctatctggaaaccccagttc

SEQ ID NO: 323263 - DNA, 25 bp, Artificial
  Probe
tcctaggagatgctgtccgtgaaat

SEQ ID NO: 323264 - DNA, 25 bp, Artificial
  Probe
agttcctaggagatgctgtccgtga

SEQ ID NO: 323265 - DNA, 25 bp, Artificial
  Probe
agatgctgtccgtgaaatcagatga

SEQ ID NO: 323266 - DNA, 25 bp, Artificial
  Probe
tgctgtccgtgaaatcagatgattt

SEQ ID NO: 323267 - DNA, 25 bp, Artificial
  Probe
tgcctatctggaaaccccagttcct

SEQ ID NO: 323268 - DNA, 25 bp, Artificial
  Probe
tggatctctttctgtgttagctcct

SEQ ID NO: 323269 - DNA, 25 bp, Artificial
  Probe
taggagatgctgtccgtgaaatcag

SEQ ID NO: 323270 - DNA, 25 bp, Artificial
  Probe
tggaaaccccagttcctaggagatg

SEQ ID NO: 323271 - DNA, 25 bp, Artificial
  Probe
ttcctaggagatgctgtccgtgaaa

SEQ ID NO: 323272 - DNA, 25 bp, Artificial
  Probe
ggatctctttctgtgttagctcctt

SEQ ID NO: 323273 - DNA, 25 bp, Artificial
  Probe
gatttagcattggatctctttctgt

SEQ ID NO: 323274 - DNA, 25 bp, Artificial
  Probe
cattggatctctttctgtgttagct

SEQ ID NO: 323275 - DNA, 25 bp, Artificial
  Probe
tcagggtctcctctgcctatctgga

SEQ ID NO: 323276 - DNA, 25 bp, Artificial
  Probe
tgtgttagctcctttcgtcttctgg

SEQ ID NO: 323277 - DNA, 25 bp, Artificial
  Probe
ctgtgttagctcctttcgtcttctg

SEQ ID NO: 323278 - DNA, 25 bp, Artificial
  Probe
gtgttagctcctttcgtcttctggc

SEQ ID NO: 323279 - DNA, 25 bp, Artificial
  Probe
ctctgcctatctggaaaccccagtt

SEQ ID NO: 323280 - DNA, 25 bp, Artificial
  Probe
attggatctctttctgtgttagctc

SEQ ID NO: 323281 - DNA, 25 bp, Artificial
  Probe
atgctgtccgtgaaatcagatgatt

SEQ ID NO: 323282 - DNA, 25 bp, Artificial
  Probe
tgatttagcattggatctctttctg

SEQ ID NO: 323283 - DNA, 25 bp, Artificial
  Probe
ggaaaccccagttcctaggagatgc

SEQ ID NO: 323284 - DNA, 25 bp, Artificial
  Probe
atttagcattggatctctttctgtg

SEQ ID NO: 323285 - DNA, 25 bp, Artificial
  Probe
cagttcctaggagatgctgtccgtg

SEQ ID NO: 323286 - DNA, 25 bp, Artificial
  Probe
ctggaaaccccagttcctaggagat

SEQ ID NO: 323287 - DNA, 25 bp, Artificial
  Probe
cctaggagatgctgtccgtgaaatc

SEQ ID NO: 323288 - DNA, 25 bp, Artificial
  Probe
gcctatctggaaaccccagttccta

SEQ ID NO: 323289 - DNA, 25 bp, Artificial
  Probe
ttggatctctttctgtgttagctcc

SEQ ID NO: 323290 - DNA, 25 bp, Artificial
  Probe
aaaccccagttcctaggagatgctg

SEQ ID NO: 323291 - DNA, 25 bp, Artificial
  Probe
gcgggtcagggtctcctctgcctat

SEQ ID NO: 323292 - DNA, 25 bp, Artificial
  Probe
ccagttcctaggagatgctgtccgt

SEQ ID NO: 323293 - DNA, 25 bp, Artificial
  Probe
gctgtccgtgaaatcagatgattta

SEQ ID NO: 323294 - DNA, 25 bp, Artificial
  Probe
cccagttcctaggagatgctgtccg

SEQ ID NO: 323295 - DNA, 25 bp, Artificial
  Probe
ggcatgggaaactctaggggcactt

SEQ ID NO: 323296 - DNA, 25 bp, Artificial
  Probe
agactttgggcctaagcagggagaa

SEQ ID NO: 323297 - DNA, 25 bp, Artificial
  Probe
tccctgagctggaccttgtagagtc

SEQ ID NO: 323298 - DNA, 25 bp, Artificial
  Probe
gtggggaatttccacttcagcaccc

SEQ ID NO: 323299 - DNA, 25 bp, Artificial
  Probe
ggaatttccacttcagcaccctgtc

SEQ ID NO: 323300 - DNA, 25 bp, Artificial
  Probe
tttgcacccttgtggcagctactgc

SEQ ID NO: 323301 - DNA, 25 bp, Artificial
  Probe
gtatgagtttcagaaacggggccgt

SEQ ID NO: 323302 - DNA, 25 bp, Artificial
  Probe
tccatcctagccatgccctttggag

SEQ ID NO: 323303 - DNA, 25 bp, Artificial
  Probe
gcctagtttctgtctgtaaatccaa

SEQ ID NO: 323304 - DNA, 25 bp, Artificial
  Probe
cggggccgtcaaaacgtgtgaaatg

SEQ ID NO: 323305 - DNA, 25 bp, Artificial
  Probe
catcatatttaacacattgggaatg

SEQ ID NO: 323306 - DNA, 25 bp, Artificial
  Probe
ccaaggttcgccatctcctaagtgg

SEQ ID NO: 323307 - DNA, 25 bp, Artificial
  Probe
gcagtctcaaaaacaccaaagaagg

SEQ ID NO: 323308 - DNA, 25 bp, Artificial
  Probe
gatatgaagagagctccctgagctg

SEQ ID NO: 323309 - DNA, 25 bp, Artificial
  Probe
ggagagtggctgctcttattagctt

SEQ ID NO: 323310 - DNA, 25 bp, Artificial
  Probe
tctcaaaaacaccaaagaaggtggg

SEQ ID NO: 323311 - DNA, 25 bp, Artificial
  Probe
gagcggtttctccttccatcctagc

SEQ ID NO: 323312 - DNA, 25 bp, Artificial
  Probe
ggaccgcccgggacctctggactga

SEQ ID NO: 323313 - DNA, 25 bp, Artificial
  Probe
agcaccctgtctcaacaagcagtct

SEQ ID NO: 323314 - DNA, 25 bp, Artificial
  Probe
gataaaagcctggattctagaccaa

SEQ ID NO: 323315 - DNA, 25 bp, Artificial
  Probe
caaggtgcaggacttgaagcgatag

SEQ ID NO: 323316 - DNA, 25 bp, Artificial
  Probe
ggcctgagggcctctggttcagcaa

SEQ ID NO: 323317 - DNA, 25 bp, Artificial
  Probe
atgcacgcgctgtccccagcgagtg

SEQ ID NO: 323318 - DNA, 25 bp, Artificial
  Probe
gagagtggctgctcttattagcttt

SEQ ID NO: 323319 - DNA, 25 bp, Artificial
  Probe
tggagtttgcaaacgtgccgcagag

SEQ ID NO: 323320 - DNA, 25 bp, Artificial
  Probe
cccagggaccacatcagtgtgtggg

SEQ ID NO: 323321 - DNA, 25 bp, Artificial
  Probe
cctctaggatgtctggtccaggcag

SEQ ID NO: 323322 - DNA, 25 bp, Artificial
  Probe
cctttggagcaggttttgaagagtc

SEQ ID NO: 323323 - DNA, 25 bp, Artificial
  Probe
tgcactgggccatgaggcagactaa

SEQ ID NO: 323324 - DNA, 25 bp, Artificial
  Probe
cggcttgcttagaagcagaacaagc

SEQ ID NO: 323325 - DNA, 25 bp, Artificial
  Probe
cattaatttctttgcacccttgtgg

SEQ ID NO: 323326 - DNA, 25 bp, Artificial
  Probe
ttacactaacctacacggcctgggc

SEQ ID NO: 323327 - DNA, 25 bp, Artificial
  Probe
tcccaaactgagatatgaagagagc

SEQ ID NO: 323328 - DNA, 25 bp, Artificial
  Probe
aaaggactggtttctgctcagcagc

SEQ ID NO: 323329 - DNA, 25 bp, Artificial
  Probe
catgggaaactctaggggcactttc

SEQ ID NO: 323330 - DNA, 25 bp, Artificial
  Probe
atccaacactcacctgaaagctgtg

SEQ ID NO: 323331 - DNA, 25 bp, Artificial
  Probe
tatgagtttcagaaacggggccgtc

SEQ ID NO: 323332 - DNA, 25 bp, Artificial
  Probe
cacctgaaagctgtgaagaggataa

SEQ ID NO: 323333 - DNA, 25 bp, Artificial
  Probe
ccgtcaaaacgtgtgaaatgacaga

SEQ ID NO: 323334 - DNA, 25 bp, Artificial
  Probe
gcacttgggtgcagggaagcaattc

SEQ ID NO: 323335 - DNA, 25 bp, Artificial
  Probe
cagcaacttgggacaggcattggtg

SEQ ID NO: 323336 - DNA, 25 bp, Artificial
  Probe
cagggaagcaattctccacaggttt

SEQ ID NO: 323337 - DNA, 25 bp, Artificial
  Probe
agagtctgttactggggaccgcccg

SEQ ID NO: 323338 - DNA, 25 bp, Artificial
  Probe
tgagtcccaaactgagatatgaaga

SEQ ID NO: 323339 - DNA, 25 bp, Artificial
  Probe
atgacagagcggtttctccttccat

SEQ ID NO: 323340 - DNA, 25 bp, Artificial
  Probe
cacacccaggctggtgggctcagtc

SEQ ID NO: 323341 - DNA, 25 bp, Artificial
  Probe
gtgctctctcatgttcctaacacgc

SEQ ID NO: 323342 - DNA, 25 bp, Artificial
  Probe
gcgtttggtcgcagccttgtttctc

SEQ ID NO: 323343 - DNA, 25 bp, Artificial
  Probe
gccagcctggccagcctgcgtttgg

SEQ ID NO: 323344 - DNA, 25 bp, Artificial
  Probe
catgttcctaacacgcctgattgtt

SEQ ID NO: 323345 - DNA, 25 bp, Artificial
  Probe
acaggccaaggacaaagtggcctct

SEQ ID NO: 323346 - DNA, 25 bp, Artificial
  Probe
tgcagaacacccagccagtatggta

SEQ ID NO: 323347 - DNA, 25 bp, Artificial
  Probe
tacattctggggaccgggactgcag

SEQ ID NO: 323348 - DNA, 25 bp, Artificial
  Probe
agatcagaacttcagggtctttctc

SEQ ID NO: 323349 - DNA, 25 bp, Artificial
  Probe
ctcatgttcctaacacgcctgattg

SEQ ID NO: 323350 - DNA, 25 bp, Artificial
  Probe
ctggggaccgggactgcagaacacc

SEQ ID NO: 323351 - DNA, 25 bp, Artificial
  Probe
cctctggaggctgctgtgccagcct

SEQ ID NO: 323352 - DNA, 25 bp, Artificial
  Probe
ggaccgggactgcagaacacccagc

SEQ ID NO: 323353 - DNA, 25 bp, Artificial
  Probe
gggacaaaaactcaaatctgcatct

SEQ ID NO: 323354 - DNA, 25 bp, Artificial
  Probe
tctttctcagccacaggatgggctc

SEQ ID NO: 323355 - DNA, 25 bp, Artificial
  Probe
cccagccagtatggtagaaacctgg

SEQ ID NO: 323356 - DNA, 25 bp, Artificial
  Probe
tggagccctgcctcggcctagagac

SEQ ID NO: 323357 - DNA, 25 bp, Artificial
  Probe
cgggactgcagaacacccagccagt

SEQ ID NO: 323358 - DNA, 25 bp, Artificial
  Probe
tccccgggtgactcacaggccaagg

SEQ ID NO: 323359 - DNA, 25 bp, Artificial
  Probe
ctcagctctgggacaaaaactcaaa

SEQ ID NO: 323360 - DNA, 25 bp, Artificial
  Probe
ctctggaggctgctgtgccagcctg

SEQ ID NO: 323361 - DNA, 25 bp, Artificial
  Probe
tcagccacaggatgggctcaaggtt

SEQ ID NO: 323362 - DNA, 25 bp, Artificial
  Probe
gcctgcgtttggtcgcagccttgtt

SEQ ID NO: 323363 - DNA, 25 bp, Artificial
  Probe
gcctagagacgcttagggaaaccag

SEQ ID NO: 323364 - DNA, 25 bp, Artificial
  Probe
cgggtgactcacaggccaaggacaa

SEQ ID NO: 323365 - DNA, 25 bp, Artificial
  Probe
agaccatgtctcaaagacagaaatc

SEQ ID NO: 323366 - DNA, 25 bp, Artificial
  Probe
atgtgctggtgtagcctgtgtacgt

SEQ ID NO: 323367 - DNA, 25 bp, Artificial
  Probe
agacgcttagggaaaccagaacaca

SEQ ID NO: 323368 - DNA, 25 bp, Artificial
  Probe
cctagagacgcttagggaaaccaga

SEQ ID NO: 323369 - DNA, 25 bp, Artificial
  Probe
gtttccctctggaggctgctgtgcc

SEQ ID NO: 323370 - DNA, 25 bp, Artificial
  Probe
cctgcctcggcctagagacgcttag

SEQ ID NO: 323371 - DNA, 25 bp, Artificial
  Probe
agggtctttctcagccacaggatgg

SEQ ID NO: 323372 - DNA, 25 bp, Artificial
  Probe
tgtgtctccagctgcactggcaggg

SEQ ID NO: 323373 - DNA, 25 bp, Artificial
  Probe
gaacacccagccagtatggtagaaa

SEQ ID NO: 323374 - DNA, 25 bp, Artificial
  Probe
agctctgggacaaaaactcaaatct

SEQ ID NO: 323375 - DNA, 25 bp, Artificial
  Probe
aagtggcctcttgctcccagggagg

SEQ ID NO: 323376 - DNA, 25 bp, Artificial
  Probe
agggaaaccagaacacatcagagca

SEQ ID NO: 323377 - DNA, 25 bp, Artificial
  Probe
taacacgcctgattgtttccctctg

SEQ ID NO: 323378 - DNA, 25 bp, Artificial
  Probe
gactcacaggccaaggacaaagtgg

SEQ ID NO: 323379 - DNA, 25 bp, Artificial
  Probe
gcctggccagcctgcgtttggtcgc

SEQ ID NO: 323380 - DNA, 25 bp, Artificial
  Probe
ggccagcctgcgtttggtcgcagcc

SEQ ID NO: 323381 - DNA, 25 bp, Artificial
  Probe
gacaaagtggcctcttgctcccagg

SEQ ID NO: 323382 - DNA, 25 bp, Artificial
  Probe
gaaaggacatacattctggggaccg

SEQ ID NO: 323383 - DNA, 25 bp, Artificial
  Probe
ggacatacattctggggaccgggac

SEQ ID NO: 323384 - DNA, 25 bp, Artificial
  Probe
tacgtcctaagcactggagccctgc

SEQ ID NO: 323385 - DNA, 25 bp, Artificial
  Probe
ctaggaaccaggtcccagcaggtgt

SEQ ID NO: 323386 - DNA, 25 bp, Artificial
  Probe
catgtctcaaagacagaaatctcag

SEQ ID NO: 323387 - DNA, 25 bp, Artificial
  Probe
cgctagcaaggatgcggaagaatct

SEQ ID NO: 323388 - DNA, 25 bp, Artificial
  Probe
cttctaatagtctcagtagagaggg

SEQ ID NO: 323389 - DNA, 25 bp, Artificial
  Probe
cattttatgcacactcccgacagag

SEQ ID NO: 323390 - DNA, 25 bp, Artificial
  Probe
ctctggtcctggagaaagagaggac

SEQ ID NO: 323391 - DNA, 25 bp, Artificial
  Probe
acagcccaggacaaagcaaacacac

SEQ ID NO: 323392 - DNA, 25 bp, Artificial
  Probe
gtagaatttcactacccacaagcgc

SEQ ID NO: 323393 - DNA, 25 bp, Artificial
  Probe
agtagaatttcactacccacaagcg

SEQ ID NO: 323394 - DNA, 25 bp, Artificial
  Probe
gcgccctcaaaagagaaggtaaaag

SEQ ID NO: 323395 - DNA, 25 bp, Artificial
  Probe
gacgaagcacgcactacctaacaca

SEQ ID NO: 323396 - DNA, 25 bp, Artificial
  Probe
caggttccgcggatgtgagccttgt

SEQ ID NO: 323397 - DNA, 25 bp, Artificial
  Probe
agcaatgaaatcacgggcagtacca

SEQ ID NO: 323398 - DNA, 25 bp, Artificial
  Probe
ggagaacaagccaccctacacggaa

SEQ ID NO: 323399 - DNA, 25 bp, Artificial
  Probe
actaacgactactcagaagatacag

SEQ ID NO: 323400 - DNA, 25 bp, Artificial
  Probe
taatgatgtccctcctttcagtgga

SEQ ID NO: 323401 - DNA, 25 bp, Artificial
  Probe
gcaaaggccagtcttctcacagtct

SEQ ID NO: 323402 - DNA, 25 bp, Artificial
  Probe
acgcagcagggactgagcaaggtac

SEQ ID NO: 323403 - DNA, 25 bp, Artificial
  Probe
ccaaaatgctcatcaaggaaaagta

SEQ ID NO: 323404 - DNA, 25 bp, Artificial
  Probe
ggattgcaatagcacacaggagaac

SEQ ID NO: 323405 - DNA, 25 bp, Artificial
  Probe
ctcacagtcttggtaatgaggttaa

SEQ ID NO: 323406 - DNA, 25 bp, Artificial
  Probe
actgaagtacagagcgacagaaaca

SEQ ID NO: 323407 - DNA, 25 bp, Artificial
  Probe
agagaagaaacctcagagtgttcta

SEQ ID NO: 323408 - DNA, 25 bp, Artificial
  Probe
acccgccaaagagacagtagtgagt

SEQ ID NO: 323409 - DNA, 25 bp, Artificial
  Probe
ccccaaatcagaaagattctcagtg

SEQ ID NO: 323410 - DNA, 25 bp, Artificial
  Probe
taatatttgactaggcggcccatta

SEQ ID NO: 323411 - DNA, 25 bp, Artificial
  Probe
gagctccctggaaaagaaggaaaca

SEQ ID NO: 323412 - DNA, 25 bp, Artificial
  Probe
gttcccaggcaaaggcaaaggccag

SEQ ID NO: 323413 - DNA, 25 bp, Artificial
  Probe
ggtaatatttgactaggcggcccat

SEQ ID NO: 323414 - DNA, 25 bp, Artificial
  Probe
ggaaacagagtcgatgccagcagcc

SEQ ID NO: 323415 - DNA, 25 bp, Artificial
  Probe
ctttcagtggagatggacaacattt

SEQ ID NO: 323416 - DNA, 25 bp, Artificial
  Probe
gcacacagggaaagccggttacaat

SEQ ID NO: 323417 - DNA, 25 bp, Artificial
  Probe
gcgctagcaaggatgcggaagaatc

SEQ ID NO: 323418 - DNA, 25 bp, Artificial
  Probe
agcgagagcagtggtgactagaccc

SEQ ID NO: 323419 - DNA, 25 bp, Artificial
  Probe
gcttccccagaccttctagtgaggg

SEQ ID NO: 323420 - DNA, 25 bp, Artificial
  Probe
cggttacaatgaaatccccaagagc

SEQ ID NO: 323421 - DNA, 25 bp, Artificial
  Probe
gagcacacagggaaagccggttaca

SEQ ID NO: 323422 - DNA, 25 bp, Artificial
  Probe
ggaaccaagtaaccttgactgaaag

SEQ ID NO: 323423 - DNA, 25 bp, Artificial
  Probe
cagcctgtaaagagtctggtgacgg

SEQ ID NO: 323424 - DNA, 25 bp, Artificial
  Probe
tgaagaagactcttctaatagtctc

SEQ ID NO: 323425 - DNA, 25 bp, Artificial
  Probe
ctatgcaaccagaggaaaaactgcg

SEQ ID NO: 323426 - DNA, 25 bp, Artificial
  Probe
aatagtctgtggatgtcacaggtgc

SEQ ID NO: 323427 - DNA, 25 bp, Artificial
  Probe
ggggttgaaccagttcccagctctg

SEQ ID NO: 323428 - DNA, 25 bp, Artificial
  Probe
caggacactgtgctgttttagtggt

SEQ ID NO: 323429 - DNA, 25 bp, Artificial
  Probe
tagggagctccctggaaaagaagga

SEQ ID NO: 323430 - DNA, 25 bp, Artificial
  Probe
aatccccaagagcagcaagggcggc

SEQ ID NO: 323431 - DNA, 25 bp, Artificial
  Probe
ccacaagcgccctcaaaagagaagg

SEQ ID NO: 323432 - DNA, 25 bp, Artificial
  Probe
gcgtaattccaacagatgtccacaa

SEQ ID NO: 323433 - DNA, 25 bp, Artificial
  Probe
gtcatttcacagacggagtaaatgg

SEQ ID NO: 323434 - DNA, 25 bp, Artificial
  Probe
ggaaaaagtccgaagctctgaagcc

SEQ ID NO: 323435 - DNA, 25 bp, Artificial
  Probe
tggatccagaggagaggcccacctt

SEQ ID NO: 323436 - DNA, 25 bp, Artificial
  Probe
tgggtatcagtgaccctctgagact

SEQ ID NO: 323437 - DNA, 25 bp, Artificial
  Probe
gaaccacagtatcagcccggagacc

SEQ ID NO: 323438 - DNA, 25 bp, Artificial
  Probe
agcacgtcggaaaaagtccgaagct

SEQ ID NO: 323439 - DNA, 25 bp, Artificial
  Probe
ggatgcccagtatccctgtatgagg

SEQ ID NO: 323440 - DNA, 25 bp, Artificial
  Probe
ctctggtcccagtgcccgagacttg

SEQ ID NO: 323441 - DNA, 25 bp, Artificial
  Probe
ggaagactatttcacctccacagaa

SEQ ID NO: 323442 - DNA, 25 bp, Artificial
  Probe
cccagtcatttcacagacggagtaa

SEQ ID NO: 323443 - DNA, 25 bp, Artificial
  Probe
gagaccagacatagcctgactgggt

SEQ ID NO: 323444 - DNA, 25 bp, Artificial
  Probe
agctctgaagccattttatagaggg

SEQ ID NO: 323445 - DNA, 25 bp, Artificial
  Probe
aaagtccgaagctctgaagccattt

SEQ ID NO: 323446 - DNA, 25 bp, Artificial
  Probe
gtatcagcccggagaccagacatag

SEQ ID NO: 323447 - DNA, 25 bp, Artificial
  Probe
ccagacatagcctgactgggtatca

SEQ ID NO: 323448 - DNA, 25 bp, Artificial
  Probe
gcccagtatccctgtatgaggtcat

SEQ ID NO: 323449 - DNA, 25 bp, Artificial
  Probe
ctgaagccattttatagagggtgca

SEQ ID NO: 323450 - DNA, 25 bp, Artificial
  Probe
gaccctctgagactatgtactaacc

SEQ ID NO: 323451 - DNA, 25 bp, Artificial
  Probe
aaccacagtatcagcccggagacca

SEQ ID NO: 323452 - DNA, 25 bp, Artificial
  Probe
agcctgactgggtatcagtgaccct

SEQ ID NO: 323453 - DNA, 25 bp, Artificial
  Probe
cctgtatgaggtcatggagcagacc

SEQ ID NO: 323454 - DNA, 25 bp, Artificial
  Probe
agtacctgcagtctttcctggaaga

SEQ ID NO: 323455 - DNA, 25 bp, Artificial
  Probe
tttcacagacggagtaaatggatgc

SEQ ID NO: 323456 - DNA, 25 bp, Artificial
  Probe
gaaattcatctcttaccttcgctgg

SEQ ID NO: 323457 - DNA, 25 bp, Artificial
  Probe
ccgaagctctgaagccattttatag

SEQ ID NO: 323458 - DNA, 25 bp, Artificial
  Probe
ttcacagacggagtaaatggatgct

SEQ ID NO: 323459 - DNA, 25 bp, Artificial
  Probe
gtctttcctggaagactatttcacc

SEQ ID NO: 323460 - DNA, 25 bp, Artificial
  Probe
accctgtggaatcctagcacgtcgg

SEQ ID NO: 323461 - DNA, 25 bp, Artificial
  Probe
catggagcagacctggcgtctggat

SEQ ID NO: 323462 - DNA, 25 bp, Artificial
  Probe
gagactatgtactaacccttgccaa

SEQ ID NO: 323463 - DNA, 25 bp, Artificial
  Probe
acctgcagtctttcctggaagacta

SEQ ID NO: 323464 - DNA, 25 bp, Artificial
  Probe
gaatcctagcacgtcggaaaaagtc

SEQ ID NO: 323465 - DNA, 25 bp, Artificial
  Probe
gctcagagttcatctctcgtacact

SEQ ID NO: 323466 - DNA, 25 bp, Artificial
  Probe
atggagcagacctggcgtctggatc

SEQ ID NO: 323467 - DNA, 25 bp, Artificial
  Probe
tgagactatgtactaacccttgcca

SEQ ID NO: 323468 - DNA, 25 bp, Artificial
  Probe
aggcccacctttgagtacctgcagt

SEQ ID NO: 323469 - DNA, 25 bp, Artificial
  Probe
acatagcctgactgggtatcagtga

SEQ ID NO: 323470 - DNA, 25 bp, Artificial
  Probe
tagggcacccagtcatttcacagac

SEQ ID NO: 323471 - DNA, 25 bp, Artificial
  Probe
acctggcgtctggatccagaggaga

SEQ ID NO: 323472 - DNA, 25 bp, Artificial
  Probe
ctagcacgtcggaaaaagtccgaag

SEQ ID NO: 323473 - DNA, 25 bp, Artificial
  Probe
gcagacctggcgtctggatccagag

SEQ ID NO: 323474 - DNA, 25 bp, Artificial
  Probe
taaatggatgctcagagttcatctc

SEQ ID NO: 323475 - DNA, 25 bp, Artificial
  Probe
tatcagtgaccctctgagactatgt

SEQ ID NO: 323476 - DNA, 25 bp, Artificial
  Probe
agagttcatctctcgtacactctga

SEQ ID NO: 323477 - DNA, 25 bp, Artificial
  Probe
cgtctggatccagaggagaggccca

SEQ ID NO: 323478 - DNA, 25 bp, Artificial
  Probe
aggtcatggagcagacctggcgtct

SEQ ID NO: 323479 - DNA, 25 bp, Artificial
  Probe
cactgtactggctaactgtatgtca

SEQ ID NO: 323480 - DNA, 25 bp, Artificial
  Probe
gttcctctcttgacttccttcagag

SEQ ID NO: 323481 - DNA, 25 bp, Artificial
  Probe
ctcactgtgggcatgggatttagta

SEQ ID NO: 323482 - DNA, 25 bp, Artificial
  Probe
cttttatatcatctggtgttacatg

SEQ ID NO: 323483 - DNA, 25 bp, Artificial
  Probe
gccagagtcatatgggaggacagaa

SEQ ID NO: 323484 - DNA, 25 bp, Artificial
  Probe
tataggtgtctcactgtgggcatgg

SEQ ID NO: 323485 - DNA, 25 bp, Artificial
  Probe
aggttctcctacacagttcctgcct

SEQ ID NO: 323486 - DNA, 25 bp, Artificial
  Probe
agagagtatctggtcatctgtcttg

SEQ ID NO: 323487 - DNA, 25 bp, Artificial
  Probe
actgcaaaggccagaagagagtatc

SEQ ID NO: 323488 - DNA, 25 bp, Artificial
  Probe
tagccacttggaagtcagtcttctc

SEQ ID NO: 323489 - DNA, 25 bp, Artificial
  Probe
tcctcgaggtcctttgcatcagctc

SEQ ID NO: 323490 - DNA, 25 bp, Artificial
  Probe
acaagtgactgcaaaggccagaaga

SEQ ID NO: 323491 - DNA, 25 bp, Artificial
  Probe
gagtgccatacaaaggattgagcac

SEQ ID NO: 323492 - DNA, 25 bp, Artificial
  Probe
gcaagccatggaggtgaaaaccagt

SEQ ID NO: 323493 - DNA, 25 bp, Artificial
  Probe
ctggtcatctgtcttggagttatag

SEQ ID NO: 323494 - DNA, 25 bp, Artificial
  Probe
ctacacagttcctgcctggacactg

SEQ ID NO: 323495 - DNA, 25 bp, Artificial
  Probe
aaaccctacctacatcagtggttcg

SEQ ID NO: 323496 - DNA, 25 bp, Artificial
  Probe
aagttacatggcagcttaagcctag

SEQ ID NO: 323497 - DNA, 25 bp, Artificial
  Probe
tgcatcagctcctgactgcaggatg

SEQ ID NO: 323498 - DNA, 25 bp, Artificial
  Probe
cttccttcagagataaagaggaata

SEQ ID NO: 323499 - DNA, 25 bp, Artificial
  Probe
tctacataaaagttacatggcagct

SEQ ID NO: 323500 - DNA, 25 bp, Artificial
  Probe
gtagctgaaattccagctacttaat

SEQ ID NO: 323501 - DNA, 25 bp, Artificial
  Probe
gtgccatacaaaggattgagcacat

SEQ ID NO: 323502 - DNA, 25 bp, Artificial
  Probe
ttctatatcaaagcaggttgagcaa

SEQ ID NO: 323503 - DNA, 25 bp, Artificial
  Probe
cccaaacaagccaggccattggaca

SEQ ID NO: 323504 - DNA, 25 bp, Artificial
  Probe
tcactgtgggcatgggatttagtac

SEQ ID NO: 323505 - DNA, 25 bp, Artificial
  Probe
aggtggttgtgacacaccaggcatg

SEQ ID NO: 323506 - DNA, 25 bp, Artificial
  Probe
cctggtgtctctttacagcaataaa

SEQ ID NO: 323507 - DNA, 25 bp, Artificial
  Probe
aatctacataaaagttacatggcag

SEQ ID NO: 323508 - DNA, 25 bp, Artificial
  Probe
ttgagcaagccatggaggtgaaaac

SEQ ID NO: 323509 - DNA, 25 bp, Artificial
  Probe
gttgccttagtcctggtgtctcttt

SEQ ID NO: 323510 - DNA, 25 bp, Artificial
  Probe
tgtagaactcaggttctcctacaca

SEQ ID NO: 323511 - DNA, 25 bp, Artificial
  Probe
aaaccagtaagcagcgctcctcgag

SEQ ID NO: 323512 - DNA, 25 bp, Artificial
  Probe
aaaccattagcactgtactggctaa

SEQ ID NO: 323513 - DNA, 25 bp, Artificial
  Probe
aatggctaatggagtgccatacaaa

SEQ ID NO: 323514 - DNA, 25 bp, Artificial
  Probe
cattggacaagcaggcttttatatc

SEQ ID NO: 323515 - DNA, 25 bp, Artificial
  Probe
tgtagccttattgtataggtgtctc

SEQ ID NO: 323516 - DNA, 25 bp, Artificial
  Probe
ttgacacaggccagagtcatatggg

SEQ ID NO: 323517 - DNA, 25 bp, Artificial
  Probe
catgggttctgtgaacttaactgaa

SEQ ID NO: 323518 - DNA, 25 bp, Artificial
  Probe
gtatgttctattctatacagtctga

SEQ ID NO: 323519 - DNA, 25 bp, Artificial
  Probe
gtgaaaaccagtaagcagcgctcct

SEQ ID NO: 323520 - DNA, 25 bp, Artificial
  Probe
cagcccattgtaggtggttttgata

SEQ ID NO: 323521 - DNA, 25 bp, Artificial
  Probe
tgtatacatgtgctcataaatgtgc

SEQ ID NO: 323522 - DNA, 25 bp, Artificial
  Probe
ttggaagtcagtcttctctttgcct

SEQ ID NO: 323523 - DNA, 25 bp, Artificial
  Probe
atggctaatggagtgccatacaaag

SEQ ID NO: 323524 - DNA, 25 bp, Artificial
  Probe
gatttagggagaccagcatgcatat

SEQ ID NO: 323525 - DNA, 25 bp, Artificial
  Probe
tccagaagatgctgcaggaggatga

SEQ ID NO: 323526 - DNA, 25 bp, Artificial
  Probe
atgcccaatgccatgcctgtgagcg

SEQ ID NO: 323527 - DNA, 25 bp, Artificial
  Probe
ctggactggctgtcccatgagctat

SEQ ID NO: 323528 - DNA, 25 bp, Artificial
  Probe
gtatgatggtctggactggctgtcc

SEQ ID NO: 323529 - DNA, 25 bp, Artificial
  Probe
cttggatgcggctggcaagactacc

SEQ ID NO: 323530 - DNA, 25 bp, Artificial
  Probe
tgcccaatgccatgcctgtgagcga

SEQ ID NO: 323531 - DNA, 25 bp, Artificial
  Probe
ggcttcaacacttgcgtagccgcac

SEQ ID NO: 323532 - DNA, 25 bp, Artificial
  Probe
gccatgcctgtgagcgaactgactg

SEQ ID NO: 323533 - DNA, 25 bp, Artificial
  Probe
tgtgcctgcctgcatgctctctctt

SEQ ID NO: 323534 - DNA, 25 bp, Artificial
  Probe
aaggcacaggcctgtatgatggtct

SEQ ID NO: 323535 - DNA, 25 bp, Artificial
  Probe
gcctgtatgatggtctggactggct

SEQ ID NO: 323536 - DNA, 25 bp, Artificial
  Probe
tggaagggcttcctggccaaggccc

SEQ ID NO: 323537 - DNA, 25 bp, Artificial
  Probe
gatggtctggactggctgtcccatg

SEQ ID NO: 323538 - DNA, 25 bp, Artificial
  Probe
ccatgagctatcaaagcgctagcca

SEQ ID NO: 323539 - DNA, 25 bp, Artificial
  Probe
tcttgttgttggagcctggagcctt

SEQ ID NO: 323540 - DNA, 25 bp, Artificial
  Probe
cgggatggccagactcccgggactc

SEQ ID NO: 323541 - DNA, 25 bp, Artificial
  Probe
tcaacacttgcgtagccgcacgtgg

SEQ ID NO: 323542 - DNA, 25 bp, Artificial
  Probe
tgcggctggcaagactaccatcctg

SEQ ID NO: 323543 - DNA, 25 bp, Artificial
  Probe
actggctgtcccatgagctatcaaa

SEQ ID NO: 323544 - DNA, 25 bp, Artificial
  Probe
gtctggactggctgtcccatgagct

SEQ ID NO: 323545 - DNA, 25 bp, Artificial
  Probe
gatccttatggttggcttggatgcg

SEQ ID NO: 323546 - DNA, 25 bp, Artificial
  Probe
ccgggatggccagactcccgggact

SEQ ID NO: 323547 - DNA, 25 bp, Artificial
  Probe
ctgatgaactccagaagatgctgca

SEQ ID NO: 323548 - DNA, 25 bp, Artificial
  Probe
ggcctcacggtgtccgcgctctttt

SEQ ID NO: 323549 - DNA, 25 bp, Artificial
  Probe
tgctctcctgcctgctgggacctgt

SEQ ID NO: 323550 - DNA, 25 bp, Artificial
  Probe
cacccaaggcacaggcctgtatgat

SEQ ID NO: 323551 - DNA, 25 bp, Artificial
  Probe
tgaactccagaagatgctgcaggag

SEQ ID NO: 323552 - DNA, 25 bp, Artificial
  Probe
gccacccaaggcacaggcctgtatg

SEQ ID NO: 323553 - DNA, 25 bp, Artificial
  Probe
ggacatgcccaatgccatgcctgtg

SEQ ID NO: 323554 - DNA, 25 bp, Artificial
  Probe
tccgcgctcttttcgcggatcttcg

SEQ ID NO: 323555 - DNA, 25 bp, Artificial
  Probe
actgactgacaagctggggcttcaa

SEQ ID NO: 323556 - DNA, 25 bp, Artificial
  Probe
cggtgtccgcgctcttttcgcggat

SEQ ID NO: 323557 - DNA, 25 bp, Artificial
  Probe
tgactgacaagctggggcttcaaca

SEQ ID NO: 323558 - DNA, 25 bp, Artificial
  Probe
caatgccatgcctgtgagcgaactg

SEQ ID NO: 323559 - DNA, 25 bp, Artificial
  Probe
tgcctgtgagcgaactgactgacaa

SEQ ID NO: 323560 - DNA, 25 bp, Artificial
  Probe
cgggtccaggagtctgctgatgaac

SEQ ID NO: 323561 - DNA, 25 bp, Artificial
  Probe
ttgttggagcctggagccttgctct

SEQ ID NO: 323562 - DNA, 25 bp, Artificial
  Probe
caggcctgtatgatggtctggactg

SEQ ID NO: 323563 - DNA, 25 bp, Artificial
  Probe
acaagctggggcttcaacacttgcg

SEQ ID NO: 323564 - DNA, 25 bp, Artificial
  Probe
aggacatgcccaatgccatgcctgt

SEQ ID NO: 323565 - DNA, 25 bp, Artificial
  Probe
tctcctgcctgctgggacctgtgga

SEQ ID NO: 323566 - DNA, 25 bp, Artificial
  Probe
agcgaactgactgacaagctggggc

SEQ ID NO: 323567 - DNA, 25 bp, Artificial
  Probe
cagatgcggatccttatggttggct

SEQ ID NO: 323568 - DNA, 25 bp, Artificial
  Probe
gtgcatcccgggatggccagactcc

SEQ ID NO: 323569 - DNA, 25 bp, Artificial
  Probe
gttgttggagcctggagccttgctc

SEQ ID NO: 323570 - DNA, 25 bp, Artificial
  Probe
gactcccgggactcctcaggcagtg

SEQ ID NO: 323571 - DNA, 25 bp, Artificial
  Probe
ggcagtggcatctgaagagcagcct

SEQ ID NO: 323572 - DNA, 25 bp, Artificial
  Probe
ctctccctcatcaatggcagtggca

SEQ ID NO: 323573 - DNA, 25 bp, Artificial
  Probe
ctccctcatcaatggcagtggcatc

SEQ ID NO: 323574 - DNA, 25 bp, Artificial
  Probe
atgtgtgctgtgtcgtcctgcagat

SEQ ID NO: 323575 - DNA, 25 bp, Artificial
  Probe
tctccctcatcaatggcagtggcat

SEQ ID NO: 323576 - DNA, 25 bp, Artificial
  Probe
tgtgtcgtcctgcagatagttgata

SEQ ID NO: 323577 - DNA, 25 bp, Artificial
  Probe
ggatatgtgtgctgtgtcgtcctgc

SEQ ID NO: 323578 - DNA, 25 bp, Artificial
  Probe
tggcagtggcatctgaagagcagcc

SEQ ID NO: 323579 - DNA, 25 bp, Artificial
  Probe
gaagagcagcctggatatgtgtgct

SEQ ID NO: 323580 - DNA, 25 bp, Artificial
  Probe
catctgaagagcagcctggatatgt

SEQ ID NO: 323581 - DNA, 25 bp, Artificial
  Probe
tggatatgtgtgctgtgtcgtcctg

SEQ ID NO: 323582 - DNA, 25 bp, Artificial
  Probe
tcagactgctctcactctccctcat

SEQ ID NO: 323583 - DNA, 25 bp, Artificial
  Probe
gcctggatatgtgtgctgtgtcgtc

SEQ ID NO: 323584 - DNA, 25 bp, Artificial
  Probe
atctgaagagcagcctggatatgtg

SEQ ID NO: 323585 - DNA, 25 bp, Artificial
  Probe
tgctgtgtcgtcctgcagatagttg

SEQ ID NO: 323586 - DNA, 25 bp, Artificial
  Probe
tgaagagcagcctggatatgtgtgc

SEQ ID NO: 323587 - DNA, 25 bp, Artificial
  Probe
tgtgctgtgtcgtcctgcagatagt

SEQ ID NO: 323588 - DNA, 25 bp, Artificial
  Probe
gtgtgctgtgtcgtcctgcagatag

SEQ ID NO: 323589 - DNA, 25 bp, Artificial
  Probe
agcctggatatgtgtgctgtgtcgt

SEQ ID NO: 323590 - DNA, 25 bp, Artificial
  Probe
cagtggcatctgaagagcagcctgg

SEQ ID NO: 323591 - DNA, 25 bp, Artificial
  Probe
gcatctgaagagcagcctggatatg

SEQ ID NO: 323592 - DNA, 25 bp, Artificial
  Probe
aatggcagtggcatctgaagagcag

SEQ ID NO: 323593 - DNA, 25 bp, Artificial
  Probe
cctcatcaatggcagtggcatctga

SEQ ID NO: 323594 - DNA, 25 bp, Artificial
  Probe
gtgctgtgtcgtcctgcagatagtt

SEQ ID NO: 323595 - DNA, 25 bp, Artificial
  Probe
atcaatggcagtggcatctgaagag

SEQ ID NO: 323596 - DNA, 25 bp, Artificial
  Probe
ctggatatgtgtgctgtgtcgtcct

SEQ ID NO: 323597 - DNA, 25 bp, Artificial
  Probe
cctggatatgtgtgctgtgtcgtcc

SEQ ID NO: 323598 - DNA, 25 bp, Artificial
  Probe
tcatcaatggcagtggcatctgaag

SEQ ID NO: 323599 - DNA, 25 bp, Artificial
  Probe
atggcagtggcatctgaagagcagc

SEQ ID NO: 323600 - DNA, 25 bp, Artificial
  Probe
catcaatggcagtggcatctgaaga

SEQ ID NO: 323601 - DNA, 25 bp, Artificial
  Probe
tggcatctgaagagcagcctggata

SEQ ID NO: 323602 - DNA, 25 bp, Artificial
  Probe
gcagcctggatatgtgtgctgtgtc

SEQ ID NO: 323603 - DNA, 25 bp, Artificial
  Probe
agtggcatctgaagagcagcctgga

SEQ ID NO: 323604 - DNA, 25 bp, Artificial
  Probe
atatgtgtgctgtgtcgtcctgcag

SEQ ID NO: 323605 - DNA, 25 bp, Artificial
  Probe
tatgtgtgctgtgtcgtcctgcaga

SEQ ID NO: 323606 - DNA, 25 bp, Artificial
  Probe
gctgtgtcgtcctgcagatagttga

SEQ ID NO: 323607 - DNA, 25 bp, Artificial
  Probe
tccctcatcaatggcagtggcatct

SEQ ID NO: 323608 - DNA, 25 bp, Artificial
  Probe
agcagcctggatatgtgtgctgtgt

SEQ ID NO: 323609 - DNA, 25 bp, Artificial
  Probe
ctgtgtcgtcctgcagatagttgat

SEQ ID NO: 323610 - DNA, 25 bp, Artificial
  Probe
gatatgtgtgctgtgtcgtcctgca

SEQ ID NO: 323611 - DNA, 25 bp, Artificial
  Probe
ggcatctgaagagcagcctggatat

SEQ ID NO: 323612 - DNA, 25 bp, Artificial
  Probe
tgtgtgctgtgtcgtcctgcagata

SEQ ID NO: 323613 - DNA, 25 bp, Artificial
  Probe
caatggcagtggcatctgaagagca

SEQ ID NO: 323614 - DNA, 25 bp, Artificial
  Probe
ctcatcaatggcagtggcatctgaa

SEQ ID NO: 323615 - DNA, 25 bp, Artificial
  Probe
cagcctggatatgtgtgctgtgtcg

SEQ ID NO: 323616 - DNA, 25 bp, Artificial
  Probe
actctccctcatcaatggcagtggc

SEQ ID NO: 323617 - DNA, 25 bp, Artificial
  Probe
tgtgtgttcttttgagcctttgcaa

SEQ ID NO: 323618 - DNA, 25 bp, Artificial
  Probe
tgtgttcttttgagcctttgcaata

SEQ ID NO: 323619 - DNA, 25 bp, Artificial
  Probe
tttgaaactgatttccttacataac

SEQ ID NO: 323620 - DNA, 25 bp, Artificial
  Probe
gattgtgtgttcttttgagcctttg

SEQ ID NO: 323621 - DNA, 25 bp, Artificial
  Probe
attgtgtgttcttttgagcctttgc

SEQ ID NO: 323622 - DNA, 25 bp, Artificial
  Probe
catgattgtgtgttcttttgagcct

SEQ ID NO: 323623 - DNA, 25 bp, Artificial
  Probe
catattttacatagtatggacaaat

SEQ ID NO: 323624 - DNA, 25 bp, Artificial
  Probe
ttgtgtgttcttttgagcctttgca

SEQ ID NO: 323625 - DNA, 25 bp, Artificial
  Probe
gttcttttgagcctttgcaatattt

SEQ ID NO: 323626 - DNA, 25 bp, Artificial
  Probe
ctttgcaatatttgaaactgatttc

SEQ ID NO: 323627 - DNA, 25 bp, Artificial
  Probe
ttgagcctttgcaatatttgaaact

SEQ ID NO: 323628 - DNA, 25 bp, Artificial
  Probe
ttcttttgagcctttgcaatatttg

SEQ ID NO: 323629 - DNA, 25 bp, Artificial
  Probe
gaaactgatttccttacataacaaa

SEQ ID NO: 323630 - DNA, 25 bp, Artificial
  Probe
tttgagcctttgcaatatttgaaac

SEQ ID NO: 323631 - DNA, 25 bp, Artificial
  Probe
tatttgaaactgatttccttacata

SEQ ID NO: 323632 - DNA, 25 bp, Artificial
  Probe
tgatttccttacataacaaagtgga

SEQ ID NO: 323633 - DNA, 25 bp, Artificial
  Probe
actgatttccttacataacaaagtg

SEQ ID NO: 323634 - DNA, 25 bp, Artificial
  Probe
tgagcctttgcaatatttgaaactg

SEQ ID NO: 323635 - DNA, 25 bp, Artificial
  Probe
gtgtgttcttttgagcctttgcaat

SEQ ID NO: 323636 - DNA, 25 bp, Artificial
  Probe
aacatgattgtgtgttcttttgagc

SEQ ID NO: 323637 - DNA, 25 bp, Artificial
  Probe
atgattgtgtgttcttttgagcctt

SEQ ID NO: 323638 - DNA, 25 bp, Artificial
  Probe
cttttgagcctttgcaatatttgaa

SEQ ID NO: 323639 - DNA, 25 bp, Artificial
  Probe
ttttgagcctttgcaatatttgaaa

SEQ ID NO: 323640 - DNA, 25 bp, Artificial
  Probe
aactgatttccttacataacaaagt

SEQ ID NO: 323641 - DNA, 25 bp, Artificial
  Probe
aaacatgattgtgtgttcttttgag

SEQ ID NO: 323642 - DNA, 25 bp, Artificial
  Probe
gagcctttgcaatatttgaaactga

SEQ ID NO: 323643 - DNA, 25 bp, Artificial
  Probe
tcttttgagcctttgcaatatttga

SEQ ID NO: 323644 - DNA, 25 bp, Artificial
  Probe
ctgatttccttacataacaaagtgg

SEQ ID NO: 323645 - DNA, 25 bp, Artificial
  Probe
acatgattgtgtgttcttttgagcc

SEQ ID NO: 323646 - DNA, 25 bp, Artificial
  Probe
aaactgatttccttacataacaaag

SEQ ID NO: 323647 - DNA, 25 bp, Artificial
  Probe
atttccttacataacaaagtggatt

SEQ ID NO: 323648 - DNA, 25 bp, Artificial
  Probe
tcatattttacatagtatggacaaa

SEQ ID NO: 323649 - DNA, 25 bp, Artificial
  Probe
ttgaaactgatttccttacataaca

SEQ ID NO: 323650 - DNA, 25 bp, Artificial
  Probe
tgttcttttgagcctttgcaatatt

SEQ ID NO: 323651 - DNA, 25 bp, Artificial
  Probe
atattttacatagtatggacaaatt

SEQ ID NO: 323652 - DNA, 25 bp, Artificial
  Probe
tattttacatagtatggacaaattc

SEQ ID NO: 323653 - DNA, 25 bp, Artificial
  Probe
agcctttgcaatatttgaaactgat

SEQ ID NO: 323654 - DNA, 25 bp, Artificial
  Probe
tgattgtgtgttcttttgagccttt

SEQ ID NO: 323655 - DNA, 25 bp, Artificial
  Probe
gtgttcttttgagcctttgcaatat

SEQ ID NO: 323656 - DNA, 25 bp, Artificial
  Probe
gatttccttacataacaaagtggat

SEQ ID NO: 323657 - DNA, 25 bp, Artificial
  Probe
atttgaaactgatttccttacataa

SEQ ID NO: 323658 - DNA, 25 bp, Artificial
  Probe
attttacatagtatggacaaattcc

SEQ ID NO: 323659 - DNA, 25 bp, Artificial
  Probe
atatttgaaactgatttccttacat

SEQ ID NO: 323660 - DNA, 25 bp, Artificial
  Probe
ggggctcacatggttaacctctaac

SEQ ID NO: 323661 - DNA, 25 bp, Artificial
  Probe
aggggctcacatggttaacctctaa

SEQ ID NO: 323662 - DNA, 25 bp, Artificial
  Probe
gtctgtttcatctagtaaactgaaa

SEQ ID NO: 323663 - DNA, 25 bp, Artificial
  Probe
gcctgacccggattcgggacaggaa

SEQ ID NO: 323664 - DNA, 25 bp, Artificial
  Probe
atgaggggctcacatggttaacctc

SEQ ID NO: 323665 - DNA, 25 bp, Artificial
  Probe
ttcgggacaggaactggtatgtgca

SEQ ID NO: 323666 - DNA, 25 bp, Artificial
  Probe
gcaactcttggtaaagtcctttata

SEQ ID NO: 323667 - DNA, 25 bp, Artificial
  Probe
aatagcaactcttggtaaagtcctt

SEQ ID NO: 323668 - DNA, 25 bp, Artificial
  Probe
caagtctgtttcatctagtaaactg

SEQ ID NO: 323669 - DNA, 25 bp, Artificial
  Probe
gagaaatcaaaaacccattcatagg

SEQ ID NO: 323670 - DNA, 25 bp, Artificial
  Probe
agcaactcttggtaaagtcctttat

SEQ ID NO: 323671 - DNA, 25 bp, Artificial
  Probe
atagcaactcttggtaaagtccttt

SEQ ID NO: 323672 - DNA, 25 bp, Artificial
  Probe
ggctcacatggttaacctctaacta

SEQ ID NO: 323673 - DNA, 25 bp, Artificial
  Probe
taatagcaactcttggtaaagtcct

SEQ ID NO: 323674 - DNA, 25 bp, Artificial
  Probe
aagtctgtttcatctagtaaactga

SEQ ID NO: 323675 - DNA, 25 bp, Artificial
  Probe
ggacggactctatgaggggctcaca

SEQ ID NO: 323676 - DNA, 25 bp, Artificial
  Probe
tctatgaggggctcacatggttaac

SEQ ID NO: 323677 - DNA, 25 bp, Artificial
  Probe
tagcaactcttggtaaagtccttta

SEQ ID NO: 323678 - DNA, 25 bp, Artificial
  Probe
ctatgaggggctcacatggttaacc

SEQ ID NO: 323679 - DNA, 25 bp, Artificial
  Probe
acggactctatgaggggctcacatg

SEQ ID NO: 323680 - DNA, 25 bp, Artificial
  Probe
tgaggggctcacatggttaacctct

SEQ ID NO: 323681 - DNA, 25 bp, Artificial
  Probe
ggtaatagcaactcttggtaaagtc

SEQ ID NO: 323682 - DNA, 25 bp, Artificial
  Probe
agtctgtttcatctagtaaactgaa

SEQ ID NO: 323683 - DNA, 25 bp, Artificial
  Probe
gacggactctatgaggggctcacat

SEQ ID NO: 323684 - DNA, 25 bp, Artificial
  Probe
gtaatagcaactcttggtaaagtcc

SEQ ID NO: 323685 - DNA, 25 bp, Artificial
  Probe
gaggggctcacatggttaacctcta

SEQ ID NO: 323686 - DNA, 25 bp, Artificial
  Probe
attcgggacaggaactggtatgtgc

SEQ ID NO: 323687 - DNA, 25 bp, Artificial
  Probe
gggctcacatggttaacctctaact

SEQ ID NO: 323688 - DNA, 25 bp, Artificial
  Probe
tatgaggggctcacatggttaacct

SEQ ID NO: 323689 - DNA, 25 bp, Artificial
  Probe
catgctgaacattcctcagttttag

SEQ ID NO: 323690 - DNA, 25 bp, Artificial
  Probe
catttctttatgtgggaccatcagc

SEQ ID NO: 323691 - DNA, 25 bp, Artificial
  Probe
caatttcaagcgtggctaggcagac

SEQ ID NO: 323692 - DNA, 25 bp, Artificial
  Probe
gcttgcatgtaatcctcaagtttgg

SEQ ID NO: 323693 - DNA, 25 bp, Artificial
  Probe
cagaccacgtgtgtttgtcagtcat

SEQ ID NO: 323694 - DNA, 25 bp, Artificial
  Probe
gatccaaagttctcatgagccccct

SEQ ID NO: 323695 - DNA, 25 bp, Artificial
  Probe
tcaagcgtggctaggcagaccacgt

SEQ ID NO: 323696 - DNA, 25 bp, Artificial
  Probe
gaccatcagcgtctcttactgagat

SEQ ID NO: 323697 - DNA, 25 bp, Artificial
  Probe
agttcaatttcaagcgtggctaggc

SEQ ID NO: 323698 - DNA, 25 bp, Artificial
  Probe
aggcttcatctcattgtaccctgcc

SEQ ID NO: 323699 - DNA, 25 bp, Artificial
  Probe
gggttactaccctaatcttgctcaa

SEQ ID NO: 323700 - DNA, 25 bp, Artificial
  Probe
agctgacagttgctgagcctggtag

SEQ ID NO: 323701 - DNA, 25 bp, Artificial
  Probe
tgccaccattttctactcgtgaggt

SEQ ID NO: 323702 - DNA, 25 bp, Artificial
  Probe
tctttatgtgggaccatcagcgtct

SEQ ID NO: 323703 - DNA, 25 bp, Artificial
  Probe
taccctaatcttgctcaagtgatgg

SEQ ID NO: 323704 - DNA, 25 bp, Artificial
  Probe
ctgtgcccttttgatcttattcaga

SEQ ID NO: 323705 - DNA, 25 bp, Artificial
  Probe
ggttactaccctaatcttgctcaag

SEQ ID NO: 323706 - DNA, 25 bp, Artificial
  Probe
tttctactcgtgaggtgtaacaaag

SEQ ID NO: 323707 - DNA, 25 bp, Artificial
  Probe
ctaccctaatcttgctcaagtgatg

SEQ ID NO: 323708 - DNA, 25 bp, Artificial
  Probe
tgaacattcctcagttttagggtta

SEQ ID NO: 323709 - DNA, 25 bp, Artificial
  Probe
acaacagatccaaagttctcatgag

SEQ ID NO: 323710 - DNA, 25 bp, Artificial
  Probe
tgcctgtcatgttagctgacagttg

SEQ ID NO: 323711 - DNA, 25 bp, Artificial
  Probe
tgtgggaccatcagcgtctcttact

SEQ ID NO: 323712 - DNA, 25 bp, Artificial
  Probe
tatgtgggaccatcagcgtctctta

SEQ ID NO: 323713 - DNA, 25 bp, Artificial
  Probe
ggaccatcagcgtctcttactgaga

SEQ ID NO: 323714 - DNA, 25 bp, Artificial
  Probe
ggcttcatctcattgtaccctgcca

SEQ ID NO: 323715 - DNA, 25 bp, Artificial
  Probe
tcagtcatgctgaacattcctcagt

SEQ ID NO: 323716 - DNA, 25 bp, Artificial
  Probe
tcaaacaagttcaatttcaagcgtg

SEQ ID NO: 323717 - DNA, 25 bp, Artificial
  Probe
tagctgacagttgctgagcctggta

SEQ ID NO: 323718 - DNA, 25 bp, Artificial
  Probe
caaacaagttcaatttcaagcgtgg

SEQ ID NO: 323719 - DNA, 25 bp, Artificial
  Probe
ttcaagcgtggctaggcagaccacg

SEQ ID NO: 323720 - DNA, 25 bp, Artificial
  Probe
ccctgggaagtcagtcatttcttta

SEQ ID NO: 323721 - DNA, 25 bp, Artificial
  Probe
gtttgtcagtcatgctgaacattcc

SEQ ID NO: 323722 - DNA, 25 bp, Artificial
  Probe
acaagttcaatttcaagcgtggcta

SEQ ID NO: 323723 - DNA, 25 bp, Artificial
  Probe
cgtggctaggcagaccacgtgtgtt

SEQ ID NO: 323724 - DNA, 25 bp, Artificial
  Probe
cctgccaccattttctactcgtgag

SEQ ID NO: 323725 - DNA, 25 bp, Artificial
  Probe
gtcagtcatttctttatgtgggacc

SEQ ID NO: 323726 - DNA, 25 bp, Artificial
  Probe
gtgcccttttgatcttattcagaaa

SEQ ID NO: 323727 - DNA, 25 bp, Artificial
  Probe
cattttctactcgtgaggtgtaaca

SEQ ID NO: 323728 - DNA, 25 bp, Artificial
  Probe
cctgtcatgttagctgacagttgct

SEQ ID NO: 323729 - DNA, 25 bp, Artificial
  Probe
gtcatgctgaacattcctcagtttt

SEQ ID NO: 323730 - DNA, 25 bp, Artificial
  Probe
taggcagaccacgtgtgtttgtcag

SEQ ID NO: 323731 - DNA, 25 bp, Artificial
  Probe
agtcagtcatttctttatgtgggac

SEQ ID NO: 323732 - DNA, 25 bp, Artificial
  Probe
ccctaatcttgctcaagtgatggtc

SEQ ID NO: 323733 - DNA, 25 bp, Artificial
  Probe
tactcgtgaggtgtaacaaagtaac

SEQ ID NO: 323734 - DNA, 25 bp, Artificial
  Probe
taatcttgctcaagtgatggtcaag

SEQ ID NO: 323735 - DNA, 25 bp, Artificial
  Probe
gcctctcttctttgctgacaaactg

SEQ ID NO: 323736 - DNA, 25 bp, Artificial
  Probe
cgtcaaggacgcatttgtggccatc

SEQ ID NO: 323737 - DNA, 25 bp, Artificial
  Probe
gtccatcattggagtggcagcaggc

SEQ ID NO: 323738 - DNA, 25 bp, Artificial
  Probe
ctcaacatccggagggaattcattg

SEQ ID NO: 323739 - DNA, 25 bp, Artificial
  Probe
gtggcagcaggcaggtttcatacag

SEQ ID NO: 323740 - DNA, 25 bp, Artificial
  Probe
agtgtgtcaccactcctcgccaagt

SEQ ID NO: 323741 - DNA, 25 bp, Artificial
  Probe
aggtgacacctctggagacttcatg

SEQ ID NO: 323742 - DNA, 25 bp, Artificial
  Probe
tccatcattggagtggcagcaggca

SEQ ID NO: 323743 - DNA, 25 bp, Artificial
  Probe
gaccgtcctgtgcacccgtagctat

SEQ ID NO: 323744 - DNA, 25 bp, Artificial
  Probe
ttatagaaatcctggccacccggac

SEQ ID NO: 323745 - DNA, 25 bp, Artificial
  Probe
atcaatgaggcctacaaggaggatt

SEQ ID NO: 323746 - DNA, 25 bp, Artificial
  Probe
ggctcccagctgtgtccatcattgg

SEQ ID NO: 323747 - DNA, 25 bp, Artificial
  Probe
agccggcacagatgaaaaggctctt

SEQ ID NO: 323748 - DNA, 25 bp, Artificial
  Probe
tcctcgccaagtctctgcttgtctt

SEQ ID NO: 323749 - DNA, 25 bp, Artificial
  Probe
gagttcatcaagaaaaccaactatg

SEQ ID NO: 323750 - DNA, 25 bp, Artificial
  Probe
cctcgccaagtctctgcttgtcttt

SEQ ID NO: 323751 - DNA, 25 bp, Artificial
  Probe
ttctctggccacagggaatcgagag

SEQ ID NO: 323752 - DNA, 25 bp, Artificial
  Probe
gtgagatagacctgctcaacatccg

SEQ ID NO: 323753 - DNA, 25 bp, Artificial
  Probe
aggagacctggcaaggctgatcctg

SEQ ID NO: 323754 - DNA, 25 bp, Artificial
  Probe
ctctggagacttcatgaaggctttg

SEQ ID NO: 323755 - DNA, 25 bp, Artificial
  Probe
catccggagggaattcattgagaaa

SEQ ID NO: 323756 - DNA, 25 bp, Artificial
  Probe
gaccccaatggagaaaagtgtgtca

SEQ ID NO: 323757 - DNA, 25 bp, Artificial
  Probe
ggctgctgagatcttggaaatagca

SEQ ID NO: 323758 - DNA, 25 bp, Artificial
  Probe
tggggctcatgatgccacctgccca

SEQ ID NO: 323759 - DNA, 25 bp, Artificial
  Probe
ggagccggcacagatgaaaaggctc

SEQ ID NO: 323760 - DNA, 25 bp, Artificial
  Probe
aaagtgtgtcaccactcctcgccaa

SEQ ID NO: 323761 - DNA, 25 bp, Artificial
  Probe
gtgtcaagaacaagcctctcttctt

SEQ ID NO: 323762 - DNA, 25 bp, Artificial
  Probe
aatggtggacagttgggtcacttac

SEQ ID NO: 323763 - DNA, 25 bp, Artificial
  Probe
gagaaaaccgggaccaggctcagga

SEQ ID NO: 323764 - DNA, 25 bp, Artificial
  Probe
ggatcaagaataccttggcagggaa

SEQ ID NO: 323765 - DNA, 25 bp, Artificial
  Probe
ccacctgcgcagagtcttccaggag

SEQ ID NO: 323766 - DNA, 25 bp, Artificial
  Probe
agtgtcaagaacaagcctctcttct

SEQ ID NO: 323767 - DNA, 25 bp, Artificial
  Probe
gctcccagctgtgtccatcattgga

SEQ ID NO: 323768 - DNA, 25 bp, Artificial
  Probe
cgatgctaagcagctgaagaaagct

SEQ ID NO: 323769 - DNA, 25 bp, Artificial
  Probe
acaccaagccattgaaggtgacacc

SEQ ID NO: 323770 - DNA, 25 bp, Artificial
  Probe
gtacaagtccatgaagggtgccggc

SEQ ID NO: 323771 - DNA, 25 bp, Artificial
  Probe
cactggactggaatggtggacagtt

SEQ ID NO: 323772 - DNA, 25 bp, Artificial
  Probe
aagatgctcaggtggctgctgagat

SEQ ID NO: 323773 - DNA, 25 bp, Artificial
  Probe
aggcctacaaggaggattatcacaa

SEQ ID NO: 323774 - DNA, 25 bp, Artificial
  Probe
acaagtccatgaagggtgccggcac

SEQ ID NO: 323775 - DNA, 25 bp, Artificial
  Probe
atccgagccatcaatgaggcctaca

SEQ ID NO: 323776 - DNA, 25 bp, Artificial
  Probe
ggattatcacaagtccctggaggat

SEQ ID NO: 323777 - DNA, 25 bp, Artificial
  Probe
ggaaatagcagacacacccagtgga

SEQ ID NO: 323778 - DNA, 25 bp, Artificial
  Probe
gcatgtcatcaagaaggagatgtct

SEQ ID NO: 323779 - DNA, 25 bp, Artificial
  Probe
ctggccacccggaccaatgctgaaa

SEQ ID NO: 323780 - DNA, 25 bp, Artificial
  Probe
aggctcttatagaaatcctggccac

SEQ ID NO: 323781 - DNA, 25 bp, Artificial
  Probe
acagagatcagctttcagctgggag

SEQ ID NO: 323782 - DNA, 25 bp, Artificial
  Probe
aacacagagatcagctttcagctgg

SEQ ID NO: 323783 - DNA, 25 bp, Artificial
  Probe
atgggaaactcatcctgactctcac

SEQ ID NO: 323784 - DNA, 25 bp, Artificial
  Probe
gacccaggtcccattgtgtatgtgg

SEQ ID NO: 323785 - DNA, 25 bp, Artificial
  Probe
acagtaccttcaagaacacagagat

SEQ ID NO: 323786 - DNA, 25 bp, Artificial
  Probe
gagatcagctttcagctgggagtag

SEQ ID NO: 323787 - DNA, 25 bp, Artificial
  Probe
caatgtggtgagcactcggacttac

SEQ ID NO: 323788 - DNA, 25 bp, Artificial
  Probe
ccaggtcccattgtgtatgtggttt

SEQ ID NO: 323789 - DNA, 25 bp, Artificial
  Probe
cttcaagaacacagagatcagcttt

SEQ ID NO: 323790 - DNA, 25 bp, Artificial
  Probe
agccgaccacaatcattgagaagaa

SEQ ID NO: 323791 - DNA, 25 bp, Artificial
  Probe
acacagtaccttcaagaacacagag

SEQ ID NO: 323792 - DNA, 25 bp, Artificial
  Probe
caagaacacagagatcagctttcag

SEQ ID NO: 323793 - DNA, 25 bp, Artificial
  Probe
ccgaccacaatcattgagaagaatg

SEQ ID NO: 323794 - DNA, 25 bp, Artificial
  Probe
agaacacagagatcagctttcagct

SEQ ID NO: 323795 - DNA, 25 bp, Artificial
  Probe
agagatcagctttcagctgggagta

SEQ ID NO: 323796 - DNA, 25 bp, Artificial
  Probe
gaccacaatcattgagaagaatggg

SEQ ID NO: 323797 - DNA, 25 bp, Artificial
  Probe
caagccgaccacaatcattgagaag

SEQ ID NO: 323798 - DNA, 25 bp, Artificial
  Probe
agatcagctttcagctgggagtaga

SEQ ID NO: 323799 - DNA, 25 bp, Artificial
  Probe
gccgaccacaatcattgagaagaat

SEQ ID NO: 323800 - DNA, 25 bp, Artificial
  Probe
tgatgggaaactcatcctgactctc

SEQ ID NO: 323801 - DNA, 25 bp, Artificial
  Probe
cagagatcagctttcagctgggagt

SEQ ID NO: 323802 - DNA, 25 bp, Artificial
  Probe
accttcaagaacacagagatcagct

SEQ ID NO: 323803 - DNA, 25 bp, Artificial
  Probe
cccaggtcccattgtgtatgtggtt

SEQ ID NO: 323804 - DNA, 25 bp, Artificial
  Probe
atcagctttcagctgggagtagagt

SEQ ID NO: 323805 - DNA, 25 bp, Artificial
  Probe
aggtcaagtcggtcgtgacactgga

SEQ ID NO: 323806 - DNA, 25 bp, Artificial
  Probe
cgaccacaatcattgagaagaatgg

SEQ ID NO: 323807 - DNA, 25 bp, Artificial
  Probe
cacagtaccttcaagaacacagaga

SEQ ID NO: 323808 - DNA, 25 bp, Artificial
  Probe
gtaccttcaagaacacagagatcag

SEQ ID NO: 323809 - DNA, 25 bp, Artificial
  Probe
tcagctttcagctgggagtagagtt

SEQ ID NO: 323810 - DNA, 25 bp, Artificial
  Probe
accacaatcattgagaagaatgggg

SEQ ID NO: 323811 - DNA, 25 bp, Artificial
  Probe
ccaagccgaccacaatcattgagaa

SEQ ID NO: 323812 - DNA, 25 bp, Artificial
  Probe
ttcaagaacacagagatcagctttc

SEQ ID NO: 323813 - DNA, 25 bp, Artificial
  Probe
acccaggtcccattgtgtatgtggt

SEQ ID NO: 323814 - DNA, 25 bp, Artificial
  Probe
cacagagatcagctttcagctggga

SEQ ID NO: 323815 - DNA, 25 bp, Artificial
  Probe
gatgggaaactcatcctgactctca

SEQ ID NO: 323816 - DNA, 25 bp, Artificial
  Probe
ccttcaagaacacagagatcagctt

SEQ ID NO: 323817 - DNA, 25 bp, Artificial
  Probe
acacagagatcagctttcagctggg

SEQ ID NO: 323818 - DNA, 25 bp, Artificial
  Probe
tgggaaactcatcctgactctcacc

SEQ ID NO: 323819 - DNA, 25 bp, Artificial
  Probe
taccttcaagaacacagagatcagc

SEQ ID NO: 323820 - DNA, 25 bp, Artificial
  Probe
agtaccttcaagaacacagagatca

SEQ ID NO: 323821 - DNA, 25 bp, Artificial
  Probe
gcaatgtggtgagcactcggactta

SEQ ID NO: 323822 - DNA, 25 bp, Artificial
  Probe
tcaagtcggtcgtgacactggacgg

SEQ ID NO: 323823 - DNA, 25 bp, Artificial
  Probe
caagtcggtcgtgacactggacgga

SEQ ID NO: 323824 - DNA, 25 bp, Artificial
  Probe
aagccgaccacaatcattgagaaga

SEQ ID NO: 323825 - DNA, 25 bp, Artificial
  Probe
gatcagctttcagctgggagtagag

SEQ ID NO: 323826 - DNA, 25 bp, Artificial
  Probe
cagtaccttcaagaacacagagatc

SEQ ID NO: 323827 - DNA, 25 bp, Artificial
  Probe
gcccggcctgtgggcccaagagggg

SEQ ID NO: 323828 - DNA, 25 bp, Artificial
  Probe
cccagaacagccggtgctcgttcct

SEQ ID NO: 323829 - DNA, 25 bp, Artificial
  Probe
cttgtgcacctgtcgtctgtgatgc

SEQ ID NO: 323830 - DNA, 25 bp, Artificial
  Probe
ccgactctacctcagacatgaggct

SEQ ID NO: 323831 - DNA, 25 bp, Artificial
  Probe
acccgactctacctcagacatgagg

SEQ ID NO: 323832 - DNA, 25 bp, Artificial
  Probe
gtcgtctgtgatgcatgccgtccgt

SEQ ID NO: 323833 - DNA, 25 bp, Artificial
  Probe
cacctgtcgtctgtgatgcatgccg

SEQ ID NO: 323834 - DNA, 25 bp, Artificial
  Probe
ccagggacacccccagaacagccgg

SEQ ID NO: 323835 - DNA, 25 bp, Artificial
  Probe
ccttgtgcacctgtcgtctgtgatg

SEQ ID NO: 323836 - DNA, 25 bp, Artificial
  Probe
cgtccgttagaactgtatttcacat

SEQ ID NO: 323837 - DNA, 25 bp, Artificial
  Probe
tgagctcttccgtggcccggcctgt

SEQ ID NO: 323838 - DNA, 25 bp, Artificial
  Probe
gactctacctcagacatgaggctcc

SEQ ID NO: 323839 - DNA, 25 bp, Artificial
  Probe
ccgtccgttagaactgtatttcaca

SEQ ID NO: 323840 - DNA, 25 bp, Artificial
  Probe
tgtgcacctgtcgtctgtgatgcat

SEQ ID NO: 323841 - DNA, 25 bp, Artificial
  Probe
tccgttagaactgtatttcacattc

SEQ ID NO: 323842 - DNA, 25 bp, Artificial
  Probe
tgggcccaagaggggccagggacac

SEQ ID NO: 323843 - DNA, 25 bp, Artificial
  Probe
gtgcacctgtcgtctgtgatgcatg

SEQ ID NO: 323844 - DNA, 25 bp, Artificial
  Probe
tgatgcatgccgtccgttagaactg

SEQ ID NO: 323845 - DNA, 25 bp, Artificial
  Probe
gtctgtgatgcatgccgtccgttag

SEQ ID NO: 323846 - DNA, 25 bp, Artificial
  Probe
tgcacctgtcgtctgtgatgcatgc

SEQ ID NO: 323847 - DNA, 25 bp, Artificial
  Probe
caagaggggccagggacacccccag

SEQ ID NO: 323848 - DNA, 25 bp, Artificial
  Probe
ccacccttgtgcacctgtcgtctgt

SEQ ID NO: 323849 - DNA, 25 bp, Artificial
  Probe
acccttgtgcacctgtcgtctgtga

SEQ ID NO: 323850 - DNA, 25 bp, Artificial
  Probe
catgccgtccgttagaactgtattt

SEQ ID NO: 323851 - DNA, 25 bp, Artificial
  Probe
cacccttgtgcacctgtcgtctgtg

SEQ ID NO: 323852 - DNA, 25 bp, Artificial
  Probe
gcacctgtcgtctgtgatgcatgcc

SEQ ID NO: 323853 - DNA, 25 bp, Artificial
  Probe
ttgtgcacctgtcgtctgtgatgca

SEQ ID NO: 323854 - DNA, 25 bp, Artificial
  Probe
tgccgtccgttagaactgtatttca

SEQ ID NO: 323855 - DNA, 25 bp, Artificial
  Probe
gccgtccgttagaactgtatttcac

SEQ ID NO: 323856 - DNA, 25 bp, Artificial
  Probe
tcccacccttgtgcacctgtcgtct

SEQ ID NO: 323857 - DNA, 25 bp, Artificial
  Probe
tctgtgatgcatgccgtccgttaga

SEQ ID NO: 323858 - DNA, 25 bp, Artificial
  Probe
acctgtcgtctgtgatgcatgccgt

SEQ ID NO: 323859 - DNA, 25 bp, Artificial
  Probe
cgactctacctcagacatgaggctc

SEQ ID NO: 323860 - DNA, 25 bp, Artificial
  Probe
ctgtcgtctgtgatgcatgccgtcc

SEQ ID NO: 323861 - DNA, 25 bp, Artificial
  Probe
acacccccagaacagccggtgctcg

SEQ ID NO: 323862 - DNA, 25 bp, Artificial
  Probe
cctgtcgtctgtgatgcatgccgtc

SEQ ID NO: 323863 - DNA, 25 bp, Artificial
  Probe
cgtctgtgatgcatgccgtccgtta

SEQ ID NO: 323864 - DNA, 25 bp, Artificial
  Probe
tcgtctgtgatgcatgccgtccgtt

SEQ ID NO: 323865 - DNA, 25 bp, Artificial
  Probe
gcatgccgtccgttagaactgtatt

SEQ ID NO: 323866 - DNA, 25 bp, Artificial
  Probe
cccgactctacctcagacatgaggc

SEQ ID NO: 323867 - DNA, 25 bp, Artificial
  Probe
tgtcgtctgtgatgcatgccgtccg

SEQ ID NO: 323868 - DNA, 25 bp, Artificial
  Probe
actctacctcagacatgaggctcct

SEQ ID NO: 323869 - DNA, 25 bp, Artificial
  Probe
gacatgaggctcctcccacccttgt

SEQ ID NO: 323870 - DNA, 25 bp, Artificial
  Probe
cccttgtgcacctgtcgtctgtgat

SEQ ID NO: 323871 - DNA, 25 bp, Artificial
  Probe
atgccgtccgttagaactgtatttc

SEQ ID NO: 323872 - DNA, 25 bp, Artificial
  Probe
tgcatgccgtccgttagaactgtat

SEQ ID NO: 323873 - DNA, 25 bp, Artificial
  Probe
ccatggacatttgagcactaaagaa

SEQ ID NO: 323874 - DNA, 25 bp, Artificial
  Probe
atcctgtcccatggacatttgagca

SEQ ID NO: 323875 - DNA, 25 bp, Artificial
  Probe
tcttgactccctgaagtaactggat

SEQ ID NO: 323876 - DNA, 25 bp, Artificial
  Probe
gctggacatgcttcgggatgctatg

SEQ ID NO: 323877 - DNA, 25 bp, Artificial
  Probe
ctgccgggctgtgcacagacacagg

SEQ ID NO: 323878 - DNA, 25 bp, Artificial
  Probe
tcctgtcccatggacatttgagcac

SEQ ID NO: 323879 - DNA, 25 bp, Artificial
  Probe
ccgtgtggacgataacgaggagacc

SEQ ID NO: 323880 - DNA, 25 bp, Artificial
  Probe
cttgactccctgaagtaactggatc

SEQ ID NO: 323881 - DNA, 25 bp, Artificial
  Probe
tgactccctgaagtaactggatccc

SEQ ID NO: 323882 - DNA, 25 bp, Artificial
  Probe
gccgggctgtgcacagacacaggaa

SEQ ID NO: 323883 - DNA, 25 bp, Artificial
  Probe
gtgctggacatgcttcgggatgcta

SEQ ID NO: 323884 - DNA, 25 bp, Artificial
  Probe
ttatcctgtcccatggacatttgag

SEQ ID NO: 323885 - DNA, 25 bp, Artificial
  Probe
ctgtcccatggacatttgagcacta

SEQ ID NO: 323886 - DNA, 25 bp, Artificial
  Probe
tgtcccatggacatttgagcactaa

SEQ ID NO: 323887 - DNA, 25 bp, Artificial
  Probe
cgggctgtgcacagacacaggaagc

SEQ ID NO: 323888 - DNA, 25 bp, Artificial
  Probe
cctgccgggctgtgcacagacacag

SEQ ID NO: 323889 - DNA, 25 bp, Artificial
  Probe
gggctgtgcacagacacaggaagct

SEQ ID NO: 323890 - DNA, 25 bp, Artificial
  Probe
ctccctgaagtaactggatccctcg

SEQ ID NO: 323891 - DNA, 25 bp, Artificial
  Probe
atcttgactccctgaagtaactgga

SEQ ID NO: 323892 - DNA, 25 bp, Artificial
  Probe
ttgactccctgaagtaactggatcc

SEQ ID NO: 323893 - DNA, 25 bp, Artificial
  Probe
cccatggacatttgagcactaaaga

SEQ ID NO: 323894 - DNA, 25 bp, Artificial
  Probe
tatcctgtcccatggacatttgagc

SEQ ID NO: 323895 - DNA, 25 bp, Artificial
  Probe
actccctgaagtaactggatccctc

SEQ ID NO: 323896 - DNA, 25 bp, Artificial
  Probe
tcccatggacatttgagcactaaag

SEQ ID NO: 323897 - DNA, 25 bp, Artificial
  Probe
catggacatttgagcactaaagaaa

SEQ ID NO: 323898 - DNA, 25 bp, Artificial
  Probe
ccaaagtggactcttccaacggctt

SEQ ID NO: 323899 - DNA, 25 bp, Artificial
  Probe
ataacgaggagaccatcaagaagag

SEQ ID NO: 323900 - DNA, 25 bp, Artificial
  Probe
tgctggacatgcttcgggatgctat

SEQ ID NO: 323901 - DNA, 25 bp, Artificial
  Probe
taacgaggagaccatcaagaagagg

SEQ ID NO: 323902 - DNA, 25 bp, Artificial
  Probe
ccgggctgtgcacagacacaggaag

SEQ ID NO: 323903 - DNA, 25 bp, Artificial
  Probe
gtcccatggacatttgagcactaaa

SEQ ID NO: 323904 - DNA, 25 bp, Artificial
  Probe
gactccctgaagtaactggatccct

SEQ ID NO: 323905 - DNA, 25 bp, Artificial
  Probe
cctgtcccatggacatttgagcact

SEQ ID NO: 323906 - DNA, 25 bp, Artificial
  Probe
tggcggcgtgtaaacggcggagcgg

SEQ ID NO: 323907 - DNA, 25 bp, Artificial
  Probe
caattcgcgaaagtgaggcgttaaa

SEQ ID NO: 323908 - DNA, 25 bp, Artificial
  Probe
gaaccaattcgcgaaagtgaggcgt

SEQ ID NO: 323909 - DNA, 25 bp, Artificial
  Probe
tgtaaacggcggagcgggagacccg

SEQ ID NO: 323910 - DNA, 25 bp, Artificial
  Probe
ccaagtaacgctggagaaactccct

SEQ ID NO: 323911 - DNA, 25 bp, Artificial
  Probe
cgctggagaaactccctagccgcgg

SEQ ID NO: 323912 - DNA, 25 bp, Artificial
  Probe
tcccaagtaacgctggagaaactcc

SEQ ID NO: 323913 - DNA, 25 bp, Artificial
  Probe
tactggcggcgtgtaaacggcggag

SEQ ID NO: 323914 - DNA, 25 bp, Artificial
  Probe
agtaacgctggagaaactccctagc

SEQ ID NO: 323915 - DNA, 25 bp, Artificial
  Probe
gcgtgtaaacggcggagcgggagac

SEQ ID NO: 323916 - DNA, 25 bp, Artificial
  Probe
gctggagaaactccctagccgcggg

SEQ ID NO: 323917 - DNA, 25 bp, Artificial
  Probe
actggcggcgtgtaaacggcggagc

SEQ ID NO: 323918 - DNA, 25 bp, Artificial
  Probe
ttaaaatactggcggcgtgtaaacg

SEQ ID NO: 323919 - DNA, 25 bp, Artificial
  Probe
ctggagaaactccctagccgcgggg

SEQ ID NO: 323920 - DNA, 25 bp, Artificial
  Probe
ccaattcgcgaaagtgaggcgttaa

SEQ ID NO: 323921 - DNA, 25 bp, Artificial
  Probe
acgctggagaaactccctagccgcg

SEQ ID NO: 323922 - DNA, 25 bp, Artificial
  Probe
aaccaattcgcgaaagtgaggcgtt

SEQ ID NO: 323923 - DNA, 25 bp, Artificial
  Probe
ggcggcgtgtaaacggcggagcggg

SEQ ID NO: 323924 - DNA, 25 bp, Artificial
  Probe
accaattcgcgaaagtgaggcgtta

SEQ ID NO: 323925 - DNA, 25 bp, Artificial
  Probe
ttcgcgaaagtgaggcgttaaaata

SEQ ID NO: 323926 - DNA, 25 bp, Artificial
  Probe
aacgctggagaaactccctagccgc

SEQ ID NO: 323927 - DNA, 25 bp, Artificial
  Probe
ctggcggcgtgtaaacggcggagcg

SEQ ID NO: 323928 - DNA, 25 bp, Artificial
  Probe
ttcccaagtaacgctggagaaactc

SEQ ID NO: 323929 - DNA, 25 bp, Artificial
  Probe
taaaatactggcggcgtgtaaacgg

SEQ ID NO: 323930 - DNA, 25 bp, Artificial
  Probe
atactggcggcgtgtaaacggcgga

SEQ ID NO: 323931 - DNA, 25 bp, Artificial
  Probe
aatactggcggcgtgtaaacggcgg

SEQ ID NO: 323932 - DNA, 25 bp, Artificial
  Probe
ggaaccaattcgcgaaagtgaggcg

SEQ ID NO: 323933 - DNA, 25 bp, Artificial
  Probe
taacgctggagaaactccctagccg

SEQ ID NO: 323934 - DNA, 25 bp, Artificial
  Probe
ggcgtgtaaacggcggagcgggaga

SEQ ID NO: 323935 - DNA, 25 bp, Artificial
  Probe
tggagaaactccctagccgcggggg

SEQ ID NO: 323936 - DNA, 25 bp, Artificial
  Probe
aaatactggcggcgtgtaaacggcg

SEQ ID NO: 323937 - DNA, 25 bp, Artificial
  Probe
gcgttaaaatactggcggcgtgtaa

SEQ ID NO: 323938 - DNA, 25 bp, Artificial
  Probe
gttcccaagtaacgctggagaaact

SEQ ID NO: 323939 - DNA, 25 bp, Artificial
  Probe
attcgcgaaagtgaggcgttaaaat

SEQ ID NO: 323940 - DNA, 25 bp, Artificial
  Probe
cggcgtgtaaacggcggagcgggag

SEQ ID NO: 323941 - DNA, 25 bp, Artificial
  Probe
gcggcgtgtaaacggcggagcggga

SEQ ID NO: 323942 - DNA, 25 bp, Artificial
  Probe
gaccaactgcgagatcgctggctgg

SEQ ID NO: 323943 - DNA, 25 bp, Artificial
  Probe
agtgtgcggacctgcaggctcccaa

SEQ ID NO: 323944 - DNA, 25 bp, Artificial
  Probe
agagggtctcagtggccaagacagt

SEQ ID NO: 323945 - DNA, 25 bp, Artificial
  Probe
tcatgtggccaaaatgaaggtcatc

SEQ ID NO: 323946 - DNA, 25 bp, Artificial
  Probe
cacgtgtgtctgtgtttgtggactg

SEQ ID NO: 323947 - DNA, 25 bp, Artificial
  Probe
cagtccttcatgtggccaaaatgaa

SEQ ID NO: 323948 - DNA, 25 bp, Artificial
  Probe
tacgggggcccacttgcctgctata

SEQ ID NO: 323949 - DNA, 25 bp, Artificial
  Probe
cacttgcctgctatacccatgactg

SEQ ID NO: 323950 - DNA, 25 bp, Artificial
  Probe
taacaaggtcgtgcagctggagtag

SEQ ID NO: 323951 - DNA, 25 bp, Artificial
  Probe
ggctcccaacttgttctgctcaagc

SEQ ID NO: 323952 - DNA, 25 bp, Artificial
  Probe
gaacccacagcctggagaagcaaac

SEQ ID NO: 323953 - DNA, 25 bp, Artificial
  Probe
agcaaacctgcagagggtctcagtg

SEQ ID NO: 323954 - DNA, 25 bp, Artificial
  Probe
agcctggagaagcaaacctgcagag

SEQ ID NO: 323955 - DNA, 25 bp, Artificial
  Probe
agggacttatcatcccgaacagagt

SEQ ID NO: 323956 - DNA, 25 bp, Artificial
  Probe
ctccagtcaggaatgtaatgtgaag

SEQ ID NO: 323957 - DNA, 25 bp, Artificial
  Probe
ctacgggggcccacttgcctgctat

SEQ ID NO: 323958 - DNA, 25 bp, Artificial
  Probe
gagaagcaaacctgcagagggtctc

SEQ ID NO: 323959 - DNA, 25 bp, Artificial
  Probe
tcgtgcagctggagtaggcctgctt

SEQ ID NO: 323960 - DNA, 25 bp, Artificial
  Probe
ctggccagctatcttcacacgtgtg

SEQ ID NO: 323961 - DNA, 25 bp, Artificial
  Probe
gtgaagtaccggagacgagtacaag

SEQ ID NO: 323962 - DNA, 25 bp, Artificial
  Probe
caattaaccagaacccacagcctgg

SEQ ID NO: 323963 - DNA, 25 bp, Artificial
  Probe
ctggagtaggcctgctttcgatctc

SEQ ID NO: 323964 - DNA, 25 bp, Artificial
  Probe
acctgcagagggtctcagtggccaa

SEQ ID NO: 323965 - DNA, 25 bp, Artificial
  Probe
gacctgtgatcctgaaccatcacgt

SEQ ID NO: 323966 - DNA, 25 bp, Artificial
  Probe
tgcaccgaggggttgctggccccta

SEQ ID NO: 323967 - DNA, 25 bp, Artificial
  Probe
taccggagacgagtacaagagagtg

SEQ ID NO: 323968 - DNA, 25 bp, Artificial
  Probe
aaatgaaggtcatctccagtcagga

SEQ ID NO: 323969 - DNA, 25 bp, Artificial
  Probe
ggacctgcaggctcccaacttgttc

SEQ ID NO: 323970 - DNA, 25 bp, Artificial
  Probe
tgaaccatcacgtggccaggatttg

SEQ ID NO: 323971 - DNA, 25 bp, Artificial
  Probe
tgtggtacctccagggaccaactgc

SEQ ID NO: 323972 - DNA, 25 bp, Artificial
  Probe
tgcagctggagtaggcctgctttcg

SEQ ID NO: 323973 - DNA, 25 bp, Artificial
  Probe
acagagtgtgtgcacggcctcgctg

SEQ ID NO: 323974 - DNA, 25 bp, Artificial
  Probe
actggattaacaaggtcgtgcagct

SEQ ID NO: 323975 - DNA, 25 bp, Artificial
  Probe
aacagtatgtggtacctccagggac

SEQ ID NO: 323976 - DNA, 25 bp, Artificial
  Probe
tcctgaacagtatgtggtacctcca

SEQ ID NO: 323977 - DNA, 25 bp, Artificial
  Probe
gacagtgtgcggacctgcaggctcc

SEQ ID NO: 323978 - DNA, 25 bp, Artificial
  Probe
cttatcatcccgaacagagtgtgtg

SEQ ID NO: 323979 - DNA, 25 bp, Artificial
  Probe
aaccagaacccacagcctggagaag

SEQ ID NO: 323980 - DNA, 25 bp, Artificial
  Probe
ggtacaagcaatagcacagtccttc

SEQ ID NO: 323981 - DNA, 25 bp, Artificial
  Probe
gatctcttagagatgacaaggctgc

SEQ ID NO: 323982 - DNA, 25 bp, Artificial
  Probe
ttcgatctcttagagatgacaaggc

SEQ ID NO: 323983 - DNA, 25 bp, Artificial
  Probe
gccaagacagtgtgcggacctgcag

SEQ ID NO: 323984 - DNA, 25 bp, Artificial
  Probe
cttcatgtggccaaaatgaaggtca

SEQ ID NO: 323985 - DNA, 25 bp, Artificial
  Probe
caccgaggggttgctggcccctacg

SEQ ID NO: 323986 - DNA, 25 bp, Artificial
  Probe
agatgacaaggctgcttatcaaact

SEQ ID NO: 323987 - DNA, 25 bp, Artificial
  Probe
gtctcagtggccaagacagtgtgcg

SEQ ID NO: 323988 - DNA, 25 bp, Artificial
  Probe
tgcatgatgcacaagcaccaattat

SEQ ID NO: 323989 - DNA, 25 bp, Artificial
  Probe
tgccttgcaggtggtgcataaagtg

SEQ ID NO: 323990 - DNA, 25 bp, Artificial
  Probe
ccttgcaggtggtgcataaagtgga

SEQ ID NO: 323991 - DNA, 25 bp, Artificial
  Probe
tctgcatggtcttctcacctgctgt

SEQ ID NO: 323992 - DNA, 25 bp, Artificial
  Probe
agcctaggagtcagattcctgattt

SEQ ID NO: 323993 - DNA, 25 bp, Artificial
  Probe
ctgcatggtcttctcacctgctgta

SEQ ID NO: 323994 - DNA, 25 bp, Artificial
  Probe
cccggtagcctaggagtcagattcc

SEQ ID NO: 323995 - DNA, 25 bp, Artificial
  Probe
ccggtagcctaggagtcagattcct

SEQ ID NO: 323996 - DNA, 25 bp, Artificial
  Probe
ttgcatgatgcacaagcaccaatta

SEQ ID NO: 323997 - DNA, 25 bp, Artificial
  Probe
cggtagcctaggagtcagattcctg

SEQ ID NO: 323998 - DNA, 25 bp, Artificial
  Probe
cttgcaggtggtgcataaagtggac

SEQ ID NO: 323999 - DNA, 25 bp, Artificial
  Probe
agatgttttgcatgatgcacaagca

SEQ ID NO: 324000 - DNA, 25 bp, Artificial
  Probe
ccaacccagaggagcgtgcggagac

SEQ ID NO: 324001 - DNA, 25 bp, Artificial
  Probe
atctgcatggtcttctcacctgctg

SEQ ID NO: 324002 - DNA, 25 bp, Artificial
  Probe
tttgcatgatgcacaagcaccaatt

SEQ ID NO: 324003 - DNA, 25 bp, Artificial
  Probe
gcatgatgcacaagcaccaattatg

SEQ ID NO: 324004 - DNA, 25 bp, Artificial
  Probe
ctaggagtcagattcctgattttag

SEQ ID NO: 324005 - DNA, 25 bp, Artificial
  Probe
acccggtagcctaggagtcagattc

SEQ ID NO: 324006 - DNA, 25 bp, Artificial
  Probe
gacccggtagcctaggagtcagatt

SEQ ID NO: 324007 - DNA, 25 bp, Artificial
  Probe
tgcatggtcttctcacctgctgtag

SEQ ID NO: 324008 - DNA, 25 bp, Artificial
  Probe
cctaggagtcagattcctgatttta

SEQ ID NO: 324009 - DNA, 25 bp, Artificial
  Probe
gatgcacaagcaccaattatgacta

SEQ ID NO: 324010 - DNA, 25 bp, Artificial
  Probe
ttttgcatgatgcacaagcaccaat

SEQ ID NO: 324011 - DNA, 25 bp, Artificial
  Probe
atcatagatgttttgcatgatgcac

SEQ ID NO: 324012 - DNA, 25 bp, Artificial
  Probe
catgatgcacaagcaccaattatga

SEQ ID NO: 324013 - DNA, 25 bp, Artificial
  Probe
agtcagattcctgattttaggatgc

SEQ ID NO: 324014 - DNA, 25 bp, Artificial
  Probe
ggtagcctaggagtcagattcctga

SEQ ID NO: 324015 - DNA, 25 bp, Artificial
  Probe
atgttttgcatgatgcacaagcacc

SEQ ID NO: 324016 - DNA, 25 bp, Artificial
  Probe
gcctaggagtcagattcctgatttt

SEQ ID NO: 324017 - DNA, 25 bp, Artificial
  Probe
tagatgttttgcatgatgcacaagc

SEQ ID NO: 324018 - DNA, 25 bp, Artificial
  Probe
catagatgttttgcatgatgcacaa

SEQ ID NO: 324019 - DNA, 25 bp, Artificial
  Probe
cggagacccggtagcctaggagtca

SEQ ID NO: 324020 - DNA, 25 bp, Artificial
  Probe
gttttgcatgatgcacaagcaccaa

SEQ ID NO: 324021 - DNA, 25 bp, Artificial
  Probe
tgatgcacaagcaccaattatgact

SEQ ID NO: 324022 - DNA, 25 bp, Artificial
  Probe
atgatgcacaagcaccaattatgac

SEQ ID NO: 324023 - DNA, 25 bp, Artificial
  Probe
gtagcctaggagtcagattcctgat

SEQ ID NO: 324024 - DNA, 25 bp, Artificial
  Probe
tcttccaaaccggctgaccatgaga

SEQ ID NO: 324025 - DNA, 25 bp, Artificial
  Probe
tgaccatgagacaccctaggagaga

SEQ ID NO: 324026 - DNA, 25 bp, Artificial
  Probe
aaaccggctgaccatgagacaccct

SEQ ID NO: 324027 - DNA, 25 bp, Artificial
  Probe
gagatgatgcttcttgggagatgga

SEQ ID NO: 324028 - DNA, 25 bp, Artificial
  Probe
gtcagactatgggcgtggttggaga

SEQ ID NO: 324029 - DNA, 25 bp, Artificial
  Probe
ggctgaccatgagacaccctaggag

SEQ ID NO: 324030 - DNA, 25 bp, Artificial
  Probe
ctgtagggccatacgactcgtcagt

SEQ ID NO: 324031 - DNA, 25 bp, Artificial
  Probe
gtggtgcccagctcccacatctctg

SEQ ID NO: 324032 - DNA, 25 bp, Artificial
  Probe
caaaccggctgaccatgagacaccc

SEQ ID NO: 324033 - DNA, 25 bp, Artificial
  Probe
gctgaccatgagacaccctaggaga

SEQ ID NO: 324034 - DNA, 25 bp, Artificial
  Probe
agggccatacgactcgtcagtcacc

SEQ ID NO: 324035 - DNA, 25 bp, Artificial
  Probe
gcttcttgggagatggaagttggcc

SEQ ID NO: 324036 - DNA, 25 bp, Artificial
  Probe
ttcttgggagatggaagttggccct

SEQ ID NO: 324037 - DNA, 25 bp, Artificial
  Probe
tggaagttggccctggttctagtca

SEQ ID NO: 324038 - DNA, 25 bp, Artificial
  Probe
gtagggccatacgactcgtcagtca

SEQ ID NO: 324039 - DNA, 25 bp, Artificial
  Probe
ggacgtggtggtgcccagctcccac

SEQ ID NO: 324040 - DNA, 25 bp, Artificial
  Probe
cacatctctgtagggccatacgact

SEQ ID NO: 324041 - DNA, 25 bp, Artificial
  Probe
cgactcgtcagtcacccacatcttc

SEQ ID NO: 324042 - DNA, 25 bp, Artificial
  Probe
tccaaaccggctgaccatgagacac

SEQ ID NO: 324043 - DNA, 25 bp, Artificial
  Probe
cggctgaccatgagacaccctagga

SEQ ID NO: 324044 - DNA, 25 bp, Artificial
  Probe
tctctgtagggccatacgactcgtc

SEQ ID NO: 324045 - DNA, 25 bp, Artificial
  Probe
tctgtagggccatacgactcgtcag

SEQ ID NO: 324046 - DNA, 25 bp, Artificial
  Probe
ggaagttggccctggttctagtcag

SEQ ID NO: 324047 - DNA, 25 bp, Artificial
  Probe
tccctggctggctggtatgatctag

SEQ ID NO: 324048 - DNA, 25 bp, Artificial
  Probe
catgagacaccctaggagagagatg

SEQ ID NO: 324049 - DNA, 25 bp, Artificial
  Probe
agagagatgatgcttcttgggagat

SEQ ID NO: 324050 - DNA, 25 bp, Artificial
  Probe
tagggccatacgactcgtcagtcac

SEQ ID NO: 324051 - DNA, 25 bp, Artificial
  Probe
ctctgtagggccatacgactcgtca

SEQ ID NO: 324052 - DNA, 25 bp, Artificial
  Probe
gagatggaagttggccctggttcta

SEQ ID NO: 324053 - DNA, 25 bp, Artificial
  Probe
atgagacaccctaggagagagatga

SEQ ID NO: 324054 - DNA, 25 bp, Artificial
  Probe
accggctgaccatgagacaccctag

SEQ ID NO: 324055 - DNA, 25 bp, Artificial
  Probe
atacgactcgtcagtcacccacatc

SEQ ID NO: 324056 - DNA, 25 bp, Artificial
  Probe
acaccctaggagagagatgatgctt

SEQ ID NO: 324057 - DNA, 25 bp, Artificial
  Probe
aaccggctgaccatgagacacccta

SEQ ID NO: 324058 - DNA, 25 bp, Artificial
  Probe
ccctggctggctggtatgatctagg

SEQ ID NO: 324059 - DNA, 25 bp, Artificial
  Probe
cttcttgggagatggaagttggccc

SEQ ID NO: 324060 - DNA, 25 bp, Artificial
  Probe
ccatgagacaccctaggagagagat

SEQ ID NO: 324061 - DNA, 25 bp, Artificial
  Probe
tgtagggccatacgactcgtcagtc

SEQ ID NO: 324062 - DNA, 25 bp, Artificial
  Probe
ctgaccatgagacaccctaggagag

SEQ ID NO: 324063 - DNA, 25 bp, Artificial
  Probe
tggtggtgcccagctcccacatctc

SEQ ID NO: 324064 - DNA, 25 bp, Artificial
  Probe
gaccatgagacaccctaggagagag

SEQ ID NO: 324065 - DNA, 25 bp, Artificial
  Probe
ttccaaaccggctgaccatgagaca

SEQ ID NO: 324066 - DNA, 25 bp, Artificial
  Probe
gggccatacgactcgtcagtcaccc

SEQ ID NO: 324067 - DNA, 25 bp, Artificial
  Probe
ccggctgaccatgagacaccctagg

SEQ ID NO: 324068 - DNA, 25 bp, Artificial
  Probe
agggacgtggtggtgcccagctccc

SEQ ID NO: 324069 - DNA, 25 bp, Artificial
  Probe
tgagacaccctaggagagagatgat

SEQ ID NO: 324070 - DNA, 25 bp, Artificial
  Probe
ctgctttaaacctggaaatgagaga

SEQ ID NO: 324071 - DNA, 25 bp, Artificial
  Probe
tcaaaacatgaccactctgggctat

SEQ ID NO: 324072 - DNA, 25 bp, Artificial
  Probe
agctgggtactgagatcagaaaagc

SEQ ID NO: 324073 - DNA, 25 bp, Artificial
  Probe
agccgggaacgcattaatcatttct

SEQ ID NO: 324074 - DNA, 25 bp, Artificial
  Probe
cagtttatgctgctttaaacctgga

SEQ ID NO: 324075 - DNA, 25 bp, Artificial
  Probe
tcttcgttaacagaggaatccgctc

SEQ ID NO: 324076 - DNA, 25 bp, Artificial
  Probe
agcccagagagacctgtctcaggcc

SEQ ID NO: 324077 - DNA, 25 bp, Artificial
  Probe
accactctgggctatagaagatgct

SEQ ID NO: 324078 - DNA, 25 bp, Artificial
  Probe
gttggttttcaatatccacgagctg

SEQ ID NO: 324079 - DNA, 25 bp, Artificial
  Probe
ctgtgtatagcttgcccgaacagga

SEQ ID NO: 324080 - DNA, 25 bp, Artificial
  Probe
ttcgttaacagaggaatccgctctg

SEQ ID NO: 324081 - DNA, 25 bp, Artificial
  Probe
ttaatcatttcttcgttaacagagg

SEQ ID NO: 324082 - DNA, 25 bp, Artificial
  Probe
ggaacgcattaatcatttcttcgtt

SEQ ID NO: 324083 - DNA, 25 bp, Artificial
  Probe
gagacctgtctcaggcctacacaac

SEQ ID NO: 324084 - DNA, 25 bp, Artificial
  Probe
gctctgcatggcatctctccaagtg

SEQ ID NO: 324085 - DNA, 25 bp, Artificial
  Probe
tgcttaagagccaagccgggaacgc

SEQ ID NO: 324086 - DNA, 25 bp, Artificial
  Probe
tggtttgctgtctatgcttaagagc

SEQ ID NO: 324087 - DNA, 25 bp, Artificial
  Probe
aacaggagtccttactgatatttat

SEQ ID NO: 324088 - DNA, 25 bp, Artificial
  Probe
gtgctcgagagactgccatacataa

SEQ ID NO: 324089 - DNA, 25 bp, Artificial
  Probe
tctgaaatccatagactaagagaaa

SEQ ID NO: 324090 - DNA, 25 bp, Artificial
  Probe
acatgaccactctgggctatagaag

SEQ ID NO: 324091 - DNA, 25 bp, Artificial
  Probe
cttcctagggatctgaaatccatag

SEQ ID NO: 324092 - DNA, 25 bp, Artificial
  Probe
tgtctcaggcctacacaacagccat

SEQ ID NO: 324093 - DNA, 25 bp, Artificial
  Probe
gccaagccgggaacgcattaatcat

SEQ ID NO: 324094 - DNA, 25 bp, Artificial
  Probe
gaatccgctctgcatggcatctctc

SEQ ID NO: 324095 - DNA, 25 bp, Artificial
  Probe
agaagatgctgagtgctcgagagac

SEQ ID NO: 324096 - DNA, 25 bp, Artificial
  Probe
ggatctgaaatccatagactaagag

SEQ ID NO: 324097 - DNA, 25 bp, Artificial
  Probe
atagcttgcccgaacaggagtcctt

SEQ ID NO: 324098 - DNA, 25 bp, Artificial
  Probe
agccaagccgggaacgcattaatca

SEQ ID NO: 324099 - DNA, 25 bp, Artificial
  Probe
gcttaagagccaagccgggaacgca

SEQ ID NO: 324100 - DNA, 25 bp, Artificial
  Probe
agaggaatccgctctgcatggcatc

SEQ ID NO: 324101 - DNA, 25 bp, Artificial
  Probe
gctgtctatgcttaagagccaagcc

SEQ ID NO: 324102 - DNA, 25 bp, Artificial
  Probe
ccacgagctgggtactgagatcaga

SEQ ID NO: 324103 - DNA, 25 bp, Artificial
  Probe
ttgcccgaacaggagtccttactga

SEQ ID NO: 324104 - DNA, 25 bp, Artificial
  Probe
aacatgaccactctgggctatagaa

SEQ ID NO: 324105 - DNA, 25 bp, Artificial
  Probe
atatccacgagctgggtactgagat

SEQ ID NO: 324106 - DNA, 25 bp, Artificial
  Probe
cgttaacagaggaatccgctctgca

SEQ ID NO: 324107 - DNA, 25 bp, Artificial
  Probe
gcttcctagggatctgaaatccata

SEQ ID NO: 324108 - DNA, 25 bp, Artificial
  Probe
cccagtttatgctgctttaaacctg

SEQ ID NO: 324109 - DNA, 25 bp, Artificial
  Probe
ggcttcctagggatctgaaatccat

SEQ ID NO: 324110 - DNA, 25 bp, Artificial
  Probe
ttaacagaggaatccgctctgcatg

SEQ ID NO: 324111 - DNA, 25 bp, Artificial
  Probe
ggcctacacaacagccatgaaatat

SEQ ID NO: 324112 - DNA, 25 bp, Artificial
  Probe
tctatgcttaagagccaagccggga

SEQ ID NO: 324113 - DNA, 25 bp, Artificial
  Probe
acgagctgggtactgagatcagaaa

SEQ ID NO: 324114 - DNA, 25 bp, Artificial
  Probe
ttattcaaaacatgaccactctggg

SEQ ID NO: 324115 - DNA, 25 bp, Artificial
  Probe
aaactgtgtatagcttgcccgaaca

SEQ ID NO: 324116 - DNA, 25 bp, Artificial
  Probe
gaatgcctgttgtcgcccggacatc

SEQ ID NO: 324117 - DNA, 25 bp, Artificial
  Probe
ccctcgctctcttcttggagagtac

SEQ ID NO: 324118 - DNA, 25 bp, Artificial
  Probe
ctctaaccagcctctggaggcagga

SEQ ID NO: 324119 - DNA, 25 bp, Artificial
  Probe
ttcttggagagtacgatgaatgcct

SEQ ID NO: 324120 - DNA, 25 bp, Artificial
  Probe
cggtcagcggggacctggaacacac

SEQ ID NO: 324121 - DNA, 25 bp, Artificial
  Probe
tgagggccgagtgaaggttatccaa

SEQ ID NO: 324122 - DNA, 25 bp, Artificial
  Probe
aagatgaatgcaagccttggggccc

SEQ ID NO: 324123 - DNA, 25 bp, Artificial
  Probe
atcacacgcactcctgagggccgag

SEQ ID NO: 324124 - DNA, 25 bp, Artificial
  Probe
tggtggtcacctccagggcgagcac

SEQ ID NO: 324125 - DNA, 25 bp, Artificial
  Probe
ttgcagcttgtaacatatcaagccc

SEQ ID NO: 324126 - DNA, 25 bp, Artificial
  Probe
cctttgcccatcctgcaagttcatg

SEQ ID NO: 324127 - DNA, 25 bp, Artificial
  Probe
ctgcaagttcatggagatgcaagat

SEQ ID NO: 324128 - DNA, 25 bp, Artificial
  Probe
tttagggaggactcagctcctactg

SEQ ID NO: 324129 - DNA, 25 bp, Artificial
  Probe
aatgaagagacctctaaccagcctc

SEQ ID NO: 324130 - DNA, 25 bp, Artificial
  Probe
agcatgagcagcattattttcatct

SEQ ID NO: 324131 - DNA, 25 bp, Artificial
  Probe
ggtcagatgtgaccaccagcccaac

SEQ ID NO: 324132 - DNA, 25 bp, Artificial
  Probe
gagccaccacacagcaacatgcagg

SEQ ID NO: 324133 - DNA, 25 bp, Artificial
  Probe
gttgtcgcccggacatccttgcagc

SEQ ID NO: 324134 - DNA, 25 bp, Artificial
  Probe
agccctggaggcttctgcctccatg

SEQ ID NO: 324135 - DNA, 25 bp, Artificial
  Probe
tatctgtgcagtttagggaggactc

SEQ ID NO: 324136 - DNA, 25 bp, Artificial
  Probe
tggtcgagctcttcaccgcactctg

SEQ ID NO: 324137 - DNA, 25 bp, Artificial
  Probe
tcctgagggccgagtgaaggttatc

SEQ ID NO: 324138 - DNA, 25 bp, Artificial
  Probe
tccttgcagcttgtaacatatcaag

SEQ ID NO: 324139 - DNA, 25 bp, Artificial
  Probe
gaggaaagacgctcctgacttcaca

SEQ ID NO: 324140 - DNA, 25 bp, Artificial
  Probe
caacatgcaggtttatgcatgaaga

SEQ ID NO: 324141 - DNA, 25 bp, Artificial
  Probe
ctctgcgtctgactggtcagatgtg

SEQ ID NO: 324142 - DNA, 25 bp, Artificial
  Probe
accagcctctggaggcaggaggaaa

SEQ ID NO: 324143 - DNA, 25 bp, Artificial
  Probe
atcaagccctggaggcttctgcctc

SEQ ID NO: 324144 - DNA, 25 bp, Artificial
  Probe
gcttgtaacatatcaagccctggag

SEQ ID NO: 324145 - DNA, 25 bp, Artificial
  Probe
ccgcactctgcgtctgactggtcag

SEQ ID NO: 324146 - DNA, 25 bp, Artificial
  Probe
catatcaagccctggaggcttctgc

SEQ ID NO: 324147 - DNA, 25 bp, Artificial
  Probe
cgctctcttcttggagagtacgatg

SEQ ID NO: 324148 - DNA, 25 bp, Artificial
  Probe
ggactcagctcctactgacctttgc

SEQ ID NO: 324149 - DNA, 25 bp, Artificial
  Probe
cacgcactcctgagggccgagtgaa

SEQ ID NO: 324150 - DNA, 25 bp, Artificial
  Probe
agacctctaaccagcctctggaggc

SEQ ID NO: 324151 - DNA, 25 bp, Artificial
  Probe
gacatccttgcagcttgtaacatat

SEQ ID NO: 324152 - DNA, 25 bp, Artificial
  Probe
ttcaccgcactctgcgtctgactgg

SEQ ID NO: 324153 - DNA, 25 bp, Artificial
  Probe
ttatgcatgaagagtgcctcagtta

SEQ ID NO: 324154 - DNA, 25 bp, Artificial
  Probe
ttttcatcttcactgagtatctgtg

SEQ ID NO: 324155 - DNA, 25 bp, Artificial
  Probe
tgtaacatatcaagccctggaggct

SEQ ID NO: 324156 - DNA, 25 bp, Artificial
  Probe
cactgagtatctgtgcagtttaggg

SEQ ID NO: 324157 - DNA, 25 bp, Artificial
  Probe
tcctgaccaatggtcgagctcttca

SEQ ID NO: 324158 - DNA, 25 bp, Artificial
  Probe
acgatgaatgcctgttgtcgcccgg

SEQ ID NO: 324159 - DNA, 25 bp, Artificial
  Probe
taaccagcctctggaggcaggagga

SEQ ID NO: 324160 - DNA, 25 bp, Artificial
  Probe
tggaacacacatgtccgagccacca

SEQ ID NO: 324161 - DNA, 25 bp, Artificial
  Probe
gaccaatggtcgagctcttcaccgc

SEQ ID NO: 324162 - DNA, 25 bp, Artificial
  Probe
tgtccacgtgtgagggcgttaacac

SEQ ID NO: 324163 - DNA, 25 bp, Artificial
  Probe
gctctcagcacagacccgagcgtgt

SEQ ID NO: 324164 - DNA, 25 bp, Artificial
  Probe
gaaagtcatcaaagcctatcatgga

SEQ ID NO: 324165 - DNA, 25 bp, Artificial
  Probe
atagctcccggcattccaagctgga

SEQ ID NO: 324166 - DNA, 25 bp, Artificial
  Probe
ccggcttcagcgagtgcatgaacga

SEQ ID NO: 324167 - DNA, 25 bp, Artificial
  Probe
ccgcgccggcttcagcgagtgcatg

SEQ ID NO: 324168 - DNA, 25 bp, Artificial
  Probe
tgccaaggtttttggcggcttccaa

SEQ ID NO: 324169 - DNA, 25 bp, Artificial
  Probe
ctaccgatcacaaagtagccctaag

SEQ ID NO: 324170 - DNA, 25 bp, Artificial
  Probe
ggcattccaagctggagaaggcaga

SEQ ID NO: 324171 - DNA, 25 bp, Artificial
  Probe
ccaaagacagcctctgagcacagaa

SEQ ID NO: 324172 - DNA, 25 bp, Artificial
  Probe
ggcagcgcaccctgcaagttgggca

SEQ ID NO: 324173 - DNA, 25 bp, Artificial
  Probe
ttaacaccgaggtgcgcactcggct

SEQ ID NO: 324174 - DNA, 25 bp, Artificial
  Probe
gcttccaagtggtgccggctcctga

SEQ ID NO: 324175 - DNA, 25 bp, Artificial
  Probe
aggctgccaaggtttttggcggctt

SEQ ID NO: 324176 - DNA, 25 bp, Artificial
  Probe
cacgacaccggacaaaccaaagaca

SEQ ID NO: 324177 - DNA, 25 bp, Artificial
  Probe
tgacccagatcaacgccatgaccta

SEQ ID NO: 324178 - DNA, 25 bp, Artificial
  Probe
gaggcgccgggcaagaataaatgaa

SEQ ID NO: 324179 - DNA, 25 bp, Artificial
  Probe
acactgattttggatgcacttaaga

SEQ ID NO: 324180 - DNA, 25 bp, Artificial
  Probe
aggcgccgggcaagaataaatgaaa

SEQ ID NO: 324181 - DNA, 25 bp, Artificial
  Probe
tgccggctcctgacggccaatttgc

SEQ ID NO: 324182 - DNA, 25 bp, Artificial
  Probe
gcggcttccaagtggtgccggctcc

SEQ ID NO: 324183 - DNA, 25 bp, Artificial
  Probe
agcacagaaagtcatcaaagcctat

SEQ ID NO: 324184 - DNA, 25 bp, Artificial
  Probe
gtttttggcggcttccaagtggtgc

SEQ ID NO: 324185 - DNA, 25 bp, Artificial
  Probe
actgcatgacccagatcaacgccat

SEQ ID NO: 324186 - DNA, 25 bp, Artificial
  Probe
taccgcgccggcttcagcgagtgca

SEQ ID NO: 324187 - DNA, 25 bp, Artificial
  Probe
gacggccaatttgctttcctcatcc

SEQ ID NO: 324188 - DNA, 25 bp, Artificial
  Probe
ttttggcggcttccaagtggtgccg

SEQ ID NO: 324189 - DNA, 25 bp, Artificial
  Probe
caccctgcaagttgggcagccaggc

SEQ ID NO: 324190 - DNA, 25 bp, Artificial
  Probe
cagccagtgtcaacacgacaccgga

SEQ ID NO: 324191 - DNA, 25 bp, Artificial
  Probe
ttaagaaagatagctcccggcattc

SEQ ID NO: 324192 - DNA, 25 bp, Artificial
  Probe
caaaccaaagacagcctctgagcac

SEQ ID NO: 324193 - DNA, 25 bp, Artificial
  Probe
tgtcaacacgacaccggacaaacca

SEQ ID NO: 324194 - DNA, 25 bp, Artificial
  Probe
taagaaagatagctcccggcattcc

SEQ ID NO: 324195 - DNA, 25 bp, Artificial
  Probe
cagaaagtcatcaaagcctatcatg

SEQ ID NO: 324196 - DNA, 25 bp, Artificial
  Probe
gaggtgacccgcttcctgtccacgt

SEQ ID NO: 324197 - DNA, 25 bp, Artificial
  Probe
ctctgagcacagaaagtcatcaaag

SEQ ID NO: 324198 - DNA, 25 bp, Artificial
  Probe
gcgttaacaccgaggtgcgcactcg

SEQ ID NO: 324199 - DNA, 25 bp, Artificial
  Probe
gacccgcttcctgtccacgtgtgag

SEQ ID NO: 324200 - DNA, 25 bp, Artificial
  Probe
cagacattctggaaatgacagtgaa

SEQ ID NO: 324201 - DNA, 25 bp, Artificial
  Probe
atgaacgaggtgacccgcttcctgt

SEQ ID NO: 324202 - DNA, 25 bp, Artificial
  Probe
cgagtgcatgaacgaggtgacccgc

SEQ ID NO: 324203 - DNA, 25 bp, Artificial
  Probe
atttgctttcctcatccccaatggg

SEQ ID NO: 324204 - DNA, 25 bp, Artificial
  Probe
acctggccaactgcatgacccagat

SEQ ID NO: 324205 - DNA, 25 bp, Artificial
  Probe
ctcctgacggccaatttgctttcct

SEQ ID NO: 324206 - DNA, 25 bp, Artificial
  Probe
gtcatcaaagcctatcatggagaag

SEQ ID NO: 324207 - DNA, 25 bp, Artificial
  Probe
aaagtttgagccaactgaaaacact

SEQ ID NO: 324208 - DNA, 25 bp, Artificial
  Probe
gggaaagactctctggtccctattg

SEQ ID NO: 324209 - DNA, 25 bp, Artificial
  Probe
cagtattagctgtcatatttctctg

SEQ ID NO: 324210 - DNA, 25 bp, Artificial
  Probe
tgtttcctgtggtaaaggctgaggc

SEQ ID NO: 324211 - DNA, 25 bp, Artificial
  Probe
tctcatctcccctttgggggaaaga

SEQ ID NO: 324212 - DNA, 25 bp, Artificial
  Probe
cctggcaacctgtggctgagggtcc

SEQ ID NO: 324213 - DNA, 25 bp, Artificial
  Probe
ggcccagagacatgggccttggccc

SEQ ID NO: 324214 - DNA, 25 bp, Artificial
  Probe
tctggtccctattgtatccacctag

SEQ ID NO: 324215 - DNA, 25 bp, Artificial
  Probe
gtattagctgtcatatttctctgtc

SEQ ID NO: 324216 - DNA, 25 bp, Artificial
  Probe
agggtggccatcttgagaggacata

SEQ ID NO: 324217 - DNA, 25 bp, Artificial
  Probe
ggcatgtccctgagggtttgagcca

SEQ ID NO: 324218 - DNA, 25 bp, Artificial
  Probe
gagtcagcagcactgctctctactg

SEQ ID NO: 324219 - DNA, 25 bp, Artificial
  Probe
gcctctcgcccaactagagagaaag

SEQ ID NO: 324220 - DNA, 25 bp, Artificial
  Probe
aagactgggcatgtccctgagggtt

SEQ ID NO: 324221 - DNA, 25 bp, Artificial
  Probe
tgtggctgagggtccccagagaccc

SEQ ID NO: 324222 - DNA, 25 bp, Artificial
  Probe
ctgtggtgtttcctgtggtaaaggc

SEQ ID NO: 324223 - DNA, 25 bp, Artificial
  Probe
tctctactgctttgcctggcaacct

SEQ ID NO: 324224 - DNA, 25 bp, Artificial
  Probe
ggccctgtcctgttcacctggatgt

SEQ ID NO: 324225 - DNA, 25 bp, Artificial
  Probe
atttctctgtcctccagacagtaag

SEQ ID NO: 324226 - DNA, 25 bp, Artificial
  Probe
catacgactcagtatttgggttatt

SEQ ID NO: 324227 - DNA, 25 bp, Artificial
  Probe
gccagtgttcatactcccatgtaca

SEQ ID NO: 324228 - DNA, 25 bp, Artificial
  Probe
cgccagggtttaggtaggcacccag

SEQ ID NO: 324229 - DNA, 25 bp, Artificial
  Probe
gctgtcatatttctctgtcctccag

SEQ ID NO: 324230 - DNA, 25 bp, Artificial
  Probe
gcccggcaggcaagcagagtcagca

SEQ ID NO: 324231 - DNA, 25 bp, Artificial
  Probe
agaggacatacgactcagtatttgg

SEQ ID NO: 324232 - DNA, 25 bp, Artificial
  Probe
tactgctttgcctggcaacctgtgg

SEQ ID NO: 324233 - DNA, 25 bp, Artificial
  Probe
gtcccctcagtattagctgtcatat

SEQ ID NO: 324234 - DNA, 25 bp, Artificial
  Probe
aagactctctggtccctattgtatc

SEQ ID NO: 324235 - DNA, 25 bp, Artificial
  Probe
agactgggcatgtccctgagggttt

SEQ ID NO: 324236 - DNA, 25 bp, Artificial
  Probe
ggccatcttgagaggacatacgact

SEQ ID NO: 324237 - DNA, 25 bp, Artificial
  Probe
tcatctcccctttgggggaaagact

SEQ ID NO: 324238 - DNA, 25 bp, Artificial
  Probe
tcctgttcacctggatgtgacctgt

SEQ ID NO: 324239 - DNA, 25 bp, Artificial
  Probe
gcgagtcaggagtctgccagtgttc

SEQ ID NO: 324240 - DNA, 25 bp, Artificial
  Probe
tatcaatctcatctcccctttgggg

SEQ ID NO: 324241 - DNA, 25 bp, Artificial
  Probe
ctgtcctccagacagtaagggagag

SEQ ID NO: 324242 - DNA, 25 bp, Artificial
  Probe
tccagcaggatgtcccctcagtatt

SEQ ID NO: 324243 - DNA, 25 bp, Artificial
  Probe
cttggccctgtcctgttcacctgga

SEQ ID NO: 324244 - DNA, 25 bp, Artificial
  Probe
cctcggcccggcaggcaagcagagt

SEQ ID NO: 324245 - DNA, 25 bp, Artificial
  Probe
atggtctcttgttggccctgggcca

SEQ ID NO: 324246 - DNA, 25 bp, Artificial
  Probe
cagatgcactcatagattgaatgtg

SEQ ID NO: 324247 - DNA, 25 bp, Artificial
  Probe
aagcagagtcagcagcactgctctc

SEQ ID NO: 324248 - DNA, 25 bp, Artificial
  Probe
cctgagggtttgagccaggccccgc

SEQ ID NO: 324249 - DNA, 25 bp, Artificial
  Probe
caggatgtcccctcagtattagctg

SEQ ID NO: 324250 - DNA, 25 bp, Artificial
  Probe
gtttaggtaggcacccagatgcact

SEQ ID NO: 324251 - DNA, 25 bp, Artificial
  Probe
tttcctgtggtaaaggctgaggcga

SEQ ID NO: 324252 - DNA, 25 bp, Artificial
  Probe
gtatcaatctcatctcccctttggg

SEQ ID NO: 324253 - DNA, 25 bp, Artificial
  Probe
cgcccaactagagagaaagactggg

SEQ ID NO: 324254 - DNA, 25 bp, Artificial
  Probe
cccagcttctgctgcctggagaggc

SEQ ID NO: 324255 - DNA, 25 bp, Artificial
  Probe
tccagtgcaatgttgcttgtgtagt

SEQ ID NO: 324256 - DNA, 25 bp, Artificial
  Probe
aggtatcctcagctagccccatctt

SEQ ID NO: 324257 - DNA, 25 bp, Artificial
  Probe
ttcagactccgcttcagggggcacc

SEQ ID NO: 324258 - DNA, 25 bp, Artificial
  Probe
tcagttcccccgtgaactgaccagg

SEQ ID NO: 324259 - DNA, 25 bp, Artificial
  Probe
tgtggagcctgagatacggccgcat

SEQ ID NO: 324260 - DNA, 25 bp, Artificial
  Probe
ggttcaggtcagtaggaaagcaatc

SEQ ID NO: 324261 - DNA, 25 bp, Artificial
  Probe
tactccagtgcaatgttgcttgtgt

SEQ ID NO: 324262 - DNA, 25 bp, Artificial
  Probe
aggaaagcaatctgtcctcatccct

SEQ ID NO: 324263 - DNA, 25 bp, Artificial
  Probe
cagactctgtggagcctgagatacg

SEQ ID NO: 324264 - DNA, 25 bp, Artificial
  Probe
ccaggtcaagagctggccattggag

SEQ ID NO: 324265 - DNA, 25 bp, Artificial
  Probe
aactcagattcagactccgcttcag

SEQ ID NO: 324266 - DNA, 25 bp, Artificial
  Probe
ccatcttctgctgcaggctccttga

SEQ ID NO: 324267 - DNA, 25 bp, Artificial
  Probe
agactccgcttcagggggcacctcg

SEQ ID NO: 324268 - DNA, 25 bp, Artificial
  Probe
tgccgccaaactcagattcagactc

SEQ ID NO: 324269 - DNA, 25 bp, Artificial
  Probe
atctctgtggggtactccagtgcaa

SEQ ID NO: 324270 - DNA, 25 bp, Artificial
  Probe
ctgcaggctccttgacctgaggggt

SEQ ID NO: 324271 - DNA, 25 bp, Artificial
  Probe
caagagctggccattggaggccaca

SEQ ID NO: 324272 - DNA, 25 bp, Artificial
  Probe
ccattggaggccacattcccggagc

SEQ ID NO: 324273 - DNA, 25 bp, Artificial
  Probe
tcagattcagactccgcttcagggg

SEQ ID NO: 324274 - DNA, 25 bp, Artificial
  Probe
caggcctcagcctgcagcaggtgct

SEQ ID NO: 324275 - DNA, 25 bp, Artificial
  Probe
ctccttgacctgaggggtagtcaga

SEQ ID NO: 324276 - DNA, 25 bp, Artificial
  Probe
accagggccaccactgtggtcaact

SEQ ID NO: 324277 - DNA, 25 bp, Artificial
  Probe
caacttctttgtcacagactctgtg

SEQ ID NO: 324278 - DNA, 25 bp, Artificial
  Probe
cttcagggggcacctcgggcctgca

SEQ ID NO: 324279 - DNA, 25 bp, Artificial
  Probe
gtaggtctcctgagagtgtgctgaa

SEQ ID NO: 324280 - DNA, 25 bp, Artificial
  Probe
agctagccccatcttctgctgcagg

SEQ ID NO: 324281 - DNA, 25 bp, Artificial
  Probe
tgctgcaggctccttgacctgaggg

SEQ ID NO: 324282 - DNA, 25 bp, Artificial
  Probe
ggagcctgagatacggccgcatcca

SEQ ID NO: 324283 - DNA, 25 bp, Artificial
  Probe
agatacggccgcatccactcagttc

SEQ ID NO: 324284 - DNA, 25 bp, Artificial
  Probe
tggacctctcacagcggtgccagac

SEQ ID NO: 324285 - DNA, 25 bp, Artificial
  Probe
gctggccattggaggccacattccc

SEQ ID NO: 324286 - DNA, 25 bp, Artificial
  Probe
agctggccattggaggccacattcc

SEQ ID NO: 324287 - DNA, 25 bp, Artificial
  Probe
acagcccagcttctgctgcctggag

SEQ ID NO: 324288 - DNA, 25 bp, Artificial
  Probe
gtcacagactctgtggagcctgaga

SEQ ID NO: 324289 - DNA, 25 bp, Artificial
  Probe
tctgctgcaggctccttgacctgag

SEQ ID NO: 324290 - DNA, 25 bp, Artificial
  Probe
atcttctgctgcaggctccttgacc

SEQ ID NO: 324291 - DNA, 25 bp, Artificial
  Probe
actgtggtcaacttctttgtcacag

SEQ ID NO: 324292 - DNA, 25 bp, Artificial
  Probe
ctcctgagagtgtgctgaattgagg

SEQ ID NO: 324293 - DNA, 25 bp, Artificial
  Probe
ccatttggttcaggtcagtaggaaa

SEQ ID NO: 324294 - DNA, 25 bp, Artificial
  Probe
acagcggtgccagaccaggcctcag

SEQ ID NO: 324295 - DNA, 25 bp, Artificial
  Probe
ctgaattgaggtatcctcagctagc

SEQ ID NO: 324296 - DNA, 25 bp, Artificial
  Probe
ctctgtggagcctgagatacggccg

SEQ ID NO: 324297 - DNA, 25 bp, Artificial
  Probe
gccaaactcagattcagactccgct

SEQ ID NO: 324298 - DNA, 25 bp, Artificial
  Probe
tggagcctgagatacggccgcatcc

SEQ ID NO: 324299 - DNA, 25 bp, Artificial
  Probe
cagagccgggccatttggttcaggt

SEQ ID NO: 324300 - DNA, 25 bp, Artificial
  Probe
ttttcaagaacacacttggggtgtt

SEQ ID NO: 324301 - DNA, 25 bp, Artificial
  Probe
tgcctccttgatgctaactaagggg

SEQ ID NO: 324302 - DNA, 25 bp, Artificial
  Probe
taccctttgcagcagccgcaagctt

SEQ ID NO: 324303 - DNA, 25 bp, Artificial
  Probe
gcctctgcctccttgatgctaacta

SEQ ID NO: 324304 - DNA, 25 bp, Artificial
  Probe
gcagcggccaagaagccaaaaaatc

SEQ ID NO: 324305 - DNA, 25 bp, Artificial
  Probe
ctcccaggatgctgggcctccgttt

SEQ ID NO: 324306 - DNA, 25 bp, Artificial
  Probe
tgtgtctgaaactcccaggatgctg

SEQ ID NO: 324307 - DNA, 25 bp, Artificial
  Probe
aacgaggcctgctaccttgtgtgtc

SEQ ID NO: 324308 - DNA, 25 bp, Artificial
  Probe
tggcctctgcctccttgatgctaac

SEQ ID NO: 324309 - DNA, 25 bp, Artificial
  Probe
tttgcaactttactctgatgtttgc

SEQ ID NO: 324310 - DNA, 25 bp, Artificial
  Probe
tcaagaacacacttggggtgttttt

SEQ ID NO: 324311 - DNA, 25 bp, Artificial
  Probe
taccttgtgtgtctgaaactcccag

SEQ ID NO: 324312 - DNA, 25 bp, Artificial
  Probe
ttttttcaagaacacacttggggtg

SEQ ID NO: 324313 - DNA, 25 bp, Artificial
  Probe
tttctttctcagatactgtgctccg

SEQ ID NO: 324314 - DNA, 25 bp, Artificial
  Probe
atctaccctttgcagcagccgcaag

SEQ ID NO: 324315 - DNA, 25 bp, Artificial
  Probe
tctctgggaactgctggcctctgcc

SEQ ID NO: 324316 - DNA, 25 bp, Artificial
  Probe
gaagtgggcttctctgggaactgct

SEQ ID NO: 324317 - DNA, 25 bp, Artificial
  Probe
ggtatagcgtgtgaacccctctgct

SEQ ID NO: 324318 - DNA, 25 bp, Artificial
  Probe
tttactctgatgtttgcagcagaga

SEQ ID NO: 324319 - DNA, 25 bp, Artificial
  Probe
ggtgtcgggcacacagaatagagta

SEQ ID NO: 324320 - DNA, 25 bp, Artificial
  Probe
tgcaactttactctgatgtttgcag

SEQ ID NO: 324321 - DNA, 25 bp, Artificial
  Probe
gcttctctgggaactgctggcctct

SEQ ID NO: 324322 - DNA, 25 bp, Artificial
  Probe
ctccttgatgctaactaaggggctg

SEQ ID NO: 324323 - DNA, 25 bp, Artificial
  Probe
cctgcccgctacacttgggaggatg

SEQ ID NO: 324324 - DNA, 25 bp, Artificial
  Probe
aagtgggcttctctgggaactgctg

SEQ ID NO: 324325 - DNA, 25 bp, Artificial
  Probe
tatagcgtgtgaacccctctgctca

SEQ ID NO: 324326 - DNA, 25 bp, Artificial
  Probe
cagatactgtgctccgtttttggag

SEQ ID NO: 324327 - DNA, 25 bp, Artificial
  Probe
cagcggccaagaagccaaaaaatct

SEQ ID NO: 324328 - DNA, 25 bp, Artificial
  Probe
ggcctgctaccttgtgtgtctgaaa

SEQ ID NO: 324329 - DNA, 25 bp, Artificial
  Probe
gaactgctggcctctgcctccttga

SEQ ID NO: 324330 - DNA, 25 bp, Artificial
  Probe
tcagatactgtgctccgtttttgga

SEQ ID NO: 324331 - DNA, 25 bp, Artificial
  Probe
ttctcagatactgtgctccgttttt

SEQ ID NO: 324332 - DNA, 25 bp, Artificial
  Probe
tctgaaactcccaggatgctgggcc

SEQ ID NO: 324333 - DNA, 25 bp, Artificial
  Probe
gaaactcccaggatgctgggcctcc

SEQ ID NO: 324334 - DNA, 25 bp, Artificial
  Probe
gtcgggcacacagaatagagtatga

SEQ ID NO: 324335 - DNA, 25 bp, Artificial
  Probe
cctccttgatgctaactaaggggct

SEQ ID NO: 324336 - DNA, 25 bp, Artificial
  Probe
aactttactctgatgtttgcagcag

SEQ ID NO: 324337 - DNA, 25 bp, Artificial
  Probe
ctctgcctccttgatgctaactaag

SEQ ID NO: 324338 - DNA, 25 bp, Artificial
  Probe
actttactctgatgtttgcagcaga

SEQ ID NO: 324339 - DNA, 25 bp, Artificial
  Probe
ggcttctctgggaactgctggcctc

SEQ ID NO: 324340 - DNA, 25 bp, Artificial
  Probe
ggatgctgggcctccgtttacatgt

SEQ ID NO: 324341 - DNA, 25 bp, Artificial
  Probe
ctggcctctgcctccttgatgctaa

SEQ ID NO: 324342 - DNA, 25 bp, Artificial
  Probe
gctgggcctccgtttacatgtgcac

SEQ ID NO: 324343 - DNA, 25 bp, Artificial
  Probe
gggcctccgtttacatgtgcacacc

SEQ ID NO: 324344 - DNA, 25 bp, Artificial
  Probe
actgctggcctctgcctccttgatg

SEQ ID NO: 324345 - DNA, 25 bp, Artificial
  Probe
tatctaccctttgcagcagccgcaa

SEQ ID NO: 324346 - DNA, 25 bp, Artificial
  Probe
tcaacaactaggtggctaaaatgaa

SEQ ID NO: 324347 - DNA, 25 bp, Artificial
  Probe
cactcttaaaaagtttgggacagct

SEQ ID NO: 324348 - DNA, 25 bp, Artificial
  Probe
gtgctcaggtcaatttctacactct

SEQ ID NO: 324349 - DNA, 25 bp, Artificial
  Probe
aatctctacagacatgtccaaaagg

SEQ ID NO: 324350 - DNA, 25 bp, Artificial
  Probe
aactctttgcaactctctttctggg

SEQ ID NO: 324351 - DNA, 25 bp, Artificial
  Probe
gagcactagtctcatttcattgtac

SEQ ID NO: 324352 - DNA, 25 bp, Artificial
  Probe
gatcacttaagctagccattagacc

SEQ ID NO: 324353 - DNA, 25 bp, Artificial
  Probe
caactaggaactaggaggcaaggca

SEQ ID NO: 324354 - DNA, 25 bp, Artificial
  Probe
aggcaaggcatcagggattaacttt

SEQ ID NO: 324355 - DNA, 25 bp, Artificial
  Probe
agatcttgaagctgattacaccaca

SEQ ID NO: 324356 - DNA, 25 bp, Artificial
  Probe
gggattaacttttaccagttcagtg

SEQ ID NO: 324357 - DNA, 25 bp, Artificial
  Probe
caccacatccacattctaagaggag

SEQ ID NO: 324358 - DNA, 25 bp, Artificial
  Probe
atcagttgacagagcatggggtagc

SEQ ID NO: 324359 - DNA, 25 bp, Artificial
  Probe
cacctcattcccattttgggggata

SEQ ID NO: 324360 - DNA, 25 bp, Artificial
  Probe
gagaagacattcaacaactaggtgg

SEQ ID NO: 324361 - DNA, 25 bp, Artificial
  Probe
aggactcgcttttcctgagttcatt

SEQ ID NO: 324362 - DNA, 25 bp, Artificial
  Probe
acagcaggaagtcactgtgacaaga

SEQ ID NO: 324363 - DNA, 25 bp, Artificial
  Probe
gtgtccaatcacagaactattaaag

SEQ ID NO: 324364 - DNA, 25 bp, Artificial
  Probe
aggtggcaaacacaatcccgtgacc

SEQ ID NO: 324365 - DNA, 25 bp, Artificial
  Probe
gaggctccttgttacctttatattc

SEQ ID NO: 324366 - DNA, 25 bp, Artificial
  Probe
ctgacaaaaagcaacttagaagagg

SEQ ID NO: 324367 - DNA, 25 bp, Artificial
  Probe
gaagaaagtctgcactgaagctgcg

SEQ ID NO: 324368 - DNA, 25 bp, Artificial
  Probe
aggaggcaaggcatcagggattaac

SEQ ID NO: 324369 - DNA, 25 bp, Artificial
  Probe
ctgacaaattggatcacttaagcta

SEQ ID NO: 324370 - DNA, 25 bp, Artificial
  Probe
agagagacattcacggatagcttgc

SEQ ID NO: 324371 - DNA, 25 bp, Artificial
  Probe
gactttccaggatcaattaacgtaa

SEQ ID NO: 324372 - DNA, 25 bp, Artificial
  Probe
ccacattctaagaggagagagacat

SEQ ID NO: 324373 - DNA, 25 bp, Artificial
  Probe
gtgaagaccacagagaaggaaaagc

SEQ ID NO: 324374 - DNA, 25 bp, Artificial
  Probe
tacactcttaaaaagtttgggacag

SEQ ID NO: 324375 - DNA, 25 bp, Artificial
  Probe
tcattcccattttgggggataagca

SEQ ID NO: 324376 - DNA, 25 bp, Artificial
  Probe
gtgaaaatcctgacaaaaagcaact

SEQ ID NO: 324377 - DNA, 25 bp, Artificial
  Probe
cctggtcaaatgtaaccaaggagaa

SEQ ID NO: 324378 - DNA, 25 bp, Artificial
  Probe
atcagcacagtgaatgtaaatgcaa

SEQ ID NO: 324379 - DNA, 25 bp, Artificial
  Probe
ctgcactgaagctgcgaatataaac

SEQ ID NO: 324380 - DNA, 25 bp, Artificial
  Probe
ttgccatggtgaaaatcctgacaaa

SEQ ID NO: 324381 - DNA, 25 bp, Artificial
  Probe
agacatgtccaaaaggccagtataa

SEQ ID NO: 324382 - DNA, 25 bp, Artificial
  Probe
ccaccagtggtaagtgaggctcctt

SEQ ID NO: 324383 - DNA, 25 bp, Artificial
  Probe
gaggagcactagtctcatttcattg

SEQ ID NO: 324384 - DNA, 25 bp, Artificial
  Probe
tctcaaacatgtctgaactgacttg

SEQ ID NO: 324385 - DNA, 25 bp, Artificial
  Probe
acagattctacttggggcgtatgta

SEQ ID NO: 324386 - DNA, 25 bp, Artificial
  Probe
ttcaaatgctttgcacttttatgtg

SEQ ID NO: 324387 - DNA, 25 bp, Artificial
  Probe
atcatgtgtgaagaccacagagaag

SEQ ID NO: 324388 - DNA, 25 bp, Artificial
  Probe
atcccatgtcattgtatcacagcag

SEQ ID NO: 324389 - DNA, 25 bp, Artificial
  Probe
gagattgattcctgagttggtgtcc

SEQ ID NO: 324390 - DNA, 25 bp, Artificial
  Probe
tcccatctatagcaagcattgtctg

SEQ ID NO: 324391 - DNA, 25 bp, Artificial
  Probe
gagttcatttcttcaggacagattc

SEQ ID NO: 324392 - DNA, 25 bp, Artificial
  Probe
taagtgctgctctgaaggatgacag

SEQ ID NO: 324393 - DNA, 25 bp, Artificial
  Probe
ccatgtactggcaggagtttgagga

SEQ ID NO: 324394 - DNA, 25 bp, Artificial
  Probe
cccgtgatgatcacgttaaacaatt

SEQ ID NO: 324395 - DNA, 25 bp, Artificial
  Probe
ctgctctgaaggatgacagaagagt

SEQ ID NO: 324396 - DNA, 25 bp, Artificial
  Probe
cacgttaaacaattccatgtactgg

SEQ ID NO: 324397 - DNA, 25 bp, Artificial
  Probe
agagtacttgattcatgtttttcct

SEQ ID NO: 324398 - DNA, 25 bp, Artificial
  Probe
gacaagtagtgaccaaccaaaaagt

SEQ ID NO: 324399 - DNA, 25 bp, Artificial
  Probe
catgtactggcaggagtttgaggac

SEQ ID NO: 324400 - DNA, 25 bp, Artificial
  Probe
aacgtccttcctgctgttcaacctg

SEQ ID NO: 324401 - DNA, 25 bp, Artificial
  Probe
tatgaggagtgcaagtctggctcct

SEQ ID NO: 324402 - DNA, 25 bp, Artificial
  Probe
atccacattgacgtctctgagctgg

SEQ ID NO: 324403 - DNA, 25 bp, Artificial
  Probe
gaggacacctgtgtctatgagtgtc

SEQ ID NO: 324404 - DNA, 25 bp, Artificial
  Probe
tctgctgctatgaggagtgcaagtc

SEQ ID NO: 324405 - DNA, 25 bp, Artificial
  Probe
aattccatgtactggcaggagtttg

SEQ ID NO: 324406 - DNA, 25 bp, Artificial
  Probe
tgctgctatgaggagtgcaagtctg

SEQ ID NO: 324407 - DNA, 25 bp, Artificial
  Probe
tctttaagtgctgctctgaaggatg

SEQ ID NO: 324408 - DNA, 25 bp, Artificial
  Probe
ttcttctgctgctatgaggagtgca

SEQ ID NO: 324409 - DNA, 25 bp, Artificial
  Probe
ctgctatgaggagtgcaagtctggc

SEQ ID NO: 324410 - DNA, 25 bp, Artificial
  Probe
agtgctgctctgaaggatgacagaa

SEQ ID NO: 324411 - DNA, 25 bp, Artificial
  Probe
gctggactcctactctcgggtcttc

SEQ ID NO: 324412 - DNA, 25 bp, Artificial
  Probe
gctgttcaacctggtctattgggtt

SEQ ID NO: 324413 - DNA, 25 bp, Artificial
  Probe
tgtctggatggcaaagactgccaga

SEQ ID NO: 324414 - DNA, 25 bp, Artificial
  Probe
agggaaggacactactccagcttgt

SEQ ID NO: 324415 - DNA, 25 bp, Artificial
  Probe
taaacaattccatgtactggcagga

SEQ ID NO: 324416 - DNA, 25 bp, Artificial
  Probe
atcatccccagacaagtagtgacca

SEQ ID NO: 324417 - DNA, 25 bp, Artificial
  Probe
acctatatctttaagtgctgctctg

SEQ ID NO: 324418 - DNA, 25 bp, Artificial
  Probe
acaattccatgtactggcaggagtt

SEQ ID NO: 324419 - DNA, 25 bp, Artificial
  Probe
cctgtgtctatgagtgtctggatgg

SEQ ID NO: 324420 - DNA, 25 bp, Artificial
  Probe
tcttctgctgctatgaggagtgcaa

SEQ ID NO: 324421 - DNA, 25 bp, Artificial
  Probe
ttctgctgctatgaggagtgcaagt

SEQ ID NO: 324422 - DNA, 25 bp, Artificial
  Probe
ccccagacaagtagtgaccaaccaa

SEQ ID NO: 324423 - DNA, 25 bp, Artificial
  Probe
tatctttaagtgctgctctgaagga

SEQ ID NO: 324424 - DNA, 25 bp, Artificial
  Probe
ttgacgtctctgagctggactccta

SEQ ID NO: 324425 - DNA, 25 bp, Artificial
  Probe
ggacacctgtgtctatgagtgtctg

SEQ ID NO: 324426 - DNA, 25 bp, Artificial
  Probe
tgtactggcaggagtttgaggacac

SEQ ID NO: 324427 - DNA, 25 bp, Artificial
  Probe
cactactccagcttgttgtgttacc

SEQ ID NO: 324428 - DNA, 25 bp, Artificial
  Probe
gacgtctctgagctggactcctact

SEQ ID NO: 324429 - DNA, 25 bp, Artificial
  Probe
gatacctatatctttaagtgctgct

SEQ ID NO: 324430 - DNA, 25 bp, Artificial
  Probe
tactggcaggagtttgaggacacct

SEQ ID NO: 324431 - DNA, 25 bp, Artificial
  Probe
tactctcgggtcttcttcccaacgt

SEQ ID NO: 324432 - DNA, 25 bp, Artificial
  Probe
ggagtttgaggacacctgtgtctat

SEQ ID NO: 324433 - DNA, 25 bp, Artificial
  Probe
caagtagtgaccaaccaaaaagtag

SEQ ID NO: 324434 - DNA, 25 bp, Artificial
  Probe
agtagtgaccaaccaaaaagtagca

SEQ ID NO: 324435 - DNA, 25 bp, Artificial
  Probe
atatctttaagtgctgctctgaagg

SEQ ID NO: 324436 - DNA, 25 bp, Artificial
  Probe
tgaccaaccaaaaagtagcagggaa

SEQ ID NO: 324437 - DNA, 25 bp, Artificial
  Probe
catcatccccagacaagtagtgacc

SEQ ID NO: 324438 - DNA, 25 bp, Artificial
  Probe
tagagcacaacgttaagggtcgtac

SEQ ID NO: 324439 - DNA, 25 bp, Artificial
  Probe
cacctctgagatgtttggcaagaaa

SEQ ID NO: 324440 - DNA, 25 bp, Artificial
  Probe
ctgctcgatgttctttgatggaaaa

SEQ ID NO: 324441 - DNA, 25 bp, Artificial
  Probe
cttgctgctcgatgttctttgatgg

SEQ ID NO: 324442 - DNA, 25 bp, Artificial
  Probe
ctctgagatgtttggcaagaaatcc

SEQ ID NO: 324443 - DNA, 25 bp, Artificial
  Probe
taaccttatagagcacaacgttaag

SEQ ID NO: 324444 - DNA, 25 bp, Artificial
  Probe
agcacaacgttaagggtcgtacaat

SEQ ID NO: 324445 - DNA, 25 bp, Artificial
  Probe
cctctgagatgtttggcaagaaatc

SEQ ID NO: 324446 - DNA, 25 bp, Artificial
  Probe
aggtttccttcttgctgctcgatgt

SEQ ID NO: 324447 - DNA, 25 bp, Artificial
  Probe
ggatttattctcagaacaccaagta

SEQ ID NO: 324448 - DNA, 25 bp, Artificial
  Probe
atagagcacaacgttaagggtcgta

SEQ ID NO: 324449 - DNA, 25 bp, Artificial
  Probe
cttcttgctgctcgatgttctttga

SEQ ID NO: 324450 - DNA, 25 bp, Artificial
  Probe
tcagactatatacagagcctgtttt

SEQ ID NO: 324451 - DNA, 25 bp, Artificial
  Probe
agactatatacagagcctgttttaa

SEQ ID NO: 324452 - DNA, 25 bp, Artificial
  Probe
tgctgctcgatgttctttgatggaa

SEQ ID NO: 324453 - DNA, 25 bp, Artificial
  Probe
cttatagagcacaacgttaagggtc

SEQ ID NO: 324454 - DNA, 25 bp, Artificial
  Probe
aaccttatagagcacaacgttaagg

SEQ ID NO: 324455 - DNA, 25 bp, Artificial
  Probe
agggtcgtacaattactgtgagaac

SEQ ID NO: 324456 - DNA, 25 bp, Artificial
  Probe
tcgtacaattactgtgagaactgtg

SEQ ID NO: 324457 - DNA, 25 bp, Artificial
  Probe
gtttccttcttgctgctcgatgttc

SEQ ID NO: 324458 - DNA, 25 bp, Artificial
  Probe
acctctgagatgtttggcaagaaat

SEQ ID NO: 324459 - DNA, 25 bp, Artificial
  Probe
gggtcgtacaattactgtgagaact

SEQ ID NO: 324460 - DNA, 25 bp, Artificial
  Probe
gaggtttccttcttgctgctcgatg

SEQ ID NO: 324461 - DNA, 25 bp, Artificial
  Probe
tgctcgatgttctttgatggaaaac

SEQ ID NO: 324462 - DNA, 25 bp, Artificial
  Probe
ctcgatgttctttgatggaaaactg

SEQ ID NO: 324463 - DNA, 25 bp, Artificial
  Probe
ctattcagactatatacagagcctg

SEQ ID NO: 324464 - DNA, 25 bp, Artificial
  Probe
tgtttggcaagaaatcccctgattt

SEQ ID NO: 324465 - DNA, 25 bp, Artificial
  Probe
gctcgatgttctttgatggaaaact

SEQ ID NO: 324466 - DNA, 25 bp, Artificial
  Probe
aagcacctctgagatgtttggcaag

SEQ ID NO: 324467 - DNA, 25 bp, Artificial
  Probe
attcagactatatacagagcctgtt

SEQ ID NO: 324468 - DNA, 25 bp, Artificial
  Probe
tacctgtctatgaagccctttagga

SEQ ID NO: 324469 - DNA, 25 bp, Artificial
  Probe
tttggcaagaaatcccctgatttcc

SEQ ID NO: 324470 - DNA, 25 bp, Artificial
  Probe
ccttcttgctgctcgatgttctttg

SEQ ID NO: 324471 - DNA, 25 bp, Artificial
  Probe
accttatagagcacaacgttaaggg

SEQ ID NO: 324472 - DNA, 25 bp, Artificial
  Probe
tcttgctgctcgatgttctttgatg

SEQ ID NO: 324473 - DNA, 25 bp, Artificial
  Probe
ggtcgtacaattactgtgagaactg

SEQ ID NO: 324474 - DNA, 25 bp, Artificial
  Probe
gcctattcagactatatacagagcc

SEQ ID NO: 324475 - DNA, 25 bp, Artificial
  Probe
tgcctattcagactatatacagagc

SEQ ID NO: 324476 - DNA, 25 bp, Artificial
  Probe
gtcgtacaattactgtgagaactgt

SEQ ID NO: 324477 - DNA, 25 bp, Artificial
  Probe
cagactatatacagagcctgtttta

SEQ ID NO: 324478 - DNA, 25 bp, Artificial
  Probe
ttatagagcacaacgttaagggtcg

SEQ ID NO: 324479 - DNA, 25 bp, Artificial
  Probe
gcacctctgagatgtttggcaagaa

SEQ ID NO: 324480 - DNA, 25 bp, Artificial
  Probe
agcacctctgagatgtttggcaaga

SEQ ID NO: 324481 - DNA, 25 bp, Artificial
  Probe
atgcctattcagactatatacagag

SEQ ID NO: 324482 - DNA, 25 bp, Artificial
  Probe
gactatatacagagcctgttttaaa

SEQ ID NO: 324483 - DNA, 25 bp, Artificial
  Probe
ttgctgctcgatgttctttgatgga

SEQ ID NO: 324484 - DNA, 25 bp, Artificial
  Probe
ctcaccaagataattctgtacagtg

SEQ ID NO: 324485 - DNA, 25 bp, Artificial
  Probe
gattttatctctgaacttccctggc

SEQ ID NO: 324486 - DNA, 25 bp, Artificial
  Probe
tgcccatctgcctctggttttcaat

SEQ ID NO: 324487 - DNA, 25 bp, Artificial
  Probe
tgaccagcagatcctggcccagggt

SEQ ID NO: 324488 - DNA, 25 bp, Artificial
  Probe
tcgtgggcatatccacctcaccaag

SEQ ID NO: 324489 - DNA, 25 bp, Artificial
  Probe
tcaccaagataattctgtacagtga

SEQ ID NO: 324490 - DNA, 25 bp, Artificial
  Probe
tagagtccttgtattatactgtcag

SEQ ID NO: 324491 - DNA, 25 bp, Artificial
  Probe
ctgtacagtgaccagcagatcctgg

SEQ ID NO: 324492 - DNA, 25 bp, Artificial
  Probe
agtgaccagcagatcctggcccagg

SEQ ID NO: 324493 - DNA, 25 bp, Artificial
  Probe
gtgaccagcagatcctggcccaggg

SEQ ID NO: 324494 - DNA, 25 bp, Artificial
  Probe
ccttgtattatactgtcagcttctg

SEQ ID NO: 324495 - DNA, 25 bp, Artificial
  Probe
gtccttgtattatactgtcagcttc

SEQ ID NO: 324496 - DNA, 25 bp, Artificial
  Probe
cagcctgtgctttctagagtccttg

SEQ ID NO: 324497 - DNA, 25 bp, Artificial
  Probe
accccagcgatcgtgggcatatcca

SEQ ID NO: 324498 - DNA, 25 bp, Artificial
  Probe
agtccttgtattatactgtcagctt

SEQ ID NO: 324499 - DNA, 25 bp, Artificial
  Probe
gataattctgtacagtgaccagcag

SEQ ID NO: 324500 - DNA, 25 bp, Artificial
  Probe
tcaccccagcgatcgtgggcatatc

SEQ ID NO: 324501 - DNA, 25 bp, Artificial
  Probe
gcccatctgcctctggttttcaatt

SEQ ID NO: 324502 - DNA, 25 bp, Artificial
  Probe
gcggtgcccatctgcctctggtttt

SEQ ID NO: 324503 - DNA, 25 bp, Artificial
  Probe
ggttttcaattgctcccgattttat

SEQ ID NO: 324504 - DNA, 25 bp, Artificial
  Probe
agatcctggcccagggtggctcagc

SEQ ID NO: 324505 - DNA, 25 bp, Artificial
  Probe
tgggcatatccacctcaccaagata

SEQ ID NO: 324506 - DNA, 25 bp, Artificial
  Probe
gcccagggtggctcagcctgtgctt

SEQ ID NO: 324507 - DNA, 25 bp, Artificial
  Probe
gagtccttgtattatactgtcagct

SEQ ID NO: 324508 - DNA, 25 bp, Artificial
  Probe
tcagcctgtgctttctagagtcctt

SEQ ID NO: 324509 - DNA, 25 bp, Artificial
  Probe
gatcgtgggcatatccacctcacca

SEQ ID NO: 324510 - DNA, 25 bp, Artificial
  Probe
gagcggtgcccatctgcctctggtt

SEQ ID NO: 324511 - DNA, 25 bp, Artificial
  Probe
tatactgtcagcttctgtgctgggg

SEQ ID NO: 324512 - DNA, 25 bp, Artificial
  Probe
tctgcctctggttttcaattgctcc

SEQ ID NO: 324513 - DNA, 25 bp, Artificial
  Probe
gtattatactgtcagcttctgtgct

SEQ ID NO: 324514 - DNA, 25 bp, Artificial
  Probe
gctttctagagtccttgtattatac

SEQ ID NO: 324515 - DNA, 25 bp, Artificial
  Probe
ggtggctcagcctgtgctttctaga

SEQ ID NO: 324516 - DNA, 25 bp, Artificial
  Probe
ccagggtggctcagcctgtgctttc

SEQ ID NO: 324517 - DNA, 25 bp, Artificial
  Probe
gcgatcgtgggcatatccacctcac

SEQ ID NO: 324518 - DNA, 25 bp, Artificial
  Probe
tttctagagtccttgtattatactg

SEQ ID NO: 324519 - DNA, 25 bp, Artificial
  Probe
cgattttatctctgaacttccctgg

SEQ ID NO: 324520 - DNA, 25 bp, Artificial
  Probe
cccatctgcctctggttttcaattg

SEQ ID NO: 324521 - DNA, 25 bp, Artificial
  Probe
tggttttcaattgctcccgatttta

SEQ ID NO: 324522 - DNA, 25 bp, Artificial
  Probe
gtggctcagcctgtgctttctagag

SEQ ID NO: 324523 - DNA, 25 bp, Artificial
  Probe
caagataattctgtacagtgaccag

SEQ ID NO: 324524 - DNA, 25 bp, Artificial
  Probe
acagtgaccagcagatcctggccca

SEQ ID NO: 324525 - DNA, 25 bp, Artificial
  Probe
tctgtgccctaggatcagtttgttt

SEQ ID NO: 324526 - DNA, 25 bp, Artificial
  Probe
ttatactgtcagcttctgtgctggg

SEQ ID NO: 324527 - DNA, 25 bp, Artificial
  Probe
cctggcccagggtggctcagcctgt

SEQ ID NO: 324528 - DNA, 25 bp, Artificial
  Probe
tgctttctagagtccttgtattata

SEQ ID NO: 324529 - DNA, 25 bp, Artificial
  Probe
taattctgtacagtgaccagcagat

SEQ ID NO: 324530 - DNA, 25 bp, Artificial
  Probe
actatgcaaatctcggggcactccc

SEQ ID NO: 324531 - DNA, 25 bp, Artificial
  Probe
tgaaatttgcccacatttttcaagg

SEQ ID NO: 324532 - DNA, 25 bp, Artificial
  Probe
acagccaggctgagaccaagatctg

SEQ ID NO: 324533 - DNA, 25 bp, Artificial
  Probe
attcttggagccaggatttgactcg

SEQ ID NO: 324534 - DNA, 25 bp, Artificial
  Probe
caagatctgtccaccgagccacagt

SEQ ID NO: 324535 - DNA, 25 bp, Artificial
  Probe
ccatgccccacagacgtaatactga

SEQ ID NO: 324536 - DNA, 25 bp, Artificial
  Probe
gctctgtaaggacttttttgagttc

SEQ ID NO: 324537 - DNA, 25 bp, Artificial
  Probe
cacatgcttttatacatgcagtacg

SEQ ID NO: 324538 - DNA, 25 bp, Artificial
  Probe
ctgtaaggacttttttgagttcctg

SEQ ID NO: 324539 - DNA, 25 bp, Artificial
  Probe
cgttcttccgcgtcgtggtagctct

SEQ ID NO: 324540 - DNA, 25 bp, Artificial
  Probe
tggtctgaaatttgcccacattttt

SEQ ID NO: 324541 - DNA, 25 bp, Artificial
  Probe
tccacagatgtcaaccccaaggcat

SEQ ID NO: 324542 - DNA, 25 bp, Artificial
  Probe
ccctcaagcggcatactagaaacag

SEQ ID NO: 324543 - DNA, 25 bp, Artificial
  Probe
tatacatgcagtacgcaacatgtac

SEQ ID NO: 324544 - DNA, 25 bp, Artificial
  Probe
ttcctggaaggaatctggaattcac

SEQ ID NO: 324545 - DNA, 25 bp, Artificial
  Probe
ctgtcggtaaggtggcttcaagatg

SEQ ID NO: 324546 - DNA, 25 bp, Artificial
  Probe
gcccacatttttcaaggcctagaaa

SEQ ID NO: 324547 - DNA, 25 bp, Artificial
  Probe
cttcacccctgctgtgcagagtggc

SEQ ID NO: 324548 - DNA, 25 bp, Artificial
  Probe
gttctcccgttcttccgcgtcgtgg

SEQ ID NO: 324549 - DNA, 25 bp, Artificial
  Probe
tttttcaaggcctagaaatagcatg

SEQ ID NO: 324550 - DNA, 25 bp, Artificial
  Probe
atttgaaaaccctcaagcggcatac

SEQ ID NO: 324551 - DNA, 25 bp, Artificial
  Probe
ggaatctggaattcaccatggtctg

SEQ ID NO: 324552 - DNA, 25 bp, Artificial
  Probe
catgcagtacgcaacatgtactcga

SEQ ID NO: 324553 - DNA, 25 bp, Artificial
  Probe
agttcctggaaggaatctggaattc

SEQ ID NO: 324554 - DNA, 25 bp, Artificial
  Probe
cagagtggcattcttggagccagga

SEQ ID NO: 324555 - DNA, 25 bp, Artificial
  Probe
gaaagactatgcaaatctcggggca

SEQ ID NO: 324556 - DNA, 25 bp, Artificial
  Probe
tttgcccacatttttcaaggcctag

SEQ ID NO: 324557 - DNA, 25 bp, Artificial
  Probe
cgtggtagctctgtaaggacttttt

SEQ ID NO: 324558 - DNA, 25 bp, Artificial
  Probe
ccccacggcagtaaatgcttatttg

SEQ ID NO: 324559 - DNA, 25 bp, Artificial
  Probe
tgaaaaccctcaagcggcatactag

SEQ ID NO: 324560 - DNA, 25 bp, Artificial
  Probe
ttcaaggcctagaaatagcatgtgt

SEQ ID NO: 324561 - DNA, 25 bp, Artificial
  Probe
gtactcgagactgatttcttctttt

SEQ ID NO: 324562 - DNA, 25 bp, Artificial
  Probe
agaccaagatctgtccaccgagcca

SEQ ID NO: 324563 - DNA, 25 bp, Artificial
  Probe
atgcttatttgaaaaccctcaagcg

SEQ ID NO: 324564 - DNA, 25 bp, Artificial
  Probe
ttatagacagccaggctgagaccaa

SEQ ID NO: 324565 - DNA, 25 bp, Artificial
  Probe
gactcgagcaagtcccaggtgctag

SEQ ID NO: 324566 - DNA, 25 bp, Artificial
  Probe
ggagcttatagacagccaggctgag

SEQ ID NO: 324567 - DNA, 25 bp, Artificial
  Probe
ttctcccgttcttccgcgtcgtggt

SEQ ID NO: 324568 - DNA, 25 bp, Artificial
  Probe
gatgggtatttctcttacatttcac

SEQ ID NO: 324569 - DNA, 25 bp, Artificial
  Probe
ctcagaacctggaaagactatgcaa

SEQ ID NO: 324570 - DNA, 25 bp, Artificial
  Probe
tgctgtgcagagtggcattcttgga

SEQ ID NO: 324571 - DNA, 25 bp, Artificial
  Probe
aatagcatgtgtccacagatgtcaa

SEQ ID NO: 324572 - DNA, 25 bp, Artificial
  Probe
cccacggcagtaaatgcttatttga

SEQ ID NO: 324573 - DNA, 25 bp, Artificial
  Probe
cctcaagcggcatactagaaacagg

SEQ ID NO: 324574 - DNA, 25 bp, Artificial
  Probe
caaggcatctgtcctctcagaacct

SEQ ID NO: 324575 - DNA, 25 bp, Artificial
  Probe
atgtcaaccccaaggcatctgtcct

SEQ ID NO: 324576 - DNA, 25 bp, Artificial
  Probe
tgcgcaaggcagaggccacccggtc

SEQ ID NO: 324577 - DNA, 25 bp, Artificial
  Probe
agcaagtccagcagcggacgagcca

SEQ ID NO: 324578 - DNA, 25 bp, Artificial
  Probe
ttcacagtggtgaccctaaacgatg

SEQ ID NO: 324579 - DNA, 25 bp, Artificial
  Probe
acccggtcaagcactgcaatggcca

SEQ ID NO: 324580 - DNA, 25 bp, Artificial
  Probe
cagcagcttagaggagagtgccttg

SEQ ID NO: 324581 - DNA, 25 bp, Artificial
  Probe
ggtgacttggccatctagccacagt

SEQ ID NO: 324582 - DNA, 25 bp, Artificial
  Probe
gggcagagccgcagactccagccag

SEQ ID NO: 324583 - DNA, 25 bp, Artificial
  Probe
cagtggtgaccctaaacgatgcgca

SEQ ID NO: 324584 - DNA, 25 bp, Artificial
  Probe
agagtgccttggtggtgacaccaga

SEQ ID NO: 324585 - DNA, 25 bp, Artificial
  Probe
taaacgatgcgcaaggcagaggcca

SEQ ID NO: 324586 - DNA, 25 bp, Artificial
  Probe
acagcagtggcagcagcttagagga

SEQ ID NO: 324587 - DNA, 25 bp, Artificial
  Probe
gcctaggggcagagccgcagactcc

SEQ ID NO: 324588 - DNA, 25 bp, Artificial
  Probe
gggttgccaccttattacacacacc

SEQ ID NO: 324589 - DNA, 25 bp, Artificial
  Probe
tctccattgggttgccaccttatta

SEQ ID NO: 324590 - DNA, 25 bp, Artificial
  Probe
ggtcaagcactgcaatggccaccac

SEQ ID NO: 324591 - DNA, 25 bp, Artificial
  Probe
gtccagcagcggacgagccagacca

SEQ ID NO: 324592 - DNA, 25 bp, Artificial
  Probe
acagagcagaactgggccagcctag

SEQ ID NO: 324593 - DNA, 25 bp, Artificial
  Probe
caggctttggcgaccacagtggaga

SEQ ID NO: 324594 - DNA, 25 bp, Artificial
  Probe
gcgaccacagtggagatgcactccc

SEQ ID NO: 324595 - DNA, 25 bp, Artificial
  Probe
cactgctaccagcagacttcacagt

SEQ ID NO: 324596 - DNA, 25 bp, Artificial
  Probe
aaggcagaggccacccggtcaagca

SEQ ID NO: 324597 - DNA, 25 bp, Artificial
  Probe
cactgacagcagtggcagcagctta

SEQ ID NO: 324598 - DNA, 25 bp, Artificial
  Probe
atgcgcaaggcagaggccacccggt

SEQ ID NO: 324599 - DNA, 25 bp, Artificial
  Probe
cagcagcggacgagccagaccaggt

SEQ ID NO: 324600 - DNA, 25 bp, Artificial
  Probe
aaagcatttcaaatcaacaggtaga

SEQ ID NO: 324601 - DNA, 25 bp, Artificial
  Probe
tggtcctcctggacccagaaaggtc

SEQ ID NO: 324602 - DNA, 25 bp, Artificial
  Probe
gtcccacagtacagggaaaggccac

SEQ ID NO: 324603 - DNA, 25 bp, Artificial
  Probe
cctgcctgtcccacagtacagggaa

SEQ ID NO: 324604 - DNA, 25 bp, Artificial
  Probe
tcccagcgtctccattgggttgcca

SEQ ID NO: 324605 - DNA, 25 bp, Artificial
  Probe
gagagcaggctttggcgaccacagt

SEQ ID NO: 324606 - DNA, 25 bp, Artificial
  Probe
agcggacgagccagaccaggtgact

SEQ ID NO: 324607 - DNA, 25 bp, Artificial
  Probe
cagcctaggggcagagccgcagact

SEQ ID NO: 324608 - DNA, 25 bp, Artificial
  Probe
cattgggttgccaccttattacaca

SEQ ID NO: 324609 - DNA, 25 bp, Artificial
  Probe
cagcgtctccattgggttgccacct

SEQ ID NO: 324610 - DNA, 25 bp, Artificial
  Probe
aaacgatgcgcaaggcagaggccac

SEQ ID NO: 324611 - DNA, 25 bp, Artificial
  Probe
caccacctgacgacagagcagaact

SEQ ID NO: 324612 - DNA, 25 bp, Artificial
  Probe
cacagggtttcctggggccccactg

SEQ ID NO: 324613 - DNA, 25 bp, Artificial
  Probe
cgttggtcctcctggacccagaaag

SEQ ID NO: 324614 - DNA, 25 bp, Artificial
  Probe
cctcatggccgcaaggggctcactg

SEQ ID NO: 324615 - DNA, 25 bp, Artificial
  Probe
acttggccatctagccacagtctct

SEQ ID NO: 324616 - DNA, 25 bp, Artificial
  Probe
gaggccacccggtcaagcactgcaa

SEQ ID NO: 324617 - DNA, 25 bp, Artificial
  Probe
ctcctggacccagaaaggtccagca

SEQ ID NO: 324618 - DNA, 25 bp, Artificial
  Probe
agagccgcagactccagccagcaag

SEQ ID NO: 324619 - DNA, 25 bp, Artificial
  Probe
gccgcaaggggctcactgacagcag

SEQ ID NO: 324620 - DNA, 25 bp, Artificial
  Probe
gaccctaaacgatgcgcaaggcaga

SEQ ID NO: 324621 - DNA, 25 bp, Artificial
  Probe
gaccaggtgacttggccatctagcc

SEQ ID NO: 324622 - DNA, 25 bp, Artificial
  Probe
actgtttcgacagagtccggtgaag

SEQ ID NO: 324623 - DNA, 25 bp, Artificial
  Probe
ctcatggcacctccatctgactgtg

SEQ ID NO: 324624 - DNA, 25 bp, Artificial
  Probe
tgtttcgacagagtccggtgaagac

SEQ ID NO: 324625 - DNA, 25 bp, Artificial
  Probe
tgcaaacacaggtcgcccaatgggg

SEQ ID NO: 324626 - DNA, 25 bp, Artificial
  Probe
gtttcgacagagtccggtgaagacc

SEQ ID NO: 324627 - DNA, 25 bp, Artificial
  Probe
ccaatgggggactgtttcgacagag

SEQ ID NO: 324628 - DNA, 25 bp, Artificial
  Probe
cttgtacatacgtgtaaataatgac

SEQ ID NO: 324629 - DNA, 25 bp, Artificial
  Probe
caggtcgcccaatgggggactgttt

SEQ ID NO: 324630 - DNA, 25 bp, Artificial
  Probe
gccctcaattcagtgcaaacacagg

SEQ ID NO: 324631 - DNA, 25 bp, Artificial
  Probe
cagtgcaaacacaggtcgcccaatg

SEQ ID NO: 324632 - DNA, 25 bp, Artificial
  Probe
ccacccgaccagcagagctttttaa

SEQ ID NO: 324633 - DNA, 25 bp, Artificial
  Probe
aattcagtgcaaacacaggtcgccc

SEQ ID NO: 324634 - DNA, 25 bp, Artificial
  Probe
caattcagtgcaaacacaggtcgcc

SEQ ID NO: 324635 - DNA, 25 bp, Artificial
  Probe
gtgcaaacacaggtcgcccaatggg

SEQ ID NO: 324636 - DNA, 25 bp, Artificial
  Probe
caatgggggactgtttcgacagagt

SEQ ID NO: 324637 - DNA, 25 bp, Artificial
  Probe
attcagtgcaaacacaggtcgccca

SEQ ID NO: 324638 - DNA, 25 bp, Artificial
  Probe
aatgggggactgtttcgacagagtc

SEQ ID NO: 324639 - DNA, 25 bp, Artificial
  Probe
ctttccagcccgtgcctggaggcgt

SEQ ID NO: 324640 - DNA, 25 bp, Artificial
  Probe
ctatgtctttccagcccgtgcctgg

SEQ ID NO: 324641 - DNA, 25 bp, Artificial
  Probe
tggcacctccatctgactgtgtcgc

SEQ ID NO: 324642 - DNA, 25 bp, Artificial
  Probe
tcatggcacctccatctgactgtgt

SEQ ID NO: 324643 - DNA, 25 bp, Artificial
  Probe
ttcagtgcaaacacaggtcgcccaa

SEQ ID NO: 324644 - DNA, 25 bp, Artificial
  Probe
tcaattcagtgcaaacacaggtcgc

SEQ ID NO: 324645 - DNA, 25 bp, Artificial
  Probe
tgccctcaattcagtgcaaacacag

SEQ ID NO: 324646 - DNA, 25 bp, Artificial
  Probe
agaggccctggacacctctcatggc

SEQ ID NO: 324647 - DNA, 25 bp, Artificial
  Probe
ccctcaattcagtgcaaacacaggt

SEQ ID NO: 324648 - DNA, 25 bp, Artificial
  Probe
tggaggcgtccttccagaggccctg

SEQ ID NO: 324649 - DNA, 25 bp, Artificial
  Probe
gactgtttcgacagagtccggtgaa

SEQ ID NO: 324650 - DNA, 25 bp, Artificial
  Probe
catggcacctccatctgactgtgtc

SEQ ID NO: 324651 - DNA, 25 bp, Artificial
  Probe
cagaggccctggacacctctcatgg

SEQ ID NO: 324652 - DNA, 25 bp, Artificial
  Probe
gacagagtccggtgaagacccccat

SEQ ID NO: 324653 - DNA, 25 bp, Artificial
  Probe
cccaatgggggactgtttcgacaga

SEQ ID NO: 324654 - DNA, 25 bp, Artificial
  Probe
tcagtgcaaacacaggtcgcccaat

SEQ ID NO: 324655 - DNA, 25 bp, Artificial
  Probe
gcccaatgggggactgtttcgacag

SEQ ID NO: 324656 - DNA, 25 bp, Artificial
  Probe
agtgcaaacacaggtcgcccaatgg

SEQ ID NO: 324657 - DNA, 25 bp, Artificial
  Probe
atggcacctccatctgactgtgtcg

SEQ ID NO: 324658 - DNA, 25 bp, Artificial
  Probe
cacccgaccagcagagctttttaat

SEQ ID NO: 324659 - DNA, 25 bp, Artificial
  Probe
ctcaattcagtgcaaacacaggtcg

SEQ ID NO: 324660 - DNA, 25 bp, Artificial
  Probe
cctcaattcagtgcaaacacaggtc

SEQ ID NO: 324661 - DNA, 25 bp, Artificial
  Probe
gaggccctggacacctctcatggca

SEQ ID NO: 324662 - DNA, 25 bp, Artificial
  Probe
tctcatggcacctccatctgactgt

SEQ ID NO: 324663 - DNA, 25 bp, Artificial
  Probe
ctggaggcgtccttccagaggccct

SEQ ID NO: 324664 - DNA, 25 bp, Artificial
  Probe
gaatattcccaattttcgaagtcag

SEQ ID NO: 324665 - DNA, 25 bp, Artificial
  Probe
atgggggactgtttcgacagagtcc

SEQ ID NO: 324666 - DNA, 25 bp, Artificial
  Probe
ctgtttcgacagagtccggtgaaga

SEQ ID NO: 324667 - DNA, 25 bp, Artificial
  Probe
ggactgtttcgacagagtccggtga

SEQ ID NO: 324668 - DNA, 25 bp, Artificial
  Probe
gcatgcgccatatgccggaggtacc

SEQ ID NO: 324669 - DNA, 25 bp, Artificial
  Probe
attggtctgcactcgggcccgtgcg

SEQ ID NO: 324670 - DNA, 25 bp, Artificial
  Probe
gccttatcgcatccatgtaaacatg

SEQ ID NO: 324671 - DNA, 25 bp, Artificial
  Probe
gtgcagtcggctccttccgcatgcg

SEQ ID NO: 324672 - DNA, 25 bp, Artificial
  Probe
gattcttcgggctctggaccaaggc

SEQ ID NO: 324673 - DNA, 25 bp, Artificial
  Probe
ctggaccaaggcttccagatggaat

SEQ ID NO: 324674 - DNA, 25 bp, Artificial
  Probe
gcttgtgggcagagtcggcttcaac

SEQ ID NO: 324675 - DNA, 25 bp, Artificial
  Probe
taccagtgcgcatccgcattggtct

SEQ ID NO: 324676 - DNA, 25 bp, Artificial
  Probe
tccgcatgcgccatatgccggaggt

SEQ ID NO: 324677 - DNA, 25 bp, Artificial
  Probe
ggagattcccccagagagacgcaag

SEQ ID NO: 324678 - DNA, 25 bp, Artificial
  Probe
gactaaggcccaaggcttctgtcca

SEQ ID NO: 324679 - DNA, 25 bp, Artificial
  Probe
ctagagaaagccaggccaggccagt

SEQ ID NO: 324680 - DNA, 25 bp, Artificial
  Probe
tgttgaggacacgtactggcttgtg

SEQ ID NO: 324681 - DNA, 25 bp, Artificial
  Probe
tcgcatccatgtaaacatgagcact

SEQ ID NO: 324682 - DNA, 25 bp, Artificial
  Probe
tctgcaaggcccttcctgaagttgc

SEQ ID NO: 324683 - DNA, 25 bp, Artificial
  Probe
gagtcggcttcaacaagcccattcc

SEQ ID NO: 324684 - DNA, 25 bp, Artificial
  Probe
gattattctgcaaggcccttcctga

SEQ ID NO: 324685 - DNA, 25 bp, Artificial
  Probe
ggagtccactggactgccttatcgc

SEQ ID NO: 324686 - DNA, 25 bp, Artificial
  Probe
gggctctggaccaaggcttccagat

SEQ ID NO: 324687 - DNA, 25 bp, Artificial
  Probe
aaccatggcatcagcctgcaggaga

SEQ ID NO: 324688 - DNA, 25 bp, Artificial
  Probe
ttgtgggcagagtcggcttcaacaa

SEQ ID NO: 324689 - DNA, 25 bp, Artificial
  Probe
tggactgccttatcgcatccatgta

SEQ ID NO: 324690 - DNA, 25 bp, Artificial
  Probe
gacaggattattctgcaaggccctt

SEQ ID NO: 324691 - DNA, 25 bp, Artificial
  Probe
gtgcgcatccgcattggtctgcact

SEQ ID NO: 324692 - DNA, 25 bp, Artificial
  Probe
aagtgaagctctactggggacagga

SEQ ID NO: 324693 - DNA, 25 bp, Artificial
  Probe
gcctgcaggagattcccccagagag

SEQ ID NO: 324694 - DNA, 25 bp, Artificial
  Probe
caaccaggggccagcaaccatggca

SEQ ID NO: 324695 - DNA, 25 bp, Artificial
  Probe
ctactggggacaggattattctgca

SEQ ID NO: 324696 - DNA, 25 bp, Artificial
  Probe
tgcctcacgaatggagtccactgga

SEQ ID NO: 324697 - DNA, 25 bp, Artificial
  Probe
ttccagatggaatgccgaggccgca

SEQ ID NO: 324698 - DNA, 25 bp, Artificial
  Probe
gaaagccaggccaggccagtttact

SEQ ID NO: 324699 - DNA, 25 bp, Artificial
  Probe
cggaggtaccagtgcgcatccgcat

SEQ ID NO: 324700 - DNA, 25 bp, Artificial
  Probe
cctcacgaatggagtccactggact

SEQ ID NO: 324701 - DNA, 25 bp, Artificial
  Probe
tcccccagagagacgcaagaagcta

SEQ ID NO: 324702 - DNA, 25 bp, Artificial
  Probe
gtgttgaggacacgtactggcttgt

SEQ ID NO: 324703 - DNA, 25 bp, Artificial
  Probe
tccatgtaaacatgagcactgttcg

SEQ ID NO: 324704 - DNA, 25 bp, Artificial
  Probe
cacgtactggcttgtgggcagagtc

SEQ ID NO: 324705 - DNA, 25 bp, Artificial
  Probe
gccatatgccggaggtaccagtgcg

SEQ ID NO: 324706 - DNA, 25 bp, Artificial
  Probe
ttactgggaagtgaagctctactgg

SEQ ID NO: 324707 - DNA, 25 bp, Artificial
  Probe
atatgggggactaaggcccaaggct

SEQ ID NO: 324708 - DNA, 25 bp, Artificial
  Probe
gtgaagctctactggggacaggatt

SEQ ID NO: 324709 - DNA, 25 bp, Artificial
  Probe
acacgtactggcttgtgggcagagt

SEQ ID NO: 324710 - DNA, 25 bp, Artificial
  Probe
ctgacctgcaaccaggggccagcaa

SEQ ID NO: 324711 - DNA, 25 bp, Artificial
  Probe
ccttcctgaagttgctgtgatatgg

SEQ ID NO: 324712 - DNA, 25 bp, Artificial
  Probe
tgttcggattcttcgggctctggac

SEQ ID NO: 324713 - DNA, 25 bp, Artificial
  Probe
tgacctgcaaccaggggccagcaac

SEQ ID NO: 324714 - DNA, 25 bp, Artificial
  Probe
tgagcccccattgggggagtaatcc

SEQ ID NO: 324715 - DNA, 25 bp, Artificial
  Probe
tatcattgcaaatgcctcccagtga

SEQ ID NO: 324716 - DNA, 25 bp, Artificial
  Probe
agttccgaattatctcagctgggag

SEQ ID NO: 324717 - DNA, 25 bp, Artificial
  Probe
cagtaaaaaatcttccccccacatg

SEQ ID NO: 324718 - DNA, 25 bp, Artificial
  Probe
ctggcccaaaaaaaaactatcattg

SEQ ID NO: 324719 - DNA, 25 bp, Artificial
  Probe
agattatatttcttattctgattgt

SEQ ID NO: 324720 - DNA, 25 bp, Artificial
  Probe
agagcacattatattcagtaagttc

SEQ ID NO: 324721 - DNA, 25 bp, Artificial
  Probe
taagagcacattatattcagtaagt

SEQ ID NO: 324722 - DNA, 25 bp, Artificial
  Probe
actatcattgcaaatgcctcccagt

SEQ ID NO: 324723 - DNA, 25 bp, Artificial
  Probe
tatctcagctgggaggaaagtaact

SEQ ID NO: 324724 - DNA, 25 bp, Artificial
  Probe
cattttattacccaataaaaagatg

SEQ ID NO: 324725 - DNA, 25 bp, Artificial
  Probe
agcacattatattcagtaagttccg

SEQ ID NO: 324726 - DNA, 25 bp, Artificial
  Probe
tgtccttttggaatggaaaatattg

SEQ ID NO: 324727 - DNA, 25 bp, Artificial
  Probe
tccccccacatgattctaaacccca

SEQ ID NO: 324728 - DNA, 25 bp, Artificial
  Probe
atatgctgagggtagcccattttta

SEQ ID NO: 324729 - DNA, 25 bp, Artificial
  Probe
ttcagtaagttccgaattatctcag

SEQ ID NO: 324730 - DNA, 25 bp, Artificial
  Probe
atctcagctgggaggaaagtaactg

SEQ ID NO: 324731 - DNA, 25 bp, Artificial
  Probe
aaaatgatgcttctaattattttgt

SEQ ID NO: 324732 - DNA, 25 bp, Artificial
  Probe
tctcagctgggaggaaagtaactgt

SEQ ID NO: 324733 - DNA, 25 bp, Artificial
  Probe
tttccaaaattgagcccccattggg

SEQ ID NO: 324734 - DNA, 25 bp, Artificial
  Probe
taactgtgggatgttacagtaaaaa

SEQ ID NO: 324735 - DNA, 25 bp, Artificial
  Probe
ccgaattatctcagctgggaggaaa

SEQ ID NO: 324736 - DNA, 25 bp, Artificial
  Probe
tccgaattatctcagctgggaggaa

SEQ ID NO: 324737 - DNA, 25 bp, Artificial
  Probe
ttccgaattatctcagctgggagga

SEQ ID NO: 324738 - DNA, 25 bp, Artificial
  Probe
aaaaataatctccactttatttcat

SEQ ID NO: 324739 - DNA, 25 bp, Artificial
  Probe
cagtaagttccgaattatctcagct

SEQ ID NO: 324740 - DNA, 25 bp, Artificial
  Probe
tatgttttccaaaattgagccccca

SEQ ID NO: 324741 - DNA, 25 bp, Artificial
  Probe
agtaagttccgaattatctcagctg

SEQ ID NO: 324742 - DNA, 25 bp, Artificial
  Probe
ttattggttataactcactaaccta

SEQ ID NO: 324743 - DNA, 25 bp, Artificial
  Probe
cactttatttcataactggcccaaa

SEQ ID NO: 324744 - DNA, 25 bp, Artificial
  Probe
atatttcttattctgattgtgcccg

SEQ ID NO: 324745 - DNA, 25 bp, Artificial
  Probe
gctgagggtagcccatttttaaatt

SEQ ID NO: 324746 - DNA, 25 bp, Artificial
  Probe
gttttccaaaattgagcccccattg

SEQ ID NO: 324747 - DNA, 25 bp, Artificial
  Probe
ctaacatcaatttaaaatttgattt

SEQ ID NO: 324748 - DNA, 25 bp, Artificial
  Probe
aaagtaactgtgggatgttacagta

SEQ ID NO: 324749 - DNA, 25 bp, Artificial
  Probe
tggtcttaatttctgggatgaaaaa

SEQ ID NO: 324750 - DNA, 25 bp, Artificial
  Probe
ttttccaaaattgagcccccattgg

SEQ ID NO: 324751 - DNA, 25 bp, Artificial
  Probe
tatgctgagggtagcccatttttaa

SEQ ID NO: 324752 - DNA, 25 bp, Artificial
  Probe
ttttatatgctgagggtagcccatt

SEQ ID NO: 324753 - DNA, 25 bp, Artificial
  Probe
taagttccgaattatctcagctggg

SEQ ID NO: 324754 - DNA, 25 bp, Artificial
  Probe
ctatcattgcaaatgcctcccagtg

SEQ ID NO: 324755 - DNA, 25 bp, Artificial
  Probe
attgcaaatgcctcccagtgaaacc

SEQ ID NO: 324756 - DNA, 25 bp, Artificial
  Probe
cctatatattttatatgctgagggt

SEQ ID NO: 324757 - DNA, 25 bp, Artificial
  Probe
cttctcaaatatttagaattattgg

SEQ ID NO: 324758 - DNA, 25 bp, Artificial
  Probe
cgaattatctcagctgggaggaaag

SEQ ID NO: 324759 - DNA, 25 bp, Artificial
  Probe
gtaagttccgaattatctcagctgg

SEQ ID NO: 324760 - DNA, 25 bp, Artificial
  Probe
ttcatgggaagagtggccaaccctg

SEQ ID NO: 324761 - DNA, 25 bp, Artificial
  Probe
ccatgatgcaaactaaagggaactt

SEQ ID NO: 324762 - DNA, 25 bp, Artificial
  Probe
agcgccaacgcctctgtcactgaga

SEQ ID NO: 324763 - DNA, 25 bp, Artificial
  Probe
ctaacagtaaacagtgtcataagtg

SEQ ID NO: 324764 - DNA, 25 bp, Artificial
  Probe
tgtaaatatcatctgttctgctttg

SEQ ID NO: 324765 - DNA, 25 bp, Artificial
  Probe
ctacttcaaaggagcttggatgaat

SEQ ID NO: 324766 - DNA, 25 bp, Artificial
  Probe
atgaagactcttgaagcacagctta

SEQ ID NO: 324767 - DNA, 25 bp, Artificial
  Probe
gctggtctgggcacctgatgtagtt

SEQ ID NO: 324768 - DNA, 25 bp, Artificial
  Probe
gttgaccgtcccttcctgttcctag

SEQ ID NO: 324769 - DNA, 25 bp, Artificial
  Probe
ggagaatacagactctgctactcag

SEQ ID NO: 324770 - DNA, 25 bp, Artificial
  Probe
gaataaattcccagtagaaatgacg

SEQ ID NO: 324771 - DNA, 25 bp, Artificial
  Probe
aatatgtcaggcatctcagaccaga

SEQ ID NO: 324772 - DNA, 25 bp, Artificial
  Probe
acaacttccggctgaatgagagaga

SEQ ID NO: 324773 - DNA, 25 bp, Artificial
  Probe
gaagctgtcgggaatgaagactctt

SEQ ID NO: 324774 - DNA, 25 bp, Artificial
  Probe
atcacagtgaatgaagagggtaccc

SEQ ID NO: 324775 - DNA, 25 bp, Artificial
  Probe
accattcttgcctagtggaaaagaa

SEQ ID NO: 324776 - DNA, 25 bp, Artificial
  Probe
tgttaatgcaactaatggtcgtgcc

SEQ ID NO: 324777 - DNA, 25 bp, Artificial
  Probe
gtggaggtcctcaagtccatgggaa

SEQ ID NO: 324778 - DNA, 25 bp, Artificial
  Probe
cattctgcagctggagtatgtaggg

SEQ ID NO: 324779 - DNA, 25 bp, Artificial
  Probe
tctcacccttccagggaggatgtcc

SEQ ID NO: 324780 - DNA, 25 bp, Artificial
  Probe
ttcccagtagaaatgacgcataacc

SEQ ID NO: 324781 - DNA, 25 bp, Artificial
  Probe
gtcaaggtgtctcctcagccaggcc

SEQ ID NO: 324782 - DNA, 25 bp, Artificial
  Probe
agtagtaaaagtctccatgatgcaa

SEQ ID NO: 324783 - DNA, 25 bp, Artificial
  Probe
agcatgacaaacagaacccgagagg

SEQ ID NO: 324784 - DNA, 25 bp, Artificial
  Probe
agagagttttactttgctgaggccc

SEQ ID NO: 324785 - DNA, 25 bp, Artificial
  Probe
tctgtcactgagaatgggcagagtg

SEQ ID NO: 324786 - DNA, 25 bp, Artificial
  Probe
ggacttaattcaaggctgaaccttt

SEQ ID NO: 324787 - DNA, 25 bp, Artificial
  Probe
aagagggtacccaagctgcagctgt

SEQ ID NO: 324788 - DNA, 25 bp, Artificial
  Probe
cctcataaaagaagctttggagaat

SEQ ID NO: 324789 - DNA, 25 bp, Artificial
  Probe
cccaggtagtggagagatggcaaaa

SEQ ID NO: 324790 - DNA, 25 bp, Artificial
  Probe
cccaagtttaagcttgagaagaatt

SEQ ID NO: 324791 - DNA, 25 bp, Artificial
  Probe
gtcagttaatgacctttatattcag

SEQ ID NO: 324792 - DNA, 25 bp, Artificial
  Probe
taaagggaacttccttgcggcaaat

SEQ ID NO: 324793 - DNA, 25 bp, Artificial
  Probe
tcttcaacaagaatggcaatatgtc

SEQ ID NO: 324794 - DNA, 25 bp, Artificial
  Probe
gaaacctcaacatgtctgagacatt

SEQ ID NO: 324795 - DNA, 25 bp, Artificial
  Probe
agctgccatgagagagttttacttt

SEQ ID NO: 324796 - DNA, 25 bp, Artificial
  Probe
ctgttttcattctaagaggacagag

SEQ ID NO: 324797 - DNA, 25 bp, Artificial
  Probe
aatgggcagagtggagctgacactt

SEQ ID NO: 324798 - DNA, 25 bp, Artificial
  Probe
gtcctagacacagactgcctcagcg

SEQ ID NO: 324799 - DNA, 25 bp, Artificial
  Probe
cttccggctgaatgagagagaagta

SEQ ID NO: 324800 - DNA, 25 bp, Artificial
  Probe
taagtgcacagatgttaatgcaact

SEQ ID NO: 324801 - DNA, 25 bp, Artificial
  Probe
atctaacagtaaacagtgtcataag

SEQ ID NO: 324802 - DNA, 25 bp, Artificial
  Probe
gtacacacttcagtcagttaatgac

SEQ ID NO: 324803 - DNA, 25 bp, Artificial
  Probe
aatgacgcataaccacaacttccgg

SEQ ID NO: 324804 - DNA, 25 bp, Artificial
  Probe
ccctccatatggatggtactgagga

SEQ ID NO: 324805 - DNA, 25 bp, Artificial
  Probe
tagggggcatcagcatgctaattgt

SEQ ID NO: 324806 - DNA, 25 bp, Artificial
  Probe
caattcacaggcaatttagcgtgcg

SEQ ID NO: 324807 - DNA, 25 bp, Artificial
  Probe
acagcgagggttactcgtggtgcct

SEQ ID NO: 324808 - DNA, 25 bp, Artificial
  Probe
caccaggactacagcgagggttact

SEQ ID NO: 324809 - DNA, 25 bp, Artificial
  Probe
cgtttcagccccaggttggccgcaa

SEQ ID NO: 324810 - DNA, 25 bp, Artificial
  Probe
gctctcagcatcaggccccgggatg

SEQ ID NO: 324811 - DNA, 25 bp, Artificial
  Probe
aggcatggccccaagtaccgtggcg

SEQ ID NO: 324812 - DNA, 25 bp, Artificial
  Probe
cggtgcagttcctgaccctgcatgc

SEQ ID NO: 324813 - DNA, 25 bp, Artificial
  Probe
gtggagatgctcagtcccaaggaga

SEQ ID NO: 324814 - DNA, 25 bp, Artificial
  Probe
attgagcagctgaaactgctgctgg

SEQ ID NO: 324815 - DNA, 25 bp, Artificial
  Probe
acatcctggagatggccgtcagcta

SEQ ID NO: 324816 - DNA, 25 bp, Artificial
  Probe
cattcttagagaatgtgcgtgcaga

SEQ ID NO: 324817 - DNA, 25 bp, Artificial
  Probe
aagctgctttaccacttccagcggc

SEQ ID NO: 324818 - DNA, 25 bp, Artificial
  Probe
ggtcattcttagagaatgtgcgtgc

SEQ ID NO: 324819 - DNA, 25 bp, Artificial
  Probe
tgtcatttggggataatcagggtcc

SEQ ID NO: 324820 - DNA, 25 bp, Artificial
  Probe
ccgcgccaattcacaggcaatttag

SEQ ID NO: 324821 - DNA, 25 bp, Artificial
  Probe
ccgacatcctggagatggccgtcag

SEQ ID NO: 324822 - DNA, 25 bp, Artificial
  Probe
ggagatgctcagtcccaaggagaaa

SEQ ID NO: 324823 - DNA, 25 bp, Artificial
  Probe
ccagcgacacgcagatgaagctgct

SEQ ID NO: 324824 - DNA, 25 bp, Artificial
  Probe
agagctccaggcatggccccaagta

SEQ ID NO: 324825 - DNA, 25 bp, Artificial
  Probe
gtttcagccccaggttggccgcaac

SEQ ID NO: 324826 - DNA, 25 bp, Artificial
  Probe
ctaatgagggcgagcgcgttcccac

SEQ ID NO: 324827 - DNA, 25 bp, Artificial
  Probe
cgtcgggaccgcatcaacagcagca

SEQ ID NO: 324828 - DNA, 25 bp, Artificial
  Probe
agttcctgaccctgcatgcagccag

SEQ ID NO: 324829 - DNA, 25 bp, Artificial
  Probe
ccagcccaactccaaactggagaag

SEQ ID NO: 324830 - DNA, 25 bp, Artificial
  Probe
gtgcagttcctgaccctgcatgcag

SEQ ID NO: 324831 - DNA, 25 bp, Artificial
  Probe
gaagcacagcaaagccttcgccgcg

SEQ ID NO: 324832 - DNA, 25 bp, Artificial
  Probe
cagatgaagctgctttaccacttcc

SEQ ID NO: 324833 - DNA, 25 bp, Artificial
  Probe
cgcggcctgggaaaaggcagcatat

SEQ ID NO: 324834 - DNA, 25 bp, Artificial
  Probe
cacgcagatgaagctgctttaccac

SEQ ID NO: 324835 - DNA, 25 bp, Artificial
  Probe
gggctctcagcatcaggccccggga

SEQ ID NO: 324836 - DNA, 25 bp, Artificial
  Probe
cacaggcaatttagcgtgcgctaat

SEQ ID NO: 324837 - DNA, 25 bp, Artificial
  Probe
cagccgcgtttcagccccaggttgg

SEQ ID NO: 324838 - DNA, 25 bp, Artificial
  Probe
ccaagagcctgcaccaggactacag

SEQ ID NO: 324839 - DNA, 25 bp, Artificial
  Probe
catggccccaagtaccgtggcggtg

SEQ ID NO: 324840 - DNA, 25 bp, Artificial
  Probe
gagatggccgtcagctacctgaagc

SEQ ID NO: 324841 - DNA, 25 bp, Artificial
  Probe
tggccgcaaccttcttccgaaggct

SEQ ID NO: 324842 - DNA, 25 bp, Artificial
  Probe
ccaactccaaactggagaaggccga

SEQ ID NO: 324843 - DNA, 25 bp, Artificial
  Probe
gagctccaggcatggccccaagtac

SEQ ID NO: 324844 - DNA, 25 bp, Artificial
  Probe
aggactacagcgagggttactcgtg

SEQ ID NO: 324845 - DNA, 25 bp, Artificial
  Probe
caggttggccgcaaccttcttccga

SEQ ID NO: 324846 - DNA, 25 bp, Artificial
  Probe
aatcgcctccagagctccaggcatg

SEQ ID NO: 324847 - DNA, 25 bp, Artificial
  Probe
acagcccggacattgtgccgcgcgg

SEQ ID NO: 324848 - DNA, 25 bp, Artificial
  Probe
gcagccagcgacacgcagatgaagc

SEQ ID NO: 324849 - DNA, 25 bp, Artificial
  Probe
ctacagcgagggttactcgtggtgc

SEQ ID NO: 324850 - DNA, 25 bp, Artificial
  Probe
atgcagccagcgacacgcagatgaa

SEQ ID NO: 324851 - DNA, 25 bp, Artificial
  Probe
gcgccaattcacaggcaatttagcg

SEQ ID NO: 324852 - DNA, 25 bp, Artificial
  Probe
gctgtcactcaagaaggtgattgac

SEQ ID NO: 324853 - DNA, 25 bp, Artificial
  Probe
gttcttcttgtcacccacgtgcctt

SEQ ID NO: 324854 - DNA, 25 bp, Artificial
  Probe
gtgcatgttcttcttgtcacccacg

SEQ ID NO: 324855 - DNA, 25 bp, Artificial
  Probe
acacgcgtgcacactcacgtgcatg

SEQ ID NO: 324856 - DNA, 25 bp, Artificial
  Probe
gaacacgcgtgcacactcacgtgca

SEQ ID NO: 324857 - DNA, 25 bp, Artificial
  Probe
tgttcttcttgtcacccacgtgcct

SEQ ID NO: 324858 - DNA, 25 bp, Artificial
  Probe
ctgatgtatctcctcattccagaag

SEQ ID NO: 324859 - DNA, 25 bp, Artificial
  Probe
ctcattccagaagatggacagagag

SEQ ID NO: 324860 - DNA, 25 bp, Artificial
  Probe
tgtacatagctgtcactcaagaagg

SEQ ID NO: 324861 - DNA, 25 bp, Artificial
  Probe
catgttcttcttgtcacccacgtgc

SEQ ID NO: 324862 - DNA, 25 bp, Artificial
  Probe
gtgcacactcacgtgcatgttcttc

SEQ ID NO: 324863 - DNA, 25 bp, Artificial
  Probe
ttcttgtcacccacgtgcctttaag

SEQ ID NO: 324864 - DNA, 25 bp, Artificial
  Probe
tgtatctcctcattccagaagatgg

SEQ ID NO: 324865 - DNA, 25 bp, Artificial
  Probe
acactcacgtgcatgttcttcttgt

SEQ ID NO: 324866 - DNA, 25 bp, Artificial
  Probe
tccatgtgtacatagctgtcactca

SEQ ID NO: 324867 - DNA, 25 bp, Artificial
  Probe
tgtgtacatagctgtcactcaagaa

SEQ ID NO: 324868 - DNA, 25 bp, Artificial
  Probe
tgatgtatctcctcattccagaaga

SEQ ID NO: 324869 - DNA, 25 bp, Artificial
  Probe
gacgctgctgtaaatacagaaagga

SEQ ID NO: 324870 - DNA, 25 bp, Artificial
  Probe
gctctccttccatgtgtacatagct

SEQ ID NO: 324871 - DNA, 25 bp, Artificial
  Probe
tagctgtcactcaagaaggtgattg

SEQ ID NO: 324872 - DNA, 25 bp, Artificial
  Probe
ctcacgtgcatgttcttcttgtcac

SEQ ID NO: 324873 - DNA, 25 bp, Artificial
  Probe
tatctcctcattccagaagatggac

SEQ ID NO: 324874 - DNA, 25 bp, Artificial
  Probe
ccgctctccttccatgtgtacatag

SEQ ID NO: 324875 - DNA, 25 bp, Artificial
  Probe
acgcgtgcacactcacgtgcatgtt

SEQ ID NO: 324876 - DNA, 25 bp, Artificial
  Probe
tacatagctgtcactcaagaaggtg

SEQ ID NO: 324877 - DNA, 25 bp, Artificial
  Probe
atgtatctcctcattccagaagatg

SEQ ID NO: 324878 - DNA, 25 bp, Artificial
  Probe
gggtgaccccactatttctcttatc

SEQ ID NO: 324879 - DNA, 25 bp, Artificial
  Probe
cctcattccagaagatggacagaga

SEQ ID NO: 324880 - DNA, 25 bp, Artificial
  Probe
gcatgttcttcttgtcacccacgtg

SEQ ID NO: 324881 - DNA, 25 bp, Artificial
  Probe
tcttgtcacccacgtgcctttaagc

SEQ ID NO: 324882 - DNA, 25 bp, Artificial
  Probe
gcgtgcacactcacgtgcatgttct

SEQ ID NO: 324883 - DNA, 25 bp, Artificial
  Probe
ctgtcactcaagaaggtgattgaca

SEQ ID NO: 324884 - DNA, 25 bp, Artificial
  Probe
ggggtgaccccactatttctcttat

SEQ ID NO: 324885 - DNA, 25 bp, Artificial
  Probe
ctgacgctgctgtaaatacagaaag

SEQ ID NO: 324886 - DNA, 25 bp, Artificial
  Probe
cttccatgtgtacatagctgtcact

SEQ ID NO: 324887 - DNA, 25 bp, Artificial
  Probe
tgacgctgctgtaaatacagaaagg

SEQ ID NO: 324888 - DNA, 25 bp, Artificial
  Probe
actcacgtgcatgttcttcttgtca

SEQ ID NO: 324889 - DNA, 25 bp, Artificial
  Probe
catgtgtacatagctgtcactcaag

SEQ ID NO: 324890 - DNA, 25 bp, Artificial
  Probe
ccttccatgtgtacatagctgtcac

SEQ ID NO: 324891 - DNA, 25 bp, Artificial
  Probe
tcctcattccagaagatggacagag

SEQ ID NO: 324892 - DNA, 25 bp, Artificial
  Probe
tctccttccatgtgtacatagctgt

SEQ ID NO: 324893 - DNA, 25 bp, Artificial
  Probe
cacgtgcatgttcttcttgtcaccc

SEQ ID NO: 324894 - DNA, 25 bp, Artificial
  Probe
aagctgacgctgctgtaaatacaga

SEQ ID NO: 324895 - DNA, 25 bp, Artificial
  Probe
ataagctgacgctgctgtaaataca

SEQ ID NO: 324896 - DNA, 25 bp, Artificial
  Probe
catagctgtcactcaagaaggtgat

SEQ ID NO: 324897 - DNA, 25 bp, Artificial
  Probe
gcacactcacgtgcatgttcttctt

SEQ ID NO: 324898 - DNA, 25 bp, Artificial
  Probe
gtctttctcatcatcgtgtcagaca

SEQ ID NO: 324899 - DNA, 25 bp, Artificial
  Probe
gacattgtgggcttttgtctgcccc

SEQ ID NO: 324900 - DNA, 25 bp, Artificial
  Probe
aaatgaagttctacgtggtcatccg

SEQ ID NO: 324901 - DNA, 25 bp, Artificial
  Probe
tcacgctccttctgggatactcagt

SEQ ID NO: 324902 - DNA, 25 bp, Artificial
  Probe
cagtaacagctatgcggaaatgaag

SEQ ID NO: 324903 - DNA, 25 bp, Artificial
  Probe
tcagcctcttgctgcccagtatctt

SEQ ID NO: 324904 - DNA, 25 bp, Artificial
  Probe
ggatactcagtctttctcatcatcg

SEQ ID NO: 324905 - DNA, 25 bp, Artificial
  Probe
tttacagcgccctgtacctgactgg

SEQ ID NO: 324906 - DNA, 25 bp, Artificial
  Probe
gcctaggggagcagcccatggccca

SEQ ID NO: 324907 - DNA, 25 bp, Artificial
  Probe
gctgcataccatccaggacatcaac

SEQ ID NO: 324908 - DNA, 25 bp, Artificial
  Probe
tcggacaagagcatcttcataaatc

SEQ ID NO: 324909 - DNA, 25 bp, Artificial
  Probe
tcccctcattggtgtctactttgta

SEQ ID NO: 324910 - DNA, 25 bp, Artificial
  Probe
gacatcaacatttccctgtggcgaa

SEQ ID NO: 324911 - DNA, 25 bp, Artificial
  Probe
gggtgttcaccaaatttcaggagtt

SEQ ID NO: 324912 - DNA, 25 bp, Artificial
  Probe
agtatagaaaccagtaacagctatg

SEQ ID NO: 324913 - DNA, 25 bp, Artificial
  Probe
tgtcagacacactgcctgcaacggc

SEQ ID NO: 324914 - DNA, 25 bp, Artificial
  Probe
tggtgataagcctcgctgagaccat

SEQ ID NO: 324915 - DNA, 25 bp, Artificial
  Probe
tctgcctaggggagcagcccatggc

SEQ ID NO: 324916 - DNA, 25 bp, Artificial
  Probe
cagctggtgcataagcaggatttac

SEQ ID NO: 324917 - DNA, 25 bp, Artificial
  Probe
accagctggctgcataccatccagg

SEQ ID NO: 324918 - DNA, 25 bp, Artificial
  Probe
tctgaccttcaccagctggctgcat

SEQ ID NO: 324919 - DNA, 25 bp, Artificial
  Probe
tcgtggacattgtgggcttttgtct

SEQ ID NO: 324920 - DNA, 25 bp, Artificial
  Probe
tttcaggagttcagtatagaaacca

SEQ ID NO: 324921 - DNA, 25 bp, Artificial
  Probe
aacaccagaagaagtgaggtcggac

SEQ ID NO: 324922 - DNA, 25 bp, Artificial
  Probe
tagcctggctgctctgcctagggga

SEQ ID NO: 324923 - DNA, 25 bp, Artificial
  Probe
tcttcataaatcagggcgagtggga

SEQ ID NO: 324924 - DNA, 25 bp, Artificial
  Probe
agaactgctctctgaccttcaccag

SEQ ID NO: 324925 - DNA, 25 bp, Artificial
  Probe
ttctacgcagtcagcctcttgctgc

SEQ ID NO: 324926 - DNA, 25 bp, Artificial
  Probe
tgaccttcaccagctggctgcatac

SEQ ID NO: 324927 - DNA, 25 bp, Artificial
  Probe
tctcatcatcgtgtcagacacactg

SEQ ID NO: 324928 - DNA, 25 bp, Artificial
  Probe
cattggtgtctactttgtagtgtgc

SEQ ID NO: 324929 - DNA, 25 bp, Artificial
  Probe
agcaggatttacagcgccctgtacc

SEQ ID NO: 324930 - DNA, 25 bp, Artificial
  Probe
ttccctgtggcgaacaccagaagaa

SEQ ID NO: 324931 - DNA, 25 bp, Artificial
  Probe
cgccggcggcctttattctacgcag

SEQ ID NO: 324932 - DNA, 25 bp, Artificial
  Probe
aacatttccctgtggcgaacaccag

SEQ ID NO: 324933 - DNA, 25 bp, Artificial
  Probe
tcagtctttctcatcatcgtgtcag

SEQ ID NO: 324934 - DNA, 25 bp, Artificial
  Probe
tgctgcccagtatcttcctcatggt

SEQ ID NO: 324935 - DNA, 25 bp, Artificial
  Probe
gacagaatagcctggctgctctgcc

SEQ ID NO: 324936 - DNA, 25 bp, Artificial
  Probe
gcagtcagcctcttgctgcccagta

SEQ ID NO: 324937 - DNA, 25 bp, Artificial
  Probe
gggagcagcccatggcccataggcc

SEQ ID NO: 324938 - DNA, 25 bp, Artificial
  Probe
acagctatgcggaaatgaagttcta

SEQ ID NO: 324939 - DNA, 25 bp, Artificial
  Probe
agtgtctttcaagatcacgctcctt

SEQ ID NO: 324940 - DNA, 25 bp, Artificial
  Probe
tcctcatggtcgtggacattgtggg

SEQ ID NO: 324941 - DNA, 25 bp, Artificial
  Probe
agtatcttcctcatggtcgtggaca

SEQ ID NO: 324942 - DNA, 25 bp, Artificial
  Probe
gtgtctactttgtagtgtgcatggc

SEQ ID NO: 324943 - DNA, 25 bp, Artificial
  Probe
ttctacgtggtcatccgccggcggc

SEQ ID NO: 324944 - DNA, 25 bp, Artificial
  Probe
gcatggctaccctgttgcatggtac

SEQ ID NO: 324945 - DNA, 25 bp, Artificial
  Probe
tctggcagaagcatggctaccctgt

SEQ ID NO: 324946 - DNA, 25 bp, Artificial
  Probe
cagaagcatggctaccctgttgcat

SEQ ID NO: 324947 - DNA, 25 bp, Artificial
  Probe
accctgttgcatggtactaattaat

SEQ ID NO: 324948 - DNA, 25 bp, Artificial
  Probe
gaagccccaaagtactattagtatt

SEQ ID NO: 324949 - DNA, 25 bp, Artificial
  Probe
ttcctatcaagagtgaaaagttctg

SEQ ID NO: 324950 - DNA, 25 bp, Artificial
  Probe
ttgctttctcctaaggttagcctgc

SEQ ID NO: 324951 - DNA, 25 bp, Artificial
  Probe
tgaaaagttctgattgctcaacatg

SEQ ID NO: 324952 - DNA, 25 bp, Artificial
  Probe
atagcactatgaagccccaaagtac

SEQ ID NO: 324953 - DNA, 25 bp, Artificial
  Probe
gatcatacatagcactatgaagccc

SEQ ID NO: 324954 - DNA, 25 bp, Artificial
  Probe
attcaaagtttctggctgccgtggt

SEQ ID NO: 324955 - DNA, 25 bp, Artificial
  Probe
agatcattattcaaagtttctggct

SEQ ID NO: 324956 - DNA, 25 bp, Artificial
  Probe
cataattcctgttgaggtagtaaca

SEQ ID NO: 324957 - DNA, 25 bp, Artificial
  Probe
attttcagagtctggcagaagcatg

SEQ ID NO: 324958 - DNA, 25 bp, Artificial
  Probe
ttcctgttgaggtagtaacaattca

SEQ ID NO: 324959 - DNA, 25 bp, Artificial
  Probe
agcctgcctgggatctgtggacgtt

SEQ ID NO: 324960 - DNA, 25 bp, Artificial
  Probe
tgctcaacatgagagagagaaagcc

SEQ ID NO: 324961 - DNA, 25 bp, Artificial
  Probe
ctcctgctttgctttctcctaaggt

SEQ ID NO: 324962 - DNA, 25 bp, Artificial
  Probe
cctgggatctgtggacgttaaagat

SEQ ID NO: 324963 - DNA, 25 bp, Artificial
  Probe
ttgactcacaaaaggcagtaaaacc

SEQ ID NO: 324964 - DNA, 25 bp, Artificial
  Probe
agagagaaagcctcgtctctgtgaa

SEQ ID NO: 324965 - DNA, 25 bp, Artificial
  Probe
ataattttcagagtctggcagaagc

SEQ ID NO: 324966 - DNA, 25 bp, Artificial
  Probe
tcagagtctggcagaagcatggcta

SEQ ID NO: 324967 - DNA, 25 bp, Artificial
  Probe
ccaacagtcgtatcctggtgaatgt

SEQ ID NO: 324968 - DNA, 25 bp, Artificial
  Probe
aagataatccttgactcacaaaagg

SEQ ID NO: 324969 - DNA, 25 bp, Artificial
  Probe
tttttaaccataattcctgttgagg

SEQ ID NO: 324970 - DNA, 25 bp, Artificial
  Probe
cacggaggtcactcatctcacatgg

SEQ ID NO: 324971 - DNA, 25 bp, Artificial
  Probe
actcatctcacatgggagactgctg

SEQ ID NO: 324972 - DNA, 25 bp, Artificial
  Probe
aaagtttctggctgccgtggtttca

SEQ ID NO: 324973 - DNA, 25 bp, Artificial
  Probe
gcaacatggctcctgctttgctttc

SEQ ID NO: 324974 - DNA, 25 bp, Artificial
  Probe
ctaaggttagcctgcctgggatctg

SEQ ID NO: 324975 - DNA, 25 bp, Artificial
  Probe
gaataagcaacatggctcctgcttt

SEQ ID NO: 324976 - DNA, 25 bp, Artificial
  Probe
tacatagcactatgaagccccaaag

SEQ ID NO: 324977 - DNA, 25 bp, Artificial
  Probe
gattcctatcaagagtgaaaagttc

SEQ ID NO: 324978 - DNA, 25 bp, Artificial
  Probe
ctgattgctcaacatgagagagaga

SEQ ID NO: 324979 - DNA, 25 bp, Artificial
  Probe
ctatgaagccccaaagtactattag

SEQ ID NO: 324980 - DNA, 25 bp, Artificial
  Probe
aacatggctcctgctttgctttctc

SEQ ID NO: 324981 - DNA, 25 bp, Artificial
  Probe
ggatttcaaacatggcttacttttt

SEQ ID NO: 324982 - DNA, 25 bp, Artificial
  Probe
ttggatttcaaacatggcttacttt

SEQ ID NO: 324983 - DNA, 25 bp, Artificial
  Probe
ttctggctgccgtggtttcagggaa

SEQ ID NO: 324984 - DNA, 25 bp, Artificial
  Probe
attcctgttgaggtagtaacaattc

SEQ ID NO: 324985 - DNA, 25 bp, Artificial
  Probe
gtctctgtgaaataactcttgattt

SEQ ID NO: 324986 - DNA, 25 bp, Artificial
  Probe
catacatgtcatgcaagagtaagaa

SEQ ID NO: 324987 - DNA, 25 bp, Artificial
  Probe
tctcctaaggttagcctgcctggga

SEQ ID NO: 324988 - DNA, 25 bp, Artificial
  Probe
ggcagtaaaaccatacatgtcatgc

SEQ ID NO: 324989 - DNA, 25 bp, Artificial
  Probe
ggctcctgctttgctttctcctaag

SEQ ID NO: 324990 - DNA, 25 bp, Artificial
  Probe
agaagcaggccttttctagaacaag

SEQ ID NO: 324991 - DNA, 25 bp, Artificial
  Probe
atcagcaaaggttcatctacgactg

SEQ ID NO: 324992 - DNA, 25 bp, Artificial
  Probe
acctgggaccaggtgttcctgtgga

SEQ ID NO: 324993 - DNA, 25 bp, Artificial
  Probe
accaggtgttcctgtggataggagc

SEQ ID NO: 324994 - DNA, 25 bp, Artificial
  Probe
ccggctttttgaatgttctaataag

SEQ ID NO: 324995 - DNA, 25 bp, Artificial
  Probe
gctccagctgaagaaagaagcaggc

SEQ ID NO: 324996 - DNA, 25 bp, Artificial
  Probe
tgcaggccggactccaaatgcccag

SEQ ID NO: 324997 - DNA, 25 bp, Artificial
  Probe
ctataccctgcaatccccaaagtgg

SEQ ID NO: 324998 - DNA, 25 bp, Artificial
  Probe
gagcggaggccaatgccacagagaa

SEQ ID NO: 324999 - DNA, 25 bp, Artificial
  Probe
cacacgctgccctagatacgacaga

SEQ ID NO: 325000 - DNA, 25 bp, Artificial
  Probe
tgatgtgatgctcctggacacctgg

SEQ ID NO: 325001 - DNA, 25 bp, Artificial
  Probe
gttaaagaacgagctgggagatgcc

SEQ ID NO: 325002 - DNA, 25 bp, Artificial
  Probe
accacggacatgaagaacgcaaccc

SEQ ID NO: 325003 - DNA, 25 bp, Artificial
  Probe
tgatcatcaaacagggctttgagcc

SEQ ID NO: 325004 - DNA, 25 bp, Artificial
  Probe
cactacctgtggtatccgaaggggt

SEQ ID NO: 325005 - DNA, 25 bp, Artificial
  Probe
ggggccctctcgactgctcaggagt

SEQ ID NO: 325006 - DNA, 25 bp, Artificial
  Probe
agcggaggccaatgccacagagaag

SEQ ID NO: 325007 - DNA, 25 bp, Artificial
  Probe
aaagtactaccctgtggaggttctg

SEQ ID NO: 325008 - DNA, 25 bp, Artificial
  Probe
ttagctttggtggtcctttagcgaa

SEQ ID NO: 325009 - DNA, 25 bp, Artificial
  Probe
agcagtggaagtctcggcctccgct

SEQ ID NO: 325010 - DNA, 25 bp, Artificial
  Probe
ggacccacatttgctttgaactata

SEQ ID NO: 325011 - DNA, 25 bp, Artificial
  Probe
tctccctgaattctagtgaaagtgg

SEQ ID NO: 325012 - DNA, 25 bp, Artificial
  Probe
agaacaaggcgtgaccacaggagag

SEQ ID NO: 325013 - DNA, 25 bp, Artificial
  Probe
ctgtgtttggcatcaccagagggca

SEQ ID NO: 325014 - DNA, 25 bp, Artificial
  Probe
aaggagaattacctctcggaacgag

SEQ ID NO: 325015 - DNA, 25 bp, Artificial
  Probe
ttcatctacgactgagcccgacaca

SEQ ID NO: 325016 - DNA, 25 bp, Artificial
  Probe
gaccggccggttccttgttactgag

SEQ ID NO: 325017 - DNA, 25 bp, Artificial
  Probe
ttgcattcatccttgcatttctagg

SEQ ID NO: 325018 - DNA, 25 bp, Artificial
  Probe
atggctaaggagctggcagagcttc

SEQ ID NO: 325019 - DNA, 25 bp, Artificial
  Probe
gatgccaactatttgccttttagct

SEQ ID NO: 325020 - DNA, 25 bp, Artificial
  Probe
tttaatgcatcaggacccacatttg

SEQ ID NO: 325021 - DNA, 25 bp, Artificial
  Probe
ctcacatttggagtgaaggaaaatc

SEQ ID NO: 325022 - DNA, 25 bp, Artificial
  Probe
ctcaggagtacctggtaacacaccc

SEQ ID NO: 325023 - DNA, 25 bp, Artificial
  Probe
ctctccctgaattctagtgaaagtg

SEQ ID NO: 325024 - DNA, 25 bp, Artificial
  Probe
tggagtcagcacacgcttcctgcag

SEQ ID NO: 325025 - DNA, 25 bp, Artificial
  Probe
gttgctatacactagatgccaacta

SEQ ID NO: 325026 - DNA, 25 bp, Artificial
  Probe
actctaatgatgtctttctgctttg

SEQ ID NO: 325027 - DNA, 25 bp, Artificial
  Probe
gggtcgtgtattctgtcttttgcat

SEQ ID NO: 325028 - DNA, 25 bp, Artificial
  Probe
agctgcctgaggatgtggaccccac

SEQ ID NO: 325029 - DNA, 25 bp, Artificial
  Probe
ctgcagcaggaaaccctggacatcc

SEQ ID NO: 325030 - DNA, 25 bp, Artificial
  Probe
acaccgatcctgatcatcaaacagg

SEQ ID NO: 325031 - DNA, 25 bp, Artificial
  Probe
ttctgggaccttctgggaggaaaag

SEQ ID NO: 325032 - DNA, 25 bp, Artificial
  Probe
gcctggctggaaacagctccagctg

SEQ ID NO: 325033 - DNA, 25 bp, Artificial
  Probe
cccctacgctaacgacaaaaggctg

SEQ ID NO: 325034 - DNA, 25 bp, Artificial
  Probe
atgtgccacaccatgttcagccttt

SEQ ID NO: 325035 - DNA, 25 bp, Artificial
  Probe
actttcacaggctggttcctggcat

SEQ ID NO: 325036 - DNA, 25 bp, Artificial
  Probe
acatgaccgagatgagcttcctgaa

SEQ ID NO: 325037 - DNA, 25 bp, Artificial
  Probe
gagttaagcacattcctcgatacca

SEQ ID NO: 325038 - DNA, 25 bp, Artificial
  Probe
tggcgctcttcacgaaacccagcag

SEQ ID NO: 325039 - DNA, 25 bp, Artificial
  Probe
aaacccagcagcagcgttgctgtaa

SEQ ID NO: 325040 - DNA, 25 bp, Artificial
  Probe
ccttcgagttaagcacattcctcga

SEQ ID NO: 325041 - DNA, 25 bp, Artificial
  Probe
atgaccgagatgagcttcctgaaca

SEQ ID NO: 325042 - DNA, 25 bp, Artificial
  Probe
atggcgctcttcacgaaacccagca

SEQ ID NO: 325043 - DNA, 25 bp, Artificial
  Probe
tccctacaacatgaccgagatgagc

SEQ ID NO: 325044 - DNA, 25 bp, Artificial
  Probe
agcaaatccctacaacatgaccgag

SEQ ID NO: 325045 - DNA, 25 bp, Artificial
  Probe
agcagcgttgctgtaacggacaaag

SEQ ID NO: 325046 - DNA, 25 bp, Artificial
  Probe
ccagcagcagcgttgctgtaacgga

SEQ ID NO: 325047 - DNA, 25 bp, Artificial
  Probe
cagcagcgttgctgtaacggacaaa

SEQ ID NO: 325048 - DNA, 25 bp, Artificial
  Probe
agcttcctgaacagcgaagtgttgg

SEQ ID NO: 325049 - DNA, 25 bp, Artificial
  Probe
cgagttaagcacattcctcgatacc

SEQ ID NO: 325050 - DNA, 25 bp, Artificial
  Probe
cggcttaagccatggcgctcttcac

SEQ ID NO: 325051 - DNA, 25 bp, Artificial
  Probe
cagcgttgctgtaacggacaaagat

SEQ ID NO: 325052 - DNA, 25 bp, Artificial
  Probe
gataccttcgagttaagcacattcc

SEQ ID NO: 325053 - DNA, 25 bp, Artificial
  Probe
aagataccttcgagttaagcacatt

SEQ ID NO: 325054 - DNA, 25 bp, Artificial
  Probe
cggacaaagataccttcgagttaag

SEQ ID NO: 325055 - DNA, 25 bp, Artificial
  Probe
ttgctgtaacggacaaagatacctt

SEQ ID NO: 325056 - DNA, 25 bp, Artificial
  Probe
cacgaaacccagcagcagcgttgct

SEQ ID NO: 325057 - DNA, 25 bp, Artificial
  Probe
tgagcttcctgaacagcgaagtgtt

SEQ ID NO: 325058 - DNA, 25 bp, Artificial
  Probe
aatccctacaacatgaccgagatga

SEQ ID NO: 325059 - DNA, 25 bp, Artificial
  Probe
agcagcagcgttgctgtaacggaca

SEQ ID NO: 325060 - DNA, 25 bp, Artificial
  Probe
agataccttcgagttaagcacattc

SEQ ID NO: 325061 - DNA, 25 bp, Artificial
  Probe
ttcacgaaacccagcagcagcgttg

SEQ ID NO: 325062 - DNA, 25 bp, Artificial
  Probe
aacatgaccgagatgagcttcctga

SEQ ID NO: 325063 - DNA, 25 bp, Artificial
  Probe
aagccatggcgctcttcacgaaacc

SEQ ID NO: 325064 - DNA, 25 bp, Artificial
  Probe
ttcgagttaagcacattcctcgata

SEQ ID NO: 325065 - DNA, 25 bp, Artificial
  Probe
ccctacaacatgaccgagatgagct

SEQ ID NO: 325066 - DNA, 25 bp, Artificial
  Probe
ccggcttaagccatggcgctcttca

SEQ ID NO: 325067 - DNA, 25 bp, Artificial
  Probe
gcagcgttgctgtaacggacaaaga

SEQ ID NO: 325068 - DNA, 25 bp, Artificial
  Probe
accttcgagttaagcacattcctcg

SEQ ID NO: 325069 - DNA, 25 bp, Artificial
  Probe
gcaaatccctacaacatgaccgaga

SEQ ID NO: 325070 - DNA, 25 bp, Artificial
  Probe
gatgagcttcctgaacagcgaagtg

SEQ ID NO: 325071 - DNA, 25 bp, Artificial
  Probe
caaagataccttcgagttaagcaca

SEQ ID NO: 325072 - DNA, 25 bp, Artificial
  Probe
gagcttcctgaacagcgaagtgttg

SEQ ID NO: 325073 - DNA, 25 bp, Artificial
  Probe
gagatgagcttcctgaacagcgaag

SEQ ID NO: 325074 - DNA, 25 bp, Artificial
  Probe
agcgttgctgtaacggacaaagata

SEQ ID NO: 325075 - DNA, 25 bp, Artificial
  Probe
gacaaagataccttcgagttaagca

SEQ ID NO: 325076 - DNA, 25 bp, Artificial
  Probe
ggacaaagataccttcgagttaagc

SEQ ID NO: 325077 - DNA, 25 bp, Artificial
  Probe
acaacatgaccgagatgagcttcct

SEQ ID NO: 325078 - DNA, 25 bp, Artificial
  Probe
aaatccctacaacatgaccgagatg

SEQ ID NO: 325079 - DNA, 25 bp, Artificial
  Probe
gaccgagatgagcttcctgaacagc

SEQ ID NO: 325080 - DNA, 25 bp, Artificial
  Probe
gttaagcacattcctcgataccagc

SEQ ID NO: 325081 - DNA, 25 bp, Artificial
  Probe
cgaaacccagcagcagcgttgctgt

SEQ ID NO: 325082 - DNA, 25 bp, Artificial
  Probe
taggaggccttagctgggacaccac

SEQ ID NO: 325083 - DNA, 25 bp, Artificial
  Probe
ttgtagactgcactctgaagttaga

SEQ ID NO: 325084 - DNA, 25 bp, Artificial
  Probe
gacgttgtagactgcactctgaagt

SEQ ID NO: 325085 - DNA, 25 bp, Artificial
  Probe
aatttggggacgttgtagactgcac

SEQ ID NO: 325086 - DNA, 25 bp, Artificial
  Probe
tgaaggactacttttccaaatttgg

SEQ ID NO: 325087 - DNA, 25 bp, Artificial
  Probe
gaaccaaggctatggcagctatgga

SEQ ID NO: 325088 - DNA, 25 bp, Artificial
  Probe
actattggaaccaaggctatggcag

SEQ ID NO: 325089 - DNA, 25 bp, Artificial
  Probe
atttggggacgttgtagactgcact

SEQ ID NO: 325090 - DNA, 25 bp, Artificial
  Probe
caccacaaagaaagacctgaaggac

SEQ ID NO: 325091 - DNA, 25 bp, Artificial
  Probe
acacactgaagcagcgacggcacag

SEQ ID NO: 325092 - DNA, 25 bp, Artificial
  Probe
ctatggcagctatggatataacagc

SEQ ID NO: 325093 - DNA, 25 bp, Artificial
  Probe
ttagatcctatcacagggcgatcaa

SEQ ID NO: 325094 - DNA, 25 bp, Artificial
  Probe
ctgaaggactacttttccaaatttg

SEQ ID NO: 325095 - DNA, 25 bp, Artificial
  Probe
ccaaatttggggacgttgtagactg

SEQ ID NO: 325096 - DNA, 25 bp, Artificial
  Probe
agatcctatcacagggcgatcaagg

SEQ ID NO: 325097 - DNA, 25 bp, Artificial
  Probe
cactatgtcggaggagcagttcgga

SEQ ID NO: 325098 - DNA, 25 bp, Artificial
  Probe
gacaccacaaagaaagacctgaagg

SEQ ID NO: 325099 - DNA, 25 bp, Artificial
  Probe
gactgcactctgaagttagatccta

SEQ ID NO: 325100 - DNA, 25 bp, Artificial
  Probe
cgatcaaggggttttggctttgtgc

SEQ ID NO: 325101 - DNA, 25 bp, Artificial
  Probe
tttggggacgttgtagactgcactc

SEQ ID NO: 325102 - DNA, 25 bp, Artificial
  Probe
atcacagggcgatcaaggggttttg

SEQ ID NO: 325103 - DNA, 25 bp, Artificial
  Probe
cggcacagcgggaagaatggaaaat

SEQ ID NO: 325104 - DNA, 25 bp, Artificial
  Probe
caaatttggggacgttgtagactgc

SEQ ID NO: 325105 - DNA, 25 bp, Artificial
  Probe
tgcactctgaagttagatcctatca

SEQ ID NO: 325106 - DNA, 25 bp, Artificial
  Probe
cacgacacactgaagcagcgacggc

SEQ ID NO: 325107 - DNA, 25 bp, Artificial
  Probe
ggacaccacaaagaaagacctgaag

SEQ ID NO: 325108 - DNA, 25 bp, Artificial
  Probe
ttataggaggccttagctgggacac

SEQ ID NO: 325109 - DNA, 25 bp, Artificial
  Probe
gctatggcagctatggatataacag

SEQ ID NO: 325110 - DNA, 25 bp, Artificial
  Probe
accacaaagaaagacctgaaggact

SEQ ID NO: 325111 - DNA, 25 bp, Artificial
  Probe
tagtaactattggaaccaaggctat

SEQ ID NO: 325112 - DNA, 25 bp, Artificial
  Probe
tggaaccaaggctatggcagctatg

SEQ ID NO: 325113 - DNA, 25 bp, Artificial
  Probe
gcagtagcactatgtcggaggagca

SEQ ID NO: 325114 - DNA, 25 bp, Artificial
  Probe
ggaggccttagctgggacaccacaa

SEQ ID NO: 325115 - DNA, 25 bp, Artificial
  Probe
agtaactattggaaccaaggctatg

SEQ ID NO: 325116 - DNA, 25 bp, Artificial
  Probe
gcactctgaagttagatcctatcac

SEQ ID NO: 325117 - DNA, 25 bp, Artificial
  Probe
gtagactgcactctgaagttagatc

SEQ ID NO: 325118 - DNA, 25 bp, Artificial
  Probe
caaggctatggcagctatggatata

SEQ ID NO: 325119 - DNA, 25 bp, Artificial
  Probe
aggctatggcagctatggatataac

SEQ ID NO: 325120 - DNA, 25 bp, Artificial
  Probe
ctattggaaccaaggctatggcagc

SEQ ID NO: 325121 - DNA, 25 bp, Artificial
  Probe
ggagcgaagatcgacgccagtaaga

SEQ ID NO: 325122 - DNA, 25 bp, Artificial
  Probe
tgaagttagatcctatcacagggcg

SEQ ID NO: 325123 - DNA, 25 bp, Artificial
  Probe
cgacacactgaagcagcgacggcac

SEQ ID NO: 325124 - DNA, 25 bp, Artificial
  Probe
gagcgaagatcgacgccagtaagaa

SEQ ID NO: 325125 - DNA, 25 bp, Artificial
  Probe
agttagatcctatcacagggcgatc

SEQ ID NO: 325126 - DNA, 25 bp, Artificial
  Probe
tatcacagggcgatcaaggggtttt

SEQ ID NO: 325127 - DNA, 25 bp, Artificial
  Probe
ccacgacacactgaagcagcgacgg

SEQ ID NO: 325128 - DNA, 25 bp, Artificial
  Probe
ctgttttgctgttcaaagggaaagc

SEQ ID NO: 325129 - DNA, 25 bp, Artificial
  Probe
tatctcaggcctctttgcctgtctc

SEQ ID NO: 325130 - DNA, 25 bp, Artificial
  Probe
ggtttctctgttttgctgttcaaag

SEQ ID NO: 325131 - DNA, 25 bp, Artificial
  Probe
ccaccagcttggttcagcagagggg

SEQ ID NO: 325132 - DNA, 25 bp, Artificial
  Probe
ccaagtgtccatgtaaatatgtaca

SEQ ID NO: 325133 - DNA, 25 bp, Artificial
  Probe
gggtttctctgttttgctgttcaaa

SEQ ID NO: 325134 - DNA, 25 bp, Artificial
  Probe
ggctgaatatctcaggcctctttgc

SEQ ID NO: 325135 - DNA, 25 bp, Artificial
  Probe
agcccgtttttcatgcgatgacttg

SEQ ID NO: 325136 - DNA, 25 bp, Artificial
  Probe
ctctgttttgctgttcaaagggaaa

SEQ ID NO: 325137 - DNA, 25 bp, Artificial
  Probe
ctgagtggttccatgggtttctctg

SEQ ID NO: 325138 - DNA, 25 bp, Artificial
  Probe
gtctccagccaccagcttggttcag

SEQ ID NO: 325139 - DNA, 25 bp, Artificial
  Probe
ctactgagtggttccatgggtttct

SEQ ID NO: 325140 - DNA, 25 bp, Artificial
  Probe
ccagcaggggataccctgagcccgt

SEQ ID NO: 325141 - DNA, 25 bp, Artificial
  Probe
accctgagcccgtttttcatgcgat

SEQ ID NO: 325142 - DNA, 25 bp, Artificial
  Probe
gcctgccactgtgtgaatctggcgg

SEQ ID NO: 325143 - DNA, 25 bp, Artificial
  Probe
cggctgaatatctcaggcctctttg

SEQ ID NO: 325144 - DNA, 25 bp, Artificial
  Probe
gctgaatatctcaggcctctttgcc

SEQ ID NO: 325145 - DNA, 25 bp, Artificial
  Probe
cctactgagtggttccatgggtttc

SEQ ID NO: 325146 - DNA, 25 bp, Artificial
  Probe
ctgccactgtgtgaatctggcggct

SEQ ID NO: 325147 - DNA, 25 bp, Artificial
  Probe
gccaccagcttggttcagcagaggg

SEQ ID NO: 325148 - DNA, 25 bp, Artificial
  Probe
gggtcatcctactgagtggttccat

SEQ ID NO: 325149 - DNA, 25 bp, Artificial
  Probe
gaatctggcggctgaatatctcagg

SEQ ID NO: 325150 - DNA, 25 bp, Artificial
  Probe
agccaccagcttggttcagcagagg

SEQ ID NO: 325151 - DNA, 25 bp, Artificial
  Probe
tttctctgttttgctgttcaaaggg

SEQ ID NO: 325152 - DNA, 25 bp, Artificial
  Probe
tggcggctgaatatctcaggcctct

SEQ ID NO: 325153 - DNA, 25 bp, Artificial
  Probe
tgagtggttccatgggtttctctgt

SEQ ID NO: 325154 - DNA, 25 bp, Artificial
  Probe
atctggcggctgaatatctcaggcc

SEQ ID NO: 325155 - DNA, 25 bp, Artificial
  Probe
cactgtgtgaatctggcggctgaat

SEQ ID NO: 325156 - DNA, 25 bp, Artificial
  Probe
tccagccaccagcttggttcagcag

SEQ ID NO: 325157 - DNA, 25 bp, Artificial
  Probe
actgtgtgaatctggcggctgaata

SEQ ID NO: 325158 - DNA, 25 bp, Artificial
  Probe
atatctcaggcctctttgcctgtct

SEQ ID NO: 325159 - DNA, 25 bp, Artificial
  Probe
tctctgttttgctgttcaaagggaa

SEQ ID NO: 325160 - DNA, 25 bp, Artificial
  Probe
catcctactgagtggttccatgggt

SEQ ID NO: 325161 - DNA, 25 bp, Artificial
  Probe
tcttgcctgccactgtgtgaatctg

SEQ ID NO: 325162 - DNA, 25 bp, Artificial
  Probe
taaatatgtacatttctcaggccag

SEQ ID NO: 325163 - DNA, 25 bp, Artificial
  Probe
tgccactgtgtgaatctggcggctg

SEQ ID NO: 325164 - DNA, 25 bp, Artificial
  Probe
cctgagcccgtttttcatgcgatga

SEQ ID NO: 325165 - DNA, 25 bp, Artificial
  Probe
tcatcctactgagtggttccatggg

SEQ ID NO: 325166 - DNA, 25 bp, Artificial
  Probe
actgagtggttccatgggtttctct

SEQ ID NO: 325167 - DNA, 25 bp, Artificial
  Probe
ggttccatgggtttctctgttttgc

SEQ ID NO: 325168 - DNA, 25 bp, Artificial
  Probe
caagtgtccatgtaaatatgtacat

SEQ ID NO: 325169 - DNA, 25 bp, Artificial
  Probe
ttgcctgccactgtgtgaatctggc

SEQ ID NO: 325170 - DNA, 25 bp, Artificial
  Probe
gccactgtgtgaatctggcggctga

SEQ ID NO: 325171 - DNA, 25 bp, Artificial
  Probe
tgagcccgtttttcatgcgatgact

SEQ ID NO: 325172 - DNA, 25 bp, Artificial
  Probe
ggagggtcatcctactgagtggttc

SEQ ID NO: 325173 - DNA, 25 bp, Artificial
  Probe
ccctgagcccgtttttcatgcgatg

SEQ ID NO: 325174 - DNA, 25 bp, Artificial
  Probe
tttggtggcgtattggatgcccgcc

SEQ ID NO: 325175 - DNA, 25 bp, Artificial
  Probe
ttagtcaactcctagtgtctaagca

SEQ ID NO: 325176 - DNA, 25 bp, Artificial
  Probe
acatagttcattgtgcctgtctgtg

SEQ ID NO: 325177 - DNA, 25 bp, Artificial
  Probe
tccggcaagttttggtggcgtattg

SEQ ID NO: 325178 - DNA, 25 bp, Artificial
  Probe
tgtgcctgtctgtgcccatcacttc

SEQ ID NO: 325179 - DNA, 25 bp, Artificial
  Probe
gaaaggctacaggattcgcccttct

SEQ ID NO: 325180 - DNA, 25 bp, Artificial
  Probe
agagctcttcctgaaagggaaaggc

SEQ ID NO: 325181 - DNA, 25 bp, Artificial
  Probe
tttgctgctcccagggaaaagatcc

SEQ ID NO: 325182 - DNA, 25 bp, Artificial
  Probe
ttactgtttacactgtgtacatagt

SEQ ID NO: 325183 - DNA, 25 bp, Artificial
  Probe
gaaactacttagtcaactcctagtg

SEQ ID NO: 325184 - DNA, 25 bp, Artificial
  Probe
gttcattgtgcctgtctgtgcccat

SEQ ID NO: 325185 - DNA, 25 bp, Artificial
  Probe
ctgctcccagggaaaagatccgtgg

SEQ ID NO: 325186 - DNA, 25 bp, Artificial
  Probe
gccttactgtttacactgtgtacat

SEQ ID NO: 325187 - DNA, 25 bp, Artificial
  Probe
ggacagtttctactccttactgcca

SEQ ID NO: 325188 - DNA, 25 bp, Artificial
  Probe
tgtttacactgtgtacatagttcat

SEQ ID NO: 325189 - DNA, 25 bp, Artificial
  Probe
caaattcttgttttgctgctcccag

SEQ ID NO: 325190 - DNA, 25 bp, Artificial
  Probe
cagagctcttcctgaaagggaaagg

SEQ ID NO: 325191 - DNA, 25 bp, Artificial
  Probe
ttctactccttactgccacctggag

SEQ ID NO: 325192 - DNA, 25 bp, Artificial
  Probe
ctgccatccggcaagttttggtggc

SEQ ID NO: 325193 - DNA, 25 bp, Artificial
  Probe
tcccagggaaaagatccgtggacag

SEQ ID NO: 325194 - DNA, 25 bp, Artificial
  Probe
ccatcacttctcactgggattccag

SEQ ID NO: 325195 - DNA, 25 bp, Artificial
  Probe
aagatccgtggacagtttctactcc

SEQ ID NO: 325196 - DNA, 25 bp, Artificial
  Probe
tcattgtgcctgtctgtgcccatca

SEQ ID NO: 325197 - DNA, 25 bp, Artificial
  Probe
ggaaaagatccgtggacagtttcta

SEQ ID NO: 325198 - DNA, 25 bp, Artificial
  Probe
gtggcgtattggatgcccgccgaac

SEQ ID NO: 325199 - DNA, 25 bp, Artificial
  Probe
gtttctactccttactgccacctgg

SEQ ID NO: 325200 - DNA, 25 bp, Artificial
  Probe
tccagagctcttcctgaaagggaaa

SEQ ID NO: 325201 - DNA, 25 bp, Artificial
  Probe
ggatgcccgccgaacaaatctgttg

SEQ ID NO: 325202 - DNA, 25 bp, Artificial
  Probe
gtacaaattcttgttttgctgctcc

SEQ ID NO: 325203 - DNA, 25 bp, Artificial
  Probe
aggctacaggattcgcccttctcat

SEQ ID NO: 325204 - DNA, 25 bp, Artificial
  Probe
ttttggtggcgtattggatgcccgc

SEQ ID NO: 325205 - DNA, 25 bp, Artificial
  Probe
tgtctgtgcccatcacttctcactg

SEQ ID NO: 325206 - DNA, 25 bp, Artificial
  Probe
gtcaactcctagtgtctaagcagaa

SEQ ID NO: 325207 - DNA, 25 bp, Artificial
  Probe
gatgcccgccgaacaaatctgttgc

SEQ ID NO: 325208 - DNA, 25 bp, Artificial
  Probe
ttgttttgctgctcccagggaaaag

SEQ ID NO: 325209 - DNA, 25 bp, Artificial
  Probe
aggtacaaattcttgttttgctgct

SEQ ID NO: 325210 - DNA, 25 bp, Artificial
  Probe
ccacctggaggaagtcaatggacct

SEQ ID NO: 325211 - DNA, 25 bp, Artificial
  Probe
cacctggaggaagtcaatggaccta

SEQ ID NO: 325212 - DNA, 25 bp, Artificial
  Probe
tctgtgcccatcacttctcactggg

SEQ ID NO: 325213 - DNA, 25 bp, Artificial
  Probe
gggccttactgtttacactgtgtac

SEQ ID NO: 325214 - DNA, 25 bp, Artificial
  Probe
tgcccatcacttctcactgggattc

SEQ ID NO: 325215 - DNA, 25 bp, Artificial
  Probe
gctcttcctgaaagggaaaggctac

SEQ ID NO: 325216 - DNA, 25 bp, Artificial
  Probe
ctccttactgccacctggaggaagt

SEQ ID NO: 325217 - DNA, 25 bp, Artificial
  Probe
tgctcccagggaaaagatccgtgga

SEQ ID NO: 325218 - DNA, 25 bp, Artificial
  Probe
ccgaacaaatctgttgctcttccgc

SEQ ID NO: 325219 - DNA, 25 bp, Artificial
  Probe
tggcgtattggatgcccgccgaaca

SEQ ID NO: 325220 - DNA, 25 bp, Artificial
  Probe
cattaacttctctggcgaagctgat

SEQ ID NO: 325221 - DNA, 25 bp, Artificial
  Probe
atgaaaccatccaagtggattgctt

SEQ ID NO: 325222 - DNA, 25 bp, Artificial
  Probe
tgtggatcaacagaggccaaacata

SEQ ID NO: 325223 - DNA, 25 bp, Artificial
  Probe
caccggtgtcaagaaggagagtcaa

SEQ ID NO: 325224 - DNA, 25 bp, Artificial
  Probe
gatggttctcagacccgacattaac

SEQ ID NO: 325225 - DNA, 25 bp, Artificial
  Probe
ccctgaagtgcttgatgaaaccatc

SEQ ID NO: 325226 - DNA, 25 bp, Artificial
  Probe
gccaccattctatgatgttgttccc

SEQ ID NO: 325227 - DNA, 25 bp, Artificial
  Probe
aacatacctaacagatggttctcag

SEQ ID NO: 325228 - DNA, 25 bp, Artificial
  Probe
tgcttgatgaaaccatccaagtgga

SEQ ID NO: 325229 - DNA, 25 bp, Artificial
  Probe
acttctctggcgaagctgatgaaag

SEQ ID NO: 325230 - DNA, 25 bp, Artificial
  Probe
tctggcgaagctgatgaaagaatgc

SEQ ID NO: 325231 - DNA, 25 bp, Artificial
  Probe
agaggccaaacatacctaacagatg

SEQ ID NO: 325232 - DNA, 25 bp, Artificial
  Probe
aaccatccaagtggattgctttgat

SEQ ID NO: 325233 - DNA, 25 bp, Artificial
  Probe
agctctacgtatcaaaaagactttg

SEQ ID NO: 325234 - DNA, 25 bp, Artificial
  Probe
gccagactcacagctctacgtatca

SEQ ID NO: 325235 - DNA, 25 bp, Artificial
  Probe
gagagtcaatgctgtcattgtccag

SEQ ID NO: 325236 - DNA, 25 bp, Artificial
  Probe
tgtcattgtccagctgggacctaat

SEQ ID NO: 325237 - DNA, 25 bp, Artificial
  Probe
cattgtcaccggtgtcaagaaggag

SEQ ID NO: 325238 - DNA, 25 bp, Artificial
  Probe
gttgacattgtcaccggtgtcaaga

SEQ ID NO: 325239 - DNA, 25 bp, Artificial
  Probe
gattacaagccaccattctatgatg

SEQ ID NO: 325240 - DNA, 25 bp, Artificial
  Probe
ttgtctgtgtggatcaacagaggcc

SEQ ID NO: 325241 - DNA, 25 bp, Artificial
  Probe
gggaccaagcgctacatggcccctg

SEQ ID NO: 325242 - DNA, 25 bp, Artificial
  Probe
ttgtcagaacagaatccatctgtcc

SEQ ID NO: 325243 - DNA, 25 bp, Artificial
  Probe
gatgttgttcccaatgacccaagtt

SEQ ID NO: 325244 - DNA, 25 bp, Artificial
  Probe
tctgtgtggatcaacagaggccaaa

SEQ ID NO: 325245 - DNA, 25 bp, Artificial
  Probe
ggcctttggcctcgttctgtgggaa

SEQ ID NO: 325246 - DNA, 25 bp, Artificial
  Probe
aaactgactgttgacattgtcaccg

SEQ ID NO: 325247 - DNA, 25 bp, Artificial
  Probe
ttaaaaactgactgttgacattgtc

SEQ ID NO: 325248 - DNA, 25 bp, Artificial
  Probe
ctttggcctcgttctgtgggaagtg

SEQ ID NO: 325249 - DNA, 25 bp, Artificial
  Probe
gaccaagcgctacatggcccctgaa

SEQ ID NO: 325250 - DNA, 25 bp, Artificial
  Probe
gaaagaatgctggtaccagaaccca

SEQ ID NO: 325251 - DNA, 25 bp, Artificial
  Probe
atcagcttgatgtgggaaacaaccc

SEQ ID NO: 325252 - DNA, 25 bp, Artificial
  Probe
aacagaggccaaacatacctaacag

SEQ ID NO: 325253 - DNA, 25 bp, Artificial
  Probe
gccaaacatacctaacagatggttc

SEQ ID NO: 325254 - DNA, 25 bp, Artificial
  Probe
tgaaagaatgctggtaccagaaccc

SEQ ID NO: 325255 - DNA, 25 bp, Artificial
  Probe
ctatgatgttgttcccaatgaccca

SEQ ID NO: 325256 - DNA, 25 bp, Artificial
  Probe
ctaatgctggcctgactggttgtca

SEQ ID NO: 325257 - DNA, 25 bp, Artificial
  Probe
tcagacccgacattaacttctctgg

SEQ ID NO: 325258 - DNA, 25 bp, Artificial
  Probe
gggacctaatgctggcctgactggt

SEQ ID NO: 325259 - DNA, 25 bp, Artificial
  Probe
tatttgggcctttggcctcgttctg

SEQ ID NO: 325260 - DNA, 25 bp, Artificial
  Probe
tccagctgggacctaatgctggcct

SEQ ID NO: 325261 - DNA, 25 bp, Artificial
  Probe
ccaagtggattgctttgattcttat

SEQ ID NO: 325262 - DNA, 25 bp, Artificial
  Probe
gatatttgggcctttggcctcgttc

SEQ ID NO: 325263 - DNA, 25 bp, Artificial
  Probe
ccattctatgatgttgttcccaatg

SEQ ID NO: 325264 - DNA, 25 bp, Artificial
  Probe
gctctacgtatcaaaaagactttga

SEQ ID NO: 325265 - DNA, 25 bp, Artificial
  Probe
tgactggttgtcagaacagaatcca

SEQ ID NO: 325266 - DNA, 25 bp, Artificial
  Probe
aggctgccatgctccctcatggatc

SEQ ID NO: 325267 - DNA, 25 bp, Artificial
  Probe
ctgccctcagggatgatacctggaa

SEQ ID NO: 325268 - DNA, 25 bp, Artificial
  Probe
acccctcagggacattaaggacatt

SEQ ID NO: 325269 - DNA, 25 bp, Artificial
  Probe
tgcaggtctcagaatggagtccgtc

SEQ ID NO: 325270 - DNA, 25 bp, Artificial
  Probe
ctgcaggtctcagaatggagtccgt

SEQ ID NO: 325271 - DNA, 25 bp, Artificial
  Probe
cgtagcattctggacgaggcacccc

SEQ ID NO: 325272 - DNA, 25 bp, Artificial
  Probe
cagaaccaaagctttcaggctgcca

SEQ ID NO: 325273 - DNA, 25 bp, Artificial
  Probe
ctgcaaacctggacagtggtgtccc

SEQ ID NO: 325274 - DNA, 25 bp, Artificial
  Probe
ctcccagaaccaaagctttcaggct

SEQ ID NO: 325275 - DNA, 25 bp, Artificial
  Probe
gatgatacctggaagagggtcctag

SEQ ID NO: 325276 - DNA, 25 bp, Artificial
  Probe
cagatccgccaagcagacactctgg

SEQ ID NO: 325277 - DNA, 25 bp, Artificial
  Probe
ggatgatacctggaagagggtccta

SEQ ID NO: 325278 - DNA, 25 bp, Artificial
  Probe
tggacagtggtgtcccgggccacta

SEQ ID NO: 325279 - DNA, 25 bp, Artificial
  Probe
caaacctggacagtggtgtcccggg

SEQ ID NO: 325280 - DNA, 25 bp, Artificial
  Probe
agcaagtacgtagcattctggacga

SEQ ID NO: 325281 - DNA, 25 bp, Artificial
  Probe
gtcagctgcaaacctggacagtggt

SEQ ID NO: 325282 - DNA, 25 bp, Artificial
  Probe
aagctttcaggctgccatgctccct

SEQ ID NO: 325283 - DNA, 25 bp, Artificial
  Probe
acactctggagcaagtacgtagcat

SEQ ID NO: 325284 - DNA, 25 bp, Artificial
  Probe
tcctcccagaaccaaagctttcagg

SEQ ID NO: 325285 - DNA, 25 bp, Artificial
  Probe
aggtctcagaatggagtccgtcagc

SEQ ID NO: 325286 - DNA, 25 bp, Artificial
  Probe
ctctggagcaagtacgtagcattct

SEQ ID NO: 325287 - DNA, 25 bp, Artificial
  Probe
catgctccctcatggatccagttct

SEQ ID NO: 325288 - DNA, 25 bp, Artificial
  Probe
ccgccaagcagacactctggagcaa

SEQ ID NO: 325289 - DNA, 25 bp, Artificial
  Probe
agcagatccgccaagcagacactct

SEQ ID NO: 325290 - DNA, 25 bp, Artificial
  Probe
tggagtccgtcagctgcaaacctgg

SEQ ID NO: 325291 - DNA, 25 bp, Artificial
  Probe
tgccatgctccctcatggatccagt

SEQ ID NO: 325292 - DNA, 25 bp, Artificial
  Probe
tgcgcctggagcagatccgccaagc

SEQ ID NO: 325293 - DNA, 25 bp, Artificial
  Probe
accaaagctttcaggctgccatgct

SEQ ID NO: 325294 - DNA, 25 bp, Artificial
  Probe
gatacctggaagagggtcctagcct

SEQ ID NO: 325295 - DNA, 25 bp, Artificial
  Probe
ctcagaatggagtccgtcagctgca

SEQ ID NO: 325296 - DNA, 25 bp, Artificial
  Probe
atgctccctcatggatccagttctc

SEQ ID NO: 325297 - DNA, 25 bp, Artificial
  Probe
cccctcagggacattaaggacatta

SEQ ID NO: 325298 - DNA, 25 bp, Artificial
  Probe
gccctcagggatgatacctggaaga

SEQ ID NO: 325299 - DNA, 25 bp, Artificial
  Probe
gccatgctccctcatggatccagtt

SEQ ID NO: 325300 - DNA, 25 bp, Artificial
  Probe
tgatacctggaagagggtcctagcc

SEQ ID NO: 325301 - DNA, 25 bp, Artificial
  Probe
tttcaggctgccatgctccctcatg

SEQ ID NO: 325302 - DNA, 25 bp, Artificial
  Probe
gactgcaggtctcagaatggagtcc

SEQ ID NO: 325303 - DNA, 25 bp, Artificial
  Probe
agctgcaaacctggacagtggtgtc

SEQ ID NO: 325304 - DNA, 25 bp, Artificial
  Probe
agacactctggagcaagtacgtagc

SEQ ID NO: 325305 - DNA, 25 bp, Artificial
  Probe
gtagcattctggacgaggcacccct

SEQ ID NO: 325306 - DNA, 25 bp, Artificial
  Probe
gcctggagcagatccgccaagcaga

SEQ ID NO: 325307 - DNA, 25 bp, Artificial
  Probe
acctggacagtggtgtcccgggcca

SEQ ID NO: 325308 - DNA, 25 bp, Artificial
  Probe
ggtctcagaatggagtccgtcagct

SEQ ID NO: 325309 - DNA, 25 bp, Artificial
  Probe
cctcagggatgatacctggaagagg

SEQ ID NO: 325310 - DNA, 25 bp, Artificial
  Probe
gaatggagtccgtcagctgcaaacc

SEQ ID NO: 325311 - DNA, 25 bp, Artificial
  Probe
gccaagcagacactctggagcaagt

SEQ ID NO: 325312 - DNA, 25 bp, Artificial
  Probe
tttacaattatcacgggcactgtgt

SEQ ID NO: 325313 - DNA, 25 bp, Artificial
  Probe
tatgctcatttgagggcccattttt

SEQ ID NO: 325314 - DNA, 25 bp, Artificial
  Probe
aatagtcaacgttcaacatcacgtg

SEQ ID NO: 325315 - DNA, 25 bp, Artificial
  Probe
ctctgcccctgctaacacgaaggtg

SEQ ID NO: 325316 - DNA, 25 bp, Artificial
  Probe
aggaattggcctagggctttggatc

SEQ ID NO: 325317 - DNA, 25 bp, Artificial
  Probe
ctaacacgaaggtgcccgttgagtg

SEQ ID NO: 325318 - DNA, 25 bp, Artificial
  Probe
cattactggacttgtgtaaactttg

SEQ ID NO: 325319 - DNA, 25 bp, Artificial
  Probe
tctgcccctgctaacacgaaggtgc

SEQ ID NO: 325320 - DNA, 25 bp, Artificial
  Probe
tgccgtgtcacgtcccatactgagt

SEQ ID NO: 325321 - DNA, 25 bp, Artificial
  Probe
ctgtgaacattactggacttgtgta

SEQ ID NO: 325322 - DNA, 25 bp, Artificial
  Probe
gccagtgttggcttcatgcgctgta

SEQ ID NO: 325323 - DNA, 25 bp, Artificial
  Probe
tctccacagagcagggcgccgaaca

SEQ ID NO: 325324 - DNA, 25 bp, Artificial
  Probe
ctcagctgggtgtctgactctgggt

SEQ ID NO: 325325 - DNA, 25 bp, Artificial
  Probe
ccttctgaggccagctatgttttga

SEQ ID NO: 325326 - DNA, 25 bp, Artificial
  Probe
caacctgattagtgagtgtgcagat

SEQ ID NO: 325327 - DNA, 25 bp, Artificial
  Probe
gtttctgtctcatggaacgagctct

SEQ ID NO: 325328 - DNA, 25 bp, Artificial
  Probe
ggcccatttttacacattggcactt

SEQ ID NO: 325329 - DNA, 25 bp, Artificial
  Probe
gctcttgcttgacagaccttaaatc

SEQ ID NO: 325330 - DNA, 25 bp, Artificial
  Probe
ggcttcatgcgctgtagatggctca

SEQ ID NO: 325331 - DNA, 25 bp, Artificial
  Probe
acccgtgtctccacagagcagggcg

SEQ ID NO: 325332 - DNA, 25 bp, Artificial
  Probe
agcagggcgccgaacagacaccagt

SEQ ID NO: 325333 - DNA, 25 bp, Artificial
  Probe
ataggggccagtgttggcttcatgc

SEQ ID NO: 325334 - DNA, 25 bp, Artificial
  Probe
tgactcagctggacccttctgcgct

SEQ ID NO: 325335 - DNA, 25 bp, Artificial
  Probe
attatcacgggcactgtgtatatct

SEQ ID NO: 325336 - DNA, 25 bp, Artificial
  Probe
cagataggggccagtgttggcttca

SEQ ID NO: 325337 - DNA, 25 bp, Artificial
  Probe
tttctcaggcctttgcctaaatccg

SEQ ID NO: 325338 - DNA, 25 bp, Artificial
  Probe
ctagttgccaagtcaacatttgcac

SEQ ID NO: 325339 - DNA, 25 bp, Artificial
  Probe
ctccgccttctgaggccagctatgt

SEQ ID NO: 325340 - DNA, 25 bp, Artificial
  Probe
cactgtgtatatcttggactgatgt

SEQ ID NO: 325341 - DNA, 25 bp, Artificial
  Probe
atctgtctagagaggagataacact

SEQ ID NO: 325342 - DNA, 25 bp, Artificial
  Probe
tgatgctgtgaacattactggactt

SEQ ID NO: 325343 - DNA, 25 bp, Artificial
  Probe
ggagataacactcatatttcctttg

SEQ ID NO: 325344 - DNA, 25 bp, Artificial
  Probe
tgagcctttctcaggcctttgccta

SEQ ID NO: 325345 - DNA, 25 bp, Artificial
  Probe
ctagggctttggatctgtctagaga

SEQ ID NO: 325346 - DNA, 25 bp, Artificial
  Probe
ggaaggattatcacacctctgcccc

SEQ ID NO: 325347 - DNA, 25 bp, Artificial
  Probe
ccctgctaacacgaaggtgcccgtt

SEQ ID NO: 325348 - DNA, 25 bp, Artificial
  Probe
ttggcctagggctttggatctgtct

SEQ ID NO: 325349 - DNA, 25 bp, Artificial
  Probe
tgcctgtcatctcaggtgtccccta

SEQ ID NO: 325350 - DNA, 25 bp, Artificial
  Probe
gtgttggcttcatgcgctgtagatg

SEQ ID NO: 325351 - DNA, 25 bp, Artificial
  Probe
aagcccttgcctgtcatctcaggtg

SEQ ID NO: 325352 - DNA, 25 bp, Artificial
  Probe
ttgcctgtcatctcaggtgtcccct

SEQ ID NO: 325353 - DNA, 25 bp, Artificial
  Probe
cgaagcctcagctgggtgtctgact

SEQ ID NO: 325354 - DNA, 25 bp, Artificial
  Probe
aaggattatcacacctctgcccctg

SEQ ID NO: 325355 - DNA, 25 bp, Artificial
  Probe
gatctgtctagagaggagataacac

SEQ ID NO: 325356 - DNA, 25 bp, Artificial
  Probe
atttgagggcccatttttacacatt

SEQ ID NO: 325357 - DNA, 25 bp, Artificial
  Probe
tacaggaattctttatgctcatttg

SEQ ID NO: 325358 - DNA, 25 bp, Artificial
  Probe
cggcttagcattctgttgtttggtt

SEQ ID NO: 325359 - DNA, 25 bp, Artificial
  Probe
cctgtcatgggctggaactgcctga

SEQ ID NO: 325360 - DNA, 25 bp, Artificial
  Probe
gtgtagtggcacctcatgtggccgt

SEQ ID NO: 325361 - DNA, 25 bp, Artificial
  Probe
gtggtccttatcatcttccacagcc

SEQ ID NO: 325362 - DNA, 25 bp, Artificial
  Probe
gaagacccgaaggtcaatttaagcg

SEQ ID NO: 325363 - DNA, 25 bp, Artificial
  Probe
tgactacccggaaagggatctccac

SEQ ID NO: 325364 - DNA, 25 bp, Artificial
  Probe
aggcagcctggctcttgcagacctg

SEQ ID NO: 325365 - DNA, 25 bp, Artificial
  Probe
cccacaggacgctggctctactaag

SEQ ID NO: 325366 - DNA, 25 bp, Artificial
  Probe
aggacgctggctctactaagcgccc

SEQ ID NO: 325367 - DNA, 25 bp, Artificial
  Probe
tctacatccagatttgtaagattgt

SEQ ID NO: 325368 - DNA, 25 bp, Artificial
  Probe
acttcctggctacgtcgcactacgt

SEQ ID NO: 325369 - DNA, 25 bp, Artificial
  Probe
ctgctgataggcagcctggctcttg

SEQ ID NO: 325370 - DNA, 25 bp, Artificial
  Probe
cactccgagaggaccgtcaccttta

SEQ ID NO: 325371 - DNA, 25 bp, Artificial
  Probe
cagagagcacgctctcccagcgatg

SEQ ID NO: 325372 - DNA, 25 bp, Artificial
  Probe
tgggtgcatccctaacacgctgtcc

SEQ ID NO: 325373 - DNA, 25 bp, Artificial
  Probe
ctgcgagcacccatgttcctgctga

SEQ ID NO: 325374 - DNA, 25 bp, Artificial
  Probe
gagtccacctgcagcgtggtcagac

SEQ ID NO: 325375 - DNA, 25 bp, Artificial
  Probe
agagatccagaaagccctctgcctc

SEQ ID NO: 325376 - DNA, 25 bp, Artificial
  Probe
ctgcctggggctgctgcctgtcatg

SEQ ID NO: 325377 - DNA, 25 bp, Artificial
  Probe
cctggctctcatcctggggaccttt

SEQ ID NO: 325378 - DNA, 25 bp, Artificial
  Probe
aaattctttgcactggatctcacag

SEQ ID NO: 325379 - DNA, 25 bp, Artificial
  Probe
actggatctcacaggcagaagcaac

SEQ ID NO: 325380 - DNA, 25 bp, Artificial
  Probe
ctggaactgcctgagggacgagtcc

SEQ ID NO: 325381 - DNA, 25 bp, Artificial
  Probe
tggcacctcatgtggccgtaaaatt

SEQ ID NO: 325382 - DNA, 25 bp, Artificial
  Probe
cctcccagggctctgttgtggagtc

SEQ ID NO: 325383 - DNA, 25 bp, Artificial
  Probe
gttcgcactgatgctccaactctac

SEQ ID NO: 325384 - DNA, 25 bp, Artificial
  Probe
acaagtctcaggatttttaacctag

SEQ ID NO: 325385 - DNA, 25 bp, Artificial
  Probe
tctgggactcatcatcaattttgtt

SEQ ID NO: 325386 - DNA, 25 bp, Artificial
  Probe
atcctggggacctttgccgcctgct

SEQ ID NO: 325387 - DNA, 25 bp, Artificial
  Probe
tccggagaacatctcagccgctgtc

SEQ ID NO: 325388 - DNA, 25 bp, Artificial
  Probe
gccctctgcctcatctgctgtgggt

SEQ ID NO: 325389 - DNA, 25 bp, Artificial
  Probe
atttaagcgggctgcctcgggactg

SEQ ID NO: 325390 - DNA, 25 bp, Artificial
  Probe
gtcatatatgctttcagaaaccaag

SEQ ID NO: 325391 - DNA, 25 bp, Artificial
  Probe
tctttccgttgaagaggacaggggt

SEQ ID NO: 325392 - DNA, 25 bp, Artificial
  Probe
cattaaaaagcctgtctttccgttg

SEQ ID NO: 325393 - DNA, 25 bp, Artificial
  Probe
tgtattacgccctgacgtaccactc

SEQ ID NO: 325394 - DNA, 25 bp, Artificial
  Probe
tgtttttgcctacctgcttcagtca

SEQ ID NO: 325395 - DNA, 25 bp, Artificial
  Probe
cttcctcttcatgttcgcactgatg

SEQ ID NO: 325396 - DNA, 25 bp, Artificial
  Probe
ctacatccagatttgtaagattgtg

SEQ ID NO: 325397 - DNA, 25 bp, Artificial
  Probe
atcagatagccctgcagcaccactt

SEQ ID NO: 325398 - DNA, 25 bp, Artificial
  Probe
cagcgatgtgtagcagcgttctccc

SEQ ID NO: 325399 - DNA, 25 bp, Artificial
  Probe
tctcggcttagcattctgttgtttg

SEQ ID NO: 325400 - DNA, 25 bp, Artificial
  Probe
gctggatgccttttaccctctattc

SEQ ID NO: 325401 - DNA, 25 bp, Artificial
  Probe
tgaggcacgcccatcagatagccct

SEQ ID NO: 325402 - DNA, 25 bp, Artificial
  Probe
attgtcgcctctttctctgcctctg

SEQ ID NO: 325403 - DNA, 25 bp, Artificial
  Probe
gggaacttccacctgcctggggctg

SEQ ID NO: 325404 - DNA, 25 bp, Artificial
  Probe
aaccaacggtgattatcagtcagga

SEQ ID NO: 325405 - DNA, 25 bp, Artificial
  Probe
acagagatcagtttccagctgggag

SEQ ID NO: 325406 - DNA, 25 bp, Artificial
  Probe
tatcagtcaggaaggcggcaaagtg

SEQ ID NO: 325407 - DNA, 25 bp, Artificial
  Probe
aacggtgattatcagtcaggaaggc

SEQ ID NO: 325408 - DNA, 25 bp, Artificial
  Probe
aaatgtgaccaaaccaacggtgatt

SEQ ID NO: 325409 - DNA, 25 bp, Artificial
  Probe
tgattatcagtcaggaaggcggcaa

SEQ ID NO: 325410 - DNA, 25 bp, Artificial
  Probe
gagatcagtttccagctgggagaag

SEQ ID NO: 325411 - DNA, 25 bp, Artificial
  Probe
cacattcaagaacacagagatcagt

SEQ ID NO: 325412 - DNA, 25 bp, Artificial
  Probe
gtgattatcagtcaggaaggcggca

SEQ ID NO: 325413 - DNA, 25 bp, Artificial
  Probe
acggtgattatcagtcaggaaggcg

SEQ ID NO: 325414 - DNA, 25 bp, Artificial
  Probe
ggacacaatgcacattcaagaacac

SEQ ID NO: 325415 - DNA, 25 bp, Artificial
  Probe
caatgcacattcaagaacacagaga

SEQ ID NO: 325416 - DNA, 25 bp, Artificial
  Probe
agagatcagtttccagctgggagaa

SEQ ID NO: 325417 - DNA, 25 bp, Artificial
  Probe
caaaccaacggtgattatcagtcag

SEQ ID NO: 325418 - DNA, 25 bp, Artificial
  Probe
ttatcagtcaggaaggcggcaaagt

SEQ ID NO: 325419 - DNA, 25 bp, Artificial
  Probe
tgatccggacacaatgcacattcaa

SEQ ID NO: 325420 - DNA, 25 bp, Artificial
  Probe
gtgatccggacacaatgcacattca

SEQ ID NO: 325421 - DNA, 25 bp, Artificial
  Probe
ccaaaccaacggtgattatcagtca

SEQ ID NO: 325422 - DNA, 25 bp, Artificial
  Probe
caagaacacagagatcagtttccag

SEQ ID NO: 325423 - DNA, 25 bp, Artificial
  Probe
cggcaaagtggtgatccggacacaa

SEQ ID NO: 325424 - DNA, 25 bp, Artificial
  Probe
gcacattcaagaacacagagatcag

SEQ ID NO: 325425 - DNA, 25 bp, Artificial
  Probe
tcaagaacacagagatcagtttcca

SEQ ID NO: 325426 - DNA, 25 bp, Artificial
  Probe
aacacagagatcagtttccagctgg

SEQ ID NO: 325427 - DNA, 25 bp, Artificial
  Probe
accaacggtgattatcagtcaggaa

SEQ ID NO: 325428 - DNA, 25 bp, Artificial
  Probe
tccggacacaatgcacattcaagaa

SEQ ID NO: 325429 - DNA, 25 bp, Artificial
  Probe
attatcagtcaggaaggcggcaaag

SEQ ID NO: 325430 - DNA, 25 bp, Artificial
  Probe
tcagtttccagctgggagaagagtt

SEQ ID NO: 325431 - DNA, 25 bp, Artificial
  Probe
aaaccaacggtgattatcagtcagg

SEQ ID NO: 325432 - DNA, 25 bp, Artificial
  Probe
gaaatgtgaccaaaccaacggtgat

SEQ ID NO: 325433 - DNA, 25 bp, Artificial
  Probe
gattatcagtcaggaaggcggcaaa

SEQ ID NO: 325434 - DNA, 25 bp, Artificial
  Probe
gatccggacacaatgcacattcaag

SEQ ID NO: 325435 - DNA, 25 bp, Artificial
  Probe
ttcaagaacacagagatcagtttcc

SEQ ID NO: 325436 - DNA, 25 bp, Artificial
  Probe
cacagagatcagtttccagctggga

SEQ ID NO: 325437 - DNA, 25 bp, Artificial
  Probe
cattcaagaacacagagatcagttt

SEQ ID NO: 325438 - DNA, 25 bp, Artificial
  Probe
atgcacattcaagaacacagagatc

SEQ ID NO: 325439 - DNA, 25 bp, Artificial
  Probe
acacagagatcagtttccagctggg

SEQ ID NO: 325440 - DNA, 25 bp, Artificial
  Probe
cggacacaatgcacattcaagaaca

SEQ ID NO: 325441 - DNA, 25 bp, Artificial
  Probe
attcaagaacacagagatcagtttc

SEQ ID NO: 325442 - DNA, 25 bp, Artificial
  Probe
atccggacacaatgcacattcaaga

SEQ ID NO: 325443 - DNA, 25 bp, Artificial
  Probe
ggtgatccggacacaatgcacattc

SEQ ID NO: 325444 - DNA, 25 bp, Artificial
  Probe
cagagatcagtttccagctgggaga

SEQ ID NO: 325445 - DNA, 25 bp, Artificial
  Probe
aatgtgaccaaaccaacggtgatta

SEQ ID NO: 325446 - DNA, 25 bp, Artificial
  Probe
acaatgcacattcaagaacacagag

SEQ ID NO: 325447 - DNA, 25 bp, Artificial
  Probe
gtggtgatccggacacaatgcacat

SEQ ID NO: 325448 - DNA, 25 bp, Artificial
  Probe
gatcagtttccagctgggagaagag

SEQ ID NO: 325449 - DNA, 25 bp, Artificial
  Probe
gtgaccaaaccaacggtgattatca

SEQ ID NO: 325450 - DNA, 25 bp, Artificial
  Probe
tttcagtcgctttcacaaagaacgc

SEQ ID NO: 325451 - DNA, 25 bp, Artificial
  Probe
ttgttccagagtcaataccatgagc

SEQ ID NO: 325452 - DNA, 25 bp, Artificial
  Probe
cgattgttccagagtcaataccatg

SEQ ID NO: 325453 - DNA, 25 bp, Artificial
  Probe
gccgctctagaactagtggatcccc

SEQ ID NO: 325454 - DNA, 25 bp, Artificial
  Probe
gcttgaccctttaccctatgtgtat

SEQ ID NO: 325455 - DNA, 25 bp, Artificial
  Probe
tttaccctatgtgtatgcaaatgtt

SEQ ID NO: 325456 - DNA, 25 bp, Artificial
  Probe
gacggtgcgattgttccagagtcaa

SEQ ID NO: 325457 - DNA, 25 bp, Artificial
  Probe
ctttaccctatgtgtatgcaaatgt

SEQ ID NO: 325458 - DNA, 25 bp, Artificial
  Probe
actctgtgaagtccagggacaggaa

SEQ ID NO: 325459 - DNA, 25 bp, Artificial
  Probe
ttccagagtcaataccatgagccac

SEQ ID NO: 325460 - DNA, 25 bp, Artificial
  Probe
ctctgtgaagtccagggacaggaag

SEQ ID NO: 325461 - DNA, 25 bp, Artificial
  Probe
ggcttgaccctttaccctatgtgta

SEQ ID NO: 325462 - DNA, 25 bp, Artificial
  Probe
cctttaccctatgtgtatgcaaatg

SEQ ID NO: 325463 - DNA, 25 bp, Artificial
  Probe
attgttccagagtcaataccatgag

SEQ ID NO: 325464 - DNA, 25 bp, Artificial
  Probe
tccagagtcaataccatgagccaca

SEQ ID NO: 325465 - DNA, 25 bp, Artificial
  Probe
agggcttgaccctttaccctatgtg

SEQ ID NO: 325466 - DNA, 25 bp, Artificial
  Probe
ggcggccgctctagaactagtggat

SEQ ID NO: 325467 - DNA, 25 bp, Artificial
  Probe
aaagctggagctccaccgcggtggc

SEQ ID NO: 325468 - DNA, 25 bp, Artificial
  Probe
tactctgtgaagtccagggacagga

SEQ ID NO: 325469 - DNA, 25 bp, Artificial
  Probe
cggtgcgattgttccagagtcaata

SEQ ID NO: 325470 - DNA, 25 bp, Artificial
  Probe
tggcggccgctctagaactagtgga

SEQ ID NO: 325471 - DNA, 25 bp, Artificial
  Probe
gttccagagtcaataccatgagcca

SEQ ID NO: 325472 - DNA, 25 bp, Artificial
  Probe
gattgttccagagtcaataccatga

SEQ ID NO: 325473 - DNA, 25 bp, Artificial
  Probe
ctttcagtcgctttcacaaagaacg

SEQ ID NO: 325474 - DNA, 25 bp, Artificial
  Probe
ggtgcgattgttccagagtcaatac

SEQ ID NO: 325475 - DNA, 25 bp, Artificial
  Probe
gaccctttaccctatgtgtatgcaa

SEQ ID NO: 325476 - DNA, 25 bp, Artificial
  Probe
acggtgcgattgttccagagtcaat

SEQ ID NO: 325477 - DNA, 25 bp, Artificial
  Probe
ggtagtctttcagtcgctttcacaa

SEQ ID NO: 325478 - DNA, 25 bp, Artificial
  Probe
ttaccctatgtgtatgcaaatgtta

SEQ ID NO: 325479 - DNA, 25 bp, Artificial
  Probe
ggccgctctagaactagtggatccc

SEQ ID NO: 325480 - DNA, 25 bp, Artificial
  Probe
agacggtgcgattgttccagagtca

SEQ ID NO: 325481 - DNA, 25 bp, Artificial
  Probe
tcagtcgctttcacaaagaacgcca

SEQ ID NO: 325482 - DNA, 25 bp, Artificial
  Probe
cggccgctctagaactagtggatcc

SEQ ID NO: 325483 - DNA, 25 bp, Artificial
  Probe
tctgtgaagtccagggacaggaaga

SEQ ID NO: 325484 - DNA, 25 bp, Artificial
  Probe
tgttccagagtcaataccatgagcc

SEQ ID NO: 325485 - DNA, 25 bp, Artificial
  Probe
gtgcgattgttccagagtcaatacc

SEQ ID NO: 325486 - DNA, 25 bp, Artificial
  Probe
gtcgctttcacaaagaacgccacat

SEQ ID NO: 325487 - DNA, 25 bp, Artificial
  Probe
cagacggtgcgattgttccagagtc

SEQ ID NO: 325488 - DNA, 25 bp, Artificial
  Probe
ccctatgtgtatgcaaatgttacct

SEQ ID NO: 325489 - DNA, 25 bp, Artificial
  Probe
gcgattgttccagagtcaataccat

SEQ ID NO: 325490 - DNA, 25 bp, Artificial
  Probe
ccagacggtgcgattgttccagagt

SEQ ID NO: 325491 - DNA, 25 bp, Artificial
  Probe
cagtcgctttcacaaagaacgccac

SEQ ID NO: 325492 - DNA, 25 bp, Artificial
  Probe
gtagtctttcagtcgctttcacaaa

SEQ ID NO: 325493 - DNA, 25 bp, Artificial
  Probe
agtcgctttcacaaagaacgccaca

SEQ ID NO: 325494 - DNA, 25 bp, Artificial
  Probe
ccagagtcaataccatgagccacaa

SEQ ID NO: 325495 - DNA, 25 bp, Artificial
  Probe
taccctatgtgtatgcaaatgttac

SEQ ID NO: 325496 - DNA, 25 bp, Artificial
  Probe
tcttcaagtagctttaaagcctagt

SEQ ID NO: 325497 - DNA, 25 bp, Artificial
  Probe
ttccttcattgtatcaaggaaagta

SEQ ID NO: 325498 - DNA, 25 bp, Artificial
  Probe
aagctgtctgcatacgtttatatct

SEQ ID NO: 325499 - DNA, 25 bp, Artificial
  Probe
tcaagtagctttaaagcctagtcct

SEQ ID NO: 325500 - DNA, 25 bp, Artificial
  Probe
gtctgcatacgtttatatctagaag

SEQ ID NO: 325501 - DNA, 25 bp, Artificial
  Probe
ttcccaggatagatttctatagaga

SEQ ID NO: 325502 - DNA, 25 bp, Artificial
  Probe
ttctttctatgcacaagctgtctgc

SEQ ID NO: 325503 - DNA, 25 bp, Artificial
  Probe
agcttccttcattgtatcaaggaaa

SEQ ID NO: 325504 - DNA, 25 bp, Artificial
  Probe
agctgtctgcatacgtttatatcta

SEQ ID NO: 325505 - DNA, 25 bp, Artificial
  Probe
tctttctatgcacaagctgtctgca

SEQ ID NO: 325506 - DNA, 25 bp, Artificial
  Probe
gacttaagtttttcccaggatagat

SEQ ID NO: 325507 - DNA, 25 bp, Artificial
  Probe
taagtttttcccaggatagatttct

SEQ ID NO: 325508 - DNA, 25 bp, Artificial
  Probe
agatatcttcaagtagctttaaagc

SEQ ID NO: 325509 - DNA, 25 bp, Artificial
  Probe
taaagcttccttcattgtatcaagg

SEQ ID NO: 325510 - DNA, 25 bp, Artificial
  Probe
cttcaagtagctttaaagcctagtc

SEQ ID NO: 325511 - DNA, 25 bp, Artificial
  Probe
gtttttcccaggatagatttctata

SEQ ID NO: 325512 - DNA, 25 bp, Artificial
  Probe
acaagctgtctgcatacgtttatat

SEQ ID NO: 325513 - DNA, 25 bp, Artificial
  Probe
ttctatgcacaagctgtctgcatac

SEQ ID NO: 325514 - DNA, 25 bp, Artificial
  Probe
caaatatgcattgtggctgtgctca

SEQ ID NO: 325515 - DNA, 25 bp, Artificial
  Probe
agtttttcccaggatagatttctat

SEQ ID NO: 325516 - DNA, 25 bp, Artificial
  Probe
tatgcacaagctgtctgcatacgtt

SEQ ID NO: 325517 - DNA, 25 bp, Artificial
  Probe
tgcattgtggctgtgctcagaaaaa

SEQ ID NO: 325518 - DNA, 25 bp, Artificial
  Probe
aagcttccttcattgtatcaaggaa

SEQ ID NO: 325519 - DNA, 25 bp, Artificial
  Probe
tcattctgttgaacttatgtttcga

SEQ ID NO: 325520 - DNA, 25 bp, Artificial
  Probe
atcttcaagtagctttaaagcctag

SEQ ID NO: 325521 - DNA, 25 bp, Artificial
  Probe
cacaagctgtctgcatacgtttata

SEQ ID NO: 325522 - DNA, 25 bp, Artificial
  Probe
aaagcttccttcattgtatcaagga

SEQ ID NO: 325523 - DNA, 25 bp, Artificial
  Probe
gcacaagctgtctgcatacgtttat

SEQ ID NO: 325524 - DNA, 25 bp, Artificial
  Probe
tcatgtgccatctcctggttttagt

SEQ ID NO: 325525 - DNA, 25 bp, Artificial
  Probe
tttctatgcacaagctgtctgcata

SEQ ID NO: 325526 - DNA, 25 bp, Artificial
  Probe
gctgtctgcatacgtttatatctag

SEQ ID NO: 325527 - DNA, 25 bp, Artificial
  Probe
ctcatgtgccatctcctggttttag

SEQ ID NO: 325528 - DNA, 25 bp, Artificial
  Probe
caagctgtctgcatacgtttatatc

SEQ ID NO: 325529 - DNA, 25 bp, Artificial
  Probe
atgcacaagctgtctgcatacgttt

SEQ ID NO: 325530 - DNA, 25 bp, Artificial
  Probe
ctgcatacgtttatatctagaagtt

SEQ ID NO: 325531 - DNA, 25 bp, Artificial
  Probe
ttctctctcatgtgccatctcctgg

SEQ ID NO: 325532 - DNA, 25 bp, Artificial
  Probe
ctgtctgcatacgtttatatctaga

SEQ ID NO: 325533 - DNA, 25 bp, Artificial
  Probe
cattctgttgaacttatgtttcgat

SEQ ID NO: 325534 - DNA, 25 bp, Artificial
  Probe
ccttcattgtatcaaggaaagtatg

SEQ ID NO: 325535 - DNA, 25 bp, Artificial
  Probe
ctctcatgtgccatctcctggtttt

SEQ ID NO: 325536 - DNA, 25 bp, Artificial
  Probe
atgcattgtggctgtgctcagaaaa

SEQ ID NO: 325537 - DNA, 25 bp, Artificial
  Probe
attctttctatgcacaagctgtctg

SEQ ID NO: 325538 - DNA, 25 bp, Artificial
  Probe
gatatcttcaagtagctttaaagcc

SEQ ID NO: 325539 - DNA, 25 bp, Artificial
  Probe
catgtgccatctcctggttttagtt

SEQ ID NO: 325540 - DNA, 25 bp, Artificial
  Probe
gttttacactcatgataaaagtagc

SEQ ID NO: 325541 - DNA, 25 bp, Artificial
  Probe
tctcatgtgccatctcctggtttta

SEQ ID NO: 325542 - DNA, 25 bp, Artificial
  Probe
ctcaggaggtctctaatgttcagtg

SEQ ID NO: 325543 - DNA, 25 bp, Artificial
  Probe
catattattcatgtgtcctcagagc

SEQ ID NO: 325544 - DNA, 25 bp, Artificial
  Probe
tctccctttactcctgtactgtggt

SEQ ID NO: 325545 - DNA, 25 bp, Artificial
  Probe
taggccagaaccaactttttccagt

SEQ ID NO: 325546 - DNA, 25 bp, Artificial
  Probe
gaggtgtgctttctaccaagcctga

SEQ ID NO: 325547 - DNA, 25 bp, Artificial
  Probe
agagcacatggctactaactttcaa

SEQ ID NO: 325548 - DNA, 25 bp, Artificial
  Probe
tcagtggagaggtgtgctttctacc

SEQ ID NO: 325549 - DNA, 25 bp, Artificial
  Probe
tattattcatgtgtcctcagagcac

SEQ ID NO: 325550 - DNA, 25 bp, Artificial
  Probe
agaagcactagagcaactctttgat

SEQ ID NO: 325551 - DNA, 25 bp, Artificial
  Probe
gtgggtttgatctctgggaccaaca

SEQ ID NO: 325552 - DNA, 25 bp, Artificial
  Probe
tgtaagatattctccaaaggccact

SEQ ID NO: 325553 - DNA, 25 bp, Artificial
  Probe
catagtaggccagaaccaacttttt

SEQ ID NO: 325554 - DNA, 25 bp, Artificial
  Probe
tgtcctcagagcacatggctactaa

SEQ ID NO: 325555 - DNA, 25 bp, Artificial
  Probe
tatctcagtggagaggtgtgctttc

SEQ ID NO: 325556 - DNA, 25 bp, Artificial
  Probe
acatagtaggccagaaccaactttt

SEQ ID NO: 325557 - DNA, 25 bp, Artificial
  Probe
gggtttgatctctgggaccaacata

SEQ ID NO: 325558 - DNA, 25 bp, Artificial
  Probe
gatattctccaaaggccactgtctc

SEQ ID NO: 325559 - DNA, 25 bp, Artificial
  Probe
ttgatctctgggaccaacatagtag

SEQ ID NO: 325560 - DNA, 25 bp, Artificial
  Probe
tcctcagagcacatggctactaact

SEQ ID NO: 325561 - DNA, 25 bp, Artificial
  Probe
agaggtgtgctttctaccaagcctg

SEQ ID NO: 325562 - DNA, 25 bp, Artificial
  Probe
tcagatgcactctggcattcaggtg

SEQ ID NO: 325563 - DNA, 25 bp, Artificial
  Probe
ttattcatgtgtcctcagagcacat

SEQ ID NO: 325564 - DNA, 25 bp, Artificial
  Probe
cttcatgtcctttgcgtcacgagaa

SEQ ID NO: 325565 - DNA, 25 bp, Artificial
  Probe
tcacgagaagcactagagcaactct

SEQ ID NO: 325566 - DNA, 25 bp, Artificial
  Probe
aggaggtctctaatgttcagtgttc

SEQ ID NO: 325567 - DNA, 25 bp, Artificial
  Probe
tgatgctctcagatgcactctggca

SEQ ID NO: 325568 - DNA, 25 bp, Artificial
  Probe
gccagaaccaactttttccagttga

SEQ ID NO: 325569 - DNA, 25 bp, Artificial
  Probe
gcactagagcaactctttgatgctc

SEQ ID NO: 325570 - DNA, 25 bp, Artificial
  Probe
aaggtgggtttgatctctgggacca

SEQ ID NO: 325571 - DNA, 25 bp, Artificial
  Probe
gggaccaacatagtaggccagaacc

SEQ ID NO: 325572 - DNA, 25 bp, Artificial
  Probe
atgtcctttgcgtcacgagaagcac

SEQ ID NO: 325573 - DNA, 25 bp, Artificial
  Probe
gaccaacatagtaggccagaaccaa

SEQ ID NO: 325574 - DNA, 25 bp, Artificial
  Probe
gtaggccagaaccaactttttccag

SEQ ID NO: 325575 - DNA, 25 bp, Artificial
  Probe
gtctctaatgttcagtgttcatatt

SEQ ID NO: 325576 - DNA, 25 bp, Artificial
  Probe
aagcactagagcaactctttgatgc

SEQ ID NO: 325577 - DNA, 25 bp, Artificial
  Probe
gagcacatggctactaactttcaaa

SEQ ID NO: 325578 - DNA, 25 bp, Artificial
  Probe
tgctctcagatgcactctggcattc

SEQ ID NO: 325579 - DNA, 25 bp, Artificial
  Probe
caaaggccactgtctcatcctcagg

SEQ ID NO: 325580 - DNA, 25 bp, Artificial
  Probe
cctcagagcacatggctactaactt

SEQ ID NO: 325581 - DNA, 25 bp, Artificial
  Probe
ggccagaaccaactttttccagttg

SEQ ID NO: 325582 - DNA, 25 bp, Artificial
  Probe
catgctgctacttggggtattttag

SEQ ID NO: 325583 - DNA, 25 bp, Artificial
  Probe
tctaccaagcctgacaaggtgggtt

SEQ ID NO: 325584 - DNA, 25 bp, Artificial
  Probe
atcaagttgtgtgtcgtttcatgct

SEQ ID NO: 325585 - DNA, 25 bp, Artificial
  Probe
ctgggaccaacatagtaggccagaa

SEQ ID NO: 325586 - DNA, 25 bp, Artificial
  Probe
ctctgggaccaacatagtaggccag

SEQ ID NO: 325587 - DNA, 25 bp, Artificial
  Probe
ttctaccaagcctgacaaggtgggt

SEQ ID NO: 325588 - DNA, 25 bp, Artificial
  Probe
acgccaggcgggactggatctcagc

SEQ ID NO: 325589 - DNA, 25 bp, Artificial
  Probe
agccagacaggctgtccccataggt

SEQ ID NO: 325590 - DNA, 25 bp, Artificial
  Probe
ctggcaggttgttgatgtagccacc

SEQ ID NO: 325591 - DNA, 25 bp, Artificial
  Probe
atctttgtggacacgcatggcggat

SEQ ID NO: 325592 - DNA, 25 bp, Artificial
  Probe
gaacctttaccttgtctgcccaggg

SEQ ID NO: 325593 - DNA, 25 bp, Artificial
  Probe
cagaagtcatgctcttggcccactc

SEQ ID NO: 325594 - DNA, 25 bp, Artificial
  Probe
tcctggcttcccacgtcgatggcaa

SEQ ID NO: 325595 - DNA, 25 bp, Artificial
  Probe
tgtggtcacattgaagtaaggcagc

SEQ ID NO: 325596 - DNA, 25 bp, Artificial
  Probe
agagcgtcatgctggcacgcacata

SEQ ID NO: 325597 - DNA, 25 bp, Artificial
  Probe
acacaggacacatacgccaggcggg

SEQ ID NO: 325598 - DNA, 25 bp, Artificial
  Probe
ggttaaaggccgagccagtaaacat

SEQ ID NO: 325599 - DNA, 25 bp, Artificial
  Probe
tggcccccatgctgcgggcgatatc

SEQ ID NO: 325600 - DNA, 25 bp, Artificial
  Probe
ttgaagtaaggcagccacaggtcct

SEQ ID NO: 325601 - DNA, 25 bp, Artificial
  Probe
cggatgcagtgatgtctgtggtcac

SEQ ID NO: 325602 - DNA, 25 bp, Artificial
  Probe
agccagtaaacatggaggtgacagg

SEQ ID NO: 325603 - DNA, 25 bp, Artificial
  Probe
gttttggcccccatgctgcgggcga

SEQ ID NO: 325604 - DNA, 25 bp, Artificial
  Probe
cacgcatggcggatgcagtgatgtc

SEQ ID NO: 325605 - DNA, 25 bp, Artificial
  Probe
cagtgatgtctgtggtcacattgaa

SEQ ID NO: 325606 - DNA, 25 bp, Artificial
  Probe
tggatacttcggttaaaggccgagc

SEQ ID NO: 325607 - DNA, 25 bp, Artificial
  Probe
gacacggtggatacttcggttaaag

SEQ ID NO: 325608 - DNA, 25 bp, Artificial
  Probe
tttagccgtttccacaggcaaccac

SEQ ID NO: 325609 - DNA, 25 bp, Artificial
  Probe
gtttagccgtttccacaggcaacca

SEQ ID NO: 325610 - DNA, 25 bp, Artificial
  Probe
tcccgggctcgctgtttggtacgac

SEQ ID NO: 325611 - DNA, 25 bp, Artificial
  Probe
tagccaccatccatgagcaggtgcc

SEQ ID NO: 325612 - DNA, 25 bp, Artificial
  Probe
gctggcacgcacatagcgccacagg

SEQ ID NO: 325613 - DNA, 25 bp, Artificial
  Probe
gcaggtagcccgagagcgtcatgct

SEQ ID NO: 325614 - DNA, 25 bp, Artificial
  Probe
gagcaggtgcccatccttcgggtcg

SEQ ID NO: 325615 - DNA, 25 bp, Artificial
  Probe
ccatccttcgggtcgcacagcgggg

SEQ ID NO: 325616 - DNA, 25 bp, Artificial
  Probe
acgcatggcggatgcagtgatgtct

SEQ ID NO: 325617 - DNA, 25 bp, Artificial
  Probe
gttcctcggcatacagggccccaat

SEQ ID NO: 325618 - DNA, 25 bp, Artificial
  Probe
gtcctggaagacacggtggatactt

SEQ ID NO: 325619 - DNA, 25 bp, Artificial
  Probe
gtttggtacgactggcgctgcgttc

SEQ ID NO: 325620 - DNA, 25 bp, Artificial
  Probe
gtctgtggtcacattgaagtaaggc

SEQ ID NO: 325621 - DNA, 25 bp, Artificial
  Probe
agcgccacagggagccatctttgtg

SEQ ID NO: 325622 - DNA, 25 bp, Artificial
  Probe
ccttgtctgcccaggggtttagccg

SEQ ID NO: 325623 - DNA, 25 bp, Artificial
  Probe
gttgatgtagccaccatccatgagc

SEQ ID NO: 325624 - DNA, 25 bp, Artificial
  Probe
agctgccgcacacaggacacatacg

SEQ ID NO: 325625 - DNA, 25 bp, Artificial
  Probe
atatccgctggcaggttgttgatgt

SEQ ID NO: 325626 - DNA, 25 bp, Artificial
  Probe
tgagatccgtctcatcctggcttcc

SEQ ID NO: 325627 - DNA, 25 bp, Artificial
  Probe
caatgaccgttttggcccccatgct

SEQ ID NO: 325628 - DNA, 25 bp, Artificial
  Probe
gacacatacgccaggcgggactgga

SEQ ID NO: 325629 - DNA, 25 bp, Artificial
  Probe
tacgactggcgctgcgttcctcggc

SEQ ID NO: 325630 - DNA, 25 bp, Artificial
  Probe
atgctgcgggcgatatccgctggca

SEQ ID NO: 325631 - DNA, 25 bp, Artificial
  Probe
tacttcggttaaaggccgagccagt

SEQ ID NO: 325632 - DNA, 25 bp, Artificial
  Probe
atatgtgaggtccaatacaggctcc

SEQ ID NO: 325633 - DNA, 25 bp, Artificial
  Probe
gcgctgcgttcctcggcatacaggg

SEQ ID NO: 325634 - DNA, 25 bp, Artificial
  Probe
aagatagattgcaccgatggcgtct

SEQ ID NO: 325635 - DNA, 25 bp, Artificial
  Probe
cattttacgatttctattgagggtc

SEQ ID NO: 325636 - DNA, 25 bp, Artificial
  Probe
cactagttttacacattttacgatt

SEQ ID NO: 325637 - DNA, 25 bp, Artificial
  Probe
ccgatggcgtctgtctggtgaacgc

SEQ ID NO: 325638 - DNA, 25 bp, Artificial
  Probe
gaacgctggcttctgacaacactag

SEQ ID NO: 325639 - DNA, 25 bp, Artificial
  Probe
gatggcgtctgtctggtgaacgctg

SEQ ID NO: 325640 - DNA, 25 bp, Artificial
  Probe
tacgatttctattgagggtcctatt

SEQ ID NO: 325641 - DNA, 25 bp, Artificial
  Probe
ctggcttctgacaacactagtttta

SEQ ID NO: 325642 - DNA, 25 bp, Artificial
  Probe
accgatggcgtctgtctggtgaacg

SEQ ID NO: 325643 - DNA, 25 bp, Artificial
  Probe
tgtatttatttattccaccaagtgt

SEQ ID NO: 325644 - DNA, 25 bp, Artificial
  Probe
cgatggcgtctgtctggtgaacgct

SEQ ID NO: 325645 - DNA, 25 bp, Artificial
  Probe
caccgatggcgtctgtctggtgaac

SEQ ID NO: 325646 - DNA, 25 bp, Artificial
  Probe
acattttacgatttctattgagggt

SEQ ID NO: 325647 - DNA, 25 bp, Artificial
  Probe
ttacgatttctattgagggtcctat

SEQ ID NO: 325648 - DNA, 25 bp, Artificial
  Probe
cgctggcttctgacaacactagttt

SEQ ID NO: 325649 - DNA, 25 bp, Artificial
  Probe
tctgtctggtgaacgctggcttctg

SEQ ID NO: 325650 - DNA, 25 bp, Artificial
  Probe
cacattttacgatttctattgaggg

SEQ ID NO: 325651 - DNA, 25 bp, Artificial
  Probe
ttttacgatttctattgagggtcct

SEQ ID NO: 325652 - DNA, 25 bp, Artificial
  Probe
agattgcaccgatggcgtctgtctg

SEQ ID NO: 325653 - DNA, 25 bp, Artificial
  Probe
tcctatttattttatgtatttattt

SEQ ID NO: 325654 - DNA, 25 bp, Artificial
  Probe
tggcttctgacaacactagttttac

SEQ ID NO: 325655 - DNA, 25 bp, Artificial
  Probe
gctggcttctgacaacactagtttt

SEQ ID NO: 325656 - DNA, 25 bp, Artificial
  Probe
acacattttacgatttctattgagg

SEQ ID NO: 325657 - DNA, 25 bp, Artificial
  Probe
gcaccgatggcgtctgtctggtgaa

SEQ ID NO: 325658 - DNA, 25 bp, Artificial
  Probe
tgcaccgatggcgtctgtctggtga

SEQ ID NO: 325659 - DNA, 25 bp, Artificial
  Probe
tgtccccaagtaatggagaaagaag

SEQ ID NO: 325660 - DNA, 25 bp, Artificial
  Probe
tttatttattccaccaagtgtgtgg

SEQ ID NO: 325661 - DNA, 25 bp, Artificial
  Probe
aacgctggcttctgacaacactagt

SEQ ID NO: 325662 - DNA, 25 bp, Artificial
  Probe
tagattgcaccgatggcgtctgtct

SEQ ID NO: 325663 - DNA, 25 bp, Artificial
  Probe
acgatttctattgagggtcctattt

SEQ ID NO: 325664 - DNA, 25 bp, Artificial
  Probe
ggcttctgacaacactagttttaca

SEQ ID NO: 325665 - DNA, 25 bp, Artificial
  Probe
cgatttctattgagggtcctattta

SEQ ID NO: 325666 - DNA, 25 bp, Artificial
  Probe
tctggtgaacgctggcttctgacaa

SEQ ID NO: 325667 - DNA, 25 bp, Artificial
  Probe
gatttctattgagggtcctatttat

SEQ ID NO: 325668 - DNA, 25 bp, Artificial
  Probe
ctgtctggtgaacgctggcttctga

SEQ ID NO: 325669 - DNA, 25 bp, Artificial
  Probe
gcgtctgtctggtgaacgctggctt

SEQ ID NO: 325670 - DNA, 25 bp, Artificial
  Probe
tccccaagtaatggagaaagaagat

SEQ ID NO: 325671 - DNA, 25 bp, Artificial
  Probe
gcttctgacaacactagttttacac

SEQ ID NO: 325672 - DNA, 25 bp, Artificial
  Probe
acgctggcttctgacaacactagtt

SEQ ID NO: 325673 - DNA, 25 bp, Artificial
  Probe
gtccccaagtaatggagaaagaaga

SEQ ID NO: 325674 - DNA, 25 bp, Artificial
  Probe
gtgaacgctggcttctgacaacact

SEQ ID NO: 325675 - DNA, 25 bp, Artificial
  Probe
ggtgaacgctggcttctgacaacac

SEQ ID NO: 325676 - DNA, 25 bp, Artificial
  Probe
cgtctgtctggtgaacgctggcttc

SEQ ID NO: 325677 - DNA, 25 bp, Artificial
  Probe
tgaacgctggcttctgacaacacta

SEQ ID NO: 325678 - DNA, 25 bp, Artificial
  Probe
gttttacacattttacgatttctat

SEQ ID NO: 325679 - DNA, 25 bp, Artificial
  Probe
tttacgatttctattgagggtccta

SEQ ID NO: 325680 - DNA, 25 bp, Artificial
  Probe
cctctgatcaaattctggagtcttt

SEQ ID NO: 325681 - DNA, 25 bp, Artificial
  Probe
agctgtgtacgaatttcagaattca

SEQ ID NO: 325682 - DNA, 25 bp, Artificial
  Probe
ctggagtctgccttactgcatctga

SEQ ID NO: 325683 - DNA, 25 bp, Artificial
  Probe
tgcctcttcctggagtctgccttac

SEQ ID NO: 325684 - DNA, 25 bp, Artificial
  Probe
gctcactgtcttgaaccatactttg

SEQ ID NO: 325685 - DNA, 25 bp, Artificial
  Probe
ggtctcacggctgatcctcagtgga

SEQ ID NO: 325686 - DNA, 25 bp, Artificial
  Probe
tctgatcaccatgtgcatacctctg

SEQ ID NO: 325687 - DNA, 25 bp, Artificial
  Probe
tggcgctcactgtcttgaaccatac

SEQ ID NO: 325688 - DNA, 25 bp, Artificial
  Probe
ccttactgcatctgatcaccatgtg

SEQ ID NO: 325689 - DNA, 25 bp, Artificial
  Probe
caaattctggagtctttgttctcgg

SEQ ID NO: 325690 - DNA, 25 bp, Artificial
  Probe
gtctgccttactgcatctgatcacc

SEQ ID NO: 325691 - DNA, 25 bp, Artificial
  Probe
attctgtacaaaacagctcactcgg

SEQ ID NO: 325692 - DNA, 25 bp, Artificial
  Probe
ctgatcctcagtggaaatgatttaa

SEQ ID NO: 325693 - DNA, 25 bp, Artificial
  Probe
tctgatcaaattctggagtctttgt

SEQ ID NO: 325694 - DNA, 25 bp, Artificial
  Probe
acctctgatcaaattctggagtctt

SEQ ID NO: 325695 - DNA, 25 bp, Artificial
  Probe
gaaatgcctcttcctggagtctgcc

SEQ ID NO: 325696 - DNA, 25 bp, Artificial
  Probe
tacctctgatcaaattctggagtct

SEQ ID NO: 325697 - DNA, 25 bp, Artificial
  Probe
actgtcttgaaccatactttgaaag

SEQ ID NO: 325698 - DNA, 25 bp, Artificial
  Probe
tcctcctatccagaattggcgctca

SEQ ID NO: 325699 - DNA, 25 bp, Artificial
  Probe
ggagtctgccttactgcatctgatc

SEQ ID NO: 325700 - DNA, 25 bp, Artificial
  Probe
acggctgatcctcagtggaaatgat

SEQ ID NO: 325701 - DNA, 25 bp, Artificial
  Probe
actgcatctgatcaccatgtgcata

SEQ ID NO: 325702 - DNA, 25 bp, Artificial
  Probe
gatcaccatgtgcatacctctgatc

SEQ ID NO: 325703 - DNA, 25 bp, Artificial
  Probe
gatcaaattctggagtctttgttct

SEQ ID NO: 325704 - DNA, 25 bp, Artificial
  Probe
ctgtcttgaaccatactttgaaaga

SEQ ID NO: 325705 - DNA, 25 bp, Artificial
  Probe
tcttcctggagtctgccttactgca

SEQ ID NO: 325706 - DNA, 25 bp, Artificial
  Probe
cagaattggcgctcactgtcttgaa

SEQ ID NO: 325707 - DNA, 25 bp, Artificial
  Probe
cttcctggagtctgccttactgcat

SEQ ID NO: 325708 - DNA, 25 bp, Artificial
  Probe
gaaagaaatgcctcttcctggagtc

SEQ ID NO: 325709 - DNA, 25 bp, Artificial
  Probe
atttctggtccctaacttgtgaaga

SEQ ID NO: 325710 - DNA, 25 bp, Artificial
  Probe
tcacggctgatcctcagtggaaatg

SEQ ID NO: 325711 - DNA, 25 bp, Artificial
  Probe
ctcacggctgatcctcagtggaaat

SEQ ID NO: 325712 - DNA, 25 bp, Artificial
  Probe
tttctggtccctaacttgtgaagac

SEQ ID NO: 325713 - DNA, 25 bp, Artificial
  Probe
attggcgctcactgtcttgaaccat

SEQ ID NO: 325714 - DNA, 25 bp, Artificial
  Probe
tgccttactgcatctgatcaccatg

SEQ ID NO: 325715 - DNA, 25 bp, Artificial
  Probe
tgtgcatacctctgatcaaattctg

SEQ ID NO: 325716 - DNA, 25 bp, Artificial
  Probe
gtgcatacctctgatcaaattctgg

SEQ ID NO: 325717 - DNA, 25 bp, Artificial
  Probe
ctcctatccagaattggcgctcact

SEQ ID NO: 325718 - DNA, 25 bp, Artificial
  Probe
gagtctttgttctcggtacctctta

SEQ ID NO: 325719 - DNA, 25 bp, Artificial
  Probe
aaattctggagtctttgttctcggt

SEQ ID NO: 325720 - DNA, 25 bp, Artificial
  Probe
gcatctgatcaccatgtgcatacct

SEQ ID NO: 325721 - DNA, 25 bp, Artificial
  Probe
cctatccagaattggcgctcactgt

SEQ ID NO: 325722 - DNA, 25 bp, Artificial
  Probe
tgatcaaattctggagtctttgttc

SEQ ID NO: 325723 - DNA, 25 bp, Artificial
  Probe
tataatttctggtccctaacttgtg

SEQ ID NO: 325724 - DNA, 25 bp, Artificial
  Probe
gcgctcactgtcttgaaccatactt

SEQ ID NO: 325725 - DNA, 25 bp, Artificial
  Probe
ctggagtctttgttctcggtacctc

SEQ ID NO: 325726 - DNA, 25 bp, Artificial
  Probe
accatctctggtatcataaagacca

SEQ ID NO: 325727 - DNA, 25 bp, Artificial
  Probe
ttcttgaccaaccatctctggtatc

SEQ ID NO: 325728 - DNA, 25 bp, Artificial
  Probe
agcctggcttcttgaccaaccatct

SEQ ID NO: 325729 - DNA, 25 bp, Artificial
  Probe
tggcttcttgaccaaccatctctgg

SEQ ID NO: 325730 - DNA, 25 bp, Artificial
  Probe
taaagaccatctggtcagctgaccc

SEQ ID NO: 325731 - DNA, 25 bp, Artificial
  Probe
tcttgaccaaccatctctggtatca

SEQ ID NO: 325732 - DNA, 25 bp, Artificial
  Probe
catctctggtatcataaagaccatc

SEQ ID NO: 325733 - DNA, 25 bp, Artificial
  Probe
catctggtcagctgacccacagccc

SEQ ID NO: 325734 - DNA, 25 bp, Artificial
  Probe
gagccaagaagcctggcttcttgac

SEQ ID NO: 325735 - DNA, 25 bp, Artificial
  Probe
cttcttgaccaaccatctctggtat

SEQ ID NO: 325736 - DNA, 25 bp, Artificial
  Probe
gtatcataaagaccatctggtcagc

SEQ ID NO: 325737 - DNA, 25 bp, Artificial
  Probe
gcttcttgaccaaccatctctggta

SEQ ID NO: 325738 - DNA, 25 bp, Artificial
  Probe
tatcataaagaccatctggtcagct

SEQ ID NO: 325739 - DNA, 25 bp, Artificial
  Probe
aaagaccatctggtcagctgaccca

SEQ ID NO: 325740 - DNA, 25 bp, Artificial
  Probe
cttgaccaaccatctctggtatcat

SEQ ID NO: 325741 - DNA, 25 bp, Artificial
  Probe
aagcctggcttcttgaccaaccatc

SEQ ID NO: 325742 - DNA, 25 bp, Artificial
  Probe
ttgaccaaccatctctggtatcata

SEQ ID NO: 325743 - DNA, 25 bp, Artificial
  Probe
aaccatctctggtatcataaagacc

SEQ ID NO: 325744 - DNA, 25 bp, Artificial
  Probe
cataaagaccatctggtcagctgac

SEQ ID NO: 325745 - DNA, 25 bp, Artificial
  Probe
tcataaagaccatctggtcagctga

SEQ ID NO: 325746 - DNA, 25 bp, Artificial
  Probe
ggcttcttgaccaaccatctctggt

SEQ ID NO: 325747 - DNA, 25 bp, Artificial
  Probe
aagaagcctggcttcttgaccaacc

SEQ ID NO: 325748 - DNA, 25 bp, Artificial
  Probe
cctggcttcttgaccaaccatctct

SEQ ID NO: 325749 - DNA, 25 bp, Artificial
  Probe
caagaagcctggcttcttgaccaac

SEQ ID NO: 325750 - DNA, 25 bp, Artificial
  Probe
ccaagaagcctggcttcttgaccaa

SEQ ID NO: 325751 - DNA, 25 bp, Artificial
  Probe
gaagcctggcttcttgaccaaccat

SEQ ID NO: 325752 - DNA, 25 bp, Artificial
  Probe
accatctggtcagctgacccacagc

SEQ ID NO: 325753 - DNA, 25 bp, Artificial
  Probe
ataaagaccatctggtcagctgacc

SEQ ID NO: 325754 - DNA, 25 bp, Artificial
  Probe
ccaaccatctctggtatcataaaga

SEQ ID NO: 325755 - DNA, 25 bp, Artificial
  Probe
agaccatctggtcagctgacccaca

SEQ ID NO: 325756 - DNA, 25 bp, Artificial
  Probe
aagaccatctggtcagctgacccac

SEQ ID NO: 325757 - DNA, 25 bp, Artificial
  Probe
ccatctggtcagctgacccacagcc

SEQ ID NO: 325758 - DNA, 25 bp, Artificial
  Probe
caaccatctctggtatcataaagac

SEQ ID NO: 325759 - DNA, 25 bp, Artificial
  Probe
agccaagaagcctggcttcttgacc

SEQ ID NO: 325760 - DNA, 25 bp, Artificial
  Probe
gaccatctggtcagctgacccacag

SEQ ID NO: 325761 - DNA, 25 bp, Artificial
  Probe
tgaccaaccatctctggtatcataa

SEQ ID NO: 325762 - DNA, 25 bp, Artificial
  Probe
ctggcttcttgaccaaccatctctg

SEQ ID NO: 325763 - DNA, 25 bp, Artificial
  Probe
agaagcctggcttcttgaccaacca

SEQ ID NO: 325764 - DNA, 25 bp, Artificial
  Probe
ccatctctggtatcataaagaccat

SEQ ID NO: 325765 - DNA, 25 bp, Artificial
  Probe
ggtatcataaagaccatctggtcag

SEQ ID NO: 325766 - DNA, 25 bp, Artificial
  Probe
accaaccatctctggtatcataaag

SEQ ID NO: 325767 - DNA, 25 bp, Artificial
  Probe
gcctggcttcttgaccaaccatctc

SEQ ID NO: 325768 - DNA, 25 bp, Artificial
  Probe
gaccaaccatctctggtatcataaa

SEQ ID NO: 325769 - DNA, 25 bp, Artificial
  Probe
atctctggtatcataaagaccatct

SEQ ID NO: 325770 - DNA, 25 bp, Artificial
  Probe
atcataaagaccatctggtcagctg

SEQ ID NO: 325771 - DNA, 25 bp, Artificial
  Probe
gccaagaagcctggcttcttgacca

SEQ ID NO: 325772 - DNA, 25 bp, Artificial
  Probe
atgatggtgtgctccccagtgctcc

SEQ ID NO: 325773 - DNA, 25 bp, Artificial
  Probe
tgattgccgcttcttgactatatac

SEQ ID NO: 325774 - DNA, 25 bp, Artificial
  Probe
ggctatttccccagtagcattgtcc

SEQ ID NO: 325775 - DNA, 25 bp, Artificial
  Probe
ctgtggcccttcaggactacgtggc

SEQ ID NO: 325776 - DNA, 25 bp, Artificial
  Probe
tacgtggcccctgattgccgcttct

SEQ ID NO: 325777 - DNA, 25 bp, Artificial
  Probe
aacccaccgatgttatccctgcagt

SEQ ID NO: 325778 - DNA, 25 bp, Artificial
  Probe
gcggccaactgcaaagtgttttgtc

SEQ ID NO: 325779 - DNA, 25 bp, Artificial
  Probe
gctccttggtattgtcatcttgtct

SEQ ID NO: 325780 - DNA, 25 bp, Artificial
  Probe
gctgatcgagccatgcccaagctgg

SEQ ID NO: 325781 - DNA, 25 bp, Artificial
  Probe
ttactatggagacctggcagcccac

SEQ ID NO: 325782 - DNA, 25 bp, Artificial
  Probe
tcaggcctcagcagggctgatcgag

SEQ ID NO: 325783 - DNA, 25 bp, Artificial
  Probe
ccttcaggactacgtggcccctgat

SEQ ID NO: 325784 - DNA, 25 bp, Artificial
  Probe
tgagctcaacccaccgatgttatcc

SEQ ID NO: 325785 - DNA, 25 bp, Artificial
  Probe
acctggcaaagtcgatatgaagaca

SEQ ID NO: 325786 - DNA, 25 bp, Artificial
  Probe
ttttttcaggcctcagcagggctga

SEQ ID NO: 325787 - DNA, 25 bp, Artificial
  Probe
ctgcaaagtgttttgtccctttggt

SEQ ID NO: 325788 - DNA, 25 bp, Artificial
  Probe
ccagtagcattgtccgggaggacct

SEQ ID NO: 325789 - DNA, 25 bp, Artificial
  Probe
ctagccaattaaagccctgaatgtt

SEQ ID NO: 325790 - DNA, 25 bp, Artificial
  Probe
caattaaagccctgaatgttgtaaa

SEQ ID NO: 325791 - DNA, 25 bp, Artificial
  Probe
ctgaccggaagctgtgtgcagatga

SEQ ID NO: 325792 - DNA, 25 bp, Artificial
  Probe
tgtggcccttcaggactacgtggcc

SEQ ID NO: 325793 - DNA, 25 bp, Artificial
  Probe
agattactatggagacctggcagcc

SEQ ID NO: 325794 - DNA, 25 bp, Artificial
  Probe
atgtttcacgggttcctgaacctag

SEQ ID NO: 325795 - DNA, 25 bp, Artificial
  Probe
ttcaggactacgtggcccctgattg

SEQ ID NO: 325796 - DNA, 25 bp, Artificial
  Probe
gtggcccctgattgccgcttcttga

SEQ ID NO: 325797 - DNA, 25 bp, Artificial
  Probe
gtgtgctccccagtgctccttggta

SEQ ID NO: 325798 - DNA, 25 bp, Artificial
  Probe
cctcagcagggctgatcgagccatg

SEQ ID NO: 325799 - DNA, 25 bp, Artificial
  Probe
tactgtcaatgagctcaacccaccg

SEQ ID NO: 325800 - DNA, 25 bp, Artificial
  Probe
ggttcctgaacctagccaattaaag

SEQ ID NO: 325801 - DNA, 25 bp, Artificial
  Probe
cctgattgccgcttcttgactatat

SEQ ID NO: 325802 - DNA, 25 bp, Artificial
  Probe
gcattgtccgggaggacctgactct

SEQ ID NO: 325803 - DNA, 25 bp, Artificial
  Probe
ccaagctggctgaccggaagctgtg

SEQ ID NO: 325804 - DNA, 25 bp, Artificial
  Probe
aatgggatttctactgtcaatgagc

SEQ ID NO: 325805 - DNA, 25 bp, Artificial
  Probe
tccggtttgggcaaatacagcggcc

SEQ ID NO: 325806 - DNA, 25 bp, Artificial
  Probe
ctgatcgagccatgcccaagctggc

SEQ ID NO: 325807 - DNA, 25 bp, Artificial
  Probe
gatttctactgtcaatgagctcaac

SEQ ID NO: 325808 - DNA, 25 bp, Artificial
  Probe
gagccatgcccaagctggctgaccg

SEQ ID NO: 325809 - DNA, 25 bp, Artificial
  Probe
tatccctgcagttacccttccggtt

SEQ ID NO: 325810 - DNA, 25 bp, Artificial
  Probe
agtggtatatgtcttctccaagttg

SEQ ID NO: 325811 - DNA, 25 bp, Artificial
  Probe
ctccaagttgaaaggccgtggacgg

SEQ ID NO: 325812 - DNA, 25 bp, Artificial
  Probe
ttgggcaaatacagcggccaactgc

SEQ ID NO: 325813 - DNA, 25 bp, Artificial
  Probe
tacaaagaatgtttcacgggttcct

SEQ ID NO: 325814 - DNA, 25 bp, Artificial
  Probe
ccaccgatgttatccctgcagttac

SEQ ID NO: 325815 - DNA, 25 bp, Artificial
  Probe
tgcagttacccttccggtttgggca

SEQ ID NO: 325816 - DNA, 25 bp, Artificial
  Probe
aatacagcggccaactgcaaagtgt

SEQ ID NO: 325817 - DNA, 25 bp, Artificial
  Probe
tgcaaagtgttttgtccctttggtt

SEQ ID NO: 325818 - DNA, 25 bp, Artificial
  Probe
agtatgtgaatgtgtcccaggacgc

SEQ ID NO: 325819 - DNA, 25 bp, Artificial
  Probe
gagctggcctctgtgacctcccagg

SEQ ID NO: 325820 - DNA, 25 bp, Artificial
  Probe
agaatgaatctagttccagccggac

SEQ ID NO: 325821 - DNA, 25 bp, Artificial
  Probe
gaaccaggagccagcccgtaagaac

SEQ ID NO: 325822 - DNA, 25 bp, Artificial
  Probe
acacctttccggagccaacgctaat

SEQ ID NO: 325823 - DNA, 25 bp, Artificial
  Probe
caggtgctctgcagatggaagcaga

SEQ ID NO: 325824 - DNA, 25 bp, Artificial
  Probe
attacgtgaatgtccctgagagcga

SEQ ID NO: 325825 - DNA, 25 bp, Artificial
  Probe
agattacgtgaatgtccctgagagc

SEQ ID NO: 325826 - DNA, 25 bp, Artificial
  Probe
tgctgctgcccttcgtggtcatgct

SEQ ID NO: 325827 - DNA, 25 bp, Artificial
  Probe
ctatgcgtgcgctgccgtgagttgc

SEQ ID NO: 325828 - DNA, 25 bp, Artificial
  Probe
cagtcgagcaagagagcagacgcag

SEQ ID NO: 325829 - DNA, 25 bp, Artificial
  Probe
ctcccctaacttattgtgactttgg

SEQ ID NO: 325830 - DNA, 25 bp, Artificial
  Probe
ctgccctatgcgtgcgctgccgtga

SEQ ID NO: 325831 - DNA, 25 bp, Artificial
  Probe
agatggaagcagacgccttgagccc

SEQ ID NO: 325832 - DNA, 25 bp, Artificial
  Probe
ctgatgaagcctgagaatgaatcta

SEQ ID NO: 325833 - DNA, 25 bp, Artificial
  Probe
cagtcctggaactggacttgctggg

SEQ ID NO: 325834 - DNA, 25 bp, Artificial
  Probe
atgaagatgactatcctgagggcta

SEQ ID NO: 325835 - DNA, 25 bp, Artificial
  Probe
catgctcctggctgccctatgcgtg

SEQ ID NO: 325836 - DNA, 25 bp, Artificial
  Probe
taactgaaagcctgctgcagctatc

SEQ ID NO: 325837 - DNA, 25 bp, Artificial
  Probe
tgccttgcctacagcctgagaatct

SEQ ID NO: 325838 - DNA, 25 bp, Artificial
  Probe
tacagctgggcacagggatcgtgca

SEQ ID NO: 325839 - DNA, 25 bp, Artificial
  Probe
acgcacagccagtgatcagggctga

SEQ ID NO: 325840 - DNA, 25 bp, Artificial
  Probe
catcttcccggcagaattcagatga

SEQ ID NO: 325841 - DNA, 25 bp, Artificial
  Probe
acagtgtggcgagctacgagaacca

SEQ ID NO: 325842 - DNA, 25 bp, Artificial
  Probe
tggctccgggactaacacctttccg

SEQ ID NO: 325843 - DNA, 25 bp, Artificial
  Probe
catcggatgccatcttcccggcaga

SEQ ID NO: 325844 - DNA, 25 bp, Artificial
  Probe
cagtagtcctgctgccgtccctgtt

SEQ ID NO: 325845 - DNA, 25 bp, Artificial
  Probe
agaggaagctcctgactatgagaac

SEQ ID NO: 325846 - DNA, 25 bp, Artificial
  Probe
cttgagccctgtggagctgggcctc

SEQ ID NO: 325847 - DNA, 25 bp, Artificial
  Probe
tcgggggctcccatcggatgccatc

SEQ ID NO: 325848 - DNA, 25 bp, Artificial
  Probe
gactaacacctttccggagccaacg

SEQ ID NO: 325849 - DNA, 25 bp, Artificial
  Probe
gaattcagatgatgccaacagtgtg

SEQ ID NO: 325850 - DNA, 25 bp, Artificial
  Probe
tcccggcagaattcagatgatgcca

SEQ ID NO: 325851 - DNA, 25 bp, Artificial
  Probe
agtgatcagggctgagctggcctct

SEQ ID NO: 325852 - DNA, 25 bp, Artificial
  Probe
ctctatggagtcatgtgaagattac

SEQ ID NO: 325853 - DNA, 25 bp, Artificial
  Probe
gcccgtaagaacgtggatgaagatg

SEQ ID NO: 325854 - DNA, 25 bp, Artificial
  Probe
ctctgccttgcctacagcctgagaa

SEQ ID NO: 325855 - DNA, 25 bp, Artificial
  Probe
gtacccaaggagcatcctcatcaaa

SEQ ID NO: 325856 - DNA, 25 bp, Artificial
  Probe
tgagctggcctctgtgacctcccag

SEQ ID NO: 325857 - DNA, 25 bp, Artificial
  Probe
gcagacgccttgagccctgtggagc

SEQ ID NO: 325858 - DNA, 25 bp, Artificial
  Probe
tcctggctgccctatgcgtgcgctg

SEQ ID NO: 325859 - DNA, 25 bp, Artificial
  Probe
cctgcaggaacttaactgaaagcct

SEQ ID NO: 325860 - DNA, 25 bp, Artificial
  Probe
gccctgtggagctgggcctcctgct

SEQ ID NO: 325861 - DNA, 25 bp, Artificial
  Probe
ccagcaaccctgaccttggagacag

SEQ ID NO: 325862 - DNA, 25 bp, Artificial
  Probe
agctgccggctgctggatcccaggc

SEQ ID NO: 325863 - DNA, 25 bp, Artificial
  Probe
gctggctccgggactaacacctttc

SEQ ID NO: 325864 - DNA, 25 bp, Artificial
  Probe
tgacacgtggtgtaacggaaaggac

SEQ ID NO: 325865 - DNA, 25 bp, Artificial
  Probe
agaggaatgtcactttctcaaagga

SEQ ID NO: 325866 - DNA, 25 bp, Artificial
  Probe
gcagtgaccagataaacttgaattg

SEQ ID NO: 325867 - DNA, 25 bp, Artificial
  Probe
gtaaaagcaactgctataggtgtgc

SEQ ID NO: 325868 - DNA, 25 bp, Artificial
  Probe
tcactttctcaaaggaagactcagc

SEQ ID NO: 325869 - DNA, 25 bp, Artificial
  Probe
ctttcatgtaacttttctgtcagga

SEQ ID NO: 325870 - DNA, 25 bp, Artificial
  Probe
ctgtagactagacacagtgagtgtg

SEQ ID NO: 325871 - DNA, 25 bp, Artificial
  Probe
gacaggttctgtagactagacacag

SEQ ID NO: 325872 - DNA, 25 bp, Artificial
  Probe
ttagccacgagtttttgcagtgacc

SEQ ID NO: 325873 - DNA, 25 bp, Artificial
  Probe
aaagcaactgctataggtgtgccga

SEQ ID NO: 325874 - DNA, 25 bp, Artificial
  Probe
tcagcatcgccaatgctgctcctga

SEQ ID NO: 325875 - DNA, 25 bp, Artificial
  Probe
gtttttgcagtgaccagataaactt

SEQ ID NO: 325876 - DNA, 25 bp, Artificial
  Probe
atggcggcagtgcttaaaaatcaac

SEQ ID NO: 325877 - DNA, 25 bp, Artificial
  Probe
cctgaccaagggaaagagaggtgaa

SEQ ID NO: 325878 - DNA, 25 bp, Artificial
  Probe
aggacaggttctgtagactagacac

SEQ ID NO: 325879 - DNA, 25 bp, Artificial
  Probe
aggaagactcagcatcgccaatgct

SEQ ID NO: 325880 - DNA, 25 bp, Artificial
  Probe
ctgctataggtgtgccgacaagtat

SEQ ID NO: 325881 - DNA, 25 bp, Artificial
  Probe
cctttcatgtaacttttctgtcagg

SEQ ID NO: 325882 - DNA, 25 bp, Artificial
  Probe
aaaggaagactcagcatcgccaatg

SEQ ID NO: 325883 - DNA, 25 bp, Artificial
  Probe
aattgactggcttcaaagggtactg

SEQ ID NO: 325884 - DNA, 25 bp, Artificial
  Probe
taattgactggcttcaaagggtact

SEQ ID NO: 325885 - DNA, 25 bp, Artificial
  Probe
ccacgagtttttgcagtgaccagat

SEQ ID NO: 325886 - DNA, 25 bp, Artificial
  Probe
ataggtgtgccgacaagtatgtcct

SEQ ID NO: 325887 - DNA, 25 bp, Artificial
  Probe
gagatggcggcagtgcttaaaaatc

SEQ ID NO: 325888 - DNA, 25 bp, Artificial
  Probe
ttctcaaaggaagactcagcatcgc

SEQ ID NO: 325889 - DNA, 25 bp, Artificial
  Probe
tgctcctgaccaagggaaagagagg

SEQ ID NO: 325890 - DNA, 25 bp, Artificial
  Probe
aacttgaattgacacgtggtgtaac

SEQ ID NO: 325891 - DNA, 25 bp, Artificial
  Probe
atcgccaatgctgctcctgaccaag

SEQ ID NO: 325892 - DNA, 25 bp, Artificial
  Probe
ggacaggttctgtagactagacaca

SEQ ID NO: 325893 - DNA, 25 bp, Artificial
  Probe
tcaaagggtactgtggcaaccaaat

SEQ ID NO: 325894 - DNA, 25 bp, Artificial
  Probe
tcgccaatgctgctcctgaccaagg

SEQ ID NO: 325895 - DNA, 25 bp, Artificial
  Probe
ccggcatcgttggaagtaaaagcaa

SEQ ID NO: 325896 - DNA, 25 bp, Artificial
  Probe
cttgaattgacacgtggtgtaacgg

SEQ ID NO: 325897 - DNA, 25 bp, Artificial
  Probe
caggactgcagttaatgtgaacatt

SEQ ID NO: 325898 - DNA, 25 bp, Artificial
  Probe
gactagacacagtgagtgtgtggac

SEQ ID NO: 325899 - DNA, 25 bp, Artificial
  Probe
tctgtcaggactgcagttaatgtga

SEQ ID NO: 325900 - DNA, 25 bp, Artificial
  Probe
ccgacaagtatgtcctaaaacagcc

SEQ ID NO: 325901 - DNA, 25 bp, Artificial
  Probe
aggttctgtagactagacacagtga

SEQ ID NO: 325902 - DNA, 25 bp, Artificial
  Probe
acgagtttttgcagtgaccagataa

SEQ ID NO: 325903 - DNA, 25 bp, Artificial
  Probe
agatggcggcagtgcttaaaaatca

SEQ ID NO: 325904 - DNA, 25 bp, Artificial
  Probe
tttgcagtgaccagataaacttgaa

SEQ ID NO: 325905 - DNA, 25 bp, Artificial
  Probe
gagtttttgcagtgaccagataaac

SEQ ID NO: 325906 - DNA, 25 bp, Artificial
  Probe
acacgtggtgtaacggaaaggacag

SEQ ID NO: 325907 - DNA, 25 bp, Artificial
  Probe
ttcaaagggtactgtggcaaccaaa

SEQ ID NO: 325908 - DNA, 25 bp, Artificial
  Probe
actttctcaaaggaagactcagcat

SEQ ID NO: 325909 - DNA, 25 bp, Artificial
  Probe
gaagactcagcatcgccaatgctgc

SEQ ID NO: 325910 - DNA, 25 bp, Artificial
  Probe
tagccccgtcataacaaaggtacca

SEQ ID NO: 325911 - DNA, 25 bp, Artificial
  Probe
agccccgtcataacaaaggtaccat

SEQ ID NO: 325912 - DNA, 25 bp, Artificial
  Probe
tgacactgttcttggctcaatgagc

SEQ ID NO: 325913 - DNA, 25 bp, Artificial
  Probe
tcataacaaaggtaccatcgtaggc

SEQ ID NO: 325914 - DNA, 25 bp, Artificial
  Probe
ctgttcttggctcaatgagcatgct

SEQ ID NO: 325915 - DNA, 25 bp, Artificial
  Probe
gagaggcgttctcatcggaaattta

SEQ ID NO: 325916 - DNA, 25 bp, Artificial
  Probe
gctcatacactcgtatgatactctg

SEQ ID NO: 325917 - DNA, 25 bp, Artificial
  Probe
ctcgtatgatactctgacactgttc

SEQ ID NO: 325918 - DNA, 25 bp, Artificial
  Probe
ttctctcggctcatacactcgtatg

SEQ ID NO: 325919 - DNA, 25 bp, Artificial
  Probe
ctcggctcatacactcgtatgatac

SEQ ID NO: 325920 - DNA, 25 bp, Artificial
  Probe
atgggtgttatcacctagctgaatg

SEQ ID NO: 325921 - DNA, 25 bp, Artificial
  Probe
cgtatgatactctgacactgttctt

SEQ ID NO: 325922 - DNA, 25 bp, Artificial
  Probe
atgatactctgacactgttcttggc

SEQ ID NO: 325923 - DNA, 25 bp, Artificial
  Probe
tttctatgggtgttatcacctagct

SEQ ID NO: 325924 - DNA, 25 bp, Artificial
  Probe
gttatcacctagctgaatgtttttc

SEQ ID NO: 325925 - DNA, 25 bp, Artificial
  Probe
ccttcccgctgagaagggtgtagcc

SEQ ID NO: 325926 - DNA, 25 bp, Artificial
  Probe
cggctcatacactcgtatgatactc

SEQ ID NO: 325927 - DNA, 25 bp, Artificial
  Probe
cgttctcatcggaaatttagcatcg

SEQ ID NO: 325928 - DNA, 25 bp, Artificial
  Probe
cgtcataacaaaggtaccatcgtag

SEQ ID NO: 325929 - DNA, 25 bp, Artificial
  Probe
tctctcggctcatacactcgtatga

SEQ ID NO: 325930 - DNA, 25 bp, Artificial
  Probe
actctgacactgttcttggctcaat

SEQ ID NO: 325931 - DNA, 25 bp, Artificial
  Probe
tggctcaatgagcatgctcacactt

SEQ ID NO: 325932 - DNA, 25 bp, Artificial
  Probe
ctatgggtgttatcacctagctgaa

SEQ ID NO: 325933 - DNA, 25 bp, Artificial
  Probe
aggtaccatcgtaggctggctccca

SEQ ID NO: 325934 - DNA, 25 bp, Artificial
  Probe
tgttcttggctcaatgagcatgctc

SEQ ID NO: 325935 - DNA, 25 bp, Artificial
  Probe
tgatactctgacactgttcttggct

SEQ ID NO: 325936 - DNA, 25 bp, Artificial
  Probe
gctcaatgagcatgctcacacttta

SEQ ID NO: 325937 - DNA, 25 bp, Artificial
  Probe
tctgacactgttcttggctcaatga

SEQ ID NO: 325938 - DNA, 25 bp, Artificial
  Probe
ggtgtagccccgtcataacaaaggt

SEQ ID NO: 325939 - DNA, 25 bp, Artificial
  Probe
acaagagaggcgttctcatcggaaa

SEQ ID NO: 325940 - DNA, 25 bp, Artificial
  Probe
cacctagctgaatgtttttctaaag

SEQ ID NO: 325941 - DNA, 25 bp, Artificial
  Probe
ggtgttatcacctagctgaatgttt

SEQ ID NO: 325942 - DNA, 25 bp, Artificial
  Probe
gggtgttatcacctagctgaatgtt

SEQ ID NO: 325943 - DNA, 25 bp, Artificial
  Probe
acactcgtatgatactctgacactg

SEQ ID NO: 325944 - DNA, 25 bp, Artificial
  Probe
actgttcttggctcaatgagcatgc

SEQ ID NO: 325945 - DNA, 25 bp, Artificial
  Probe
tctcatcggaaatttagcatcgtag

SEQ ID NO: 325946 - DNA, 25 bp, Artificial
  Probe
ccccgtcataacaaaggtaccatcg

SEQ ID NO: 325947 - DNA, 25 bp, Artificial
  Probe
aagagaggcgttctcatcggaaatt

SEQ ID NO: 325948 - DNA, 25 bp, Artificial
  Probe
tttttctatgggtgttatcacctag

SEQ ID NO: 325949 - DNA, 25 bp, Artificial
  Probe
ccgtcataacaaaggtaccatcgta

SEQ ID NO: 325950 - DNA, 25 bp, Artificial
  Probe
caaaggtaccatcgtaggctggctc

SEQ ID NO: 325951 - DNA, 25 bp, Artificial
  Probe
ttcccgctgagaagggtgtagcccc

SEQ ID NO: 325952 - DNA, 25 bp, Artificial
  Probe
taacaaaggtaccatcgtaggctgg

SEQ ID NO: 325953 - DNA, 25 bp, Artificial
  Probe
tgtagccccgtcataacaaaggtac

SEQ ID NO: 325954 - DNA, 25 bp, Artificial
  Probe
gaggcgttctcatcggaaatttagc

SEQ ID NO: 325955 - DNA, 25 bp, Artificial
  Probe
gtgttatcacctagctgaatgtttt

SEQ ID NO: 325956 - DNA, 25 bp, Artificial
  Probe
cccgtgagcgagatgcagcaccgaa

SEQ ID NO: 325957 - DNA, 25 bp, Artificial
  Probe
cttggctgtcacgaccgcggtggcc

SEQ ID NO: 325958 - DNA, 25 bp, Artificial
  Probe
cttagcggccttagcgggacaggcc

SEQ ID NO: 325959 - DNA, 25 bp, Artificial
  Probe
agcaccgaagtttcttccttctagc

SEQ ID NO: 325960 - DNA, 25 bp, Artificial
  Probe
tctagcccttgttgccctcttggct

SEQ ID NO: 325961 - DNA, 25 bp, Artificial
  Probe
gcaccgaagtttcttccttctagcc

SEQ ID NO: 325962 - DNA, 25 bp, Artificial
  Probe
cgagatgcagcaccgaagtttcttc

SEQ ID NO: 325963 - DNA, 25 bp, Artificial
  Probe
ttggctgtcacgaccgcggtggcca

SEQ ID NO: 325964 - DNA, 25 bp, Artificial
  Probe
tttcttccttctagcccttgttgcc

SEQ ID NO: 325965 - DNA, 25 bp, Artificial
  Probe
tcttggctgtcacgaccgcggtggc

SEQ ID NO: 325966 - DNA, 25 bp, Artificial
  Probe
cgaagtttcttccttctagcccttg

SEQ ID NO: 325967 - DNA, 25 bp, Artificial
  Probe
gagcgagatgcagcaccgaagtttc

SEQ ID NO: 325968 - DNA, 25 bp, Artificial
  Probe
gcccgtgagcgagatgcagcaccga

SEQ ID NO: 325969 - DNA, 25 bp, Artificial
  Probe
gcatcgagccggcccgtgagcgaga

SEQ ID NO: 325970 - DNA, 25 bp, Artificial
  Probe
ccttagcggccttagcgggacaggc

SEQ ID NO: 325971 - DNA, 25 bp, Artificial
  Probe
ttgttgccctcttggctgtcacgac

SEQ ID NO: 325972 - DNA, 25 bp, Artificial
  Probe
acgaagcatcgagccggcccgtgag

SEQ ID NO: 325973 - DNA, 25 bp, Artificial
  Probe
atgcagcaccgaagtttcttccttc

SEQ ID NO: 325974 - DNA, 25 bp, Artificial
  Probe
agtttcttccttctagcccttgttg

SEQ ID NO: 325975 - DNA, 25 bp, Artificial
  Probe
ttctagcccttgttgccctcttggc

SEQ ID NO: 325976 - DNA, 25 bp, Artificial
  Probe
aacgaagcatcgagccggcccgtga

SEQ ID NO: 325977 - DNA, 25 bp, Artificial
  Probe
tcacgaccgcggtggccaaaaagaa

SEQ ID NO: 325978 - DNA, 25 bp, Artificial
  Probe
ccttgttgccctcttggctgtcacg

SEQ ID NO: 325979 - DNA, 25 bp, Artificial
  Probe
ggccttagcgggacaggccgtagcg

SEQ ID NO: 325980 - DNA, 25 bp, Artificial
  Probe
agcgagatgcagcaccgaagtttct

SEQ ID NO: 325981 - DNA, 25 bp, Artificial
  Probe
tgagcgagatgcagcaccgaagttt

SEQ ID NO: 325982 - DNA, 25 bp, Artificial
  Probe
agaagggcagcgagtgttcggagtg

SEQ ID NO: 325983 - DNA, 25 bp, Artificial
  Probe
tgcagcaccgaagtttcttccttct

SEQ ID NO: 325984 - DNA, 25 bp, Artificial
  Probe
gcgagatgcagcaccgaagtttctt

SEQ ID NO: 325985 - DNA, 25 bp, Artificial
  Probe
ctcttggctgtcacgaccgcggtgg

SEQ ID NO: 325986 - DNA, 25 bp, Artificial
  Probe
gtttcttccttctagcccttgttgc

SEQ ID NO: 325987 - DNA, 25 bp, Artificial
  Probe
gaacgaagcatcgagccggcccgtg

SEQ ID NO: 325988 - DNA, 25 bp, Artificial
  Probe
cttgttgccctcttggctgtcacga

SEQ ID NO: 325989 - DNA, 25 bp, Artificial
  Probe
gaagtttcttccttctagcccttgt

SEQ ID NO: 325990 - DNA, 25 bp, Artificial
  Probe
agcagcaaggactgcggcatgggtt

SEQ ID NO: 325991 - DNA, 25 bp, Artificial
  Probe
gcagcaccgaagtttcttccttcta

SEQ ID NO: 325992 - DNA, 25 bp, Artificial
  Probe
cctcttggctgtcacgaccgcggtg

SEQ ID NO: 325993 - DNA, 25 bp, Artificial
  Probe
cgtagcgggagggaacgaagcatcg

SEQ ID NO: 325994 - DNA, 25 bp, Artificial
  Probe
ggcccgtgagcgagatgcagcaccg

SEQ ID NO: 325995 - DNA, 25 bp, Artificial
  Probe
cttctagcccttgttgccctcttgg

SEQ ID NO: 325996 - DNA, 25 bp, Artificial
  Probe
gagccggcccgtgagcgagatgcag

SEQ ID NO: 325997 - DNA, 25 bp, Artificial
  Probe
gagtggacctgggggccctgcaccc

SEQ ID NO: 325998 - DNA, 25 bp, Artificial
  Probe
gatgcagcaccgaagtttcttcctt

SEQ ID NO: 325999 - DNA, 25 bp, Artificial
  Probe
ggaacgaagcatcgagccggcccgt

SEQ ID NO: 326000 - DNA, 25 bp, Artificial
  Probe
agatgcagcaccgaagtttcttcct

SEQ ID NO: 326001 - DNA, 25 bp, Artificial
  Probe
cagcaccgaagtttcttccttctag

SEQ ID NO: 326002 - DNA, 25 bp, Artificial
  Probe
tgcggctggatacttggacattaaa

SEQ ID NO: 326003 - DNA, 25 bp, Artificial
  Probe
tttgggcccacactaggcctgctgc

SEQ ID NO: 326004 - DNA, 25 bp, Artificial
  Probe
ccccagagcctgaggctgagggctc

SEQ ID NO: 326005 - DNA, 25 bp, Artificial
  Probe
cagctgcccagtgcagagctttcct

SEQ ID NO: 326006 - DNA, 25 bp, Artificial
  Probe
gcgaaggtctcagcagcccagctgg

SEQ ID NO: 326007 - DNA, 25 bp, Artificial
  Probe
accagctgcccagtgcagagctttc

SEQ ID NO: 326008 - DNA, 25 bp, Artificial
  Probe
cagctcacctgcagggctggcacta

SEQ ID NO: 326009 - DNA, 25 bp, Artificial
  Probe
tcagaaccagtgtccccaagtcgtg

SEQ ID NO: 326010 - DNA, 25 bp, Artificial
  Probe
cacctgcagggctggcactaggcaa

SEQ ID NO: 326011 - DNA, 25 bp, Artificial
  Probe
gactttgggcccacactaggcctgc

SEQ ID NO: 326012 - DNA, 25 bp, Artificial
  Probe
gcctacaacacagattaccagctgc

SEQ ID NO: 326013 - DNA, 25 bp, Artificial
  Probe
tctcagcagcccagctggaggatcc

SEQ ID NO: 326014 - DNA, 25 bp, Artificial
  Probe
cttcagctcacctgcagggctggca

SEQ ID NO: 326015 - DNA, 25 bp, Artificial
  Probe
gtgtccccaagtcgtgaacgcagcc

SEQ ID NO: 326016 - DNA, 25 bp, Artificial
  Probe
ctgagcctggcgaaggtctcagcag

SEQ ID NO: 326017 - DNA, 25 bp, Artificial
  Probe
ggcactaggcaacgtcaccgcctgg

SEQ ID NO: 326018 - DNA, 25 bp, Artificial
  Probe
agcctggcgaaggtctcagcagccc

SEQ ID NO: 326019 - DNA, 25 bp, Artificial
  Probe
tggcactaggcaacgtcaccgcctg

SEQ ID NO: 326020 - DNA, 25 bp, Artificial
  Probe
cggctggatacttggacattaaagt

SEQ ID NO: 326021 - DNA, 25 bp, Artificial
  Probe
ccttgccccatgtgggtgctgctct

SEQ ID NO: 326022 - DNA, 25 bp, Artificial
  Probe
cacttggtccctgtttctctcagca

SEQ ID NO: 326023 - DNA, 25 bp, Artificial
  Probe
tggtccctgtttctctcagcaacct

SEQ ID NO: 326024 - DNA, 25 bp, Artificial
  Probe
taccagctgcccagtgcagagcttt

SEQ ID NO: 326025 - DNA, 25 bp, Artificial
  Probe
tgagcctggcgaaggtctcagcagc

SEQ ID NO: 326026 - DNA, 25 bp, Artificial
  Probe
cacatcagcatcaagtcagaaccag

SEQ ID NO: 326027 - DNA, 25 bp, Artificial
  Probe
gaaggtctcagcagcccagctggag

SEQ ID NO: 326028 - DNA, 25 bp, Artificial
  Probe
agggctggcactaggcaacgtcacc

SEQ ID NO: 326029 - DNA, 25 bp, Artificial
  Probe
accagtgtccccaagtcgtgaacgc

SEQ ID NO: 326030 - DNA, 25 bp, Artificial
  Probe
gggtgctgctctcactgtcactacc

SEQ ID NO: 326031 - DNA, 25 bp, Artificial
  Probe
agctgcccagtgcagagctttcctc

SEQ ID NO: 326032 - DNA, 25 bp, Artificial
  Probe
tgcccagtgcagagctttcctcctt

SEQ ID NO: 326033 - DNA, 25 bp, Artificial
  Probe
aggatgcggctggatacttggacat

SEQ ID NO: 326034 - DNA, 25 bp, Artificial
  Probe
ttgggcccacactaggcctgctgcg

SEQ ID NO: 326035 - DNA, 25 bp, Artificial
  Probe
tggcgaaggtctcagcagcccagct

SEQ ID NO: 326036 - DNA, 25 bp, Artificial
  Probe
cagattaccagctgcccagtgcaga

SEQ ID NO: 326037 - DNA, 25 bp, Artificial
  Probe
cagctggaggatcctatgagaccgg

SEQ ID NO: 326038 - DNA, 25 bp, Artificial
  Probe
tgcagggctggcactaggcaacgtc

SEQ ID NO: 326039 - DNA, 25 bp, Artificial
  Probe
gtgcagagctttcctccttaccagc

SEQ ID NO: 326040 - DNA, 25 bp, Artificial
  Probe
agccttcagctcacctgcagggctg

SEQ ID NO: 326041 - DNA, 25 bp, Artificial
  Probe
actaggcaacgtcaccgcctggcag

SEQ ID NO: 326042 - DNA, 25 bp, Artificial
  Probe
tcaagtcagaaccagtgtccccaag

SEQ ID NO: 326043 - DNA, 25 bp, Artificial
  Probe
cagtgcagagctttcctccttacca

SEQ ID NO: 326044 - DNA, 25 bp, Artificial
  Probe
gcccagtgcagagctttcctcctta

SEQ ID NO: 326045 - DNA, 25 bp, Artificial
  Probe
gccccatgtgggtgctgctctcact

SEQ ID NO: 326046 - DNA, 25 bp, Artificial
  Probe
acaacacagattaccagctgcccag

SEQ ID NO: 326047 - DNA, 25 bp, Artificial
  Probe
gccttcagctcacctgcagggctgg

SEQ ID NO: 326048 - DNA, 25 bp, Artificial
  Probe
aacagcgcattgatgaatttgagtc

SEQ ID NO: 326049 - DNA, 25 bp, Artificial
  Probe
agacaaatacaagaccctgcgccag

SEQ ID NO: 326050 - DNA, 25 bp, Artificial
  Probe
catgatccatgctgagaacatgcga

SEQ ID NO: 326051 - DNA, 25 bp, Artificial
  Probe
agagctggccaatgcccgagatgag

SEQ ID NO: 326052 - DNA, 25 bp, Artificial
  Probe
acagcgcattgatgaatttgagtcc

SEQ ID NO: 326053 - DNA, 25 bp, Artificial
  Probe
tgagtccaagaagactaccaatgac

SEQ ID NO: 326054 - DNA, 25 bp, Artificial
  Probe
gatgctatggccaaggaccgcagtg

SEQ ID NO: 326055 - DNA, 25 bp, Artificial
  Probe
tccttgggcaaacaaatggcccacc

SEQ ID NO: 326056 - DNA, 25 bp, Artificial
  Probe
gaagaacgtaccactgaggcagaga

SEQ ID NO: 326057 - DNA, 25 bp, Artificial
  Probe
cccgagatgagtccaagaagactac

SEQ ID NO: 326058 - DNA, 25 bp, Artificial
  Probe
gtttccctattcatatccttgggca

SEQ ID NO: 326059 - DNA, 25 bp, Artificial
  Probe
agagcctgctgagaatgaacatgat

SEQ ID NO: 326060 - DNA, 25 bp, Artificial
  Probe
tatgaccatgggaccaaatttagtt

SEQ ID NO: 326061 - DNA, 25 bp, Artificial
  Probe
atgctgagaacatgcgactgggacg

SEQ ID NO: 326062 - DNA, 25 bp, Artificial
  Probe
ttacttcagagctggccaatgcccg

SEQ ID NO: 326063 - DNA, 25 bp, Artificial
  Probe
agaatgagcgtgtgcagaagcatct

SEQ ID NO: 326064 - DNA, 25 bp, Artificial
  Probe
tcagagctggccaatgcccgagatg

SEQ ID NO: 326065 - DNA, 25 bp, Artificial
  Probe
cgggctgatgctatggccaaggacc

SEQ ID NO: 326066 - DNA, 25 bp, Artificial
  Probe
gccaaggaccgcagtgaggaagaac

SEQ ID NO: 326067 - DNA, 25 bp, Artificial
  Probe
ctatggccaaggaccgcagtgagga

SEQ ID NO: 326068 - DNA, 25 bp, Artificial
  Probe
cctgctggagccactaactagaaaa

SEQ ID NO: 326069 - DNA, 25 bp, Artificial
  Probe
agctgcgggctgatgctatggccaa

SEQ ID NO: 326070 - DNA, 25 bp, Artificial
  Probe
taccaaacattcagtatgaccatgg

SEQ ID NO: 326071 - DNA, 25 bp, Artificial
  Probe
taactaacaccctgctggagccact

SEQ ID NO: 326072 - DNA, 25 bp, Artificial
  Probe
accaatgacatgatccatgctgaga

SEQ ID NO: 326073 - DNA, 25 bp, Artificial
  Probe
gagacaaatacaagaccctgcgcca

SEQ ID NO: 326074 - DNA, 25 bp, Artificial
  Probe
gttttgcctaactaacaccctgctg

SEQ ID NO: 326075 - DNA, 25 bp, Artificial
  Probe
agaagcatcttaaggcccttacttc

SEQ ID NO: 326076 - DNA, 25 bp, Artificial
  Probe
caaatggcccacctgtgtagccaat

SEQ ID NO: 326077 - DNA, 25 bp, Artificial
  Probe
gagccataccaaacattcagtatga

SEQ ID NO: 326078 - DNA, 25 bp, Artificial
  Probe
tagtttccctattcatatccttggg

SEQ ID NO: 326079 - DNA, 25 bp, Artificial
  Probe
tagaaaagccttggagccataccaa

SEQ ID NO: 326080 - DNA, 25 bp, Artificial
  Probe
tcagtatgaccatgggaccaaattt

SEQ ID NO: 326081 - DNA, 25 bp, Artificial
  Probe
aggaccgcagtgaggaagaacgtac

SEQ ID NO: 326082 - DNA, 25 bp, Artificial
  Probe
agccttggagccataccaaacattc

SEQ ID NO: 326083 - DNA, 25 bp, Artificial
  Probe
tgaccatgggaccaaatttagtttc

SEQ ID NO: 326084 - DNA, 25 bp, Artificial
  Probe
tgagcgtgtgcagaagcatcttaag

SEQ ID NO: 326085 - DNA, 25 bp, Artificial
  Probe
aggaagaacgtaccactgaggcaga

SEQ ID NO: 326086 - DNA, 25 bp, Artificial
  Probe
ggccaatgcccgagatgagtccaag

SEQ ID NO: 326087 - DNA, 25 bp, Artificial
  Probe
tttgagtccatgtagtgggcgcgca

SEQ ID NO: 326088 - DNA, 25 bp, Artificial
  Probe
tgcgactgggacgagacaaatacaa

SEQ ID NO: 326089 - DNA, 25 bp, Artificial
  Probe
atatccttgggcaaacaaatggccc

SEQ ID NO: 326090 - DNA, 25 bp, Artificial
  Probe
gaatttgagtccatgtagtgggcgc

SEQ ID NO: 326091 - DNA, 25 bp, Artificial
  Probe
tgtgcagaagcatcttaaggccctt

SEQ ID NO: 326092 - DNA, 25 bp, Artificial
  Probe
atcttaaggcccttacttcagagct

SEQ ID NO: 326093 - DNA, 25 bp, Artificial
  Probe
aatacaagaccctgcgccagatccg

SEQ ID NO: 326094 - DNA, 25 bp, Artificial
  Probe
tggtcatcccaggagcaaagaggga

SEQ ID NO: 326095 - DNA, 25 bp, Artificial
  Probe
actaacagaggttcctgcttcccaa

SEQ ID NO: 326096 - DNA, 25 bp, Artificial
  Probe
agaggttcctgcttcccaaatcttg

SEQ ID NO: 326097 - DNA, 25 bp, Artificial
  Probe
tcaatctggtcatcccaggagcaaa

SEQ ID NO: 326098 - DNA, 25 bp, Artificial
  Probe
tttccaggaactgaagtcagaacta

SEQ ID NO: 326099 - DNA, 25 bp, Artificial
  Probe
atcaatctggtcatcccaggagcaa

SEQ ID NO: 326100 - DNA, 25 bp, Artificial
  Probe
gacacgttggctttccaggaactga

SEQ ID NO: 326101 - DNA, 25 bp, Artificial
  Probe
gaggttcctgcttcccaaatcttga

SEQ ID NO: 326102 - DNA, 25 bp, Artificial
  Probe
tcccaggagcaaagagggagacaaa

SEQ ID NO: 326103 - DNA, 25 bp, Artificial
  Probe
aatttggacacgttggctttccagg

SEQ ID NO: 326104 - DNA, 25 bp, Artificial
  Probe
ggacacgttggctttccaggaactg

SEQ ID NO: 326105 - DNA, 25 bp, Artificial
  Probe
tccagggaagtctctcagtggaatt

SEQ ID NO: 326106 - DNA, 25 bp, Artificial
  Probe
gtctctcagtggaatttggacacgt

SEQ ID NO: 326107 - DNA, 25 bp, Artificial
  Probe
agaatcaatctggtcatcccaggag

SEQ ID NO: 326108 - DNA, 25 bp, Artificial
  Probe
ggaagtctctcagtggaatttggac

SEQ ID NO: 326109 - DNA, 25 bp, Artificial
  Probe
gaagtctctcagtggaatttggaca

SEQ ID NO: 326110 - DNA, 25 bp, Artificial
  Probe
tctctcagtggaatttggacacgtt

SEQ ID NO: 326111 - DNA, 25 bp, Artificial
  Probe
tcatcccaggagcaaagagggagac

SEQ ID NO: 326112 - DNA, 25 bp, Artificial
  Probe
ttggctttccaggaactgaagtcag

SEQ ID NO: 326113 - DNA, 25 bp, Artificial
  Probe
agaactaacagaggttcctgcttcc

SEQ ID NO: 326114 - DNA, 25 bp, Artificial
  Probe
gaactaacagaggttcctgcttccc

SEQ ID NO: 326115 - DNA, 25 bp, Artificial
  Probe
gtcatcccaggagcaaagagggaga

SEQ ID NO: 326116 - DNA, 25 bp, Artificial
  Probe
ctctcagtggaatttggacacgttg

SEQ ID NO: 326117 - DNA, 25 bp, Artificial
  Probe
ctaacagaggttcctgcttcccaaa

SEQ ID NO: 326118 - DNA, 25 bp, Artificial
  Probe
aactaacagaggttcctgcttccca

SEQ ID NO: 326119 - DNA, 25 bp, Artificial
  Probe
ctttccaggaactgaagtcagaact

SEQ ID NO: 326120 - DNA, 25 bp, Artificial
  Probe
atttggacacgttggctttccagga

SEQ ID NO: 326121 - DNA, 25 bp, Artificial
  Probe
atcttgaagaatcaatctggtcatc

SEQ ID NO: 326122 - DNA, 25 bp, Artificial
  Probe
ttccaggaactgaagtcagaactaa

SEQ ID NO: 326123 - DNA, 25 bp, Artificial
  Probe
ccagggaagtctctcagtggaattt

SEQ ID NO: 326124 - DNA, 25 bp, Artificial
  Probe
aacagaggttcctgcttcccaaatc

SEQ ID NO: 326125 - DNA, 25 bp, Artificial
  Probe
catcccaggagcaaagagggagaca

SEQ ID NO: 326126 - DNA, 25 bp, Artificial
  Probe
aagtcagaactaacagaggttcctg

SEQ ID NO: 326127 - DNA, 25 bp, Artificial
  Probe
cagaggttcctgcttcccaaatctt

SEQ ID NO: 326128 - DNA, 25 bp, Artificial
  Probe
gaatcaatctggtcatcccaggagc

SEQ ID NO: 326129 - DNA, 25 bp, Artificial
  Probe
cccaaatcttgaagaatcaatctgg

SEQ ID NO: 326130 - DNA, 25 bp, Artificial
  Probe
ctggtcatcccaggagcaaagaggg

SEQ ID NO: 326131 - DNA, 25 bp, Artificial
  Probe
tctggtcatcccaggagcaaagagg

SEQ ID NO: 326132 - DNA, 25 bp, Artificial
  Probe
cagggaagtctctcagtggaatttg

SEQ ID NO: 326133 - DNA, 25 bp, Artificial
  Probe
atcccaggagcaaagagggagacaa

SEQ ID NO: 326134 - DNA, 25 bp, Artificial
  Probe
ggaatttggacacgttggctttcca

SEQ ID NO: 326135 - DNA, 25 bp, Artificial
  Probe
aagtctctcagtggaatttggacac

SEQ ID NO: 326136 - DNA, 25 bp, Artificial
  Probe
gaatttggacacgttggctttccag

SEQ ID NO: 326137 - DNA, 25 bp, Artificial
  Probe
agtctctcagtggaatttggacacg

SEQ ID NO: 326138 - DNA, 25 bp, Artificial
  Probe
acagaggttcctgcttcccaaatct

SEQ ID NO: 326139 - DNA, 25 bp, Artificial
  Probe
aatcaatctggtcatcccaggagca

SEQ ID NO: 326140 - DNA, 25 bp, Artificial
  Probe
cacctagcagccatccttggagagg

SEQ ID NO: 326141 - DNA, 25 bp, Artificial
  Probe
gggctctctaggtcccgacgcagca

SEQ ID NO: 326142 - DNA, 25 bp, Artificial
  Probe
ccttcctggatttcctcctgggctt

SEQ ID NO: 326143 - DNA, 25 bp, Artificial
  Probe
gcgctggagctctcggcagaaccca

SEQ ID NO: 326144 - DNA, 25 bp, Artificial
  Probe
gtcgcagagcttagcccagagctgt

SEQ ID NO: 326145 - DNA, 25 bp, Artificial
  Probe
gagaggcatctacagtagagaaact

SEQ ID NO: 326146 - DNA, 25 bp, Artificial
  Probe
gaacccagcgtcaggcaggcgaccg

SEQ ID NO: 326147 - DNA, 25 bp, Artificial
  Probe
aggaccaggtctggtcgcagagctt

SEQ ID NO: 326148 - DNA, 25 bp, Artificial
  Probe
agagcttagcccagagctgtcttgg

SEQ ID NO: 326149 - DNA, 25 bp, Artificial
  Probe
gaggcatctacagtagagaaactct

SEQ ID NO: 326150 - DNA, 25 bp, Artificial
  Probe
ccagagctgtcttgggcgcccttag

SEQ ID NO: 326151 - DNA, 25 bp, Artificial
  Probe
agacgccgatgaatggtgcgacagt

SEQ ID NO: 326152 - DNA, 25 bp, Artificial
  Probe
cagccctgcacttggccgtgataca

SEQ ID NO: 326153 - DNA, 25 bp, Artificial
  Probe
cagaacccagcgtcaggcaggcgac

SEQ ID NO: 326154 - DNA, 25 bp, Artificial
  Probe
tcctgggcttctctgccggcactga

SEQ ID NO: 326155 - DNA, 25 bp, Artificial
  Probe
agtctttggctacgtcactgaggat

SEQ ID NO: 326156 - DNA, 25 bp, Artificial
  Probe
ggaaaactgcagacgccgatgaatg

SEQ ID NO: 326157 - DNA, 25 bp, Artificial
  Probe
tgcagaacgacctaggccaaacagc

SEQ ID NO: 326158 - DNA, 25 bp, Artificial
  Probe
agcacgagcccttcctggatttcct

SEQ ID NO: 326159 - DNA, 25 bp, Artificial
  Probe
ctgcagacgccgatgaatggtgcga

SEQ ID NO: 326160 - DNA, 25 bp, Artificial
  Probe
gaccaggtctggtcgcagagcttag

SEQ ID NO: 326161 - DNA, 25 bp, Artificial
  Probe
ttggccgtgatacatcagcacgagc

SEQ ID NO: 326162 - DNA, 25 bp, Artificial
  Probe
ttagtctttggctacgtcactgagg

SEQ ID NO: 326163 - DNA, 25 bp, Artificial
  Probe
agtggcctgggctctctaggtcccg

SEQ ID NO: 326164 - DNA, 25 bp, Artificial
  Probe
ggagctctcggcagaacccagcgtc

SEQ ID NO: 326165 - DNA, 25 bp, Artificial
  Probe
tcttgggcgcccttagtctttggct

SEQ ID NO: 326166 - DNA, 25 bp, Artificial
  Probe
agcagctcccggaggaccaggtctg

SEQ ID NO: 326167 - DNA, 25 bp, Artificial
  Probe
ctggtcgcagagcttagcccagagc

SEQ ID NO: 326168 - DNA, 25 bp, Artificial
  Probe
tacatcagcacgagcccttcctgga

SEQ ID NO: 326169 - DNA, 25 bp, Artificial
  Probe
tcccggaggaccaggtctggtcgca

SEQ ID NO: 326170 - DNA, 25 bp, Artificial
  Probe
ttcctggatttcctcctgggcttct

SEQ ID NO: 326171 - DNA, 25 bp, Artificial
  Probe
tagagaaactctatgcagctggcgc

SEQ ID NO: 326172 - DNA, 25 bp, Artificial
  Probe
gagcccttcctggatttcctcctgg

SEQ ID NO: 326173 - DNA, 25 bp, Artificial
  Probe
gccgtgatacatcagcacgagccct

SEQ ID NO: 326174 - DNA, 25 bp, Artificial
  Probe
cctgggcttctctgccggcactgag

SEQ ID NO: 326175 - DNA, 25 bp, Artificial
  Probe
ctggatttcctcctgggcttctctg

SEQ ID NO: 326176 - DNA, 25 bp, Artificial
  Probe
ccatccttggagaggcatctacagt

SEQ ID NO: 326177 - DNA, 25 bp, Artificial
  Probe
gctctcggcagaacccagcgtcagg

SEQ ID NO: 326178 - DNA, 25 bp, Artificial
  Probe
gggaaaactgcagacgccgatgaat

SEQ ID NO: 326179 - DNA, 25 bp, Artificial
  Probe
tgcacttggccgtgatacatcagca

SEQ ID NO: 326180 - DNA, 25 bp, Artificial
  Probe
cttggagaggcatctacagtagaga

SEQ ID NO: 326181 - DNA, 25 bp, Artificial
  Probe
ccttggagaggcatctacagtagag

SEQ ID NO: 326182 - DNA, 25 bp, Artificial
  Probe
tcggcagaacccagcgtcaggcagg

SEQ ID NO: 326183 - DNA, 25 bp, Artificial
  Probe
gcccttagtctttggctacgtcact

SEQ ID NO: 326184 - DNA, 25 bp, Artificial
  Probe
ttctctgccggcactgagtacctgg

SEQ ID NO: 326185 - DNA, 25 bp, Artificial
  Probe
aggtctggtcgcagagcttagccca

SEQ ID NO: 326186 - DNA, 25 bp, Artificial
  Probe
actacagagtggagcgcgtgttcca

SEQ ID NO: 326187 - DNA, 25 bp, Artificial
  Probe
tgtccacccgggtcaccaacaggaa

SEQ ID NO: 326188 - DNA, 25 bp, Artificial
  Probe
ttcggccttgtgagcaagagcctgg

SEQ ID NO: 326189 - DNA, 25 bp, Artificial
  Probe
catttaccgcaatggagagaagttt

SEQ ID NO: 326190 - DNA, 25 bp, Artificial
  Probe
cgaaaagtggacctgtggctcagag

SEQ ID NO: 326191 - DNA, 25 bp, Artificial
  Probe
tctgactccagcatcaactgcattg

SEQ ID NO: 326192 - DNA, 25 bp, Artificial
  Probe
aagtttgagccgaactgtcaatacc

SEQ ID NO: 326193 - DNA, 25 bp, Artificial
  Probe
aaatgtaacaggtgcccagggaagt

SEQ ID NO: 326194 - DNA, 25 bp, Artificial
  Probe
tgccccgctgccagctggatgtgct

SEQ ID NO: 326195 - DNA, 25 bp, Artificial
  Probe
gtgcttctgccaggtcctgactgcc

SEQ ID NO: 326196 - DNA, 25 bp, Artificial
  Probe
ttccagagggagacaactgtgtgtt

SEQ ID NO: 326197 - DNA, 25 bp, Artificial
  Probe
agtttcagtgtttgccagggcaaat

SEQ ID NO: 326198 - DNA, 25 bp, Artificial
  Probe
gaatgggcttgtccacccgggtcac

SEQ ID NO: 326199 - DNA, 25 bp, Artificial
  Probe
agcgcgtgttccaagagctgtggaa

SEQ ID NO: 326200 - DNA, 25 bp, Artificial
  Probe
agtgacgggcgctgctgtacgccct

SEQ ID NO: 326201 - DNA, 25 bp, Artificial
  Probe
agcgcggaccccaacaacgagactg

SEQ ID NO: 326202 - DNA, 25 bp, Artificial
  Probe
gtcgaactctctgactccagcatca

SEQ ID NO: 326203 - DNA, 25 bp, Artificial
  Probe
cacctgcagagatgggcaaattggc

SEQ ID NO: 326204 - DNA, 25 bp, Artificial
  Probe
agtgccccagtatatcaccgacctg

SEQ ID NO: 326205 - DNA, 25 bp, Artificial
  Probe
gtctctactgcgaccgcagcgcgga

SEQ ID NO: 326206 - DNA, 25 bp, Artificial
  Probe
gagcctggggaagcaacagacatga

SEQ ID NO: 326207 - DNA, 25 bp, Artificial
  Probe
tgttgcgaaaagtggacctgtggct

SEQ ID NO: 326208 - DNA, 25 bp, Artificial
  Probe
tcaagtctctgcaactctgcgctgc

SEQ ID NO: 326209 - DNA, 25 bp, Artificial
  Probe
atcaaaaaaccagtcatggtcattg

SEQ ID NO: 326210 - DNA, 25 bp, Artificial
  Probe
ttccagcctacagaccggaagctac

SEQ ID NO: 326211 - DNA, 25 bp, Artificial
  Probe
tgcgctcggtgctagacggctgctc

SEQ ID NO: 326212 - DNA, 25 bp, Artificial
  Probe
gggcgctgctgtacgcccttcaata

SEQ ID NO: 326213 - DNA, 25 bp, Artificial
  Probe
tggtaaaacagactcgtctctgcat

SEQ ID NO: 326214 - DNA, 25 bp, Artificial
  Probe
agccagtgccccagtatatcaccga

SEQ ID NO: 326215 - DNA, 25 bp, Artificial
  Probe
acaatgaggccttcctccaagagct

SEQ ID NO: 326216 - DNA, 25 bp, Artificial
  Probe
ttcaataccaaaaccatccaggtgg

SEQ ID NO: 326217 - DNA, 25 bp, Artificial
  Probe
agatgggcaaattggctgtgtgccc

SEQ ID NO: 326218 - DNA, 25 bp, Artificial
  Probe
tgtacacctataagcccaggttctg

SEQ ID NO: 326219 - DNA, 25 bp, Artificial
  Probe
tgccagggcaaatcatcaaaaaacc

SEQ ID NO: 326220 - DNA, 25 bp, Artificial
  Probe
acctacagttcaagaattgcactag

SEQ ID NO: 326221 - DNA, 25 bp, Artificial
  Probe
agacaactgtgtgttcgatggggtc

SEQ ID NO: 326222 - DNA, 25 bp, Artificial
  Probe
ggtgcccgagccagtgccccagtat

SEQ ID NO: 326223 - DNA, 25 bp, Artificial
  Probe
tctccaatgtgagatggtaaaacag

SEQ ID NO: 326224 - DNA, 25 bp, Artificial
  Probe
gctgctcctgctgtccggtgtgcgc

SEQ ID NO: 326225 - DNA, 25 bp, Artificial
  Probe
acagaccggaagctaccgtaggagt

SEQ ID NO: 326226 - DNA, 25 bp, Artificial
  Probe
ttggaacctgtacctgccactccaa

SEQ ID NO: 326227 - DNA, 25 bp, Artificial
  Probe
cttccagcctacagaccggaagcta

SEQ ID NO: 326228 - DNA, 25 bp, Artificial
  Probe
ggagagttgctctgagatgagaccc

SEQ ID NO: 326229 - DNA, 25 bp, Artificial
  Probe
tcctccaagagctggagctgaagac

SEQ ID NO: 326230 - DNA, 25 bp, Artificial
  Probe
aaattggctgtgtgccccgctgcca

SEQ ID NO: 326231 - DNA, 25 bp, Artificial
  Probe
tgagcaagagcctggggaagcaaca

SEQ ID NO: 326232 - DNA, 25 bp, Artificial
  Probe
ttctctgccgggacacagacaggag

SEQ ID NO: 326233 - DNA, 25 bp, Artificial
  Probe
atccagaatactgaaggtatggaca

SEQ ID NO: 326234 - DNA, 25 bp, Artificial
  Probe
agtgctgctcggaggcatgaccgat

SEQ ID NO: 326235 - DNA, 25 bp, Artificial
  Probe
atgcagccgtgaaggggatcattgc

SEQ ID NO: 326236 - DNA, 25 bp, Artificial
  Probe
tttttcctttggaaactgaatgcca

SEQ ID NO: 326237 - DNA, 25 bp, Artificial
  Probe
aagagctggctgtacacactggacc

SEQ ID NO: 326238 - DNA, 25 bp, Artificial
  Probe
gacacagacaggagcgcatctcctc

SEQ ID NO: 326239 - DNA, 25 bp, Artificial
  Probe
cagaagtgctgctcggaggcatgac

SEQ ID NO: 326240 - DNA, 25 bp, Artificial
  Probe
catcattgccatgagctcgctgggt

SEQ ID NO: 326241 - DNA, 25 bp, Artificial
  Probe
aaggtcaagatcaatcaccagaagt

SEQ ID NO: 326242 - DNA, 25 bp, Artificial
  Probe
caagcacaaggtcaagatcaatcac

SEQ ID NO: 326243 - DNA, 25 bp, Artificial
  Probe
ttgagctctacgacggcctcaagca

SEQ ID NO: 326244 - DNA, 25 bp, Artificial
  Probe
cctactctggcctgagttcgagaag

SEQ ID NO: 326245 - DNA, 25 bp, Artificial
  Probe
aacagacaggccagtctaggagaaa

SEQ ID NO: 326246 - DNA, 25 bp, Artificial
  Probe
gttaatgcaggaaccgggcccgtgt

SEQ ID NO: 326247 - DNA, 25 bp, Artificial
  Probe
tctacgacggcctcaagcacaaggt

SEQ ID NO: 326248 - DNA, 25 bp, Artificial
  Probe
ctgctcctactctggcctgagttcg

SEQ ID NO: 326249 - DNA, 25 bp, Artificial
  Probe
gctggctgtacacactggaccccat

SEQ ID NO: 326250 - DNA, 25 bp, Artificial
  Probe
gcccgtgttctctgccgggacacag

SEQ ID NO: 326251 - DNA, 25 bp, Artificial
  Probe
aaactgaatgccataatctggatca

SEQ ID NO: 326252 - DNA, 25 bp, Artificial
  Probe
ggatcattgcccacagaggacagtg

SEQ ID NO: 326253 - DNA, 25 bp, Artificial
  Probe
gagaactacaactttgagctctacg

SEQ ID NO: 326254 - DNA, 25 bp, Artificial
  Probe
caggccagtctaggagaaaggaaga

SEQ ID NO: 326255 - DNA, 25 bp, Artificial
  Probe
tggatcaaaccgatccagaatactg

SEQ ID NO: 326256 - DNA, 25 bp, Artificial
  Probe
ccatgagctcgctgggtgtcctgct

SEQ ID NO: 326257 - DNA, 25 bp, Artificial
  Probe
agacaggagcgcatctcctcggagt

SEQ ID NO: 326258 - DNA, 25 bp, Artificial
  Probe
aagatgcagccgtgaaggggatcat

SEQ ID NO: 326259 - DNA, 25 bp, Artificial
  Probe
acctgctcctactctggcctgagtt

SEQ ID NO: 326260 - DNA, 25 bp, Artificial
  Probe
ccacagaggacagtggtggtcaagt

SEQ ID NO: 326261 - DNA, 25 bp, Artificial
  Probe
ctgaatcgcttctggcgtttcattc

SEQ ID NO: 326262 - DNA, 25 bp, Artificial
  Probe
cgggcccgtgttctctgccgggaca

SEQ ID NO: 326263 - DNA, 25 bp, Artificial
  Probe
ggacagaacagacaggccagtctag

SEQ ID NO: 326264 - DNA, 25 bp, Artificial
  Probe
gaggcatgaccgattgtgtctgaat

SEQ ID NO: 326265 - DNA, 25 bp, Artificial
  Probe
ggaacaactcttcctctacctcagg

SEQ ID NO: 326266 - DNA, 25 bp, Artificial
  Probe
ataatctggatcaaaccgatccaga

SEQ ID NO: 326267 - DNA, 25 bp, Artificial
  Probe
caagttaatgcaggaaccgggcccg

SEQ ID NO: 326268 - DNA, 25 bp, Artificial
  Probe
ctcggaggcatgaccgattgtgtct

SEQ ID NO: 326269 - DNA, 25 bp, Artificial
  Probe
gacagaacagacaggccagtctagg

SEQ ID NO: 326270 - DNA, 25 bp, Artificial
  Probe
tttcctttggaaactgaatgccata

SEQ ID NO: 326271 - DNA, 25 bp, Artificial
  Probe
gaaccgggcccgtgttctctgccgg

SEQ ID NO: 326272 - DNA, 25 bp, Artificial
  Probe
tcgcttctggcgtttcattccagcg

SEQ ID NO: 326273 - DNA, 25 bp, Artificial
  Probe
tgtctgaatcgcttctggcgtttca

SEQ ID NO: 326274 - DNA, 25 bp, Artificial
  Probe
ggtagtccctcatctggcaaagaaa

SEQ ID NO: 326275 - DNA, 25 bp, Artificial
  Probe
gctggtagtccctcatctggcaaag

SEQ ID NO: 326276 - DNA, 25 bp, Artificial
  Probe
ctggcgtttcattccagcgagaggg

SEQ ID NO: 326277 - DNA, 25 bp, Artificial
  Probe
accacactggagaactacaactttg

SEQ ID NO: 326278 - DNA, 25 bp, Artificial
  Probe
aatggttttcaatgcacttcttgca

SEQ ID NO: 326279 - DNA, 25 bp, Artificial
  Probe
gaaagagttggctgcccaaggcgaa

SEQ ID NO: 326280 - DNA, 25 bp, Artificial
  Probe
caacctggtggacatcattcagcag

SEQ ID NO: 326281 - DNA, 25 bp, Artificial
  Probe
aagaggacccacaaccacacaattg

SEQ ID NO: 326282 - DNA, 25 bp, Artificial
  Probe
aaagcatgctgacacacatccatag

SEQ ID NO: 326283 - DNA, 25 bp, Artificial
  Probe
cactcttcttagctcagcaaagcag

SEQ ID NO: 326284 - DNA, 25 bp, Artificial
  Probe
agagcataagtttcactcttcttag

SEQ ID NO: 326285 - DNA, 25 bp, Artificial
  Probe
tatatgtttggctcaggccatttta

SEQ ID NO: 326286 - DNA, 25 bp, Artificial
  Probe
tgacttggcctgaagacagaatggt

SEQ ID NO: 326287 - DNA, 25 bp, Artificial
  Probe
acatgcaaagaccttgatttttctg

SEQ ID NO: 326288 - DNA, 25 bp, Artificial
  Probe
aaatctggagactttcaactttccg

SEQ ID NO: 326289 - DNA, 25 bp, Artificial
  Probe
catcttcaatgaagccagagaaatc

SEQ ID NO: 326290 - DNA, 25 bp, Artificial
  Probe
atgaagccagagaaatctggagact

SEQ ID NO: 326291 - DNA, 25 bp, Artificial
  Probe
ttggcctgaagacagaatggttttc

SEQ ID NO: 326292 - DNA, 25 bp, Artificial
  Probe
catgatttggccatcttcaatgaag

SEQ ID NO: 326293 - DNA, 25 bp, Artificial
  Probe
cataagaactcagaagacttagaag

SEQ ID NO: 326294 - DNA, 25 bp, Artificial
  Probe
tgatcttcataagaactcagaagac

SEQ ID NO: 326295 - DNA, 25 bp, Artificial
  Probe
aagttatcattaggattctggctgc

SEQ ID NO: 326296 - DNA, 25 bp, Artificial
  Probe
gagcataagtttcactcttcttagc

SEQ ID NO: 326297 - DNA, 25 bp, Artificial
  Probe
cctccataaggaacaagagcataag

SEQ ID NO: 326298 - DNA, 25 bp, Artificial
  Probe
gactttcaactttccgtcatgtttg

SEQ ID NO: 326299 - DNA, 25 bp, Artificial
  Probe
tgatgggacctatgccccagactac

SEQ ID NO: 326300 - DNA, 25 bp, Artificial
  Probe
tcattaggattctggctgctgtttc

SEQ ID NO: 326301 - DNA, 25 bp, Artificial
  Probe
cttcataagaactcagaagacttag

SEQ ID NO: 326302 - DNA, 25 bp, Artificial
  Probe
tcaactttccgtcatgtttgacttg

SEQ ID NO: 326303 - DNA, 25 bp, Artificial
  Probe
acatcattcagcagaacaaggagag

SEQ ID NO: 326304 - DNA, 25 bp, Artificial
  Probe
ttcaatgaagccagagaaatctgga

SEQ ID NO: 326305 - DNA, 25 bp, Artificial
  Probe
tgcacttcttgcaccgtgtcactca

SEQ ID NO: 326306 - DNA, 25 bp, Artificial
  Probe
acaacctggtggacatcattcagca

SEQ ID NO: 326307 - DNA, 25 bp, Artificial
  Probe
cattcagcagaacaaggagaggtgg

SEQ ID NO: 326308 - DNA, 25 bp, Artificial
  Probe
cttcttgcaccgtgtcactcaagag

SEQ ID NO: 326309 - DNA, 25 bp, Artificial
  Probe
aggctgcatgagtgatgggacctat

SEQ ID NO: 326310 - DNA, 25 bp, Artificial
  Probe
agttggctgcccaaggcgaacttga

SEQ ID NO: 326311 - DNA, 25 bp, Artificial
  Probe
tatgtttggctcaggccattttagt

SEQ ID NO: 326312 - DNA, 25 bp, Artificial
  Probe
gaacttgatcttcataagaactcag

SEQ ID NO: 326313 - DNA, 25 bp, Artificial
  Probe
ggctgctgtttctgccatcgttctc

SEQ ID NO: 326314 - DNA, 25 bp, Artificial
  Probe
gttggctgcccaaggcgaacttgat

SEQ ID NO: 326315 - DNA, 25 bp, Artificial
  Probe
ctgcccaaggcgaacttgatcttca

SEQ ID NO: 326316 - DNA, 25 bp, Artificial
  Probe
cctgcaagttatcattaggattctg

SEQ ID NO: 326317 - DNA, 25 bp, Artificial
  Probe
agtgatgggacctatgccccagact

SEQ ID NO: 326318 - DNA, 25 bp, Artificial
  Probe
tatgccccagactactctctgtcag

SEQ ID NO: 326319 - DNA, 25 bp, Artificial
  Probe
gcaaagaccttgatttttctgcaaa

SEQ ID NO: 326320 - DNA, 25 bp, Artificial
  Probe
tcatgtttgacttggcctgaagaca

SEQ ID NO: 326321 - DNA, 25 bp, Artificial
  Probe
tgtcactcaagaggacccacaacca

SEQ ID NO: 326322 - DNA, 25 bp, Artificial
  Probe
catccataggtgtgaacgaacttta

SEQ ID NO: 326323 - DNA, 25 bp, Artificial
  Probe
ttggctcaggccattttagtcgact

SEQ ID NO: 326324 - DNA, 25 bp, Artificial
  Probe
ggcacattgggctggtttcttcgtc

SEQ ID NO: 326325 - DNA, 25 bp, Artificial
  Probe
actcaaacccaggatgccccatgta

SEQ ID NO: 326326 - DNA, 25 bp, Artificial
  Probe
tcaaacccaggatgccccatgtaca

SEQ ID NO: 326327 - DNA, 25 bp, Artificial
  Probe
tatccctgcttgagctttagacccc

SEQ ID NO: 326328 - DNA, 25 bp, Artificial
  Probe
cctgcttgagctttagaccccagac

SEQ ID NO: 326329 - DNA, 25 bp, Artificial
  Probe
ctgtacaggcacattgggctggttt

SEQ ID NO: 326330 - DNA, 25 bp, Artificial
  Probe
attgggctggtttcttcgtcagtag

SEQ ID NO: 326331 - DNA, 25 bp, Artificial
  Probe
tggcatgtcctcacgtgtatacctc

SEQ ID NO: 326332 - DNA, 25 bp, Artificial
  Probe
ctaagagtaacctgtccccaaggcg

SEQ ID NO: 326333 - DNA, 25 bp, Artificial
  Probe
ccctgtacaggcacattgggctggt

SEQ ID NO: 326334 - DNA, 25 bp, Artificial
  Probe
gcttgagctttagaccccagacttc

SEQ ID NO: 326335 - DNA, 25 bp, Artificial
  Probe
ttgccactgggaacttgagaatggg

SEQ ID NO: 326336 - DNA, 25 bp, Artificial
  Probe
caaggcccaccgagaaggcctaaga

SEQ ID NO: 326337 - DNA, 25 bp, Artificial
  Probe
accgagaaggcctaagagtaacctg

SEQ ID NO: 326338 - DNA, 25 bp, Artificial
  Probe
cacattgggctggtttcttcgtcag

SEQ ID NO: 326339 - DNA, 25 bp, Artificial
  Probe
gggctggtttcttcgtcagtagtaa

SEQ ID NO: 326340 - DNA, 25 bp, Artificial
  Probe
atccctgcttgagctttagacccca

SEQ ID NO: 326341 - DNA, 25 bp, Artificial
  Probe
ctggtttcttcgtcagtagtaagaa

SEQ ID NO: 326342 - DNA, 25 bp, Artificial
  Probe
taacctgtccccaaggcgatcttag

SEQ ID NO: 326343 - DNA, 25 bp, Artificial
  Probe
ggcccaccgagaaggcctaagagta

SEQ ID NO: 326344 - DNA, 25 bp, Artificial
  Probe
cgcacacaggggttaaagccgtgtg

SEQ ID NO: 326345 - DNA, 25 bp, Artificial
  Probe
aggatgccccatgtacatagccagt

SEQ ID NO: 326346 - DNA, 25 bp, Artificial
  Probe
cacaccctgtacaggcacattgggc

SEQ ID NO: 326347 - DNA, 25 bp, Artificial
  Probe
cacgtggctgcctcgcttgccttat

SEQ ID NO: 326348 - DNA, 25 bp, Artificial
  Probe
ccaggatgccccatgtacatagcca

SEQ ID NO: 326349 - DNA, 25 bp, Artificial
  Probe
gactcaaacccaggatgccccatgt

SEQ ID NO: 326350 - DNA, 25 bp, Artificial
  Probe
gctggtttcttcgtcagtagtaaga

SEQ ID NO: 326351 - DNA, 25 bp, Artificial
  Probe
tccctgcttgagctttagaccccag

SEQ ID NO: 326352 - DNA, 25 bp, Artificial
  Probe
gcctaagagtaacctgtccccaagg

SEQ ID NO: 326353 - DNA, 25 bp, Artificial
  Probe
cacacaggggttaaagccgtgtgcc

SEQ ID NO: 326354 - DNA, 25 bp, Artificial
  Probe
ttgggctggtttcttcgtcagtagt

SEQ ID NO: 326355 - DNA, 25 bp, Artificial
  Probe
tgccactgggaacttgagaatgggt

SEQ ID NO: 326356 - DNA, 25 bp, Artificial
  Probe
cctgtacaggcacattgggctggtt

SEQ ID NO: 326357 - DNA, 25 bp, Artificial
  Probe
gcacattgggctggtttcttcgtca

SEQ ID NO: 326358 - DNA, 25 bp, Artificial
  Probe
aaggcccaccgagaaggcctaagag

SEQ ID NO: 326359 - DNA, 25 bp, Artificial
  Probe
tgtacaggcacattgggctggtttc

SEQ ID NO: 326360 - DNA, 25 bp, Artificial
  Probe
tgggctggtttcttcgtcagtagta

SEQ ID NO: 326361 - DNA, 25 bp, Artificial
  Probe
ggcatgtcctcacgtgtatacctcc

SEQ ID NO: 326362 - DNA, 25 bp, Artificial
  Probe
taagagtaacctgtccccaaggcga

SEQ ID NO: 326363 - DNA, 25 bp, Artificial
  Probe
aagagtaacctgtccccaaggcgat

SEQ ID NO: 326364 - DNA, 25 bp, Artificial
  Probe
aacctgtccccaaggcgatcttagc

SEQ ID NO: 326365 - DNA, 25 bp, Artificial
  Probe
tgcttgagctttagaccccagactt

SEQ ID NO: 326366 - DNA, 25 bp, Artificial
  Probe
gttgccactgggaacttgagaatgg

SEQ ID NO: 326367 - DNA, 25 bp, Artificial
  Probe
ctgcttgagctttagaccccagact

SEQ ID NO: 326368 - DNA, 25 bp, Artificial
  Probe
gtacaggcacattgggctggtttct

SEQ ID NO: 326369 - DNA, 25 bp, Artificial
  Probe
taaagttgccactgggaacttgaga

SEQ ID NO: 326370 - DNA, 25 bp, Artificial
  Probe
ccttcgaacatgaggcgtttggttt

SEQ ID NO: 326371 - DNA, 25 bp, Artificial
  Probe
gtcatgattcccaagggtcatttgt

SEQ ID NO: 326372 - DNA, 25 bp, Artificial
  Probe
ctttatacctgaagaggtctgatgt

SEQ ID NO: 326373 - DNA, 25 bp, Artificial
  Probe
cataatgctaccagattgtagatgg

SEQ ID NO: 326374 - DNA, 25 bp, Artificial
  Probe
tactgtcatgattcccaagggtcat

SEQ ID NO: 326375 - DNA, 25 bp, Artificial
  Probe
gcactttgagcatttacttagctca

SEQ ID NO: 326376 - DNA, 25 bp, Artificial
  Probe
ctggcatcgtgatcgcagcacaata

SEQ ID NO: 326377 - DNA, 25 bp, Artificial
  Probe
tgtatgttagccactgtgtgcccaa

SEQ ID NO: 326378 - DNA, 25 bp, Artificial
  Probe
cgtcttagcaattagtggaatactg

SEQ ID NO: 326379 - DNA, 25 bp, Artificial
  Probe
atatgaactcgctttatacctgaag

SEQ ID NO: 326380 - DNA, 25 bp, Artificial
  Probe
ccaagggtcatttgtatgttagcca

SEQ ID NO: 326381 - DNA, 25 bp, Artificial
  Probe
catttgtatgttagccactgtgtgc

SEQ ID NO: 326382 - DNA, 25 bp, Artificial
  Probe
ggggcatgccaagtcgggcatcact

SEQ ID NO: 326383 - DNA, 25 bp, Artificial
  Probe
atctggcatcgtgatcgcagcacaa

SEQ ID NO: 326384 - DNA, 25 bp, Artificial
  Probe
tcgcagcacaataatgatttgcatg

SEQ ID NO: 326385 - DNA, 25 bp, Artificial
  Probe
aatattaagcaaggtgccggtgtac

SEQ ID NO: 326386 - DNA, 25 bp, Artificial
  Probe
gtcttccttttgtagcgcatggttg

SEQ ID NO: 326387 - DNA, 25 bp, Artificial
  Probe
ttttctactgtcatgattcccaagg

SEQ ID NO: 326388 - DNA, 25 bp, Artificial
  Probe
acatgaggcgtttggtttgcttcca

SEQ ID NO: 326389 - DNA, 25 bp, Artificial
  Probe
gtgcatgcatctgtacttcacacct

SEQ ID NO: 326390 - DNA, 25 bp, Artificial
  Probe
ccaacccttatctggcatcgtgatc

SEQ ID NO: 326391 - DNA, 25 bp, Artificial
  Probe
gtacaatctctaatttgatcagtgt

SEQ ID NO: 326392 - DNA, 25 bp, Artificial
  Probe
ttcgtcttagcaattagtggaatac

SEQ ID NO: 326393 - DNA, 25 bp, Artificial
  Probe
gccaagtcgggcatcacttcgtctt

SEQ ID NO: 326394 - DNA, 25 bp, Artificial
  Probe
gggcatgccaagtcgggcatcactt

SEQ ID NO: 326395 - DNA, 25 bp, Artificial
  Probe
gagcatttacttagctcatttagtc

SEQ ID NO: 326396 - DNA, 25 bp, Artificial
  Probe
ggcgtttggtttgcttccattctct

SEQ ID NO: 326397 - DNA, 25 bp, Artificial
  Probe
gtcatttgtatgttagccactgtgt

SEQ ID NO: 326398 - DNA, 25 bp, Artificial
  Probe
ttatggtcataatgctaccagattg

SEQ ID NO: 326399 - DNA, 25 bp, Artificial
  Probe
tattaagcaaggtgccggtgtacaa

SEQ ID NO: 326400 - DNA, 25 bp, Artificial
  Probe
ctcagcactttgagcatttacttag

SEQ ID NO: 326401 - DNA, 25 bp, Artificial
  Probe
agctcatttagtcttccttttgtag

SEQ ID NO: 326402 - DNA, 25 bp, Artificial
  Probe
cccttatctggcatcgtgatcgcag

SEQ ID NO: 326403 - DNA, 25 bp, Artificial
  Probe
catcgtgatcgcagcacaataatga

SEQ ID NO: 326404 - DNA, 25 bp, Artificial
  Probe
gattcccaagggtcatttgtatgtt

SEQ ID NO: 326405 - DNA, 25 bp, Artificial
  Probe
acctgaagaggtctgatgtataagc

SEQ ID NO: 326406 - DNA, 25 bp, Artificial
  Probe
ctaccagattgtagatggtagctag

SEQ ID NO: 326407 - DNA, 25 bp, Artificial
  Probe
gcaaggtgccggtgtacaatctcta

SEQ ID NO: 326408 - DNA, 25 bp, Artificial
  Probe
tgcttccattctctttgtgtagtgc

SEQ ID NO: 326409 - DNA, 25 bp, Artificial
  Probe
ttgagcatttacttagctcatttag

SEQ ID NO: 326410 - DNA, 25 bp, Artificial
  Probe
tatgttagccactgtgtgcccaacc

SEQ ID NO: 326411 - DNA, 25 bp, Artificial
  Probe
aaagtgcatgcatctgtacttcaca

SEQ ID NO: 326412 - DNA, 25 bp, Artificial
  Probe
gtccacacaggcacaattaacaaga

SEQ ID NO: 326413 - DNA, 25 bp, Artificial
  Probe
ttatctggcatcgtgatcgcagcac

SEQ ID NO: 326414 - DNA, 25 bp, Artificial
  Probe
cctcccttcgaacatgaggcgtttg

SEQ ID NO: 326415 - DNA, 25 bp, Artificial
  Probe
aggtgtccacacaggcacaattaac

SEQ ID NO: 326416 - DNA, 25 bp, Artificial
  Probe
catcgagttcagcatccaggactcc

SEQ ID NO: 326417 - DNA, 25 bp, Artificial
  Probe
tccgcttgtggaatactacaggaaa

SEQ ID NO: 326418 - DNA, 25 bp, Artificial
  Probe
tttcttcctctctgtgaaaggaatg

SEQ ID NO: 326419 - DNA, 25 bp, Artificial
  Probe
ttttcttcctctctgtgaaaggaat

SEQ ID NO: 326420 - DNA, 25 bp, Artificial
  Probe
ttcttcctctctgtgaaaggaatgg

SEQ ID NO: 326421 - DNA, 25 bp, Artificial
  Probe
gaccactccgcttgtggaatactac

SEQ ID NO: 326422 - DNA, 25 bp, Artificial
  Probe
tagaaggaacttcctttctcagaca

SEQ ID NO: 326423 - DNA, 25 bp, Artificial
  Probe
cccagacccctgacgtggtgtttgc

SEQ ID NO: 326424 - DNA, 25 bp, Artificial
  Probe
cttttcttcctctctgtgaaaggaa

SEQ ID NO: 326425 - DNA, 25 bp, Artificial
  Probe
ctcttttcttcctctctgtgaaagg

SEQ ID NO: 326426 - DNA, 25 bp, Artificial
  Probe
ttgatgcgtcccagacccctgacgt

SEQ ID NO: 326427 - DNA, 25 bp, Artificial
  Probe
ccactccgcttgtggaatactacag

SEQ ID NO: 326428 - DNA, 25 bp, Artificial
  Probe
ggaatactacaggaaacggggcatt

SEQ ID NO: 326429 - DNA, 25 bp, Artificial
  Probe
tggaatactacaggaaacggggcat

SEQ ID NO: 326430 - DNA, 25 bp, Artificial
  Probe
tgattcaccccaagagtggccggtc

SEQ ID NO: 326431 - DNA, 25 bp, Artificial
  Probe
ggaacttcctttctcagacagcaag

SEQ ID NO: 326432 - DNA, 25 bp, Artificial
  Probe
gatgcgtcccagacccctgacgtgg

SEQ ID NO: 326433 - DNA, 25 bp, Artificial
  Probe
gagaaagccttgaagacccgcctgg

SEQ ID NO: 326434 - DNA, 25 bp, Artificial
  Probe
ccagacccctgacgtggtgtttgca

SEQ ID NO: 326435 - DNA, 25 bp, Artificial
  Probe
actccgcttgtggaatactacagga

SEQ ID NO: 326436 - DNA, 25 bp, Artificial
  Probe
tcttttcttcctctctgtgaaagga

SEQ ID NO: 326437 - DNA, 25 bp, Artificial
  Probe
tcatcgagttcagcatccaggactc

SEQ ID NO: 326438 - DNA, 25 bp, Artificial
  Probe
gaatactacaggaaacggggcattc

SEQ ID NO: 326439 - DNA, 25 bp, Artificial
  Probe
accatgaggagttcaaccctccaaa

SEQ ID NO: 326440 - DNA, 25 bp, Artificial
  Probe
atgacaacgagaaagccttgaagac

SEQ ID NO: 326441 - DNA, 25 bp, Artificial
  Probe
agaccactccgcttgtggaatacta

SEQ ID NO: 326442 - DNA, 25 bp, Artificial
  Probe
tcagtcatcgagttcagcatccagg

SEQ ID NO: 326443 - DNA, 25 bp, Artificial
  Probe
agccacatgtaaagacttggtcatg

SEQ ID NO: 326444 - DNA, 25 bp, Artificial
  Probe
ctgattcaccccaagagtggccggt

SEQ ID NO: 326445 - DNA, 25 bp, Artificial
  Probe
acactcagaccactccgcttgtgga

SEQ ID NO: 326446 - DNA, 25 bp, Artificial
  Probe
tcccagacccctgacgtggtgtttg

SEQ ID NO: 326447 - DNA, 25 bp, Artificial
  Probe
cagtcatcgagttcagcatccagga

SEQ ID NO: 326448 - DNA, 25 bp, Artificial
  Probe
tgatccgcaggtcagatgacaacga

SEQ ID NO: 326449 - DNA, 25 bp, Artificial
  Probe
atccgcaggtcagatgacaacgaga

SEQ ID NO: 326450 - DNA, 25 bp, Artificial
  Probe
ttcagtcatcgagttcagcatccag

SEQ ID NO: 326451 - DNA, 25 bp, Artificial
  Probe
attcagtcatcgagttcagcatcca

SEQ ID NO: 326452 - DNA, 25 bp, Artificial
  Probe
tccgcaggtcagatgacaacgagaa

SEQ ID NO: 326453 - DNA, 25 bp, Artificial
  Probe
ccaaagccacatgtaaagacttggt

SEQ ID NO: 326454 - DNA, 25 bp, Artificial
  Probe
aaggaacttcctttctcagacagca

SEQ ID NO: 326455 - DNA, 25 bp, Artificial
  Probe
cgcttgtggaatactacaggaaacg

SEQ ID NO: 326456 - DNA, 25 bp, Artificial
  Probe
ccatgaggagttcaaccctccaaag

SEQ ID NO: 326457 - DNA, 25 bp, Artificial
  Probe
tccaaagccacatgtaaagacttgg

SEQ ID NO: 326458 - DNA, 25 bp, Artificial
  Probe
aatactacaggaaacggggcattca

SEQ ID NO: 326459 - DNA, 25 bp, Artificial
  Probe
ccgcaggtcagatgacaacgagaaa

SEQ ID NO: 326460 - DNA, 25 bp, Artificial
  Probe
gatccgcaggtcagatgacaacgag

SEQ ID NO: 326461 - DNA, 25 bp, Artificial
  Probe
tgacaacgagaaagccttgaagacc

SEQ ID NO: 326462 - DNA, 25 bp, Artificial
  Probe
cagctacccgaagaccaagaagggc

SEQ ID NO: 326463 - DNA, 25 bp, Artificial
  Probe
gtagttgctgggtctctgctggtcc

SEQ ID NO: 326464 - DNA, 25 bp, Artificial
  Probe
agacagcagggctcactccagctac

SEQ ID NO: 326465 - DNA, 25 bp, Artificial
  Probe
gttggacctggcacctacagtgaaa

SEQ ID NO: 326466 - DNA, 25 bp, Artificial
  Probe
agacaatgctagtcccttcactgcc

SEQ ID NO: 326467 - DNA, 25 bp, Artificial
  Probe
aagattctatcttgggccctcatac

SEQ ID NO: 326468 - DNA, 25 bp, Artificial
  Probe
ttcttgccattttatgactttaggg

SEQ ID NO: 326469 - DNA, 25 bp, Artificial
  Probe
cgaagaccaagaagggccagtctac

SEQ ID NO: 326470 - DNA, 25 bp, Artificial
  Probe
ggggcctgactcagactgacagcct

SEQ ID NO: 326471 - DNA, 25 bp, Artificial
  Probe
gggccctcatacgatctgtatcctc

SEQ ID NO: 326472 - DNA, 25 bp, Artificial
  Probe
ttttttaccttgtagatagtactcg

SEQ ID NO: 326473 - DNA, 25 bp, Artificial
  Probe
aagggccagtctacgtcccgccata

SEQ ID NO: 326474 - DNA, 25 bp, Artificial
  Probe
caagacaatgctagtcccttcactg

SEQ ID NO: 326475 - DNA, 25 bp, Artificial
  Probe
cccctctatgcaaactggttcctgg

SEQ ID NO: 326476 - DNA, 25 bp, Artificial
  Probe
gctacccgaagaccaagaagggcca

SEQ ID NO: 326477 - DNA, 25 bp, Artificial
  Probe
tctctgctggtccagcgaaatccta

SEQ ID NO: 326478 - DNA, 25 bp, Artificial
  Probe
agttgttggacctggcacctacagt

SEQ ID NO: 326479 - DNA, 25 bp, Artificial
  Probe
ccaagaagggccagtctacgtcccg

SEQ ID NO: 326480 - DNA, 25 bp, Artificial
  Probe
ccattttatgactttagggcttgtt

SEQ ID NO: 326481 - DNA, 25 bp, Artificial
  Probe
tacccgaagaccaagaagggccagt

SEQ ID NO: 326482 - DNA, 25 bp, Artificial
  Probe
ggccagtctacgtcccgccataaaa

SEQ ID NO: 326483 - DNA, 25 bp, Artificial
  Probe
agcgaaatcctatccggtcagttgt

SEQ ID NO: 326484 - DNA, 25 bp, Artificial
  Probe
agctgacaagacaatgctagtccct

SEQ ID NO: 326485 - DNA, 25 bp, Artificial
  Probe
tggacctggcacctacagtgaaatt

SEQ ID NO: 326486 - DNA, 25 bp, Artificial
  Probe
agactgacagcctctgcatcctgtc

SEQ ID NO: 326487 - DNA, 25 bp, Artificial
  Probe
caagaagggccagtctacgtcccgc

SEQ ID NO: 326488 - DNA, 25 bp, Artificial
  Probe
tggggcctgactcagactgacagcc

SEQ ID NO: 326489 - DNA, 25 bp, Artificial
  Probe
caaactggttcctggcccagattgg

SEQ ID NO: 326490 - DNA, 25 bp, Artificial
  Probe
agggctcactccagctacccgaaga

SEQ ID NO: 326491 - DNA, 25 bp, Artificial
  Probe
ctgactcagactgacagcctctgca

SEQ ID NO: 326492 - DNA, 25 bp, Artificial
  Probe
tatcttgggccctcatacgatctgt

SEQ ID NO: 326493 - DNA, 25 bp, Artificial
  Probe
tccactctgcaaagcctgtctgcat

SEQ ID NO: 326494 - DNA, 25 bp, Artificial
  Probe
atcctatccggtcagttgttggacc

SEQ ID NO: 326495 - DNA, 25 bp, Artificial
  Probe
agaagggccagtctacgtcccgcca

SEQ ID NO: 326496 - DNA, 25 bp, Artificial
  Probe
gaaagtggggcctgactcagactga

SEQ ID NO: 326497 - DNA, 25 bp, Artificial
  Probe
tccagctacccgaagaccaagaagg

SEQ ID NO: 326498 - DNA, 25 bp, Artificial
  Probe
taccttgtagatagtactcggcccc

SEQ ID NO: 326499 - DNA, 25 bp, Artificial
  Probe
gcctgactcagactgacagcctctg

SEQ ID NO: 326500 - DNA, 25 bp, Artificial
  Probe
ctctgctggtccagcgaaatcctat

SEQ ID NO: 326501 - DNA, 25 bp, Artificial
  Probe
ctctgcaaagcctgtctgcatttat

SEQ ID NO: 326502 - DNA, 25 bp, Artificial
  Probe
ggcctgactcagactgacagcctct

SEQ ID NO: 326503 - DNA, 25 bp, Artificial
  Probe
gctggtccagcgaaatcctatccgg

SEQ ID NO: 326504 - DNA, 25 bp, Artificial
  Probe
gactcagactgacagcctctgcatc

SEQ ID NO: 326505 - DNA, 25 bp, Artificial
  Probe
ggcacctacagtgaaatttcacccc

SEQ ID NO: 326506 - DNA, 25 bp, Artificial
  Probe
caccgcctgtaagattctatcttgg

SEQ ID NO: 326507 - DNA, 25 bp, Artificial
  Probe
aatcctatccggtcagttgttggac

SEQ ID NO: 326508 - DNA, 25 bp, Artificial
  Probe
actcccagatttcaggcttatcctg

SEQ ID NO: 326509 - DNA, 25 bp, Artificial
  Probe
acgcatgcacatacaaagagagtta

SEQ ID NO: 326510 - DNA, 25 bp, Artificial
  Probe
caggcttatcctgtacttgttaact

SEQ ID NO: 326511 - DNA, 25 bp, Artificial
  Probe
cacacgcatgcacatacaaagagag

SEQ ID NO: 326512 - DNA, 25 bp, Artificial
  Probe
cacacacgcatgcacatacaaagag

SEQ ID NO: 326513 - DNA, 25 bp, Artificial
  Probe
gcttatcctgtacttgttaactttg

SEQ ID NO: 326514 - DNA, 25 bp, Artificial
  Probe
cagatttcaggcttatcctgtactt

SEQ ID NO: 326515 - DNA, 25 bp, Artificial
  Probe
tttcaggcttatcctgtacttgtta

SEQ ID NO: 326516 - DNA, 25 bp, Artificial
  Probe
ccaaagtgcttttgtcatgttgaaa

SEQ ID NO: 326517 - DNA, 25 bp, Artificial
  Probe
aggcttatcctgtacttgttaactt

SEQ ID NO: 326518 - DNA, 25 bp, Artificial
  Probe
acacgcatgcacatacaaagagagt

SEQ ID NO: 326519 - DNA, 25 bp, Artificial
  Probe
ctgtcattccccaaagtgcttttgt

SEQ ID NO: 326520 - DNA, 25 bp, Artificial
  Probe
agatttcaggcttatcctgtacttg

SEQ ID NO: 326521 - DNA, 25 bp, Artificial
  Probe
tccccaaagtgcttttgtcatgttg

SEQ ID NO: 326522 - DNA, 25 bp, Artificial
  Probe
gaagaactcccagatttcaggctta

SEQ ID NO: 326523 - DNA, 25 bp, Artificial
  Probe
gaactcccagatttcaggcttatcc

SEQ ID NO: 326524 - DNA, 25 bp, Artificial
  Probe
ttccccaaagtgcttttgtcatgtt

SEQ ID NO: 326525 - DNA, 25 bp, Artificial
  Probe
atgcacatacaaagagagttaatca

SEQ ID NO: 326526 - DNA, 25 bp, Artificial
  Probe
tcaggcttatcctgtacttgttaac

SEQ ID NO: 326527 - DNA, 25 bp, Artificial
  Probe
atttcaggcttatcctgtacttgtt

SEQ ID NO: 326528 - DNA, 25 bp, Artificial
  Probe
cattccccaaagtgcttttgtcatg

SEQ ID NO: 326529 - DNA, 25 bp, Artificial
  Probe
aacctgaagaactcccagatttcag

SEQ ID NO: 326530 - DNA, 25 bp, Artificial
  Probe
tatcctgtacttgttaactttgggt

SEQ ID NO: 326531 - DNA, 25 bp, Artificial
  Probe
cgcatgcacatacaaagagagttaa

SEQ ID NO: 326532 - DNA, 25 bp, Artificial
  Probe
tgaagaactcccagatttcaggctt

SEQ ID NO: 326533 - DNA, 25 bp, Artificial
  Probe
catgcacatacaaagagagttaatc

SEQ ID NO: 326534 - DNA, 25 bp, Artificial
  Probe
cacgcatgcacatacaaagagagtt

SEQ ID NO: 326535 - DNA, 25 bp, Artificial
  Probe
gtcattccccaaagtgcttttgtca

SEQ ID NO: 326536 - DNA, 25 bp, Artificial
  Probe
tgtcattccccaaagtgcttttgtc

SEQ ID NO: 326537 - DNA, 25 bp, Artificial
  Probe
ctcccagatttcaggcttatcctgt

SEQ ID NO: 326538 - DNA, 25 bp, Artificial
  Probe
atcctgtacttgttaactttgggtg

SEQ ID NO: 326539 - DNA, 25 bp, Artificial
  Probe
acacacgcatgcacatacaaagaga

SEQ ID NO: 326540 - DNA, 25 bp, Artificial
  Probe
ttcaggcttatcctgtacttgttaa

SEQ ID NO: 326541 - DNA, 25 bp, Artificial
  Probe
ttatcctgtacttgttaactttggg

SEQ ID NO: 326542 - DNA, 25 bp, Artificial
  Probe
tcctgtacttgttaactttgggtga

SEQ ID NO: 326543 - DNA, 25 bp, Artificial
  Probe
cttatcctgtacttgttaactttgg

SEQ ID NO: 326544 - DNA, 25 bp, Artificial
  Probe
cccaaagtgcttttgtcatgttgaa

SEQ ID NO: 326545 - DNA, 25 bp, Artificial
  Probe
gatttcaggcttatcctgtacttgt

SEQ ID NO: 326546 - DNA, 25 bp, Artificial
  Probe
ggcttatcctgtacttgttaacttt

SEQ ID NO: 326547 - DNA, 25 bp, Artificial
  Probe
gcatgcacatacaaagagagttaat

SEQ ID NO: 326548 - DNA, 25 bp, Artificial
  Probe
agaactcccagatttcaggcttatc

SEQ ID NO: 326549 - DNA, 25 bp, Artificial
  Probe
attccccaaagtgcttttgtcatgt

SEQ ID NO: 326550 - DNA, 25 bp, Artificial
  Probe
ccccaaagtgcttttgtcatgttga

SEQ ID NO: 326551 - DNA, 25 bp, Artificial
  Probe
gaaaccgactttcataagagcacat

SEQ ID NO: 326552 - DNA, 25 bp, Artificial
  Probe
ccaggactgcagtagtacgtgtgga

SEQ ID NO: 326553 - DNA, 25 bp, Artificial
  Probe
ctcaaaagaggcacaatccaggact

SEQ ID NO: 326554 - DNA, 25 bp, Artificial
  Probe
tgctccttatattggctctgtggaa

SEQ ID NO: 326555 - DNA, 25 bp, Artificial
  Probe
ctgactttaagtagcagcaaccgga

SEQ ID NO: 326556 - DNA, 25 bp, Artificial
  Probe
atcaactctgggaagaaaatgacaa

SEQ ID NO: 326557 - DNA, 25 bp, Artificial
  Probe
ggttatcctgtactgtacccaattg

SEQ ID NO: 326558 - DNA, 25 bp, Artificial
  Probe
tcaaaagaggcacaatccaggactg

SEQ ID NO: 326559 - DNA, 25 bp, Artificial
  Probe
tgccgctgtgggttatcctcctgag

SEQ ID NO: 326560 - DNA, 25 bp, Artificial
  Probe
aggttctcaaaagaggcacaatcca

SEQ ID NO: 326561 - DNA, 25 bp, Artificial
  Probe
gttatcctgtactgtacccaattgg

SEQ ID NO: 326562 - DNA, 25 bp, Artificial
  Probe
accggaagcgagagctggctattca

SEQ ID NO: 326563 - DNA, 25 bp, Artificial
  Probe
aagaggcacaatccaggactgcagt

SEQ ID NO: 326564 - DNA, 25 bp, Artificial
  Probe
caaccggaagcgagagctggctatt

SEQ ID NO: 326565 - DNA, 25 bp, Artificial
  Probe
cttactctaagaggagaacttaaga

SEQ ID NO: 326566 - DNA, 25 bp, Artificial
  Probe
gcgagagctggctattcagatatcc

SEQ ID NO: 326567 - DNA, 25 bp, Artificial
  Probe
agagtgccgctgtgggttatcctcc

SEQ ID NO: 326568 - DNA, 25 bp, Artificial
  Probe
taagtagcagcaaccggaagcgaga

SEQ ID NO: 326569 - DNA, 25 bp, Artificial
  Probe
agtcaagtgaatgtctcgctcctcc

SEQ ID NO: 326570 - DNA, 25 bp, Artificial
  Probe
ccttcgcggggctactgctgctaat

SEQ ID NO: 326571 - DNA, 25 bp, Artificial
  Probe
ggttctcaaaagaggcacaatccag

SEQ ID NO: 326572 - DNA, 25 bp, Artificial
  Probe
ccttatattggctctgtggaagatt

SEQ ID NO: 326573 - DNA, 25 bp, Artificial
  Probe
ccttactctaagaggagaacttaag

SEQ ID NO: 326574 - DNA, 25 bp, Artificial
  Probe
atgacaatatcgaagtctgaggttc

SEQ ID NO: 326575 - DNA, 25 bp, Artificial
  Probe
tctgaggttctcaaaagaggcacaa

SEQ ID NO: 326576 - DNA, 25 bp, Artificial
  Probe
agatatccaaagacgggctcccagg

SEQ ID NO: 326577 - DNA, 25 bp, Artificial
  Probe
tccttccttccgacctgagtcaagt

SEQ ID NO: 326578 - DNA, 25 bp, Artificial
  Probe
cctcctgtggaaaccgactttcata

SEQ ID NO: 326579 - DNA, 25 bp, Artificial
  Probe
atttcattccccaatttgacggcag

SEQ ID NO: 326580 - DNA, 25 bp, Artificial
  Probe
caagtgaatgtctcgctcctcctgt

SEQ ID NO: 326581 - DNA, 25 bp, Artificial
  Probe
ccagcttaaaccttactctaagagg

SEQ ID NO: 326582 - DNA, 25 bp, Artificial
  Probe
gtctcgctcctcctgtggaaaccga

SEQ ID NO: 326583 - DNA, 25 bp, Artificial
  Probe
tcctgagcgccttcgcggggctact

SEQ ID NO: 326584 - DNA, 25 bp, Artificial
  Probe
ctgtggaaaccgactttcataagag

SEQ ID NO: 326585 - DNA, 25 bp, Artificial
  Probe
gcagagtgccgctgtgggttatcct

SEQ ID NO: 326586 - DNA, 25 bp, Artificial
  Probe
tgaatgtctcgctcctcctgtggaa

SEQ ID NO: 326587 - DNA, 25 bp, Artificial
  Probe
ctttaagtagcagcaaccggaagcg

SEQ ID NO: 326588 - DNA, 25 bp, Artificial
  Probe
tcaactctgggaagaaaatgacaat

SEQ ID NO: 326589 - DNA, 25 bp, Artificial
  Probe
tttcattccccaatttgacggcaga

SEQ ID NO: 326590 - DNA, 25 bp, Artificial
  Probe
gttatcctcctgagcgccttcgcgg

SEQ ID NO: 326591 - DNA, 25 bp, Artificial
  Probe
ccaaagacgggctcccaggcagagt

SEQ ID NO: 326592 - DNA, 25 bp, Artificial
  Probe
gccagaacttcagctgtcaatttca

SEQ ID NO: 326593 - DNA, 25 bp, Artificial
  Probe
gcttaaaccttactctaagaggaga

SEQ ID NO: 326594 - DNA, 25 bp, Artificial
  Probe
agtgaaaattcatcgctgactttaa

SEQ ID NO: 326595 - DNA, 25 bp, Artificial
  Probe
gacctgagtcaagtgaatgtctcgc

SEQ ID NO: 326596 - DNA, 25 bp, Artificial
  Probe
aaattcatcgctgactttaagtagc

SEQ ID NO: 326597 - DNA, 25 bp, Artificial
  Probe
cattcctccgtttcagttagcagtt

SEQ ID NO: 326598 - DNA, 25 bp, Artificial
  Probe
tccctacagtaagctgtcccggatc

SEQ ID NO: 326599 - DNA, 25 bp, Artificial
  Probe
tcaaacccattccaggacccaggag

SEQ ID NO: 326600 - DNA, 25 bp, Artificial
  Probe
aggacccaggagagccaacacgcgt

SEQ ID NO: 326601 - DNA, 25 bp, Artificial
  Probe
gaagactcttgattattcaaaccca

SEQ ID NO: 326602 - DNA, 25 bp, Artificial
  Probe
tccgtttcagttagcagttatcttg

SEQ ID NO: 326603 - DNA, 25 bp, Artificial
  Probe
cccattcctccgtttcagttagcag

SEQ ID NO: 326604 - DNA, 25 bp, Artificial
  Probe
ttcctccgtttcagttagcagttat

SEQ ID NO: 326605 - DNA, 25 bp, Artificial
  Probe
cccaggagagccaacacgcgtgaga

SEQ ID NO: 326606 - DNA, 25 bp, Artificial
  Probe
ctccctacagtaagctgtcccggat

SEQ ID NO: 326607 - DNA, 25 bp, Artificial
  Probe
ttccaggacccaggagagccaacac

SEQ ID NO: 326608 - DNA, 25 bp, Artificial
  Probe
ttcagttagcagttatcttggaaga

SEQ ID NO: 326609 - DNA, 25 bp, Artificial
  Probe
tcctccgtttcagttagcagttatc

SEQ ID NO: 326610 - DNA, 25 bp, Artificial
  Probe
actcctccctacagtaagctgtccc

SEQ ID NO: 326611 - DNA, 25 bp, Artificial
  Probe
ctccgtttcagttagcagttatctt

SEQ ID NO: 326612 - DNA, 25 bp, Artificial
  Probe
gttagcagttatcttggaagactct

SEQ ID NO: 326613 - DNA, 25 bp, Artificial
  Probe
tcagttagcagttatcttggaagac

SEQ ID NO: 326614 - DNA, 25 bp, Artificial
  Probe
tcttggaagactcttgattattcaa

SEQ ID NO: 326615 - DNA, 25 bp, Artificial
  Probe
cagttagcagttatcttggaagact

SEQ ID NO: 326616 - DNA, 25 bp, Artificial
  Probe
agttagcagttatcttggaagactc

SEQ ID NO: 326617 - DNA, 25 bp, Artificial
  Probe
aacccattccaggacccaggagagc

SEQ ID NO: 326618 - DNA, 25 bp, Artificial
  Probe
attccaggacccaggagagccaaca

SEQ ID NO: 326619 - DNA, 25 bp, Artificial
  Probe
ttagcagttatcttggaagactctt

SEQ ID NO: 326620 - DNA, 25 bp, Artificial
  Probe
ccaggagagccaacacgcgtgagag

SEQ ID NO: 326621 - DNA, 25 bp, Artificial
  Probe
agttatcttggaagactcttgatta

SEQ ID NO: 326622 - DNA, 25 bp, Artificial
  Probe
tcccattcctccgtttcagttagca

SEQ ID NO: 326623 - DNA, 25 bp, Artificial
  Probe
attcaaacccattccaggacccagg

SEQ ID NO: 326624 - DNA, 25 bp, Artificial
  Probe
ccgtttcagttagcagttatcttgg

SEQ ID NO: 326625 - DNA, 25 bp, Artificial
  Probe
ttcaaacccattccaggacccagga

SEQ ID NO: 326626 - DNA, 25 bp, Artificial
  Probe
cctccgtttcagttagcagttatct

SEQ ID NO: 326627 - DNA, 25 bp, Artificial
  Probe
caaacccattccaggacccaggaga

SEQ ID NO: 326628 - DNA, 25 bp, Artificial
  Probe
ttatcttggaagactcttgattatt

SEQ ID NO: 326629 - DNA, 25 bp, Artificial
  Probe
tccaggacccaggagagccaacacg

SEQ ID NO: 326630 - DNA, 25 bp, Artificial
  Probe
aaacccattccaggacccaggagag

SEQ ID NO: 326631 - DNA, 25 bp, Artificial
  Probe
gttttcccagactcctccctacagt

SEQ ID NO: 326632 - DNA, 25 bp, Artificial
  Probe
gtttcagttagcagttatcttggaa

SEQ ID NO: 326633 - DNA, 25 bp, Artificial
  Probe
cggatcccattcctccgtttcagtt

SEQ ID NO: 326634 - DNA, 25 bp, Artificial
  Probe
caggacccaggagagccaacacgcg

SEQ ID NO: 326635 - DNA, 25 bp, Artificial
  Probe
tacagtaagctgtcccggatcccat

SEQ ID NO: 326636 - DNA, 25 bp, Artificial
  Probe
tatcttggaagactcttgattattc

SEQ ID NO: 326637 - DNA, 25 bp, Artificial
  Probe
ccattcctccgtttcagttagcagt

SEQ ID NO: 326638 - DNA, 25 bp, Artificial
  Probe
ctacagtaagctgtcccggatccca

SEQ ID NO: 326639 - DNA, 25 bp, Artificial
  Probe
cgtttcagttagcagttatcttgga

SEQ ID NO: 326640 - DNA, 25 bp, Artificial
  Probe
attcctccgtttcagttagcagtta

SEQ ID NO: 326641 - DNA, 25 bp, Artificial
  Probe
atcttggaagactcttgattattca

SEQ ID NO: 326642 - DNA, 25 bp, Artificial
  Probe
cagttatcttggaagactcttgatt

SEQ ID NO: 326643 - DNA, 25 bp, Artificial
  Probe
cagggtaccttcctactgaccactg

SEQ ID NO: 326644 - DNA, 25 bp, Artificial
  Probe
cagtctccctagtctcagaccaaag

SEQ ID NO: 326645 - DNA, 25 bp, Artificial
  Probe
gtaccttcctactgaccactgcaag

SEQ ID NO: 326646 - DNA, 25 bp, Artificial
  Probe
gttgccaagcaagacatgagtgtca

SEQ ID NO: 326647 - DNA, 25 bp, Artificial
  Probe
gagtgtcataccagggtaccttcct

SEQ ID NO: 326648 - DNA, 25 bp, Artificial
  Probe
gacatgagtgtcataccagggtacc

SEQ ID NO: 326649 - DNA, 25 bp, Artificial
  Probe
tgaccactgcaagttctctccctga

SEQ ID NO: 326650 - DNA, 25 bp, Artificial
  Probe
agtctccctagtctcagaccaaagc

SEQ ID NO: 326651 - DNA, 25 bp, Artificial
  Probe
ggcctatctggtcctttccaagggg

SEQ ID NO: 326652 - DNA, 25 bp, Artificial
  Probe
gaagcgccagtctccctagtctcag

SEQ ID NO: 326653 - DNA, 25 bp, Artificial
  Probe
ggaagcgccagtctccctagtctca

SEQ ID NO: 326654 - DNA, 25 bp, Artificial
  Probe
tcataccagggtaccttcctactga

SEQ ID NO: 326655 - DNA, 25 bp, Artificial
  Probe
gggcctatctggtcctttccaaggg

SEQ ID NO: 326656 - DNA, 25 bp, Artificial
  Probe
tagtctcagaccaaagccagactgg

SEQ ID NO: 326657 - DNA, 25 bp, Artificial
  Probe
gtacacgttgccaagcaagacatga

SEQ ID NO: 326658 - DNA, 25 bp, Artificial
  Probe
gcctatctggtcctttccaaggggc

SEQ ID NO: 326659 - DNA, 25 bp, Artificial
  Probe
aaaggtacacgttgccaagcaagac

SEQ ID NO: 326660 - DNA, 25 bp, Artificial
  Probe
tacacgttgccaagcaagacatgag

SEQ ID NO: 326661 - DNA, 25 bp, Artificial
  Probe
acacgttgccaagcaagacatgagt

SEQ ID NO: 326662 - DNA, 25 bp, Artificial
  Probe
ccttgggcctatctggtcctttcca

SEQ ID NO: 326663 - DNA, 25 bp, Artificial
  Probe
agggtaccttcctactgaccactgc

SEQ ID NO: 326664 - DNA, 25 bp, Artificial
  Probe
ttgccaagcaagacatgagtgtcat

SEQ ID NO: 326665 - DNA, 25 bp, Artificial
  Probe
cacgttgccaagcaagacatgagtg

SEQ ID NO: 326666 - DNA, 25 bp, Artificial
  Probe
agacatgagtgtcataccagggtac

SEQ ID NO: 326667 - DNA, 25 bp, Artificial
  Probe
tccctagtctcagaccaaagccaga

SEQ ID NO: 326668 - DNA, 25 bp, Artificial
  Probe
catgagtgtcataccagggtacctt

SEQ ID NO: 326669 - DNA, 25 bp, Artificial
  Probe
gtcataccagggtaccttcctactg

SEQ ID NO: 326670 - DNA, 25 bp, Artificial
  Probe
tgccaagcaagacatgagtgtcata

SEQ ID NO: 326671 - DNA, 25 bp, Artificial
  Probe
tccccttgggcctatctggtccttt

SEQ ID NO: 326672 - DNA, 25 bp, Artificial
  Probe
taccagggtaccttcctactgacca

SEQ ID NO: 326673 - DNA, 25 bp, Artificial
  Probe
tgggcctatctggtcctttccaagg

SEQ ID NO: 326674 - DNA, 25 bp, Artificial
  Probe
cataccagggtaccttcctactgac

SEQ ID NO: 326675 - DNA, 25 bp, Artificial
  Probe
ggtaccttcctactgaccactgcaa

SEQ ID NO: 326676 - DNA, 25 bp, Artificial
  Probe
ttgggcctatctggtcctttccaag

SEQ ID NO: 326677 - DNA, 25 bp, Artificial
  Probe
ctagtctcagaccaaagccagactg

SEQ ID NO: 326678 - DNA, 25 bp, Artificial
  Probe
agggaagcgccagtctccctagtct

SEQ ID NO: 326679 - DNA, 25 bp, Artificial
  Probe
cctatctggtcctttccaaggggcg

SEQ ID NO: 326680 - DNA, 25 bp, Artificial
  Probe
gggtaccttcctactgaccactgca

SEQ ID NO: 326681 - DNA, 25 bp, Artificial
  Probe
gtctcagaccaaagccagactgggt

SEQ ID NO: 326682 - DNA, 25 bp, Artificial
  Probe
gggaagcgccagtctccctagtctc

SEQ ID NO: 326683 - DNA, 25 bp, Artificial
  Probe
cttgggcctatctggtcctttccaa

SEQ ID NO: 326684 - DNA, 25 bp, Artificial
  Probe
atgagtgtcataccagggtaccttc

SEQ ID NO: 326685 - DNA, 25 bp, Artificial
  Probe
tgagtgtcataccagggtaccttcc

SEQ ID NO: 326686 - DNA, 25 bp, Artificial
  Probe
cctagtctcagaccaaagccagact

SEQ ID NO: 326687 - DNA, 25 bp, Artificial
  Probe
agtctcagaccaaagccagactggg

SEQ ID NO: 326688 - DNA, 25 bp, Artificial
  Probe
cgttgccaagcaagacatgagtgtc

SEQ ID NO: 326689 - DNA, 25 bp, Artificial
  Probe
ccactgttcaggtgtatgtaaatga

SEQ ID NO: 326690 - DNA, 25 bp, Artificial
  Probe
taacccatcgggtagctatgctcag

SEQ ID NO: 326691 - DNA, 25 bp, Artificial
  Probe
cagcaatcccagtgcctgtgagctc

SEQ ID NO: 326692 - DNA, 25 bp, Artificial
  Probe
gtaaatgagcagctcatatgaactc

SEQ ID NO: 326693 - DNA, 25 bp, Artificial
  Probe
ttgtctcctcagtgttcagcaaggc

SEQ ID NO: 326694 - DNA, 25 bp, Artificial
  Probe
cctgcaggcctcagcagagttcttg

SEQ ID NO: 326695 - DNA, 25 bp, Artificial
  Probe
agagctgtccacagggctgcccaga

SEQ ID NO: 326696 - DNA, 25 bp, Artificial
  Probe
aatcccagtgcctgtgagctctggg

SEQ ID NO: 326697 - DNA, 25 bp, Artificial
  Probe
aagtcctgagcctgtaagtgccact

SEQ ID NO: 326698 - DNA, 25 bp, Artificial
  Probe
acagctgagtgtgtgcagcagcgcc

SEQ ID NO: 326699 - DNA, 25 bp, Artificial
  Probe
gtttctaacccatcgggtagctatg

SEQ ID NO: 326700 - DNA, 25 bp, Artificial
  Probe
gccctggcttatcctcaggtggctt

SEQ ID NO: 326701 - DNA, 25 bp, Artificial
  Probe
ggcagcaatcccagtgcctgtgagc

SEQ ID NO: 326702 - DNA, 25 bp, Artificial
  Probe
cgggtgtcagcctcatgcctgttga

SEQ ID NO: 326703 - DNA, 25 bp, Artificial
  Probe
tcctcagtgttcagcaaggctctgg

SEQ ID NO: 326704 - DNA, 25 bp, Artificial
  Probe
tttcaattggcttatgaggcagaac

SEQ ID NO: 326705 - DNA, 25 bp, Artificial
  Probe
cagtgttcagcaaggctctggctct

SEQ ID NO: 326706 - DNA, 25 bp, Artificial
  Probe
ggacgcagacccagaagcaaggctg

SEQ ID NO: 326707 - DNA, 25 bp, Artificial
  Probe
tcaggtggcttcctccttcccagag

SEQ ID NO: 326708 - DNA, 25 bp, Artificial
  Probe
caattggcttatgaggcagaactgg

SEQ ID NO: 326709 - DNA, 25 bp, Artificial
  Probe
atgtcattctgtgtgggtttctaac

SEQ ID NO: 326710 - DNA, 25 bp, Artificial
  Probe
tacaggctgacatgcgtgtggccga

SEQ ID NO: 326711 - DNA, 25 bp, Artificial
  Probe
ctctggctctaagtcctgagcctgt

SEQ ID NO: 326712 - DNA, 25 bp, Artificial
  Probe
tgtccacagggctgcccagagaact

SEQ ID NO: 326713 - DNA, 25 bp, Artificial
  Probe
cagtgcctgtgagctctgggccctg

SEQ ID NO: 326714 - DNA, 25 bp, Artificial
  Probe
ggtttctaacccatcgggtagctat

SEQ ID NO: 326715 - DNA, 25 bp, Artificial
  Probe
tccttcccagagagctgtccacagg

SEQ ID NO: 326716 - DNA, 25 bp, Artificial
  Probe
tgtgggtttctaacccatcgggtag

SEQ ID NO: 326717 - DNA, 25 bp, Artificial
  Probe
aaggctctggctctaagtcctgagc

SEQ ID NO: 326718 - DNA, 25 bp, Artificial
  Probe
cagaactgggcagcaatcccagtgc

SEQ ID NO: 326719 - DNA, 25 bp, Artificial
  Probe
caaggctctggctctaagtcctgag

SEQ ID NO: 326720 - DNA, 25 bp, Artificial
  Probe
aggtggcttcctccttcccagagag

SEQ ID NO: 326721 - DNA, 25 bp, Artificial
  Probe
cctgttgatgtcattctgtgtgggt

SEQ ID NO: 326722 - DNA, 25 bp, Artificial
  Probe
aagcaaggctgacagctgagtgtgt

SEQ ID NO: 326723 - DNA, 25 bp, Artificial
  Probe
caccttttcaattggcttatgaggc

SEQ ID NO: 326724 - DNA, 25 bp, Artificial
  Probe
tgaactctgtacaggctgacatgcg

SEQ ID NO: 326725 - DNA, 25 bp, Artificial
  Probe
cctgtaagtgccactgttcaggtgt

SEQ ID NO: 326726 - DNA, 25 bp, Artificial
  Probe
gtgtcagcctcatgcctgttgatgt

SEQ ID NO: 326727 - DNA, 25 bp, Artificial
  Probe
cagctgagtgtgtgcagcagcgcct

SEQ ID NO: 326728 - DNA, 25 bp, Artificial
  Probe
ctctgtacaggctgacatgcgtgtg

SEQ ID NO: 326729 - DNA, 25 bp, Artificial
  Probe
cttatcctcaggtggcttcctcctt

SEQ ID NO: 326730 - DNA, 25 bp, Artificial
  Probe
tgtgtcgggtgtcagcctcatgcct

SEQ ID NO: 326731 - DNA, 25 bp, Artificial
  Probe
caaggctgacagctgagtgtgtgca

SEQ ID NO: 326732 - DNA, 25 bp, Artificial
  Probe
gcttatgaggcagaactgggcagca

SEQ ID NO: 326733 - DNA, 25 bp, Artificial
  Probe
atgaggcagaactgggcagcaatcc

SEQ ID NO: 326734 - DNA, 25 bp, Artificial
  Probe
gacccagaagcaaggctgacagctg

SEQ ID NO: 326735 - DNA, 25 bp, Artificial
  Probe
cactacgacaatgaaaagtgctggt

SEQ ID NO: 326736 - DNA, 25 bp, Artificial
  Probe
ccgagtggcccgagctatgtccatc

SEQ ID NO: 326737 - DNA, 25 bp, Artificial
  Probe
aaactccgggcatccactacatctg

SEQ ID NO: 326738 - DNA, 25 bp, Artificial
  Probe
tggcaaacgtcctggggtatacact

SEQ ID NO: 326739 - DNA, 25 bp, Artificial
  Probe
tacactgactacatctaccagggcc

SEQ ID NO: 326740 - DNA, 25 bp, Artificial
  Probe
gccccatgatcctggtcctgctgat

SEQ ID NO: 326741 - DNA, 25 bp, Artificial
  Probe
ggtccgctccgctatccggaagagg

SEQ ID NO: 326742 - DNA, 25 bp, Artificial
  Probe
gtccacagcagtgtgagctccaggc

SEQ ID NO: 326743 - DNA, 25 bp, Artificial
  Probe
tccgggcatccactacatctgagac

SEQ ID NO: 326744 - DNA, 25 bp, Artificial
  Probe
cagcagtgtgagctccaggccacag

SEQ ID NO: 326745 - DNA, 25 bp, Artificial
  Probe
cgtcggtggcaggacaagcactcca

SEQ ID NO: 326746 - DNA, 25 bp, Artificial
  Probe
tccgctatccggaagaggtggcgtc

SEQ ID NO: 326747 - DNA, 25 bp, Artificial
  Probe
acaagcactccatcagagcccgagt

SEQ ID NO: 326748 - DNA, 25 bp, Artificial
  Probe
ggcatccactacatctgagaccatt

SEQ ID NO: 326749 - DNA, 25 bp, Artificial
  Probe
tcagagcccgagtggcccgagctat

SEQ ID NO: 326750 - DNA, 25 bp, Artificial
  Probe
ggccattgggaagctgcactacgac

SEQ ID NO: 326751 - DNA, 25 bp, Artificial
  Probe
tcctggggtatacactgactacatc

SEQ ID NO: 326752 - DNA, 25 bp, Artificial
  Probe
tccgctccgctatccggaagaggtg

SEQ ID NO: 326753 - DNA, 25 bp, Artificial
  Probe
gagtggcccgagctatgtccatccc

SEQ ID NO: 326754 - DNA, 25 bp, Artificial
  Probe
aaagtgctggtttggcaaacgtcct

SEQ ID NO: 326755 - DNA, 25 bp, Artificial
  Probe
atcattgtggcttgggccattggga

SEQ ID NO: 326756 - DNA, 25 bp, Artificial
  Probe
ggtcctgctgatcaactttatcttt

SEQ ID NO: 326757 - DNA, 25 bp, Artificial
  Probe
acagcatcaagcagtccacagcagt

SEQ ID NO: 326758 - DNA, 25 bp, Artificial
  Probe
ttggcaaacgtcctggggtatacac

SEQ ID NO: 326759 - DNA, 25 bp, Artificial
  Probe
gcagtccacagcagtgtgagctcca

SEQ ID NO: 326760 - DNA, 25 bp, Artificial
  Probe
actacatctaccagggccccatgat

SEQ ID NO: 326761 - DNA, 25 bp, Artificial
  Probe
tcacagcatcaagcagtccacagca

SEQ ID NO: 326762 - DNA, 25 bp, Artificial
  Probe
aactccgggcatccactacatctga

SEQ ID NO: 326763 - DNA, 25 bp, Artificial
  Probe
gcgtcggtggcaggacaagcactcc

SEQ ID NO: 326764 - DNA, 25 bp, Artificial
  Probe
tgcactacgacaatgaaaagtgctg

SEQ ID NO: 326765 - DNA, 25 bp, Artificial
  Probe
tgactacatctaccagggccccatg

SEQ ID NO: 326766 - DNA, 25 bp, Artificial
  Probe
agcactccatcagagcccgagtggc

SEQ ID NO: 326767 - DNA, 25 bp, Artificial
  Probe
tggtttggcaaacgtcctggggtat

SEQ ID NO: 326768 - DNA, 25 bp, Artificial
  Probe
catcagagcccgagtggcccgagct

SEQ ID NO: 326769 - DNA, 25 bp, Artificial
  Probe
cccatgatcctggtcctgctgatca

SEQ ID NO: 326770 - DNA, 25 bp, Artificial
  Probe
agggccccatgatcctggtcctgct

SEQ ID NO: 326771 - DNA, 25 bp, Artificial
  Probe
ccacagcagtgtgagctccaggcca

SEQ ID NO: 326772 - DNA, 25 bp, Artificial
  Probe
aggacaagcactccatcagagcccg

SEQ ID NO: 326773 - DNA, 25 bp, Artificial
  Probe
gggtatacactgactacatctacca

SEQ ID NO: 326774 - DNA, 25 bp, Artificial
  Probe
tttggcaaacgtcctggggtataca

SEQ ID NO: 326775 - DNA, 25 bp, Artificial
  Probe
tggcaggacaagcactccatcagag

SEQ ID NO: 326776 - DNA, 25 bp, Artificial
  Probe
tcctggtcctgctgatcaactttat

SEQ ID NO: 326777 - DNA, 25 bp, Artificial
  Probe
atcctcatgaccaaactccgggcat

SEQ ID NO: 326778 - DNA, 25 bp, Artificial
  Probe
tgggccattgggaagctgcactacg

SEQ ID NO: 326779 - DNA, 25 bp, Artificial
  Probe
gcaggacaagcactccatcagagcc

SEQ ID NO: 326780 - DNA, 25 bp, Artificial
  Probe
aacgtcctggggtatacactgacta

SEQ ID NO: 326781 - DNA, 25 bp, Artificial
  Probe
tgggccgctcacaggaggccgaact

SEQ ID NO: 326782 - DNA, 25 bp, Artificial
  Probe
gtcatctcgcacagcacaggctcag

SEQ ID NO: 326783 - DNA, 25 bp, Artificial
  Probe
actggcttccagagcatcacacacg

SEQ ID NO: 326784 - DNA, 25 bp, Artificial
  Probe
ttagcttattcaaagccatgatgct

SEQ ID NO: 326785 - DNA, 25 bp, Artificial
  Probe
aaactctaagacttggctaatcacg

SEQ ID NO: 326786 - DNA, 25 bp, Artificial
  Probe
agagctcctgcagcacatctgcctt

SEQ ID NO: 326787 - DNA, 25 bp, Artificial
  Probe
tgactggcttccagagcatcacaca

SEQ ID NO: 326788 - DNA, 25 bp, Artificial
  Probe
tttccagtgaacaacgttccgtccg

SEQ ID NO: 326789 - DNA, 25 bp, Artificial
  Probe
tcacacacgcccagaagggtcatct

SEQ ID NO: 326790 - DNA, 25 bp, Artificial
  Probe
ctaagacttggctaatcacgtaaaa

SEQ ID NO: 326791 - DNA, 25 bp, Artificial
  Probe
cagagcatcacacacgcccagaagg

SEQ ID NO: 326792 - DNA, 25 bp, Artificial
  Probe
gggtcatctcgcacagcacaggctc

SEQ ID NO: 326793 - DNA, 25 bp, Artificial
  Probe
atcctgtcagagctcctgcagcaca

SEQ ID NO: 326794 - DNA, 25 bp, Artificial
  Probe
cttggctaatcacgtaaaagattgt

SEQ ID NO: 326795 - DNA, 25 bp, Artificial
  Probe
agctcctgcagcacatctgccttta

SEQ ID NO: 326796 - DNA, 25 bp, Artificial
  Probe
ttattcaaagccatgatgctgtaaa

SEQ ID NO: 326797 - DNA, 25 bp, Artificial
  Probe
aagattgtggcttcagtgttttctc

SEQ ID NO: 326798 - DNA, 25 bp, Artificial
  Probe
tcctgcagcacatctgcctttactg

SEQ ID NO: 326799 - DNA, 25 bp, Artificial
  Probe
agaagggtcatctcgcacagcacag

SEQ ID NO: 326800 - DNA, 25 bp, Artificial
  Probe
agagcatcacacacgcccagaaggg

SEQ ID NO: 326801 - DNA, 25 bp, Artificial
  Probe
tgtcagagctcctgcagcacatctg

SEQ ID NO: 326802 - DNA, 25 bp, Artificial
  Probe
acagctttccagtgaacaacgttcc

SEQ ID NO: 326803 - DNA, 25 bp, Artificial
  Probe
aactctaagacttggctaatcacgt

SEQ ID NO: 326804 - DNA, 25 bp, Artificial
  Probe
gctttccagtgaacaacgttccgtc

SEQ ID NO: 326805 - DNA, 25 bp, Artificial
  Probe
atctcgcacagcacaggctcagcaa

SEQ ID NO: 326806 - DNA, 25 bp, Artificial
  Probe
ggatcctgtcagagctcctgcagca

SEQ ID NO: 326807 - DNA, 25 bp, Artificial
  Probe
gctaatcacgtaaaagattgtggct

SEQ ID NO: 326808 - DNA, 25 bp, Artificial
  Probe
tctcgcacagcacaggctcagcaag

SEQ ID NO: 326809 - DNA, 25 bp, Artificial
  Probe
agattgtggcttcagtgttttctct

SEQ ID NO: 326810 - DNA, 25 bp, Artificial
  Probe
agccatgatgctgtaaatgtgcttg

SEQ ID NO: 326811 - DNA, 25 bp, Artificial
  Probe
gtaaaactctaagacttggctaatc

SEQ ID NO: 326812 - DNA, 25 bp, Artificial
  Probe
gccgctcacaggaggccgaactgtt

SEQ ID NO: 326813 - DNA, 25 bp, Artificial
  Probe
aaagccatgatgctgtaaatgtgct

SEQ ID NO: 326814 - DNA, 25 bp, Artificial
  Probe
cagtgaacaacgttccgtccggcac

SEQ ID NO: 326815 - DNA, 25 bp, Artificial
  Probe
ctgtcagagctcctgcagcacatct

SEQ ID NO: 326816 - DNA, 25 bp, Artificial
  Probe
tacagctttccagtgaacaacgttc

SEQ ID NO: 326817 - DNA, 25 bp, Artificial
  Probe
aatcacgtaaaagattgtggcttca

SEQ ID NO: 326818 - DNA, 25 bp, Artificial
  Probe
aggcattgtgactggcttccagagc

SEQ ID NO: 326819 - DNA, 25 bp, Artificial
  Probe
attgtgactggcttccagagcatca

SEQ ID NO: 326820 - DNA, 25 bp, Artificial
  Probe
acacacgcccagaagggtcatctcg

SEQ ID NO: 326821 - DNA, 25 bp, Artificial
  Probe
ggccgctcacaggaggccgaactgt

SEQ ID NO: 326822 - DNA, 25 bp, Artificial
  Probe
taatcacgtaaaagattgtggcttc

SEQ ID NO: 326823 - DNA, 25 bp, Artificial
  Probe
tcctgtcagagctcctgcagcacat

SEQ ID NO: 326824 - DNA, 25 bp, Artificial
  Probe
cggatcctgtcagagctcctgcagc

SEQ ID NO: 326825 - DNA, 25 bp, Artificial
  Probe
tagcttattcaaagccatgatgctg

SEQ ID NO: 326826 - DNA, 25 bp, Artificial
  Probe
cgcccagaagggtcatctcgcacag

SEQ ID NO: 326827 - DNA, 25 bp, Artificial
  Probe
gacggctgacacagatacagcggat

SEQ ID NO: 326828 - DNA, 25 bp, Artificial
  Probe
tttggtttcagctcagccaccaagg

SEQ ID NO: 326829 - DNA, 25 bp, Artificial
  Probe
ttcagctcagccaccaaggggacag

SEQ ID NO: 326830 - DNA, 25 bp, Artificial
  Probe
cgagagacggctgacacagatacag

SEQ ID NO: 326831 - DNA, 25 bp, Artificial
  Probe
tcagctcagccaccaaggggacaga

SEQ ID NO: 326832 - DNA, 25 bp, Artificial
  Probe
catcaccggggatgagctgcgccgc

SEQ ID NO: 326833 - DNA, 25 bp, Artificial
  Probe
catgtcccgagagacggctgacaca

SEQ ID NO: 326834 - DNA, 25 bp, Artificial
  Probe
tcatgtcccgagagacggctgacac

SEQ ID NO: 326835 - DNA, 25 bp, Artificial
  Probe
atgtcccgagagacggctgacacag

SEQ ID NO: 326836 - DNA, 25 bp, Artificial
  Probe
gagacggctgacacagatacagcgg

SEQ ID NO: 326837 - DNA, 25 bp, Artificial
  Probe
acggctgacacagatacagcggatc

SEQ ID NO: 326838 - DNA, 25 bp, Artificial
  Probe
ctgacacagatacagcggatcaggt

SEQ ID NO: 326839 - DNA, 25 bp, Artificial
  Probe
gatcctggctggagataagaattac

SEQ ID NO: 326840 - DNA, 25 bp, Artificial
  Probe
ataagaattacatcaccggggatga

SEQ ID NO: 326841 - DNA, 25 bp, Artificial
  Probe
agatacagcggatcaggtcatggct

SEQ ID NO: 326842 - DNA, 25 bp, Artificial
  Probe
cggctgacacagatacagcggatca

SEQ ID NO: 326843 - DNA, 25 bp, Artificial
  Probe
ccgagagacggctgacacagataca

SEQ ID NO: 326844 - DNA, 25 bp, Artificial
  Probe
agagacggctgacacagatacagcg

SEQ ID NO: 326845 - DNA, 25 bp, Artificial
  Probe
gctgacacagatacagcggatcagg

SEQ ID NO: 326846 - DNA, 25 bp, Artificial
  Probe
gatacagcggatcaggtcatggctt

SEQ ID NO: 326847 - DNA, 25 bp, Artificial
  Probe
atcgacttcatgtcccgagagacgg

SEQ ID NO: 326848 - DNA, 25 bp, Artificial
  Probe
tgcgtttggtttcagctcagccacc

SEQ ID NO: 326849 - DNA, 25 bp, Artificial
  Probe
gtttggtttcagctcagccaccaag

SEQ ID NO: 326850 - DNA, 25 bp, Artificial
  Probe
ttggtttcagctcagccaccaaggg

SEQ ID NO: 326851 - DNA, 25 bp, Artificial
  Probe
tgacacagatacagcggatcaggtc

SEQ ID NO: 326852 - DNA, 25 bp, Artificial
  Probe
tacagcggatcaggtcatggcttcc

SEQ ID NO: 326853 - DNA, 25 bp, Artificial
  Probe
gcgtttggtttcagctcagccacca

SEQ ID NO: 326854 - DNA, 25 bp, Artificial
  Probe
ttcatgtcccgagagacggctgaca

SEQ ID NO: 326855 - DNA, 25 bp, Artificial
  Probe
cagctcagccaccaaggggacagag

SEQ ID NO: 326856 - DNA, 25 bp, Artificial
  Probe
cagatacagcggatcaggtcatggc

SEQ ID NO: 326857 - DNA, 25 bp, Artificial
  Probe
tggtttcagctcagccaccaagggg

SEQ ID NO: 326858 - DNA, 25 bp, Artificial
  Probe
agacggctgacacagatacagcgga

SEQ ID NO: 326859 - DNA, 25 bp, Artificial
  Probe
atcctggctggagataagaattaca

SEQ ID NO: 326860 - DNA, 25 bp, Artificial
  Probe
gataagaattacatcaccggggatg

SEQ ID NO: 326861 - DNA, 25 bp, Artificial
  Probe
taagaattacatcaccggggatgag

SEQ ID NO: 326862 - DNA, 25 bp, Artificial
  Probe
acatcaccggggatgagctgcgccg

SEQ ID NO: 326863 - DNA, 25 bp, Artificial
  Probe
gagagacggctgacacagatacagc

SEQ ID NO: 326864 - DNA, 25 bp, Artificial
  Probe
cttcatgtcccgagagacggctgac

SEQ ID NO: 326865 - DNA, 25 bp, Artificial
  Probe
cgtttggtttcagctcagccaccaa

SEQ ID NO: 326866 - DNA, 25 bp, Artificial
  Probe
atacagcggatcaggtcatggcttc

SEQ ID NO: 326867 - DNA, 25 bp, Artificial
  Probe
attcctcatcacattgggccagagt

SEQ ID NO: 326868 - DNA, 25 bp, Artificial
  Probe
acattgggccagagtttaggggcct

SEQ ID NO: 326869 - DNA, 25 bp, Artificial
  Probe
tttcccaagggaagaggccgagatt

SEQ ID NO: 326870 - DNA, 25 bp, Artificial
  Probe
cacattgggccagagtttaggggcc

SEQ ID NO: 326871 - DNA, 25 bp, Artificial
  Probe
cctcatcacattgggccagagttta

SEQ ID NO: 326872 - DNA, 25 bp, Artificial
  Probe
gtctggccaagtccccacctccctt

SEQ ID NO: 326873 - DNA, 25 bp, Artificial
  Probe
gggatttcgaggtggggtctggcca

SEQ ID NO: 326874 - DNA, 25 bp, Artificial
  Probe
tcacattgggccagagtttaggggc

SEQ ID NO: 326875 - DNA, 25 bp, Artificial
  Probe
ctcatcacattgggccagagtttag

SEQ ID NO: 326876 - DNA, 25 bp, Artificial
  Probe
tcatcacattgggccagagtttagg

SEQ ID NO: 326877 - DNA, 25 bp, Artificial
  Probe
tagcattcctcatcacattgggcca

SEQ ID NO: 326878 - DNA, 25 bp, Artificial
  Probe
ttcccaagggaagaggccgagatta

SEQ ID NO: 326879 - DNA, 25 bp, Artificial
  Probe
tctggccaagtccccacctcccttt

SEQ ID NO: 326880 - DNA, 25 bp, Artificial
  Probe
ttttcccaagggaagaggccgagat

SEQ ID NO: 326881 - DNA, 25 bp, Artificial
  Probe
gatttcgaggtggggtctggccaag

SEQ ID NO: 326882 - DNA, 25 bp, Artificial
  Probe
atcacattgggccagagtttagggg

SEQ ID NO: 326883 - DNA, 25 bp, Artificial
  Probe
cattgggccagagtttaggggcctt

SEQ ID NO: 326884 - DNA, 25 bp, Artificial
  Probe
cattcctcatcacattgggccagag

SEQ ID NO: 326885 - DNA, 25 bp, Artificial
  Probe
tggggtctggccaagtccccacctc

SEQ ID NO: 326886 - DNA, 25 bp, Artificial
  Probe
gcattcctcatcacattgggccaga

SEQ ID NO: 326887 - DNA, 25 bp, Artificial
  Probe
catcacattgggccagagtttaggg

SEQ ID NO: 326888 - DNA, 25 bp, Artificial
  Probe
tcctcatcacattgggccagagttt

SEQ ID NO: 326889 - DNA, 25 bp, Artificial
  Probe
ggatttcgaggtggggtctggccaa

SEQ ID NO: 326890 - DNA, 25 bp, Artificial
  Probe
tttcgaggtggggtctggccaagtc

SEQ ID NO: 326891 - DNA, 25 bp, Artificial
  Probe
ttcgaggtggggtctggccaagtcc

SEQ ID NO: 326892 - DNA, 25 bp, Artificial
  Probe
ggtctggccaagtccccacctccct

SEQ ID NO: 326893 - DNA, 25 bp, Artificial
  Probe
atttcgaggtggggtctggccaagt

SEQ ID NO: 326894 - DNA, 25 bp, Artificial
  Probe
ttcctcatcacattgggccagagtt

SEQ ID NO: 326895 - DNA, 25 bp, Artificial
  Probe
gaggtggggtctggccaagtcccca

SEQ ID NO: 326896 - DNA, 25 bp, Artificial
  Probe
tgggatttcgaggtggggtctggcc

SEQ ID NO: 326897 - DNA, 25 bp, Artificial
  Probe
tcccaagggaagaggccgagattaa

SEQ ID NO: 326898 - DNA, 25 bp, Artificial
  Probe
agcattcctcatcacattgggccag

SEQ ID NO: 326899 - DNA, 25 bp, Artificial
  Probe
tcgaggtggggtctggccaagtccc

SEQ ID NO: 326900 - DNA, 25 bp, Artificial
  Probe
agtgacatactgtttggtgtctgcg

SEQ ID NO: 326901 - DNA, 25 bp, Artificial
  Probe
ggagcccctgcagactagttcctgt

SEQ ID NO: 326902 - DNA, 25 bp, Artificial
  Probe
gactagttcctgtgacccagtgaca

SEQ ID NO: 326903 - DNA, 25 bp, Artificial
  Probe
agcccctgcagactagttcctgtga

SEQ ID NO: 326904 - DNA, 25 bp, Artificial
  Probe
gacccagtgacatactgtttggtgt

SEQ ID NO: 326905 - DNA, 25 bp, Artificial
  Probe
tctggagcccctgcagactagttcc

SEQ ID NO: 326906 - DNA, 25 bp, Artificial
  Probe
tgtgaataagctgatcccgtcaccc

SEQ ID NO: 326907 - DNA, 25 bp, Artificial
  Probe
tgacatactgtttggtgtctgcgcg

SEQ ID NO: 326908 - DNA, 25 bp, Artificial
  Probe
aagctgatcccgtcacccaacatgg

SEQ ID NO: 326909 - DNA, 25 bp, Artificial
  Probe
ctggagcccctgcagactagttcct

SEQ ID NO: 326910 - DNA, 25 bp, Artificial
  Probe
acatactgtttggtgtctgcgcgtg

SEQ ID NO: 326911 - DNA, 25 bp, Artificial
  Probe
gcccctgcagactagttcctgtgac

SEQ ID NO: 326912 - DNA, 25 bp, Artificial
  Probe
tgacccagtgacatactgtttggtg

SEQ ID NO: 326913 - DNA, 25 bp, Artificial
  Probe
ttgtcctgccacttgcactgtgctt

SEQ ID NO: 326914 - DNA, 25 bp, Artificial
  Probe
catactgtttggtgtctgcgcgtgc

SEQ ID NO: 326915 - DNA, 25 bp, Artificial
  Probe
gttgtcctgccacttgcactgtgct

SEQ ID NO: 326916 - DNA, 25 bp, Artificial
  Probe
acccagtgacatactgtttggtgtc

SEQ ID NO: 326917 - DNA, 25 bp, Artificial
  Probe
tggagcccctgcagactagttcctg

SEQ ID NO: 326918 - DNA, 25 bp, Artificial
  Probe
tcctgccacttgcactgtgcttgct

SEQ ID NO: 326919 - DNA, 25 bp, Artificial
  Probe
cagactagttcctgtgacccagtga

SEQ ID NO: 326920 - DNA, 25 bp, Artificial
  Probe
gtgaacacacattcttaaggcaata

SEQ ID NO: 326921 - DNA, 25 bp, Artificial
  Probe
tgaataagctgatcccgtcacccaa

SEQ ID NO: 326922 - DNA, 25 bp, Artificial
  Probe
gaagtgaacacacattcttaaggca

SEQ ID NO: 326923 - DNA, 25 bp, Artificial
  Probe
cagtgacatactgtttggtgtctgc

SEQ ID NO: 326924 - DNA, 25 bp, Artificial
  Probe
gtggcagcagcacgttgccatccat

SEQ ID NO: 326925 - DNA, 25 bp, Artificial
  Probe
tgtcctgccacttgcactgtgcttg

SEQ ID NO: 326926 - DNA, 25 bp, Artificial
  Probe
tgaagtgaacacacattcttaaggc

SEQ ID NO: 326927 - DNA, 25 bp, Artificial
  Probe
agactagttcctgtgacccagtgac

SEQ ID NO: 326928 - DNA, 25 bp, Artificial
  Probe
tgcagactagttcctgtgacccagt

SEQ ID NO: 326929 - DNA, 25 bp, Artificial
  Probe
ctgcagactagttcctgtgacccag

SEQ ID NO: 326930 - DNA, 25 bp, Artificial
  Probe
ttcctgtgacccagtgacatactgt

SEQ ID NO: 326931 - DNA, 25 bp, Artificial
  Probe
cccagtgacatactgtttggtgtct

SEQ ID NO: 326932 - DNA, 25 bp, Artificial
  Probe
gtgaataagctgatcccgtcaccca

SEQ ID NO: 326933 - DNA, 25 bp, Artificial
  Probe
ttgtggcagcagcacgttgccatcc

SEQ ID NO: 326934 - DNA, 25 bp, Artificial
  Probe
gcagactagttcctgtgacccagtg

SEQ ID NO: 326935 - DNA, 25 bp, Artificial
  Probe
cctgtgacccagtgacatactgttt

SEQ ID NO: 326936 - DNA, 25 bp, Artificial
  Probe
ggttgtcctgccacttgcactgtgc

SEQ ID NO: 326937 - DNA, 25 bp, Artificial
  Probe
tgccacttgcactgtgcttgctcct

SEQ ID NO: 326938 - DNA, 25 bp, Artificial
  Probe
agtgaacacacattcttaaggcaat

SEQ ID NO: 326939 - DNA, 25 bp, Artificial
  Probe
ttgtgaataagctgatcccgtcacc

SEQ ID NO: 326940 - DNA, 25 bp, Artificial
  Probe
tgtgacccagtgacatactgtttgg

SEQ ID NO: 326941 - DNA, 25 bp, Artificial
  Probe
tcctgtgacccagtgacatactgtt

SEQ ID NO: 326942 - DNA, 25 bp, Artificial
  Probe
cctgcagactagttcctgtgaccca

SEQ ID NO: 326943 - DNA, 25 bp, Artificial
  Probe
gtgacatactgtttggtgtctgcgc

SEQ ID NO: 326944 - DNA, 25 bp, Artificial
  Probe
gccacttgcactgtgcttgctccta

SEQ ID NO: 326945 - DNA, 25 bp, Artificial
  Probe
tgtggcagcagcacgttgccatcca

SEQ ID NO: 326946 - DNA, 25 bp, Artificial
  Probe
taaagccaacatcaagtgggtgaag

SEQ ID NO: 326947 - DNA, 25 bp, Artificial
  Probe
ttctcctctgagttcgagctgcagc

SEQ ID NO: 326948 - DNA, 25 bp, Artificial
  Probe
cgcttctcctctgagttcgagctgc

SEQ ID NO: 326949 - DNA, 25 bp, Artificial
  Probe
actaaagccaacatcaagtgggtga

SEQ ID NO: 326950 - DNA, 25 bp, Artificial
  Probe
agtcccgggccgagaaccatctgtc

SEQ ID NO: 326951 - DNA, 25 bp, Artificial
  Probe
caagccctggagaagactaaagcca

SEQ ID NO: 326952 - DNA, 25 bp, Artificial
  Probe
cttctcctctgagttcgagctgcag

SEQ ID NO: 326953 - DNA, 25 bp, Artificial
  Probe
caaagacgtggtactcaagtggttc

SEQ ID NO: 326954 - DNA, 25 bp, Artificial
  Probe
tctgagttcgagctgcagcagctgg

SEQ ID NO: 326955 - DNA, 25 bp, Artificial
  Probe
ctaaagccaacatcaagtgggtgaa

SEQ ID NO: 326956 - DNA, 25 bp, Artificial
  Probe
acccagaaccaaagaatcaacaggg

SEQ ID NO: 326957 - DNA, 25 bp, Artificial
  Probe
cctctgagttcgagctgcagcagct

SEQ ID NO: 326958 - DNA, 25 bp, Artificial
  Probe
gacccagaaccaaagaatcaacagg

SEQ ID NO: 326959 - DNA, 25 bp, Artificial
  Probe
gcttctcctctgagttcgagctgca

SEQ ID NO: 326960 - DNA, 25 bp, Artificial
  Probe
gccaacatcaagtgggtgaaggaga

SEQ ID NO: 326961 - DNA, 25 bp, Artificial
  Probe
agccaacatcaagtgggtgaaggag

SEQ ID NO: 326962 - DNA, 25 bp, Artificial
  Probe
ctctgagttcgagctgcagcagctg

SEQ ID NO: 326963 - DNA, 25 bp, Artificial
  Probe
cccagaaccaaagaatcaacagggc

SEQ ID NO: 326964 - DNA, 25 bp, Artificial
  Probe
agccctggagaagactaaagccaac

SEQ ID NO: 326965 - DNA, 25 bp, Artificial
  Probe
aagccaacatcaagtgggtgaagga

SEQ ID NO: 326966 - DNA, 25 bp, Artificial
  Probe
aaagccaacatcaagtgggtgaagg

SEQ ID NO: 326967 - DNA, 25 bp, Artificial
  Probe
aagactaaagccaacatcaagtggg

SEQ ID NO: 326968 - DNA, 25 bp, Artificial
  Probe
gactaaagccaacatcaagtgggtg

SEQ ID NO: 326969 - DNA, 25 bp, Artificial
  Probe
tcctctgagttcgagctgcagcagc

SEQ ID NO: 326970 - DNA, 25 bp, Artificial
  Probe
agactaaagccaacatcaagtgggt

SEQ ID NO: 326971 - DNA, 25 bp, Artificial
  Probe
ctcctctgagttcgagctgcagcag

SEQ ID NO: 326972 - DNA, 25 bp, Artificial
  Probe
ctgagttcgagctgcagcagctgga

SEQ ID NO: 326973 - DNA, 25 bp, Artificial
  Probe
aagccctggagaagactaaagccaa

SEQ ID NO: 326974 - DNA, 25 bp, Artificial
  Probe
ctgccttgactcaccacagctaagt

SEQ ID NO: 326975 - DNA, 25 bp, Artificial
  Probe
ctggagccagccacagagcctgcag

SEQ ID NO: 326976 - DNA, 25 bp, Artificial
  Probe
tgctgcgtgtgcatcagtgtttgga

SEQ ID NO: 326977 - DNA, 25 bp, Artificial
  Probe
agagatttccacacactgccgtgcc

SEQ ID NO: 326978 - DNA, 25 bp, Artificial
  Probe
agaacagtgactctcagcccaagct

SEQ ID NO: 326979 - DNA, 25 bp, Artificial
  Probe
gtgacatccccatgggccagggctg

SEQ ID NO: 326980 - DNA, 25 bp, Artificial
  Probe
tgtgtgtgcttgacaggcactcact

SEQ ID NO: 326981 - DNA, 25 bp, Artificial
  Probe
ccaggttggcttgagcaaggccaca

SEQ ID NO: 326982 - DNA, 25 bp, Artificial
  Probe
tggacagggcttgctcttccctcga

SEQ ID NO: 326983 - DNA, 25 bp, Artificial
  Probe
ctcctttttgggaggaagatagcag

SEQ ID NO: 326984 - DNA, 25 bp, Artificial
  Probe
atggcgtgcacatatcccctaactc

SEQ ID NO: 326985 - DNA, 25 bp, Artificial
  Probe
agccacatggagagaagccgcaaac

SEQ ID NO: 326986 - DNA, 25 bp, Artificial
  Probe
gactccgactgacttgtctttacct

SEQ ID NO: 326987 - DNA, 25 bp, Artificial
  Probe
tacagtgctgctcattgctcaccgc

SEQ ID NO: 326988 - DNA, 25 bp, Artificial
  Probe
ggtgacaccttgtccaaccctagga

SEQ ID NO: 326989 - DNA, 25 bp, Artificial
  Probe
cagagatgcccttctaaagctgtgg

SEQ ID NO: 326990 - DNA, 25 bp, Artificial
  Probe
agcctgagtcaggactcttcccaaa

SEQ ID NO: 326991 - DNA, 25 bp, Artificial
  Probe
tggccctgaactcactttgttgctg

SEQ ID NO: 326992 - DNA, 25 bp, Artificial
  Probe
tgcccaatctaaactcctttttggg

SEQ ID NO: 326993 - DNA, 25 bp, Artificial
  Probe
tggtgaagggtctcttgctcaaact

SEQ ID NO: 326994 - DNA, 25 bp, Artificial
  Probe
ggattatggcctgtgtcaccacgcc

SEQ ID NO: 326995 - DNA, 25 bp, Artificial
  Probe
cagagagtggcagtccagcacagct

SEQ ID NO: 326996 - DNA, 25 bp, Artificial
  Probe
gttttacaggctagcccaggagtcg

SEQ ID NO: 326997 - DNA, 25 bp, Artificial
  Probe
caccccaggccattcaggttggatg

SEQ ID NO: 326998 - DNA, 25 bp, Artificial
  Probe
attcaggttggatgccctggaccgg

SEQ ID NO: 326999 - DNA, 25 bp, Artificial
  Probe
ctccagagtgctggaatgacagacg

SEQ ID NO: 327000 - DNA, 25 bp, Artificial
  Probe
cccccaggactgcatcatgaattga

SEQ ID NO: 327001 - DNA, 25 bp, Artificial
  Probe
gctgtctacttcaaggccataccca

SEQ ID NO: 327002 - DNA, 25 bp, Artificial
  Probe
gtgatggcgtgcacatatcccctaa

SEQ ID NO: 327003 - DNA, 25 bp, Artificial
  Probe
tgagtcaggactcttcccaaacctc

SEQ ID NO: 327004 - DNA, 25 bp, Artificial
  Probe
gtattggaataccagacccagaaga

SEQ ID NO: 327005 - DNA, 25 bp, Artificial
  Probe
tcaaactggcctcaaactcgagatg

SEQ ID NO: 327006 - DNA, 25 bp, Artificial
  Probe
cctgagcagtgatatgttgggttca

SEQ ID NO: 327007 - DNA, 25 bp, Artificial
  Probe
cgaccctgaggcttctctgattggc

SEQ ID NO: 327008 - DNA, 25 bp, Artificial
  Probe
cgccagggttctagtcatggatgag

SEQ ID NO: 327009 - DNA, 25 bp, Artificial
  Probe
ggggtctcaaacaaggctttgtgtg

SEQ ID NO: 327010 - DNA, 25 bp, Artificial
  Probe
cctgaactcactttgttgctgagga

SEQ ID NO: 327011 - DNA, 25 bp, Artificial
  Probe
gtgtgctgagcagtacccttcgctt

SEQ ID NO: 327012 - DNA, 25 bp, Artificial
  Probe
gagtggcagtccagcacagctgctg

SEQ ID NO: 327013 - DNA, 25 bp, Artificial
  Probe
agtcccgtgcgtgacagtgtgctga

SEQ ID NO: 327014 - DNA, 25 bp, Artificial
  Probe
atcagtgtttggactccgtgctttg

SEQ ID NO: 327015 - DNA, 25 bp, Artificial
  Probe
ctaactccttattttgaggtcattg

SEQ ID NO: 327016 - DNA, 25 bp, Artificial
  Probe
caggagaggattcctgcttgcttct

SEQ ID NO: 327017 - DNA, 25 bp, Artificial
  Probe
ggaatgacagacgtgtgccactaca

SEQ ID NO: 327018 - DNA, 25 bp, Artificial
  Probe
gcctgcgctccgtgatgaactgcgc

SEQ ID NO: 327019 - DNA, 25 bp, Artificial
  Probe
ccagaaaggcctgttttacaggcta

SEQ ID NO: 327020 - DNA, 25 bp, Artificial
  Probe
gtttatagtgacctgccatttcact

SEQ ID NO: 327021 - DNA, 25 bp, Artificial
  Probe
ggaaaaatctctactgtctcctgct

SEQ ID NO: 327022 - DNA, 25 bp, Artificial
  Probe
cctgccgatggaaatcaagaaagcc

SEQ ID NO: 327023 - DNA, 25 bp, Artificial
  Probe
aggaaaaatctctactgtctcctgc

SEQ ID NO: 327024 - DNA, 25 bp, Artificial
  Probe
agacactatcattgcgcccatgctc

SEQ ID NO: 327025 - DNA, 25 bp, Artificial
  Probe
tgtgtttatagtgacctgccatttc

SEQ ID NO: 327026 - DNA, 25 bp, Artificial
  Probe
tgcagagcacgagcatatatatcct

SEQ ID NO: 327027 - DNA, 25 bp, Artificial
  Probe
tgacacattccatgctaacacagag

SEQ ID NO: 327028 - DNA, 25 bp, Artificial
  Probe
ctctcttgaagaagggcgtcagagt

SEQ ID NO: 327029 - DNA, 25 bp, Artificial
  Probe
aagaggcatgctgaaactgcagatc

SEQ ID NO: 327030 - DNA, 25 bp, Artificial
  Probe
gtgacctgccatttcactttacagt

SEQ ID NO: 327031 - DNA, 25 bp, Artificial
  Probe
ccctgccgatggaaatcaagaaagc

SEQ ID NO: 327032 - DNA, 25 bp, Artificial
  Probe
caagaaagccaacaacaaccagtcg

SEQ ID NO: 327033 - DNA, 25 bp, Artificial
  Probe
gcatatatatcctcggctgtgctgt

SEQ ID NO: 327034 - DNA, 25 bp, Artificial
  Probe
ctgttgttcccctgtgtggcggtga

SEQ ID NO: 327035 - DNA, 25 bp, Artificial
  Probe
ttacagtcttactgcaacatgaaag

SEQ ID NO: 327036 - DNA, 25 bp, Artificial
  Probe
cttactgcaacatgaaagtaaggag

SEQ ID NO: 327037 - DNA, 25 bp, Artificial
  Probe
gacacattccatgctaacacagaga

SEQ ID NO: 327038 - DNA, 25 bp, Artificial
  Probe
agtgacctgccatttcactttacag

SEQ ID NO: 327039 - DNA, 25 bp, Artificial
  Probe
agacctacatggaaagaagcaggca

SEQ ID NO: 327040 - DNA, 25 bp, Artificial
  Probe
cagtttaggagcaccgagaaattga

SEQ ID NO: 327041 - DNA, 25 bp, Artificial
  Probe
ttagagagacactatcattgcgccc

SEQ ID NO: 327042 - DNA, 25 bp, Artificial
  Probe
aaactgcagatctaaggaaaaatct

SEQ ID NO: 327043 - DNA, 25 bp, Artificial
  Probe
tctctgcacaagaagaataacctag

SEQ ID NO: 327044 - DNA, 25 bp, Artificial
  Probe
tgctctgatcggaaggatttcaaca

SEQ ID NO: 327045 - DNA, 25 bp, Artificial
  Probe
gcccatgctccgttttggaaagact

SEQ ID NO: 327046 - DNA, 25 bp, Artificial
  Probe
cttataaaccctgtcagtttaggag

SEQ ID NO: 327047 - DNA, 25 bp, Artificial
  Probe
ctctgatcggaaggatttcaacaca

SEQ ID NO: 327048 - DNA, 25 bp, Artificial
  Probe
gatgcagagatggtctgcagagcac

SEQ ID NO: 327049 - DNA, 25 bp, Artificial
  Probe
aagggcgtcagagtctacaatttca

SEQ ID NO: 327050 - DNA, 25 bp, Artificial
  Probe
atcattgcgcccatgctccgttttg

SEQ ID NO: 327051 - DNA, 25 bp, Artificial
  Probe
gagtctacaatttcatgtctctgca

SEQ ID NO: 327052 - DNA, 25 bp, Artificial
  Probe
tgttcccctgtgtggcggtgagaaa

SEQ ID NO: 327053 - DNA, 25 bp, Artificial
  Probe
tctttctgttgttcccctgtgtggc

SEQ ID NO: 327054 - DNA, 25 bp, Artificial
  Probe
tatatcctcggctgtgctgtgctct

SEQ ID NO: 327055 - DNA, 25 bp, Artificial
  Probe
ggaagaacagcgaccagaaagctgt

SEQ ID NO: 327056 - DNA, 25 bp, Artificial
  Probe
acgagcatatatatcctcggctgtg

SEQ ID NO: 327057 - DNA, 25 bp, Artificial
  Probe
agaagcaggcactgtacaatgagag

SEQ ID NO: 327058 - DNA, 25 bp, Artificial
  Probe
ccatgctaacacagagacctacatg

SEQ ID NO: 327059 - DNA, 25 bp, Artificial
  Probe
tgctccgttttggaaagactacctt

SEQ ID NO: 327060 - DNA, 25 bp, Artificial
  Probe
tcatgtctctgcacaagaagaataa

SEQ ID NO: 327061 - DNA, 25 bp, Artificial
  Probe
tctactgtctcctgctctcttgaag

SEQ ID NO: 327062 - DNA, 25 bp, Artificial
  Probe
cgaccagaaagctgtgtttatagtg

SEQ ID NO: 327063 - DNA, 25 bp, Artificial
  Probe
caatttcatgtctctgcacaagaag

SEQ ID NO: 327064 - DNA, 25 bp, Artificial
  Probe
caggcactgtacaatgagagagaag

SEQ ID NO: 327065 - DNA, 25 bp, Artificial
  Probe
tgtcttggggaagaacagcgaccag

SEQ ID NO: 327066 - DNA, 25 bp, Artificial
  Probe
ttcgtctaatgaagaacagggaagc

SEQ ID NO: 327067 - DNA, 25 bp, Artificial
  Probe
cacttcctacacagcctgctgaaga

SEQ ID NO: 327068 - DNA, 25 bp, Artificial
  Probe
aagcacttaaggacctttactgcca

SEQ ID NO: 327069 - DNA, 25 bp, Artificial
  Probe
accccgatttaccaaactagcagtg

SEQ ID NO: 327070 - DNA, 25 bp, Artificial
  Probe
ccaaactagcagtgggcagtatatt

SEQ ID NO: 327071 - DNA, 25 bp, Artificial
  Probe
cactcagccgggtactaccattcta

SEQ ID NO: 327072 - DNA, 25 bp, Artificial
  Probe
gcctctggtgatgtacaaacatacc

SEQ ID NO: 327073 - DNA, 25 bp, Artificial
  Probe
tgatggacagcagattctagtgccc

SEQ ID NO: 327074 - DNA, 25 bp, Artificial
  Probe
aaatggactggattggccacaacca

SEQ ID NO: 327075 - DNA, 25 bp, Artificial
  Probe
aatgcagctgccactcagccgggta

SEQ ID NO: 327076 - DNA, 25 bp, Artificial
  Probe
gtatattgccattacccagggagga

SEQ ID NO: 327077 - DNA, 25 bp, Artificial
  Probe
atgaccaatgcagctgccactcagc

SEQ ID NO: 327078 - DNA, 25 bp, Artificial
  Probe
aggagcaatacagctggctaacaat

SEQ ID NO: 327079 - DNA, 25 bp, Artificial
  Probe
agcagattctagtgcccagcaacca

SEQ ID NO: 327080 - DNA, 25 bp, Artificial
  Probe
gggtacagggcctgcagacattaac

SEQ ID NO: 327081 - DNA, 25 bp, Artificial
  Probe
gtacaaacataccagattcgcacag

SEQ ID NO: 327082 - DNA, 25 bp, Artificial
  Probe
cacctatgtggtggaaaatggactg

SEQ ID NO: 327083 - DNA, 25 bp, Artificial
  Probe
gttcaagctgcctctggtgatgtac

SEQ ID NO: 327084 - DNA, 25 bp, Artificial
  Probe
acagagtggcagtgcttgaaaacca

SEQ ID NO: 327085 - DNA, 25 bp, Artificial
  Probe
caaccaagttgttgttcaagctgcc

SEQ ID NO: 327086 - DNA, 25 bp, Artificial
  Probe
caccattgcccctggagttgttatg

SEQ ID NO: 327087 - DNA, 25 bp, Artificial
  Probe
gaacagagtggcagtgcttgaaaac

SEQ ID NO: 327088 - DNA, 25 bp, Artificial
  Probe
gggtactaccattctacaatatgca

SEQ ID NO: 327089 - DNA, 25 bp, Artificial
  Probe
agtgcccagcaaccaagttgttgtt

SEQ ID NO: 327090 - DNA, 25 bp, Artificial
  Probe
tgttgttcaagctgcctctggtgat

SEQ ID NO: 327091 - DNA, 25 bp, Artificial
  Probe
aaggacctttactgccacaagtcag

SEQ ID NO: 327092 - DNA, 25 bp, Artificial
  Probe
agcacttcctacacagcctgctgaa

SEQ ID NO: 327093 - DNA, 25 bp, Artificial
  Probe
ctagcagtgggcagtatattgccat

SEQ ID NO: 327094 - DNA, 25 bp, Artificial
  Probe
tactgccacaagtcagattaatttg

SEQ ID NO: 327095 - DNA, 25 bp, Artificial
  Probe
ccacaagtcagattaatttgggatt

SEQ ID NO: 327096 - DNA, 25 bp, Artificial
  Probe
gctaacaatggtaccgatggggtac

SEQ ID NO: 327097 - DNA, 25 bp, Artificial
  Probe
tcgtctaatgaagaacagggaagca

SEQ ID NO: 327098 - DNA, 25 bp, Artificial
  Probe
gcagctgccactcagccgggtacta

SEQ ID NO: 327099 - DNA, 25 bp, Artificial
  Probe
gtgatgtacaaacataccagattcg

SEQ ID NO: 327100 - DNA, 25 bp, Artificial
  Probe
tagcagtgggcagtatattgccatt

SEQ ID NO: 327101 - DNA, 25 bp, Artificial
  Probe
tacaatatgcacagaccactgatgg

SEQ ID NO: 327102 - DNA, 25 bp, Artificial
  Probe
cactagcaccattgcccctggagtt

SEQ ID NO: 327103 - DNA, 25 bp, Artificial
  Probe
cctggagttgttatggcgtcctccc

SEQ ID NO: 327104 - DNA, 25 bp, Artificial
  Probe
gccatcaccactgtaacagtgccaa

SEQ ID NO: 327105 - DNA, 25 bp, Artificial
  Probe
ttcacctatgtggtggaaaatggac

SEQ ID NO: 327106 - DNA, 25 bp, Artificial
  Probe
cagtatattgccattacccagggag

SEQ ID NO: 327107 - DNA, 25 bp, Artificial
  Probe
attctagtgcccagcaaccaagttg

SEQ ID NO: 327108 - DNA, 25 bp, Artificial
  Probe
gagcaatacagctggctaacaatgg

SEQ ID NO: 327109 - DNA, 25 bp, Artificial
  Probe
aatacagctggctaacaatggtacc

SEQ ID NO: 327110 - DNA, 25 bp, Artificial
  Probe
ccactgatggacagcagattctagt

SEQ ID NO: 327111 - DNA, 25 bp, Artificial
  Probe
aagcagcacgaaagagagaggttcg

SEQ ID NO: 327112 - DNA, 25 bp, Artificial
  Probe
gggttcagtccttagagaagaaagc

SEQ ID NO: 327113 - DNA, 25 bp, Artificial
  Probe
gcagcttcaagatgccgtcaaaaaa

SEQ ID NO: 327114 - DNA, 25 bp, Artificial
  Probe
cctgtaaccgccatgcagaagaagt

SEQ ID NO: 327115 - DNA, 25 bp, Artificial
  Probe
gcccacatacagaagcgatccagca

SEQ ID NO: 327116 - DNA, 25 bp, Artificial
  Probe
agttcaacatcaaaaacagaagctg

SEQ ID NO: 327117 - DNA, 25 bp, Artificial
  Probe
tccaatggagtcagttcaacatcaa

SEQ ID NO: 327118 - DNA, 25 bp, Artificial
  Probe
taaagatgacagctcagaagacctt

SEQ ID NO: 327119 - DNA, 25 bp, Artificial
  Probe
accctgctgagaaatgaagtggcac

SEQ ID NO: 327120 - DNA, 25 bp, Artificial
  Probe
tggccgtcgaagaagagcagctaat

SEQ ID NO: 327121 - DNA, 25 bp, Artificial
  Probe
ggagtcagttcaacatcaaaaacag

SEQ ID NO: 327122 - DNA, 25 bp, Artificial
  Probe
gcgaagtcaccctgctgagaaatga

SEQ ID NO: 327123 - DNA, 25 bp, Artificial
  Probe
tcagtccttagagaagaaagcagaa

SEQ ID NO: 327124 - DNA, 25 bp, Artificial
  Probe
catacagaagcgatccagcacagct

SEQ ID NO: 327125 - DNA, 25 bp, Artificial
  Probe
cacagattgtcatggctccttcctc

SEQ ID NO: 327126 - DNA, 25 bp, Artificial
  Probe
gcttcttctggctcataaagattgc

SEQ ID NO: 327127 - DNA, 25 bp, Artificial
  Probe
aaatgaagtggcacagctgaaacag

SEQ ID NO: 327128 - DNA, 25 bp, Artificial
  Probe
gattgtcatggctccttcctcccag

SEQ ID NO: 327129 - DNA, 25 bp, Artificial
  Probe
agaagcgatccagcacagctctgtc

SEQ ID NO: 327130 - DNA, 25 bp, Artificial
  Probe
agctgcagagcgaagtcaccctgct

SEQ ID NO: 327131 - DNA, 25 bp, Artificial
  Probe
agaagtctggctatcatactgctga

SEQ ID NO: 327132 - DNA, 25 bp, Artificial
  Probe
cagaagacttgagctcactaaatgg

SEQ ID NO: 327133 - DNA, 25 bp, Artificial
  Probe
ccaaaatacaagtggccgtcgaaga

SEQ ID NO: 327134 - DNA, 25 bp, Artificial
  Probe
gagcaccgagcctgcactttcacag

SEQ ID NO: 327135 - DNA, 25 bp, Artificial
  Probe
gaaacagcttcttctggctcataaa

SEQ ID NO: 327136 - DNA, 25 bp, Artificial
  Probe
gccaagcagcccacatacagaagcg

SEQ ID NO: 327137 - DNA, 25 bp, Artificial
  Probe
catactgctgataaagatgacagct

SEQ ID NO: 327138 - DNA, 25 bp, Artificial
  Probe
attgtcatggctccttcctcccagg

SEQ ID NO: 327139 - DNA, 25 bp, Artificial
  Probe
ttctggctcataaagattgccctgt

SEQ ID NO: 327140 - DNA, 25 bp, Artificial
  Probe
agcagctaatgaagatcctgatgag

SEQ ID NO: 327141 - DNA, 25 bp, Artificial
  Probe
gagctcactaaatggccagctgcag

SEQ ID NO: 327142 - DNA, 25 bp, Artificial
  Probe
ttcaacatcaaaaacagaagctgga

SEQ ID NO: 327143 - DNA, 25 bp, Artificial
  Probe
caggcacagccctcaggaagttgat

SEQ ID NO: 327144 - DNA, 25 bp, Artificial
  Probe
gccatgcagaagaagtctggctatc

SEQ ID NO: 327145 - DNA, 25 bp, Artificial
  Probe
tcagaagacctttccgtgccaagca

SEQ ID NO: 327146 - DNA, 25 bp, Artificial
  Probe
tcaagatgccgtcaaaaaaggaaag

SEQ ID NO: 327147 - DNA, 25 bp, Artificial
  Probe
tggccagctgcagagcgaagtcacc

SEQ ID NO: 327148 - DNA, 25 bp, Artificial
  Probe
tacaagtggccgtcgaagaagagca

SEQ ID NO: 327149 - DNA, 25 bp, Artificial
  Probe
gattgccctgtaaccgccatgcaga

SEQ ID NO: 327150 - DNA, 25 bp, Artificial
  Probe
gtcagttcaacatcaaaaacagaag

SEQ ID NO: 327151 - DNA, 25 bp, Artificial
  Probe
taaagattgccctgtaaccgccatg

SEQ ID NO: 327152 - DNA, 25 bp, Artificial
  Probe
cactaaatggccagctgcagagcga

SEQ ID NO: 327153 - DNA, 25 bp, Artificial
  Probe
ttcagtccttagagaagaaagcaga

SEQ ID NO: 327154 - DNA, 25 bp, Artificial
  Probe
ttcaagatgccgtcaaaaaaggaaa

SEQ ID NO: 327155 - DNA, 25 bp, Artificial
  Probe
cagagcgaagtcaccctgctgagaa

SEQ ID NO: 327156 - DNA, 25 bp, Artificial
  Probe
aatagagcagcagcttcaagatgcc

SEQ ID NO: 327157 - DNA, 25 bp, Artificial
  Probe
gctcataaagattgccctgtaaccg

SEQ ID NO: 327158 - DNA, 25 bp, Artificial
  Probe
tatatttaagctttttgtgcagtaa

SEQ ID NO: 327159 - DNA, 25 bp, Artificial
  Probe
gtttgcataattttctgaatttcag

SEQ ID NO: 327160 - DNA, 25 bp, Artificial
  Probe
ccatatatttaagctttttgtgcag

SEQ ID NO: 327161 - DNA, 25 bp, Artificial
  Probe
ctttttgtgcagtaagaaagtgtaa

SEQ ID NO: 327162 - DNA, 25 bp, Artificial
  Probe
atatgaggacccatatatttaagct

SEQ ID NO: 327163 - DNA, 25 bp, Artificial
  Probe
caggcactttgtgctatatgaggac

SEQ ID NO: 327164 - DNA, 25 bp, Artificial
  Probe
tgtgctatatgaggacccatatatt

SEQ ID NO: 327165 - DNA, 25 bp, Artificial
  Probe
gaatcctcaggggtgaagaacagtt

SEQ ID NO: 327166 - DNA, 25 bp, Artificial
  Probe
tttgcataattttctgaatttcagg

SEQ ID NO: 327167 - DNA, 25 bp, Artificial
  Probe
tttctgaatttcaggcactttgtgc

SEQ ID NO: 327168 - DNA, 25 bp, Artificial
  Probe
attttctgaatttcaggcactttgt

SEQ ID NO: 327169 - DNA, 25 bp, Artificial
  Probe
ctttgtgctatatgaggacccatat

SEQ ID NO: 327170 - DNA, 25 bp, Artificial
  Probe
cagtttgcataattttctgaatttc

SEQ ID NO: 327171 - DNA, 25 bp, Artificial
  Probe
gacccatatatttaagctttttgtg

SEQ ID NO: 327172 - DNA, 25 bp, Artificial
  Probe
tcctcaggggtgaagaacagtttgc

SEQ ID NO: 327173 - DNA, 25 bp, Artificial
  Probe
ttctgaatttcaggcactttgtgct

SEQ ID NO: 327174 - DNA, 25 bp, Artificial
  Probe
agtttgcataattttctgaatttca

SEQ ID NO: 327175 - DNA, 25 bp, Artificial
  Probe
ttttctgaatttcaggcactttgtg

SEQ ID NO: 327176 - DNA, 25 bp, Artificial
  Probe
ttgtgctatatgaggacccatatat

SEQ ID NO: 327177 - DNA, 25 bp, Artificial
  Probe
aggacccatatatttaagctttttg

SEQ ID NO: 327178 - DNA, 25 bp, Artificial
  Probe
gcactttgtgctatatgaggaccca

SEQ ID NO: 327179 - DNA, 25 bp, Artificial
  Probe
aagctttttgtgcagtaagaaagtg

SEQ ID NO: 327180 - DNA, 25 bp, Artificial
  Probe
ctgaatttcaggcactttgtgctat

SEQ ID NO: 327181 - DNA, 25 bp, Artificial
  Probe
tttcaggcactttgtgctatatgag

SEQ ID NO: 327182 - DNA, 25 bp, Artificial
  Probe
acagtttgcataattttctgaattt

SEQ ID NO: 327183 - DNA, 25 bp, Artificial
  Probe
actttgtgctatatgaggacccata

SEQ ID NO: 327184 - DNA, 25 bp, Artificial
  Probe
taattttctgaatttcaggcacttt

SEQ ID NO: 327185 - DNA, 25 bp, Artificial
  Probe
ggcactttgtgctatatgaggaccc

SEQ ID NO: 327186 - DNA, 25 bp, Artificial
  Probe
atcctcaggggtgaagaacagtttg

SEQ ID NO: 327187 - DNA, 25 bp, Artificial
  Probe
tttaagctttttgtgcagtaagaaa

SEQ ID NO: 327188 - DNA, 25 bp, Artificial
  Probe
tgctatatgaggacccatatattta

SEQ ID NO: 327189 - DNA, 25 bp, Artificial
  Probe
cactttgtgctatatgaggacccat

SEQ ID NO: 327190 - DNA, 25 bp, Artificial
  Probe
tgaatttcaggcactttgtgctata

SEQ ID NO: 327191 - DNA, 25 bp, Artificial
  Probe
aacatgaatcctcaggggtgaagaa

SEQ ID NO: 327192 - DNA, 25 bp, Artificial
  Probe
acatgaatcctcaggggtgaagaac

SEQ ID NO: 327193 - DNA, 25 bp, Artificial
  Probe
catgaatcctcaggggtgaagaaca

SEQ ID NO: 327194 - DNA, 25 bp, Artificial
  Probe
tcaggcactttgtgctatatgagga

SEQ ID NO: 327195 - DNA, 25 bp, Artificial
  Probe
ttcaggcactttgtgctatatgagg

SEQ ID NO: 327196 - DNA, 25 bp, Artificial
  Probe
cataattttctgaatttcaggcact

SEQ ID NO: 327197 - DNA, 25 bp, Artificial
  Probe
tgaggacccatatatttaagctttt

SEQ ID NO: 327198 - DNA, 25 bp, Artificial
  Probe
aaacatgaatcctcaggggtgaaga

SEQ ID NO: 327199 - DNA, 25 bp, Artificial
  Probe
gtgctatatgaggacccatatattt

SEQ ID NO: 327200 - DNA, 25 bp, Artificial
  Probe
aattttctgaatttcaggcactttg

SEQ ID NO: 327201 - DNA, 25 bp, Artificial
  Probe
tatgaggacccatatatttaagctt

SEQ ID NO: 327202 - DNA, 25 bp, Artificial
  Probe
aatcctcaggggtgaagaacagttt

SEQ ID NO: 327203 - DNA, 25 bp, Artificial
  Probe
aggcactttgtgctatatgaggacc

SEQ ID NO: 327204 - DNA, 25 bp, Artificial
  Probe
atctctaccagtgaacgcagcccat

SEQ ID NO: 327205 - DNA, 25 bp, Artificial
  Probe
gaccttgtcctgatttcagtttcaa

SEQ ID NO: 327206 - DNA, 25 bp, Artificial
  Probe
tcttagagttacatctcgaaaaaag

SEQ ID NO: 327207 - DNA, 25 bp, Artificial
  Probe
actagttaggcaactgttttcttag

SEQ ID NO: 327208 - DNA, 25 bp, Artificial
  Probe
gagtccttgccgtgatagagccatg

SEQ ID NO: 327209 - DNA, 25 bp, Artificial
  Probe
gacagatctccttgataatgtactt

SEQ ID NO: 327210 - DNA, 25 bp, Artificial
  Probe
acggtgacctatttaatggtcttgt

SEQ ID NO: 327211 - DNA, 25 bp, Artificial
  Probe
tgaacgcagcccatcactagaaaat

SEQ ID NO: 327212 - DNA, 25 bp, Artificial
  Probe
ctctagtgctttatagcaaaagtgt

SEQ ID NO: 327213 - DNA, 25 bp, Artificial
  Probe
gtagtatcttatgcatagtgattcc

SEQ ID NO: 327214 - DNA, 25 bp, Artificial
  Probe
ttagagttgttcactttttcatagc

SEQ ID NO: 327215 - DNA, 25 bp, Artificial
  Probe
cgttcacttagagtatttctagagt

SEQ ID NO: 327216 - DNA, 25 bp, Artificial
  Probe
ctaaccttttttgatggctaagtag

SEQ ID NO: 327217 - DNA, 25 bp, Artificial
  Probe
gtggtacctgggtgaccagcattgc

SEQ ID NO: 327218 - DNA, 25 bp, Artificial
  Probe
cgtgatagagccatgtagggaatgc

SEQ ID NO: 327219 - DNA, 25 bp, Artificial
  Probe
tatatgcactaaccttttttgatgg

SEQ ID NO: 327220 - DNA, 25 bp, Artificial
  Probe
tgattgcatgttaccccaagcgtca

SEQ ID NO: 327221 - DNA, 25 bp, Artificial
  Probe
atcactagaaaatgaccttgtcctg

SEQ ID NO: 327222 - DNA, 25 bp, Artificial
  Probe
catgttaccccaagcgtcatgaaac

SEQ ID NO: 327223 - DNA, 25 bp, Artificial
  Probe
gaacacccaatcatgacctctagtg

SEQ ID NO: 327224 - DNA, 25 bp, Artificial
  Probe
atagataagccctttgagccttgtg

SEQ ID NO: 327225 - DNA, 25 bp, Artificial
  Probe
gggaatgcactgattgcatgttacc

SEQ ID NO: 327226 - DNA, 25 bp, Artificial
  Probe
ttcacatctctaccagtgaacgcag

SEQ ID NO: 327227 - DNA, 25 bp, Artificial
  Probe
gagttgttcactttttcatagctac

SEQ ID NO: 327228 - DNA, 25 bp, Artificial
  Probe
gcaactgttttcttagttacaagct

SEQ ID NO: 327229 - DNA, 25 bp, Artificial
  Probe
cagtctgtgccatgttgatgtacag

SEQ ID NO: 327230 - DNA, 25 bp, Artificial
  Probe
agtttgagtccttgccgtgatagag

SEQ ID NO: 327231 - DNA, 25 bp, Artificial
  Probe
aatcatgacctctagtgctttatag

SEQ ID NO: 327232 - DNA, 25 bp, Artificial
  Probe
tatgcagactagttaggcaactgtt

SEQ ID NO: 327233 - DNA, 25 bp, Artificial
  Probe
atagagccatgtagggaatgcactg

SEQ ID NO: 327234 - DNA, 25 bp, Artificial
  Probe
aaagtaggctacagtctgtgccatg

SEQ ID NO: 327235 - DNA, 25 bp, Artificial
  Probe
accagtgaacgcagcccatcactag

SEQ ID NO: 327236 - DNA, 25 bp, Artificial
  Probe
ccaagcgtcatgaaaccttccgaca

SEQ ID NO: 327237 - DNA, 25 bp, Artificial
  Probe
cttagttacaagcttcacttttgtg

SEQ ID NO: 327238 - DNA, 25 bp, Artificial
  Probe
ttaggcaactgttttcttagttaca

SEQ ID NO: 327239 - DNA, 25 bp, Artificial
  Probe
cctttgagccttgtggctaaatttt

SEQ ID NO: 327240 - DNA, 25 bp, Artificial
  Probe
gtaaagtggtacctgggtgaccagc

SEQ ID NO: 327241 - DNA, 25 bp, Artificial
  Probe
cttccgacacggtgacctatttaat

SEQ ID NO: 327242 - DNA, 25 bp, Artificial
  Probe
gaaaccttccgacacggtgacctat

SEQ ID NO: 327243 - DNA, 25 bp, Artificial
  Probe
gtatttctagagtttgagtccttgc

SEQ ID NO: 327244 - DNA, 25 bp, Artificial
  Probe
gactagttaggcaactgttttctta

SEQ ID NO: 327245 - DNA, 25 bp, Artificial
  Probe
tggctgcagaacacccaatcatgac

SEQ ID NO: 327246 - DNA, 25 bp, Artificial
  Probe
gtgtaaagtggtacctgggtgacca

SEQ ID NO: 327247 - DNA, 25 bp, Artificial
  Probe
aatatgacagatctccttgataatg

SEQ ID NO: 327248 - DNA, 25 bp, Artificial
  Probe
gcttcacttttgtgcagttaaaaaa

SEQ ID NO: 327249 - DNA, 25 bp, Artificial
  Probe
catctcgaaaaaagcatttgtgata

SEQ ID NO: 327250 - DNA, 25 bp, Artificial
  Probe
ccagggcttcagatattttgcacga

SEQ ID NO: 327251 - DNA, 25 bp, Artificial
  Probe
gtagcttagtccttcctgctcagct

SEQ ID NO: 327252 - DNA, 25 bp, Artificial
  Probe
tctatccagggcttcagatattttg

SEQ ID NO: 327253 - DNA, 25 bp, Artificial
  Probe
gtacaattgactggttttcctcccg

SEQ ID NO: 327254 - DNA, 25 bp, Artificial
  Probe
gcttcagatattttgcacgaaattt

SEQ ID NO: 327255 - DNA, 25 bp, Artificial
  Probe
ttgtacaattgactggttttcctcc

SEQ ID NO: 327256 - DNA, 25 bp, Artificial
  Probe
tgtagcttagtccttcctgctcagc

SEQ ID NO: 327257 - DNA, 25 bp, Artificial
  Probe
tattctctatccagggcttcagata

SEQ ID NO: 327258 - DNA, 25 bp, Artificial
  Probe
tacaattgactggttttcctcccgt

SEQ ID NO: 327259 - DNA, 25 bp, Artificial
  Probe
ttagtccttcctgctcagctgacca

SEQ ID NO: 327260 - DNA, 25 bp, Artificial
  Probe
tagcttagtccttcctgctcagctg

SEQ ID NO: 327261 - DNA, 25 bp, Artificial
  Probe
acccacagggcctgacttttacagc

SEQ ID NO: 327262 - DNA, 25 bp, Artificial
  Probe
atccagggcttcagatattttgcac

SEQ ID NO: 327263 - DNA, 25 bp, Artificial
  Probe
acagggcctgacttttacagctttt

SEQ ID NO: 327264 - DNA, 25 bp, Artificial
  Probe
gattgtagcttagtccttcctgctc

SEQ ID NO: 327265 - DNA, 25 bp, Artificial
  Probe
cctgcccagaccagattgtagctta

SEQ ID NO: 327266 - DNA, 25 bp, Artificial
  Probe
gtccttcctgctcagctgaccaggg

SEQ ID NO: 327267 - DNA, 25 bp, Artificial
  Probe
ccacagggcctgacttttacagctt

SEQ ID NO: 327268 - DNA, 25 bp, Artificial
  Probe
agacttgtacaattgactggttttc

SEQ ID NO: 327269 - DNA, 25 bp, Artificial
  Probe
cctcccgttggtagttgaaacaatg

SEQ ID NO: 327270 - DNA, 25 bp, Artificial
  Probe
ggcttcagatattttgcacgaaatt

SEQ ID NO: 327271 - DNA, 25 bp, Artificial
  Probe
tccagggcttcagatattttgcacg

SEQ ID NO: 327272 - DNA, 25 bp, Artificial
  Probe
ggggacctgtctgcttctctaccca

SEQ ID NO: 327273 - DNA, 25 bp, Artificial
  Probe
cagaccagattgtagcttagtcctt

SEQ ID NO: 327274 - DNA, 25 bp, Artificial
  Probe
ttcctgctcagctgaccagggtgga

SEQ ID NO: 327275 - DNA, 25 bp, Artificial
  Probe
ccagattgtagcttagtccttcctg

SEQ ID NO: 327276 - DNA, 25 bp, Artificial
  Probe
gtgcctctggccagccggcttgcag

SEQ ID NO: 327277 - DNA, 25 bp, Artificial
  Probe
tcctcccgttggtagttgaaacaat

SEQ ID NO: 327278 - DNA, 25 bp, Artificial
  Probe
gtattctctatccagggcttcagat

SEQ ID NO: 327279 - DNA, 25 bp, Artificial
  Probe
gccggggacctgtctgcttctctac

SEQ ID NO: 327280 - DNA, 25 bp, Artificial
  Probe
ttgtagcttagtccttcctgctcag

SEQ ID NO: 327281 - DNA, 25 bp, Artificial
  Probe
ctgcccagaccagattgtagcttag

SEQ ID NO: 327282 - DNA, 25 bp, Artificial
  Probe
caattgactggttttcctcccgttg

SEQ ID NO: 327283 - DNA, 25 bp, Artificial
  Probe
gcccagaccagattgtagcttagtc

SEQ ID NO: 327284 - DNA, 25 bp, Artificial
  Probe
ctttgtattctctatccagggcttc

SEQ ID NO: 327285 - DNA, 25 bp, Artificial
  Probe
tgtattctctatccagggcttcaga

SEQ ID NO: 327286 - DNA, 25 bp, Artificial
  Probe
gcttagtccttcctgctcagctgac

SEQ ID NO: 327287 - DNA, 25 bp, Artificial
  Probe
ccttcctgcccagaccagattgtag

SEQ ID NO: 327288 - DNA, 25 bp, Artificial
  Probe
tcccgttggtagttgaaacaatgtt

SEQ ID NO: 327289 - DNA, 25 bp, Artificial
  Probe
ccttcctgctcagctgaccagggtg

SEQ ID NO: 327290 - DNA, 25 bp, Artificial
  Probe
cttcctgctcagctgaccagggtgg

SEQ ID NO: 327291 - DNA, 25 bp, Artificial
  Probe
agaccagattgtagcttagtccttc

SEQ ID NO: 327292 - DNA, 25 bp, Artificial
  Probe
cagccggcttgcagcgccagcatta

SEQ ID NO: 327293 - DNA, 25 bp, Artificial
  Probe
atcactttgtattctctatccaggg

SEQ ID NO: 327294 - DNA, 25 bp, Artificial
  Probe
gacttgtacaattgactggttttcc

SEQ ID NO: 327295 - DNA, 25 bp, Artificial
  Probe
tgactggttttcctcccgttggtag

SEQ ID NO: 327296 - DNA, 25 bp, Artificial
  Probe
gtatttttgagatgccattgaactc

SEQ ID NO: 327297 - DNA, 25 bp, Artificial
  Probe
ttgcttcagctttgtgtttggggcc

SEQ ID NO: 327298 - DNA, 25 bp, Artificial
  Probe
gaaagatcagcttcgccagcattga

SEQ ID NO: 327299 - DNA, 25 bp, Artificial
  Probe
ctctcgagtcggttcctgcgagaac

SEQ ID NO: 327300 - DNA, 25 bp, Artificial
  Probe
agatagggggccagcaaaggactca

SEQ ID NO: 327301 - DNA, 25 bp, Artificial
  Probe
gagtatgcagttgctcactacagct

SEQ ID NO: 327302 - DNA, 25 bp, Artificial
  Probe
cattgaaatttctggcgacaatgtc

SEQ ID NO: 327303 - DNA, 25 bp, Artificial
  Probe
tccagctttaaacgaaagatcagct

SEQ ID NO: 327304 - DNA, 25 bp, Artificial
  Probe
gccagcgacaagtttaagtttgtct

SEQ ID NO: 327305 - DNA, 25 bp, Artificial
  Probe
ctgggcatactacatgtatttttga

SEQ ID NO: 327306 - DNA, 25 bp, Artificial
  Probe
ggtctccttttggatctctctcgag

SEQ ID NO: 327307 - DNA, 25 bp, Artificial
  Probe
ctggggatttgcttcagctttgtgt

SEQ ID NO: 327308 - DNA, 25 bp, Artificial
  Probe
gtggtgttatcctgggtctcctttt

SEQ ID NO: 327309 - DNA, 25 bp, Artificial
  Probe
gtttacctggggatttgcttcagct

SEQ ID NO: 327310 - DNA, 25 bp, Artificial
  Probe
tctccagctttaaacgaaagatcag

SEQ ID NO: 327311 - DNA, 25 bp, Artificial
  Probe
ttactgggcatactacatgtatttt

SEQ ID NO: 327312 - DNA, 25 bp, Artificial
  Probe
cagcttcgccagcattgaaatttct

SEQ ID NO: 327313 - DNA, 25 bp, Artificial
  Probe
acgatgaaagccagcgacaagttta

SEQ ID NO: 327314 - DNA, 25 bp, Artificial
  Probe
attcaaaatcccagcaacgtggatc

SEQ ID NO: 327315 - DNA, 25 bp, Artificial
  Probe
tcttccgagaaaagatcggcagaat

SEQ ID NO: 327316 - DNA, 25 bp, Artificial
  Probe
atgacaacgctgatgattggctccc

SEQ ID NO: 327317 - DNA, 25 bp, Artificial
  Probe
gtttgtcttccgagaaaagatcggc

SEQ ID NO: 327318 - DNA, 25 bp, Artificial
  Probe
agtgttgtccatgacaacgctgatg

SEQ ID NO: 327319 - DNA, 25 bp, Artificial
  Probe
atcagcttcgccagcattgaaattt

SEQ ID NO: 327320 - DNA, 25 bp, Artificial
  Probe
caactgcttcataaaggccattgat

SEQ ID NO: 327321 - DNA, 25 bp, Artificial
  Probe
tagggggccagcaaaggactcagaa

SEQ ID NO: 327322 - DNA, 25 bp, Artificial
  Probe
cagcagatggcagtcaaagataggg

SEQ ID NO: 327323 - DNA, 25 bp, Artificial
  Probe
ggatcgatattccaaactactgttt

SEQ ID NO: 327324 - DNA, 25 bp, Artificial
  Probe
ttactggagtatgcagttgctcact

SEQ ID NO: 327325 - DNA, 25 bp, Artificial
  Probe
acctgcattggagtgacaacagtgt

SEQ ID NO: 327326 - DNA, 25 bp, Artificial
  Probe
ttggccaatgtattttactgggcat

SEQ ID NO: 327327 - DNA, 25 bp, Artificial
  Probe
aaggccattgatgtttacctgggga

SEQ ID NO: 327328 - DNA, 25 bp, Artificial
  Probe
tgtttggggccttactggagtatgc

SEQ ID NO: 327329 - DNA, 25 bp, Artificial
  Probe
catactacatgtatttttgagatgc

SEQ ID NO: 327330 - DNA, 25 bp, Artificial
  Probe
accaactgcttcataaaggccattg

SEQ ID NO: 327331 - DNA, 25 bp, Artificial
  Probe
tcataaaggccattgatgtttacct

SEQ ID NO: 327332 - DNA, 25 bp, Artificial
  Probe
cattgatgtttacctggggatttgc

SEQ ID NO: 327333 - DNA, 25 bp, Artificial
  Probe
aaacgaaagatcagcttcgccagca

SEQ ID NO: 327334 - DNA, 25 bp, Artificial
  Probe
aatgtattttactgggcatactaca

SEQ ID NO: 327335 - DNA, 25 bp, Artificial
  Probe
ttgtccatgacaacgctgatgattg

SEQ ID NO: 327336 - DNA, 25 bp, Artificial
  Probe
ttcataaaggccattgatgtttacc

SEQ ID NO: 327337 - DNA, 25 bp, Artificial
  Probe
gccagcattgaaatttctggcgaca

SEQ ID NO: 327338 - DNA, 25 bp, Artificial
  Probe
actacatgtatttttgagatgccat

SEQ ID NO: 327339 - DNA, 25 bp, Artificial
  Probe
cagctttgtgtttggggccttactg

SEQ ID NO: 327340 - DNA, 25 bp, Artificial
  Probe
cctttgatttttatgttggccaatg

SEQ ID NO: 327341 - DNA, 25 bp, Artificial
  Probe
aaatttctggcgacaatgtcaacta

SEQ ID NO: 327342 - DNA, 25 bp, Artificial
  Probe
cctgaatgctgctggcctgactgag

SEQ ID NO: 327343 - DNA, 25 bp, Artificial
  Probe
gctgtcacctcttgaatggcacatg

SEQ ID NO: 327344 - DNA, 25 bp, Artificial
  Probe
gataagtttgccaatcatctgtaca

SEQ ID NO: 327345 - DNA, 25 bp, Artificial
  Probe
ctcatgaatcctgaatgctgctggc

SEQ ID NO: 327346 - DNA, 25 bp, Artificial
  Probe
cagctgtcacaatttgtgatttact

SEQ ID NO: 327347 - DNA, 25 bp, Artificial
  Probe
gctggcctgactgaggcacaaatgg

SEQ ID NO: 327348 - DNA, 25 bp, Artificial
  Probe
catgaatcctgaatgctgctggcct

SEQ ID NO: 327349 - DNA, 25 bp, Artificial
  Probe
ctggcctgactgaggcacaaatggg

SEQ ID NO: 327350 - DNA, 25 bp, Artificial
  Probe
atgctgctggcctgactgaggcaca

SEQ ID NO: 327351 - DNA, 25 bp, Artificial
  Probe
atcctgaatgctgctggcctgactg

SEQ ID NO: 327352 - DNA, 25 bp, Artificial
  Probe
ctgtcacaatttgtgatttacttgg

SEQ ID NO: 327353 - DNA, 25 bp, Artificial
  Probe
ggggcctggaccatctactcccaat

SEQ ID NO: 327354 - DNA, 25 bp, Artificial
  Probe
cctgactgaggcacaaatgggacca

SEQ ID NO: 327355 - DNA, 25 bp, Artificial
  Probe
tcttgaatggcacatgtcgctggca

SEQ ID NO: 327356 - DNA, 25 bp, Artificial
  Probe
tccacagctgtcacaatttgtgatt

SEQ ID NO: 327357 - DNA, 25 bp, Artificial
  Probe
tcaaggcccctcttctgaggcctgt

SEQ ID NO: 327358 - DNA, 25 bp, Artificial
  Probe
tcttctgaggcctgtgatgactatg

SEQ ID NO: 327359 - DNA, 25 bp, Artificial
  Probe
gaaagcattcctcagatctgatatt

SEQ ID NO: 327360 - DNA, 25 bp, Artificial
  Probe
ccattccatggctgggagagaaagc

SEQ ID NO: 327361 - DNA, 25 bp, Artificial
  Probe
tgcatggtctgagtttgaaaaccag

SEQ ID NO: 327362 - DNA, 25 bp, Artificial
  Probe
aggcccctcttctgaggcctgtgat

SEQ ID NO: 327363 - DNA, 25 bp, Artificial
  Probe
gctcatgaatcctgaatgctgctgg

SEQ ID NO: 327364 - DNA, 25 bp, Artificial
  Probe
aagcattcctcagatctgatatttg

SEQ ID NO: 327365 - DNA, 25 bp, Artificial
  Probe
agagaaagcattcctcagatctgat

SEQ ID NO: 327366 - DNA, 25 bp, Artificial
  Probe
ctgtcacctcttgaatggcacatgt

SEQ ID NO: 327367 - DNA, 25 bp, Artificial
  Probe
tccatggctgggagagaaagcattc

SEQ ID NO: 327368 - DNA, 25 bp, Artificial
  Probe
aggggcctggaccatctactcccaa

SEQ ID NO: 327369 - DNA, 25 bp, Artificial
  Probe
tgactgaggcacaaatgggaccata

SEQ ID NO: 327370 - DNA, 25 bp, Artificial
  Probe
ggtggctgtcacctcttgaatggca

SEQ ID NO: 327371 - DNA, 25 bp, Artificial
  Probe
gcccctcttctgaggcctgtgatga

SEQ ID NO: 327372 - DNA, 25 bp, Artificial
  Probe
ctcttgaatggcacatgtcgctggc

SEQ ID NO: 327373 - DNA, 25 bp, Artificial
  Probe
ctgctggcctgactgaggcacaaat

SEQ ID NO: 327374 - DNA, 25 bp, Artificial
  Probe
gtcacctcttgaatggcacatgtcg

SEQ ID NO: 327375 - DNA, 25 bp, Artificial
  Probe
tgctcatgaatcctgaatgctgctg

SEQ ID NO: 327376 - DNA, 25 bp, Artificial
  Probe
gagctgctcatgaatcctgaatgct

SEQ ID NO: 327377 - DNA, 25 bp, Artificial
  Probe
gagaaagcattcctcagatctgata

SEQ ID NO: 327378 - DNA, 25 bp, Artificial
  Probe
tggtggctgtcacctcttgaatggc

SEQ ID NO: 327379 - DNA, 25 bp, Artificial
  Probe
aataccattccatggctgggagaga

SEQ ID NO: 327380 - DNA, 25 bp, Artificial
  Probe
cacagctgtcacaatttgtgattta

SEQ ID NO: 327381 - DNA, 25 bp, Artificial
  Probe
ccttccacagctgtcacaatttgtg

SEQ ID NO: 327382 - DNA, 25 bp, Artificial
  Probe
gagagaaagcattcctcagatctga

SEQ ID NO: 327383 - DNA, 25 bp, Artificial
  Probe
ggcccctcttctgaggcctgtgatg

SEQ ID NO: 327384 - DNA, 25 bp, Artificial
  Probe
acagctgtcacaatttgtgatttac

SEQ ID NO: 327385 - DNA, 25 bp, Artificial
  Probe
aatcctgaatgctgctggcctgact

SEQ ID NO: 327386 - DNA, 25 bp, Artificial
  Probe
tcacctcttgaatggcacatgtcgc

SEQ ID NO: 327387 - DNA, 25 bp, Artificial
  Probe
tgaatcctgaatgctgctggcctga

SEQ ID NO: 327388 - DNA, 25 bp, Artificial
  Probe
ggaccgcatcgctacagtaggctac

SEQ ID NO: 327389 - DNA, 25 bp, Artificial
  Probe
gacgtggaccgcatcgctacagtag

SEQ ID NO: 327390 - DNA, 25 bp, Artificial
  Probe
tgtgcccacaactggcatcatcgag

SEQ ID NO: 327391 - DNA, 25 bp, Artificial
  Probe
cttggtggcattaagcgagtatgac

SEQ ID NO: 327392 - DNA, 25 bp, Artificial
  Probe
aatgtcacgtccatcatgttcttgg

SEQ ID NO: 327393 - DNA, 25 bp, Artificial
  Probe
tcgatgggccacagagggacgcaca

SEQ ID NO: 327394 - DNA, 25 bp, Artificial
  Probe
ttctggaagacaagatcctgcactc

SEQ ID NO: 327395 - DNA, 25 bp, Artificial
  Probe
tggtcgactacttccccgagttcga

SEQ ID NO: 327396 - DNA, 25 bp, Artificial
  Probe
tccagcactcgtctgtgatcctctt

SEQ ID NO: 327397 - DNA, 25 bp, Artificial
  Probe
gaccttctggaagacaagatcctgc

SEQ ID NO: 327398 - DNA, 25 bp, Artificial
  Probe
agagcaaggccctgttccgcacaat

SEQ ID NO: 327399 - DNA, 25 bp, Artificial
  Probe
tgacggacgtggaccgcatcgctac

SEQ ID NO: 327400 - DNA, 25 bp, Artificial
  Probe
atgtgctgcgggtacgtgtgcccac

SEQ ID NO: 327401 - DNA, 25 bp, Artificial
  Probe
gcatcatcgagtacccgtttgacct

SEQ ID NO: 327402 - DNA, 25 bp, Artificial
  Probe
ccgcgagttcatcctgaagatgttt

SEQ ID NO: 327403 - DNA, 25 bp, Artificial
  Probe
ttggtcgactacttccccgagttcg

SEQ ID NO: 327404 - DNA, 25 bp, Artificial
  Probe
gaagacaagatcctgcactcacact

SEQ ID NO: 327405 - DNA, 25 bp, Artificial
  Probe
gcatcgctacagtaggctacctgcc

SEQ ID NO: 327406 - DNA, 25 bp, Artificial
  Probe
tcatgttcttggtggcattaagcga

SEQ ID NO: 327407 - DNA, 25 bp, Artificial
  Probe
accgcatggaggagagcaaggccct

SEQ ID NO: 327408 - DNA, 25 bp, Artificial
  Probe
accaggtcctggtggagtcggacaa

SEQ ID NO: 327409 - DNA, 25 bp, Artificial
  Probe
gtacgtgtgcccacaactggcatca

SEQ ID NO: 327410 - DNA, 25 bp, Artificial
  Probe
ctggttccagcactcgtctgtgatc

SEQ ID NO: 327411 - DNA, 25 bp, Artificial
  Probe
aaccgcatggaggagagcaaggccc

SEQ ID NO: 327412 - DNA, 25 bp, Artificial
  Probe
gtttgtggatctgaaccccgacagc

SEQ ID NO: 327413 - DNA, 25 bp, Artificial
  Probe
cctggagaacatcatcttcaggatg

SEQ ID NO: 327414 - DNA, 25 bp, Artificial
  Probe
ttccccgagttcgatgggccacaga

SEQ ID NO: 327415 - DNA, 25 bp, Artificial
  Probe
ttaagcgagtatgaccaggtcctgg

SEQ ID NO: 327416 - DNA, 25 bp, Artificial
  Probe
ggaagacaagatcctgcactcacac

SEQ ID NO: 327417 - DNA, 25 bp, Artificial
  Probe
acgtggaccgcatcgctacagtagg

SEQ ID NO: 327418 - DNA, 25 bp, Artificial
  Probe
accttctggaagacaagatcctgca

SEQ ID NO: 327419 - DNA, 25 bp, Artificial
  Probe
gcactcacacttggtcgactacttc

SEQ ID NO: 327420 - DNA, 25 bp, Artificial
  Probe
ctacttccccgagttcgatgggcca

SEQ ID NO: 327421 - DNA, 25 bp, Artificial
  Probe
tgacctggagaacatcatcttcagg

SEQ ID NO: 327422 - DNA, 25 bp, Artificial
  Probe
tgcgggtacgtgtgcccacaactgg

SEQ ID NO: 327423 - DNA, 25 bp, Artificial
  Probe
ccccgagttcgatgggccacagagg

SEQ ID NO: 327424 - DNA, 25 bp, Artificial
  Probe
cattaagcgagtatgaccaggtcct

SEQ ID NO: 327425 - DNA, 25 bp, Artificial
  Probe
gtcacgtccatcatgttcttggtgg

SEQ ID NO: 327426 - DNA, 25 bp, Artificial
  Probe
tcgagtacccgtttgacctggagaa

SEQ ID NO: 327427 - DNA, 25 bp, Artificial
  Probe
atcgagtacccgtttgacctggaga

SEQ ID NO: 327428 - DNA, 25 bp, Artificial
  Probe
cacttggtcgactacttccccgagt

SEQ ID NO: 327429 - DNA, 25 bp, Artificial
  Probe
aacatcatcttcaggatggtggatg

SEQ ID NO: 327430 - DNA, 25 bp, Artificial
  Probe
acacttggtcgactacttccccgag

SEQ ID NO: 327431 - DNA, 25 bp, Artificial
  Probe
gcaaggccctgttccgcacaatcat

SEQ ID NO: 327432 - DNA, 25 bp, Artificial
  Probe
cacaactggcatcatcgagtacccg

SEQ ID NO: 327433 - DNA, 25 bp, Artificial
  Probe
ttcgatgggccacagagggacgcac

SEQ ID NO: 327434 - DNA, 25 bp, Artificial
  Probe
gtggcctctgtgtggccacatgtct

SEQ ID NO: 327435 - DNA, 25 bp, Artificial
  Probe
ctctgtgtggccacatgtctctggt

SEQ ID NO: 327436 - DNA, 25 bp, Artificial
  Probe
cctgcagtgggcatctcgaagccac

SEQ ID NO: 327437 - DNA, 25 bp, Artificial
  Probe
gcacttcccagacttcaagggcgac

SEQ ID NO: 327438 - DNA, 25 bp, Artificial
  Probe
gtggagtccatgaacatcttcgaga

SEQ ID NO: 327439 - DNA, 25 bp, Artificial
  Probe
gaaagatatcatgctgcagtgagac

SEQ ID NO: 327440 - DNA, 25 bp, Artificial
  Probe
gcaccaaccggctggtggagtccat

SEQ ID NO: 327441 - DNA, 25 bp, Artificial
  Probe
ttcaccactgccatagacaccgaga

SEQ ID NO: 327442 - DNA, 25 bp, Artificial
  Probe
ataggcgcaccaaccggctggtgga

SEQ ID NO: 327443 - DNA, 25 bp, Artificial
  Probe
agtgtcagtgatagctactgaatcg

SEQ ID NO: 327444 - DNA, 25 bp, Artificial
  Probe
gaagccacaccatctaatacctggc

SEQ ID NO: 327445 - DNA, 25 bp, Artificial
  Probe
tgctgcagtgagacagcccctctgc

SEQ ID NO: 327446 - DNA, 25 bp, Artificial
  Probe
ccggctggaggacgtccagcgctac

SEQ ID NO: 327447 - DNA, 25 bp, Artificial
  Probe
cacctgcatggacctgcagtgggca

SEQ ID NO: 327448 - DNA, 25 bp, Artificial
  Probe
cacaccagcgagctgcgggcaagag

SEQ ID NO: 327449 - DNA, 25 bp, Artificial
  Probe
ctctcgtggcctctgtgtggccaca

SEQ ID NO: 327450 - DNA, 25 bp, Artificial
  Probe
gaagcacttcccagacttcaagggc

SEQ ID NO: 327451 - DNA, 25 bp, Artificial
  Probe
tggaggacgtccagcgctacctggt

SEQ ID NO: 327452 - DNA, 25 bp, Artificial
  Probe
agaacctgaaagatatcatgctgca

SEQ ID NO: 327453 - DNA, 25 bp, Artificial
  Probe
gccagtcctctcgtggcctctgtgt

SEQ ID NO: 327454 - DNA, 25 bp, Artificial
  Probe
tgggcatctcgaagccacaccatct

SEQ ID NO: 327455 - DNA, 25 bp, Artificial
  Probe
tgccagtcctctcgtggcctctgtg

SEQ ID NO: 327456 - DNA, 25 bp, Artificial
  Probe
agtgatagctactgaatcggggact

SEQ ID NO: 327457 - DNA, 25 bp, Artificial
  Probe
cctgcaggagaacctgaaagatatc

SEQ ID NO: 327458 - DNA, 25 bp, Artificial
  Probe
cgaagccacaccatctaatacctgg

SEQ ID NO: 327459 - DNA, 25 bp, Artificial
  Probe
atggacctgcagtgggcatctcgaa

SEQ ID NO: 327460 - DNA, 25 bp, Artificial
  Probe
acaggaagcgcaggaaccgcggcaa

SEQ ID NO: 327461 - DNA, 25 bp, Artificial
  Probe
gacgtccagcgctacctggtccagt

SEQ ID NO: 327462 - DNA, 25 bp, Artificial
  Probe
actgccatagacaccgagaacatcc

SEQ ID NO: 327463 - DNA, 25 bp, Artificial
  Probe
gccacaccagcgagctgcgggcaag

SEQ ID NO: 327464 - DNA, 25 bp, Artificial
  Probe
agcattaagaagcacttcccagact

SEQ ID NO: 327465 - DNA, 25 bp, Artificial
  Probe
tgctggactgtcagccacaccagcg

SEQ ID NO: 327466 - DNA, 25 bp, Artificial
  Probe
gaacatcttcgagaccatcgtcaac

SEQ ID NO: 327467 - DNA, 25 bp, Artificial
  Probe
gcactaagaatgctggactgtcagc

SEQ ID NO: 327468 - DNA, 25 bp, Artificial
  Probe
gctttgacaggaagcgcaggaaccg

SEQ ID NO: 327469 - DNA, 25 bp, Artificial
  Probe
ttcgagaccatcgtcaacaacaagc

SEQ ID NO: 327470 - DNA, 25 bp, Artificial
  Probe
ctctggtgtgtctgccacctgcatg

SEQ ID NO: 327471 - DNA, 25 bp, Artificial
  Probe
ctgccacctgcatggacctgcagtg

SEQ ID NO: 327472 - DNA, 25 bp, Artificial
  Probe
ctaatacctggcactaagaatgctg

SEQ ID NO: 327473 - DNA, 25 bp, Artificial
  Probe
cctcatggaggataggcgcaccaac

SEQ ID NO: 327474 - DNA, 25 bp, Artificial
  Probe
tcctgcaggagaacctgaaagatat

SEQ ID NO: 327475 - DNA, 25 bp, Artificial
  Probe
gtcagccacaccagcgagctgcggg

SEQ ID NO: 327476 - DNA, 25 bp, Artificial
  Probe
gagaccatcgtcaacaacaagctct

SEQ ID NO: 327477 - DNA, 25 bp, Artificial
  Probe
aggataggcgcaccaaccggctggt

SEQ ID NO: 327478 - DNA, 25 bp, Artificial
  Probe
gactgtcagccacaccagcgagctg

SEQ ID NO: 327479 - DNA, 25 bp, Artificial
  Probe
cggctggtggagtccatgaacatct

SEQ ID NO: 327480 - DNA, 25 bp, Artificial
  Probe
cttcccagaatatgatggaccccag

SEQ ID NO: 327481 - DNA, 25 bp, Artificial
  Probe
gatcatgtttctggtagcgcttagc

SEQ ID NO: 327482 - DNA, 25 bp, Artificial
  Probe
accccttcgacttacagagtgtcat

SEQ ID NO: 327483 - DNA, 25 bp, Artificial
  Probe
cctcgatcatgtttctggtagcgct

SEQ ID NO: 327484 - DNA, 25 bp, Artificial
  Probe
cgaatacgatcaagttcttgtggag

SEQ ID NO: 327485 - DNA, 25 bp, Artificial
  Probe
tacgatcaagttcttgtggagtcag

SEQ ID NO: 327486 - DNA, 25 bp, Artificial
  Probe
catgtttctggtagcgcttagcgaa

SEQ ID NO: 327487 - DNA, 25 bp, Artificial
  Probe
aaacgtcacctcgatcatgtttctg

SEQ ID NO: 327488 - DNA, 25 bp, Artificial
  Probe
acactgctttgaaaacgtcacctcg

SEQ ID NO: 327489 - DNA, 25 bp, Artificial
  Probe
cagaatatgatggaccccagagaga

SEQ ID NO: 327490 - DNA, 25 bp, Artificial
  Probe
acttcccagaatatgatggacccca

SEQ ID NO: 327491 - DNA, 25 bp, Artificial
  Probe
cgcttagcgaatacgatcaagttct

SEQ ID NO: 327492 - DNA, 25 bp, Artificial
  Probe
tgaaaacgtcacctcgatcatgttt

SEQ ID NO: 327493 - DNA, 25 bp, Artificial
  Probe
ctcgatcatgtttctggtagcgctt

SEQ ID NO: 327494 - DNA, 25 bp, Artificial
  Probe
gtaccccttcgacttacagagtgtc

SEQ ID NO: 327495 - DNA, 25 bp, Artificial
  Probe
aatacgatcaagttcttgtggagtc

SEQ ID NO: 327496 - DNA, 25 bp, Artificial
  Probe
agcgcttagcgaatacgatcaagtt

SEQ ID NO: 327497 - DNA, 25 bp, Artificial
  Probe
caagttcttgtggagtcagacaatg

SEQ ID NO: 327498 - DNA, 25 bp, Artificial
  Probe
actgctttgaaaacgtcacctcgat

SEQ ID NO: 327499 - DNA, 25 bp, Artificial
  Probe
tcatgtttctggtagcgcttagcga

SEQ ID NO: 327500 - DNA, 25 bp, Artificial
  Probe
cttacagagtgtcatcttcagaatg

SEQ ID NO: 327501 - DNA, 25 bp, Artificial
  Probe
ttctggtagcgcttagcgaatacga

SEQ ID NO: 327502 - DNA, 25 bp, Artificial
  Probe
cttagcgaatacgatcaagttcttg

SEQ ID NO: 327503 - DNA, 25 bp, Artificial
  Probe
tacagagtgtcatcttcagaatggt

SEQ ID NO: 327504 - DNA, 25 bp, Artificial
  Probe
ccccttcgacttacagagtgtcatc

SEQ ID NO: 327505 - DNA, 25 bp, Artificial
  Probe
gactacttcccagaatatgatggac

SEQ ID NO: 327506 - DNA, 25 bp, Artificial
  Probe
cgatcatgtttctggtagcgcttag

SEQ ID NO: 327507 - DNA, 25 bp, Artificial
  Probe
cacctcgatcatgtttctggtagcg

SEQ ID NO: 327508 - DNA, 25 bp, Artificial
  Probe
cgacttacagagtgtcatcttcaga

SEQ ID NO: 327509 - DNA, 25 bp, Artificial
  Probe
atggatacactgctttgaaaacgtc

SEQ ID NO: 327510 - DNA, 25 bp, Artificial
  Probe
tacttcccagaatatgatggacccc

SEQ ID NO: 327511 - DNA, 25 bp, Artificial
  Probe
acgtcacctcgatcatgtttctggt

SEQ ID NO: 327512 - DNA, 25 bp, Artificial
  Probe
gtcacctcgatcatgtttctggtag

SEQ ID NO: 327513 - DNA, 25 bp, Artificial
  Probe
aacgtcacctcgatcatgtttctgg

SEQ ID NO: 327514 - DNA, 25 bp, Artificial
  Probe
acagagtgtcatcttcagaatggtc

SEQ ID NO: 327515 - DNA, 25 bp, Artificial
  Probe
ctggtagcgcttagcgaatacgatc

SEQ ID NO: 327516 - DNA, 25 bp, Artificial
  Probe
cgatcaagttcttgtggagtcagac

SEQ ID NO: 327517 - DNA, 25 bp, Artificial
  Probe
ctacttcccagaatatgatggaccc

SEQ ID NO: 327518 - DNA, 25 bp, Artificial
  Probe
tcgacttacagagtgtcatcttcag

SEQ ID NO: 327519 - DNA, 25 bp, Artificial
  Probe
ctgctttgaaaacgtcacctcgatc

SEQ ID NO: 327520 - DNA, 25 bp, Artificial
  Probe
ccttcgacttacagagtgtcatctt

SEQ ID NO: 327521 - DNA, 25 bp, Artificial
  Probe
tcaagttcttgtggagtcagacaat

SEQ ID NO: 327522 - DNA, 25 bp, Artificial
  Probe
gatacactgctttgaaaacgtcacc

SEQ ID NO: 327523 - DNA, 25 bp, Artificial
  Probe
tgtcatcttcagaatggtcgatgta

SEQ ID NO: 327524 - DNA, 25 bp, Artificial
  Probe
ttagcgaatacgatcaagttcttgt

SEQ ID NO: 327525 - DNA, 25 bp, Artificial
  Probe
tagcgcttagcgaatacgatcaagt

SEQ ID NO: 327526 - DNA, 25 bp, Artificial
  Probe
attggcatcagcactgccatcttgg

SEQ ID NO: 327527 - DNA, 25 bp, Artificial
  Probe
tggcatcagcactgccatcttggct

SEQ ID NO: 327528 - DNA, 25 bp, Artificial
  Probe
ctttactttatcttggcttaagaag

SEQ ID NO: 327529 - DNA, 25 bp, Artificial
  Probe
gaagtcattggcatcagcactgcca

SEQ ID NO: 327530 - DNA, 25 bp, Artificial
  Probe
ggctgtaattctggactccctaagc

SEQ ID NO: 327531 - DNA, 25 bp, Artificial
  Probe
tggactccctaagcaaagggagagt

SEQ ID NO: 327532 - DNA, 25 bp, Artificial
  Probe
agcactgccatcttggctgtaattc

SEQ ID NO: 327533 - DNA, 25 bp, Artificial
  Probe
ctccctaagcaaagggagagttgag

SEQ ID NO: 327534 - DNA, 25 bp, Artificial
  Probe
gatccacacatcctgaacagctgct

SEQ ID NO: 327535 - DNA, 25 bp, Artificial
  Probe
catcttggctgtaattctggactcc

SEQ ID NO: 327536 - DNA, 25 bp, Artificial
  Probe
catcctgaacagctgctttatgaga

SEQ ID NO: 327537 - DNA, 25 bp, Artificial
  Probe
tcagcactgccatcttggctgtaat

SEQ ID NO: 327538 - DNA, 25 bp, Artificial
  Probe
ctgaacagctgctttatgagacacc

SEQ ID NO: 327539 - DNA, 25 bp, Artificial
  Probe
gaggatccacacatcctgaacagct

SEQ ID NO: 327540 - DNA, 25 bp, Artificial
  Probe
tgccatcttggctgtaattctggac

SEQ ID NO: 327541 - DNA, 25 bp, Artificial
  Probe
agctgctttatgagacacctttact

SEQ ID NO: 327542 - DNA, 25 bp, Artificial
  Probe
tgtaattctggactccctaagcaaa

SEQ ID NO: 327543 - DNA, 25 bp, Artificial
  Probe
acacatcctgaacagctgctttatg

SEQ ID NO: 327544 - DNA, 25 bp, Artificial
  Probe
gtaattctggactccctaagcaaag

SEQ ID NO: 327545 - DNA, 25 bp, Artificial
  Probe
tggctgtaattctggactccctaag

SEQ ID NO: 327546 - DNA, 25 bp, Artificial
  Probe
tgttagaggatccacacatcctgaa

SEQ ID NO: 327547 - DNA, 25 bp, Artificial
  Probe
atgttagaggatccacacatcctga

SEQ ID NO: 327548 - DNA, 25 bp, Artificial
  Probe
gactccctaagcaaagggagagttg

SEQ ID NO: 327549 - DNA, 25 bp, Artificial
  Probe
gctgctttatgagacacctttactt

SEQ ID NO: 327550 - DNA, 25 bp, Artificial
  Probe
gagacacctttactttatcttggct

SEQ ID NO: 327551 - DNA, 25 bp, Artificial
  Probe
gccatcttggctgtaattctggact

SEQ ID NO: 327552 - DNA, 25 bp, Artificial
  Probe
cctgaacagctgctttatgagacac

SEQ ID NO: 327553 - DNA, 25 bp, Artificial
  Probe
tgagacacctttactttatcttggc

SEQ ID NO: 327554 - DNA, 25 bp, Artificial
  Probe
gcactgccatcttggctgtaattct

SEQ ID NO: 327555 - DNA, 25 bp, Artificial
  Probe
acatcctgaacagctgctttatgag

SEQ ID NO: 327556 - DNA, 25 bp, Artificial
  Probe
gaacagctgctttatgagacacctt

SEQ ID NO: 327557 - DNA, 25 bp, Artificial
  Probe
cacatcctgaacagctgctttatga

SEQ ID NO: 327558 - DNA, 25 bp, Artificial
  Probe
cttggctgtaattctggactcccta

SEQ ID NO: 327559 - DNA, 25 bp, Artificial
  Probe
cattggcatcagcactgccatcttg

SEQ ID NO: 327560 - DNA, 25 bp, Artificial
  Probe
atcttggctgtaattctggactccc

SEQ ID NO: 327561 - DNA, 25 bp, Artificial
  Probe
atcttggcttaagaagtcattggca

SEQ ID NO: 327562 - DNA, 25 bp, Artificial
  Probe
tatcttggcttaagaagtcattggc

SEQ ID NO: 327563 - DNA, 25 bp, Artificial
  Probe
cagctgctttatgagacacctttac

SEQ ID NO: 327564 - DNA, 25 bp, Artificial
  Probe
atcagcactgccatcttggctgtaa

SEQ ID NO: 327565 - DNA, 25 bp, Artificial
  Probe
ggatccacacatcctgaacagctgc

SEQ ID NO: 327566 - DNA, 25 bp, Artificial
  Probe
ttctggactccctaagcaaagggag

SEQ ID NO: 327567 - DNA, 25 bp, Artificial
  Probe
atgagacacctttactttatcttgg

SEQ ID NO: 327568 - DNA, 25 bp, Artificial
  Probe
ctggactccctaagcaaagggagag

SEQ ID NO: 327569 - DNA, 25 bp, Artificial
  Probe
tagaggatccacacatcctgaacag

SEQ ID NO: 327570 - DNA, 25 bp, Artificial
  Probe
aagtcattggcatcagcactgccat

SEQ ID NO: 327571 - DNA, 25 bp, Artificial
  Probe
ctttatcttggcttaagaagtcatt

SEQ ID NO: 327572 - DNA, 25 bp, Artificial
  Probe
agagaagcgtgtgcaacagttacag

SEQ ID NO: 327573 - DNA, 25 bp, Artificial
  Probe
agagtacaggcattaccaaacagag

SEQ ID NO: 327574 - DNA, 25 bp, Artificial
  Probe
aagacaactgagtctgtctgccatt

SEQ ID NO: 327575 - DNA, 25 bp, Artificial
  Probe
gagctgaagccagagtacaggcatt

SEQ ID NO: 327576 - DNA, 25 bp, Artificial
  Probe
actgagtctgtctgccattcctcag

SEQ ID NO: 327577 - DNA, 25 bp, Artificial
  Probe
gtctgccattcctcagtaaactgtt

SEQ ID NO: 327578 - DNA, 25 bp, Artificial
  Probe
tcacaagaatacgtgggagctgaag

SEQ ID NO: 327579 - DNA, 25 bp, Artificial
  Probe
agtctgtctgccattcctcagtaaa

SEQ ID NO: 327580 - DNA, 25 bp, Artificial
  Probe
ccctgacaggacaaagacaactgag

SEQ ID NO: 327581 - DNA, 25 bp, Artificial
  Probe
tcctcagataaactgtcattggaag

SEQ ID NO: 327582 - DNA, 25 bp, Artificial
  Probe
caggcattaccaaacagaggagaag

SEQ ID NO: 327583 - DNA, 25 bp, Artificial
  Probe
cctgtgggatacctgaaagaaatct

SEQ ID NO: 327584 - DNA, 25 bp, Artificial
  Probe
agaatcttccaaacctgtaaggctc

SEQ ID NO: 327585 - DNA, 25 bp, Artificial
  Probe
ctcagataaactgtcattggaagga

SEQ ID NO: 327586 - DNA, 25 bp, Artificial
  Probe
gcggaatgccgacctgctgccagtg

SEQ ID NO: 327587 - DNA, 25 bp, Artificial
  Probe
gctgccagtgaaaactacatgaaac

SEQ ID NO: 327588 - DNA, 25 bp, Artificial
  Probe
caactgagtctgtctgccattcctc

SEQ ID NO: 327589 - DNA, 25 bp, Artificial
  Probe
gcaacctgtgggatacctgaaagaa

SEQ ID NO: 327590 - DNA, 25 bp, Artificial
  Probe
cagagtacaggcattaccaaacaga

SEQ ID NO: 327591 - DNA, 25 bp, Artificial
  Probe
attaccaaacagaggagaagagcga

SEQ ID NO: 327592 - DNA, 25 bp, Artificial
  Probe
agaatacgtgggagctgaagccaga

SEQ ID NO: 327593 - DNA, 25 bp, Artificial
  Probe
gccattcctcagtaaactgttaaag

SEQ ID NO: 327594 - DNA, 25 bp, Artificial
  Probe
gaagaatcttccaaacctgtaaggc

SEQ ID NO: 327595 - DNA, 25 bp, Artificial
  Probe
acgtgggagctgaagccagagtaca

SEQ ID NO: 327596 - DNA, 25 bp, Artificial
  Probe
agaagcgtgtgcaacagttacaggc

SEQ ID NO: 327597 - DNA, 25 bp, Artificial
  Probe
attcacaagaatacgtgggagctga

SEQ ID NO: 327598 - DNA, 25 bp, Artificial
  Probe
agcgtgtgcaacagttacaggcaga

SEQ ID NO: 327599 - DNA, 25 bp, Artificial
  Probe
aatacgtgggagctgaagccagagt

SEQ ID NO: 327600 - DNA, 25 bp, Artificial
  Probe
attcctcagtaaactgttaaagctg

SEQ ID NO: 327601 - DNA, 25 bp, Artificial
  Probe
tgaagccagagtacaggcattacca

SEQ ID NO: 327602 - DNA, 25 bp, Artificial
  Probe
gtgtgcaacagttacaggcagatct

SEQ ID NO: 327603 - DNA, 25 bp, Artificial
  Probe
aagccagagtacaggcattaccaaa

SEQ ID NO: 327604 - DNA, 25 bp, Artificial
  Probe
gtctgtctgccattcctcagtaaac

SEQ ID NO: 327605 - DNA, 25 bp, Artificial
  Probe
cgacctgctgccagtgaaaactaca

SEQ ID NO: 327606 - DNA, 25 bp, Artificial
  Probe
gacaaagacaactgagtctgtctgc

SEQ ID NO: 327607 - DNA, 25 bp, Artificial
  Probe
ctgccagtgaaaactacatgaaact

SEQ ID NO: 327608 - DNA, 25 bp, Artificial
  Probe
tagaagaatcttccaaacctgtaag

SEQ ID NO: 327609 - DNA, 25 bp, Artificial
  Probe
caaagcaacctgtgggatacctgaa

SEQ ID NO: 327610 - DNA, 25 bp, Artificial
  Probe
atgccgacctgctgccagtgaaaac

SEQ ID NO: 327611 - DNA, 25 bp, Artificial
  Probe
ccaccctgacaggacaaagacaact

SEQ ID NO: 327612 - DNA, 25 bp, Artificial
  Probe
gcgtgtgcaacagttacaggcagat

SEQ ID NO: 327613 - DNA, 25 bp, Artificial
  Probe
ggaattcacaagaatacgtgggagc

SEQ ID NO: 327614 - DNA, 25 bp, Artificial
  Probe
caaagacaactgagtctgtctgcca

SEQ ID NO: 327615 - DNA, 25 bp, Artificial
  Probe
gaatcttccaaacctgtaaggctct

SEQ ID NO: 327616 - DNA, 25 bp, Artificial
  Probe
ctgtctgccattcctcagtaaactg

SEQ ID NO: 327617 - DNA, 25 bp, Artificial
  Probe
agtacaggcattaccaaacagagga

SEQ ID NO: 327618 - DNA, 25 bp, Artificial
  Probe
cttgtcagacctgtcctttggggag

SEQ ID NO: 327619 - DNA, 25 bp, Artificial
  Probe
catgaaggcggcatgcagacctgct

SEQ ID NO: 327620 - DNA, 25 bp, Artificial
  Probe
ctccatcttcaaaacaaggtatgag

SEQ ID NO: 327621 - DNA, 25 bp, Artificial
  Probe
tgctccaacaccatggccttgtcaa

SEQ ID NO: 327622 - DNA, 25 bp, Artificial
  Probe
tagaggctttcactaaacctcagca

SEQ ID NO: 327623 - DNA, 25 bp, Artificial
  Probe
gcatcacagccttctttgtcctcag

SEQ ID NO: 327624 - DNA, 25 bp, Artificial
  Probe
ctgttacaattgttagaggctttca

SEQ ID NO: 327625 - DNA, 25 bp, Artificial
  Probe
atgatggaacatgtcacaggagcct

SEQ ID NO: 327626 - DNA, 25 bp, Artificial
  Probe
gagaaaacttgacacttacctacag

SEQ ID NO: 327627 - DNA, 25 bp, Artificial
  Probe
attgttagaggctttcactaaacct

SEQ ID NO: 327628 - DNA, 25 bp, Artificial
  Probe
actaaattaggctctttcaaatggt

SEQ ID NO: 327629 - DNA, 25 bp, Artificial
  Probe
ggtgggacaccttcaccaccaatgt

SEQ ID NO: 327630 - DNA, 25 bp, Artificial
  Probe
aagcctgtcagagaagtagccttct

SEQ ID NO: 327631 - DNA, 25 bp, Artificial
  Probe
cccagagtttctgaacctgtggtgg

SEQ ID NO: 327632 - DNA, 25 bp, Artificial
  Probe
tagaattgttcaaagcctgtcagag

SEQ ID NO: 327633 - DNA, 25 bp, Artificial
  Probe
tttgggcaggacaacaggtgagaac

SEQ ID NO: 327634 - DNA, 25 bp, Artificial
  Probe
gtgtcaaatgtgaatcccaggaccc

SEQ ID NO: 327635 - DNA, 25 bp, Artificial
  Probe
tctgttacaattgttagaggctttc

SEQ ID NO: 327636 - DNA, 25 bp, Artificial
  Probe
gggaacagggccaggctgattatat

SEQ ID NO: 327637 - DNA, 25 bp, Artificial
  Probe
aagccatggaattacacgtacaatc

SEQ ID NO: 327638 - DNA, 25 bp, Artificial
  Probe
tcacagccttctttgtcctcagaag

SEQ ID NO: 327639 - DNA, 25 bp, Artificial
  Probe
gttcaccagttttctatgcaccatg

SEQ ID NO: 327640 - DNA, 25 bp, Artificial
  Probe
tatgcaccatgaaggcggcatgcag

SEQ ID NO: 327641 - DNA, 25 bp, Artificial
  Probe
atttgcttgttgtatccttcactag

SEQ ID NO: 327642 - DNA, 25 bp, Artificial
  Probe
ttgtcctcagaagaaaggaaggaac

SEQ ID NO: 327643 - DNA, 25 bp, Artificial
  Probe
actaaagtggcctttattaacactg

SEQ ID NO: 327644 - DNA, 25 bp, Artificial
  Probe
ctatctaatgatggaacatgtcaca

SEQ ID NO: 327645 - DNA, 25 bp, Artificial
  Probe
gccattttcttgtggacacatccat

SEQ ID NO: 327646 - DNA, 25 bp, Artificial
  Probe
tgggacaccttcaccaccaatgtct

SEQ ID NO: 327647 - DNA, 25 bp, Artificial
  Probe
gtgcagaacttgactctccatcttc

SEQ ID NO: 327648 - DNA, 25 bp, Artificial
  Probe
gcagacctgctctttctcagttatc

SEQ ID NO: 327649 - DNA, 25 bp, Artificial
  Probe
tcagttatctacttgaaaattgcag

SEQ ID NO: 327650 - DNA, 25 bp, Artificial
  Probe
gccaggctgattatatgggagcaga

SEQ ID NO: 327651 - DNA, 25 bp, Artificial
  Probe
gattctccaatatttgcttgttgta

SEQ ID NO: 327652 - DNA, 25 bp, Artificial
  Probe
cactgcggagtgattcataagccta

SEQ ID NO: 327653 - DNA, 25 bp, Artificial
  Probe
caaagatgccggttcctatctaatg

SEQ ID NO: 327654 - DNA, 25 bp, Artificial
  Probe
ttgggcaggacaacaggtgagaact

SEQ ID NO: 327655 - DNA, 25 bp, Artificial
  Probe
gtatgagattctccaatatttgctt

SEQ ID NO: 327656 - DNA, 25 bp, Artificial
  Probe
gattcataagcctaccagctagtgt

SEQ ID NO: 327657 - DNA, 25 bp, Artificial
  Probe
agagaagtagccttctagactaaag

SEQ ID NO: 327658 - DNA, 25 bp, Artificial
  Probe
tgtcctcagaagaaaggaaggaacg

SEQ ID NO: 327659 - DNA, 25 bp, Artificial
  Probe
gacctgcaatgtagaattgttcaaa

SEQ ID NO: 327660 - DNA, 25 bp, Artificial
  Probe
tcttcaaaacaaggtatgagattct

SEQ ID NO: 327661 - DNA, 25 bp, Artificial
  Probe
agccttctttgtcctcagaagaaag

SEQ ID NO: 327662 - DNA, 25 bp, Artificial
  Probe
acagggccaggctgattatatggga

SEQ ID NO: 327663 - DNA, 25 bp, Artificial
  Probe
ccttgtcaaagatgccggttcctat

SEQ ID NO: 327664 - DNA, 25 bp, Artificial
  Probe
tgtgccggccttccacggtgtggtc

SEQ ID NO: 327665 - DNA, 25 bp, Artificial
  Probe
gatcctggatcatcggaggccctgg

SEQ ID NO: 327666 - DNA, 25 bp, Artificial
  Probe
ggtctaacttcctacactaccatgg

SEQ ID NO: 327667 - DNA, 25 bp, Artificial
  Probe
cactcctcttcgtgcatgaccattg

SEQ ID NO: 327668 - DNA, 25 bp, Artificial
  Probe
ttcatgcaaggagatgctgaagtgc

SEQ ID NO: 327669 - DNA, 25 bp, Artificial
  Probe
gctggacaatctcattggcatcttg

SEQ ID NO: 327670 - DNA, 25 bp, Artificial
  Probe
agccgcggcaacgtgcagctggaaa

SEQ ID NO: 327671 - DNA, 25 bp, Artificial
  Probe
acctgctgagcgacagcgagagccg

SEQ ID NO: 327672 - DNA, 25 bp, Artificial
  Probe
ataagaaaatgctggccgtggaccc

SEQ ID NO: 327673 - DNA, 25 bp, Artificial
  Probe
actactgcctggtgcggttgatggc

SEQ ID NO: 327674 - DNA, 25 bp, Artificial
  Probe
caagagactggaaccccgctggcgg

SEQ ID NO: 327675 - DNA, 25 bp, Artificial
  Probe
gcaatcgtgaggacggctatttgct

SEQ ID NO: 327676 - DNA, 25 bp, Artificial
  Probe
tgtagtacattaggagctggcttct

SEQ ID NO: 327677 - DNA, 25 bp, Artificial
  Probe
gatgtggacctgtggctgcatcccc

SEQ ID NO: 327678 - DNA, 25 bp, Artificial
  Probe
tgccggccttccacggtgtggtcga

SEQ ID NO: 327679 - DNA, 25 bp, Artificial
  Probe
tcgagtctttgaggagttcatgcaa

SEQ ID NO: 327680 - DNA, 25 bp, Artificial
  Probe
tccccgatggccagatcctggatca

SEQ ID NO: 327681 - DNA, 25 bp, Artificial
  Probe
ccaacctggctgagagatgaggctg

SEQ ID NO: 327682 - DNA, 25 bp, Artificial
  Probe
gcttgactgcaagatgggtgtcaga

SEQ ID NO: 327683 - DNA, 25 bp, Artificial
  Probe
caagctgcgaaaggacatgtataag

SEQ ID NO: 327684 - DNA, 25 bp, Artificial
  Probe
gaccaaagcccgagaacggcccaag

SEQ ID NO: 327685 - DNA, 25 bp, Artificial
  Probe
actacactcggcttccgcatcgagg

SEQ ID NO: 327686 - DNA, 25 bp, Artificial
  Probe
gaaagccgatggatcttgcagtact

SEQ ID NO: 327687 - DNA, 25 bp, Artificial
  Probe
gattttggcaagaccacgcctctcc

SEQ ID NO: 327688 - DNA, 25 bp, Artificial
  Probe
aggagctggcttctacacaagcctg

SEQ ID NO: 327689 - DNA, 25 bp, Artificial
  Probe
gggctggacaatctcattggcatct

SEQ ID NO: 327690 - DNA, 25 bp, Artificial
  Probe
tgaggctgggccttttccctcagct

SEQ ID NO: 327691 - DNA, 25 bp, Artificial
  Probe
ctgctcgaggactcggaggacgacc

SEQ ID NO: 327692 - DNA, 25 bp, Artificial
  Probe
cggcacgaggtgattggcagctcac

SEQ ID NO: 327693 - DNA, 25 bp, Artificial
  Probe
ggcagttcacatggtcctggaggac

SEQ ID NO: 327694 - DNA, 25 bp, Artificial
  Probe
ctcccagagctgaatgacactaatt

SEQ ID NO: 327695 - DNA, 25 bp, Artificial
  Probe
gcagaaaagccattggcagaagatc

SEQ ID NO: 327696 - DNA, 25 bp, Artificial
  Probe
gtatatagacttactggtctaactt

SEQ ID NO: 327697 - DNA, 25 bp, Artificial
  Probe
cgcatcgagggcatcaagaaagccg

SEQ ID NO: 327698 - DNA, 25 bp, Artificial
  Probe
agggcaatcgtgaggacggctattt

SEQ ID NO: 327699 - DNA, 25 bp, Artificial
  Probe
aagaggtatctgaaccgcctacagc

SEQ ID NO: 327700 - DNA, 25 bp, Artificial
  Probe
atgcatgccggcaagagactggaac

SEQ ID NO: 327701 - DNA, 25 bp, Artificial
  Probe
cccagccttgtcaagtgactttgca

SEQ ID NO: 327702 - DNA, 25 bp, Artificial
  Probe
cccgaggcacctactgaggaggagc

SEQ ID NO: 327703 - DNA, 25 bp, Artificial
  Probe
aaccagcgaagacgtggggcagaaa

SEQ ID NO: 327704 - DNA, 25 bp, Artificial
  Probe
ctacactcggcttccgcatcgaggg

SEQ ID NO: 327705 - DNA, 25 bp, Artificial
  Probe
cccagagctgaatgacactaattta

SEQ ID NO: 327706 - DNA, 25 bp, Artificial
  Probe
gtgaaagctacttacagttacagga

SEQ ID NO: 327707 - DNA, 25 bp, Artificial
  Probe
caggacctgcttgatggcttcgatg

SEQ ID NO: 327708 - DNA, 25 bp, Artificial
  Probe
aaggcatcagctccagcactacact

SEQ ID NO: 327709 - DNA, 25 bp, Artificial
  Probe
atgctggccgtggaccccgaggcac

SEQ ID NO: 327710 - DNA, 25 bp, Artificial
  Probe
aaggcactttctaggacactgactt

SEQ ID NO: 327711 - DNA, 25 bp, Artificial
  Probe
caccgtggcttcctcctgtgggaac

SEQ ID NO: 327712 - DNA, 25 bp, Artificial
  Probe
cacctctgacttctatgccagggaa

SEQ ID NO: 327713 - DNA, 25 bp, Artificial
  Probe
ctctgacttctatgccagggaaggc

SEQ ID NO: 327714 - DNA, 25 bp, Artificial
  Probe
tgtgctccattctgcatcacaagag

SEQ ID NO: 327715 - DNA, 25 bp, Artificial
  Probe
gcttcagtctgctgtaacctaaccc

SEQ ID NO: 327716 - DNA, 25 bp, Artificial
  Probe
cactgacttcataaagatgttagaa

SEQ ID NO: 327717 - DNA, 25 bp, Artificial
  Probe
taatgcagcgggtgtagctgactga

SEQ ID NO: 327718 - DNA, 25 bp, Artificial
  Probe
attctgcatcacaagagtttagtcg

SEQ ID NO: 327719 - DNA, 25 bp, Artificial
  Probe
aatccatattggttaaaagtcacag

SEQ ID NO: 327720 - DNA, 25 bp, Artificial
  Probe
caaagcaaaggcactttctaggaca

SEQ ID NO: 327721 - DNA, 25 bp, Artificial
  Probe
ggcttcctcctgtgggaactatcca

SEQ ID NO: 327722 - DNA, 25 bp, Artificial
  Probe
ggataggagctgcttcagtctgctg

SEQ ID NO: 327723 - DNA, 25 bp, Artificial
  Probe
tctatgccagggaaggcttttttaa

SEQ ID NO: 327724 - DNA, 25 bp, Artificial
  Probe
ttgttcccaggtgtgctccattctg

SEQ ID NO: 327725 - DNA, 25 bp, Artificial
  Probe
ggttactaatgcagcgggtgtagct

SEQ ID NO: 327726 - DNA, 25 bp, Artificial
  Probe
gtcacctctgacttctatgccaggg

SEQ ID NO: 327727 - DNA, 25 bp, Artificial
  Probe
gttaaaagtcacagttcccactgaa

SEQ ID NO: 327728 - DNA, 25 bp, Artificial
  Probe
gctccattctgcatcacaagagttt

SEQ ID NO: 327729 - DNA, 25 bp, Artificial
  Probe
cagcgggtgtagctgactgaagttt

SEQ ID NO: 327730 - DNA, 25 bp, Artificial
  Probe
cctcctgtgggaactatccaaaaga

SEQ ID NO: 327731 - DNA, 25 bp, Artificial
  Probe
tggttactaatgcagcgggtgtagc

SEQ ID NO: 327732 - DNA, 25 bp, Artificial
  Probe
gggaactatccaaaagatttcacct

SEQ ID NO: 327733 - DNA, 25 bp, Artificial
  Probe
acagaagggtttgttcccaggtgtg

SEQ ID NO: 327734 - DNA, 25 bp, Artificial
  Probe
tccgttgtgccagcagcccacagtt

SEQ ID NO: 327735 - DNA, 25 bp, Artificial
  Probe
ctaggacactgacttcataaagatg

SEQ ID NO: 327736 - DNA, 25 bp, Artificial
  Probe
gctgcttcagtctgctgtaacctaa

SEQ ID NO: 327737 - DNA, 25 bp, Artificial
  Probe
tccattctgcatcacaagagtttag

SEQ ID NO: 327738 - DNA, 25 bp, Artificial
  Probe
aatgcagcgggtgtagctgactgaa

SEQ ID NO: 327739 - DNA, 25 bp, Artificial
  Probe
tttctaggacactgacttcataaag

SEQ ID NO: 327740 - DNA, 25 bp, Artificial
  Probe
gacttctatgccagggaaggctttt

SEQ ID NO: 327741 - DNA, 25 bp, Artificial
  Probe
atccgttgtgccagcagcccacagt

SEQ ID NO: 327742 - DNA, 25 bp, Artificial
  Probe
agcagcccacagttcgacaccgtgg

SEQ ID NO: 327743 - DNA, 25 bp, Artificial
  Probe
cattctgcatcacaagagtttagtc

SEQ ID NO: 327744 - DNA, 25 bp, Artificial
  Probe
acactgacttcataaagatgttaga

SEQ ID NO: 327745 - DNA, 25 bp, Artificial
  Probe
cgacaccgtggcttcctcctgtggg

SEQ ID NO: 327746 - DNA, 25 bp, Artificial
  Probe
agcccacagttcgacaccgtggctt

SEQ ID NO: 327747 - DNA, 25 bp, Artificial
  Probe
cagtcacctctgacttctatgccag

SEQ ID NO: 327748 - DNA, 25 bp, Artificial
  Probe
caaccaaagcaaaggcactttctag

SEQ ID NO: 327749 - DNA, 25 bp, Artificial
  Probe
cgttgtgccagcagcccacagttcg

SEQ ID NO: 327750 - DNA, 25 bp, Artificial
  Probe
ggtttgttcccaggtgtgctccatt

SEQ ID NO: 327751 - DNA, 25 bp, Artificial
  Probe
agaagggtttgttcccaggtgtgct

SEQ ID NO: 327752 - DNA, 25 bp, Artificial
  Probe
cccaggtgtgctccattctgcatca

SEQ ID NO: 327753 - DNA, 25 bp, Artificial
  Probe
agttcgacaccgtggcttcctcctg

SEQ ID NO: 327754 - DNA, 25 bp, Artificial
  Probe
ttcacagaagggtttgttcccaggt

SEQ ID NO: 327755 - DNA, 25 bp, Artificial
  Probe
cctctgacttctatgccagggaagg

SEQ ID NO: 327756 - DNA, 25 bp, Artificial
  Probe
cgtgatggtggcaggctataagcca

SEQ ID NO: 327757 - DNA, 25 bp, Artificial
  Probe
agcaggacactgaccccgtgatggt

SEQ ID NO: 327758 - DNA, 25 bp, Artificial
  Probe
atgaagcggacaagaccgcaggtta

SEQ ID NO: 327759 - DNA, 25 bp, Artificial
  Probe
cattaaccccacagcggaagacaca

SEQ ID NO: 327760 - DNA, 25 bp, Artificial
  Probe
tcctcctaaggatgaagactctcct

SEQ ID NO: 327761 - DNA, 25 bp, Artificial
  Probe
gtggtcctttacaaacttcttccag

SEQ ID NO: 327762 - DNA, 25 bp, Artificial
  Probe
gtgctccatcaattccaggcaattt

SEQ ID NO: 327763 - DNA, 25 bp, Artificial
  Probe
gaacaaaccaaatgactaaccaggt

SEQ ID NO: 327764 - DNA, 25 bp, Artificial
  Probe
ataacgtccccagtttctgagcgtc

SEQ ID NO: 327765 - DNA, 25 bp, Artificial
  Probe
gtgaagttgtctcatttggaagtcc

SEQ ID NO: 327766 - DNA, 25 bp, Artificial
  Probe
ataacaaacccagcagcagatgagg

SEQ ID NO: 327767 - DNA, 25 bp, Artificial
  Probe
cgtgtacattgatgtgcagtccatg

SEQ ID NO: 327768 - DNA, 25 bp, Artificial
  Probe
cagattccccaaggtccacagacag

SEQ ID NO: 327769 - DNA, 25 bp, Artificial
  Probe
aggcaatttttgattcctcctaagg

SEQ ID NO: 327770 - DNA, 25 bp, Artificial
  Probe
tggtggcaggctataagccacagat

SEQ ID NO: 327771 - DNA, 25 bp, Artificial
  Probe
agacagcaacagtgaagttgtctca

SEQ ID NO: 327772 - DNA, 25 bp, Artificial
  Probe
gcggaagacacaacagcagaagatg

SEQ ID NO: 327773 - DNA, 25 bp, Artificial
  Probe
cccacagcggaagacacaacagcag

SEQ ID NO: 327774 - DNA, 25 bp, Artificial
  Probe
caaggtccacagacagcaacagtga

SEQ ID NO: 327775 - DNA, 25 bp, Artificial
  Probe
cccatcattgaggaggaaataacaa

SEQ ID NO: 327776 - DNA, 25 bp, Artificial
  Probe
cacaacagcagaagatgaagcggac

SEQ ID NO: 327777 - DNA, 25 bp, Artificial
  Probe
attccccaaggtccacagacagcaa

SEQ ID NO: 327778 - DNA, 25 bp, Artificial
  Probe
agaggacgagcaggacactgacccc

SEQ ID NO: 327779 - DNA, 25 bp, Artificial
  Probe
gactctcctaaatctaatggaggag

SEQ ID NO: 327780 - DNA, 25 bp, Artificial
  Probe
ggccaacgtaaatacttggaatttg

SEQ ID NO: 327781 - DNA, 25 bp, Artificial
  Probe
tggaatctcggtcaataccccctaa

SEQ ID NO: 327782 - DNA, 25 bp, Artificial
  Probe
taacaaacccagcagcagatgaggc

SEQ ID NO: 327783 - DNA, 25 bp, Artificial
  Probe
ggtccacagacagcaacagtgaagt

SEQ ID NO: 327784 - DNA, 25 bp, Artificial
  Probe
atacttggaatttggtctccccaga

SEQ ID NO: 327785 - DNA, 25 bp, Artificial
  Probe
ttggtctccccagattccccaaggt

SEQ ID NO: 327786 - DNA, 25 bp, Artificial
  Probe
gaggggcttcccaggtcgtgtacat

SEQ ID NO: 327787 - DNA, 25 bp, Artificial
  Probe
acagaaataacgtccccagtttctg

SEQ ID NO: 327788 - DNA, 25 bp, Artificial
  Probe
aagctctgagacagaccccgagaac

SEQ ID NO: 327789 - DNA, 25 bp, Artificial
  Probe
gaccccgagaaccaggcggccgtgt

SEQ ID NO: 327790 - DNA, 25 bp, Artificial
  Probe
ccccagtttctgagcgtcctggcga

SEQ ID NO: 327791 - DNA, 25 bp, Artificial
  Probe
ggctataagccacagatgcgcctcc

SEQ ID NO: 327792 - DNA, 25 bp, Artificial
  Probe
aaggatgaagactctcctaaatcta

SEQ ID NO: 327793 - DNA, 25 bp, Artificial
  Probe
agacagaccccgagaaccaggcggc

SEQ ID NO: 327794 - DNA, 25 bp, Artificial
  Probe
tggaatttggtctccccagattccc

SEQ ID NO: 327795 - DNA, 25 bp, Artificial
  Probe
aaatgactaaccaggtcaccctttg

SEQ ID NO: 327796 - DNA, 25 bp, Artificial
  Probe
gacacagaaataacgtccccagttt

SEQ ID NO: 327797 - DNA, 25 bp, Artificial
  Probe
ccacccatcattgaggaggaaataa

SEQ ID NO: 327798 - DNA, 25 bp, Artificial
  Probe
accaggtcaccctttgtcacttcag

SEQ ID NO: 327799 - DNA, 25 bp, Artificial
  Probe
gactaaccaggtcaccctttgtcac

SEQ ID NO: 327800 - DNA, 25 bp, Artificial
  Probe
acactgaccccgtgatggtggcagg

SEQ ID NO: 327801 - DNA, 25 bp, Artificial
  Probe
tggcaggctataagccacagatgcg

SEQ ID NO: 327802 - DNA, 25 bp, Artificial
  Probe
cttgaaaactattacctggaggtca

SEQ ID NO: 327803 - DNA, 25 bp, Artificial
  Probe
ataagctcaagagtataccaaccgt

SEQ ID NO: 327804 - DNA, 25 bp, Artificial
  Probe
cttcaacacaaccagctcaaagagg

SEQ ID NO: 327805 - DNA, 25 bp, Artificial
  Probe
gtttagatcctatgttttgaaacca

SEQ ID NO: 327806 - DNA, 25 bp, Artificial
  Probe
ttacctggaggtcaataaactcgaa

SEQ ID NO: 327807 - DNA, 25 bp, Artificial
  Probe
ttcgacgggctggtaaacctgacct

SEQ ID NO: 327808 - DNA, 25 bp, Artificial
  Probe
aacatatcatctctgctcgagctcg

SEQ ID NO: 327809 - DNA, 25 bp, Artificial
  Probe
agatgagcaagctgcccgctggcct

SEQ ID NO: 327810 - DNA, 25 bp, Artificial
  Probe
attatgaagcctttttactgattgc

SEQ ID NO: 327811 - DNA, 25 bp, Artificial
  Probe
tgatgtcaagagcttctgtaagatc

SEQ ID NO: 327812 - DNA, 25 bp, Artificial
  Probe
caataaactcgaaaagtttgatgtc

SEQ ID NO: 327813 - DNA, 25 bp, Artificial
  Probe
gggaccactatcttactccaagatc

SEQ ID NO: 327814 - DNA, 25 bp, Artificial
  Probe
ttcctgatgagtatttcaatcgctt

SEQ ID NO: 327815 - DNA, 25 bp, Artificial
  Probe
ataataagatcagcaagctgggctc

SEQ ID NO: 327816 - DNA, 25 bp, Artificial
  Probe
ggctgtctcggcttctctgaaaggc

SEQ ID NO: 327817 - DNA, 25 bp, Artificial
  Probe
gatcaccaacattcctgatgagtat

SEQ ID NO: 327818 - DNA, 25 bp, Artificial
  Probe
cttactccaagatcaagcatttgcg

SEQ ID NO: 327819 - DNA, 25 bp, Artificial
  Probe
tgtctacgtgtagcaaatgaaatca

SEQ ID NO: 327820 - DNA, 25 bp, Artificial
  Probe
aacatgaaacaaacatgcatggatg

SEQ ID NO: 327821 - DNA, 25 bp, Artificial
  Probe
gaaaccagtgatttgcaacatacca

SEQ ID NO: 327822 - DNA, 25 bp, Artificial
  Probe
tgccccctgacatgtacgagtgtct

SEQ ID NO: 327823 - DNA, 25 bp, Artificial
  Probe
gctggtaaacctgaccttcatttac

SEQ ID NO: 327824 - DNA, 25 bp, Artificial
  Probe
acaactgaagaagctgcatataaac

SEQ ID NO: 327825 - DNA, 25 bp, Artificial
  Probe
tctcacaatgagctggctgacagtg

SEQ ID NO: 327826 - DNA, 25 bp, Artificial
  Probe
taagctgaaacaactgaagaagctg

SEQ ID NO: 327827 - DNA, 25 bp, Artificial
  Probe
aaggaaaggtcttctctaagctgaa

SEQ ID NO: 327828 - DNA, 25 bp, Artificial
  Probe
gtgcctggaaactcatttaacatat

SEQ ID NO: 327829 - DNA, 25 bp, Artificial
  Probe
acattcctgatgagtatttcaatcg

SEQ ID NO: 327830 - DNA, 25 bp, Artificial
  Probe
cagtacttcatggatgggtatttgc

SEQ ID NO: 327831 - DNA, 25 bp, Artificial
  Probe
aagacctgtctacttaaagaaatgt

SEQ ID NO: 327832 - DNA, 25 bp, Artificial
  Probe
gagctcgatctctcctacaataagc

SEQ ID NO: 327833 - DNA, 25 bp, Artificial
  Probe
tacattgaagtatgttccagagcag

SEQ ID NO: 327834 - DNA, 25 bp, Artificial
  Probe
caatttgaccgagtccgtgggtccg

SEQ ID NO: 327835 - DNA, 25 bp, Artificial
  Probe
caggtttctatggttcctcacattt

SEQ ID NO: 327836 - DNA, 25 bp, Artificial
  Probe
catgaaacaaacatgcatggatgtt

SEQ ID NO: 327837 - DNA, 25 bp, Artificial
  Probe
tttgcgcttggatggcaatcccctc

SEQ ID NO: 327838 - DNA, 25 bp, Artificial
  Probe
tgggctccttcgacgggctggtaaa

SEQ ID NO: 327839 - DNA, 25 bp, Artificial
  Probe
caagagtataccaaccgttaatgaa

SEQ ID NO: 327840 - DNA, 25 bp, Artificial
  Probe
ctccaagatcaaaggaaaggtcttc

SEQ ID NO: 327841 - DNA, 25 bp, Artificial
  Probe
gggcttcaatacttgcgtttatctc

SEQ ID NO: 327842 - DNA, 25 bp, Artificial
  Probe
ctgacagtggcgtgcctggaaactc

SEQ ID NO: 327843 - DNA, 25 bp, Artificial
  Probe
caaagaggaggctgtctcggcttct

SEQ ID NO: 327844 - DNA, 25 bp, Artificial
  Probe
aactacaacaatttgaccgagtccg

SEQ ID NO: 327845 - DNA, 25 bp, Artificial
  Probe
atacttgcgtttatctcacaatgag

SEQ ID NO: 327846 - DNA, 25 bp, Artificial
  Probe
taagatcaccaacattcctgatgag

SEQ ID NO: 327847 - DNA, 25 bp, Artificial
  Probe
caaacatgcatggatgtttgttatc

SEQ ID NO: 327848 - DNA, 25 bp, Artificial
  Probe
ccagtattggtgctgcaatttaatg

SEQ ID NO: 327849 - DNA, 25 bp, Artificial
  Probe
tcttgctctgtatcccagtattggt

SEQ ID NO: 327850 - DNA, 25 bp, Artificial
  Probe
catagccaccatagagagactgcat

SEQ ID NO: 327851 - DNA, 25 bp, Artificial
  Probe
aatcatagccaccatagagagactg

SEQ ID NO: 327852 - DNA, 25 bp, Artificial
  Probe
tctgttcttgctctgtatcccagta

SEQ ID NO: 327853 - DNA, 25 bp, Artificial
  Probe
ttcttaggctccagggtttccagtg

SEQ ID NO: 327854 - DNA, 25 bp, Artificial
  Probe
tttcttaggctccagggtttccagt

SEQ ID NO: 327855 - DNA, 25 bp, Artificial
  Probe
tatcccagtattggtgctgcaattt

SEQ ID NO: 327856 - DNA, 25 bp, Artificial
  Probe
tagagagactgcatggccatccaag

SEQ ID NO: 327857 - DNA, 25 bp, Artificial
  Probe
accatagagagactgcatggccatc

SEQ ID NO: 327858 - DNA, 25 bp, Artificial
  Probe
taggctccagggtttccagtgctct

SEQ ID NO: 327859 - DNA, 25 bp, Artificial
  Probe
agagagactgcatggccatccaagg

SEQ ID NO: 327860 - DNA, 25 bp, Artificial
  Probe
cagtattggtgctgcaatttaatgc

SEQ ID NO: 327861 - DNA, 25 bp, Artificial
  Probe
agccaccatagagagactgcatggc

SEQ ID NO: 327862 - DNA, 25 bp, Artificial
  Probe
gctctgtatcccagtattggtgctg

SEQ ID NO: 327863 - DNA, 25 bp, Artificial
  Probe
atagagagactgcatggccatccaa

SEQ ID NO: 327864 - DNA, 25 bp, Artificial
  Probe
gacacttggtttcttaggctccagg

SEQ ID NO: 327865 - DNA, 25 bp, Artificial
  Probe
ttggtgctgcaatttaatgcatttc

SEQ ID NO: 327866 - DNA, 25 bp, Artificial
  Probe
gtatcccagtattggtgctgcaatt

SEQ ID NO: 327867 - DNA, 25 bp, Artificial
  Probe
caatcatagccaccatagagagact

SEQ ID NO: 327868 - DNA, 25 bp, Artificial
  Probe
atcatagccaccatagagagactgc

SEQ ID NO: 327869 - DNA, 25 bp, Artificial
  Probe
ttcttgctctgtatcccagtattgg

SEQ ID NO: 327870 - DNA, 25 bp, Artificial
  Probe
caccatagagagactgcatggccat

SEQ ID NO: 327871 - DNA, 25 bp, Artificial
  Probe
tagccaccatagagagactgcatgg

SEQ ID NO: 327872 - DNA, 25 bp, Artificial
  Probe
ctgtatcccagtattggtgctgcaa

SEQ ID NO: 327873 - DNA, 25 bp, Artificial
  Probe
tcccagtattggtgctgcaatttaa

SEQ ID NO: 327874 - DNA, 25 bp, Artificial
  Probe
taggacacttggtttcttaggctcc

SEQ ID NO: 327875 - DNA, 25 bp, Artificial
  Probe
gcaatcatagccaccatagagagac

SEQ ID NO: 327876 - DNA, 25 bp, Artificial
  Probe
tgttcttgctctgtatcccagtatt

SEQ ID NO: 327877 - DNA, 25 bp, Artificial
  Probe
ctccagggtttccagtgctctctgt

SEQ ID NO: 327878 - DNA, 25 bp, Artificial
  Probe
tgtatcccagtattggtgctgcaat

SEQ ID NO: 327879 - DNA, 25 bp, Artificial
  Probe
gttcttgctctgtatcccagtattg

SEQ ID NO: 327880 - DNA, 25 bp, Artificial
  Probe
atagccaccatagagagactgcatg

SEQ ID NO: 327881 - DNA, 25 bp, Artificial
  Probe
gccaccatagagagactgcatggcc

SEQ ID NO: 327882 - DNA, 25 bp, Artificial
  Probe
aggacacttggtttcttaggctcca

SEQ ID NO: 327883 - DNA, 25 bp, Artificial
  Probe
gctctctgttcttgctctgtatccc

SEQ ID NO: 327884 - DNA, 25 bp, Artificial
  Probe
ctctgttcttgctctgtatcccagt

SEQ ID NO: 327885 - DNA, 25 bp, Artificial
  Probe
cccagtattggtgctgcaatttaat

SEQ ID NO: 327886 - DNA, 25 bp, Artificial
  Probe
gactgcatggccatccaaggtgaag

SEQ ID NO: 327887 - DNA, 25 bp, Artificial
  Probe
gtttcttaggctccagggtttccag

SEQ ID NO: 327888 - DNA, 25 bp, Artificial
  Probe
acacttggtttcttaggctccaggg

SEQ ID NO: 327889 - DNA, 25 bp, Artificial
  Probe
ggacacttggtttcttaggctccag

SEQ ID NO: 327890 - DNA, 25 bp, Artificial
  Probe
ccaccatagagagactgcatggcca

SEQ ID NO: 327891 - DNA, 25 bp, Artificial
  Probe
cacttggtttcttaggctccagggt

SEQ ID NO: 327892 - DNA, 25 bp, Artificial
  Probe
aaatgcaatcatagccaccatagag

SEQ ID NO: 327893 - DNA, 25 bp, Artificial
  Probe
tctgtatcccagtattggtgctgca

SEQ ID NO: 327894 - DNA, 25 bp, Artificial
  Probe
cgagatgatccctcagtggaaggat

SEQ ID NO: 327895 - DNA, 25 bp, Artificial
  Probe
gaatgcttactgtgcgtcgggcgct

SEQ ID NO: 327896 - DNA, 25 bp, Artificial
  Probe
gaccccagactccactctggagaat

SEQ ID NO: 327897 - DNA, 25 bp, Artificial
  Probe
ttattgtgagcatccctagggagcc

SEQ ID NO: 327898 - DNA, 25 bp, Artificial
  Probe
caagaatcgctcagggattctcagt

SEQ ID NO: 327899 - DNA, 25 bp, Artificial
  Probe
tttaacctatagaatgcttactgtg

SEQ ID NO: 327900 - DNA, 25 bp, Artificial
  Probe
attatgtatgtggtcatgttcacac

SEQ ID NO: 327901 - DNA, 25 bp, Artificial
  Probe
ggaaacagcccgtttaaagtgcatg

SEQ ID NO: 327902 - DNA, 25 bp, Artificial
  Probe
tgtagggtcggttctgaccttttgt

SEQ ID NO: 327903 - DNA, 25 bp, Artificial
  Probe
gtgacaagtacttcacccgctgcac

SEQ ID NO: 327904 - DNA, 25 bp, Artificial
  Probe
cagctggcttttgtgacaagtactt

SEQ ID NO: 327905 - DNA, 25 bp, Artificial
  Probe
agggagccaggctctctactgggca

SEQ ID NO: 327906 - DNA, 25 bp, Artificial
  Probe
cgtcgggcgctgctccaactgctgt

SEQ ID NO: 327907 - DNA, 25 bp, Artificial
  Probe
gtggtcatgttcacacacatgtatt

SEQ ID NO: 327908 - DNA, 25 bp, Artificial
  Probe
tccaacccactcacaggggaaacag

SEQ ID NO: 327909 - DNA, 25 bp, Artificial
  Probe
tccctcagtggaaggataaccaagt

SEQ ID NO: 327910 - DNA, 25 bp, Artificial
  Probe
gggcatctggggattgaactcagct

SEQ ID NO: 327911 - DNA, 25 bp, Artificial
  Probe
agactccactctggagaatccaacc

SEQ ID NO: 327912 - DNA, 25 bp, Artificial
  Probe
ctcttacatcggaggacaccaccga

SEQ ID NO: 327913 - DNA, 25 bp, Artificial
  Probe
ttatgtatgtggtcatgttcacaca

SEQ ID NO: 327914 - DNA, 25 bp, Artificial
  Probe
gcatccctagggagccaggctctct

SEQ ID NO: 327915 - DNA, 25 bp, Artificial
  Probe
ctactgggcattagggacagaggaa

SEQ ID NO: 327916 - DNA, 25 bp, Artificial
  Probe
tagccgagatgatccctcagtggaa

SEQ ID NO: 327917 - DNA, 25 bp, Artificial
  Probe
ccctagggagccaggctctctactg

SEQ ID NO: 327918 - DNA, 25 bp, Artificial
  Probe
tctctactgggcattagggacagag

SEQ ID NO: 327919 - DNA, 25 bp, Artificial
  Probe
caggctctctactgggcattaggga

SEQ ID NO: 327920 - DNA, 25 bp, Artificial
  Probe
aactcagctggcttttgtgacaagt

SEQ ID NO: 327921 - DNA, 25 bp, Artificial
  Probe
acatttattgtgagcatccctaggg

SEQ ID NO: 327922 - DNA, 25 bp, Artificial
  Probe
aatcgctcagggattctcagtgtcc

SEQ ID NO: 327923 - DNA, 25 bp, Artificial
  Probe
gtatgtggtcatgttcacacacatg

SEQ ID NO: 327924 - DNA, 25 bp, Artificial
  Probe
ccagactccactctggagaatccaa

SEQ ID NO: 327925 - DNA, 25 bp, Artificial
  Probe
tcctactggaaggtattatgtaacc

SEQ ID NO: 327926 - DNA, 25 bp, Artificial
  Probe
tcggaggacaccaccgagctatcca

SEQ ID NO: 327927 - DNA, 25 bp, Artificial
  Probe
attgaactcagctggcttttgtgac

SEQ ID NO: 327928 - DNA, 25 bp, Artificial
  Probe
catctggggattgaactcagctggc

SEQ ID NO: 327929 - DNA, 25 bp, Artificial
  Probe
ttcaagaatcgctcagggattctca

SEQ ID NO: 327930 - DNA, 25 bp, Artificial
  Probe
ggtagccgagatgatccctcagtgg

SEQ ID NO: 327931 - DNA, 25 bp, Artificial
  Probe
cactcacaggggaaacagcccgttt

SEQ ID NO: 327932 - DNA, 25 bp, Artificial
  Probe
tattggatgttggttcttccttcaa

SEQ ID NO: 327933 - DNA, 25 bp, Artificial
  Probe
cgctgctccaactgctgtataaata

SEQ ID NO: 327934 - DNA, 25 bp, Artificial
  Probe
aaccatttctctcttacatcggagg

SEQ ID NO: 327935 - DNA, 25 bp, Artificial
  Probe
ccgtttaaagtgcatgtgtgctaga

SEQ ID NO: 327936 - DNA, 25 bp, Artificial
  Probe
taaggtattcagttactcctactgg

SEQ ID NO: 327937 - DNA, 25 bp, Artificial
  Probe
ttccttcaagaatcgctcagggatt

SEQ ID NO: 327938 - DNA, 25 bp, Artificial
  Probe
aggataaccaagtatcttcctcgga

SEQ ID NO: 327939 - DNA, 25 bp, Artificial
  Probe
tcaaaacatgctgaaaccggacccc

SEQ ID NO: 327940 - DNA, 25 bp, Artificial
  Probe
tgttgtcaaggctctgcacttgaag

SEQ ID NO: 327941 - DNA, 25 bp, Artificial
  Probe
gattgttcagttaccctaaagactt

SEQ ID NO: 327942 - DNA, 25 bp, Artificial
  Probe
acctcaggaggctttgggcatatga

SEQ ID NO: 327943 - DNA, 25 bp, Artificial
  Probe
accttacaggcaaaggccaaatggg

SEQ ID NO: 327944 - DNA, 25 bp, Artificial
  Probe
cctcaggaggctttgggcatatgag

SEQ ID NO: 327945 - DNA, 25 bp, Artificial
  Probe
agattgttcagttaccctaaagact

SEQ ID NO: 327946 - DNA, 25 bp, Artificial
  Probe
ggccaaatggggtcatctgcttctc

SEQ ID NO: 327947 - DNA, 25 bp, Artificial
  Probe
gttgtcaaggctctgcacttgaagg

SEQ ID NO: 327948 - DNA, 25 bp, Artificial
  Probe
tcctccgaaggcagtggcagccggt

SEQ ID NO: 327949 - DNA, 25 bp, Artificial
  Probe
ctcaggaggctttgggcatatgagc

SEQ ID NO: 327950 - DNA, 25 bp, Artificial
  Probe
cgcttctaccacaaggactttgcct

SEQ ID NO: 327951 - DNA, 25 bp, Artificial
  Probe
acccgcttctaccacaaggactttg

SEQ ID NO: 327952 - DNA, 25 bp, Artificial
  Probe
tgaatgttgtcaaggctctgcactt

SEQ ID NO: 327953 - DNA, 25 bp, Artificial
  Probe
tggcaggtgggctgttctcacccat

SEQ ID NO: 327954 - DNA, 25 bp, Artificial
  Probe
aatggggtcatctgcttctcttcca

SEQ ID NO: 327955 - DNA, 25 bp, Artificial
  Probe
atggggtcatctgcttctcttccat

SEQ ID NO: 327956 - DNA, 25 bp, Artificial
  Probe
aaatggggtcatctgcttctcttcc

SEQ ID NO: 327957 - DNA, 25 bp, Artificial
  Probe
tcaaggctctgcacttgaaggcagg

SEQ ID NO: 327958 - DNA, 25 bp, Artificial
  Probe
ttgtcaaggctctgcacttgaaggc

SEQ ID NO: 327959 - DNA, 25 bp, Artificial
  Probe
ggggtcatctgcttctcttccatcc

SEQ ID NO: 327960 - DNA, 25 bp, Artificial
  Probe
caaatggggtcatctgcttctcttc

SEQ ID NO: 327961 - DNA, 25 bp, Artificial
  Probe
gtgggctgttctcacccatcctggg

SEQ ID NO: 327962 - DNA, 25 bp, Artificial
  Probe
caggcaaaggccaaatggggtcatc

SEQ ID NO: 327963 - DNA, 25 bp, Artificial
  Probe
cctctgaccttacaggcaaaggcca

SEQ ID NO: 327964 - DNA, 25 bp, Artificial
  Probe
tatgacctcaggaggctttgggcat

SEQ ID NO: 327965 - DNA, 25 bp, Artificial
  Probe
ccttacaggcaaaggccaaatgggg

SEQ ID NO: 327966 - DNA, 25 bp, Artificial
  Probe
gaccttacaggcaaaggccaaatgg

SEQ ID NO: 327967 - DNA, 25 bp, Artificial
  Probe
tgggctgttctcacccatcctgggc

SEQ ID NO: 327968 - DNA, 25 bp, Artificial
  Probe
aggcaaaggccaaatggggtcatct

SEQ ID NO: 327969 - DNA, 25 bp, Artificial
  Probe
gcttctaccacaaggactttgcctc

SEQ ID NO: 327970 - DNA, 25 bp, Artificial
  Probe
aggctttgggcatatgagccctata

SEQ ID NO: 327971 - DNA, 25 bp, Artificial
  Probe
ggcaggtgggctgttctcacccatc

SEQ ID NO: 327972 - DNA, 25 bp, Artificial
  Probe
gccaaatggggtcatctgcttctct

SEQ ID NO: 327973 - DNA, 25 bp, Artificial
  Probe
gaggctttgggcatatgagccctat

SEQ ID NO: 327974 - DNA, 25 bp, Artificial
  Probe
ccaaatggggtcatctgcttctctt

SEQ ID NO: 327975 - DNA, 25 bp, Artificial
  Probe
ctctgaccttacaggcaaaggccaa

SEQ ID NO: 327976 - DNA, 25 bp, Artificial
  Probe
gtcaaggctctgcacttgaaggcag

SEQ ID NO: 327977 - DNA, 25 bp, Artificial
  Probe
tggggtcatctgcttctcttccatc

SEQ ID NO: 327978 - DNA, 25 bp, Artificial
  Probe
cggtctatagctgagtaccgtttaa

SEQ ID NO: 327979 - DNA, 25 bp, Artificial
  Probe
aactttgagcactatgctgaatttt

SEQ ID NO: 327980 - DNA, 25 bp, Artificial
  Probe
cttgaaaacatgacggtctatagct

SEQ ID NO: 327981 - DNA, 25 bp, Artificial
  Probe
gctgagtaccgtttaaatgggcatg

SEQ ID NO: 327982 - DNA, 25 bp, Artificial
  Probe
ggacaactttgagcactatgctgaa

SEQ ID NO: 327983 - DNA, 25 bp, Artificial
  Probe
ctgtagtacttaacaccagaacccg

SEQ ID NO: 327984 - DNA, 25 bp, Artificial
  Probe
tgtagtacttaacaccagaacccgg

SEQ ID NO: 327985 - DNA, 25 bp, Artificial
  Probe
gtctatagctgagtaccgtttaaat

SEQ ID NO: 327986 - DNA, 25 bp, Artificial
  Probe
accgtttaaatgggcatggacaact

SEQ ID NO: 327987 - DNA, 25 bp, Artificial
  Probe
tgagtaccgtttaaatgggcatgga

SEQ ID NO: 327988 - DNA, 25 bp, Artificial
  Probe
gtttcctgtagtacttaacaccaga

SEQ ID NO: 327989 - DNA, 25 bp, Artificial
  Probe
catgacggtctatagctgagtaccg

SEQ ID NO: 327990 - DNA, 25 bp, Artificial
  Probe
tttgagcactatgctgaattttata

SEQ ID NO: 327991 - DNA, 25 bp, Artificial
  Probe
ggcatggacaactttgagcactatg

SEQ ID NO: 327992 - DNA, 25 bp, Artificial
  Probe
acggtctatagctgagtaccgttta

SEQ ID NO: 327993 - DNA, 25 bp, Artificial
  Probe
tctatagctgagtaccgtttaaatg

SEQ ID NO: 327994 - DNA, 25 bp, Artificial
  Probe
tcctgtagtacttaacaccagaacc

SEQ ID NO: 327995 - DNA, 25 bp, Artificial
  Probe
tatagctgagtaccgtttaaatggg

SEQ ID NO: 327996 - DNA, 25 bp, Artificial
  Probe
tgctgtttcctgtagtacttaacac

SEQ ID NO: 327997 - DNA, 25 bp, Artificial
  Probe
atacttgaaaacatgacggtctata

SEQ ID NO: 327998 - DNA, 25 bp, Artificial
  Probe
atggacaactttgagcactatgctg

SEQ ID NO: 327999 - DNA, 25 bp, Artificial
  Probe
tggacaactttgagcactatgctga

SEQ ID NO: 328000 - DNA, 25 bp, Artificial
  Probe
ctatagctgagtaccgtttaaatgg

SEQ ID NO: 328001 - DNA, 25 bp, Artificial
  Probe
acaactttgagcactatgctgaatt

SEQ ID NO: 328002 - DNA, 25 bp, Artificial
  Probe
gacaactttgagcactatgctgaat

SEQ ID NO: 328003 - DNA, 25 bp, Artificial
  Probe
ctttgagcactatgctgaattttat

SEQ ID NO: 328004 - DNA, 25 bp, Artificial
  Probe
gtaccgtttaaatgggcatggacaa

SEQ ID NO: 328005 - DNA, 25 bp, Artificial
  Probe
ttaacaccagaacccggggagcagt

SEQ ID NO: 328006 - DNA, 25 bp, Artificial
  Probe
ctgagtaccgtttaaatgggcatgg

SEQ ID NO: 328007 - DNA, 25 bp, Artificial
  Probe
atgacggtctatagctgagtaccgt

SEQ ID NO: 328008 - DNA, 25 bp, Artificial
  Probe
tgtttcctgtagtacttaacaccag

SEQ ID NO: 328009 - DNA, 25 bp, Artificial
  Probe
agctgagtaccgtttaaatgggcat

SEQ ID NO: 328010 - DNA, 25 bp, Artificial
  Probe
aaacatgacggtctatagctgagta

SEQ ID NO: 328011 - DNA, 25 bp, Artificial
  Probe
aacatgacggtctatagctgagtac

SEQ ID NO: 328012 - DNA, 25 bp, Artificial
  Probe
ggtctatagctgagtaccgtttaaa

SEQ ID NO: 328013 - DNA, 25 bp, Artificial
  Probe
caactttgagcactatgctgaattt

SEQ ID NO: 328014 - DNA, 25 bp, Artificial
  Probe
cttaacaccagaacccggggagcag

SEQ ID NO: 328015 - DNA, 25 bp, Artificial
  Probe
aatgggcatggacaactttgagcac

SEQ ID NO: 328016 - DNA, 25 bp, Artificial
  Probe
acatgacggtctatagctgagtacc

SEQ ID NO: 328017 - DNA, 25 bp, Artificial
  Probe
gagtaccgtttaaatgggcatggac

SEQ ID NO: 328018 - DNA, 25 bp, Artificial
  Probe
tgacggtctatagctgagtaccgtt

SEQ ID NO: 328019 - DNA, 25 bp, Artificial
  Probe
actttgagcactatgctgaatttta

SEQ ID NO: 328020 - DNA, 25 bp, Artificial
  Probe
agtaccgtttaaatgggcatggaca

SEQ ID NO: 328021 - DNA, 25 bp, Artificial
  Probe
gctgtttcctgtagtacttaacacc

SEQ ID NO: 328022 - DNA, 25 bp, Artificial
  Probe
ccggggagcagtgtgctgaagtatt

SEQ ID NO: 328023 - DNA, 25 bp, Artificial
  Probe
tgaaaacatgacggtctatagctga

SEQ ID NO: 328024 - DNA, 25 bp, Artificial
  Probe
tacaaccgctacaccacggagtcag

SEQ ID NO: 328025 - DNA, 25 bp, Artificial
  Probe
gcagacagacccagcttctgcagta

SEQ ID NO: 328026 - DNA, 25 bp, Artificial
  Probe
ggatgccacccgagtctatcttcta

SEQ ID NO: 328027 - DNA, 25 bp, Artificial
  Probe
gctacaccacggagtcagatgtgtg

SEQ ID NO: 328028 - DNA, 25 bp, Artificial
  Probe
tcctatggactgcagccctactatg

SEQ ID NO: 328029 - DNA, 25 bp, Artificial
  Probe
cctactatggaatggcccatgagga

SEQ ID NO: 328030 - DNA, 25 bp, Artificial
  Probe
agtatccaccggatcctgcagcgca

SEQ ID NO: 328031 - DNA, 25 bp, Artificial
  Probe
aaccgctacaccacggagtcagatg

SEQ ID NO: 328032 - DNA, 25 bp, Artificial
  Probe
atcctgcagcgcatgtgcgagagag

SEQ ID NO: 328033 - DNA, 25 bp, Artificial
  Probe
accggatcctgcagcgcatgtgcga

SEQ ID NO: 328034 - DNA, 25 bp, Artificial
  Probe
acagacccagcttctgcagtatcca

SEQ ID NO: 328035 - DNA, 25 bp, Artificial
  Probe
gagcaagctgcctgcagacagaccc

SEQ ID NO: 328036 - DNA, 25 bp, Artificial
  Probe
cctgcagcgcatgtgcgagagagca

SEQ ID NO: 328037 - DNA, 25 bp, Artificial
  Probe
cctacctgtcggagcgcaagtttgt

SEQ ID NO: 328038 - DNA, 25 bp, Artificial
  Probe
actgcgagctggagggatcctaaag

SEQ ID NO: 328039 - DNA, 25 bp, Artificial
  Probe
caaacaacacccaggaggatctttt

SEQ ID NO: 328040 - DNA, 25 bp, Artificial
  Probe
tctgcagtatccaccggatcctgca

SEQ ID NO: 328041 - DNA, 25 bp, Artificial
  Probe
tgtacaaccttatgcgcctatgttg

SEQ ID NO: 328042 - DNA, 25 bp, Artificial
  Probe
tggaaacgatgctatacctatccgc

SEQ ID NO: 328043 - DNA, 25 bp, Artificial
  Probe
ttgcctgccctgagaactgtccctt

SEQ ID NO: 328044 - DNA, 25 bp, Artificial
  Probe
taggaacatctactccgcagactac

SEQ ID NO: 328045 - DNA, 25 bp, Artificial
  Probe
atcttttcagactgcgagctggagg

SEQ ID NO: 328046 - DNA, 25 bp, Artificial
  Probe
ctcctatggactgcagccctactat

SEQ ID NO: 328047 - DNA, 25 bp, Artificial
  Probe
gagaactgtcccttggaactgtaca

SEQ ID NO: 328048 - DNA, 25 bp, Artificial
  Probe
acggtaggcgtctaaggttgaccat

SEQ ID NO: 328049 - DNA, 25 bp, Artificial
  Probe
atggaatggcccatgaggaggtcat

SEQ ID NO: 328050 - DNA, 25 bp, Artificial
  Probe
ggcccatgaggaggtcatttactat

SEQ ID NO: 328051 - DNA, 25 bp, Artificial
  Probe
ttgtccatcgggacttagctaccag

SEQ ID NO: 328052 - DNA, 25 bp, Artificial
  Probe
ccatcgggacttagctaccaggaac

SEQ ID NO: 328053 - DNA, 25 bp, Artificial
  Probe
gcaagtttgtccatcgggacttagc

SEQ ID NO: 328054 - DNA, 25 bp, Artificial
  Probe
tactacaaagctgatggaaacgatg

SEQ ID NO: 328055 - DNA, 25 bp, Artificial
  Probe
cacggagtcagatgtgtgggcttat

SEQ ID NO: 328056 - DNA, 25 bp, Artificial
  Probe
gatgccacccgagtctatcttctac

SEQ ID NO: 328057 - DNA, 25 bp, Artificial
  Probe
ctgtcggagcgcaagtttgtccatc

SEQ ID NO: 328058 - DNA, 25 bp, Artificial
  Probe
cagactttggcctctctaggaacat

SEQ ID NO: 328059 - DNA, 25 bp, Artificial
  Probe
gaagagtttatctcaggcagcacgt

SEQ ID NO: 328060 - DNA, 25 bp, Artificial
  Probe
accttatgcgcctatgttggagcaa

SEQ ID NO: 328061 - DNA, 25 bp, Artificial
  Probe
gatgctatacctatccgctggatgc

SEQ ID NO: 328062 - DNA, 25 bp, Artificial
  Probe
ggactgcagccctactatggaatgg

SEQ ID NO: 328063 - DNA, 25 bp, Artificial
  Probe
tggtaacatccttgcctgccctgag

SEQ ID NO: 328064 - DNA, 25 bp, Artificial
  Probe
ttctacaaccgctacaccacggagt

SEQ ID NO: 328065 - DNA, 25 bp, Artificial
  Probe
tgcctgcagacagacccagcttctg

SEQ ID NO: 328066 - DNA, 25 bp, Artificial
  Probe
agatggtaacatccttgcctgccct

SEQ ID NO: 328067 - DNA, 25 bp, Artificial
  Probe
gttggagcaagctgcctgcagacag

SEQ ID NO: 328068 - DNA, 25 bp, Artificial
  Probe
ccagcttctgcagtatccaccggat

SEQ ID NO: 328069 - DNA, 25 bp, Artificial
  Probe
tactccgcagactactacaaagctg

SEQ ID NO: 328070 - DNA, 25 bp, Artificial
  Probe
cctgtggacaagctgcccatggtgg

SEQ ID NO: 328071 - DNA, 25 bp, Artificial
  Probe
tgtcatcctgccaagaagcttccac

SEQ ID NO: 328072 - DNA, 25 bp, Artificial
  Probe
ctctgacatgtcatcctgccaagaa

SEQ ID NO: 328073 - DNA, 25 bp, Artificial
  Probe
gctttatccccgtgtgtacctgtgg

SEQ ID NO: 328074 - DNA, 25 bp, Artificial
  Probe
ttgactgctgggagaccagcattgg

SEQ ID NO: 328075 - DNA, 25 bp, Artificial
  Probe
ccgtgtgtacctgtggacaagctgc

SEQ ID NO: 328076 - DNA, 25 bp, Artificial
  Probe
tgtacctgtggacaagctgcccatg

SEQ ID NO: 328077 - DNA, 25 bp, Artificial
  Probe
ctttatccccgtgtgtacctgtgga

SEQ ID NO: 328078 - DNA, 25 bp, Artificial
  Probe
gagacagcaggctgacacagtaggc

SEQ ID NO: 328079 - DNA, 25 bp, Artificial
  Probe
ccatctgtatcctggcactgctgaa

SEQ ID NO: 328080 - DNA, 25 bp, Artificial
  Probe
ttccccctgggtgattctgcctggg

SEQ ID NO: 328081 - DNA, 25 bp, Artificial
  Probe
cctgtgctggccactaacacatttc

SEQ ID NO: 328082 - DNA, 25 bp, Artificial
  Probe
tgtctcctgtcctctctcggggatc

SEQ ID NO: 328083 - DNA, 25 bp, Artificial
  Probe
gtgtgtacctgtggacaagctgccc

SEQ ID NO: 328084 - DNA, 25 bp, Artificial
  Probe
gacatgtcatcctgccaagaagctt

SEQ ID NO: 328085 - DNA, 25 bp, Artificial
  Probe
tcctgtcctctctcggggatcatcg

SEQ ID NO: 328086 - DNA, 25 bp, Artificial
  Probe
catgtctcctgtcctctctcgggga

SEQ ID NO: 328087 - DNA, 25 bp, Artificial
  Probe
tcctggcactgctgaagccagacag

SEQ ID NO: 328088 - DNA, 25 bp, Artificial
  Probe
aggcatgccgactgctttatccccg

SEQ ID NO: 328089 - DNA, 25 bp, Artificial
  Probe
ggagttggcccctgtgctggccact

SEQ ID NO: 328090 - DNA, 25 bp, Artificial
  Probe
gtggctcatgtctcctgtcctctct

SEQ ID NO: 328091 - DNA, 25 bp, Artificial
  Probe
cccctgggtgattctgcctgggcct

SEQ ID NO: 328092 - DNA, 25 bp, Artificial
  Probe
actgctgggagaccagcattggagc

SEQ ID NO: 328093 - DNA, 25 bp, Artificial
  Probe
gccctgaccggctgcgggtttgact

SEQ ID NO: 328094 - DNA, 25 bp, Artificial
  Probe
ctggccactaacacatttcctgctg

SEQ ID NO: 328095 - DNA, 25 bp, Artificial
  Probe
tcatgtctcctgtcctctctcgggg

SEQ ID NO: 328096 - DNA, 25 bp, Artificial
  Probe
gcgcctggggtctccatgcactcag

SEQ ID NO: 328097 - DNA, 25 bp, Artificial
  Probe
tccccctgggtgattctgcctgggc

SEQ ID NO: 328098 - DNA, 25 bp, Artificial
  Probe
tctcctgtcctctctcggggatcat

SEQ ID NO: 328099 - DNA, 25 bp, Artificial
  Probe
ttggcccctgtgctggccactaaca

SEQ ID NO: 328100 - DNA, 25 bp, Artificial
  Probe
gcaggctgacacagtaggccttccc

SEQ ID NO: 328101 - DNA, 25 bp, Artificial
  Probe
gagttggcccctgtgctggccacta

SEQ ID NO: 328102 - DNA, 25 bp, Artificial
  Probe
agacaggcatcagttgccgggtctt

SEQ ID NO: 328103 - DNA, 25 bp, Artificial
  Probe
caaggcatgccgactgctttatccc

SEQ ID NO: 328104 - DNA, 25 bp, Artificial
  Probe
actgctgaagccagacaggcatcag

SEQ ID NO: 328105 - DNA, 25 bp, Artificial
  Probe
aacacatttcctgctggtagtgcct

SEQ ID NO: 328106 - DNA, 25 bp, Artificial
  Probe
agcgcctggggtctccatgcactca

SEQ ID NO: 328107 - DNA, 25 bp, Artificial
  Probe
gtcatcctgccaagaagcttccacg

SEQ ID NO: 328108 - DNA, 25 bp, Artificial
  Probe
tgactgctgggagaccagcattgga

SEQ ID NO: 328109 - DNA, 25 bp, Artificial
  Probe
ccagacaggcatcagttgccgggtc

SEQ ID NO: 328110 - DNA, 25 bp, Artificial
  Probe
ccgactgctttatccccgtgtgtac

SEQ ID NO: 328111 - DNA, 25 bp, Artificial
  Probe
ctgaagccagacaggcatcagttgc

SEQ ID NO: 328112 - DNA, 25 bp, Artificial
  Probe
agccagacaggcatcagttgccggg

SEQ ID NO: 328113 - DNA, 25 bp, Artificial
  Probe
catttcctgctggtagtgccttgta

SEQ ID NO: 328114 - DNA, 25 bp, Artificial
  Probe
gtacctgtggacaagctgcccatgg

SEQ ID NO: 328115 - DNA, 25 bp, Artificial
  Probe
ctgggagaccagcattggagcgcct

SEQ ID NO: 328116 - DNA, 25 bp, Artificial
  Probe
gacctagtctagatgcctgcagtac

SEQ ID NO: 328117 - DNA, 25 bp, Artificial
  Probe
gatcatcccacctgaggaagaagag

SEQ ID NO: 328118 - DNA, 25 bp, Artificial
  Probe
gcagtaccgtgcatttcggtcgatg

SEQ ID NO: 328119 - DNA, 25 bp, Artificial
  Probe
gctgacctagtctagatgcctgcag

SEQ ID NO: 328120 - DNA, 25 bp, Artificial
  Probe
ccttgctgacctagtctagatgcct

SEQ ID NO: 328121 - DNA, 25 bp, Artificial
  Probe
atgatcatcccacctgaggaagaag

SEQ ID NO: 328122 - DNA, 25 bp, Artificial
  Probe
tgacctagtctagatgcctgcagta

SEQ ID NO: 328123 - DNA, 25 bp, Artificial
  Probe
tcatccttgctgacctagtctagat

SEQ ID NO: 328124 - DNA, 25 bp, Artificial
  Probe
agatgcctgcagtaccgtgcatttc

SEQ ID NO: 328125 - DNA, 25 bp, Artificial
  Probe
tctagatgcctgcagtaccgtgcat

SEQ ID NO: 328126 - DNA, 25 bp, Artificial
  Probe
atcatcccacctgaggaagaagagg

SEQ ID NO: 328127 - DNA, 25 bp, Artificial
  Probe
agtctagatgcctgcagtaccgtgc

SEQ ID NO: 328128 - DNA, 25 bp, Artificial
  Probe
ataatagagacttggcaccatttat

SEQ ID NO: 328129 - DNA, 25 bp, Artificial
  Probe
ctagatgcctgcagtaccgtgcatt

SEQ ID NO: 328130 - DNA, 25 bp, Artificial
  Probe
gtctagatgcctgcagtaccgtgca

SEQ ID NO: 328131 - DNA, 25 bp, Artificial
  Probe
agtaccgtgcatttcggtcgatggt

SEQ ID NO: 328132 - DNA, 25 bp, Artificial
  Probe
ttgctgacctagtctagatgcctgc

SEQ ID NO: 328133 - DNA, 25 bp, Artificial
  Probe
tagatgcctgcagtaccgtgcattt

SEQ ID NO: 328134 - DNA, 25 bp, Artificial
  Probe
atccttgctgacctagtctagatgc

SEQ ID NO: 328135 - DNA, 25 bp, Artificial
  Probe
gctcatccttgctgacctagtctag

SEQ ID NO: 328136 - DNA, 25 bp, Artificial
  Probe
tccttgctgacctagtctagatgcc

SEQ ID NO: 328137 - DNA, 25 bp, Artificial
  Probe
aatgatcatcccacctgaggaagaa

SEQ ID NO: 328138 - DNA, 25 bp, Artificial
  Probe
ctcatccttgctgacctagtctaga

SEQ ID NO: 328139 - DNA, 25 bp, Artificial
  Probe
tcatcccacctgaggaagaagaggg

SEQ ID NO: 328140 - DNA, 25 bp, Artificial
  Probe
cagtaccgtgcatttcggtcgatgg

SEQ ID NO: 328141 - DNA, 25 bp, Artificial
  Probe
gatgcctgcagtaccgtgcatttcg

SEQ ID NO: 328142 - DNA, 25 bp, Artificial
  Probe
cttgctgacctagtctagatgcctg

SEQ ID NO: 328143 - DNA, 25 bp, Artificial
  Probe
tgcagtaccgtgcatttcggtcgat

SEQ ID NO: 328144 - DNA, 25 bp, Artificial
  Probe
acctagtctagatgcctgcagtacc

SEQ ID NO: 328145 - DNA, 25 bp, Artificial
  Probe
cctgcagtaccgtgcatttcggtcg

SEQ ID NO: 328146 - DNA, 25 bp, Artificial
  Probe
ctgacctagtctagatgcctgcagt

SEQ ID NO: 328147 - DNA, 25 bp, Artificial
  Probe
ctgcagtaccgtgcatttcggtcga

SEQ ID NO: 328148 - DNA, 25 bp, Artificial
  Probe
tgatcatcccacctgaggaagaaga

SEQ ID NO: 328149 - DNA, 25 bp, Artificial
  Probe
tgctgacctagtctagatgcctgca

SEQ ID NO: 328150 - DNA, 25 bp, Artificial
  Probe
ggctgggcagactgatggcgattac

SEQ ID NO: 328151 - DNA, 25 bp, Artificial
  Probe
atgcaactgtgtcaatggctgggca

SEQ ID NO: 328152 - DNA, 25 bp, Artificial
  Probe
ccagccaaatgcaactgtgtcaatg

SEQ ID NO: 328153 - DNA, 25 bp, Artificial
  Probe
tgcaactgtgtcaatggctgggcag

SEQ ID NO: 328154 - DNA, 25 bp, Artificial
  Probe
cagccaaatgcaactgtgtcaatgg

SEQ ID NO: 328155 - DNA, 25 bp, Artificial
  Probe
aactgtgtcaatggctgggcagact

SEQ ID NO: 328156 - DNA, 25 bp, Artificial
  Probe
gccaaatgcaactgtgtcaatggct

SEQ ID NO: 328157 - DNA, 25 bp, Artificial
  Probe
caatggctgggcagactgatggcga

SEQ ID NO: 328158 - DNA, 25 bp, Artificial
  Probe
gctgggcagactgatggcgattacg

SEQ ID NO: 328159 - DNA, 25 bp, Artificial
  Probe
caactgtgtcaatggctgggcagac

SEQ ID NO: 328160 - DNA, 25 bp, Artificial
  Probe
aaatgcaactgtgtcaatggctggg

SEQ ID NO: 328161 - DNA, 25 bp, Artificial
  Probe
ctgggcagactgatggcgattacgg

SEQ ID NO: 328162 - DNA, 25 bp, Artificial
  Probe
aatggctgggcagactgatggcgat

SEQ ID NO: 328163 - DNA, 25 bp, Artificial
  Probe
ctgtgtcaatggctgggcagactga

SEQ ID NO: 328164 - DNA, 25 bp, Artificial
  Probe
tgtgtcaatggctgggcagactgat

SEQ ID NO: 328165 - DNA, 25 bp, Artificial
  Probe
gcagactgatggcgattacggctct

SEQ ID NO: 328166 - DNA, 25 bp, Artificial
  Probe
tgggcagactgatggcgattacggc

SEQ ID NO: 328167 - DNA, 25 bp, Artificial
  Probe
aatgcaactgtgtcaatggctgggc

SEQ ID NO: 328168 - DNA, 25 bp, Artificial
  Probe
gtcaatggctgggcagactgatggc

SEQ ID NO: 328169 - DNA, 25 bp, Artificial
  Probe
atggctgggcagactgatggcgatt

SEQ ID NO: 328170 - DNA, 25 bp, Artificial
  Probe
agccaaatgcaactgtgtcaatggc

SEQ ID NO: 328171 - DNA, 25 bp, Artificial
  Probe
actgtgtcaatggctgggcagactg

SEQ ID NO: 328172 - DNA, 25 bp, Artificial
  Probe
gcaactgtgtcaatggctgggcaga

SEQ ID NO: 328173 - DNA, 25 bp, Artificial
  Probe
tggctgggcagactgatggcgatta

SEQ ID NO: 328174 - DNA, 25 bp, Artificial
  Probe
gtgtcaatggctgggcagactgatg

SEQ ID NO: 328175 - DNA, 25 bp, Artificial
  Probe
tgtcaatggctgggcagactgatgg

SEQ ID NO: 328176 - DNA, 25 bp, Artificial
  Probe
cagactgatggcgattacggctctg

SEQ ID NO: 328177 - DNA, 25 bp, Artificial
  Probe
ccaaatgcaactgtgtcaatggctg

SEQ ID NO: 328178 - DNA, 25 bp, Artificial
  Probe
tcaatggctgggcagactgatggcg

SEQ ID NO: 328179 - DNA, 25 bp, Artificial
  Probe
ccatctgttaaccttgttttgtgat

SEQ ID NO: 328180 - DNA, 25 bp, Artificial
  Probe
agtattgtcaaggccatgactgtgg

SEQ ID NO: 328181 - DNA, 25 bp, Artificial
  Probe
tgtacaccagtatttggcattcagt

SEQ ID NO: 328182 - DNA, 25 bp, Artificial
  Probe
acaccagtatttggcattcagtatt

SEQ ID NO: 328183 - DNA, 25 bp, Artificial
  Probe
attcagtattgtcaaggccatgact

SEQ ID NO: 328184 - DNA, 25 bp, Artificial
  Probe
cagtattgtcaaggccatgactgtg

SEQ ID NO: 328185 - DNA, 25 bp, Artificial
  Probe
aaggccatgactgtggtttcagtaa

SEQ ID NO: 328186 - DNA, 25 bp, Artificial
  Probe
gccatgactgtggtttcagtaaact

SEQ ID NO: 328187 - DNA, 25 bp, Artificial
  Probe
caaggccatgactgtggtttcagta

SEQ ID NO: 328188 - DNA, 25 bp, Artificial
  Probe
tgtgtacaccagtatttggcattca

SEQ ID NO: 328189 - DNA, 25 bp, Artificial
  Probe
tacaccagtatttggcattcagtat

SEQ ID NO: 328190 - DNA, 25 bp, Artificial
  Probe
attgtcaaggccatgactgtggttt

SEQ ID NO: 328191 - DNA, 25 bp, Artificial
  Probe
tatttggcattcagtattgtcaagg

SEQ ID NO: 328192 - DNA, 25 bp, Artificial
  Probe
tctgttaaccttgttttgtgattgg

SEQ ID NO: 328193 - DNA, 25 bp, Artificial
  Probe
tgttaaccttgttttgtgattgggc

SEQ ID NO: 328194 - DNA, 25 bp, Artificial
  Probe
agtatttggcattcagtattgtcaa

SEQ ID NO: 328195 - DNA, 25 bp, Artificial
  Probe
tttggcattcagtattgtcaaggcc

SEQ ID NO: 328196 - DNA, 25 bp, Artificial
  Probe
tggcattcagtattgtcaaggccat

SEQ ID NO: 328197 - DNA, 25 bp, Artificial
  Probe
gtacaccagtatttggcattcagta

SEQ ID NO: 328198 - DNA, 25 bp, Artificial
  Probe
tcagtattgtcaaggccatgactgt

SEQ ID NO: 328199 - DNA, 25 bp, Artificial
  Probe
catctgttaaccttgttttgtgatt

SEQ ID NO: 328200 - DNA, 25 bp, Artificial
  Probe
ctgtgtacaccagtatttggcattc

SEQ ID NO: 328201 - DNA, 25 bp, Artificial
  Probe
ccagtatttggcattcagtattgtc

SEQ ID NO: 328202 - DNA, 25 bp, Artificial
  Probe
cttttttcataatcgggctgctcaa

SEQ ID NO: 328203 - DNA, 25 bp, Artificial
  Probe
gtatttggcattcagtattgtcaag

SEQ ID NO: 328204 - DNA, 25 bp, Artificial
  Probe
gtattgtcaaggccatgactgtggt

SEQ ID NO: 328205 - DNA, 25 bp, Artificial
  Probe
ccatgactgtggtttcagtaaactt

SEQ ID NO: 328206 - DNA, 25 bp, Artificial
  Probe
tcaaggccatgactgtggtttcagt

SEQ ID NO: 328207 - DNA, 25 bp, Artificial
  Probe
ggcattcagtattgtcaaggccatg

SEQ ID NO: 328208 - DNA, 25 bp, Artificial
  Probe
cagtatttggcattcagtattgtca

SEQ ID NO: 328209 - DNA, 25 bp, Artificial
  Probe
ttgtcaaggccatgactgtggtttc

SEQ ID NO: 328210 - DNA, 25 bp, Artificial
  Probe
cctgtgtacaccagtatttggcatt

SEQ ID NO: 328211 - DNA, 25 bp, Artificial
  Probe
catgactgtggtttcagtaaacttt

SEQ ID NO: 328212 - DNA, 25 bp, Artificial
  Probe
ggccatgactgtggtttcagtaaac

SEQ ID NO: 328213 - DNA, 25 bp, Artificial
  Probe
tgtcaaggccatgactgtggtttca

SEQ ID NO: 328214 - DNA, 25 bp, Artificial
  Probe
gcttttttcataatcgggctgctca

SEQ ID NO: 328215 - DNA, 25 bp, Artificial
  Probe
aggccatgactgtggtttcagtaaa

SEQ ID NO: 328216 - DNA, 25 bp, Artificial
  Probe
atttggcattcagtattgtcaaggc

SEQ ID NO: 328217 - DNA, 25 bp, Artificial
  Probe
accagtatttggcattcagtattgt

SEQ ID NO: 328218 - DNA, 25 bp, Artificial
  Probe
gtgtacaccagtatttggcattcag

SEQ ID NO: 328219 - DNA, 25 bp, Artificial
  Probe
ttcagtattgtcaaggccatgactg

SEQ ID NO: 328220 - DNA, 25 bp, Artificial
  Probe
ttggcattcagtattgtcaaggcca

SEQ ID NO: 328221 - DNA, 25 bp, Artificial
  Probe
cattcagtattgtcaaggccatgac

SEQ ID NO: 328222 - DNA, 25 bp, Artificial
  Probe
gtcaaggccatgactgtggtttcag

SEQ ID NO: 328223 - DNA, 25 bp, Artificial
  Probe
gcattcagtattgtcaaggccatga

SEQ ID NO: 328224 - DNA, 25 bp, Artificial
  Probe
gttaaccttgttttgtgattgggct

SEQ ID NO: 328225 - DNA, 25 bp, Artificial
  Probe
gtgtaaactccatgctgtactctcc

SEQ ID NO: 328226 - DNA, 25 bp, Artificial
  Probe
ctccaatagagacatcaggaaagga

SEQ ID NO: 328227 - DNA, 25 bp, Artificial
  Probe
ggcttcatctctccaatagagacat

SEQ ID NO: 328228 - DNA, 25 bp, Artificial
  Probe
atagcccctcattgggcaaggctga

SEQ ID NO: 328229 - DNA, 25 bp, Artificial
  Probe
ctccctagaagaagatggagacacg

SEQ ID NO: 328230 - DNA, 25 bp, Artificial
  Probe
gccttcagtaagtgtgtaaactcca

SEQ ID NO: 328231 - DNA, 25 bp, Artificial
  Probe
aaggtagcttatagcccctcattgg

SEQ ID NO: 328232 - DNA, 25 bp, Artificial
  Probe
tcatgtggacagagggctggccctc

SEQ ID NO: 328233 - DNA, 25 bp, Artificial
  Probe
gatgtcagctaatcatagaaattac

SEQ ID NO: 328234 - DNA, 25 bp, Artificial
  Probe
aggagttctcacacagacccaacct

SEQ ID NO: 328235 - DNA, 25 bp, Artificial
  Probe
caagatgctccctagaagaagatgg

SEQ ID NO: 328236 - DNA, 25 bp, Artificial
  Probe
aggcttcatctctccaatagagaca

SEQ ID NO: 328237 - DNA, 25 bp, Artificial
  Probe
ctcttctgggccttcagtaagtgtg

SEQ ID NO: 328238 - DNA, 25 bp, Artificial
  Probe
tcaccggacggtgcaaagagatgtg

SEQ ID NO: 328239 - DNA, 25 bp, Artificial
  Probe
cgagatgagcattcatgtggacaga

SEQ ID NO: 328240 - DNA, 25 bp, Artificial
  Probe
aggaaagagcacagcctccaagaag

SEQ ID NO: 328241 - DNA, 25 bp, Artificial
  Probe
ccatcataatgtgtgatggggtact

SEQ ID NO: 328242 - DNA, 25 bp, Artificial
  Probe
cctcattgggcaaggctgagttcac

SEQ ID NO: 328243 - DNA, 25 bp, Artificial
  Probe
tggggtactgtctccctaacaccag

SEQ ID NO: 328244 - DNA, 25 bp, Artificial
  Probe
cctccaagaaggtagcttatagccc

SEQ ID NO: 328245 - DNA, 25 bp, Artificial
  Probe
ccctcattgggcaaggctgagttca

SEQ ID NO: 328246 - DNA, 25 bp, Artificial
  Probe
ccttgtctgaaccaagtccacttcg

SEQ ID NO: 328247 - DNA, 25 bp, Artificial
  Probe
attacaacgaccagcttgtatctga

SEQ ID NO: 328248 - DNA, 25 bp, Artificial
  Probe
ctagatgtcagctaatcatagaaat

SEQ ID NO: 328249 - DNA, 25 bp, Artificial
  Probe
gcttatagcccctcattgggcaagg

SEQ ID NO: 328250 - DNA, 25 bp, Artificial
  Probe
aggaggaccacaggagttctcacac

SEQ ID NO: 328251 - DNA, 25 bp, Artificial
  Probe
gtactctccttgtctgaaccaagtc

SEQ ID NO: 328252 - DNA, 25 bp, Artificial
  Probe
tatccagagacctggccaggcttca

SEQ ID NO: 328253 - DNA, 25 bp, Artificial
  Probe
agaggatctcataccccagactaga

SEQ ID NO: 328254 - DNA, 25 bp, Artificial
  Probe
ccctaacaccagtgtcaattcctgg

SEQ ID NO: 328255 - DNA, 25 bp, Artificial
  Probe
aagtgtgtaaactccatgctgtact

SEQ ID NO: 328256 - DNA, 25 bp, Artificial
  Probe
attgggcaaggctgagttcaccaag

SEQ ID NO: 328257 - DNA, 25 bp, Artificial
  Probe
ctggacctcttctgggccttcagta

SEQ ID NO: 328258 - DNA, 25 bp, Artificial
  Probe
agagtccttcccactagccttgcat

SEQ ID NO: 328259 - DNA, 25 bp, Artificial
  Probe
gtctaggaggaccacaggagttctc

SEQ ID NO: 328260 - DNA, 25 bp, Artificial
  Probe
ctcaccggacggtgcaaagagatgt

SEQ ID NO: 328261 - DNA, 25 bp, Artificial
  Probe
cacaggagttctcacacagacccaa

SEQ ID NO: 328262 - DNA, 25 bp, Artificial
  Probe
caccggacgagatgagcattcatgt

SEQ ID NO: 328263 - DNA, 25 bp, Artificial
  Probe
ctccatgctgtactctccttgtctg

SEQ ID NO: 328264 - DNA, 25 bp, Artificial
  Probe
aagagcacagcctccaagaaggtag

SEQ ID NO: 328265 - DNA, 25 bp, Artificial
  Probe
acatgcctggacctcttctgggcct

SEQ ID NO: 328266 - DNA, 25 bp, Artificial
  Probe
agatggagacacgtgtcctaagagg

SEQ ID NO: 328267 - DNA, 25 bp, Artificial
  Probe
gggtaagagtccttcccactagcct

SEQ ID NO: 328268 - DNA, 25 bp, Artificial
  Probe
cccatcataatgtgtgatggggtac

SEQ ID NO: 328269 - DNA, 25 bp, Artificial
  Probe
catagaaattacaacgaccagcttg

SEQ ID NO: 328270 - DNA, 25 bp, Artificial
  Probe
tgatggggtactgtctccctaacac

SEQ ID NO: 328271 - DNA, 25 bp, Artificial
  Probe
gctcaggagactctcccagggctgg

SEQ ID NO: 328272 - DNA, 25 bp, Artificial
  Probe
atcctcatggaagaaggagaggcca

SEQ ID NO: 328273 - DNA, 25 bp, Artificial
  Probe
tgtcccacaagttcaccatccgagg

SEQ ID NO: 328274 - DNA, 25 bp, Artificial
  Probe
ggaccctgagggtgcctctgtgctt

SEQ ID NO: 328275 - DNA, 25 bp, Artificial
  Probe
gtcctgtgggctgagtgctttgtac

SEQ ID NO: 328276 - DNA, 25 bp, Artificial
  Probe
gccaccgagagagcagagggtataa

SEQ ID NO: 328277 - DNA, 25 bp, Artificial
  Probe
tcgccatagggtgaagggaccctga

SEQ ID NO: 328278 - DNA, 25 bp, Artificial
  Probe
tccccagtaacaactcgctggattt

SEQ ID NO: 328279 - DNA, 25 bp, Artificial
  Probe
atatgaggtccctgatttggacgtc

SEQ ID NO: 328280 - DNA, 25 bp, Artificial
  Probe
aggggcctggcctctctccacaggg

SEQ ID NO: 328281 - DNA, 25 bp, Artificial
  Probe
atgtcccctgtgacctggcacatgc

SEQ ID NO: 328282 - DNA, 25 bp, Artificial
  Probe
aatggctgctgcagcctcgagggct

SEQ ID NO: 328283 - DNA, 25 bp, Artificial
  Probe
aagctgacagccaggttgctcagtg

SEQ ID NO: 328284 - DNA, 25 bp, Artificial
  Probe
actgggaccctggaggaagctgaca

SEQ ID NO: 328285 - DNA, 25 bp, Artificial
  Probe
ttcctggatgaggaatatgaggtcc

SEQ ID NO: 328286 - DNA, 25 bp, Artificial
  Probe
agatgcatttttctaggactctgtg

SEQ ID NO: 328287 - DNA, 25 bp, Artificial
  Probe
agagccatgggtcctgggttctaga

SEQ ID NO: 328288 - DNA, 25 bp, Artificial
  Probe
aagccactccatctttgagccacag

SEQ ID NO: 328289 - DNA, 25 bp, Artificial
  Probe
agcacagtagtgaccagtggcagtg

SEQ ID NO: 328290 - DNA, 25 bp, Artificial
  Probe
caggaggcagtgctccagcagagaa

SEQ ID NO: 328291 - DNA, 25 bp, Artificial
  Probe
tgtaccgtgcccagttctgcccaag

SEQ ID NO: 328292 - DNA, 25 bp, Artificial
  Probe
tgcctttagagagatgcatttttct

SEQ ID NO: 328293 - DNA, 25 bp, Artificial
  Probe
gacagaaggatcctcaagctgggag

SEQ ID NO: 328294 - DNA, 25 bp, Artificial
  Probe
agccaagacaggatcattagacagc

SEQ ID NO: 328295 - DNA, 25 bp, Artificial
  Probe
ttagatcaaagtctccgtcattctg

SEQ ID NO: 328296 - DNA, 25 bp, Artificial
  Probe
agagcctaacctcctttcctctgag

SEQ ID NO: 328297 - DNA, 25 bp, Artificial
  Probe
cattctgtggagtccgtgagtggtt

SEQ ID NO: 328298 - DNA, 25 bp, Artificial
  Probe
ctccagcagagaaggcaggaataag

SEQ ID NO: 328299 - DNA, 25 bp, Artificial
  Probe
actctgtgcacctgttgttgtatgt

SEQ ID NO: 328300 - DNA, 25 bp, Artificial
  Probe
agctgggagacagtccctacacacc

SEQ ID NO: 328301 - DNA, 25 bp, Artificial
  Probe
attgggaaccagagccatgggtcct

SEQ ID NO: 328302 - DNA, 25 bp, Artificial
  Probe
tccgtgagtggttgtggcatgctct

SEQ ID NO: 328303 - DNA, 25 bp, Artificial
  Probe
agcctcgagggctgagtgatcccct

SEQ ID NO: 328304 - DNA, 25 bp, Artificial
  Probe
agggctcaggagactctcccagggc

SEQ ID NO: 328305 - DNA, 25 bp, Artificial
  Probe
cacctgccttacctactctgagttg

SEQ ID NO: 328306 - DNA, 25 bp, Artificial
  Probe
ccttcctgggcttcgtctttctcat

SEQ ID NO: 328307 - DNA, 25 bp, Artificial
  Probe
gaccagtggcagtgggcttccttct

SEQ ID NO: 328308 - DNA, 25 bp, Artificial
  Probe
ggtataaatcagtcaccagctagaa

SEQ ID NO: 328309 - DNA, 25 bp, Artificial
  Probe
cttctggcaggactgggaccctgga

SEQ ID NO: 328310 - DNA, 25 bp, Artificial
  Probe
caactctctaccagtctgtctgatg

SEQ ID NO: 328311 - DNA, 25 bp, Artificial
  Probe
gcctcttgggtgagtggccactagc

SEQ ID NO: 328312 - DNA, 25 bp, Artificial
  Probe
accagctagaagtcgccatagggtg

SEQ ID NO: 328313 - DNA, 25 bp, Artificial
  Probe
caccgagagagcagagggtataaat

SEQ ID NO: 328314 - DNA, 25 bp, Artificial
  Probe
tgagtgatcccctctagggaccctc

SEQ ID NO: 328315 - DNA, 25 bp, Artificial
  Probe
gccactagcttctccttctgttttg

SEQ ID NO: 328316 - DNA, 25 bp, Artificial
  Probe
cctgcccttcaggtgttgtgacctg

SEQ ID NO: 328317 - DNA, 25 bp, Artificial
  Probe
acaggacgtattacctgatggatcc

SEQ ID NO: 328318 - DNA, 25 bp, Artificial
  Probe
aaatgggcccagtggataagcgaaa

SEQ ID NO: 328319 - DNA, 25 bp, Artificial
  Probe
atgatttggacactaactcttttga

SEQ ID NO: 328320 - DNA, 25 bp, Artificial
  Probe
acgtattacctgatggatccaagcg

SEQ ID NO: 328321 - DNA, 25 bp, Artificial
  Probe
aattccatggtcacaagaactccga

SEQ ID NO: 328322 - DNA, 25 bp, Artificial
  Probe
ggtttatttgcaagacgacggcagt

SEQ ID NO: 328323 - DNA, 25 bp, Artificial
  Probe
tgatttggacactaactcttttgaa

SEQ ID NO: 328324 - DNA, 25 bp, Artificial
  Probe
tttatttgcaagacgacggcagtta

SEQ ID NO: 328325 - DNA, 25 bp, Artificial
  Probe
ttccatggtcacaagaactccgacc

SEQ ID NO: 328326 - DNA, 25 bp, Artificial
  Probe
ttatttgcaagacgacggcagttat

SEQ ID NO: 328327 - DNA, 25 bp, Artificial
  Probe
aaattccatggtcacaagaactccg

SEQ ID NO: 328328 - DNA, 25 bp, Artificial
  Probe
catggtcacaagaactccgaccaga

SEQ ID NO: 328329 - DNA, 25 bp, Artificial
  Probe
gatttggacactaactcttttgaac

SEQ ID NO: 328330 - DNA, 25 bp, Artificial
  Probe
ggtcacaagaactccgaccagaggc

SEQ ID NO: 328331 - DNA, 25 bp, Artificial
  Probe
acgacggcagttattactcacagaa

SEQ ID NO: 328332 - DNA, 25 bp, Artificial
  Probe
agacgacggcagttattactcacag

SEQ ID NO: 328333 - DNA, 25 bp, Artificial
  Probe
tggacactaactcttttgaactaga

SEQ ID NO: 328334 - DNA, 25 bp, Artificial
  Probe
ggacactaactcttttgaactagac

SEQ ID NO: 328335 - DNA, 25 bp, Artificial
  Probe
atttgcaagacgacggcagttatta

SEQ ID NO: 328336 - DNA, 25 bp, Artificial
  Probe
tccatggtcacaagaactccgacca

SEQ ID NO: 328337 - DNA, 25 bp, Artificial
  Probe
caagacgacggcagttattactcac

SEQ ID NO: 328338 - DNA, 25 bp, Artificial
  Probe
caggacgtattacctgatggatcca

SEQ ID NO: 328339 - DNA, 25 bp, Artificial
  Probe
aggacgtattacctgatggatccaa

SEQ ID NO: 328340 - DNA, 25 bp, Artificial
  Probe
aatgggcccagtggataagcgaaag

SEQ ID NO: 328341 - DNA, 25 bp, Artificial
  Probe
gtttatttgcaagacgacggcagtt

SEQ ID NO: 328342 - DNA, 25 bp, Artificial
  Probe
tgaaattccatggtcacaagaactc

SEQ ID NO: 328343 - DNA, 25 bp, Artificial
  Probe
ccatggtcacaagaactccgaccag

SEQ ID NO: 328344 - DNA, 25 bp, Artificial
  Probe
ttggacactaactcttttgaactag

SEQ ID NO: 328345 - DNA, 25 bp, Artificial
  Probe
aagacgacggcagttattactcaca

SEQ ID NO: 328346 - DNA, 25 bp, Artificial
  Probe
cgtattacctgatggatccaagcgg

SEQ ID NO: 328347 - DNA, 25 bp, Artificial
  Probe
gtattacctgatggatccaagcggg

SEQ ID NO: 328348 - DNA, 25 bp, Artificial
  Probe
gacgtattacctgatggatccaagc

SEQ ID NO: 328349 - DNA, 25 bp, Artificial
  Probe
attccatggtcacaagaactccgac

SEQ ID NO: 328350 - DNA, 25 bp, Artificial
  Probe
ggacgtattacctgatggatccaag

SEQ ID NO: 328351 - DNA, 25 bp, Artificial
  Probe
gtgaaattccatggtcacaagaact

SEQ ID NO: 328352 - DNA, 25 bp, Artificial
  Probe
tggtcacaagaactccgaccagagg

SEQ ID NO: 328353 - DNA, 25 bp, Artificial
  Probe
gaaattccatggtcacaagaactcc

SEQ ID NO: 328354 - DNA, 25 bp, Artificial
  Probe
tatttgcaagacgacggcagttatt

SEQ ID NO: 328355 - DNA, 25 bp, Artificial
  Probe
atggtcacaagaactccgaccagag

SEQ ID NO: 328356 - DNA, 25 bp, Artificial
  Probe
tattacctgatggatccaagcggga

SEQ ID NO: 328357 - DNA, 25 bp, Artificial
  Probe
tgccctccagagaacagagatgatg

SEQ ID NO: 328358 - DNA, 25 bp, Artificial
  Probe
caaccatggggtccagacttgctgg

SEQ ID NO: 328359 - DNA, 25 bp, Artificial
  Probe
ggtccagacttgctggggcttcccc

SEQ ID NO: 328360 - DNA, 25 bp, Artificial
  Probe
ccctccagagaacagagatgatgaa

SEQ ID NO: 328361 - DNA, 25 bp, Artificial
  Probe
taaccatgagagctggccaaagggt

SEQ ID NO: 328362 - DNA, 25 bp, Artificial
  Probe
tcatgtggtaaccatgagagctggc

SEQ ID NO: 328363 - DNA, 25 bp, Artificial
  Probe
ccaaccatggggtccagacttgctg

SEQ ID NO: 328364 - DNA, 25 bp, Artificial
  Probe
ctgccctccagagaacagagatgat

SEQ ID NO: 328365 - DNA, 25 bp, Artificial
  Probe
tcactgccctccagagaacagagat

SEQ ID NO: 328366 - DNA, 25 bp, Artificial
  Probe
cacctcttgctgtgtcagtattgcc

SEQ ID NO: 328367 - DNA, 25 bp, Artificial
  Probe
ctggccaaagggtaggagagccaac

SEQ ID NO: 328368 - DNA, 25 bp, Artificial
  Probe
ttgctgtgtcagtattgccacctga

SEQ ID NO: 328369 - DNA, 25 bp, Artificial
  Probe
tcttgctgtgtcagtattgccacct

SEQ ID NO: 328370 - DNA, 25 bp, Artificial
  Probe
ggatcatgtggtaaccatgagagct

SEQ ID NO: 328371 - DNA, 25 bp, Artificial
  Probe
acctcttgctgtgtcagtattgcca

SEQ ID NO: 328372 - DNA, 25 bp, Artificial
  Probe
gtaggagagccaaccatggggtcca

SEQ ID NO: 328373 - DNA, 25 bp, Artificial
  Probe
ggtaaccatgagagctggccaaagg

SEQ ID NO: 328374 - DNA, 25 bp, Artificial
  Probe
tcccctcggggatctcatcttttac

SEQ ID NO: 328375 - DNA, 25 bp, Artificial
  Probe
gggtccagacttgctggggcttccc

SEQ ID NO: 328376 - DNA, 25 bp, Artificial
  Probe
taggagagccaaccatggggtccag

SEQ ID NO: 328377 - DNA, 25 bp, Artificial
  Probe
ctgtgtcagtattgccacctgacag

SEQ ID NO: 328378 - DNA, 25 bp, Artificial
  Probe
cccctcggggatctcatcttttact

SEQ ID NO: 328379 - DNA, 25 bp, Artificial
  Probe
ctcttgctgtgtcagtattgccacc

SEQ ID NO: 328380 - DNA, 25 bp, Artificial
  Probe
tgtggtaaccatgagagctggccaa

SEQ ID NO: 328381 - DNA, 25 bp, Artificial
  Probe
tccctgggtcccagcaagatgggag

SEQ ID NO: 328382 - DNA, 25 bp, Artificial
  Probe
gagagccaaccatggggtccagact

SEQ ID NO: 328383 - DNA, 25 bp, Artificial
  Probe
catgtggtaaccatgagagctggcc

SEQ ID NO: 328384 - DNA, 25 bp, Artificial
  Probe
atgaacatgaggaggactggaacct

SEQ ID NO: 328385 - DNA, 25 bp, Artificial
  Probe
gatcatgtggtaaccatgagagctg

SEQ ID NO: 328386 - DNA, 25 bp, Artificial
  Probe
gtggtaaccatgagagctggccaaa

SEQ ID NO: 328387 - DNA, 25 bp, Artificial
  Probe
aaccatggggtccagacttgctggg

SEQ ID NO: 328388 - DNA, 25 bp, Artificial
  Probe
aaccatgagagctggccaaagggta

SEQ ID NO: 328389 - DNA, 25 bp, Artificial
  Probe
cctcttgctgtgtcagtattgccac

SEQ ID NO: 328390 - DNA, 25 bp, Artificial
  Probe
ggagagccaaccatggggtccagac

SEQ ID NO: 328391 - DNA, 25 bp, Artificial
  Probe
gctgtgtcagtattgccacctgaca

SEQ ID NO: 328392 - DNA, 25 bp, Artificial
  Probe
ccacctcttgctgtgtcagtattgc

SEQ ID NO: 328393 - DNA, 25 bp, Artificial
  Probe
atcatgtggtaaccatgagagctgg

SEQ ID NO: 328394 - DNA, 25 bp, Artificial
  Probe
gtccagacttgctggggcttcccca

SEQ ID NO: 328395 - DNA, 25 bp, Artificial
  Probe
gtaaccatgagagctggccaaaggg

SEQ ID NO: 328396 - DNA, 25 bp, Artificial
  Probe
gaggactggaaccttcttcccctcg

SEQ ID NO: 328397 - DNA, 25 bp, Artificial
  Probe
aggagagccaaccatggggtccaga

SEQ ID NO: 328398 - DNA, 25 bp, Artificial
  Probe
aacacaaaggatcatgtggtaacca

SEQ ID NO: 328399 - DNA, 25 bp, Artificial
  Probe
cttgctgtgtcagtattgccacctg

SEQ ID NO: 328400 - DNA, 25 bp, Artificial
  Probe
cactgccctccagagaacagagatg

SEQ ID NO: 328401 - DNA, 25 bp, Artificial
  Probe
tggtaaccatgagagctggccaaag

SEQ ID NO: 328402 - DNA, 25 bp, Artificial
  Probe
ttcccctcggggatctcatctttta

SEQ ID NO: 328403 - DNA, 25 bp, Artificial
  Probe
cactctgtcaagtcccggggagcca

SEQ ID NO: 328404 - DNA, 25 bp, Artificial
  Probe
cgcagttgggcgtcttaagctccaa

SEQ ID NO: 328405 - DNA, 25 bp, Artificial
  Probe
ccggagtctccatggctttcaggct

SEQ ID NO: 328406 - DNA, 25 bp, Artificial
  Probe
tagccttatgggaagcaacaaagag

SEQ ID NO: 328407 - DNA, 25 bp, Artificial
  Probe
cacactgttcttcacgccaatagtg

SEQ ID NO: 328408 - DNA, 25 bp, Artificial
  Probe
cacttcggtagttgatactgaggta

SEQ ID NO: 328409 - DNA, 25 bp, Artificial
  Probe
gaacaaaccgcagttgggcgtctta

SEQ ID NO: 328410 - DNA, 25 bp, Artificial
  Probe
tcttgtgtgggaagtccccagctcc

SEQ ID NO: 328411 - DNA, 25 bp, Artificial
  Probe
gccaaaagtctctctagggaaacgg

SEQ ID NO: 328412 - DNA, 25 bp, Artificial
  Probe
tccatggctttcaggcttggagtaa

SEQ ID NO: 328413 - DNA, 25 bp, Artificial
  Probe
agatgttacagagacgtgcaccgcc

SEQ ID NO: 328414 - DNA, 25 bp, Artificial
  Probe
agatcaaatgctgatgaagaagcca

SEQ ID NO: 328415 - DNA, 25 bp, Artificial
  Probe
gtttagaaacttttcctatgtgtca

SEQ ID NO: 328416 - DNA, 25 bp, Artificial
  Probe
caagtcccggggagccatggtacac

SEQ ID NO: 328417 - DNA, 25 bp, Artificial
  Probe
gagacaaatctagactttccgtgga

SEQ ID NO: 328418 - DNA, 25 bp, Artificial
  Probe
gagcaaatgttcacaactctgcgaa

SEQ ID NO: 328419 - DNA, 25 bp, Artificial
  Probe
gaaacggacggcattctaagcagac

SEQ ID NO: 328420 - DNA, 25 bp, Artificial
  Probe
acactgttcttcacgccaatagtgc

SEQ ID NO: 328421 - DNA, 25 bp, Artificial
  Probe
ctttcaggcttggagtaaaggacag

SEQ ID NO: 328422 - DNA, 25 bp, Artificial
  Probe
cgcttcgaacaaaccgcagttgggc

SEQ ID NO: 328423 - DNA, 25 bp, Artificial
  Probe
acaactctgcgaaggcggagcctca

SEQ ID NO: 328424 - DNA, 25 bp, Artificial
  Probe
cctcagccaaacaggcttcttgttt

SEQ ID NO: 328425 - DNA, 25 bp, Artificial
  Probe
agatgctgggtaacacaggaggtcc

SEQ ID NO: 328426 - DNA, 25 bp, Artificial
  Probe
accccggagtctccatggctttcag

SEQ ID NO: 328427 - DNA, 25 bp, Artificial
  Probe
agaagccaaaagtctctctagggaa

SEQ ID NO: 328428 - DNA, 25 bp, Artificial
  Probe
gttcttcacgccaatagtgcagtct

SEQ ID NO: 328429 - DNA, 25 bp, Artificial
  Probe
gaggtcctagggatcctcagccaaa

SEQ ID NO: 328430 - DNA, 25 bp, Artificial
  Probe
gaaggcggagcctcaagagagccac

SEQ ID NO: 328431 - DNA, 25 bp, Artificial
  Probe
accttcaccttcacggagcaaatgt

SEQ ID NO: 328432 - DNA, 25 bp, Artificial
  Probe
aaatctagactttccgtggagcacc

SEQ ID NO: 328433 - DNA, 25 bp, Artificial
  Probe
aagggggatctttccagagatttct

SEQ ID NO: 328434 - DNA, 25 bp, Artificial
  Probe
tgcagtctgcgaaagatcaaatgct

SEQ ID NO: 328435 - DNA, 25 bp, Artificial
  Probe
gggaagtccccagctcctgcctttt

SEQ ID NO: 328436 - DNA, 25 bp, Artificial
  Probe
tctccatggctttcaggcttggagt

SEQ ID NO: 328437 - DNA, 25 bp, Artificial
  Probe
cgaacaaaccgcagttgggcgtctt

SEQ ID NO: 328438 - DNA, 25 bp, Artificial
  Probe
gaaacttttcctatgtgtcaccaga

SEQ ID NO: 328439 - DNA, 25 bp, Artificial
  Probe
cttcacggagcaaatgttcacaact

SEQ ID NO: 328440 - DNA, 25 bp, Artificial
  Probe
ggctttcaggcttggagtaaaggac

SEQ ID NO: 328441 - DNA, 25 bp, Artificial
  Probe
ctttccagagatttcttgtgtggga

SEQ ID NO: 328442 - DNA, 25 bp, Artificial
  Probe
tgggaagtccccagctcctgccttt

SEQ ID NO: 328443 - DNA, 25 bp, Artificial
  Probe
agatttcttgtgtgggaagtcccca

SEQ ID NO: 328444 - DNA, 25 bp, Artificial
  Probe
cctatgattaaccaggatgagttta

SEQ ID NO: 328445 - DNA, 25 bp, Artificial
  Probe
gtctctctagggaaacggacggcat

SEQ ID NO: 328446 - DNA, 25 bp, Artificial
  Probe
ctctctagggaaacggacggcattc

SEQ ID NO: 328447 - DNA, 25 bp, Artificial
  Probe
tgctgggtaacacaggaggtcctag

SEQ ID NO: 328448 - DNA, 25 bp, Artificial
  Probe
aagatcaaatgctgatgaagaagcc

SEQ ID NO: 328449 - DNA, 25 bp, Artificial
  Probe
tcttcagggatgaggtcacgtgtgt

SEQ ID NO: 328450 - DNA, 25 bp, Artificial
  Probe
ttagaagctgagtcctgttcttatt

SEQ ID NO: 328451 - DNA, 25 bp, Artificial
  Probe
atgaatgcccccagtgctttgtttg

SEQ ID NO: 328452 - DNA, 25 bp, Artificial
  Probe
taccaatacatagatgtccctgctg

SEQ ID NO: 328453 - DNA, 25 bp, Artificial
  Probe
gtaatcaatccttcagggctgagca

SEQ ID NO: 328454 - DNA, 25 bp, Artificial
  Probe
caagcctatcttcagggatgaggtc

SEQ ID NO: 328455 - DNA, 25 bp, Artificial
  Probe
ttgtcgtcatgaatgcccccagtgc

SEQ ID NO: 328456 - DNA, 25 bp, Artificial
  Probe
gactgctgggaagtggcttaatgac

SEQ ID NO: 328457 - DNA, 25 bp, Artificial
  Probe
ctatcttcagggatgaggtcacgtg

SEQ ID NO: 328458 - DNA, 25 bp, Artificial
  Probe
tctgtaatcaatccttcagggctga

SEQ ID NO: 328459 - DNA, 25 bp, Artificial
  Probe
gacaaaagccagtttgtcgtcatga

SEQ ID NO: 328460 - DNA, 25 bp, Artificial
  Probe
aggacgctaagcaccaacaccctga

SEQ ID NO: 328461 - DNA, 25 bp, Artificial
  Probe
tttctgcagtggactgctgggaagt

SEQ ID NO: 328462 - DNA, 25 bp, Artificial
  Probe
agtatcttagaagctgagtcctgtt

SEQ ID NO: 328463 - DNA, 25 bp, Artificial
  Probe
gctgggccaacaagcctatcttcag

SEQ ID NO: 328464 - DNA, 25 bp, Artificial
  Probe
gtgatgtctgttacctttagtatct

SEQ ID NO: 328465 - DNA, 25 bp, Artificial
  Probe
actgctgggaagtggcttaatgaca

SEQ ID NO: 328466 - DNA, 25 bp, Artificial
  Probe
gccagtttgtcgtcatgaatgcccc

SEQ ID NO: 328467 - DNA, 25 bp, Artificial
  Probe
atccttcagggctgagcaggaggaa

SEQ ID NO: 328468 - DNA, 25 bp, Artificial
  Probe
tccaggtctgtaatcaatccttcag

SEQ ID NO: 328469 - DNA, 25 bp, Artificial
  Probe
gcccccagtgctttgtttgtgatgt

SEQ ID NO: 328470 - DNA, 25 bp, Artificial
  Probe
gatgtctgttacctttagtatctta

SEQ ID NO: 328471 - DNA, 25 bp, Artificial
  Probe
aatcaatccttcagggctgagcagg

SEQ ID NO: 328472 - DNA, 25 bp, Artificial
  Probe
gccaacaagcctatcttcagggatg

SEQ ID NO: 328473 - DNA, 25 bp, Artificial
  Probe
ctgtaatcaatccttcagggctgag

SEQ ID NO: 328474 - DNA, 25 bp, Artificial
  Probe
accaacaccctgaccagaggacaaa

SEQ ID NO: 328475 - DNA, 25 bp, Artificial
  Probe
gtctgttacctttagtatcttagaa

SEQ ID NO: 328476 - DNA, 25 bp, Artificial
  Probe
tgtcgtcatgaatgcccccagtgct

SEQ ID NO: 328477 - DNA, 25 bp, Artificial
  Probe
ggaaggacgctaagcaccaacaccc

SEQ ID NO: 328478 - DNA, 25 bp, Artificial
  Probe
tgagtcctgttcttatttctgcagt

SEQ ID NO: 328479 - DNA, 25 bp, Artificial
  Probe
acctttagtatcttagaagctgagt

SEQ ID NO: 328480 - DNA, 25 bp, Artificial
  Probe
gcacggtcaggaaggacgctaagca

SEQ ID NO: 328481 - DNA, 25 bp, Artificial
  Probe
caacaagcctatcttcagggatgag

SEQ ID NO: 328482 - DNA, 25 bp, Artificial
  Probe
ggccaacaagcctatcttcagggat

SEQ ID NO: 328483 - DNA, 25 bp, Artificial
  Probe
cttcagggctgagcaggaggaacat

SEQ ID NO: 328484 - DNA, 25 bp, Artificial
  Probe
gctgagtcctgttcttatttctgca

SEQ ID NO: 328485 - DNA, 25 bp, Artificial
  Probe
aaagccagtttgtcgtcatgaatgc

SEQ ID NO: 328486 - DNA, 25 bp, Artificial
  Probe
cctgaccagaggacaaaagccagtt

SEQ ID NO: 328487 - DNA, 25 bp, Artificial
  Probe
tgtgatgtctgttacctttagtatc

SEQ ID NO: 328488 - DNA, 25 bp, Artificial
  Probe
ggacaaaagccagtttgtcgtcatg

SEQ ID NO: 328489 - DNA, 25 bp, Artificial
  Probe
aagcctatcttcagggatgaggtca

SEQ ID NO: 328490 - DNA, 25 bp, Artificial
  Probe
tatcttagaagctgagtcctgttct

SEQ ID NO: 328491 - DNA, 25 bp, Artificial
  Probe
cacggtcaggaaggacgctaagcac

SEQ ID NO: 328492 - DNA, 25 bp, Artificial
  Probe
aaggacgctaagcaccaacaccctg

SEQ ID NO: 328493 - DNA, 25 bp, Artificial
  Probe
caggtctgtaatcaatccttcaggg

SEQ ID NO: 328494 - DNA, 25 bp, Artificial
  Probe
ccaatacatagatgtccctgctgga

SEQ ID NO: 328495 - DNA, 25 bp, Artificial
  Probe
ggctgcacacgtgatgacgtgatga

SEQ ID NO: 328496 - DNA, 25 bp, Artificial
  Probe
tttgagaaaccagatgcagaagact

SEQ ID NO: 328497 - DNA, 25 bp, Artificial
  Probe
tgatgacgtgatgacggggcccttt

SEQ ID NO: 328498 - DNA, 25 bp, Artificial
  Probe
gatgcataaagttcacatcgggtgg

SEQ ID NO: 328499 - DNA, 25 bp, Artificial
  Probe
aatgtaaacaaatggccttgctttg

SEQ ID NO: 328500 - DNA, 25 bp, Artificial
  Probe
tgaccatcaccttcgctgtatgctc

SEQ ID NO: 328501 - DNA, 25 bp, Artificial
  Probe
aaaccagatgcagaagactttaacg

SEQ ID NO: 328502 - DNA, 25 bp, Artificial
  Probe
tatggatgaaacctcttcccgaaag

SEQ ID NO: 328503 - DNA, 25 bp, Artificial
  Probe
caaatggccttgctttgagaaacca

SEQ ID NO: 328504 - DNA, 25 bp, Artificial
  Probe
tcatccttagaccaccagtcctgag

SEQ ID NO: 328505 - DNA, 25 bp, Artificial
  Probe
tttaaatggcctcgttggaggaacg

SEQ ID NO: 328506 - DNA, 25 bp, Artificial
  Probe
cagtgaactccataattgatccttg

SEQ ID NO: 328507 - DNA, 25 bp, Artificial
  Probe
atggcctcgttggaggaacgtaaag

SEQ ID NO: 328508 - DNA, 25 bp, Artificial
  Probe
ctttgcttatatggatgaaacctct

SEQ ID NO: 328509 - DNA, 25 bp, Artificial
  Probe
gctcttagatttttatcagtgaact

SEQ ID NO: 328510 - DNA, 25 bp, Artificial
  Probe
gtttttgtcatccttagaccaccag

SEQ ID NO: 328511 - DNA, 25 bp, Artificial
  Probe
ctcgccggagaggagaaaggacttc

SEQ ID NO: 328512 - DNA, 25 bp, Artificial
  Probe
gagacggaccacctcattctcctgg

SEQ ID NO: 328513 - DNA, 25 bp, Artificial
  Probe
tggatgaaacctcttcccgaaagga

SEQ ID NO: 328514 - DNA, 25 bp, Artificial
  Probe
ttcactgagagcaccggaagctcca

SEQ ID NO: 328515 - DNA, 25 bp, Artificial
  Probe
tgagcatgcgctgcttgagggaacc

SEQ ID NO: 328516 - DNA, 25 bp, Artificial
  Probe
tcgggtggcctttgagggacaacca

SEQ ID NO: 328517 - DNA, 25 bp, Artificial
  Probe
gatccttgggtttttgtcatcctta

SEQ ID NO: 328518 - DNA, 25 bp, Artificial
  Probe
ccagcagacggacctctgcggacag

SEQ ID NO: 328519 - DNA, 25 bp, Artificial
  Probe
ccctttgtggtaagtgtcagaggat

SEQ ID NO: 328520 - DNA, 25 bp, Artificial
  Probe
gcttcctgttcgacccagcagacgg

SEQ ID NO: 328521 - DNA, 25 bp, Artificial
  Probe
cttgagggaacctgggccaaagcct

SEQ ID NO: 328522 - DNA, 25 bp, Artificial
  Probe
gaacctgggccaaagcctttaaatg

SEQ ID NO: 328523 - DNA, 25 bp, Artificial
  Probe
ctggccattatgaccatcaccttcg

SEQ ID NO: 328524 - DNA, 25 bp, Artificial
  Probe
gaggagacggaccacctcattctcc

SEQ ID NO: 328525 - DNA, 25 bp, Artificial
  Probe
ggaaaagtgggacctccgagctctt

SEQ ID NO: 328526 - DNA, 25 bp, Artificial
  Probe
tgttcgacccagcagacggacctct

SEQ ID NO: 328527 - DNA, 25 bp, Artificial
  Probe
gccctttgtggtaagtgtcagagga

SEQ ID NO: 328528 - DNA, 25 bp, Artificial
  Probe
ggaagctccaggagcttcctgttcg

SEQ ID NO: 328529 - DNA, 25 bp, Artificial
  Probe
agcaccggaagctccaggagcttcc

SEQ ID NO: 328530 - DNA, 25 bp, Artificial
  Probe
cagttgtgagcatgcgctgcttgag

SEQ ID NO: 328531 - DNA, 25 bp, Artificial
  Probe
ttcacaatctttgcttatatggatg

SEQ ID NO: 328532 - DNA, 25 bp, Artificial
  Probe
ggccaaagcctttaaatggcctcgt

SEQ ID NO: 328533 - DNA, 25 bp, Artificial
  Probe
catcgggtggcctttgagggacaac

SEQ ID NO: 328534 - DNA, 25 bp, Artificial
  Probe
agcatgcgctgcttgagggaacctg

SEQ ID NO: 328535 - DNA, 25 bp, Artificial
  Probe
tgcacacgtgatgacgtgatgacgg

SEQ ID NO: 328536 - DNA, 25 bp, Artificial
  Probe
gtgggacctccgagctcttagattt

SEQ ID NO: 328537 - DNA, 25 bp, Artificial
  Probe
cataattgatccttgggtttttgtc

SEQ ID NO: 328538 - DNA, 25 bp, Artificial
  Probe
cataaagttcacatcgggtggcctt

SEQ ID NO: 328539 - DNA, 25 bp, Artificial
  Probe
gttcgacccagcagacggacctctg

SEQ ID NO: 328540 - DNA, 25 bp, Artificial
  Probe
gctgcttgagggaacctgggccaaa

SEQ ID NO: 328541 - DNA, 25 bp, Artificial
  Probe
aaggcgccgccttgtggcggccaca

SEQ ID NO: 328542 - DNA, 25 bp, Artificial
  Probe
gcaggactgtcaaccacaatctacc

SEQ ID NO: 328543 - DNA, 25 bp, Artificial
  Probe
cttgtggcggccacaggtacggctc

SEQ ID NO: 328544 - DNA, 25 bp, Artificial
  Probe
gtacaggctgaggtgaagaagacct

SEQ ID NO: 328545 - DNA, 25 bp, Artificial
  Probe
gtcttccaggccagtagcattcacc

SEQ ID NO: 328546 - DNA, 25 bp, Artificial
  Probe
ttcaccatagacacggaaggatgca

SEQ ID NO: 328547 - DNA, 25 bp, Artificial
  Probe
actgcaacggagaggtacaggctga

SEQ ID NO: 328548 - DNA, 25 bp, Artificial
  Probe
cagctcttgtggattggcggatctg

SEQ ID NO: 328549 - DNA, 25 bp, Artificial
  Probe
tacaggctgaggtgaagaagacctg

SEQ ID NO: 328550 - DNA, 25 bp, Artificial
  Probe
tgcactgcgagctcttcttcaactc

SEQ ID NO: 328551 - DNA, 25 bp, Artificial
  Probe
atccgcatgcactgcgagctcttct

SEQ ID NO: 328552 - DNA, 25 bp, Artificial
  Probe
ccatagacacggaaggatgcaaggg

SEQ ID NO: 328553 - DNA, 25 bp, Artificial
  Probe
tcgttggaatctgtccatcgactgg

SEQ ID NO: 328554 - DNA, 25 bp, Artificial
  Probe
tcaaccacaatctaccccggaggag

SEQ ID NO: 328555 - DNA, 25 bp, Artificial
  Probe
gcagccagtcacagatgggaccaag

SEQ ID NO: 328556 - DNA, 25 bp, Artificial
  Probe
gcgtcgcttaaacatttccagtttc

SEQ ID NO: 328557 - DNA, 25 bp, Artificial
  Probe
ggggagtcttccaggccagtagcat

SEQ ID NO: 328558 - DNA, 25 bp, Artificial
  Probe
tggtgctcatctctagcaaacccgc

SEQ ID NO: 328559 - DNA, 25 bp, Artificial
  Probe
ggactcgttggaatctgtccatcga

SEQ ID NO: 328560 - DNA, 25 bp, Artificial
  Probe
gatccgcatgcactgcgagctcttc

SEQ ID NO: 328561 - DNA, 25 bp, Artificial
  Probe
gccaagactgcctgcagacagatcg

SEQ ID NO: 328562 - DNA, 25 bp, Artificial
  Probe
tccttccagggattcttcgtgtcta

SEQ ID NO: 328563 - DNA, 25 bp, Artificial
  Probe
gtcacagatgggaccaagcacacgc

SEQ ID NO: 328564 - DNA, 25 bp, Artificial
  Probe
ccatcgactggaaaaaggcgccgcc

SEQ ID NO: 328565 - DNA, 25 bp, Artificial
  Probe
taaacatttccagtttctatgagtg

SEQ ID NO: 328566 - DNA, 25 bp, Artificial
  Probe
cttcgtgtctattgtctattgctac

SEQ ID NO: 328567 - DNA, 25 bp, Artificial
  Probe
gcatgcactgcgagctcttcttcaa

SEQ ID NO: 328568 - DNA, 25 bp, Artificial
  Probe
tgtcaaccacaatctaccccggagg

SEQ ID NO: 328569 - DNA, 25 bp, Artificial
  Probe
aattctgaaataaggcgtcgcttaa

SEQ ID NO: 328570 - DNA, 25 bp, Artificial
  Probe
gacctaagttggaagactggaattc

SEQ ID NO: 328571 - DNA, 25 bp, Artificial
  Probe
gggaccaagcacacgcctggtgctc

SEQ ID NO: 328572 - DNA, 25 bp, Artificial
  Probe
tctgaatcaccatttgcagctcttg

SEQ ID NO: 328573 - DNA, 25 bp, Artificial
  Probe
cacaggtacggctcggtgctcacca

SEQ ID NO: 328574 - DNA, 25 bp, Artificial
  Probe
aagcacacgcctggtgctcatctct

SEQ ID NO: 328575 - DNA, 25 bp, Artificial
  Probe
ttctgagcaggactgtcaaccacaa

SEQ ID NO: 328576 - DNA, 25 bp, Artificial
  Probe
ctactgcaacggagaggtacaggct

SEQ ID NO: 328577 - DNA, 25 bp, Artificial
  Probe
ggtacggctcggtgctcaccactgt

SEQ ID NO: 328578 - DNA, 25 bp, Artificial
  Probe
tgaaataaggcgtcgcttaaacatt

SEQ ID NO: 328579 - DNA, 25 bp, Artificial
  Probe
gcaccagcagccagtcacagatggg

SEQ ID NO: 328580 - DNA, 25 bp, Artificial
  Probe
aaaggcgccgccttgtggcggccac

SEQ ID NO: 328581 - DNA, 25 bp, Artificial
  Probe
gggattcttcgtgtctattgtctat

SEQ ID NO: 328582 - DNA, 25 bp, Artificial
  Probe
tgtgactctacctggctacgtctgg

SEQ ID NO: 328583 - DNA, 25 bp, Artificial
  Probe
agtagttctgagcaggactgtcaac

SEQ ID NO: 328584 - DNA, 25 bp, Artificial
  Probe
acctaagttggaagactggaattct

SEQ ID NO: 328585 - DNA, 25 bp, Artificial
  Probe
gggagatccgcatgcactgcgagct

SEQ ID NO: 328586 - DNA, 25 bp, Artificial
  Probe
tgaagaagacctggactcgttggaa

SEQ ID NO: 328587 - DNA, 25 bp, Artificial
  Probe
tccttaggggttgaccagtgtgtaa

SEQ ID NO: 328588 - DNA, 25 bp, Artificial
  Probe
actgctcatcattggcaacagcagc

SEQ ID NO: 328589 - DNA, 25 bp, Artificial
  Probe
ccctgcctttgtcagcactgtgggt

SEQ ID NO: 328590 - DNA, 25 bp, Artificial
  Probe
cccagctacagatactaactgcagg

SEQ ID NO: 328591 - DNA, 25 bp, Artificial
  Probe
agccagctgagttctttgccagccc

SEQ ID NO: 328592 - DNA, 25 bp, Artificial
  Probe
actccttaggggttgaccagtgtgt

SEQ ID NO: 328593 - DNA, 25 bp, Artificial
  Probe
caggtcattctcgtggggaataaat

SEQ ID NO: 328594 - DNA, 25 bp, Artificial
  Probe
cagcgtcgggaagacctccttcctt

SEQ ID NO: 328595 - DNA, 25 bp, Artificial
  Probe
cgtgtgaagctgcagatatgggaca

SEQ ID NO: 328596 - DNA, 25 bp, Artificial
  Probe
gagaacatcagtgtgaggcaggcct

SEQ ID NO: 328597 - DNA, 25 bp, Artificial
  Probe
tgtgaagctgcagatatgggacacg

SEQ ID NO: 328598 - DNA, 25 bp, Artificial
  Probe
tcatgagaagcgtgtgaagctgcag

SEQ ID NO: 328599 - DNA, 25 bp, Artificial
  Probe
tccgctatgctgatgacaccttcac

SEQ ID NO: 328600 - DNA, 25 bp, Artificial
  Probe
ttactgtgtgggtgaagactcctct

SEQ ID NO: 328601 - DNA, 25 bp, Artificial
  Probe
tgaagacagtttaccgtcatgagaa

SEQ ID NO: 328602 - DNA, 25 bp, Artificial
  Probe
ctaactgcaggttactgtgtgggtg

SEQ ID NO: 328603 - DNA, 25 bp, Artificial
  Probe
gcaacagcagcgtcgggaagacctc

SEQ ID NO: 328604 - DNA, 25 bp, Artificial
  Probe
ctgcacagctgatactattaaagaa

SEQ ID NO: 328605 - DNA, 25 bp, Artificial
  Probe
caggttactgtgtgggtgaagactc

SEQ ID NO: 328606 - DNA, 25 bp, Artificial
  Probe
tatgctgatgacaccttcacccctg

SEQ ID NO: 328607 - DNA, 25 bp, Artificial
  Probe
ccttcgagcgtctggtggacgccat

SEQ ID NO: 328608 - DNA, 25 bp, Artificial
  Probe
aacatcagtgtgaggcaggccttcg

SEQ ID NO: 328609 - DNA, 25 bp, Artificial
  Probe
gacagtttaccgtcatgagaagcgt

SEQ ID NO: 328610 - DNA, 25 bp, Artificial
  Probe
agtaactgatggtaacactggaatc

SEQ ID NO: 328611 - DNA, 25 bp, Artificial
  Probe
agcagcgtcgggaagacctccttcc

SEQ ID NO: 328612 - DNA, 25 bp, Artificial
  Probe
tcccacacgcactccttaggggttg

SEQ ID NO: 328613 - DNA, 25 bp, Artificial
  Probe
gccttcgagcgtctggtggacgcca

SEQ ID NO: 328614 - DNA, 25 bp, Artificial
  Probe
ttccttttccgctatgctgatgaca

SEQ ID NO: 328615 - DNA, 25 bp, Artificial
  Probe
gaaccccaagccagctgagttcttt

SEQ ID NO: 328616 - DNA, 25 bp, Artificial
  Probe
gggtgaagactcctcttacaacaga

SEQ ID NO: 328617 - DNA, 25 bp, Artificial
  Probe
accgtcatgagaagcgtgtgaagct

SEQ ID NO: 328618 - DNA, 25 bp, Artificial
  Probe
cctcagtaactgatggtaacactgg

SEQ ID NO: 328619 - DNA, 25 bp, Artificial
  Probe
cgcacaggtcattctcgtggggaat

SEQ ID NO: 328620 - DNA, 25 bp, Artificial
  Probe
ggactgggctactcagatcaagacc

SEQ ID NO: 328621 - DNA, 25 bp, Artificial
  Probe
ttgtcagcactgtgggtatcgactt

SEQ ID NO: 328622 - DNA, 25 bp, Artificial
  Probe
aactgctcttgctaggcaaggcccg

SEQ ID NO: 328623 - DNA, 25 bp, Artificial
  Probe
tgggtgaagactcctcttacaacag

SEQ ID NO: 328624 - DNA, 25 bp, Artificial
  Probe
tgaccagtgtgtaaagtgaggccca

SEQ ID NO: 328625 - DNA, 25 bp, Artificial
  Probe
attggcaacagcagcgtcgggaaga

SEQ ID NO: 328626 - DNA, 25 bp, Artificial
  Probe
actgctcttgctaggcaaggcccgc

SEQ ID NO: 328627 - DNA, 25 bp, Artificial
  Probe
ctcatcattggcaacagcagcgtcg

SEQ ID NO: 328628 - DNA, 25 bp, Artificial
  Probe
gttgaccagtgtgtaaagtgaggcc

SEQ ID NO: 328629 - DNA, 25 bp, Artificial
  Probe
atggtaacactggaatcagagatgc

SEQ ID NO: 328630 - DNA, 25 bp, Artificial
  Probe
cacgcactccttaggggttgaccag

SEQ ID NO: 328631 - DNA, 25 bp, Artificial
  Probe
taactgatggtaacactggaatcag

SEQ ID NO: 328632 - DNA, 25 bp, Artificial
  Probe
aacactggaatcagagatgcctctg

SEQ ID NO: 328633 - DNA, 25 bp, Artificial
  Probe
gtgcacggtgcccagatccaccacc

SEQ ID NO: 328634 - DNA, 25 bp, Artificial
  Probe
cctttgccatcagtcagctttaact

SEQ ID NO: 328635 - DNA, 25 bp, Artificial
  Probe
aggccgtcctttgccatcagtcagc

SEQ ID NO: 328636 - DNA, 25 bp, Artificial
  Probe
cggtgcccagatccaccacctttag

SEQ ID NO: 328637 - DNA, 25 bp, Artificial
  Probe
tttgccatcagtcagctttaactag

SEQ ID NO: 328638 - DNA, 25 bp, Artificial
  Probe
tccaccacctttaggttgctactgt

SEQ ID NO: 328639 - DNA, 25 bp, Artificial
  Probe
ccgtcctttgccatcagtcagcttt

SEQ ID NO: 328640 - DNA, 25 bp, Artificial
  Probe
atcagtcagctttaactaggcagag

SEQ ID NO: 328641 - DNA, 25 bp, Artificial
  Probe
ctcttcaggccgtcctttgccatca

SEQ ID NO: 328642 - DNA, 25 bp, Artificial
  Probe
tcaggccgtcctttgccatcagtca

SEQ ID NO: 328643 - DNA, 25 bp, Artificial
  Probe
ctttgccatcagtcagctttaacta

SEQ ID NO: 328644 - DNA, 25 bp, Artificial
  Probe
tcctttgccatcagtcagctttaac

SEQ ID NO: 328645 - DNA, 25 bp, Artificial
  Probe
ccatcagtcagctttaactaggcag

SEQ ID NO: 328646 - DNA, 25 bp, Artificial
  Probe
ccagatccaccacctttaggttgct

SEQ ID NO: 328647 - DNA, 25 bp, Artificial
  Probe
ccaccacctttaggttgctactgtt

SEQ ID NO: 328648 - DNA, 25 bp, Artificial
  Probe
caggccgtcctttgccatcagtcag

SEQ ID NO: 328649 - DNA, 25 bp, Artificial
  Probe
ctttaggttgctactgttttctctt

SEQ ID NO: 328650 - DNA, 25 bp, Artificial
  Probe
cacggtgcccagatccaccaccttt

SEQ ID NO: 328651 - DNA, 25 bp, Artificial
  Probe
gcacggtgcccagatccaccacctt

SEQ ID NO: 328652 - DNA, 25 bp, Artificial
  Probe
aaagtgcacggtgcccagatccacc

SEQ ID NO: 328653 - DNA, 25 bp, Artificial
  Probe
cgtcctttgccatcagtcagcttta

SEQ ID NO: 328654 - DNA, 25 bp, Artificial
  Probe
ttgccatcagtcagctttaactagg

SEQ ID NO: 328655 - DNA, 25 bp, Artificial
  Probe
ggtgcccagatccaccacctttagg

SEQ ID NO: 328656 - DNA, 25 bp, Artificial
  Probe
tgccatcagtcagctttaactaggc

SEQ ID NO: 328657 - DNA, 25 bp, Artificial
  Probe
tcagctttaactaggcagagtccag

SEQ ID NO: 328658 - DNA, 25 bp, Artificial
  Probe
cacctttaggttgctactgttttct

SEQ ID NO: 328659 - DNA, 25 bp, Artificial
  Probe
gctttaactaggcagagtccagcag

SEQ ID NO: 328660 - DNA, 25 bp, Artificial
  Probe
gtcagctttaactaggcagagtcca

SEQ ID NO: 328661 - DNA, 25 bp, Artificial
  Probe
tcagtcagctttaactaggcagagt

SEQ ID NO: 328662 - DNA, 25 bp, Artificial
  Probe
cagtcagctttaactaggcagagtc

SEQ ID NO: 328663 - DNA, 25 bp, Artificial
  Probe
catcagtcagctttaactaggcaga

SEQ ID NO: 328664 - DNA, 25 bp, Artificial
  Probe
gccatcagtcagctttaactaggca

SEQ ID NO: 328665 - DNA, 25 bp, Artificial
  Probe
cttcaggccgtcctttgccatcagt

SEQ ID NO: 328666 - DNA, 25 bp, Artificial
  Probe
cctttaggttgctactgttttctct

SEQ ID NO: 328667 - DNA, 25 bp, Artificial
  Probe
agatccaccacctttaggttgctac

SEQ ID NO: 328668 - DNA, 25 bp, Artificial
  Probe
caccacctttaggttgctactgttt

SEQ ID NO: 328669 - DNA, 25 bp, Artificial
  Probe
cagctttaactaggcagagtccagc

SEQ ID NO: 328670 - DNA, 25 bp, Artificial
  Probe
ggccgtcctttgccatcagtcagct

SEQ ID NO: 328671 - DNA, 25 bp, Artificial
  Probe
gccgtcctttgccatcagtcagctt

SEQ ID NO: 328672 - DNA, 25 bp, Artificial
  Probe
gtgcccagatccaccacctttaggt

SEQ ID NO: 328673 - DNA, 25 bp, Artificial
  Probe
ttcaggccgtcctttgccatcagtc

SEQ ID NO: 328674 - DNA, 25 bp, Artificial
  Probe
gtcctttgccatcagtcagctttaa

SEQ ID NO: 328675 - DNA, 25 bp, Artificial
  Probe
agtcagctttaactaggcagagtcc

SEQ ID NO: 328676 - DNA, 25 bp, Artificial
  Probe
gatccaccacctttaggttgctact

SEQ ID NO: 328677 - DNA, 25 bp, Artificial
  Probe
tcttcaggccgtcctttgccatcag

SEQ ID NO: 328678 - DNA, 25 bp, Artificial
  Probe
aagtgcacggtgcccagatccacca

SEQ ID NO: 328679 - DNA, 25 bp, Artificial
  Probe
cggggacctcaacgtgtggcgccca

SEQ ID NO: 328680 - DNA, 25 bp, Artificial
  Probe
cgtgtggcgcccagacggtcaaatg

SEQ ID NO: 328681 - DNA, 25 bp, Artificial
  Probe
tcttcggggacctcaacgtgtggcg

SEQ ID NO: 328682 - DNA, 25 bp, Artificial
  Probe
tacagccaaatcagggatgtgtctc

SEQ ID NO: 328683 - DNA, 25 bp, Artificial
  Probe
tgtggcgcccagacggtcaaatgcc

SEQ ID NO: 328684 - DNA, 25 bp, Artificial
  Probe
ggcaactgctccattccctggcagg

SEQ ID NO: 328685 - DNA, 25 bp, Artificial
  Probe
acattcaggatgtgggtgccttttc

SEQ ID NO: 328686 - DNA, 25 bp, Artificial
  Probe
tttttgacaaagcagacacagaatt

SEQ ID NO: 328687 - DNA, 25 bp, Artificial
  Probe
tccatccaggtcaccatgcaactgt

SEQ ID NO: 328688 - DNA, 25 bp, Artificial
  Probe
gcagacacagaattcttccaagaat

SEQ ID NO: 328689 - DNA, 25 bp, Artificial
  Probe
gacacagaattcttccaagaattcg

SEQ ID NO: 328690 - DNA, 25 bp, Artificial
  Probe
ggcagcccctacagccaaatcaggg

SEQ ID NO: 328691 - DNA, 25 bp, Artificial
  Probe
ccgttcatcccagactctaggactg

SEQ ID NO: 328692 - DNA, 25 bp, Artificial
  Probe
tgtgtctcatctcctagcctagtgt

SEQ ID NO: 328693 - DNA, 25 bp, Artificial
  Probe
tcttccaagaattcgcctccggcaa

SEQ ID NO: 328694 - DNA, 25 bp, Artificial
  Probe
gtgtcttcacaaggagccagcaaga

SEQ ID NO: 328695 - DNA, 25 bp, Artificial
  Probe
agggatgtgtctcatctcctagcct

SEQ ID NO: 328696 - DNA, 25 bp, Artificial
  Probe
taggactgtctatgccaagaacatt

SEQ ID NO: 328697 - DNA, 25 bp, Artificial
  Probe
caggtcaccatgcaactgtgtcttc

SEQ ID NO: 328698 - DNA, 25 bp, Artificial
  Probe
caagaacattcaggatgtgggtgcc

SEQ ID NO: 328699 - DNA, 25 bp, Artificial
  Probe
agaacattcaggatgtgggtgcctt

SEQ ID NO: 328700 - DNA, 25 bp, Artificial
  Probe
atgccaagaacattcaggatgtggg

SEQ ID NO: 328701 - DNA, 25 bp, Artificial
  Probe
atcagggatgtgtctcatctcctag

SEQ ID NO: 328702 - DNA, 25 bp, Artificial
  Probe
gcccctacagccaaatcagggatgt

SEQ ID NO: 328703 - DNA, 25 bp, Artificial
  Probe
atccaggtcaccatgcaactgtgtc

SEQ ID NO: 328704 - DNA, 25 bp, Artificial
  Probe
aaatgcccgatgacatgaagggaat

SEQ ID NO: 328705 - DNA, 25 bp, Artificial
  Probe
gatgtgggtgccttttccacagtca

SEQ ID NO: 328706 - DNA, 25 bp, Artificial
  Probe
gaattcttccaagaattcgcctccg

SEQ ID NO: 328707 - DNA, 25 bp, Artificial
  Probe
tcaggatgtgggtgccttttccaca

SEQ ID NO: 328708 - DNA, 25 bp, Artificial
  Probe
agcagacacagaattcttccaagaa

SEQ ID NO: 328709 - DNA, 25 bp, Artificial
  Probe
gagagtgaccctggtgtcagcctgt

SEQ ID NO: 328710 - DNA, 25 bp, Artificial
  Probe
cagacggtcaaatgcccgatgacat

SEQ ID NO: 328711 - DNA, 25 bp, Artificial
  Probe
caccatgcaactgtgtcttcacaag

SEQ ID NO: 328712 - DNA, 25 bp, Artificial
  Probe
tgccttttccacagtcaagggtgtg

SEQ ID NO: 328713 - DNA, 25 bp, Artificial
  Probe
tgcccgatgacatgaagggaatcac

SEQ ID NO: 328714 - DNA, 25 bp, Artificial
  Probe
caaatcagggatgtgtctcatctcc

SEQ ID NO: 328715 - DNA, 25 bp, Artificial
  Probe
gcgcccagacggtcaaatgcccgat

SEQ ID NO: 328716 - DNA, 25 bp, Artificial
  Probe
gacctcaacgtgtggcgcccagacg

SEQ ID NO: 328717 - DNA, 25 bp, Artificial
  Probe
gtcaaatgcccgatgacatgaaggg

SEQ ID NO: 328718 - DNA, 25 bp, Artificial
  Probe
tgaccctggtgtcagcctgtgccca

SEQ ID NO: 328719 - DNA, 25 bp, Artificial
  Probe
actgtctatgccaagaacattcagg

SEQ ID NO: 328720 - DNA, 25 bp, Artificial
  Probe
caagaattcgcctccggcaactgct

SEQ ID NO: 328721 - DNA, 25 bp, Artificial
  Probe
gagacagctcgaagccggaatgctc

SEQ ID NO: 328722 - DNA, 25 bp, Artificial
  Probe
ctggagacagctcgaagccggaatg

SEQ ID NO: 328723 - DNA, 25 bp, Artificial
  Probe
gacaaagcagacacagaattcttcc

SEQ ID NO: 328724 - DNA, 25 bp, Artificial
  Probe
ctgtctatgccaagaacattcagga

SEQ ID NO: 328725 - DNA, 25 bp, Artificial
  Probe
ttgttgggcacaaaagcacactgag

SEQ ID NO: 328726 - DNA, 25 bp, Artificial
  Probe
aagattcctaagaaggcaccttctg

SEQ ID NO: 328727 - DNA, 25 bp, Artificial
  Probe
gctgttgttctgtcttgttgggcac

SEQ ID NO: 328728 - DNA, 25 bp, Artificial
  Probe
accaggcttttcagggttaagattg

SEQ ID NO: 328729 - DNA, 25 bp, Artificial
  Probe
taccaccaggcttttcagggttaag

SEQ ID NO: 328730 - DNA, 25 bp, Artificial
  Probe
tggctttgtccgtgcctctcctcga

SEQ ID NO: 328731 - DNA, 25 bp, Artificial
  Probe
gtcttgttgggcacaaaagcacact

SEQ ID NO: 328732 - DNA, 25 bp, Artificial
  Probe
tacctgatcaccaggctgtttaaca

SEQ ID NO: 328733 - DNA, 25 bp, Artificial
  Probe
gaaggcaccttctggctttgtccgt

SEQ ID NO: 328734 - DNA, 25 bp, Artificial
  Probe
agatatgttgctgttagcatgtcct

SEQ ID NO: 328735 - DNA, 25 bp, Artificial
  Probe
caaatcagtctttccggaaagtagt

SEQ ID NO: 328736 - DNA, 25 bp, Artificial
  Probe
gatctactgcaaatcagtctttccg

SEQ ID NO: 328737 - DNA, 25 bp, Artificial
  Probe
gtaactcatctggtaaagaagattc

SEQ ID NO: 328738 - DNA, 25 bp, Artificial
  Probe
gtcgaagatgccatgttaagtccca

SEQ ID NO: 328739 - DNA, 25 bp, Artificial
  Probe
atgttaagtcccacagggaccatct

SEQ ID NO: 328740 - DNA, 25 bp, Artificial
  Probe
aactagttaaccatgtgacctactg

SEQ ID NO: 328741 - DNA, 25 bp, Artificial
  Probe
tgatcaccaggctgtttaacatgtg

SEQ ID NO: 328742 - DNA, 25 bp, Artificial
  Probe
tgttctgtcttgttgggcacaaaag

SEQ ID NO: 328743 - DNA, 25 bp, Artificial
  Probe
ccctagagtgtcgaagatgccatgt

SEQ ID NO: 328744 - DNA, 25 bp, Artificial
  Probe
tcctaagaaggcaccttctggcttt

SEQ ID NO: 328745 - DNA, 25 bp, Artificial
  Probe
cgacaagatctactgcaaatcagtc

SEQ ID NO: 328746 - DNA, 25 bp, Artificial
  Probe
cacaaataccaccaggcttttcagg

SEQ ID NO: 328747 - DNA, 25 bp, Artificial
  Probe
cacaaaagcacactgaggattgttt

SEQ ID NO: 328748 - DNA, 25 bp, Artificial
  Probe
ctgctaggttttttaggtggctctt

SEQ ID NO: 328749 - DNA, 25 bp, Artificial
  Probe
attattactatgcatcaggtacatg

SEQ ID NO: 328750 - DNA, 25 bp, Artificial
  Probe
agaggacttgattcccccatgcaaa

SEQ ID NO: 328751 - DNA, 25 bp, Artificial
  Probe
gcatcaggtacatgggaagctgcta

SEQ ID NO: 328752 - DNA, 25 bp, Artificial
  Probe
gcgggtttgcctacggtagttagat

SEQ ID NO: 328753 - DNA, 25 bp, Artificial
  Probe
aggtggctctttggataaggaatcc

SEQ ID NO: 328754 - DNA, 25 bp, Artificial
  Probe
ccccatgcaaagtaagttatgatgt

SEQ ID NO: 328755 - DNA, 25 bp, Artificial
  Probe
tttcttgcgggtttgcctacggtag

SEQ ID NO: 328756 - DNA, 25 bp, Artificial
  Probe
cttgattcccccatgcaaagtaagt

SEQ ID NO: 328757 - DNA, 25 bp, Artificial
  Probe
ctactgctgtgttggaatcatatgg

SEQ ID NO: 328758 - DNA, 25 bp, Artificial
  Probe
aagaggacttgattcccccatgcaa

SEQ ID NO: 328759 - DNA, 25 bp, Artificial
  Probe
accttctggctttgtccgtgcctct

SEQ ID NO: 328760 - DNA, 25 bp, Artificial
  Probe
ttcttgcgggtttgcctacggtagt

SEQ ID NO: 328761 - DNA, 25 bp, Artificial
  Probe
gcaccttctggctttgtccgtgcct

SEQ ID NO: 328762 - DNA, 25 bp, Artificial
  Probe
aactcatctggtaaagaagattcct

SEQ ID NO: 328763 - DNA, 25 bp, Artificial
  Probe
ccatctagacaagaaagaggacttg

SEQ ID NO: 328764 - DNA, 25 bp, Artificial
  Probe
catgtcctcaggatgaacaaaagaa

SEQ ID NO: 328765 - DNA, 25 bp, Artificial
  Probe
ctcctcgaacgctgtcgacaagatc

SEQ ID NO: 328766 - DNA, 25 bp, Artificial
  Probe
gaatcatatggatgctacctgatca

SEQ ID NO: 328767 - DNA, 25 bp, Artificial
  Probe
agctgctaggttttttaggtggctc

SEQ ID NO: 328768 - DNA, 25 bp, Artificial
  Probe
aacatcagcaagagatatgttgctg

SEQ ID NO: 328769 - DNA, 25 bp, Artificial
  Probe
atgtggaacagacaggctgtttctt

SEQ ID NO: 328770 - DNA, 25 bp, Artificial
  Probe
gtaacatcagcaagagatatgttgc

SEQ ID NO: 328771 - DNA, 25 bp, Artificial
  Probe
gttggttgtctccagtctatcttgc

SEQ ID NO: 328772 - DNA, 25 bp, Artificial
  Probe
ggtgccctgagtcttcattccttac

SEQ ID NO: 328773 - DNA, 25 bp, Artificial
  Probe
tttattcccttccaagggttgcaca

SEQ ID NO: 328774 - DNA, 25 bp, Artificial
  Probe
ttagggtgccctgagtcttcattcc

SEQ ID NO: 328775 - DNA, 25 bp, Artificial
  Probe
ttgatccactctatagggcattggt

SEQ ID NO: 328776 - DNA, 25 bp, Artificial
  Probe
cagcataatggaacgcgggttccat

SEQ ID NO: 328777 - DNA, 25 bp, Artificial
  Probe
gcacagcataatggaacgcgggttc

SEQ ID NO: 328778 - DNA, 25 bp, Artificial
  Probe
actctatagggcattggtaccgccc

SEQ ID NO: 328779 - DNA, 25 bp, Artificial
  Probe
aacgcgggttccatccacctgtatc

SEQ ID NO: 328780 - DNA, 25 bp, Artificial
  Probe
gcgccgtattgatccactctatagg

SEQ ID NO: 328781 - DNA, 25 bp, Artificial
  Probe
ggaacgcgggttccatccacctgta

SEQ ID NO: 328782 - DNA, 25 bp, Artificial
  Probe
ccgcgccgtattgatccactctata

SEQ ID NO: 328783 - DNA, 25 bp, Artificial
  Probe
cacagcataatggaacgcgggttcc

SEQ ID NO: 328784 - DNA, 25 bp, Artificial
  Probe
tattcccttccaagggttgcacagc

SEQ ID NO: 328785 - DNA, 25 bp, Artificial
  Probe
agggtgccctgagtcttcattcctt

SEQ ID NO: 328786 - DNA, 25 bp, Artificial
  Probe
attgatccactctatagggcattgg

SEQ ID NO: 328787 - DNA, 25 bp, Artificial
  Probe
cccttccaagggttgcacagcataa

SEQ ID NO: 328788 - DNA, 25 bp, Artificial
  Probe
ggttgcacagcataatggaacgcgg

SEQ ID NO: 328789 - DNA, 25 bp, Artificial
  Probe
tccaagggttgcacagcataatgga

SEQ ID NO: 328790 - DNA, 25 bp, Artificial
  Probe
ttggttgtctccagtctatcttgcg

SEQ ID NO: 328791 - DNA, 25 bp, Artificial
  Probe
gaacgcgggttccatccacctgtat

SEQ ID NO: 328792 - DNA, 25 bp, Artificial
  Probe
gcccttgagtctcgtccctttattc

SEQ ID NO: 328793 - DNA, 25 bp, Artificial
  Probe
tggaacgcgggttccatccacctgt

SEQ ID NO: 328794 - DNA, 25 bp, Artificial
  Probe
cgcccttgagtctcgtccctttatt

SEQ ID NO: 328795 - DNA, 25 bp, Artificial
  Probe
gatccactctatagggcattggtac

SEQ ID NO: 328796 - DNA, 25 bp, Artificial
  Probe
ccttccaagggttgcacagcataat

SEQ ID NO: 328797 - DNA, 25 bp, Artificial
  Probe
gtgccctgagtcttcattccttact

SEQ ID NO: 328798 - DNA, 25 bp, Artificial
  Probe
tttagggtgccctgagtcttcattc

SEQ ID NO: 328799 - DNA, 25 bp, Artificial
  Probe
ccaagggttgcacagcataatggaa

SEQ ID NO: 328800 - DNA, 25 bp, Artificial
  Probe
ccgtattgatccactctatagggca

SEQ ID NO: 328801 - DNA, 25 bp, Artificial
  Probe
tccgcgccgtattgatccactctat

SEQ ID NO: 328802 - DNA, 25 bp, Artificial
  Probe
gggtgccctgagtcttcattcctta

SEQ ID NO: 328803 - DNA, 25 bp, Artificial
  Probe
ttgcacagcataatggaacgcgggt

SEQ ID NO: 328804 - DNA, 25 bp, Artificial
  Probe
gtatccgcgccgtattgatccactc

SEQ ID NO: 328805 - DNA, 25 bp, Artificial
  Probe
atggaacgcgggttccatccacctg

SEQ ID NO: 328806 - DNA, 25 bp, Artificial
  Probe
gtattgatccactctatagggcatt

SEQ ID NO: 328807 - DNA, 25 bp, Artificial
  Probe
gtgttggttgtctccagtctatctt

SEQ ID NO: 328808 - DNA, 25 bp, Artificial
  Probe
cccctgggtttctgtgttgtgtgtt

SEQ ID NO: 328809 - DNA, 25 bp, Artificial
  Probe
ccccctgggtttctgtgttgtgtgt

SEQ ID NO: 328810 - DNA, 25 bp, Artificial
  Probe
aagggttgcacagcataatggaacg

SEQ ID NO: 328811 - DNA, 25 bp, Artificial
  Probe
cgtattgatccactctatagggcat

SEQ ID NO: 328812 - DNA, 25 bp, Artificial
  Probe
cctcttttagggtgccctgagtctt

SEQ ID NO: 328813 - DNA, 25 bp, Artificial
  Probe
gcgcccttgagtctcgtccctttat

SEQ ID NO: 328814 - DNA, 25 bp, Artificial
  Probe
tggttgtctccagtctatcttgcga

SEQ ID NO: 328815 - DNA, 25 bp, Artificial
  Probe
cttccaagggttgcacagcataatg

SEQ ID NO: 328816 - DNA, 25 bp, Artificial
  Probe
agggttgcacagcataatggaacgc

SEQ ID NO: 328817 - DNA, 25 bp, Artificial
  Probe
ggcttctcatgacaccttgctacac

SEQ ID NO: 328818 - DNA, 25 bp, Artificial
  Probe
cccaggacgggctcttctgggctca

SEQ ID NO: 328819 - DNA, 25 bp, Artificial
  Probe
ctttcctcctcagctggtaactcag

SEQ ID NO: 328820 - DNA, 25 bp, Artificial
  Probe
tcacaggagaccagggaggtagtcc

SEQ ID NO: 328821 - DNA, 25 bp, Artificial
  Probe
actttgtggcacctgaggtgctgaa

SEQ ID NO: 328822 - DNA, 25 bp, Artificial
  Probe
atgaaggctgtgacatatggagcct

SEQ ID NO: 328823 - DNA, 25 bp, Artificial
  Probe
gatacactccatttgccaatgggcc

SEQ ID NO: 328824 - DNA, 25 bp, Artificial
  Probe
tgcagcacccgtggatcacccagaa

SEQ ID NO: 328825 - DNA, 25 bp, Artificial
  Probe
ggaggaacacccagtcccatgtgtg

SEQ ID NO: 328826 - DNA, 25 bp, Artificial
  Probe
aggaacacccagtcccatgtgtggc

SEQ ID NO: 328827 - DNA, 25 bp, Artificial
  Probe
ccggatcagcagtgggaagttcacc

SEQ ID NO: 328828 - DNA, 25 bp, Artificial
  Probe
ggagcctgggcgttctgctgtacac

SEQ ID NO: 328829 - DNA, 25 bp, Artificial
  Probe
agtcctaaaggaagcaactagccca

SEQ ID NO: 328830 - DNA, 25 bp, Artificial
  Probe
cagctcaagccaatcgagtcgtcca

SEQ ID NO: 328831 - DNA, 25 bp, Artificial
  Probe
ccgtgcgggtgtgaagtgccttcct

SEQ ID NO: 328832 - DNA, 25 bp, Artificial
  Probe
aatcgagtcgtccatcctggcccag

SEQ ID NO: 328833 - DNA, 25 bp, Artificial
  Probe
gcagtcccaggaggaacacccagtc

SEQ ID NO: 328834 - DNA, 25 bp, Artificial
  Probe
ggcccctgcagtcagaacgggcagc

SEQ ID NO: 328835 - DNA, 25 bp, Artificial
  Probe
acagagttcacaggagaccagggag

SEQ ID NO: 328836 - DNA, 25 bp, Artificial
  Probe
ctcccgtgatagctttgggactccg

SEQ ID NO: 328837 - DNA, 25 bp, Artificial
  Probe
gacgggctcttctgggctcaggctc

SEQ ID NO: 328838 - DNA, 25 bp, Artificial
  Probe
cgactttggctttgccaagcagcta

SEQ ID NO: 328839 - DNA, 25 bp, Artificial
  Probe
acagaccaagtggaatggagtccta

SEQ ID NO: 328840 - DNA, 25 bp, Artificial
  Probe
tgtgacatatggagcctgggcgttc

SEQ ID NO: 328841 - DNA, 25 bp, Artificial
  Probe
accttgctacacagccaactttgtg

SEQ ID NO: 328842 - DNA, 25 bp, Artificial
  Probe
acttagtatctaagatgctgcatgt

SEQ ID NO: 328843 - DNA, 25 bp, Artificial
  Probe
ctaagatgctgcatgtggaccccca

SEQ ID NO: 328844 - DNA, 25 bp, Artificial
  Probe
ccaagacctgcagcttgtgaagggg

SEQ ID NO: 328845 - DNA, 25 bp, Artificial
  Probe
ggatcacccagaaagacaagctccc

SEQ ID NO: 328846 - DNA, 25 bp, Artificial
  Probe
ctcacccggatcagcagtgggaagt

SEQ ID NO: 328847 - DNA, 25 bp, Artificial
  Probe
aaggaagcaactagcccagctcacc

SEQ ID NO: 328848 - DNA, 25 bp, Artificial
  Probe
agttgtcccaccaagacctgcagct

SEQ ID NO: 328849 - DNA, 25 bp, Artificial
  Probe
tttccattctgttctggggttctcg

SEQ ID NO: 328850 - DNA, 25 bp, Artificial
  Probe
tcagggctacgatgaaggctgtgac

SEQ ID NO: 328851 - DNA, 25 bp, Artificial
  Probe
catggcagctacatattctgcactc

SEQ ID NO: 328852 - DNA, 25 bp, Artificial
  Probe
ggcagctacatattctgcactcagt

SEQ ID NO: 328853 - DNA, 25 bp, Artificial
  Probe
tgccaagcagctacgggctgagaac

SEQ ID NO: 328854 - DNA, 25 bp, Artificial
  Probe
ccagctcacccgtgcgggtgtgaag

SEQ ID NO: 328855 - DNA, 25 bp, Artificial
  Probe
tgttctggggttctcgaaccacttt

SEQ ID NO: 328856 - DNA, 25 bp, Artificial
  Probe
tctgccactggacagagttcacagg

SEQ ID NO: 328857 - DNA, 25 bp, Artificial
  Probe
gggctcaggctccattgtgtgaaat

SEQ ID NO: 328858 - DNA, 25 bp, Artificial
  Probe
cccgtgatagctttgggactccgcc

SEQ ID NO: 328859 - DNA, 25 bp, Artificial
  Probe
ctttttggccattgcagtcccagga

SEQ ID NO: 328860 - DNA, 25 bp, Artificial
  Probe
gggctacgatgaaggctgtgacata

SEQ ID NO: 328861 - DNA, 25 bp, Artificial
  Probe
tgggcccctgcagtcagaacgggca

SEQ ID NO: 328862 - DNA, 25 bp, Artificial
  Probe
aggcagagtccttccagagggagca

SEQ ID NO: 328863 - DNA, 25 bp, Artificial
  Probe
cgctctcactggtgtggtcgggtct

SEQ ID NO: 328864 - DNA, 25 bp, Artificial
  Probe
gccgctctagaactagtggatcccc

SEQ ID NO: 328865 - DNA, 25 bp, Artificial
  Probe
ggctctggctagtggctctaccggt

SEQ ID NO: 328866 - DNA, 25 bp, Artificial
  Probe
agaactagtggatcccccgggctgc

SEQ ID NO: 328867 - DNA, 25 bp, Artificial
  Probe
ccggtcgctctcactggtgtggtcg

SEQ ID NO: 328868 - DNA, 25 bp, Artificial
  Probe
cggctctggctagtggctctaccgg

SEQ ID NO: 328869 - DNA, 25 bp, Artificial
  Probe
caagttggctgtgctgaaatactat

SEQ ID NO: 328870 - DNA, 25 bp, Artificial
  Probe
ggctagtggctctaccggtcgctct

SEQ ID NO: 328871 - DNA, 25 bp, Artificial
  Probe
tgatcagcagaggttgatctttgct

SEQ ID NO: 328872 - DNA, 25 bp, Artificial
  Probe
gcggccgctctagaactagtggatc

SEQ ID NO: 328873 - DNA, 25 bp, Artificial
  Probe
tctagaactagtggatcccccgggc

SEQ ID NO: 328874 - DNA, 25 bp, Artificial
  Probe
tcaagttggctgtgctgaaatacta

SEQ ID NO: 328875 - DNA, 25 bp, Artificial
  Probe
ctggctagtggctctaccggtcgct

SEQ ID NO: 328876 - DNA, 25 bp, Artificial
  Probe
ggcggccgctctagaactagtggat

SEQ ID NO: 328877 - DNA, 25 bp, Artificial
  Probe
tcgctctcactggtgtggtcgggtc

SEQ ID NO: 328878 - DNA, 25 bp, Artificial
  Probe
tggcggccgctctagaactagtgga

SEQ ID NO: 328879 - DNA, 25 bp, Artificial
  Probe
ctctagaactagtggatcccccggg

SEQ ID NO: 328880 - DNA, 25 bp, Artificial
  Probe
aaagctggagctccaccgcggtggc

SEQ ID NO: 328881 - DNA, 25 bp, Artificial
  Probe
ctgatcagcagaggttgatctttgc

SEQ ID NO: 328882 - DNA, 25 bp, Artificial
  Probe
gctctagaactagtggatcccccgg

SEQ ID NO: 328883 - DNA, 25 bp, Artificial
  Probe
ctagaactagtggatcccccgggct

SEQ ID NO: 328884 - DNA, 25 bp, Artificial
  Probe
ccggctctggctagtggctctaccg

SEQ ID NO: 328885 - DNA, 25 bp, Artificial
  Probe
cctgatcagcagaggttgatctttg

SEQ ID NO: 328886 - DNA, 25 bp, Artificial
  Probe
tctaccggtcgctctcactggtgtg

SEQ ID NO: 328887 - DNA, 25 bp, Artificial
  Probe
accggtcgctctcactggtgtggtc

SEQ ID NO: 328888 - DNA, 25 bp, Artificial
  Probe
tagaactagtggatcccccgggctg

SEQ ID NO: 328889 - DNA, 25 bp, Artificial
  Probe
ggccgctctagaactagtggatccc

SEQ ID NO: 328890 - DNA, 25 bp, Artificial
  Probe
tggctctaccggtcgctctcactgg

SEQ ID NO: 328891 - DNA, 25 bp, Artificial
  Probe
gctagtggctctaccggtcgctctc

SEQ ID NO: 328892 - DNA, 25 bp, Artificial
  Probe
taccggtcgctctcactggtgtggt

SEQ ID NO: 328893 - DNA, 25 bp, Artificial
  Probe
cggccgctctagaactagtggatcc

SEQ ID NO: 328894 - DNA, 25 bp, Artificial
  Probe
cgctctagaactagtggatcccccg

SEQ ID NO: 328895 - DNA, 25 bp, Artificial
  Probe
tggctagtggctctaccggtcgctc

SEQ ID NO: 328896 - DNA, 25 bp, Artificial
  Probe
tcagcagaggttgatctttgctggt

SEQ ID NO: 328897 - DNA, 25 bp, Artificial
  Probe
ggtcaagttggctgtgctgaaatac

SEQ ID NO: 328898 - DNA, 25 bp, Artificial
  Probe
ctaccggtcgctctcactggtgtgg

SEQ ID NO: 328899 - DNA, 25 bp, Artificial
  Probe
gtcaagttggctgtgctgaaatact

SEQ ID NO: 328900 - DNA, 25 bp, Artificial
  Probe
cagaggttgatctttgctggtaagc

SEQ ID NO: 328901 - DNA, 25 bp, Artificial
  Probe
atcagcagaggttgatctttgctgg

SEQ ID NO: 328902 - DNA, 25 bp, Artificial
  Probe
tcctgatcagcagaggttgatcttt

SEQ ID NO: 328903 - DNA, 25 bp, Artificial
  Probe
gccgatataaccatgttcgagactg

SEQ ID NO: 328904 - DNA, 25 bp, Artificial
  Probe
aattccccttatcatgaggtcgaat

SEQ ID NO: 328905 - DNA, 25 bp, Artificial
  Probe
ccttatcatgaggtcgaattacaat

SEQ ID NO: 328906 - DNA, 25 bp, Artificial
  Probe
caattccccttatcatgaggtcgaa

SEQ ID NO: 328907 - DNA, 25 bp, Artificial
  Probe
ccccttatcatgaggtcgaattaca

SEQ ID NO: 328908 - DNA, 25 bp, Artificial
  Probe
attacaatttcccttggccgccgat

SEQ ID NO: 328909 - DNA, 25 bp, Artificial
  Probe
ttggccgccgatataaccatgttcg

SEQ ID NO: 328910 - DNA, 25 bp, Artificial
  Probe
gaattacaatttcccttggccgccg

SEQ ID NO: 328911 - DNA, 25 bp, Artificial
  Probe
cccttggccgccgatataaccatgt

SEQ ID NO: 328912 - DNA, 25 bp, Artificial
  Probe
ccttggccgccgatataaccatgtt

SEQ ID NO: 328913 - DNA, 25 bp, Artificial
  Probe
gtcgaattacaatttcccttggccg

SEQ ID NO: 328914 - DNA, 25 bp, Artificial
  Probe
cccaattccccttatcatgaggtcg

SEQ ID NO: 328915 - DNA, 25 bp, Artificial
  Probe
cgccgatataaccatgttcgagact

SEQ ID NO: 328916 - DNA, 25 bp, Artificial
  Probe
gccgccgatataaccatgttcgaga

SEQ ID NO: 328917 - DNA, 25 bp, Artificial
  Probe
ccgccgatataaccatgttcgagac

SEQ ID NO: 328918 - DNA, 25 bp, Artificial
  Probe
ttcccttggccgccgatataaccat

SEQ ID NO: 328919 - DNA, 25 bp, Artificial
  Probe
acaatttcccttggccgccgatata

SEQ ID NO: 328920 - DNA, 25 bp, Artificial
  Probe
caatttcccttggccgccgatataa

SEQ ID NO: 328921 - DNA, 25 bp, Artificial
  Probe
tccccttatcatgaggtcgaattac

SEQ ID NO: 328922 - DNA, 25 bp, Artificial
  Probe
cttatcatgaggtcgaattacaatt

SEQ ID NO: 328923 - DNA, 25 bp, Artificial
  Probe
ttccccttatcatgaggtcgaatta

SEQ ID NO: 328924 - DNA, 25 bp, Artificial
  Probe
ttacaatttcccttggccgccgata

SEQ ID NO: 328925 - DNA, 25 bp, Artificial
  Probe
ccaattccccttatcatgaggtcga

SEQ ID NO: 328926 - DNA, 25 bp, Artificial
  Probe
tcccttggccgccgatataaccatg

SEQ ID NO: 328927 - DNA, 25 bp, Artificial
  Probe
ggccgccgatataaccatgttcgag

SEQ ID NO: 328928 - DNA, 25 bp, Artificial
  Probe
ccgatataaccatgttcgagactgg

SEQ ID NO: 328929 - DNA, 25 bp, Artificial
  Probe
ttatcatgaggtcgaattacaattt

SEQ ID NO: 328930 - DNA, 25 bp, Artificial
  Probe
tttcccttggccgccgatataacca

SEQ ID NO: 328931 - DNA, 25 bp, Artificial
  Probe
tacaatttcccttggccgccgatat

SEQ ID NO: 328932 - DNA, 25 bp, Artificial
  Probe
cccttatcatgaggtcgaattacaa

SEQ ID NO: 328933 - DNA, 25 bp, Artificial
  Probe
tcgaattacaatttcccttggccgc

SEQ ID NO: 328934 - DNA, 25 bp, Artificial
  Probe
attccccttatcatgaggtcgaatt

SEQ ID NO: 328935 - DNA, 25 bp, Artificial
  Probe
tggccgccgatataaccatgttcga

SEQ ID NO: 328936 - DNA, 25 bp, Artificial
  Probe
cttggccgccgatataaccatgttc

SEQ ID NO: 328937 - DNA, 25 bp, Artificial
  Probe
gtaggacggacatctgtctgatagc

SEQ ID NO: 328938 - DNA, 25 bp, Artificial
  Probe
tttcttgttcttctaagaagagcaa

SEQ ID NO: 328939 - DNA, 25 bp, Artificial
  Probe
gagactactaggtcatcgcggagca

SEQ ID NO: 328940 - DNA, 25 bp, Artificial
  Probe
atcgcggagcaggaaacggacccat

SEQ ID NO: 328941 - DNA, 25 bp, Artificial
  Probe
caggcttgtctctcgggtccgagct

SEQ ID NO: 328942 - DNA, 25 bp, Artificial
  Probe
ttgtctctcgggtccgagcttcctc

SEQ ID NO: 328943 - DNA, 25 bp, Artificial
  Probe
catctgtctgatagccatctcgtgc

SEQ ID NO: 328944 - DNA, 25 bp, Artificial
  Probe
ttcctcggagatcaagcaagaggag

SEQ ID NO: 328945 - DNA, 25 bp, Artificial
  Probe
ttggatattcggtaggacggacatc

SEQ ID NO: 328946 - DNA, 25 bp, Artificial
  Probe
ctcgtgctcgactggctgaacaggc

SEQ ID NO: 328947 - DNA, 25 bp, Artificial
  Probe
aggagactactaggtcatcgcggag

SEQ ID NO: 328948 - DNA, 25 bp, Artificial
  Probe
acggacatctgtctgatagccatct

SEQ ID NO: 328949 - DNA, 25 bp, Artificial
  Probe
gacggacatctgtctgatagccatc

SEQ ID NO: 328950 - DNA, 25 bp, Artificial
  Probe
ttttcttgttcttctaagaagagca

SEQ ID NO: 328951 - DNA, 25 bp, Artificial
  Probe
agggccagtatcatctgaggctgca

SEQ ID NO: 328952 - DNA, 25 bp, Artificial
  Probe
agcaggaaacggacccatgacttgg

SEQ ID NO: 328953 - DNA, 25 bp, Artificial
  Probe
gggtccgagcttcctcggagatcaa

SEQ ID NO: 328954 - DNA, 25 bp, Artificial
  Probe
gacatctgtctgatagccatctcgt

SEQ ID NO: 328955 - DNA, 25 bp, Artificial
  Probe
ctctcgggtccgagcttcctcggag

SEQ ID NO: 328956 - DNA, 25 bp, Artificial
  Probe
gagcttcctcggagatcaagcaaga

SEQ ID NO: 328957 - DNA, 25 bp, Artificial
  Probe
actactaggtcatcgcggagcagga

SEQ ID NO: 328958 - DNA, 25 bp, Artificial
  Probe
ccatctcgtgctcgactggctgaac

SEQ ID NO: 328959 - DNA, 25 bp, Artificial
  Probe
tcggtaggacggacatctgtctgat

SEQ ID NO: 328960 - DNA, 25 bp, Artificial
  Probe
gactggctgaacaggcttgtctctc

SEQ ID NO: 328961 - DNA, 25 bp, Artificial
  Probe
cagtatcatctgaggctgcagcaag

SEQ ID NO: 328962 - DNA, 25 bp, Artificial
  Probe
tctcgtgctcgactggctgaacagg

SEQ ID NO: 328963 - DNA, 25 bp, Artificial
  Probe
ttcttctaagaagagcaattcagca

SEQ ID NO: 328964 - DNA, 25 bp, Artificial
  Probe
atattcggtaggacggacatctgtc

SEQ ID NO: 328965 - DNA, 25 bp, Artificial
  Probe
atctcgtgctcgactggctgaacag

SEQ ID NO: 328966 - DNA, 25 bp, Artificial
  Probe
atcatctgaggctgcagcaaggcgc

SEQ ID NO: 328967 - DNA, 25 bp, Artificial
  Probe
ggatattcggtaggacggacatctg

SEQ ID NO: 328968 - DNA, 25 bp, Artificial
  Probe
ctcggagatcaagcaagaggagact

SEQ ID NO: 328969 - DNA, 25 bp, Artificial
  Probe
ccagggccagtatcatctgaggctg

SEQ ID NO: 328970 - DNA, 25 bp, Artificial
  Probe
gcaattcagcaactccagaaggggc

SEQ ID NO: 328971 - DNA, 25 bp, Artificial
  Probe
tctgaggctgcagcaaggcgccagc

SEQ ID NO: 328972 - DNA, 25 bp, Artificial
  Probe
ccagtatcatctgaggctgcagcaa

SEQ ID NO: 328973 - DNA, 25 bp, Artificial
  Probe
gtccgagcttcctcggagatcaagc

SEQ ID NO: 328974 - DNA, 25 bp, Artificial
  Probe
gctgaacaggcttgtctctcgggtc

SEQ ID NO: 328975 - DNA, 25 bp, Artificial
  Probe
aagagcaattcagcaactccagaag

SEQ ID NO: 328976 - DNA, 25 bp, Artificial
  Probe
tctgatagccatctcgtgctcgact

SEQ ID NO: 328977 - DNA, 25 bp, Artificial
  Probe
tgtctgatagccatctcgtgctcga

SEQ ID NO: 328978 - DNA, 25 bp, Artificial
  Probe
tgaacaggcttgtctctcgggtccg

SEQ ID NO: 328979 - DNA, 25 bp, Artificial
  Probe
gtcatcgcggagcaggaaacggacc

SEQ ID NO: 328980 - DNA, 25 bp, Artificial
  Probe
gagcaattcagcaactccagaaggg

SEQ ID NO: 328981 - DNA, 25 bp, Artificial
  Probe
cctcggagatcaagcaagaggagac

SEQ ID NO: 328982 - DNA, 25 bp, Artificial
  Probe
aggacggacatctgtctgatagcca

SEQ ID NO: 328983 - DNA, 25 bp, Artificial
  Probe
tttggtacaattcctttgtctaatg

SEQ ID NO: 328984 - DNA, 25 bp, Artificial
  Probe
tggcttttaacttcatcgttaacga

SEQ ID NO: 328985 - DNA, 25 bp, Artificial
  Probe
catgttctttggaatggcttttaac

SEQ ID NO: 328986 - DNA, 25 bp, Artificial
  Probe
tcttcctcggccatggagtcattct

SEQ ID NO: 328987 - DNA, 25 bp, Artificial
  Probe
catcgttaacgacagtcggaaaagg

SEQ ID NO: 328988 - DNA, 25 bp, Artificial
  Probe
acgacagtcggaaaaggccagtctg

SEQ ID NO: 328989 - DNA, 25 bp, Artificial
  Probe
ctaaaatggccactaaggatccaga

SEQ ID NO: 328990 - DNA, 25 bp, Artificial
  Probe
ccagaagctggcttctgaaacgtct

SEQ ID NO: 328991 - DNA, 25 bp, Artificial
  Probe
actaaaatggccactaaggatccag

SEQ ID NO: 328992 - DNA, 25 bp, Artificial
  Probe
ccctacatttctggattatgtccgg

SEQ ID NO: 328993 - DNA, 25 bp, Artificial
  Probe
tctcaagagtggtatgctcgacagc

SEQ ID NO: 328994 - DNA, 25 bp, Artificial
  Probe
aaaggccagtctggaacatcatggt

SEQ ID NO: 328995 - DNA, 25 bp, Artificial
  Probe
ctttggaatggcttttaacttcatc

SEQ ID NO: 328996 - DNA, 25 bp, Artificial
  Probe
gtcattctgtgcttttactctcaag

SEQ ID NO: 328997 - DNA, 25 bp, Artificial
  Probe
ctcttcatgttctttggaatggctt

SEQ ID NO: 328998 - DNA, 25 bp, Artificial
  Probe
aggatccagaagctggcttctgaaa

SEQ ID NO: 328999 - DNA, 25 bp, Artificial
  Probe
ataatactaaaatggccactaagga

SEQ ID NO: 329000 - DNA, 25 bp, Artificial
  Probe
accctacatttctggattatgtccg

SEQ ID NO: 329001 - DNA, 25 bp, Artificial
  Probe
gattacagaagacatctccatgtct

SEQ ID NO: 329002 - DNA, 25 bp, Artificial
  Probe
tgagctacttctacccagtgctctt

SEQ ID NO: 329003 - DNA, 25 bp, Artificial
  Probe
ttaacttcatcgttaacgacagtcg

SEQ ID NO: 329004 - DNA, 25 bp, Artificial
  Probe
ctagactagtgagtccatagtagaa

SEQ ID NO: 329005 - DNA, 25 bp, Artificial
  Probe
gctgtctgcctgagctacttctacc

SEQ ID NO: 329006 - DNA, 25 bp, Artificial
  Probe
ggaaaaggccagtctggaacatcat

SEQ ID NO: 329007 - DNA, 25 bp, Artificial
  Probe
gtatcctttggtacaattcctttgt

SEQ ID NO: 329008 - DNA, 25 bp, Artificial
  Probe
ttacttagaagtatcctttggtaca

SEQ ID NO: 329009 - DNA, 25 bp, Artificial
  Probe
aaatggccactaaggatccagaagc

SEQ ID NO: 329010 - DNA, 25 bp, Artificial
  Probe
gaagtatcctttggtacaattcctt

SEQ ID NO: 329011 - DNA, 25 bp, Artificial
  Probe
tctgaagaaccctacatttctggat

SEQ ID NO: 329012 - DNA, 25 bp, Artificial
  Probe
tcggaaaaggccagtctggaacatc

SEQ ID NO: 329013 - DNA, 25 bp, Artificial
  Probe
ctacttctacccagtgctcttcgtg

SEQ ID NO: 329014 - DNA, 25 bp, Artificial
  Probe
cttcgtgctcttcatgttctttgga

SEQ ID NO: 329015 - DNA, 25 bp, Artificial
  Probe
gaatggcttttaacttcatcgttaa

SEQ ID NO: 329016 - DNA, 25 bp, Artificial
  Probe
actagtgagtccatagtagaagtac

SEQ ID NO: 329017 - DNA, 25 bp, Artificial
  Probe
aatgtgtagtgactttccttgttct

SEQ ID NO: 329018 - DNA, 25 bp, Artificial
  Probe
tagaagtactgatctctactgataa

SEQ ID NO: 329019 - DNA, 25 bp, Artificial
  Probe
tacccagtgctcttcgtgctcttca

SEQ ID NO: 329020 - DNA, 25 bp, Artificial
  Probe
tctttgaagttacttagaagtatcc

SEQ ID NO: 329021 - DNA, 25 bp, Artificial
  Probe
agtgctcttcgtgctcttcatgttc

SEQ ID NO: 329022 - DNA, 25 bp, Artificial
  Probe
catctccatgtctggccaagatttt

SEQ ID NO: 329023 - DNA, 25 bp, Artificial
  Probe
gaagtactgatctctactgataata

SEQ ID NO: 329024 - DNA, 25 bp, Artificial
  Probe
tttgtctaatgtgtagtgactttcc

SEQ ID NO: 329025 - DNA, 25 bp, Artificial
  Probe
ctagtgagtccatagtagaagtact

SEQ ID NO: 329026 - DNA, 25 bp, Artificial
  Probe
aaggccagtctggaacatcatggtt

SEQ ID NO: 329027 - DNA, 25 bp, Artificial
  Probe
atggcttttaacttcatcgttaacg

SEQ ID NO: 329028 - DNA, 25 bp, Artificial
  Probe
tctctgaagtgctaggattacagaa

SEQ ID NO: 329029 - DNA, 25 bp, Artificial
  Probe
gtagcttggccccatgcctttgtat

SEQ ID NO: 329030 - DNA, 25 bp, Artificial
  Probe
ttttatagtctggagtttgagggtt

SEQ ID NO: 329031 - DNA, 25 bp, Artificial
  Probe
acataacatgtttttatagtctgga

SEQ ID NO: 329032 - DNA, 25 bp, Artificial
  Probe
caaatagactgtgtagcttggcccc

SEQ ID NO: 329033 - DNA, 25 bp, Artificial
  Probe
actgtgtagcttggccccatgcctt

SEQ ID NO: 329034 - DNA, 25 bp, Artificial
  Probe
tggccccatgcctttgtatctaggg

SEQ ID NO: 329035 - DNA, 25 bp, Artificial
  Probe
agcttggccccatgcctttgtatct

SEQ ID NO: 329036 - DNA, 25 bp, Artificial
  Probe
aatgtaattcagtgtttgtttattg

SEQ ID NO: 329037 - DNA, 25 bp, Artificial
  Probe
agactgtgtagcttggccccatgcc

SEQ ID NO: 329038 - DNA, 25 bp, Artificial
  Probe
agaaagcatcagggtggccaggttg

SEQ ID NO: 329039 - DNA, 25 bp, Artificial
  Probe
tggcctgtggtatatgagaaagcat

SEQ ID NO: 329040 - DNA, 25 bp, Artificial
  Probe
ctaggggtggcctgtggtatatgag

SEQ ID NO: 329041 - DNA, 25 bp, Artificial
  Probe
catgtttttatagtctggagtttga

SEQ ID NO: 329042 - DNA, 25 bp, Artificial
  Probe
gggtggccaggttgggagacacata

SEQ ID NO: 329043 - DNA, 25 bp, Artificial
  Probe
ttggccccatgcctttgtatctagg

SEQ ID NO: 329044 - DNA, 25 bp, Artificial
  Probe
aatagactgtgtagcttggccccat

SEQ ID NO: 329045 - DNA, 25 bp, Artificial
  Probe
atagactgtgtagcttggccccatg

SEQ ID NO: 329046 - DNA, 25 bp, Artificial
  Probe
taacatgtttttatagtctggagtt

SEQ ID NO: 329047 - DNA, 25 bp, Artificial
  Probe
gctccaaatagactgtgtagcttgg

SEQ ID NO: 329048 - DNA, 25 bp, Artificial
  Probe
agtgtttgtttattggctgcctttc

SEQ ID NO: 329049 - DNA, 25 bp, Artificial
  Probe
cccatgcctttgtatctaggggtgg

SEQ ID NO: 329050 - DNA, 25 bp, Artificial
  Probe
attcagtgtttgtttattggctgcc

SEQ ID NO: 329051 - DNA, 25 bp, Artificial
  Probe
tggctccaaatagactgtgtagctt

SEQ ID NO: 329052 - DNA, 25 bp, Artificial
  Probe
tagactgtgtagcttggccccatgc

SEQ ID NO: 329053 - DNA, 25 bp, Artificial
  Probe
tccaaatagactgtgtagcttggcc

SEQ ID NO: 329054 - DNA, 25 bp, Artificial
  Probe
ggccccatgcctttgtatctagggg

SEQ ID NO: 329055 - DNA, 25 bp, Artificial
  Probe
gccccatgcctttgtatctaggggt

SEQ ID NO: 329056 - DNA, 25 bp, Artificial
  Probe
gggtggcctgtggtatatgagaaag

SEQ ID NO: 329057 - DNA, 25 bp, Artificial
  Probe
aaatagactgtgtagcttggcccca

SEQ ID NO: 329058 - DNA, 25 bp, Artificial
  Probe
gcctttgtatctaggggtggcctgt

SEQ ID NO: 329059 - DNA, 25 bp, Artificial
  Probe
gactgtgtagcttggccccatgcct

SEQ ID NO: 329060 - DNA, 25 bp, Artificial
  Probe
gcatcagggtggccaggttgggaga

SEQ ID NO: 329061 - DNA, 25 bp, Artificial
  Probe
tatagtctggagtttgagggtttaa

SEQ ID NO: 329062 - DNA, 25 bp, Artificial
  Probe
tgtttttatagtctggagtttgagg

SEQ ID NO: 329063 - DNA, 25 bp, Artificial
  Probe
ttcagtgtttgtttattggctgcct

SEQ ID NO: 329064 - DNA, 25 bp, Artificial
  Probe
cacataacatgtttttatagtctgg

SEQ ID NO: 329065 - DNA, 25 bp, Artificial
  Probe
ggctccaaatagactgtgtagcttg

SEQ ID NO: 329066 - DNA, 25 bp, Artificial
  Probe
tgtatctaggggtggcctgtggtat

SEQ ID NO: 329067 - DNA, 25 bp, Artificial
  Probe
tagcttggccccatgcctttgtatc

SEQ ID NO: 329068 - DNA, 25 bp, Artificial
  Probe
tggccaggttgggagacacataaca

SEQ ID NO: 329069 - DNA, 25 bp, Artificial
  Probe
gcttggccccatgcctttgtatcta

SEQ ID NO: 329070 - DNA, 25 bp, Artificial
  Probe
gagacacataacatgtttttatagt

SEQ ID NO: 329071 - DNA, 25 bp, Artificial
  Probe
tgtttgtttattggctgcctttctt

SEQ ID NO: 329072 - DNA, 25 bp, Artificial
  Probe
ctccaaatagactgtgtagcttggc

SEQ ID NO: 329073 - DNA, 25 bp, Artificial
  Probe
ccccatgcctttgtatctaggggtg

SEQ ID NO: 329074 - DNA, 25 bp, Artificial
  Probe
ctggctccaaatagactgtgtagct

SEQ ID NO: 329075 - DNA, 25 bp, Artificial
  Probe
ttgagggtcggcacaaggacatcgt

SEQ ID NO: 329076 - DNA, 25 bp, Artificial
  Probe
gatttccaagcaagccctcagcgag

SEQ ID NO: 329077 - DNA, 25 bp, Artificial
  Probe
gaagtatcagggtcaggctcgaaag

SEQ ID NO: 329078 - DNA, 25 bp, Artificial
  Probe
ctccatgacatgtttatggacatcg

SEQ ID NO: 329079 - DNA, 25 bp, Artificial
  Probe
agtatcagggtcaggctcgaaagaa

SEQ ID NO: 329080 - DNA, 25 bp, Artificial
  Probe
tgcacacggtggaccatgtggagaa

SEQ ID NO: 329081 - DNA, 25 bp, Artificial
  Probe
tcagcgagattgagggtcggcacaa

SEQ ID NO: 329082 - DNA, 25 bp, Artificial
  Probe
gcatccaacggcagcttgaaattac

SEQ ID NO: 329083 - DNA, 25 bp, Artificial
  Probe
ggtggacttccgtgaacgcagcaaa

SEQ ID NO: 329084 - DNA, 25 bp, Artificial
  Probe
tgactcccagatttccaagcaagcc

SEQ ID NO: 329085 - DNA, 25 bp, Artificial
  Probe
tcggcacaaggacatcgtgaggctg

SEQ ID NO: 329086 - DNA, 25 bp, Artificial
  Probe
aggagctccatgacatgtttatgga

SEQ ID NO: 329087 - DNA, 25 bp, Artificial
  Probe
aatgtcatgcacacggtggaccatg

SEQ ID NO: 329088 - DNA, 25 bp, Artificial
  Probe
acccagccatcttcacttctgggat

SEQ ID NO: 329089 - DNA, 25 bp, Artificial
  Probe
ttcacttctgggatcattgactccc

SEQ ID NO: 329090 - DNA, 25 bp, Artificial
  Probe
cagatttccaagcaagccctcagcg

SEQ ID NO: 329091 - DNA, 25 bp, Artificial
  Probe
gaaatcttggcctgaccactcttgt

SEQ ID NO: 329092 - DNA, 25 bp, Artificial
  Probe
tctccagatgggaacaaagattaaa

SEQ ID NO: 329093 - DNA, 25 bp, Artificial
  Probe
cctaaggggctgctgcactgaaatc

SEQ ID NO: 329094 - DNA, 25 bp, Artificial
  Probe
tccgttgggctgaaataagagtggc

SEQ ID NO: 329095 - DNA, 25 bp, Artificial
  Probe
aagccctcagcgagattgagggtcg

SEQ ID NO: 329096 - DNA, 25 bp, Artificial
  Probe
tcgtgaggctggagagcagcatcaa

SEQ ID NO: 329097 - DNA, 25 bp, Artificial
  Probe
tggacttccgtgaacgcagcaaagg

SEQ ID NO: 329098 - DNA, 25 bp, Artificial
  Probe
gagtggcaacccagccatcttcact

SEQ ID NO: 329099 - DNA, 25 bp, Artificial
  Probe
gctccatgacatgtttatggacatc

SEQ ID NO: 329100 - DNA, 25 bp, Artificial
  Probe
agcatcaaggagctccatgacatgt

SEQ ID NO: 329101 - DNA, 25 bp, Artificial
  Probe
agccatcttcacttctgggatcatt

SEQ ID NO: 329102 - DNA, 25 bp, Artificial
  Probe
aagagccatgaagtatcagggtcag

SEQ ID NO: 329103 - DNA, 25 bp, Artificial
  Probe
cacaggtggacttccgtgaacgcag

SEQ ID NO: 329104 - DNA, 25 bp, Artificial
  Probe
caaggagctccatgacatgtttatg

SEQ ID NO: 329105 - DNA, 25 bp, Artificial
  Probe
gcactgaaatcttggcctgaccact

SEQ ID NO: 329106 - DNA, 25 bp, Artificial
  Probe
agagccatgaagtatcagggtcagg

SEQ ID NO: 329107 - DNA, 25 bp, Artificial
  Probe
agagcagcatcaaggagctccatga

SEQ ID NO: 329108 - DNA, 25 bp, Artificial
  Probe
agcttgaaattactggcaagaaaac

SEQ ID NO: 329109 - DNA, 25 bp, Artificial
  Probe
atgcacacggtggaccatgtggaga

SEQ ID NO: 329110 - DNA, 25 bp, Artificial
  Probe
cactcttgtctccagatgggaacaa

SEQ ID NO: 329111 - DNA, 25 bp, Artificial
  Probe
cagggtcaggctcgaaagaaattga

SEQ ID NO: 329112 - DNA, 25 bp, Artificial
  Probe
gattaaatggccttcctgagaatga

SEQ ID NO: 329113 - DNA, 25 bp, Artificial
  Probe
cggcagcttgaaattactggcaaga

SEQ ID NO: 329114 - DNA, 25 bp, Artificial
  Probe
ctggagagcagcatcaaggagctcc

SEQ ID NO: 329115 - DNA, 25 bp, Artificial
  Probe
gtcggcacaaggacatcgtgaggct

SEQ ID NO: 329116 - DNA, 25 bp, Artificial
  Probe
agttgaatgtcatgcacacggtgga

SEQ ID NO: 329117 - DNA, 25 bp, Artificial
  Probe
tcagggtcaggctcgaaagaaattg

SEQ ID NO: 329118 - DNA, 25 bp, Artificial
  Probe
ccctcagcgagattgagggtcggca

SEQ ID NO: 329119 - DNA, 25 bp, Artificial
  Probe
cacttctgggatcattgactcccag

SEQ ID NO: 329120 - DNA, 25 bp, Artificial
  Probe
catcttcacttctgggatcattgac

SEQ ID NO: 329121 - DNA, 25 bp, Artificial
  Probe
gatgatcaatcgtatcgaaaagaac

SEQ ID NO: 329122 - DNA, 25 bp, Artificial
  Probe
gaatgagatctctgcgcgacacagt

SEQ ID NO: 329123 - DNA, 25 bp, Artificial
  Probe
gactatgtggaacgtgggcaagaac

SEQ ID NO: 329124 - DNA, 25 bp, Artificial
  Probe
cctgaatgagatctctgcgcgacac

SEQ ID NO: 329125 - DNA, 25 bp, Artificial
  Probe
tctgcgcgacacagtgagatccagc

SEQ ID NO: 329126 - DNA, 25 bp, Artificial
  Probe
cagtgagatccagcagttggagcgc

SEQ ID NO: 329127 - DNA, 25 bp, Artificial
  Probe
gcgacacagtgagatccagcagttg

SEQ ID NO: 329128 - DNA, 25 bp, Artificial
  Probe
aggacacacaggtgacccggcaggc

SEQ ID NO: 329129 - DNA, 25 bp, Artificial
  Probe
atctctgcgcgacacagtgagatcc

SEQ ID NO: 329130 - DNA, 25 bp, Artificial
  Probe
tgcgcgacacagtgagatccagcag

SEQ ID NO: 329131 - DNA, 25 bp, Artificial
  Probe
ctgaaggacacacaggtgacccggc

SEQ ID NO: 329132 - DNA, 25 bp, Artificial
  Probe
ctatgtggaacgtgggcaagaacat

SEQ ID NO: 329133 - DNA, 25 bp, Artificial
  Probe
agtgagatccagcagttggagcgca

SEQ ID NO: 329134 - DNA, 25 bp, Artificial
  Probe
ggacacacaggtgacccggcaggcc

SEQ ID NO: 329135 - DNA, 25 bp, Artificial
  Probe
ccctgaatgagatctctgcgcgaca

SEQ ID NO: 329136 - DNA, 25 bp, Artificial
  Probe
cgcgacacagtgagatccagcagtt

SEQ ID NO: 329137 - DNA, 25 bp, Artificial
  Probe
aggtgacccggcaggccctgaatga

SEQ ID NO: 329138 - DNA, 25 bp, Artificial
  Probe
caggccctgaatgagatctctgcgc

SEQ ID NO: 329139 - DNA, 25 bp, Artificial
  Probe
tactgaaggacacacaggtgacccg

SEQ ID NO: 329140 - DNA, 25 bp, Artificial
  Probe
gaaggacacacaggtgacccggcag

SEQ ID NO: 329141 - DNA, 25 bp, Artificial
  Probe
aggccctgaatgagatctctgcgcg

SEQ ID NO: 329142 - DNA, 25 bp, Artificial
  Probe
tgaatgagatctctgcgcgacacag

SEQ ID NO: 329143 - DNA, 25 bp, Artificial
  Probe
gacacagtgagatccagcagttgga

SEQ ID NO: 329144 - DNA, 25 bp, Artificial
  Probe
tctctgcgcgacacagtgagatcca

SEQ ID NO: 329145 - DNA, 25 bp, Artificial
  Probe
cggcaggccctgaatgagatctctg

SEQ ID NO: 329146 - DNA, 25 bp, Artificial
  Probe
gcgcgacacagtgagatccagcagt

SEQ ID NO: 329147 - DNA, 25 bp, Artificial
  Probe
actgaaggacacacaggtgacccgg

SEQ ID NO: 329148 - DNA, 25 bp, Artificial
  Probe
ctgcgcgacacagtgagatccagca

SEQ ID NO: 329149 - DNA, 25 bp, Artificial
  Probe
acagtgagatccagcagttggagcg

SEQ ID NO: 329150 - DNA, 25 bp, Artificial
  Probe
acacagtgagatccagcagttggag

SEQ ID NO: 329151 - DNA, 25 bp, Artificial
  Probe
aaggacacacaggtgacccggcagg

SEQ ID NO: 329152 - DNA, 25 bp, Artificial
  Probe
actatgtggaacgtgggcaagaaca

SEQ ID NO: 329153 - DNA, 25 bp, Artificial
  Probe
ctgaatgagatctctgcgcgacaca

SEQ ID NO: 329154 - DNA, 25 bp, Artificial
  Probe
ggccctgaatgagatctctgcgcga

SEQ ID NO: 329155 - DNA, 25 bp, Artificial
  Probe
cgacacagtgagatccagcagttgg

SEQ ID NO: 329156 - DNA, 25 bp, Artificial
  Probe
gccctgaatgagatctctgcgcgac

SEQ ID NO: 329157 - DNA, 25 bp, Artificial
  Probe
ggcaggccctgaatgagatctctgc

SEQ ID NO: 329158 - DNA, 25 bp, Artificial
  Probe
ctctgcgcgacacagtgagatccag

SEQ ID NO: 329159 - DNA, 25 bp, Artificial
  Probe
gcaggccctgaatgagatctctgcg

SEQ ID NO: 329160 - DNA, 25 bp, Artificial
  Probe
cagactatgtggaacgtgggcaaga

SEQ ID NO: 329161 - DNA, 25 bp, Artificial
  Probe
ccggcaggccctgaatgagatctct

SEQ ID NO: 329162 - DNA, 25 bp, Artificial
  Probe
cacagtgagatccagcagttggagc

SEQ ID NO: 329163 - DNA, 25 bp, Artificial
  Probe
cccggcaggccctgaatgagatctc

SEQ ID NO: 329164 - DNA, 25 bp, Artificial
  Probe
cgctttggccactggcataaaaaca

SEQ ID NO: 329165 - DNA, 25 bp, Artificial
  Probe
atgaacgttgggaacctgggctctg

SEQ ID NO: 329166 - DNA, 25 bp, Artificial
  Probe
cactttcttcccagagagagctgta

SEQ ID NO: 329167 - DNA, 25 bp, Artificial
  Probe
ctggacccaggctcatcgtgtacat

SEQ ID NO: 329168 - DNA, 25 bp, Artificial
  Probe
ggcagggctgcaaccccattgtcac

SEQ ID NO: 329169 - DNA, 25 bp, Artificial
  Probe
agagctgccaatcagggaatggcag

SEQ ID NO: 329170 - DNA, 25 bp, Artificial
  Probe
catgtctgaaatgagggctgcttat

SEQ ID NO: 329171 - DNA, 25 bp, Artificial
  Probe
ggtggtgtcgccatgtctgaaatga

SEQ ID NO: 329172 - DNA, 25 bp, Artificial
  Probe
tgttctgcctgaaccttcccttggc

SEQ ID NO: 329173 - DNA, 25 bp, Artificial
  Probe
gaatggcagggctgcaaccccattg

SEQ ID NO: 329174 - DNA, 25 bp, Artificial
  Probe
ggctctggctctctggctgggtccc

SEQ ID NO: 329175 - DNA, 25 bp, Artificial
  Probe
tgaggtgaccagagccactgaaggc

SEQ ID NO: 329176 - DNA, 25 bp, Artificial
  Probe
ccaatcagggaatggcagggctgca

SEQ ID NO: 329177 - DNA, 25 bp, Artificial
  Probe
cacctcactttcttcccagagagag

SEQ ID NO: 329178 - DNA, 25 bp, Artificial
  Probe
tcagggaatggcagggctgcaaccc

SEQ ID NO: 329179 - DNA, 25 bp, Artificial
  Probe
ggctgcttatgaggtgaccagagcc

SEQ ID NO: 329180 - DNA, 25 bp, Artificial
  Probe
atgagggctgcttatgaggtgacca

SEQ ID NO: 329181 - DNA, 25 bp, Artificial
  Probe
tgtcagcagtgctcgctttggccac

SEQ ID NO: 329182 - DNA, 25 bp, Artificial
  Probe
cgggctggacccaggctcatcgtgt

SEQ ID NO: 329183 - DNA, 25 bp, Artificial
  Probe
caaactgcagaggagacagagagct

SEQ ID NO: 329184 - DNA, 25 bp, Artificial
  Probe
tgtataaaccagacccatgctgccg

SEQ ID NO: 329185 - DNA, 25 bp, Artificial
  Probe
agctgtataaaccagacccatgctg

SEQ ID NO: 329186 - DNA, 25 bp, Artificial
  Probe
cccttatgttactgttctgcctgaa

SEQ ID NO: 329187 - DNA, 25 bp, Artificial
  Probe
ctcgctttggccactggcataaaaa

SEQ ID NO: 329188 - DNA, 25 bp, Artificial
  Probe
agcagtgctcgctttggccactggc

SEQ ID NO: 329189 - DNA, 25 bp, Artificial
  Probe
cagagagctgccaatcagggaatgg

SEQ ID NO: 329190 - DNA, 25 bp, Artificial
  Probe
gtgaccagagccactgaaggcaagt

SEQ ID NO: 329191 - DNA, 25 bp, Artificial
  Probe
tccccttatgttactgttctgcctg

SEQ ID NO: 329192 - DNA, 25 bp, Artificial
  Probe
ttcccagagagagctgtataaacca

SEQ ID NO: 329193 - DNA, 25 bp, Artificial
  Probe
aaccctgatcttagcagacaaactg

SEQ ID NO: 329194 - DNA, 25 bp, Artificial
  Probe
gctctggctctctggctgggtccct

SEQ ID NO: 329195 - DNA, 25 bp, Artificial
  Probe
ccttggcccccagaagcagctttag

SEQ ID NO: 329196 - DNA, 25 bp, Artificial
  Probe
aatgagggctgcttatgaggtgacc

SEQ ID NO: 329197 - DNA, 25 bp, Artificial
  Probe
ttagcagacaaactgcagaggagac

SEQ ID NO: 329198 - DNA, 25 bp, Artificial
  Probe
ccagagccactgaaggcaagtggga

SEQ ID NO: 329199 - DNA, 25 bp, Artificial
  Probe
tggctctctggctgggtccctccat

SEQ ID NO: 329200 - DNA, 25 bp, Artificial
  Probe
ggctgcaaccccattgtcactagaa

SEQ ID NO: 329201 - DNA, 25 bp, Artificial
  Probe
acctcactttcttcccagagagagc

SEQ ID NO: 329202 - DNA, 25 bp, Artificial
  Probe
gaacctgggctctggctctctggct

SEQ ID NO: 329203 - DNA, 25 bp, Artificial
  Probe
aggctcatcgtgtacattgtgggtg

SEQ ID NO: 329204 - DNA, 25 bp, Artificial
  Probe
acgttgggaacctgggctctggctc

SEQ ID NO: 329205 - DNA, 25 bp, Artificial
  Probe
ttccatgaacgttgggaacctgggc

SEQ ID NO: 329206 - DNA, 25 bp, Artificial
  Probe
aactgcagaggagacagagagctgc

SEQ ID NO: 329207 - DNA, 25 bp, Artificial
  Probe
actgttctgcctgaaccttcccttg

SEQ ID NO: 329208 - DNA, 25 bp, Artificial
  Probe
cagtgctcgctttggccactggcat

SEQ ID NO: 329209 - DNA, 25 bp, Artificial
  Probe
ggaacctgggctctggctctctggc

SEQ ID NO: 329210 - DNA, 25 bp, Artificial
  Probe
cttttaggatcagatctgtgagcac

SEQ ID NO: 329211 - DNA, 25 bp, Artificial
  Probe
atctgtgagcacgttggcgaggaaa

SEQ ID NO: 329212 - DNA, 25 bp, Artificial
  Probe
ctgtgagcacgttggcgaggaaaaa

SEQ ID NO: 329213 - DNA, 25 bp, Artificial
  Probe
agactcttttaggatcagatctgtg

SEQ ID NO: 329214 - DNA, 25 bp, Artificial
  Probe
tcgaggctgttcttcaagaattaaa

SEQ ID NO: 329215 - DNA, 25 bp, Artificial
  Probe
ggatcagatctgtgagcacgttggc

SEQ ID NO: 329216 - DNA, 25 bp, Artificial
  Probe
aaccttgtgtctgtctggtgaaaaa

SEQ ID NO: 329217 - DNA, 25 bp, Artificial
  Probe
accttgtgtctgtctggtgaaaaaa

SEQ ID NO: 329218 - DNA, 25 bp, Artificial
  Probe
gactcttttaggatcagatctgtga

SEQ ID NO: 329219 - DNA, 25 bp, Artificial
  Probe
ctcttttaggatcagatctgtgagc

SEQ ID NO: 329220 - DNA, 25 bp, Artificial
  Probe
tcagatctgtgagcacgttggcgag

SEQ ID NO: 329221 - DNA, 25 bp, Artificial
  Probe
cgaggctgttcttcaagaattaaaa

SEQ ID NO: 329222 - DNA, 25 bp, Artificial
  Probe
tttaggatcagatctgtgagcacgt

SEQ ID NO: 329223 - DNA, 25 bp, Artificial
  Probe
ttgtcgaggctgttcttcaagaatt

SEQ ID NO: 329224 - DNA, 25 bp, Artificial
  Probe
ctggttccaaaccagatttcctgtg

SEQ ID NO: 329225 - DNA, 25 bp, Artificial
  Probe
aggatcagatctgtgagcacgttgg

SEQ ID NO: 329226 - DNA, 25 bp, Artificial
  Probe
atcagatctgtgagcacgttggcga

SEQ ID NO: 329227 - DNA, 25 bp, Artificial
  Probe
taggatcagatctgtgagcacgttg

SEQ ID NO: 329228 - DNA, 25 bp, Artificial
  Probe
ttaggatcagatctgtgagcacgtt

SEQ ID NO: 329229 - DNA, 25 bp, Artificial
  Probe
aagagactcttttaggatcagatct

SEQ ID NO: 329230 - DNA, 25 bp, Artificial
  Probe
tcttttaggatcagatctgtgagca

SEQ ID NO: 329231 - DNA, 25 bp, Artificial
  Probe
actcttttaggatcagatctgtgag

SEQ ID NO: 329232 - DNA, 25 bp, Artificial
  Probe
agaaccttgtgtctgtctggtgaaa

SEQ ID NO: 329233 - DNA, 25 bp, Artificial
  Probe
ggttccaaaccagatttcctgtgat

SEQ ID NO: 329234 - DNA, 25 bp, Artificial
  Probe
tgtcgaggctgttcttcaagaatta

SEQ ID NO: 329235 - DNA, 25 bp, Artificial
  Probe
tggttccaaaccagatttcctgtga

SEQ ID NO: 329236 - DNA, 25 bp, Artificial
  Probe
gagactcttttaggatcagatctgt

SEQ ID NO: 329237 - DNA, 25 bp, Artificial
  Probe
gaaactaatggaccttccaggattt

SEQ ID NO: 329238 - DNA, 25 bp, Artificial
  Probe
agagactcttttaggatcagatctg

SEQ ID NO: 329239 - DNA, 25 bp, Artificial
  Probe
gaaccttgtgtctgtctggtgaaaa

SEQ ID NO: 329240 - DNA, 25 bp, Artificial
  Probe
ttttaggatcagatctgtgagcacg

SEQ ID NO: 329241 - DNA, 25 bp, Artificial
  Probe
ttctggttccaaaccagatttcctg

SEQ ID NO: 329242 - DNA, 25 bp, Artificial
  Probe
ggaaactaatggaccttccaggatt

SEQ ID NO: 329243 - DNA, 25 bp, Artificial
  Probe
gttccaaaccagatttcctgtgatt

SEQ ID NO: 329244 - DNA, 25 bp, Artificial
  Probe
tctggttccaaaccagatttcctgt

SEQ ID NO: 329245 - DNA, 25 bp, Artificial
  Probe
tctgtgagcacgttggcgaggaaaa

SEQ ID NO: 329246 - DNA, 25 bp, Artificial
  Probe
gatcagatctgtgagcacgttggcg

SEQ ID NO: 329247 - DNA, 25 bp, Artificial
  Probe
gtcgaggctgttcttcaagaattaa

SEQ ID NO: 329248 - DNA, 25 bp, Artificial
  Probe
tgaaaatcacggtgacaatgacgta

SEQ ID NO: 329249 - DNA, 25 bp, Artificial
  Probe
aaagtcctcgggaaagccaggatga

SEQ ID NO: 329250 - DNA, 25 bp, Artificial
  Probe
tgttctgtttgttaaaactggcatc

SEQ ID NO: 329251 - DNA, 25 bp, Artificial
  Probe
gttaaaactggcatctgggattaca

SEQ ID NO: 329252 - DNA, 25 bp, Artificial
  Probe
taaatgcagctaaagtcctcgggaa

SEQ ID NO: 329253 - DNA, 25 bp, Artificial
  Probe
atttggactcaaataagccaggggg

SEQ ID NO: 329254 - DNA, 25 bp, Artificial
  Probe
cactgcctgccgaagcttcatgagc

SEQ ID NO: 329255 - DNA, 25 bp, Artificial
  Probe
cgtatgacgacaatgacgatgataa

SEQ ID NO: 329256 - DNA, 25 bp, Artificial
  Probe
cctctgagttaacagtgggttattt

SEQ ID NO: 329257 - DNA, 25 bp, Artificial
  Probe
actttgcaagcttgtgttctgtttg

SEQ ID NO: 329258 - DNA, 25 bp, Artificial
  Probe
ccagaaaacatgtgctgtgcactgc

SEQ ID NO: 329259 - DNA, 25 bp, Artificial
  Probe
tcatactggatgaccccctgtgagc

SEQ ID NO: 329260 - DNA, 25 bp, Artificial
  Probe
catcccttcctctgagttaacagtg

SEQ ID NO: 329261 - DNA, 25 bp, Artificial
  Probe
aggtcatactggatgaccccctgtg

SEQ ID NO: 329262 - DNA, 25 bp, Artificial
  Probe
ttggactcaaataagccagggggaa

SEQ ID NO: 329263 - DNA, 25 bp, Artificial
  Probe
tgagccgttatagaactgagcaagt

SEQ ID NO: 329264 - DNA, 25 bp, Artificial
  Probe
aatgacgtatgacgacaatgacgat

SEQ ID NO: 329265 - DNA, 25 bp, Artificial
  Probe
tgggattacagcaacaacagccaca

SEQ ID NO: 329266 - DNA, 25 bp, Artificial
  Probe
gttctgtttgttaaaactggcatct

SEQ ID NO: 329267 - DNA, 25 bp, Artificial
  Probe
atactttgccacaaactcatggatg

SEQ ID NO: 329268 - DNA, 25 bp, Artificial
  Probe
gtattgctctgcaatgggcgccctc

SEQ ID NO: 329269 - DNA, 25 bp, Artificial
  Probe
gtctgcatctcacctacttcctgag

SEQ ID NO: 329270 - DNA, 25 bp, Artificial
  Probe
ctgtgcactgcctgccgaagcttca

SEQ ID NO: 329271 - DNA, 25 bp, Artificial
  Probe
tgtttcctctgtattgctctgcaat

SEQ ID NO: 329272 - DNA, 25 bp, Artificial
  Probe
tgcatctcacctacttcctgagaga

SEQ ID NO: 329273 - DNA, 25 bp, Artificial
  Probe
agtcctcgggaaagccaggatgaaa

SEQ ID NO: 329274 - DNA, 25 bp, Artificial
  Probe
caggaaaatccgttcagtggagttg

SEQ ID NO: 329275 - DNA, 25 bp, Artificial
  Probe
ggattacagcaacaacagccacaaa

SEQ ID NO: 329276 - DNA, 25 bp, Artificial
  Probe
ctggcatctgggattacagcaacaa

SEQ ID NO: 329277 - DNA, 25 bp, Artificial
  Probe
tggcatctgggattacagcaacaac

SEQ ID NO: 329278 - DNA, 25 bp, Artificial
  Probe
tacattggcaatacgcccaagatcg

SEQ ID NO: 329279 - DNA, 25 bp, Artificial
  Probe
cttccccttgctgtgtgtcccagga

SEQ ID NO: 329280 - DNA, 25 bp, Artificial
  Probe
aacatgtgctgtgcactgcctgccg

SEQ ID NO: 329281 - DNA, 25 bp, Artificial
  Probe
caaactcatggatggcttaaggaat

SEQ ID NO: 329282 - DNA, 25 bp, Artificial
  Probe
tactacattggcaatacgcccaaga

SEQ ID NO: 329283 - DNA, 25 bp, Artificial
  Probe
tcttgtaaatgcagctaaagtcctc

SEQ ID NO: 329284 - DNA, 25 bp, Artificial
  Probe
caacatgatcgtcaagtcttgtaaa

SEQ ID NO: 329285 - DNA, 25 bp, Artificial
  Probe
ggagaccaaatactttgccacaaac

SEQ ID NO: 329286 - DNA, 25 bp, Artificial
  Probe
aatcaaagccccagaaaacatgtgc

SEQ ID NO: 329287 - DNA, 25 bp, Artificial
  Probe
tgaacctttcattgcccttggaaaa

SEQ ID NO: 329288 - DNA, 25 bp, Artificial
  Probe
ttaaaactggcatctgggattacag

SEQ ID NO: 329289 - DNA, 25 bp, Artificial
  Probe
aatcggtactagttcaaacactttg

SEQ ID NO: 329290 - DNA, 25 bp, Artificial
  Probe
tggatgaccccctgtgagccgttat

SEQ ID NO: 329291 - DNA, 25 bp, Artificial
  Probe
atcacggtgacaatgacgtatgacg

SEQ ID NO: 329292 - DNA, 25 bp, Artificial
  Probe
acaacagccacaaaaatggaaggcg

SEQ ID NO: 329293 - DNA, 25 bp, Artificial
  Probe
ataatgaacctttcattgcccttgg

SEQ ID NO: 329294 - DNA, 25 bp, Artificial
  Probe
tgccttgggtgttgtcctggcataa

SEQ ID NO: 329295 - DNA, 25 bp, Artificial
  Probe
ctatgccttgggtgttgtcctggca

SEQ ID NO: 329296 - DNA, 25 bp, Artificial
  Probe
ctcctcaggaaatgagattgatttt

SEQ ID NO: 329297 - DNA, 25 bp, Artificial
  Probe
agcggtggcagcagcaaccatagca

SEQ ID NO: 329298 - DNA, 25 bp, Artificial
  Probe
ggtggcagcagcaaccatagcagaa

SEQ ID NO: 329299 - DNA, 25 bp, Artificial
  Probe
cacctcctcaggaaatgagattgat

SEQ ID NO: 329300 - DNA, 25 bp, Artificial
  Probe
atgccttgggtgttgtcctggcata

SEQ ID NO: 329301 - DNA, 25 bp, Artificial
  Probe
tgtgctagcacctcctcaggaaatg

SEQ ID NO: 329302 - DNA, 25 bp, Artificial
  Probe
tggcataagctgtgctagcacctcc

SEQ ID NO: 329303 - DNA, 25 bp, Artificial
  Probe
tagtagctgctccatgttcagaagc

SEQ ID NO: 329304 - DNA, 25 bp, Artificial
  Probe
ttgggtgttgtcctggcataagctg

SEQ ID NO: 329305 - DNA, 25 bp, Artificial
  Probe
ctggcataagctgtgctagcacctc

SEQ ID NO: 329306 - DNA, 25 bp, Artificial
  Probe
agcagcaaccatagcagaagcggtg

SEQ ID NO: 329307 - DNA, 25 bp, Artificial
  Probe
ataagctgtgctagcacctcctcag

SEQ ID NO: 329308 - DNA, 25 bp, Artificial
  Probe
tgctagcacctcctcaggaaatgag

SEQ ID NO: 329309 - DNA, 25 bp, Artificial
  Probe
gtgctagcacctcctcaggaaatga

SEQ ID NO: 329310 - DNA, 25 bp, Artificial
  Probe
gtagctgctccatgttcagaagcag

SEQ ID NO: 329311 - DNA, 25 bp, Artificial
  Probe
tatgccttgggtgttgtcctggcat

SEQ ID NO: 329312 - DNA, 25 bp, Artificial
  Probe
gcagcaaccatagcagaagcggtgg

SEQ ID NO: 329313 - DNA, 25 bp, Artificial
  Probe
cctcctcaggaaatgagattgattt

SEQ ID NO: 329314 - DNA, 25 bp, Artificial
  Probe
cagcggtggcagcagcaaccatagc

SEQ ID NO: 329315 - DNA, 25 bp, Artificial
  Probe
catcctatgccttgggtgttgtcct

SEQ ID NO: 329316 - DNA, 25 bp, Artificial
  Probe
gaaggcatcctatgccttgggtgtt

SEQ ID NO: 329317 - DNA, 25 bp, Artificial
  Probe
acctcctcaggaaatgagattgatt

SEQ ID NO: 329318 - DNA, 25 bp, Artificial
  Probe
gcataagctgtgctagcacctcctc

SEQ ID NO: 329319 - DNA, 25 bp, Artificial
  Probe
gacagaaggcatcctatgccttggg

SEQ ID NO: 329320 - DNA, 25 bp, Artificial
  Probe
agaaggcatcctatgccttgggtgt

SEQ ID NO: 329321 - DNA, 25 bp, Artificial
  Probe
tagcacctcctcaggaaatgagatt

SEQ ID NO: 329322 - DNA, 25 bp, Artificial
  Probe
tggcagcagcaaccatagcagaagc

SEQ ID NO: 329323 - DNA, 25 bp, Artificial
  Probe
cataagctgtgctagcacctcctca

SEQ ID NO: 329324 - DNA, 25 bp, Artificial
  Probe
ggcagcagcaaccatagcagaagcg

SEQ ID NO: 329325 - DNA, 25 bp, Artificial
  Probe
gcagcggtggcagcagcaaccatag

SEQ ID NO: 329326 - DNA, 25 bp, Artificial
  Probe
cagcagcaaccatagcagaagcggt

SEQ ID NO: 329327 - DNA, 25 bp, Artificial
  Probe
gcatcctatgccttgggtgttgtcc

SEQ ID NO: 329328 - DNA, 25 bp, Artificial
  Probe
gtgacagaaggcatcctatgccttg

SEQ ID NO: 329329 - DNA, 25 bp, Artificial
  Probe
ctagcacctcctcaggaaatgagat

SEQ ID NO: 329330 - DNA, 25 bp, Artificial
  Probe
ggcagcggtggcagcagcaaccata

SEQ ID NO: 329331 - DNA, 25 bp, Artificial
  Probe
ccttgggtgttgtcctggcataagc

SEQ ID NO: 329332 - DNA, 25 bp, Artificial
  Probe
tgttgtcctggcataagctgtgcta

SEQ ID NO: 329333 - DNA, 25 bp, Artificial
  Probe
tgctccatgttcagaagcagcagtg

SEQ ID NO: 329334 - DNA, 25 bp, Artificial
  Probe
ttgtcctggcataagctgtgctagc

SEQ ID NO: 329335 - DNA, 25 bp, Artificial
  Probe
acagaaggcatcctatgccttgggt

SEQ ID NO: 329336 - DNA, 25 bp, Artificial
  Probe
agcacctcctcaggaaatgagattg

SEQ ID NO: 329337 - DNA, 25 bp, Artificial
  Probe
gccttgggtgttgtcctggcataag

SEQ ID NO: 329338 - DNA, 25 bp, Artificial
  Probe
ggcataagctgtgctagcacctcct

SEQ ID NO: 329339 - DNA, 25 bp, Artificial
  Probe
tgggtgttgtcctggcataagctgt

SEQ ID NO: 329340 - DNA, 25 bp, Artificial
  Probe
aaccctcatccaggacttggtctca

SEQ ID NO: 329341 - DNA, 25 bp, Artificial
  Probe
tacctgaacgggacacacgaacctg

SEQ ID NO: 329342 - DNA, 25 bp, Artificial
  Probe
acagaccctggaagccccagacgtt

SEQ ID NO: 329343 - DNA, 25 bp, Artificial
  Probe
tcaaggattcagagccaagattatt

SEQ ID NO: 329344 - DNA, 25 bp, Artificial
  Probe
tagacatcctgctctcgcctaacgg

SEQ ID NO: 329345 - DNA, 25 bp, Artificial
  Probe
ctatcccaagccttgctgctgatgg

SEQ ID NO: 329346 - DNA, 25 bp, Artificial
  Probe
ttctgaacaggcttcaaggattcag

SEQ ID NO: 329347 - DNA, 25 bp, Artificial
  Probe
gattattcctggtcagctaaatcaa

SEQ ID NO: 329348 - DNA, 25 bp, Artificial
  Probe
tgccactcaacctccagagtggact

SEQ ID NO: 329349 - DNA, 25 bp, Artificial
  Probe
ggacttctgaacaggcttcaaggat

SEQ ID NO: 329350 - DNA, 25 bp, Artificial
  Probe
cagagtggacttcctcctatcccaa

SEQ ID NO: 329351 - DNA, 25 bp, Artificial
  Probe
tctttgctgggacctcactacagac

SEQ ID NO: 329352 - DNA, 25 bp, Artificial
  Probe
actcaacctccagagtggacttcct

SEQ ID NO: 329353 - DNA, 25 bp, Artificial
  Probe
gcaacatctctcaggggcaagcttc

SEQ ID NO: 329354 - DNA, 25 bp, Artificial
  Probe
tctctcaggggcaagcttcctcagg

SEQ ID NO: 329355 - DNA, 25 bp, Artificial
  Probe
ggacctcactacagaccctggaagc

SEQ ID NO: 329356 - DNA, 25 bp, Artificial
  Probe
tggtcagctaaatcaaacctccggg

SEQ ID NO: 329357 - DNA, 25 bp, Artificial
  Probe
tgaatggaactcatgggctctttgc

SEQ ID NO: 329358 - DNA, 25 bp, Artificial
  Probe
acctgtgaatggaactcatgggctc

SEQ ID NO: 329359 - DNA, 25 bp, Artificial
  Probe
cttgccactcaacctccagagtgga

SEQ ID NO: 329360 - DNA, 25 bp, Artificial
  Probe
gcttcctcaggaaggctctgaggca

SEQ ID NO: 329361 - DNA, 25 bp, Artificial
  Probe
gatacacaggccaggacactgtaca

SEQ ID NO: 329362 - DNA, 25 bp, Artificial
  Probe
cagctaaatcaaacctccgggtcct

SEQ ID NO: 329363 - DNA, 25 bp, Artificial
  Probe
agctttcaacaaaggctccttgcca

SEQ ID NO: 329364 - DNA, 25 bp, Artificial
  Probe
agcgtcccgtgcactggcacggaga

SEQ ID NO: 329365 - DNA, 25 bp, Artificial
  Probe
tgctgctgatggatacacacttttc

SEQ ID NO: 329366 - DNA, 25 bp, Artificial
  Probe
ctggatacctgaacgggacacacga

SEQ ID NO: 329367 - DNA, 25 bp, Artificial
  Probe
gaactcatgggctctttgctgggac

SEQ ID NO: 329368 - DNA, 25 bp, Artificial
  Probe
acctccagagtggacttcctcctat

SEQ ID NO: 329369 - DNA, 25 bp, Artificial
  Probe
gattcagagccaagattattcctgg

SEQ ID NO: 329370 - DNA, 25 bp, Artificial
  Probe
tgctctcgcctaacgggccctggga

SEQ ID NO: 329371 - DNA, 25 bp, Artificial
  Probe
aggctctgaggcagctcactagaca

SEQ ID NO: 329372 - DNA, 25 bp, Artificial
  Probe
cctggaagccccagacgttgtgcca

SEQ ID NO: 329373 - DNA, 25 bp, Artificial
  Probe
tccgggtccttagaccaaatccctg

SEQ ID NO: 329374 - DNA, 25 bp, Artificial
  Probe
gaatggaactcatgggctctttgct

SEQ ID NO: 329375 - DNA, 25 bp, Artificial
  Probe
agaccaaatccctggatacctgaac

SEQ ID NO: 329376 - DNA, 25 bp, Artificial
  Probe
tacagaccctggaagccccagacgt

SEQ ID NO: 329377 - DNA, 25 bp, Artificial
  Probe
gtaagcgtcccgtgcactggcacgg

SEQ ID NO: 329378 - DNA, 25 bp, Artificial
  Probe
aaagggatacacaggccaggacact

SEQ ID NO: 329379 - DNA, 25 bp, Artificial
  Probe
gtccttagaccaaatccctggatac

SEQ ID NO: 329380 - DNA, 25 bp, Artificial
  Probe
tgggctctttgctgggacctcacta

SEQ ID NO: 329381 - DNA, 25 bp, Artificial
  Probe
ggcagctcactagacatcctgctct

SEQ ID NO: 329382 - DNA, 25 bp, Artificial
  Probe
ccgtgcactggcacggagagcgatc

SEQ ID NO: 329383 - DNA, 25 bp, Artificial
  Probe
gagtggacttcctcctatcccaagc

SEQ ID NO: 329384 - DNA, 25 bp, Artificial
  Probe
cacgaacctgtgaatggaactcatg

SEQ ID NO: 329385 - DNA, 25 bp, Artificial
  Probe
tctcagtaagcgtcccgtgcactgg

SEQ ID NO: 329386 - DNA, 25 bp, Artificial
  Probe
tttcttaccacgtagagagatgaga

SEQ ID NO: 329387 - DNA, 25 bp, Artificial
  Probe
tcttaccacgtagagagatgagaac

SEQ ID NO: 329388 - DNA, 25 bp, Artificial
  Probe
cagccacaggcagttcacagaaggg

SEQ ID NO: 329389 - DNA, 25 bp, Artificial
  Probe
atgagaacactcgtgtcccttgagt

SEQ ID NO: 329390 - DNA, 25 bp, Artificial
  Probe
tgactccttgagaaagatggcttat

SEQ ID NO: 329391 - DNA, 25 bp, Artificial
  Probe
tcgtgtcccttgagtagttttggaa

SEQ ID NO: 329392 - DNA, 25 bp, Artificial
  Probe
gatgagaacactcgtgtcccttgag

SEQ ID NO: 329393 - DNA, 25 bp, Artificial
  Probe
cagcctgggttagatgacgagaagt

SEQ ID NO: 329394 - DNA, 25 bp, Artificial
  Probe
gcccagcctgggttagatgacgaga

SEQ ID NO: 329395 - DNA, 25 bp, Artificial
  Probe
agatgactccttgagaaagatggct

SEQ ID NO: 329396 - DNA, 25 bp, Artificial
  Probe
ttaccacgtagagagatgagaacac

SEQ ID NO: 329397 - DNA, 25 bp, Artificial
  Probe
cgtgtcccttgagtagttttggaag

SEQ ID NO: 329398 - DNA, 25 bp, Artificial
  Probe
gtgcttcagccacaggcagttcaca

SEQ ID NO: 329399 - DNA, 25 bp, Artificial
  Probe
actcgtgtcccttgagtagttttgg

SEQ ID NO: 329400 - DNA, 25 bp, Artificial
  Probe
atgacgagaagtgcttcagccacag

SEQ ID NO: 329401 - DNA, 25 bp, Artificial
  Probe
ggggttcatttcttaccacgtagag

SEQ ID NO: 329402 - DNA, 25 bp, Artificial
  Probe
cactcgtgtcccttgagtagttttg

SEQ ID NO: 329403 - DNA, 25 bp, Artificial
  Probe
ggttcatttcttaccacgtagagag

SEQ ID NO: 329404 - DNA, 25 bp, Artificial
  Probe
gggttcatttcttaccacgtagaga

SEQ ID NO: 329405 - DNA, 25 bp, Artificial
  Probe
gagatgactccttgagaaagatggc

SEQ ID NO: 329406 - DNA, 25 bp, Artificial
  Probe
gactccttgagaaagatggcttatg

SEQ ID NO: 329407 - DNA, 25 bp, Artificial
  Probe
tcagccacaggcagttcacagaagg

SEQ ID NO: 329408 - DNA, 25 bp, Artificial
  Probe
cttaccacgtagagagatgagaaca

SEQ ID NO: 329409 - DNA, 25 bp, Artificial
  Probe
acgctgcgctttgtttagaaaacaa

SEQ ID NO: 329410 - DNA, 25 bp, Artificial
  Probe
tgagaacactcgtgtcccttgagta

SEQ ID NO: 329411 - DNA, 25 bp, Artificial
  Probe
gagaagtgcttcagccacaggcagt

SEQ ID NO: 329412 - DNA, 25 bp, Artificial
  Probe
agccacaggcagttcacagaagggc

SEQ ID NO: 329413 - DNA, 25 bp, Artificial
  Probe
acgagaagtgcttcagccacaggca

SEQ ID NO: 329414 - DNA, 25 bp, Artificial
  Probe
ttcttaccacgtagagagatgagaa

SEQ ID NO: 329415 - DNA, 25 bp, Artificial
  Probe
ccacaggcagttcacagaagggcgg

SEQ ID NO: 329416 - DNA, 25 bp, Artificial
  Probe
cgagaagtgcttcagccacaggcag

SEQ ID NO: 329417 - DNA, 25 bp, Artificial
  Probe
gctgcgctttgtttagaaaacaatc

SEQ ID NO: 329418 - DNA, 25 bp, Artificial
  Probe
taccacgtagagagatgagaacact

SEQ ID NO: 329419 - DNA, 25 bp, Artificial
  Probe
agatgagaacactcgtgtcccttga

SEQ ID NO: 329420 - DNA, 25 bp, Artificial
  Probe
cccagcctgggttagatgacgagaa

SEQ ID NO: 329421 - DNA, 25 bp, Artificial
  Probe
gagaacactcgtgtcccttgagtag

SEQ ID NO: 329422 - DNA, 25 bp, Artificial
  Probe
atgactccttgagaaagatggctta

SEQ ID NO: 329423 - DNA, 25 bp, Artificial
  Probe
gttcatttcttaccacgtagagaga

SEQ ID NO: 329424 - DNA, 25 bp, Artificial
  Probe
gatgactccttgagaaagatggctt

SEQ ID NO: 329425 - DNA, 25 bp, Artificial
  Probe
cgctgcgctttgtttagaaaacaat

SEQ ID NO: 329426 - DNA, 25 bp, Artificial
  Probe
gccacaggcagttcacagaagggcg

SEQ ID NO: 329427 - DNA, 25 bp, Artificial
  Probe
tgcttcagccacaggcagttcacag

SEQ ID NO: 329428 - DNA, 25 bp, Artificial
  Probe
ccagcctgggttagatgacgagaag

SEQ ID NO: 329429 - DNA, 25 bp, Artificial
  Probe
agtgcttcagccacaggcagttcac

SEQ ID NO: 329430 - DNA, 25 bp, Artificial
  Probe
agaacactcgtgtcccttgagtagt

SEQ ID NO: 329431 - DNA, 25 bp, Artificial
  Probe
ctcgtgtcccttgagtagttttgga

SEQ ID NO: 329432 - DNA, 25 bp, Artificial
  Probe
gtccgatgccttccaaagtggcgct

SEQ ID NO: 329433 - DNA, 25 bp, Artificial
  Probe
atgccttccaaagtggcgctgatgg

SEQ ID NO: 329434 - DNA, 25 bp, Artificial
  Probe
caaagtggcgctgatgggatggcat

SEQ ID NO: 329435 - DNA, 25 bp, Artificial
  Probe
tacgaagagccgtccgatgccttcc

SEQ ID NO: 329436 - DNA, 25 bp, Artificial
  Probe
ccaaagtggcgctgatgggatggca

SEQ ID NO: 329437 - DNA, 25 bp, Artificial
  Probe
ttccaaagtggcgctgatgggatgg

SEQ ID NO: 329438 - DNA, 25 bp, Artificial
  Probe
tgccttccaaagtggcgctgatggg

SEQ ID NO: 329439 - DNA, 25 bp, Artificial
  Probe
agagccgtccgatgccttccaaagt

SEQ ID NO: 329440 - DNA, 25 bp, Artificial
  Probe
cttccaaagtggcgctgatgggatg

SEQ ID NO: 329441 - DNA, 25 bp, Artificial
  Probe
tggcgctgatgggatggcatgtacg

SEQ ID NO: 329442 - DNA, 25 bp, Artificial
  Probe
agccgtccgatgccttccaaagtgg

SEQ ID NO: 329443 - DNA, 25 bp, Artificial
  Probe
gtatacgaagagccgtccgatgcct

SEQ ID NO: 329444 - DNA, 25 bp, Artificial
  Probe
ggggttaccaatttatcgcttggag

SEQ ID NO: 329445 - DNA, 25 bp, Artificial
  Probe
cggcgtatacgaagagccgtccgat

SEQ ID NO: 329446 - DNA, 25 bp, Artificial
  Probe
gtggcgctgatgggatggcatgtac

SEQ ID NO: 329447 - DNA, 25 bp, Artificial
  Probe
tatacgaagagccgtccgatgcctt

SEQ ID NO: 329448 - DNA, 25 bp, Artificial
  Probe
tccgatgccttccaaagtggcgctg

SEQ ID NO: 329449 - DNA, 25 bp, Artificial
  Probe
tgccgcggcgtatacgaagagccgt

SEQ ID NO: 329450 - DNA, 25 bp, Artificial
  Probe
gaagagccgtccgatgccttccaaa

SEQ ID NO: 329451 - DNA, 25 bp, Artificial
  Probe
atacgaagagccgtccgatgccttc

SEQ ID NO: 329452 - DNA, 25 bp, Artificial
  Probe
tttgccgcggcgtatacgaagagcc

SEQ ID NO: 329453 - DNA, 25 bp, Artificial
  Probe
gggttaccaatttatcgcttggagc

SEQ ID NO: 329454 - DNA, 25 bp, Artificial
  Probe
gccgcggcgtatacgaagagccgtc

SEQ ID NO: 329455 - DNA, 25 bp, Artificial
  Probe
ccgtccgatgccttccaaagtggcg

SEQ ID NO: 329456 - DNA, 25 bp, Artificial
  Probe
gccttccaaagtggcgctgatggga

SEQ ID NO: 329457 - DNA, 25 bp, Artificial
  Probe
aagagccgtccgatgccttccaaag

SEQ ID NO: 329458 - DNA, 25 bp, Artificial
  Probe
ctttgccgcggcgtatacgaagagc

SEQ ID NO: 329459 - DNA, 25 bp, Artificial
  Probe
ccttccaaagtggcgctgatgggat

SEQ ID NO: 329460 - DNA, 25 bp, Artificial
  Probe
cgatgccttccaaagtggcgctgat

SEQ ID NO: 329461 - DNA, 25 bp, Artificial
  Probe
ccgcggcgtatacgaagagccgtcc

SEQ ID NO: 329462 - DNA, 25 bp, Artificial
  Probe
gccgtccgatgccttccaaagtggc

SEQ ID NO: 329463 - DNA, 25 bp, Artificial
  Probe
cgaagagccgtccgatgccttccaa

SEQ ID NO: 329464 - DNA, 25 bp, Artificial
  Probe
aagtggcgctgatgggatggcatgt

SEQ ID NO: 329465 - DNA, 25 bp, Artificial
  Probe
gatgccttccaaagtggcgctgatg

SEQ ID NO: 329466 - DNA, 25 bp, Artificial
  Probe
gagccgtccgatgccttccaaagtg

SEQ ID NO: 329467 - DNA, 25 bp, Artificial
  Probe
cgtatacgaagagccgtccgatgcc

SEQ ID NO: 329468 - DNA, 25 bp, Artificial
  Probe
tccaaagtggcgctgatgggatggc

SEQ ID NO: 329469 - DNA, 25 bp, Artificial
  Probe
ttggagcaatcccctttgccgcggc

SEQ ID NO: 329470 - DNA, 25 bp, Artificial
  Probe
ttgccgcggcgtatacgaagagccg

SEQ ID NO: 329471 - DNA, 25 bp, Artificial
  Probe
agtggcgctgatgggatggcatgta

SEQ ID NO: 329472 - DNA, 25 bp, Artificial
  Probe
aaagtggcgctgatgggatggcatg

SEQ ID NO: 329473 - DNA, 25 bp, Artificial
  Probe
acgaagagccgtccgatgccttcca

SEQ ID NO: 329474 - DNA, 25 bp, Artificial
  Probe
cgtccgatgccttccaaagtggcgc

SEQ ID NO: 329475 - DNA, 25 bp, Artificial
  Probe
ccgatgccttccaaagtggcgctga

SEQ ID NO: 329476 - DNA, 25 bp, Artificial
  Probe
caggagttccaggaaccaagaacca

SEQ ID NO: 329477 - DNA, 25 bp, Artificial
  Probe
tccagcctgctgagttccccatatt

SEQ ID NO: 329478 - DNA, 25 bp, Artificial
  Probe
tacagtgaggcctggcgcttcccca

SEQ ID NO: 329479 - DNA, 25 bp, Artificial
  Probe
aggacttggcctgagacgggcccca

SEQ ID NO: 329480 - DNA, 25 bp, Artificial
  Probe
ccgctcactccctgtgtggtcaatt

SEQ ID NO: 329481 - DNA, 25 bp, Artificial
  Probe
caagagtcatttcgtgatgtgacag

SEQ ID NO: 329482 - DNA, 25 bp, Artificial
  Probe
ggaaggccaaactgtcctccaagag

SEQ ID NO: 329483 - DNA, 25 bp, Artificial
  Probe
gaaccatccatttcaaaagagcacg

SEQ ID NO: 329484 - DNA, 25 bp, Artificial
  Probe
gaacaaccaggcaacaggaggactt

SEQ ID NO: 329485 - DNA, 25 bp, Artificial
  Probe
gttccaggaaccaagaaccatccat

SEQ ID NO: 329486 - DNA, 25 bp, Artificial
  Probe
tcatggggacagtgggaacaaccag

SEQ ID NO: 329487 - DNA, 25 bp, Artificial
  Probe
aaccatgaaagtcaggatgaccttg

SEQ ID NO: 329488 - DNA, 25 bp, Artificial
  Probe
gagacgggccccagagagtcacaca

SEQ ID NO: 329489 - DNA, 25 bp, Artificial
  Probe
cctcctacagtgaggcctggcgctt

SEQ ID NO: 329490 - DNA, 25 bp, Artificial
  Probe
tgcctccgtgtatgggcagttcacg

SEQ ID NO: 329491 - DNA, 25 bp, Artificial
  Probe
ttccgctattgcaggcatggtggca

SEQ ID NO: 329492 - DNA, 25 bp, Artificial
  Probe
cgtacgcctcctacagtgaggcctg

SEQ ID NO: 329493 - DNA, 25 bp, Artificial
  Probe
catctgtagttgtcatggggacagt

SEQ ID NO: 329494 - DNA, 25 bp, Artificial
  Probe
acagggcagctatgcctcttccgct

SEQ ID NO: 329495 - DNA, 25 bp, Artificial
  Probe
tgcctcttccgctattgcaggcatg

SEQ ID NO: 329496 - DNA, 25 bp, Artificial
  Probe
tctgccacggcctttgaccatctgt

SEQ ID NO: 329497 - DNA, 25 bp, Artificial
  Probe
gacagggcagctatgcctcttccgc

SEQ ID NO: 329498 - DNA, 25 bp, Artificial
  Probe
aagtgagtattctggcaatgcctac

SEQ ID NO: 329499 - DNA, 25 bp, Artificial
  Probe
agcctgctgagttccccatattatt

SEQ ID NO: 329500 - DNA, 25 bp, Artificial
  Probe
agctctacaacaaggccaagcgcac

SEQ ID NO: 329501 - DNA, 25 bp, Artificial
  Probe
tatgggcagttcacgggccaggccc

SEQ ID NO: 329502 - DNA, 25 bp, Artificial
  Probe
tcccatgctgcctccgtgtatgggc

SEQ ID NO: 329503 - DNA, 25 bp, Artificial
  Probe
tcatttcgtgatgtgacaggagttc

SEQ ID NO: 329504 - DNA, 25 bp, Artificial
  Probe
agtggacagggcagctatgcctctt

SEQ ID NO: 329505 - DNA, 25 bp, Artificial
  Probe
ggcagctatgcctcttccgctattg

SEQ ID NO: 329506 - DNA, 25 bp, Artificial
  Probe
agctatgcctcttccgctattgcag

SEQ ID NO: 329507 - DNA, 25 bp, Artificial
  Probe
attacagctctacaacaaggccaag

SEQ ID NO: 329508 - DNA, 25 bp, Artificial
  Probe
ccgtgtatgggcagttcacgggcca

SEQ ID NO: 329509 - DNA, 25 bp, Artificial
  Probe
ccaccagtggacagggcagctatgc

SEQ ID NO: 329510 - DNA, 25 bp, Artificial
  Probe
gagtcacacaaaggaatctttattt

SEQ ID NO: 329511 - DNA, 25 bp, Artificial
  Probe
tggggccatcgctgcctggataccc

SEQ ID NO: 329512 - DNA, 25 bp, Artificial
  Probe
cttttcccatgctgcctccgtgtat

SEQ ID NO: 329513 - DNA, 25 bp, Artificial
  Probe
ttgtcatggggacagtgggaacaac

SEQ ID NO: 329514 - DNA, 25 bp, Artificial
  Probe
aatgaaccatgaaagtcaggatgac

SEQ ID NO: 329515 - DNA, 25 bp, Artificial
  Probe
tgtgacaggagttccaggaaccaag

SEQ ID NO: 329516 - DNA, 25 bp, Artificial
  Probe
acttggcctgagacgggccccagag

SEQ ID NO: 329517 - DNA, 25 bp, Artificial
  Probe
tccctgtgtggtcaattaaatgaac

SEQ ID NO: 329518 - DNA, 25 bp, Artificial
  Probe
ttcgtgatgtgacaggagttccagg

SEQ ID NO: 329519 - DNA, 25 bp, Artificial
  Probe
caacaggaggacttggcctgagacg

SEQ ID NO: 329520 - DNA, 25 bp, Artificial
  Probe
gtattctggcaatgcctacagccac

SEQ ID NO: 329521 - DNA, 25 bp, Artificial
  Probe
cccaccagtggacagggcagctatg

SEQ ID NO: 329522 - DNA, 25 bp, Artificial
  Probe
ttgtctgctcggacatagccactgc

SEQ ID NO: 329523 - DNA, 25 bp, Artificial
  Probe
tgggagaaatcctcagcctcagctc

SEQ ID NO: 329524 - DNA, 25 bp, Artificial
  Probe
gagcgttggcacacgctcaccaatg

SEQ ID NO: 329525 - DNA, 25 bp, Artificial
  Probe
acacgctcaccaatgagatcccagg

SEQ ID NO: 329526 - DNA, 25 bp, Artificial
  Probe
tccaggttgtctgctcggacatagc

SEQ ID NO: 329527 - DNA, 25 bp, Artificial
  Probe
tggccctcacaatgggcaagatcca

SEQ ID NO: 329528 - DNA, 25 bp, Artificial
  Probe
tctgctcggacatagccactgcagc

SEQ ID NO: 329529 - DNA, 25 bp, Artificial
  Probe
tggaagggctatctacagtgaggac

SEQ ID NO: 329530 - DNA, 25 bp, Artificial
  Probe
caccaagggctgtggccctcacaat

SEQ ID NO: 329531 - DNA, 25 bp, Artificial
  Probe
aatgggggtactctggctacctgga

SEQ ID NO: 329532 - DNA, 25 bp, Artificial
  Probe
tgcaagcacagaaatgggggtactc

SEQ ID NO: 329533 - DNA, 25 bp, Artificial
  Probe
ttggcacacgctcaccaatgagatc

SEQ ID NO: 329534 - DNA, 25 bp, Artificial
  Probe
gggtactctggctacctggagacca

SEQ ID NO: 329535 - DNA, 25 bp, Artificial
  Probe
taggaggccaagagcacccagcctc

SEQ ID NO: 329536 - DNA, 25 bp, Artificial
  Probe
ctgaagcactggtttgactgtctga

SEQ ID NO: 329537 - DNA, 25 bp, Artificial
  Probe
gtgagcgcctgaagcactggtttga

SEQ ID NO: 329538 - DNA, 25 bp, Artificial
  Probe
gggctgtggccctcacaatgggcaa

SEQ ID NO: 329539 - DNA, 25 bp, Artificial
  Probe
aggaggccaagagcacccagcctct

SEQ ID NO: 329540 - DNA, 25 bp, Artificial
  Probe
aagggccagagctgggagaaatcct

SEQ ID NO: 329541 - DNA, 25 bp, Artificial
  Probe
tctcgcagagggacaggaaaacaca

SEQ ID NO: 329542 - DNA, 25 bp, Artificial
  Probe
gaaatgggggtactctggctacctg

SEQ ID NO: 329543 - DNA, 25 bp, Artificial
  Probe
ctcacaatgggcaagatccaggttg

SEQ ID NO: 329544 - DNA, 25 bp, Artificial
  Probe
gcatcaatgccaagggtgagcgcct

SEQ ID NO: 329545 - DNA, 25 bp, Artificial
  Probe
caggaaaacacaacatgaaacctgt

SEQ ID NO: 329546 - DNA, 25 bp, Artificial
  Probe
ggcatcaatgccaagggtgagcgcc

SEQ ID NO: 329547 - DNA, 25 bp, Artificial
  Probe
tgagcgttggcacacgctcaccaat

SEQ ID NO: 329548 - DNA, 25 bp, Artificial
  Probe
acagtgaggacctatcagaggtgag

SEQ ID NO: 329549 - DNA, 25 bp, Artificial
  Probe
ccagcctctcgcagagggacaggaa

SEQ ID NO: 329550 - DNA, 25 bp, Artificial
  Probe
ccccaaagggccagagctgggagaa

SEQ ID NO: 329551 - DNA, 25 bp, Artificial
  Probe
tcagctgccaccaagggctgtggcc

SEQ ID NO: 329552 - DNA, 25 bp, Artificial
  Probe
atgccaagggtgagcgcctgaagca

SEQ ID NO: 329553 - DNA, 25 bp, Artificial
  Probe
gaaacctgtttcagctcccctggca

SEQ ID NO: 329554 - DNA, 25 bp, Artificial
  Probe
catgaaacctgtttcagctcccctg

SEQ ID NO: 329555 - DNA, 25 bp, Artificial
  Probe
ctggcaccccaaagggccagagctg

SEQ ID NO: 329556 - DNA, 25 bp, Artificial
  Probe
cctcagctctgtccagtggaagggc

SEQ ID NO: 329557 - DNA, 25 bp, Artificial
  Probe
gggagaaatcctcagcctcagctct

SEQ ID NO: 329558 - DNA, 25 bp, Artificial
  Probe
cactgcagcccctgctaggaggcta

SEQ ID NO: 329559 - DNA, 25 bp, Artificial
  Probe
agcgactgactgtcccatctgctgc

SEQ ID NO: 329560 - DNA, 25 bp, Artificial
  Probe
ctgggctttctcagctgccaccaag

SEQ ID NO: 329561 - DNA, 25 bp, Artificial
  Probe
ctgcagcccctgctaggaggctagg

SEQ ID NO: 329562 - DNA, 25 bp, Artificial
  Probe
aggattgagcgttggcacacgctca

SEQ ID NO: 329563 - DNA, 25 bp, Artificial
  Probe
ctgtccagtggaagggctatctaca

SEQ ID NO: 329564 - DNA, 25 bp, Artificial
  Probe
gatcccaggggctgtactcagcgac

SEQ ID NO: 329565 - DNA, 25 bp, Artificial
  Probe
caatgagatcccaggggctgtactc

SEQ ID NO: 329566 - DNA, 25 bp, Artificial
  Probe
caggtccaaccctgggctttctcag

SEQ ID NO: 329567 - DNA, 25 bp, Artificial
  Probe
tggaaccctgctgcaagcacagaaa

SEQ ID NO: 329568 - DNA, 25 bp, Artificial
  Probe
gagctggactctcacctgtccctgg

SEQ ID NO: 329569 - DNA, 25 bp, Artificial
  Probe
gaggactagagctctccttgcccat

SEQ ID NO: 329570 - DNA, 25 bp, Artificial
  Probe
cactgccacattcctgtcagatggc

SEQ ID NO: 329571 - DNA, 25 bp, Artificial
  Probe
gtcacagggaaggagccccgtgcca

SEQ ID NO: 329572 - DNA, 25 bp, Artificial
  Probe
tgggcatcccagaaactcaagagcc

SEQ ID NO: 329573 - DNA, 25 bp, Artificial
  Probe
cgagggacactaccagaggactaga

SEQ ID NO: 329574 - DNA, 25 bp, Artificial
  Probe
cattcctgtcagatggctatggggg

SEQ ID NO: 329575 - DNA, 25 bp, Artificial
  Probe
gggcatcccagaaactcaagagcct

SEQ ID NO: 329576 - DNA, 25 bp, Artificial
  Probe
ggactctaaggagctggactctcac

SEQ ID NO: 329577 - DNA, 25 bp, Artificial
  Probe
gagaagccgttcagatctagggctg

SEQ ID NO: 329578 - DNA, 25 bp, Artificial
  Probe
ctcacctgtccctggtttcatgggg

SEQ ID NO: 329579 - DNA, 25 bp, Artificial
  Probe
gatcaacgagggacactaccagagg

SEQ ID NO: 329580 - DNA, 25 bp, Artificial
  Probe
agctggactctcacctgtccctggt

SEQ ID NO: 329581 - DNA, 25 bp, Artificial
  Probe
aacgagggacactaccagaggacta

SEQ ID NO: 329582 - DNA, 25 bp, Artificial
  Probe
ctctaaggagctggactctcacctg

SEQ ID NO: 329583 - DNA, 25 bp, Artificial
  Probe
agatctagggctggactctaaggag

SEQ ID NO: 329584 - DNA, 25 bp, Artificial
  Probe
gatctagggctggactctaaggagc

SEQ ID NO: 329585 - DNA, 25 bp, Artificial
  Probe
agccgttcagatctagggctggact

SEQ ID NO: 329586 - DNA, 25 bp, Artificial
  Probe
ctaccagaggactagagctctcctt

SEQ ID NO: 329587 - DNA, 25 bp, Artificial
  Probe
ccatggatcaacgagggacactacc

SEQ ID NO: 329588 - DNA, 25 bp, Artificial
  Probe
cagatctagggctggactctaagga

SEQ ID NO: 329589 - DNA, 25 bp, Artificial
  Probe
tctagggctggactctaaggagctg

SEQ ID NO: 329590 - DNA, 25 bp, Artificial
  Probe
gggacactaccagaggactagagct

SEQ ID NO: 329591 - DNA, 25 bp, Artificial
  Probe
ccgttcagatctagggctggactct

SEQ ID NO: 329592 - DNA, 25 bp, Artificial
  Probe
gctggactctaaggagctggactct

SEQ ID NO: 329593 - DNA, 25 bp, Artificial
  Probe
tgtcacagggaaggagccccgtgcc

SEQ ID NO: 329594 - DNA, 25 bp, Artificial
  Probe
cactaccagaggactagagctctcc

SEQ ID NO: 329595 - DNA, 25 bp, Artificial
  Probe
cctgagaagccgttcagatctaggg

SEQ ID NO: 329596 - DNA, 25 bp, Artificial
  Probe
ctgagaagccgttcagatctagggc

SEQ ID NO: 329597 - DNA, 25 bp, Artificial
  Probe
caacgagggacactaccagaggact

SEQ ID NO: 329598 - DNA, 25 bp, Artificial
  Probe
gacactaccagaggactagagctct

SEQ ID NO: 329599 - DNA, 25 bp, Artificial
  Probe
ctgccacattcctgtcagatggcta

SEQ ID NO: 329600 - DNA, 25 bp, Artificial
  Probe
ctaaggagctggactctcacctgtc

SEQ ID NO: 329601 - DNA, 25 bp, Artificial
  Probe
cctgtcacagggaaggagccccgtg

SEQ ID NO: 329602 - DNA, 25 bp, Artificial
  Probe
ctggactctcacctgtccctggttt

SEQ ID NO: 329603 - DNA, 25 bp, Artificial
  Probe
tcactgccacattcctgtcagatgg

SEQ ID NO: 329604 - DNA, 25 bp, Artificial
  Probe
gccacattcctgtcagatggctatg

SEQ ID NO: 329605 - DNA, 25 bp, Artificial
  Probe
gaagccgttcagatctagggctgga

SEQ ID NO: 329606 - DNA, 25 bp, Artificial
  Probe
aggactagagctctccttgcccatc

SEQ ID NO: 329607 - DNA, 25 bp, Artificial
  Probe
ggactagagctctccttgcccatct

SEQ ID NO: 329608 - DNA, 25 bp, Artificial
  Probe
ggctggactctaaggagctggactc

SEQ ID NO: 329609 - DNA, 25 bp, Artificial
  Probe
tcacagggaaggagccccgtgccac

SEQ ID NO: 329610 - DNA, 25 bp, Artificial
  Probe
atcaacgagggacactaccagagga

SEQ ID NO: 329611 - DNA, 25 bp, Artificial
  Probe
taccagaggactagagctctccttg

SEQ ID NO: 329612 - DNA, 25 bp, Artificial
  Probe
gactctaaggagctggactctcacc

SEQ ID NO: 329613 - DNA, 25 bp, Artificial
  Probe
acattcctgtcagatggctatgggg

SEQ ID NO: 329614 - DNA, 25 bp, Artificial
  Probe
cgagtaccaggacctgacgttcctg

SEQ ID NO: 329615 - DNA, 25 bp, Artificial
  Probe
agcaggagatcctccttgcccacag

SEQ ID NO: 329616 - DNA, 25 bp, Artificial
  Probe
gtaccaggacctgacgttcctgacc

SEQ ID NO: 329617 - DNA, 25 bp, Artificial
  Probe
agtaccaggacctgacgttcctgac

SEQ ID NO: 329618 - DNA, 25 bp, Artificial
  Probe
tacccgagtatcttttgagcagatc

SEQ ID NO: 329619 - DNA, 25 bp, Artificial
  Probe
acgttcctgaccaagcaggagatcc

SEQ ID NO: 329620 - DNA, 25 bp, Artificial
  Probe
ccgagtaccaggacctgacgttcct

SEQ ID NO: 329621 - DNA, 25 bp, Artificial
  Probe
gcccacagacgcttttgcgagttgc

SEQ ID NO: 329622 - DNA, 25 bp, Artificial
  Probe
ccgagtatcttttgagcagatcctc

SEQ ID NO: 329623 - DNA, 25 bp, Artificial
  Probe
ccacgcgtccggttggccgagctgt

SEQ ID NO: 329624 - DNA, 25 bp, Artificial
  Probe
ttcccccagagcatcggaccgtgga

SEQ ID NO: 329625 - DNA, 25 bp, Artificial
  Probe
tcttttgagcagatcctcagccttc

SEQ ID NO: 329626 - DNA, 25 bp, Artificial
  Probe
ggccgagtaccaggacctgacgttc

SEQ ID NO: 329627 - DNA, 25 bp, Artificial
  Probe
tccttgcccacagacgcttttgcga

SEQ ID NO: 329628 - DNA, 25 bp, Artificial
  Probe
cgttcctgaccaagcaggagatcct

SEQ ID NO: 329629 - DNA, 25 bp, Artificial
  Probe
gaagagtcactgcatacccgagtat

SEQ ID NO: 329630 - DNA, 25 bp, Artificial
  Probe
gccgagtaccaggacctgacgttcc

SEQ ID NO: 329631 - DNA, 25 bp, Artificial
  Probe
ttcctgaccaagcaggagatcctcc

SEQ ID NO: 329632 - DNA, 25 bp, Artificial
  Probe
gagtcactgcatacccgagtatctt

SEQ ID NO: 329633 - DNA, 25 bp, Artificial
  Probe
gagtaccaggacctgacgttcctga

SEQ ID NO: 329634 - DNA, 25 bp, Artificial
  Probe
tcagccttccagagctcaaggccaa

SEQ ID NO: 329635 - DNA, 25 bp, Artificial
  Probe
ctgaccaagcaggagatcctccttg

SEQ ID NO: 329636 - DNA, 25 bp, Artificial
  Probe
accaggacctgacgttcctgaccaa

SEQ ID NO: 329637 - DNA, 25 bp, Artificial
  Probe
agtatcttttgagcagatcctcagc

SEQ ID NO: 329638 - DNA, 25 bp, Artificial
  Probe
cacagacgcttttgcgagttgcttc

SEQ ID NO: 329639 - DNA, 25 bp, Artificial
  Probe
gcatacccgagtatcttttgagcag

SEQ ID NO: 329640 - DNA, 25 bp, Artificial
  Probe
caggacctgacgttcctgaccaagc

SEQ ID NO: 329641 - DNA, 25 bp, Artificial
  Probe
tcccccagagcatcggaccgtggaa

SEQ ID NO: 329642 - DNA, 25 bp, Artificial
  Probe
ttttgagcagatcctcagccttcca

SEQ ID NO: 329643 - DNA, 25 bp, Artificial
  Probe
ccaggacctgacgttcctgaccaag

SEQ ID NO: 329644 - DNA, 25 bp, Artificial
  Probe
actgcatacccgagtatcttttgag

SEQ ID NO: 329645 - DNA, 25 bp, Artificial
  Probe
aggttcgggcagtcgcctgtctaag

SEQ ID NO: 329646 - DNA, 25 bp, Artificial
  Probe
cccacagacgcttttgcgagttgct

SEQ ID NO: 329647 - DNA, 25 bp, Artificial
  Probe
gcaggagatcctccttgcccacaga

SEQ ID NO: 329648 - DNA, 25 bp, Artificial
  Probe
cctgaccaagcaggagatcctcctt

SEQ ID NO: 329649 - DNA, 25 bp, Artificial
  Probe
tgcatacccgagtatcttttgagca

SEQ ID NO: 329650 - DNA, 25 bp, Artificial
  Probe
ccttgcccacagacgcttttgcgag

SEQ ID NO: 329651 - DNA, 25 bp, Artificial
  Probe
aagagtcactgcatacccgagtatc

SEQ ID NO: 329652 - DNA, 25 bp, Artificial
  Probe
aagcaggagatcctccttgcccaca

SEQ ID NO: 329653 - DNA, 25 bp, Artificial
  Probe
acccgagtatcttttgagcagatcc

SEQ ID NO: 329654 - DNA, 25 bp, Artificial
  Probe
cccgagtatcttttgagcagatcct

SEQ ID NO: 329655 - DNA, 25 bp, Artificial
  Probe
gaggttcgggcagtcgcctgtctaa

SEQ ID NO: 329656 - DNA, 25 bp, Artificial
  Probe
gtatcttttgagcagatcctcagcc

SEQ ID NO: 329657 - DNA, 25 bp, Artificial
  Probe
cgagtatcttttgagcagatcctca

SEQ ID NO: 329658 - DNA, 25 bp, Artificial
  Probe
ctgcatacccgagtatcttttgagc

SEQ ID NO: 329659 - DNA, 25 bp, Artificial
  Probe
gaccaagcaggagatcctccttgcc

SEQ ID NO: 329660 - DNA, 25 bp, Artificial
  Probe
agaactccagttgattgtgaatgac

SEQ ID NO: 329661 - DNA, 25 bp, Artificial
  Probe
gacaagagtcagaacctccggagac

SEQ ID NO: 329662 - DNA, 25 bp, Artificial
  Probe
gtcatggcccgagaacatgctccct

SEQ ID NO: 329663 - DNA, 25 bp, Artificial
  Probe
atggcagtagccaaggtcatgcaaa

SEQ ID NO: 329664 - DNA, 25 bp, Artificial
  Probe
gaaatgacagctacactctgcataa

SEQ ID NO: 329665 - DNA, 25 bp, Artificial
  Probe
ggagctgtttgtcatggcccgagaa

SEQ ID NO: 329666 - DNA, 25 bp, Artificial
  Probe
gttggcccgggctgtggctcatcat

SEQ ID NO: 329667 - DNA, 25 bp, Artificial
  Probe
actctcggaaaatgaacttgaccag

SEQ ID NO: 329668 - DNA, 25 bp, Artificial
  Probe
tttgaggccactaagaatatcaagg

SEQ ID NO: 329669 - DNA, 25 bp, Artificial
  Probe
cagctggatggctttgaggccacta

SEQ ID NO: 329670 - DNA, 25 bp, Artificial
  Probe
aaggcaggcagtggactccgtcaat

SEQ ID NO: 329671 - DNA, 25 bp, Artificial
  Probe
gtcctgctatatggacccccgggca

SEQ ID NO: 329672 - DNA, 25 bp, Artificial
  Probe
catcctgagggcaaatttgttgttg

SEQ ID NO: 329673 - DNA, 25 bp, Artificial
  Probe
tcgggtggctctaagaaatgacagc

SEQ ID NO: 329674 - DNA, 25 bp, Artificial
  Probe
tctttgaagccctgggcattgcaca

SEQ ID NO: 329675 - DNA, 25 bp, Artificial
  Probe
gcgggaacggcgtgtccacgttact

SEQ ID NO: 329676 - DNA, 25 bp, Artificial
  Probe
aggaactgcagctgctgcaggaaca

SEQ ID NO: 329677 - DNA, 25 bp, Artificial
  Probe
acattgatatcaatgatgtgacacc

SEQ ID NO: 329678 - DNA, 25 bp, Artificial
  Probe
acagcgcacaatgctggaactgctc

SEQ ID NO: 329679 - DNA, 25 bp, Artificial
  Probe
cccggctggacattttgaaaatcca

SEQ ID NO: 329680 - DNA, 25 bp, Artificial
  Probe
ctcctacgttggagaagtcgtgagg

SEQ ID NO: 329681 - DNA, 25 bp, Artificial
  Probe
gaagtgattgagctgcctgtgaagc

SEQ ID NO: 329682 - DNA, 25 bp, Artificial
  Probe
ctagacaagcagatcaaggagatca

SEQ ID NO: 329683 - DNA, 25 bp, Artificial
  Probe
gtgtctctggctctgaactggtaca

SEQ ID NO: 329684 - DNA, 25 bp, Artificial
  Probe
ttgatgggccagagcagatggaact

SEQ ID NO: 329685 - DNA, 25 bp, Artificial
  Probe
tatcggttcttcacggctggaggga

SEQ ID NO: 329686 - DNA, 25 bp, Artificial
  Probe
gggctgtggctcatcatacggactg

SEQ ID NO: 329687 - DNA, 25 bp, Artificial
  Probe
ccaattgtcgggtggctctaagaaa

SEQ ID NO: 329688 - DNA, 25 bp, Artificial
  Probe
aggcccggctggacattttgaaaat

SEQ ID NO: 329689 - DNA, 25 bp, Artificial
  Probe
ctccagttgattgtgaatgacaaga

SEQ ID NO: 329690 - DNA, 25 bp, Artificial
  Probe
tcatcttcatggacgagatcgactc

SEQ ID NO: 329691 - DNA, 25 bp, Artificial
  Probe
agtgttggtcaaggtccatcctgag

SEQ ID NO: 329692 - DNA, 25 bp, Artificial
  Probe
atctgtccaagattgaagaactcca

SEQ ID NO: 329693 - DNA, 25 bp, Artificial
  Probe
tttgaaaatccactctcggaaaatg

SEQ ID NO: 329694 - DNA, 25 bp, Artificial
  Probe
aaatgaacttgaccagggggatcaa

SEQ ID NO: 329695 - DNA, 25 bp, Artificial
  Probe
aaaggtgccagactcaacctacgag

SEQ ID NO: 329696 - DNA, 25 bp, Artificial
  Probe
cctttggtatcactaatgatggtgg

SEQ ID NO: 329697 - DNA, 25 bp, Artificial
  Probe
tgcaaaagttcgtctgttgcgggag

SEQ ID NO: 329698 - DNA, 25 bp, Artificial
  Probe
ccagggggatcaacctgaggaaaat

SEQ ID NO: 329699 - DNA, 25 bp, Artificial
  Probe
acctttattcgtgtctctggctctg

SEQ ID NO: 329700 - DNA, 25 bp, Artificial
  Probe
cgacagtgaggtacagcgcacaatg

SEQ ID NO: 329701 - DNA, 25 bp, Artificial
  Probe
aatgagctcaatgcaaaagttcgtc

SEQ ID NO: 329702 - DNA, 25 bp, Artificial
  Probe
ctacgagatgattggcgggctagac

SEQ ID NO: 329703 - DNA, 25 bp, Artificial
  Probe
ggcgtgtccacgttactcaggagga

SEQ ID NO: 329704 - DNA, 25 bp, Artificial
  Probe
gctagacaagcagatcaaggagatc

SEQ ID NO: 329705 - DNA, 25 bp, Artificial
  Probe
caggcccagaggaatgagctcaatg

SEQ ID NO: 329706 - DNA, 25 bp, Artificial
  Probe
aagccaaaggtgcagtgctgtcaga

SEQ ID NO: 329707 - DNA, 25 bp, Artificial
  Probe
gacgagtacgactacctctttaaag

SEQ ID NO: 329708 - DNA, 25 bp, Artificial
  Probe
cgacgacgagtacgactacctcttt

SEQ ID NO: 329709 - DNA, 25 bp, Artificial
  Probe
agagtaacctcctgtctcgatttac

SEQ ID NO: 329710 - DNA, 25 bp, Artificial
  Probe
ccaaaggtgcagtgctgtcagaaca

SEQ ID NO: 329711 - DNA, 25 bp, Artificial
  Probe
agaacaagccaaaggtgcagtgctg

SEQ ID NO: 329712 - DNA, 25 bp, Artificial
  Probe
gggcacccgcgacgacgagtacgac

SEQ ID NO: 329713 - DNA, 25 bp, Artificial
  Probe
attctaacagagatataccgcattg

SEQ ID NO: 329714 - DNA, 25 bp, Artificial
  Probe
ccaccactgagaacaagccaaaggt

SEQ ID NO: 329715 - DNA, 25 bp, Artificial
  Probe
gcacccgcgacgacgagtacgacta

SEQ ID NO: 329716 - DNA, 25 bp, Artificial
  Probe
acagggctataacgtctgcatacta

SEQ ID NO: 329717 - DNA, 25 bp, Artificial
  Probe
gagtaacctcctgtctcgatttact

SEQ ID NO: 329718 - DNA, 25 bp, Artificial
  Probe
ctttttcatgctatggcttctctag

SEQ ID NO: 329719 - DNA, 25 bp, Artificial
  Probe
tttttcatgctatggcttctctagc

SEQ ID NO: 329720 - DNA, 25 bp, Artificial
  Probe
gaagagtaacctcctgtctcgattt

SEQ ID NO: 329721 - DNA, 25 bp, Artificial
  Probe
tgggcacccgcgacgacgagtacga

SEQ ID NO: 329722 - DNA, 25 bp, Artificial
  Probe
gacaattctaacagagatataccgc

SEQ ID NO: 329723 - DNA, 25 bp, Artificial
  Probe
ctcctgtctcgatttactcggaatg

SEQ ID NO: 329724 - DNA, 25 bp, Artificial
  Probe
gacgacgagtacgactacctcttta

SEQ ID NO: 329725 - DNA, 25 bp, Artificial
  Probe
acctcctgtctcgatttactcggaa

SEQ ID NO: 329726 - DNA, 25 bp, Artificial
  Probe
ggcacccgcgacgacgagtacgact

SEQ ID NO: 329727 - DNA, 25 bp, Artificial
  Probe
caccactgagaacaagccaaaggtg

SEQ ID NO: 329728 - DNA, 25 bp, Artificial
  Probe
aacctcctgtctcgatttactcgga

SEQ ID NO: 329729 - DNA, 25 bp, Artificial
  Probe
aagagtaacctcctgtctcgattta

SEQ ID NO: 329730 - DNA, 25 bp, Artificial
  Probe
agccaaaggtgcagtgctgtcagaa

SEQ ID NO: 329731 - DNA, 25 bp, Artificial
  Probe
gaacaagccaaaggtgcagtgctgt

SEQ ID NO: 329732 - DNA, 25 bp, Artificial
  Probe
cgcgacgacgagtacgactacctct

SEQ ID NO: 329733 - DNA, 25 bp, Artificial
  Probe
gcgacgacgagtacgactacctctt

SEQ ID NO: 329734 - DNA, 25 bp, Artificial
  Probe
taacctcctgtctcgatttactcgg

SEQ ID NO: 329735 - DNA, 25 bp, Artificial
  Probe
caaaggtgcagtgctgtcagaacat

SEQ ID NO: 329736 - DNA, 25 bp, Artificial
  Probe
gtaacctcctgtctcgatttactcg

SEQ ID NO: 329737 - DNA, 25 bp, Artificial
  Probe
ctgtctcgatttactcggaatgagt

SEQ ID NO: 329738 - DNA, 25 bp, Artificial
  Probe
acaagccaaaggtgcagtgctgtca

SEQ ID NO: 329739 - DNA, 25 bp, Artificial
  Probe
caagccaaaggtgcagtgctgtcag

SEQ ID NO: 329740 - DNA, 25 bp, Artificial
  Probe
ccactgagaacaagccaaaggtgca

SEQ ID NO: 329741 - DNA, 25 bp, Artificial
  Probe
gccaaaggtgcagtgctgtcagaac

SEQ ID NO: 329742 - DNA, 25 bp, Artificial
  Probe
accactgagaacaagccaaaggtgc

SEQ ID NO: 329743 - DNA, 25 bp, Artificial
  Probe
cctcctgtctcgatttactcggaat

SEQ ID NO: 329744 - DNA, 25 bp, Artificial
  Probe
agtaagcgcagtgaccctggaaggc

SEQ ID NO: 329745 - DNA, 25 bp, Artificial
  Probe
gtaagcgcagtgaccctggaaggca

SEQ ID NO: 329746 - DNA, 25 bp, Artificial
  Probe
ggcagtggtttttctcgcagcctcc

SEQ ID NO: 329747 - DNA, 25 bp, Artificial
  Probe
ctccctaagctgtgagggacagctg

SEQ ID NO: 329748 - DNA, 25 bp, Artificial
  Probe
gcagcctccctaagctgtgagggac

SEQ ID NO: 329749 - DNA, 25 bp, Artificial
  Probe
ggcacgccgccgtgtgtctctgcat

SEQ ID NO: 329750 - DNA, 25 bp, Artificial
  Probe
cgactctcggtggtgtttaagtggt

SEQ ID NO: 329751 - DNA, 25 bp, Artificial
  Probe
aagctgtgagggacagctgtcccct

SEQ ID NO: 329752 - DNA, 25 bp, Artificial
  Probe
tgtgtctctgcatctgtgtgtaatg

SEQ ID NO: 329753 - DNA, 25 bp, Artificial
  Probe
cgtgtgtctctgcatctgtgtgtaa

SEQ ID NO: 329754 - DNA, 25 bp, Artificial
  Probe
aaggcagtggtttttctcgcagcct

SEQ ID NO: 329755 - DNA, 25 bp, Artificial
  Probe
gccgccgtgtgtctctgcatctgtg

SEQ ID NO: 329756 - DNA, 25 bp, Artificial
  Probe
aatggctttatctgttaacgactct

SEQ ID NO: 329757 - DNA, 25 bp, Artificial
  Probe
tcgcagcctccctaagctgtgaggg

SEQ ID NO: 329758 - DNA, 25 bp, Artificial
  Probe
agcctccctaagctgtgagggacag

SEQ ID NO: 329759 - DNA, 25 bp, Artificial
  Probe
gcatctgtgtgtaatggctttatct

SEQ ID NO: 329760 - DNA, 25 bp, Artificial
  Probe
gctttatctgttaacgactctcggt

SEQ ID NO: 329761 - DNA, 25 bp, Artificial
  Probe
tggtgtttccagtgtaagtaagcgc

SEQ ID NO: 329762 - DNA, 25 bp, Artificial
  Probe
tgttaacgactctcggtggtgttta

SEQ ID NO: 329763 - DNA, 25 bp, Artificial
  Probe
agtgaccctggaaggcagtggtttt

SEQ ID NO: 329764 - DNA, 25 bp, Artificial
  Probe
gaaggcagtggtttttctcgcagcc

SEQ ID NO: 329765 - DNA, 25 bp, Artificial
  Probe
cagtggtttttctcgcagcctccct

SEQ ID NO: 329766 - DNA, 25 bp, Artificial
  Probe
acgccgccgtgtgtctctgcatctg

SEQ ID NO: 329767 - DNA, 25 bp, Artificial
  Probe
tgcatctgtgtgtaatggctttatc

SEQ ID NO: 329768 - DNA, 25 bp, Artificial
  Probe
agctgtgagggacagctgtcccctg

SEQ ID NO: 329769 - DNA, 25 bp, Artificial
  Probe
cagtgaccctggaaggcagtggttt

SEQ ID NO: 329770 - DNA, 25 bp, Artificial
  Probe
ctgttaacgactctcggtggtgttt

SEQ ID NO: 329771 - DNA, 25 bp, Artificial
  Probe
gtgtctctgcatctgtgtgtaatgg

SEQ ID NO: 329772 - DNA, 25 bp, Artificial
  Probe
ggtttttctcgcagcctccctaagc

SEQ ID NO: 329773 - DNA, 25 bp, Artificial
  Probe
ttatctgttaacgactctcggtggt

SEQ ID NO: 329774 - DNA, 25 bp, Artificial
  Probe
tgtaatggctttatctgttaacgac

SEQ ID NO: 329775 - DNA, 25 bp, Artificial
  Probe
ccctaagctgtgagggacagctgtc

SEQ ID NO: 329776 - DNA, 25 bp, Artificial
  Probe
aacgactctcggtggtgtttaagtg

SEQ ID NO: 329777 - DNA, 25 bp, Artificial
  Probe
acgactctcggtggtgtttaagtgg

SEQ ID NO: 329778 - DNA, 25 bp, Artificial
  Probe
catctgtgtgtaatggctttatctg

SEQ ID NO: 329779 - DNA, 25 bp, Artificial
  Probe
ctctgcatctgtgtgtaatggcttt

SEQ ID NO: 329780 - DNA, 25 bp, Artificial
  Probe
cctccctaagctgtgagggacagct

SEQ ID NO: 329781 - DNA, 25 bp, Artificial
  Probe
ttccagtgtaagtaagcgcagtgac

SEQ ID NO: 329782 - DNA, 25 bp, Artificial
  Probe
taagtaagcgcagtgaccctggaag

SEQ ID NO: 329783 - DNA, 25 bp, Artificial
  Probe
ggtgtttccagtgtaagtaagcgca

SEQ ID NO: 329784 - DNA, 25 bp, Artificial
  Probe
ccgtgtgtctctgcatctgtgtgta

SEQ ID NO: 329785 - DNA, 25 bp, Artificial
  Probe
tttccagtgtaagtaagcgcagtga

SEQ ID NO: 329786 - DNA, 25 bp, Artificial
  Probe
ataacgcaagtgtccaccggcacgc

SEQ ID NO: 329787 - DNA, 25 bp, Artificial
  Probe
tttatctgttaacgactctcggtgg

SEQ ID NO: 329788 - DNA, 25 bp, Artificial
  Probe
ccctggaaggcagtggtttttctcg

SEQ ID NO: 329789 - DNA, 25 bp, Artificial
  Probe
gtcccctgtccctgtacatataagc

SEQ ID NO: 329790 - DNA, 25 bp, Artificial
  Probe
aatggacttgggactcagcagtttt

SEQ ID NO: 329791 - DNA, 25 bp, Artificial
  Probe
gttaacaggttgacacattgcttga

SEQ ID NO: 329792 - DNA, 25 bp, Artificial
  Probe
tggcagccctagagttcataaatgg

SEQ ID NO: 329793 - DNA, 25 bp, Artificial
  Probe
tattgccatgttcagttaaagtgca

SEQ ID NO: 329794 - DNA, 25 bp, Artificial
  Probe
ggttgacacattgcttgacctgatt

SEQ ID NO: 329795 - DNA, 25 bp, Artificial
  Probe
gttgacacattgcttgacctgattt

SEQ ID NO: 329796 - DNA, 25 bp, Artificial
  Probe
tgacacattgcttgacctgatttat

SEQ ID NO: 329797 - DNA, 25 bp, Artificial
  Probe
tctgttaacaggttgacacattgct

SEQ ID NO: 329798 - DNA, 25 bp, Artificial
  Probe
tgttcagttaaagtgcacagtctgt

SEQ ID NO: 329799 - DNA, 25 bp, Artificial
  Probe
actcagcagttttgaaacgtgtata

SEQ ID NO: 329800 - DNA, 25 bp, Artificial
  Probe
agtctgttaacaggttgacacattg

SEQ ID NO: 329801 - DNA, 25 bp, Artificial
  Probe
gccctagagttcataaatggacttg

SEQ ID NO: 329802 - DNA, 25 bp, Artificial
  Probe
acttgggactcagcagttttgaaac

SEQ ID NO: 329803 - DNA, 25 bp, Artificial
  Probe
ctcagcagttttgaaacgtgtatat

SEQ ID NO: 329804 - DNA, 25 bp, Artificial
  Probe
gttcataaatggacttgggactcag

SEQ ID NO: 329805 - DNA, 25 bp, Artificial
  Probe
ctgttaacaggttgacacattgctt

SEQ ID NO: 329806 - DNA, 25 bp, Artificial
  Probe
attgccatgttcagttaaagtgcac

SEQ ID NO: 329807 - DNA, 25 bp, Artificial
  Probe
cagtctgttaacaggttgacacatt

SEQ ID NO: 329808 - DNA, 25 bp, Artificial
  Probe
ggcagccctagagttcataaatgga

SEQ ID NO: 329809 - DNA, 25 bp, Artificial
  Probe
agtgcacagtctgttaacaggttga

SEQ ID NO: 329810 - DNA, 25 bp, Artificial
  Probe
ttcataaatggacttgggactcagc

SEQ ID NO: 329811 - DNA, 25 bp, Artificial
  Probe
tgttaacaggttgacacattgcttg

SEQ ID NO: 329812 - DNA, 25 bp, Artificial
  Probe
aggttgacacattgcttgacctgat

SEQ ID NO: 329813 - DNA, 25 bp, Artificial
  Probe
cagccctagagttcataaatggact

SEQ ID NO: 329814 - DNA, 25 bp, Artificial
  Probe
caggttgacacattgcttgacctga

SEQ ID NO: 329815 - DNA, 25 bp, Artificial
  Probe
aaagtgcacagtctgttaacaggtt

SEQ ID NO: 329816 - DNA, 25 bp, Artificial
  Probe
ggactcagcagttttgaaacgtgta

SEQ ID NO: 329817 - DNA, 25 bp, Artificial
  Probe
cttgggactcagcagttttgaaacg

SEQ ID NO: 329818 - DNA, 25 bp, Artificial
  Probe
taacaggttgacacattgcttgacc

SEQ ID NO: 329819 - DNA, 25 bp, Artificial
  Probe
gccatgttcagttaaagtgcacagt

SEQ ID NO: 329820 - DNA, 25 bp, Artificial
  Probe
agttcataaatggacttgggactca

SEQ ID NO: 329821 - DNA, 25 bp, Artificial
  Probe
ttaacaggttgacacattgcttgac

SEQ ID NO: 329822 - DNA, 25 bp, Artificial
  Probe
acacattgcttgacctgatttatgc

SEQ ID NO: 329823 - DNA, 25 bp, Artificial
  Probe
atattgccatgttcagttaaagtgc

SEQ ID NO: 329824 - DNA, 25 bp, Artificial
  Probe
gcacagtctgttaacaggttgacac

SEQ ID NO: 329825 - DNA, 25 bp, Artificial
  Probe
tgccatgttcagttaaagtgcacag

SEQ ID NO: 329826 - DNA, 25 bp, Artificial
  Probe
tgggactcagcagttttgaaacgtg

SEQ ID NO: 329827 - DNA, 25 bp, Artificial
  Probe
gacttgggactcagcagttttgaaa

SEQ ID NO: 329828 - DNA, 25 bp, Artificial
  Probe
atggacttgggactcagcagttttg

SEQ ID NO: 329829 - DNA, 25 bp, Artificial
  Probe
tgtagctttaatacgctgcacatga

SEQ ID NO: 329830 - DNA, 25 bp, Artificial
  Probe
ttgacacattgcttgacctgattta

SEQ ID NO: 329831 - DNA, 25 bp, Artificial
  Probe
ttaaagtgcacagtctgttaacagg

SEQ ID NO: 329832 - DNA, 25 bp, Artificial
  Probe
cacagtctgttaacaggttgacaca

SEQ ID NO: 329833 - DNA, 25 bp, Artificial
  Probe
ggacttgggactcagcagttttgaa

SEQ ID NO: 329834 - DNA, 25 bp, Artificial
  Probe
tggacttgggactcagcagttttga

SEQ ID NO: 329835 - DNA, 25 bp, Artificial
  Probe
aacaggttgacacattgcttgacct

SEQ ID NO: 329836 - DNA, 25 bp, Artificial
  Probe
tggaatcaagccatgtgtgcaattg

SEQ ID NO: 329837 - DNA, 25 bp, Artificial
  Probe
actggtggaccctgacatgcctgtg

SEQ ID NO: 329838 - DNA, 25 bp, Artificial
  Probe
atcttgcctcctagacatctcagag

SEQ ID NO: 329839 - DNA, 25 bp, Artificial
  Probe
cttgcctcctagacatctcagaggt

SEQ ID NO: 329840 - DNA, 25 bp, Artificial
  Probe
tgccatgctccctgtaagatgccat

SEQ ID NO: 329841 - DNA, 25 bp, Artificial
  Probe
tcccatgagtcaaacagtatcttgc

SEQ ID NO: 329842 - DNA, 25 bp, Artificial
  Probe
ctttgactttgaactggtggaccct

SEQ ID NO: 329843 - DNA, 25 bp, Artificial
  Probe
acatctcagaggtctgccatgctcc

SEQ ID NO: 329844 - DNA, 25 bp, Artificial
  Probe
atgagtcaaacagtatcttgcaaat

SEQ ID NO: 329845 - DNA, 25 bp, Artificial
  Probe
aagtttgactcatcccggaggacag

SEQ ID NO: 329846 - DNA, 25 bp, Artificial
  Probe
caagccatgtgtgcaattgttaagt

SEQ ID NO: 329847 - DNA, 25 bp, Artificial
  Probe
ctctcaggaggaaaacctgtggtca

SEQ ID NO: 329848 - DNA, 25 bp, Artificial
  Probe
gagtcaaacagtatcttgcaaatgc

SEQ ID NO: 329849 - DNA, 25 bp, Artificial
  Probe
atggtcatgtactttgactttgaac

SEQ ID NO: 329850 - DNA, 25 bp, Artificial
  Probe
aaacctgtggtcagttcgatttaca

SEQ ID NO: 329851 - DNA, 25 bp, Artificial
  Probe
cctcctagacatctcagaggtctgc

SEQ ID NO: 329852 - DNA, 25 bp, Artificial
  Probe
ggaaaacctgtggtcagttcgattt

SEQ ID NO: 329853 - DNA, 25 bp, Artificial
  Probe
tcatcccggaggacagtaccagctc

SEQ ID NO: 329854 - DNA, 25 bp, Artificial
  Probe
aacagtatcttgcaaatgctgcctc

SEQ ID NO: 329855 - DNA, 25 bp, Artificial
  Probe
ttcgatttacagctggttacccacc

SEQ ID NO: 329856 - DNA, 25 bp, Artificial
  Probe
cacccaagtttgactcatcccggag

SEQ ID NO: 329857 - DNA, 25 bp, Artificial
  Probe
gaggacagtaccagctcccatgagt

SEQ ID NO: 329858 - DNA, 25 bp, Artificial
  Probe
tcaatggaatcaagccatgtgtgca

SEQ ID NO: 329859 - DNA, 25 bp, Artificial
  Probe
atcaagccatgtgtgcaattgttaa

SEQ ID NO: 329860 - DNA, 25 bp, Artificial
  Probe
ccacctctcaggaggaaaacctgtg

SEQ ID NO: 329861 - DNA, 25 bp, Artificial
  Probe
tactttgactttgaactggtggacc

SEQ ID NO: 329862 - DNA, 25 bp, Artificial
  Probe
ggtggaccctgacatgcctgtgccc

SEQ ID NO: 329863 - DNA, 25 bp, Artificial
  Probe
atgttactcaatggaatcaagccat

SEQ ID NO: 329864 - DNA, 25 bp, Artificial
  Probe
gccatgctccctgtaagatgccatc

SEQ ID NO: 329865 - DNA, 25 bp, Artificial
  Probe
gaggaaaacctgtggtcagttcgat

SEQ ID NO: 329866 - DNA, 25 bp, Artificial
  Probe
gactcatcccggaggacagtaccag

SEQ ID NO: 329867 - DNA, 25 bp, Artificial
  Probe
cagtgagcttagacctgagcacacc

SEQ ID NO: 329868 - DNA, 25 bp, Artificial
  Probe
tgaagcccatgcagtgagcttagac

SEQ ID NO: 329869 - DNA, 25 bp, Artificial
  Probe
tcttgcaaatgctgcctcagcccat

SEQ ID NO: 329870 - DNA, 25 bp, Artificial
  Probe
ttgaactggtggaccctgacatgcc

SEQ ID NO: 329871 - DNA, 25 bp, Artificial
  Probe
ggaatcaagccatgtgtgcaattgt

SEQ ID NO: 329872 - DNA, 25 bp, Artificial
  Probe
catgtactttgactttgaactggtg

SEQ ID NO: 329873 - DNA, 25 bp, Artificial
  Probe
caaacagtatcttgcaaatgctgcc

SEQ ID NO: 329874 - DNA, 25 bp, Artificial
  Probe
ggtctgccatgctccctgtaagatg

SEQ ID NO: 329875 - DNA, 25 bp, Artificial
  Probe
cttatggtcatgtactttgactttg

SEQ ID NO: 329876 - DNA, 25 bp, Artificial
  Probe
actttgaactggtggaccctgacat

SEQ ID NO: 329877 - DNA, 25 bp, Artificial
  Probe
cagaggtctgccatgctccctgtaa

SEQ ID NO: 329878 - DNA, 25 bp, Artificial
  Probe
gtactttgactttgaactggtggac

SEQ ID NO: 329879 - DNA, 25 bp, Artificial
  Probe
gtaccagctcccatgagtcaaacag

SEQ ID NO: 329880 - DNA, 25 bp, Artificial
  Probe
gacagtaccagctcccatgagtcaa

SEQ ID NO: 329881 - DNA, 25 bp, Artificial
  Probe
atctcagaggtctgccatgctccct

SEQ ID NO: 329882 - DNA, 25 bp, Artificial
  Probe
ccacgtggaacctctttgagattca

SEQ ID NO: 329883 - DNA, 25 bp, Artificial
  Probe
cacgtggaacctctttgagattcag

SEQ ID NO: 329884 - DNA, 25 bp, Artificial
  Probe
attatgcctcctgtgccacagcatc

SEQ ID NO: 329885 - DNA, 25 bp, Artificial
  Probe
tccgccttcgggactccacgtggaa

SEQ ID NO: 329886 - DNA, 25 bp, Artificial
  Probe
atcacaccgtctgagtatatggact

SEQ ID NO: 329887 - DNA, 25 bp, Artificial
  Probe
tgcgggagccaatgctgccagccga

SEQ ID NO: 329888 - DNA, 25 bp, Artificial
  Probe
tccacgtggaacctctttgagattc

SEQ ID NO: 329889 - DNA, 25 bp, Artificial
  Probe
acgtcttccagtgcactgacggctc

SEQ ID NO: 329890 - DNA, 25 bp, Artificial
  Probe
agatagtccgtgaagccatccgccg

SEQ ID NO: 329891 - DNA, 25 bp, Artificial
  Probe
gtgccacagcatccaaggtgcccat

SEQ ID NO: 329892 - DNA, 25 bp, Artificial
  Probe
agagatagtccgtgaagccatccgc

SEQ ID NO: 329893 - DNA, 25 bp, Artificial
  Probe
ctgcgggagccaatgctgccagccg

SEQ ID NO: 329894 - DNA, 25 bp, Artificial
  Probe
gccttcgggactccacgtggaacct

SEQ ID NO: 329895 - DNA, 25 bp, Artificial
  Probe
acaccgtctgagtatatggactata

SEQ ID NO: 329896 - DNA, 25 bp, Artificial
  Probe
atcactgtgagcaagagaatccatg

SEQ ID NO: 329897 - DNA, 25 bp, Artificial
  Probe
caccgtctgagtatatggactatac

SEQ ID NO: 329898 - DNA, 25 bp, Artificial
  Probe
ggaacctctttgagattcagaatga

SEQ ID NO: 329899 - DNA, 25 bp, Artificial
  Probe
gactccacgtggaacctctttgaga

SEQ ID NO: 329900 - DNA, 25 bp, Artificial
  Probe
cacagcatccaaggtgcccatcatg

SEQ ID NO: 329901 - DNA, 25 bp, Artificial
  Probe
tccatgtttgggagagatagtccgt

SEQ ID NO: 329902 - DNA, 25 bp, Artificial
  Probe
ttcgggactccacgtggaacctctt

SEQ ID NO: 329903 - DNA, 25 bp, Artificial
  Probe
aaagcttggagaccaagaggcaaaa

SEQ ID NO: 329904 - DNA, 25 bp, Artificial
  Probe
tgtgccacagcatccaaggtgccca

SEQ ID NO: 329905 - DNA, 25 bp, Artificial
  Probe
gattatgcctcctgtgccacagcat

SEQ ID NO: 329906 - DNA, 25 bp, Artificial
  Probe
tacgtcttccagtgcactgacggct

SEQ ID NO: 329907 - DNA, 25 bp, Artificial
  Probe
agcttggagaccaagaggcaaaaga

SEQ ID NO: 329908 - DNA, 25 bp, Artificial
  Probe
acagcatccaaggtgcccatcatgg

SEQ ID NO: 329909 - DNA, 25 bp, Artificial
  Probe
tcacaccgtctgagtatatggacta

SEQ ID NO: 329910 - DNA, 25 bp, Artificial
  Probe
cagcatccaaggtgcccatcatggt

SEQ ID NO: 329911 - DNA, 25 bp, Artificial
  Probe
tatcacaccgtctgagtatatggac

SEQ ID NO: 329912 - DNA, 25 bp, Artificial
  Probe
aagcttggagaccaagaggcaaaag

SEQ ID NO: 329913 - DNA, 25 bp, Artificial
  Probe
aggtgcccatcatggtatgccgcgg

SEQ ID NO: 329914 - DNA, 25 bp, Artificial
  Probe
cgccgccagaaagattatgcctcct

SEQ ID NO: 329915 - DNA, 25 bp, Artificial
  Probe
caaggtgcccatcatggtatgccgc

SEQ ID NO: 329916 - DNA, 25 bp, Artificial
  Probe
aacctctttgagattcagaatgaag

SEQ ID NO: 329917 - DNA, 25 bp, Artificial
  Probe
gatagtccgtgaagccatccgccgc

SEQ ID NO: 329918 - DNA, 25 bp, Artificial
  Probe
gtggaacctctttgagattcagaat

SEQ ID NO: 329919 - DNA, 25 bp, Artificial
  Probe
tccaaggtgcccatcatggtatgcc

SEQ ID NO: 329920 - DNA, 25 bp, Artificial
  Probe
ctccacgtggaacctctttgagatt

SEQ ID NO: 329921 - DNA, 25 bp, Artificial
  Probe
aagattatgcctcctgtgccacagc

SEQ ID NO: 329922 - DNA, 25 bp, Artificial
  Probe
gggagccaatgctgccagccgattc

SEQ ID NO: 329923 - DNA, 25 bp, Artificial
  Probe
cgggagccaatgctgccagccgatt

SEQ ID NO: 329924 - DNA, 25 bp, Artificial
  Probe
cttcgggactccacgtggaacctct

SEQ ID NO: 329925 - DNA, 25 bp, Artificial
  Probe
gggactccacgtggaacctctttga

SEQ ID NO: 329926 - DNA, 25 bp, Artificial
  Probe
aatcactgtgagcaagagaatccat

SEQ ID NO: 329927 - DNA, 25 bp, Artificial
  Probe
tatatcacaccgtctgagtatatgg

SEQ ID NO: 329928 - DNA, 25 bp, Artificial
  Probe
tgccgcctggtgaaagagacccgga

SEQ ID NO: 329929 - DNA, 25 bp, Artificial
  Probe
ccttggattcgatgcctcggaggtg

SEQ ID NO: 329930 - DNA, 25 bp, Artificial
  Probe
atgcccatggccagaaatgcatcgt

SEQ ID NO: 329931 - DNA, 25 bp, Artificial
  Probe
gcatctccacacgagttaccaatga

SEQ ID NO: 329932 - DNA, 25 bp, Artificial
  Probe
caaaggcagctcactgaagaggctt

SEQ ID NO: 329933 - DNA, 25 bp, Artificial
  Probe
ctaaaggtctcctgggtttctagtg

SEQ ID NO: 329934 - DNA, 25 bp, Artificial
  Probe
tgctgcacacctctgcagaccagga

SEQ ID NO: 329935 - DNA, 25 bp, Artificial
  Probe
acacctctgcagaccaggaccgtga

SEQ ID NO: 329936 - DNA, 25 bp, Artificial
  Probe
tgcaagtgtaactacaactgcccgc

SEQ ID NO: 329937 - DNA, 25 bp, Artificial
  Probe
ggacggccggtgctgcacacctctg

SEQ ID NO: 329938 - DNA, 25 bp, Artificial
  Probe
tgctccagtgtgaagaaataccggc

SEQ ID NO: 329939 - DNA, 25 bp, Artificial
  Probe
tactgcggctcctgcgtggacggcc

SEQ ID NO: 329940 - DNA, 25 bp, Artificial
  Probe
cggatctgtgaagtgcgtccttgtg

SEQ ID NO: 329941 - DNA, 25 bp, Artificial
  Probe
ccctgcatgcccatggccagaaatg

SEQ ID NO: 329942 - DNA, 25 bp, Artificial
  Probe
gcttcctgtctttggcacggaacct

SEQ ID NO: 329943 - DNA, 25 bp, Artificial
  Probe
caagagctgcggaactggcatctcc

SEQ ID NO: 329944 - DNA, 25 bp, Artificial
  Probe
gtgctgcacacctctgcagaccagg

SEQ ID NO: 329945 - DNA, 25 bp, Artificial
  Probe
ggactccctggacgaccaggacgac

SEQ ID NO: 329946 - DNA, 25 bp, Artificial
  Probe
tggacggccggtgctgcacacctct

SEQ ID NO: 329947 - DNA, 25 bp, Artificial
  Probe
aagagacccggatctgtgaagtgcg

SEQ ID NO: 329948 - DNA, 25 bp, Artificial
  Probe
cctgtctttggcacggaacctcgag

SEQ ID NO: 329949 - DNA, 25 bp, Artificial
  Probe
cgtcctggtcccagtgctccaagag

SEQ ID NO: 329950 - DNA, 25 bp, Artificial
  Probe
ggacgacctccttggattcgatgcc

SEQ ID NO: 329951 - DNA, 25 bp, Artificial
  Probe
ctgtgaagtgcgtccttgtggacaa

SEQ ID NO: 329952 - DNA, 25 bp, Artificial
  Probe
gactaaaggtctcctgggtttctag

SEQ ID NO: 329953 - DNA, 25 bp, Artificial
  Probe
gtccgatttacttatgcaggatgct

SEQ ID NO: 329954 - DNA, 25 bp, Artificial
  Probe
ccaggaccgtgaagatgcggttccg

SEQ ID NO: 329955 - DNA, 25 bp, Artificial
  Probe
tccaagaacgtcatgatgattcagt

SEQ ID NO: 329956 - DNA, 25 bp, Artificial
  Probe
agtgtaactacaactgcccgcatcc

SEQ ID NO: 329957 - DNA, 25 bp, Artificial
  Probe
caagttcagggactaaaggtctcct

SEQ ID NO: 329958 - DNA, 25 bp, Artificial
  Probe
ctggacgaccaggacgacctccttg

SEQ ID NO: 329959 - DNA, 25 bp, Artificial
  Probe
gtctcctgggtttctagtgtgggtc

SEQ ID NO: 329960 - DNA, 25 bp, Artificial
  Probe
gcctctacagtctgttcaacgatat

SEQ ID NO: 329961 - DNA, 25 bp, Artificial
  Probe
agactacgtcctggtcccagtgctc

SEQ ID NO: 329962 - DNA, 25 bp, Artificial
  Probe
cgtcgtttcgcctctacagtctgtt

SEQ ID NO: 329963 - DNA, 25 bp, Artificial
  Probe
gcacggaacctcgagtcctttacaa

SEQ ID NO: 329964 - DNA, 25 bp, Artificial
  Probe
ggccggtgctgcacacctctgcaga

SEQ ID NO: 329965 - DNA, 25 bp, Artificial
  Probe
cagtctgttcaacgatatccacaag

SEQ ID NO: 329966 - DNA, 25 bp, Artificial
  Probe
gagtgccgcctggtgaaagagaccc

SEQ ID NO: 329967 - DNA, 25 bp, Artificial
  Probe
tgctccaagagctgcggaactggca

SEQ ID NO: 329968 - DNA, 25 bp, Artificial
  Probe
aatactgcggctcctgcgtggacgg

SEQ ID NO: 329969 - DNA, 25 bp, Artificial
  Probe
cctgcatgcccatggccagaaatgc

SEQ ID NO: 329970 - DNA, 25 bp, Artificial
  Probe
agatggcgagatgttctccaagaac

SEQ ID NO: 329971 - DNA, 25 bp, Artificial
  Probe
atccacaagttcagggactaaaggt

SEQ ID NO: 329972 - DNA, 25 bp, Artificial
  Probe
tacagcagcctaaaaaagggcaaga

SEQ ID NO: 329973 - DNA, 25 bp, Artificial
  Probe
aataccggcccaaatactgcggctc

SEQ ID NO: 329974 - DNA, 25 bp, Artificial
  Probe
actggatgactacagagaggagagc

SEQ ID NO: 329975 - DNA, 25 bp, Artificial
  Probe
aggtcaacaaagagctctctcgtct

SEQ ID NO: 329976 - DNA, 25 bp, Artificial
  Probe
agggaatatccacctatcacttcag

SEQ ID NO: 329977 - DNA, 25 bp, Artificial
  Probe
ctcgacagagaactggatgactaca

SEQ ID NO: 329978 - DNA, 25 bp, Artificial
  Probe
actggctcagggaatatccacctat

SEQ ID NO: 329979 - DNA, 25 bp, Artificial
  Probe
tggctgctgctgatgaatataacag

SEQ ID NO: 329980 - DNA, 25 bp, Artificial
  Probe
tactgcaagcagttaaagagcaaat

SEQ ID NO: 329981 - DNA, 25 bp, Artificial
  Probe
atcacacatcaagaggatggtggga

SEQ ID NO: 329982 - DNA, 25 bp, Artificial
  Probe
gagctctctcgtctcgacagagaac

SEQ ID NO: 329983 - DNA, 25 bp, Artificial
  Probe
gctcagggaatatccacctatcact

SEQ ID NO: 329984 - DNA, 25 bp, Artificial
  Probe
cagagacaactgtacaagagaaatt

SEQ ID NO: 329985 - DNA, 25 bp, Artificial
  Probe
gaattactgcaagcagttaaagagc

SEQ ID NO: 329986 - DNA, 25 bp, Artificial
  Probe
ctcgacgaggtcaacaaagagctct

SEQ ID NO: 329987 - DNA, 25 bp, Artificial
  Probe
gtctccagtattgaagcattttata

SEQ ID NO: 329988 - DNA, 25 bp, Artificial
  Probe
aattgactgggctgaacactccaat

SEQ ID NO: 329989 - DNA, 25 bp, Artificial
  Probe
atagaggtgcatctatctacctgcc

SEQ ID NO: 329990 - DNA, 25 bp, Artificial
  Probe
tggactctcgtctgggaagttaaaa

SEQ ID NO: 329991 - DNA, 25 bp, Artificial
  Probe
acggaaaacctagacagatgctggt

SEQ ID NO: 329992 - DNA, 25 bp, Artificial
  Probe
tgtctgcagttctccccagaggcaa

SEQ ID NO: 329993 - DNA, 25 bp, Artificial
  Probe
aaacctagacagatgctggttgctg

SEQ ID NO: 329994 - DNA, 25 bp, Artificial
  Probe
tataagagtttactggcagaactcg

SEQ ID NO: 329995 - DNA, 25 bp, Artificial
  Probe
ctccccagaggcaaactgactttgg

SEQ ID NO: 329996 - DNA, 25 bp, Artificial
  Probe
gtgtctgcagttctccccagaggca

SEQ ID NO: 329997 - DNA, 25 bp, Artificial
  Probe
ggctgctgctgatgaatataacaga

SEQ ID NO: 329998 - DNA, 25 bp, Artificial
  Probe
tacctgcccagtgtctgcagttctc

SEQ ID NO: 329999 - DNA, 25 bp, Artificial
  Probe
aggaggactggctcagggaatatcc

SEQ ID NO: 330000 - DNA, 25 bp, Artificial
  Probe
agttctccccagaggcaaactgact

SEQ ID NO: 330001 - DNA, 25 bp, Artificial
  Probe
agagcaaattatcacacatcaagag

SEQ ID NO: 330002 - DNA, 25 bp, Artificial
  Probe
cacttcagatcaacagagacaactg

SEQ ID NO: 330003 - DNA, 25 bp, Artificial
  Probe
caaagagctctctcgtctcgacaga

SEQ ID NO: 330004 - DNA, 25 bp, Artificial
  Probe
gagtttactggcagaactcgacgag

SEQ ID NO: 330005 - DNA, 25 bp, Artificial
  Probe
ctacacgacaggtggcgagtcctgc

SEQ ID NO: 330006 - DNA, 25 bp, Artificial
  Probe
gcagttctccccagaggcaaactga

SEQ ID NO: 330007 - DNA, 25 bp, Artificial
  Probe
ttgataattgactgggctgaacact

SEQ ID NO: 330008 - DNA, 25 bp, Artificial
  Probe
caacaaagagctctctcgtctcgac

SEQ ID NO: 330009 - DNA, 25 bp, Artificial
  Probe
cggaaaacctagacagatgctggtt

SEQ ID NO: 330010 - DNA, 25 bp, Artificial
  Probe
ctctcgtctcgacagagaactggat

SEQ ID NO: 330011 - DNA, 25 bp, Artificial
  Probe
catccgtttcctgtctccagtattg

SEQ ID NO: 330012 - DNA, 25 bp, Artificial
  Probe
atctacctgcccagtgtctgcagtt

SEQ ID NO: 330013 - DNA, 25 bp, Artificial
  Probe
gggaatatccacctatcacttcaga

SEQ ID NO: 330014 - DNA, 25 bp, Artificial
  Probe
tctcgtctgggaagttaaaactttg

SEQ ID NO: 330015 - DNA, 25 bp, Artificial
  Probe
ctagacagatgctggttgctggaga

SEQ ID NO: 330016 - DNA, 25 bp, Artificial
  Probe
cttttgataattgactgggctgaac

SEQ ID NO: 330017 - DNA, 25 bp, Artificial
  Probe
gaggactggctcagggaatatccac

SEQ ID NO: 330018 - DNA, 25 bp, Artificial
  Probe
tcaacagagacaactgtacaagaga

SEQ ID NO: 330019 - DNA, 25 bp, Artificial
  Probe
catctatctacctgcccagtgtctg

SEQ ID NO: 330020 - DNA, 25 bp, Artificial
  Probe
tcgtaggacagaagctccaggagga

SEQ ID NO: 330021 - DNA, 25 bp, Artificial
  Probe
tcatctatcgcctatgaccggcatc

SEQ ID NO: 330022 - DNA, 25 bp, Artificial
  Probe
tcaccaaagctgagatgcagcagat

SEQ ID NO: 330023 - DNA, 25 bp, Artificial
  Probe
tccgctggagccactggatcctgag

SEQ ID NO: 330024 - DNA, 25 bp, Artificial
  Probe
gcaggtatcccaactctgttcctgc

SEQ ID NO: 330025 - DNA, 25 bp, Artificial
  Probe
gtgaagtcctcttccctgggtacac

SEQ ID NO: 330026 - DNA, 25 bp, Artificial
  Probe
ggcagaagacctgattctctacggt

SEQ ID NO: 330027 - DNA, 25 bp, Artificial
  Probe
gctcaacagtatggatgccaccagc

SEQ ID NO: 330028 - DNA, 25 bp, Artificial
  Probe
aagagtgggcccaaggcatcttcaa

SEQ ID NO: 330029 - DNA, 25 bp, Artificial
  Probe
catctgtggaatgtggacctgcagg

SEQ ID NO: 330030 - DNA, 25 bp, Artificial
  Probe
agtgctgccacatcccgcaagctga

SEQ ID NO: 330031 - DNA, 25 bp, Artificial
  Probe
gaagcaaggcctacagcaggggcct

SEQ ID NO: 330032 - DNA, 25 bp, Artificial
  Probe
cgatttgcaggctcggtcgacccca

SEQ ID NO: 330033 - DNA, 25 bp, Artificial
  Probe
ctgagatgcagcagatactgcaagg

SEQ ID NO: 330034 - DNA, 25 bp, Artificial
  Probe
actgcaaggcctggacaaggtggct

SEQ ID NO: 330035 - DNA, 25 bp, Artificial
  Probe
agcccatccgctggagccactggat

SEQ ID NO: 330036 - DNA, 25 bp, Artificial
  Probe
aagcaaggcctacagcaggggcctg

SEQ ID NO: 330037 - DNA, 25 bp, Artificial
  Probe
ctgacacgagatttagagagactga

SEQ ID NO: 330038 - DNA, 25 bp, Artificial
  Probe
ccacatcccgcaagctgagcaggta

SEQ ID NO: 330039 - DNA, 25 bp, Artificial
  Probe
gcttgctgagtgctgccacatcccg

SEQ ID NO: 330040 - DNA, 25 bp, Artificial
  Probe
gtgagtgtggtcttgtcttccagat

SEQ ID NO: 330041 - DNA, 25 bp, Artificial
  Probe
caaattgtaccctaatgatgaagac

SEQ ID NO: 330042 - DNA, 25 bp, Artificial
  Probe
gtaccctaatgatgaagacatccac

SEQ ID NO: 330043 - DNA, 25 bp, Artificial
  Probe
tccaccttcctcaaggtgctcattg

SEQ ID NO: 330044 - DNA, 25 bp, Artificial
  Probe
gagtgtgaagtcctcttccctgggt

SEQ ID NO: 330045 - DNA, 25 bp, Artificial
  Probe
acgccgttgcgctgacacgagattt

SEQ ID NO: 330046 - DNA, 25 bp, Artificial
  Probe
cctatgaccggcatctgtggaatgt

SEQ ID NO: 330047 - DNA, 25 bp, Artificial
  Probe
acctgcagggaagcaaggcctacag

SEQ ID NO: 330048 - DNA, 25 bp, Artificial
  Probe
ggatcctgagtcacgccgttgcgct

SEQ ID NO: 330049 - DNA, 25 bp, Artificial
  Probe
gcagtggggccattgcaggcaaccc

SEQ ID NO: 330050 - DNA, 25 bp, Artificial
  Probe
ctatcgcctatgaccggcatctgtg

SEQ ID NO: 330051 - DNA, 25 bp, Artificial
  Probe
tgtggaccgggagttcctctgtgca

SEQ ID NO: 330052 - DNA, 25 bp, Artificial
  Probe
ggacctgcagggaagcaaggcctac

SEQ ID NO: 330053 - DNA, 25 bp, Artificial
  Probe
ttgaagccatggtagaccgggcaga

SEQ ID NO: 330054 - DNA, 25 bp, Artificial
  Probe
gcccaaggcatcttcaaattgtacc

SEQ ID NO: 330055 - DNA, 25 bp, Artificial
  Probe
ggcatcttcaaattgtaccctaatg

SEQ ID NO: 330056 - DNA, 25 bp, Artificial
  Probe
tgagtgctgccacatcccgcaagct

SEQ ID NO: 330057 - DNA, 25 bp, Artificial
  Probe
agaagcggatcaatgtcctgccact

SEQ ID NO: 330058 - DNA, 25 bp, Artificial
  Probe
ggctgagttcctgttttgggcttct

SEQ ID NO: 330059 - DNA, 25 bp, Artificial
  Probe
gtggggccattgcaggcaaccctct

SEQ ID NO: 330060 - DNA, 25 bp, Artificial
  Probe
atggacaagttcaactcatctatcg

SEQ ID NO: 330061 - DNA, 25 bp, Artificial
  Probe
caatgtcctgccactgggcagtggg

SEQ ID NO: 330062 - DNA, 25 bp, Artificial
  Probe
tgagtcacgccgttgcgctgacacg

SEQ ID NO: 330063 - DNA, 25 bp, Artificial
  Probe
atctcagcaggatggcagaagacct

SEQ ID NO: 330064 - DNA, 25 bp, Artificial
  Probe
tggccgatttgcaggctcggtcgac

SEQ ID NO: 330065 - DNA, 25 bp, Artificial
  Probe
ggacaagttcaactcatctatcgcc

SEQ ID NO: 330066 - DNA, 25 bp, Artificial
  Probe
tggctctgaagcaccggcagggcaa

SEQ ID NO: 330067 - DNA, 25 bp, Artificial
  Probe
tccgcgtggcccatctggctctgaa

SEQ ID NO: 330068 - DNA, 25 bp, Artificial
  Probe
tgaagcaccggcagggcaagaatca

SEQ ID NO: 330069 - DNA, 25 bp, Artificial
  Probe
agtttggagtagatcccagtgctga

SEQ ID NO: 330070 - DNA, 25 bp, Artificial
  Probe
agaatcacaagatgcgcatcatcgc

SEQ ID NO: 330071 - DNA, 25 bp, Artificial
  Probe
tacatgcggaatggagacttccttc

SEQ ID NO: 330072 - DNA, 25 bp, Artificial
  Probe
tgacactggccgaatcctctccaag

SEQ ID NO: 330073 - DNA, 25 bp, Artificial
  Probe
gactttgagtttggagtagatccca

SEQ ID NO: 330074 - DNA, 25 bp, Artificial
  Probe
caagaatcacaagatgcgcatcatc

SEQ ID NO: 330075 - DNA, 25 bp, Artificial
  Probe
gcttgatcacgctggccaatgactg

SEQ ID NO: 330076 - DNA, 25 bp, Artificial
  Probe
caagatcaccttctgcactggcatc

SEQ ID NO: 330077 - DNA, 25 bp, Artificial
  Probe
ataacgtgggcttgatcacgctggc

SEQ ID NO: 330078 - DNA, 25 bp, Artificial
  Probe
acaacagtgagtacatgcggaatgg

SEQ ID NO: 330079 - DNA, 25 bp, Artificial
  Probe
atctagtgacagtgcctcctgggcc

SEQ ID NO: 330080 - DNA, 25 bp, Artificial
  Probe
aaaggcaagatcaccttctgcactg

SEQ ID NO: 330081 - DNA, 25 bp, Artificial
  Probe
acagagaagctgacagcctttgtga

SEQ ID NO: 330082 - DNA, 25 bp, Artificial
  Probe
cagtgctgatcctgaattggccctg

SEQ ID NO: 330083 - DNA, 25 bp, Artificial
  Probe
gtgaaactagctaaacgccttaaga

SEQ ID NO: 330084 - DNA, 25 bp, Artificial
  Probe
tgactttgagtttggagtagatccc

SEQ ID NO: 330085 - DNA, 25 bp, Artificial
  Probe
ctcaaagacccgaagcaaccctgag

SEQ ID NO: 330086 - DNA, 25 bp, Artificial
  Probe
tcatcagttctcctattctagctgg

SEQ ID NO: 330087 - DNA, 25 bp, Artificial
  Probe
tgtgaggtgctgaccacactcaccc

SEQ ID NO: 330088 - DNA, 25 bp, Artificial
  Probe
tcatcgccttcgtgggtagccctgt

SEQ ID NO: 330089 - DNA, 25 bp, Artificial
  Probe
gccgatgctctcatcagttctccta

SEQ ID NO: 330090 - DNA, 25 bp, Artificial
  Probe
cacaagatgcgcatcatcgccttcg

SEQ ID NO: 330091 - DNA, 25 bp, Artificial
  Probe
actgtccagcccaaaggcaagatca

SEQ ID NO: 330092 - DNA, 25 bp, Artificial
  Probe
gctgcaggcccagcaggatgctgtc

SEQ ID NO: 330093 - DNA, 25 bp, Artificial
  Probe
caacagtgagtacatgcggaatgga

SEQ ID NO: 330094 - DNA, 25 bp, Artificial
  Probe
cgccatgctgggtcttggtgccagt

SEQ ID NO: 330095 - DNA, 25 bp, Artificial
  Probe
agatcaccttctgcactggcatccg

SEQ ID NO: 330096 - DNA, 25 bp, Artificial
  Probe
tgtcagtcccggagccggtccgcaa

SEQ ID NO: 330097 - DNA, 25 bp, Artificial
  Probe
gagcactatggtttgtgtggacaac

SEQ ID NO: 330098 - DNA, 25 bp, Artificial
  Probe
gttgtttgtcagtcccggagccggt

SEQ ID NO: 330099 - DNA, 25 bp, Artificial
  Probe
ctgagaataacgtgggcttgatcac

SEQ ID NO: 330100 - DNA, 25 bp, Artificial
  Probe
ggcccatctggctctgaagcaccgg

SEQ ID NO: 330101 - DNA, 25 bp, Artificial
  Probe
ttcgtgtctctatggaagagcagcg

SEQ ID NO: 330102 - DNA, 25 bp, Artificial
  Probe
cttggtgccagtgactttgagtttg

SEQ ID NO: 330103 - DNA, 25 bp, Artificial
  Probe
agttctcctattctagctggggaag

SEQ ID NO: 330104 - DNA, 25 bp, Artificial
  Probe
acggaactggatcacatctagtgac

SEQ ID NO: 330105 - DNA, 25 bp, Artificial
  Probe
gagtacatgcggaatggagacttcc

SEQ ID NO: 330106 - DNA, 25 bp, Artificial
  Probe
acaacgagaaggatctggtgaaact

SEQ ID NO: 330107 - DNA, 25 bp, Artificial
  Probe
cactatggtttgtgtggacaacagt

SEQ ID NO: 330108 - DNA, 25 bp, Artificial
  Probe
taaacggcaaggacggaactggatc

SEQ ID NO: 330109 - DNA, 25 bp, Artificial
  Probe
caccggcagggcaagaatcacaaga

SEQ ID NO: 330110 - DNA, 25 bp, Artificial
  Probe
cagcctggccgatgctctcatcagt

SEQ ID NO: 330111 - DNA, 25 bp, Artificial
  Probe
tgaaactagctaaacgccttaagaa

SEQ ID NO: 330112 - DNA, 25 bp, Artificial
  Probe
ggaaaaagctcaccatagaggagct

SEQ ID NO: 330113 - DNA, 25 bp, Artificial
  Probe
tcaggcaaacaggtatgggtatcag

SEQ ID NO: 330114 - DNA, 25 bp, Artificial
  Probe
aagggatgcctatctggctccttca

SEQ ID NO: 330115 - DNA, 25 bp, Artificial
  Probe
tggctaccttcaacggcaagaagga

SEQ ID NO: 330116 - DNA, 25 bp, Artificial
  Probe
gaagacactccaacgggtggctacc

SEQ ID NO: 330117 - DNA, 25 bp, Artificial
  Probe
actcaaaggccctgaagacactcca

SEQ ID NO: 330118 - DNA, 25 bp, Artificial
  Probe
caccatagaggagctgaagttcaac

SEQ ID NO: 330119 - DNA, 25 bp, Artificial
  Probe
cctactacagtttggctatgggggt

SEQ ID NO: 330120 - DNA, 25 bp, Artificial
  Probe
agctgaagttcaacttgcagaagga

SEQ ID NO: 330121 - DNA, 25 bp, Artificial
  Probe
ctgggccggcgcatcactcagagct

SEQ ID NO: 330122 - DNA, 25 bp, Artificial
  Probe
ggttgacatcccagccaagttcatc

SEQ ID NO: 330123 - DNA, 25 bp, Artificial
  Probe
gggatgcctatctggctccttcagc

SEQ ID NO: 330124 - DNA, 25 bp, Artificial
  Probe
taccctacagtcctcaggcaaacag

SEQ ID NO: 330125 - DNA, 25 bp, Artificial
  Probe
gccctcatctttgtgccttcagaaa

SEQ ID NO: 330126 - DNA, 25 bp, Artificial
  Probe
acagcactggctgtgtttggaaagg

SEQ ID NO: 330127 - DNA, 25 bp, Artificial
  Probe
aaaggcatcccaaataatcccgctg

SEQ ID NO: 330128 - DNA, 25 bp, Artificial
  Probe
ttaccggagactatcgaggacatac

SEQ ID NO: 330129 - DNA, 25 bp, Artificial
  Probe
tatctgacttgttccgggtgtccat

SEQ ID NO: 330130 - DNA, 25 bp, Artificial
  Probe
tcagccaaggtcaaatatggcttat

SEQ ID NO: 330131 - DNA, 25 bp, Artificial
  Probe
ttctatctggaaaatactcaaaggc

SEQ ID NO: 330132 - DNA, 25 bp, Artificial
  Probe
ggagtcaacatctacatactccaga

SEQ ID NO: 330133 - DNA, 25 bp, Artificial
  Probe
ccttcaacggcaagaaggaggaagg

SEQ ID NO: 330134 - DNA, 25 bp, Artificial
  Probe
tggagtcaacatctacatactccag

SEQ ID NO: 330135 - DNA, 25 bp, Artificial
  Probe
cgagtgagctctaccctacagtcct

SEQ ID NO: 330136 - DNA, 25 bp, Artificial
  Probe
tcttcctctacacgagtgagctcta

SEQ ID NO: 330137 - DNA, 25 bp, Artificial
  Probe
gagtccatacgctggctggttctat

SEQ ID NO: 330138 - DNA, 25 bp, Artificial
  Probe
ctctctctggcctggttttctactg

SEQ ID NO: 330139 - DNA, 25 bp, Artificial
  Probe
tttctactggttttgcctactacag

SEQ ID NO: 330140 - DNA, 25 bp, Artificial
  Probe
cactccaacgggtggctaccttcaa

SEQ ID NO: 330141 - DNA, 25 bp, Artificial
  Probe
catactccagattatctttggtggg

SEQ ID NO: 330142 - DNA, 25 bp, Artificial
  Probe
accttcaacggcaagaaggaggaag

SEQ ID NO: 330143 - DNA, 25 bp, Artificial
  Probe
tctgtctctctctggcctggttttc

SEQ ID NO: 330144 - DNA, 25 bp, Artificial
  Probe
tatctggctccttcagctgcctctt

SEQ ID NO: 330145 - DNA, 25 bp, Artificial
  Probe
ggaaaatactcaaaggccctgaaga

SEQ ID NO: 330146 - DNA, 25 bp, Artificial
  Probe
acttgttccgggtgtccatccttcg

SEQ ID NO: 330147 - DNA, 25 bp, Artificial
  Probe
ttggccctcatctttgtgccttcag

SEQ ID NO: 330148 - DNA, 25 bp, Artificial
  Probe
gtgccttcagaaatgcagctcttga

SEQ ID NO: 330149 - DNA, 25 bp, Artificial
  Probe
agggaaaaagctcaccatagaggag

SEQ ID NO: 330150 - DNA, 25 bp, Artificial
  Probe
caatcctctccttaagttatctggg

SEQ ID NO: 330151 - DNA, 25 bp, Artificial
  Probe
caacgggtggctaccttcaacggca

SEQ ID NO: 330152 - DNA, 25 bp, Artificial
  Probe
tacatactccagattatctttggtg

SEQ ID NO: 330153 - DNA, 25 bp, Artificial
  Probe
ccttaagttatctgggccggcgcat

SEQ ID NO: 330154 - DNA, 25 bp, Artificial
  Probe
gtcaaatatggcttatctgacttgt

SEQ ID NO: 330155 - DNA, 25 bp, Artificial
  Probe
gggccggcgcatcactcagagcttc

SEQ ID NO: 330156 - DNA, 25 bp, Artificial
  Probe
atcttctccttgttgtcctggtggg

SEQ ID NO: 330157 - DNA, 25 bp, Artificial
  Probe
gcctggttttctactggttttgcct

SEQ ID NO: 330158 - DNA, 25 bp, Artificial
  Probe
accagaatacaaacaatacacccct

SEQ ID NO: 330159 - DNA, 25 bp, Artificial
  Probe
agtgacatttgattcaaccgttgag

SEQ ID NO: 330160 - DNA, 25 bp, Artificial
  Probe
tgcagagaactcggaacatgtgtat

SEQ ID NO: 330161 - DNA, 25 bp, Artificial
  Probe
gtttcatcagcatagactgtggagg

SEQ ID NO: 330162 - DNA, 25 bp, Artificial
  Probe
agtatttacaaaacaaagtgacatt

SEQ ID NO: 330163 - DNA, 25 bp, Artificial
  Probe
gaatacaaacaatacacccctgacc

SEQ ID NO: 330164 - DNA, 25 bp, Artificial
  Probe
tttacaaaacaaagtgacatttgat

SEQ ID NO: 330165 - DNA, 25 bp, Artificial
  Probe
tggactttggattcaggttttttgc

SEQ ID NO: 330166 - DNA, 25 bp, Artificial
  Probe
tgtacataatgtttcatcagcatag

SEQ ID NO: 330167 - DNA, 25 bp, Artificial
  Probe
tatttggactttggattcaggtttt

SEQ ID NO: 330168 - DNA, 25 bp, Artificial
  Probe
ttcatcagcatagactgtggaggag

SEQ ID NO: 330169 - DNA, 25 bp, Artificial
  Probe
gactttggattcaggttttttgcat

SEQ ID NO: 330170 - DNA, 25 bp, Artificial
  Probe
agagaactcggaacatgtgtatgta

SEQ ID NO: 330171 - DNA, 25 bp, Artificial
  Probe
tattatttggactttggattcaggt

SEQ ID NO: 330172 - DNA, 25 bp, Artificial
  Probe
ccagaatacaaacaatacacccctg

SEQ ID NO: 330173 - DNA, 25 bp, Artificial
  Probe
gacatttgattcaaccgttgagctg

SEQ ID NO: 330174 - DNA, 25 bp, Artificial
  Probe
atgtttcatcagcatagactgtgga

SEQ ID NO: 330175 - DNA, 25 bp, Artificial
  Probe
tatgtattatttggactttggattc

SEQ ID NO: 330176 - DNA, 25 bp, Artificial
  Probe
ttggactttggattcaggttttttg

SEQ ID NO: 330177 - DNA, 25 bp, Artificial
  Probe
taatgtttcatcagcatagactgtg

SEQ ID NO: 330178 - DNA, 25 bp, Artificial
  Probe
tgacatttgattcaaccgttgagct

SEQ ID NO: 330179 - DNA, 25 bp, Artificial
  Probe
tatctttcgttatgggtaaagtatt

SEQ ID NO: 330180 - DNA, 25 bp, Artificial
  Probe
tttcatcagcatagactgtggagga

SEQ ID NO: 330181 - DNA, 25 bp, Artificial
  Probe
aatgtttcatcagcatagactgtgg

SEQ ID NO: 330182 - DNA, 25 bp, Artificial
  Probe
gtgacatttgattcaaccgttgagc

SEQ ID NO: 330183 - DNA, 25 bp, Artificial
  Probe
aagttcttagcacaaatgttttaca

SEQ ID NO: 330184 - DNA, 25 bp, Artificial
  Probe
catcagcatagactgtggaggagtg

SEQ ID NO: 330185 - DNA, 25 bp, Artificial
  Probe
acatttgattcaaccgttgagctgt

SEQ ID NO: 330186 - DNA, 25 bp, Artificial
  Probe
tcatcagcatagactgtggaggagt

SEQ ID NO: 330187 - DNA, 25 bp, Artificial
  Probe
atcagcatagactgtggaggagtgc

SEQ ID NO: 330188 - DNA, 25 bp, Artificial
  Probe
ctttggattcaggttttttgcatgt

SEQ ID NO: 330189 - DNA, 25 bp, Artificial
  Probe
ttagcacaaatgttttacataattt

SEQ ID NO: 330190 - DNA, 25 bp, Artificial
  Probe
cataatgtttcatcagcatagactg

SEQ ID NO: 330191 - DNA, 25 bp, Artificial
  Probe
actcggaacatgtgtatgtattatt

SEQ ID NO: 330192 - DNA, 25 bp, Artificial
  Probe
tcagcatagactgtggaggagtgca

SEQ ID NO: 330193 - DNA, 25 bp, Artificial
  Probe
tacaaacaatacacccctgacccca

SEQ ID NO: 330194 - DNA, 25 bp, Artificial
  Probe
gtacataatgtttcatcagcataga

SEQ ID NO: 330195 - DNA, 25 bp, Artificial
  Probe
actgtggaggagtgcagagaactcg

SEQ ID NO: 330196 - DNA, 25 bp, Artificial
  Probe
agcacaaatgttttacataatttgt

SEQ ID NO: 330197 - DNA, 25 bp, Artificial
  Probe
atatctttcgttatgggtaaagtat

SEQ ID NO: 330198 - DNA, 25 bp, Artificial
  Probe
ataatgtttcatcagcatagactgt

SEQ ID NO: 330199 - DNA, 25 bp, Artificial
  Probe
tgtttcatcagcatagactgtggag

SEQ ID NO: 330200 - DNA, 25 bp, Artificial
  Probe
tacaaaacaaagtgacatttgattc

SEQ ID NO: 330201 - DNA, 25 bp, Artificial
  Probe
cagagaactcggaacatgtgtatgt

SEQ ID NO: 330202 - DNA, 25 bp, Artificial
  Probe
acataatgtttcatcagcatagact

SEQ ID NO: 330203 - DNA, 25 bp, Artificial
  Probe
cagcatagactgtggaggagtgcag

SEQ ID NO: 330204 - DNA, 25 bp, Artificial
  Probe
tgggtgtgttggtgcacgcctttaa

SEQ ID NO: 330205 - DNA, 25 bp, Artificial
  Probe
gtgcattttctcagaaagcaggaag

SEQ ID NO: 330206 - DNA, 25 bp, Artificial
  Probe
ttaatcccggcactcgggaggcaga

SEQ ID NO: 330207 - DNA, 25 bp, Artificial
  Probe
ttggtgcacgcctttaatcccggca

SEQ ID NO: 330208 - DNA, 25 bp, Artificial
  Probe
gagacagtctcagatctctctgagt

SEQ ID NO: 330209 - DNA, 25 bp, Artificial
  Probe
ctcagatctctctgagttcaaggtc

SEQ ID NO: 330210 - DNA, 25 bp, Artificial
  Probe
tctcagatctctctgagttcaaggt

SEQ ID NO: 330211 - DNA, 25 bp, Artificial
  Probe
tttaatcccggcactcgggaggcag

SEQ ID NO: 330212 - DNA, 25 bp, Artificial
  Probe
cagatctctctgagttcaaggtcag

SEQ ID NO: 330213 - DNA, 25 bp, Artificial
  Probe
tgtgcattttctcagaaagcaggaa

SEQ ID NO: 330214 - DNA, 25 bp, Artificial
  Probe
gagttgcccaatcttaagtacaaat

SEQ ID NO: 330215 - DNA, 25 bp, Artificial
  Probe
tggtgcacgcctttaatcccggcac

SEQ ID NO: 330216 - DNA, 25 bp, Artificial
  Probe
tcagatctctctgagttcaaggtca

SEQ ID NO: 330217 - DNA, 25 bp, Artificial
  Probe
agagacagtctcagatctctctgag

SEQ ID NO: 330218 - DNA, 25 bp, Artificial
  Probe
agacagtctcagatctctctgagtt

SEQ ID NO: 330219 - DNA, 25 bp, Artificial
  Probe
ggtgtgttggtgcacgcctttaatc

SEQ ID NO: 330220 - DNA, 25 bp, Artificial
  Probe
agtctcagatctctctgagttcaag

SEQ ID NO: 330221 - DNA, 25 bp, Artificial
  Probe
gtgtgttggtgcacgcctttaatcc

SEQ ID NO: 330222 - DNA, 25 bp, Artificial
  Probe
ggtgcacgcctttaatcccggcact

SEQ ID NO: 330223 - DNA, 25 bp, Artificial
  Probe
cagtctcagatctctctgagttcaa

SEQ ID NO: 330224 - DNA, 25 bp, Artificial
  Probe
gtctcagatctctctgagttcaagg

SEQ ID NO: 330225 - DNA, 25 bp, Artificial
  Probe
acagtctcagatctctctgagttca

SEQ ID NO: 330226 - DNA, 25 bp, Artificial
  Probe
gcattttctcagaaagcaggaagaa

SEQ ID NO: 330227 - DNA, 25 bp, Artificial
  Probe
taatcccggcactcgggaggcagag

SEQ ID NO: 330228 - DNA, 25 bp, Artificial
  Probe
ctgggtgtgttggtgcacgccttta

SEQ ID NO: 330229 - DNA, 25 bp, Artificial
  Probe
gggtgtgttggtgcacgcctttaat

SEQ ID NO: 330230 - DNA, 25 bp, Artificial
  Probe
actcgggaggcagagacagtctcag

SEQ ID NO: 330231 - DNA, 25 bp, Artificial
  Probe
gacagtctcagatctctctgagttc

SEQ ID NO: 330232 - DNA, 25 bp, Artificial
  Probe
agatctctctgagttcaaggtcagc

SEQ ID NO: 330233 - DNA, 25 bp, Artificial
  Probe
cactcgggaggcagagacagtctca

SEQ ID NO: 330234 - DNA, 25 bp, Artificial
  Probe
tgcattttctcagaaagcaggaaga

SEQ ID NO: 330235 - DNA, 25 bp, Artificial
  Probe
accacattgctaaagcactggagtg

SEQ ID NO: 330236 - DNA, 25 bp, Artificial
  Probe
acctctgcagatgaccacattgcta

SEQ ID NO: 330237 - DNA, 25 bp, Artificial
  Probe
gctctgtttggtagcactgctggca

SEQ ID NO: 330238 - DNA, 25 bp, Artificial
  Probe
ttttcagcttctggagaagtgtctg

SEQ ID NO: 330239 - DNA, 25 bp, Artificial
  Probe
tgttgtaacttaagacccatcctga

SEQ ID NO: 330240 - DNA, 25 bp, Artificial
  Probe
tctgtttggtagcactgctggcagg

SEQ ID NO: 330241 - DNA, 25 bp, Artificial
  Probe
tttggtagcactgctggcagggaaa

SEQ ID NO: 330242 - DNA, 25 bp, Artificial
  Probe
acattgctaaagcactggagtgaac

SEQ ID NO: 330243 - DNA, 25 bp, Artificial
  Probe
agcactgctggcagggaaacttcct

SEQ ID NO: 330244 - DNA, 25 bp, Artificial
  Probe
caaagcacttggtgttatttaaggc

SEQ ID NO: 330245 - DNA, 25 bp, Artificial
  Probe
gactgcgggttctgcagctctgttt

SEQ ID NO: 330246 - DNA, 25 bp, Artificial
  Probe
ttctggagaagtgtctgttctctct

SEQ ID NO: 330247 - DNA, 25 bp, Artificial
  Probe
ccaaccaatgtgaaaggagaatgag

SEQ ID NO: 330248 - DNA, 25 bp, Artificial
  Probe
gcttctggagaagtgtctgttctct

SEQ ID NO: 330249 - DNA, 25 bp, Artificial
  Probe
tcgatacctgactgcgggttctgca

SEQ ID NO: 330250 - DNA, 25 bp, Artificial
  Probe
agggaaacttcctgcctcctggatg

SEQ ID NO: 330251 - DNA, 25 bp, Artificial
  Probe
cactgtcagggcacttttcagcttc

SEQ ID NO: 330252 - DNA, 25 bp, Artificial
  Probe
gcagggaaacttcctgcctcctgga

SEQ ID NO: 330253 - DNA, 25 bp, Artificial
  Probe
cagatgaccacattgctaaagcact

SEQ ID NO: 330254 - DNA, 25 bp, Artificial
  Probe
attgctaaagcactggagtgaaccc

SEQ ID NO: 330255 - DNA, 25 bp, Artificial
  Probe
ctgctggcagggaaacttcctgcct

SEQ ID NO: 330256 - DNA, 25 bp, Artificial
  Probe
agcaagacctctgcagatgaccaca

SEQ ID NO: 330257 - DNA, 25 bp, Artificial
  Probe
acttcctgcctcctggatgaaggaa

SEQ ID NO: 330258 - DNA, 25 bp, Artificial
  Probe
gggcacttttcagcttctggagaag

SEQ ID NO: 330259 - DNA, 25 bp, Artificial
  Probe
tcgggggcctgataaacaagttcat

SEQ ID NO: 330260 - DNA, 25 bp, Artificial
  Probe
tgctaaagcactggagtgaaccccc

SEQ ID NO: 330261 - DNA, 25 bp, Artificial
  Probe
cctcccaaagcacttggtgttattt

SEQ ID NO: 330262 - DNA, 25 bp, Artificial
  Probe
tggtagcactgctggcagggaaact

SEQ ID NO: 330263 - DNA, 25 bp, Artificial
  Probe
acttttcagcttctggagaagtgtc

SEQ ID NO: 330264 - DNA, 25 bp, Artificial
  Probe
ttgtaacttaagacccatcctgaag

SEQ ID NO: 330265 - DNA, 25 bp, Artificial
  Probe
gggagcaagacctctgcagatgacc

SEQ ID NO: 330266 - DNA, 25 bp, Artificial
  Probe
cccaaagcacttggtgttatttaag

SEQ ID NO: 330267 - DNA, 25 bp, Artificial
  Probe
ctgactgcgggttctgcagctctgt

SEQ ID NO: 330268 - DNA, 25 bp, Artificial
  Probe
ggttctgcagctctgtttggtagca

SEQ ID NO: 330269 - DNA, 25 bp, Artificial
  Probe
ccacattgctaaagcactggagtga

SEQ ID NO: 330270 - DNA, 25 bp, Artificial
  Probe
ctcctggatgaaggaagggtttact

SEQ ID NO: 330271 - DNA, 25 bp, Artificial
  Probe
ggcacttttcagcttctggagaagt

SEQ ID NO: 330272 - DNA, 25 bp, Artificial
  Probe
gcgggttctgcagctctgtttggta

SEQ ID NO: 330273 - DNA, 25 bp, Artificial
  Probe
gcctcctggatgaaggaagggttta

SEQ ID NO: 330274 - DNA, 25 bp, Artificial
  Probe
ttcctgcctcctggatgaaggaagg

SEQ ID NO: 330275 - DNA, 25 bp, Artificial
  Probe
aacttaagacccatcctgaagtgcc

SEQ ID NO: 330276 - DNA, 25 bp, Artificial
  Probe
agacccatcctgaagtgccctgaag

SEQ ID NO: 330277 - DNA, 25 bp, Artificial
  Probe
cctgactgcgggttctgcagctctg

SEQ ID NO: 330278 - DNA, 25 bp, Artificial
  Probe
cccatcctgaagtgccctgaagtgc

SEQ ID NO: 330279 - DNA, 25 bp, Artificial
  Probe
ccccaggatgggagaagccatgtcg

SEQ ID NO: 330280 - DNA, 25 bp, Artificial
  Probe
cagctctgtttggtagcactgctgg

SEQ ID NO: 330281 - DNA, 25 bp, Artificial
  Probe
cacagcagcccgaggaggccatgga

SEQ ID NO: 330282 - DNA, 25 bp, Artificial
  Probe
catgattcggaaacggtcttttggg

SEQ ID NO: 330283 - DNA, 25 bp, Artificial
  Probe
gagcgttccttgtcagcacccggaa

SEQ ID NO: 330284 - DNA, 25 bp, Artificial
  Probe
gcacgtgtgtagagccttgactgtc

SEQ ID NO: 330285 - DNA, 25 bp, Artificial
  Probe
gcagcatgtcctacggaaaccaagc

SEQ ID NO: 330286 - DNA, 25 bp, Artificial
  Probe
ctagtgaagaccatgattcggaaac

SEQ ID NO: 330287 - DNA, 25 bp, Artificial
  Probe
agccttgactgtcatctctggttat

SEQ ID NO: 330288 - DNA, 25 bp, Artificial
  Probe
acctcgcatgcctggctgtgtggcc

SEQ ID NO: 330289 - DNA, 25 bp, Artificial
  Probe
tgcgtttccatagcagcatgtccta

SEQ ID NO: 330290 - DNA, 25 bp, Artificial
  Probe
aggagcgttccttgtcagcacccgg

SEQ ID NO: 330291 - DNA, 25 bp, Artificial
  Probe
tgtgatcctagtgaagaccatgatt

SEQ ID NO: 330292 - DNA, 25 bp, Artificial
  Probe
atgcctggctgtgtggccctgcacg

SEQ ID NO: 330293 - DNA, 25 bp, Artificial
  Probe
tcagtcaaacacattcccagcctgg

SEQ ID NO: 330294 - DNA, 25 bp, Artificial
  Probe
agtgaagaccatgattcggaaacgg

SEQ ID NO: 330295 - DNA, 25 bp, Artificial
  Probe
gaagtgctcttgtgaaaggtggtcc

SEQ ID NO: 330296 - DNA, 25 bp, Artificial
  Probe
ttccttgtcagcacccggaaacctg

SEQ ID NO: 330297 - DNA, 25 bp, Artificial
  Probe
cgcatgcctggctgtgtggccctgc

SEQ ID NO: 330298 - DNA, 25 bp, Artificial
  Probe
cggaaaccaagcacgtgtgtagagc

SEQ ID NO: 330299 - DNA, 25 bp, Artificial
  Probe
tcctagtgaagaccatgattcggaa

SEQ ID NO: 330300 - DNA, 25 bp, Artificial
  Probe
tggcaactgtgatcctagtgaagac

SEQ ID NO: 330301 - DNA, 25 bp, Artificial
  Probe
tgaagaccatgattcggaaacggtc

SEQ ID NO: 330302 - DNA, 25 bp, Artificial
  Probe
gtgtgtagagccttgactgtcatct

SEQ ID NO: 330303 - DNA, 25 bp, Artificial
  Probe
cttgactgtcatctctggttatcag

SEQ ID NO: 330304 - DNA, 25 bp, Artificial
  Probe
gttccttgtcagcacccggaaacct

SEQ ID NO: 330305 - DNA, 25 bp, Artificial
  Probe
gcgttccttgtcagcacccggaaac

SEQ ID NO: 330306 - DNA, 25 bp, Artificial
  Probe
accatgattcggaaacggtcttttg

SEQ ID NO: 330307 - DNA, 25 bp, Artificial
  Probe
tcttgtgaaaggtggtccctgcgtg

SEQ ID NO: 330308 - DNA, 25 bp, Artificial
  Probe
acctgacctcgcatgcctggctgtg

SEQ ID NO: 330309 - DNA, 25 bp, Artificial
  Probe
cgtttccatagcagcatgtcctacg

SEQ ID NO: 330310 - DNA, 25 bp, Artificial
  Probe
tgcaccctgcgtttccatagcagca

SEQ ID NO: 330311 - DNA, 25 bp, Artificial
  Probe
accaagcacgtgtgtagagccttga

SEQ ID NO: 330312 - DNA, 25 bp, Artificial
  Probe
caagcacgtgtgtagagccttgact

SEQ ID NO: 330313 - DNA, 25 bp, Artificial
  Probe
tcccagcctggcaactgtgatccta

SEQ ID NO: 330314 - DNA, 25 bp, Artificial
  Probe
actgtgatcctagtgaagaccatga

SEQ ID NO: 330315 - DNA, 25 bp, Artificial
  Probe
gtgctcttgtgaaaggtggtccctg

SEQ ID NO: 330316 - DNA, 25 bp, Artificial
  Probe
cctgacctcgcatgcctggctgtgt

SEQ ID NO: 330317 - DNA, 25 bp, Artificial
  Probe
gctgctgcaccctgcgtttccatag

SEQ ID NO: 330318 - DNA, 25 bp, Artificial
  Probe
catagcagcatgtcctacggaaacc

SEQ ID NO: 330319 - DNA, 25 bp, Artificial
  Probe
ggaggagcgttccttgtcagcaccc

SEQ ID NO: 330320 - DNA, 25 bp, Artificial
  Probe
agtcaaacacattcccagcctggca

SEQ ID NO: 330321 - DNA, 25 bp, Artificial
  Probe
ccatgattcggaaacggtcttttgg

SEQ ID NO: 330322 - DNA, 25 bp, Artificial
  Probe
tgactgtcatctctggttatcagtt

SEQ ID NO: 330323 - DNA, 25 bp, Artificial
  Probe
cctgcgtttccatagcagcatgtcc

SEQ ID NO: 330324 - DNA, 25 bp, Artificial
  Probe
acattcccagcctggcaactgtgat

SEQ ID NO: 330325 - DNA, 25 bp, Artificial
  Probe
catgtcctacggaaaccaagcacgt

SEQ ID NO: 330326 - DNA, 25 bp, Artificial
  Probe
tagcagcatgtcctacggaaaccaa

SEQ ID NO: 330327 - DNA, 25 bp, Artificial
  Probe
caatttctacaacgaaattgttgga

SEQ ID NO: 330328 - DNA, 25 bp, Artificial
  Probe
gacatcttggccagcgacgcggttg

SEQ ID NO: 330329 - DNA, 25 bp, Artificial
  Probe
taactactacagcttcagctactgg

SEQ ID NO: 330330 - DNA, 25 bp, Artificial
  Probe
gtgggactttctattgtgggtcagc

SEQ ID NO: 330331 - DNA, 25 bp, Artificial
  Probe
gtcccgctttatagcgataccatca

SEQ ID NO: 330332 - DNA, 25 bp, Artificial
  Probe
gctagtgcataaacacttcagtttt

SEQ ID NO: 330333 - DNA, 25 bp, Artificial
  Probe
agctttgttctcctactcgggctgg

SEQ ID NO: 330334 - DNA, 25 bp, Artificial
  Probe
ctccgaagccagctgccaaaggcaa

SEQ ID NO: 330335 - DNA, 25 bp, Artificial
  Probe
gaggacatcttccagctcattaact

SEQ ID NO: 330336 - DNA, 25 bp, Artificial
  Probe
cagtgccttctctactcttcaatgg

SEQ ID NO: 330337 - DNA, 25 bp, Artificial
  Probe
tcggcatcggcatcgcgctctcggg

SEQ ID NO: 330338 - DNA, 25 bp, Artificial
  Probe
ggttcacaccagtgccttctctact

SEQ ID NO: 330339 - DNA, 25 bp, Artificial
  Probe
aatcccgagaggaacttgcccctct

SEQ ID NO: 330340 - DNA, 25 bp, Artificial
  Probe
gtcagttgctgcagaaatggacttg

SEQ ID NO: 330341 - DNA, 25 bp, Artificial
  Probe
tgtcactgaagagatcaggaatccc

SEQ ID NO: 330342 - DNA, 25 bp, Artificial
  Probe
tgtgggctcgagagaaggccacctc

SEQ ID NO: 330343 - DNA, 25 bp, Artificial
  Probe
gcttagtggccctgggatatttacg

SEQ ID NO: 330344 - DNA, 25 bp, Artificial
  Probe
atcggcatcggcatcgcgctctcgg

SEQ ID NO: 330345 - DNA, 25 bp, Artificial
  Probe
tcttggccagcgacgcggttgctgt

SEQ ID NO: 330346 - DNA, 25 bp, Artificial
  Probe
tccattggcatttccatgcccatcg

SEQ ID NO: 330347 - DNA, 25 bp, Artificial
  Probe
cagttcaaacagacatggaaactaa

SEQ ID NO: 330348 - DNA, 25 bp, Artificial
  Probe
ttggcatttccatgcccatcgtcac

SEQ ID NO: 330349 - DNA, 25 bp, Artificial
  Probe
ttctgcctctgtaccatcttcctgg

SEQ ID NO: 330350 - DNA, 25 bp, Artificial
  Probe
ctcccggatgccatctgtatgattc

SEQ ID NO: 330351 - DNA, 25 bp, Artificial
  Probe
ttatttgtgggctcgagagaaggcc

SEQ ID NO: 330352 - DNA, 25 bp, Artificial
  Probe
ttacagtgtgctagacataaaggac

SEQ ID NO: 330353 - DNA, 25 bp, Artificial
  Probe
cacacggtacctccagatcatctgt

SEQ ID NO: 330354 - DNA, 25 bp, Artificial
  Probe
tctacaacgaaattgttggactaaa

SEQ ID NO: 330355 - DNA, 25 bp, Artificial
  Probe
gccatctgtatgattcatgttgaac

SEQ ID NO: 330356 - DNA, 25 bp, Artificial
  Probe
gtatgattcatgttgaacggttcac

SEQ ID NO: 330357 - DNA, 25 bp, Artificial
  Probe
gctgggacacccttaactatgtcac

SEQ ID NO: 330358 - DNA, 25 bp, Artificial
  Probe
ctacgctggaaggaacctgaccggc

SEQ ID NO: 330359 - DNA, 25 bp, Artificial
  Probe
tagacataaaggacatcttggccag

SEQ ID NO: 330360 - DNA, 25 bp, Artificial
  Probe
tttggtggcctcaatgcttccattg

SEQ ID NO: 330361 - DNA, 25 bp, Artificial
  Probe
attgtggctgcttctaggcttttat

SEQ ID NO: 330362 - DNA, 25 bp, Artificial
  Probe
ttcaactggacaattccattagcag

SEQ ID NO: 330363 - DNA, 25 bp, Artificial
  Probe
gtgtggaggacatcttccagctcat

SEQ ID NO: 330364 - DNA, 25 bp, Artificial
  Probe
aagagatcaggaatcccgagaggaa

SEQ ID NO: 330365 - DNA, 25 bp, Artificial
  Probe
actcttcaatggtatcttggcactg

SEQ ID NO: 330366 - DNA, 25 bp, Artificial
  Probe
actggttctttgtgggactttctat

SEQ ID NO: 330367 - DNA, 25 bp, Artificial
  Probe
aaacgacctctgtgccttcgcagga

SEQ ID NO: 330368 - DNA, 25 bp, Artificial
  Probe
atcatctacctcttgaccaatgtgg

SEQ ID NO: 330369 - DNA, 25 bp, Artificial
  Probe
gccagctgccaaaggcaataaaacc

SEQ ID NO: 330370 - DNA, 25 bp, Artificial
  Probe
tatttcctcatcatcagagtgcccg

SEQ ID NO: 330371 - DNA, 25 bp, Artificial
  Probe
cctttgcagatcagatttttggaat

SEQ ID NO: 330372 - DNA, 25 bp, Artificial
  Probe
cacttcagttttttcctaaagtgcg

SEQ ID NO: 330373 - DNA, 25 bp, Artificial
  Probe
acacttgggtagcattgagaaggca

SEQ ID NO: 330374 - DNA, 25 bp, Artificial
  Probe
agaagtcaggtccagcaccattgat

SEQ ID NO: 330375 - DNA, 25 bp, Artificial
  Probe
taagaagtcaggtccagcaccattg

SEQ ID NO: 330376 - DNA, 25 bp, Artificial
  Probe
tgtttcactcccatgttctctgtgt

SEQ ID NO: 330377 - DNA, 25 bp, Artificial
  Probe
ttccagccttcagagctttgttatt

SEQ ID NO: 330378 - DNA, 25 bp, Artificial
  Probe
ctttccagccttcagagctttgtta

SEQ ID NO: 330379 - DNA, 25 bp, Artificial
  Probe
gtttcactcccatgttctctgtgtc

SEQ ID NO: 330380 - DNA, 25 bp, Artificial
  Probe
cactcccatgttctctgtgtcacag

SEQ ID NO: 330381 - DNA, 25 bp, Artificial
  Probe
ccatagatcctcttttgtcgagttt

SEQ ID NO: 330382 - DNA, 25 bp, Artificial
  Probe
tcaggtccagcaccattgatttgac

SEQ ID NO: 330383 - DNA, 25 bp, Artificial
  Probe
gtcaggtccagcaccattgatttga

SEQ ID NO: 330384 - DNA, 25 bp, Artificial
  Probe
tgtcacagactgttcaagtatcatt

SEQ ID NO: 330385 - DNA, 25 bp, Artificial
  Probe
tgtcccatagatcctcttttgtcga

SEQ ID NO: 330386 - DNA, 25 bp, Artificial
  Probe
taggattgtttcactcccatgttct

SEQ ID NO: 330387 - DNA, 25 bp, Artificial
  Probe
tttaagaagtcaggtccagcaccat

SEQ ID NO: 330388 - DNA, 25 bp, Artificial
  Probe
atagatcctcttttgtcgagttttc

SEQ ID NO: 330389 - DNA, 25 bp, Artificial
  Probe
tcctgccagaaaaccttggtgttta

SEQ ID NO: 330390 - DNA, 25 bp, Artificial
  Probe
ttcagagctttgttattacttcatg

SEQ ID NO: 330391 - DNA, 25 bp, Artificial
  Probe
tgccagaaaaccttggtgtttaaga

SEQ ID NO: 330392 - DNA, 25 bp, Artificial
  Probe
caccattgatttgacacttgggtag

SEQ ID NO: 330393 - DNA, 25 bp, Artificial
  Probe
catagatcctcttttgtcgagtttt

SEQ ID NO: 330394 - DNA, 25 bp, Artificial
  Probe
actcccatgttctctgtgtcacaga

SEQ ID NO: 330395 - DNA, 25 bp, Artificial
  Probe
cagcaccattgatttgacacttggg

SEQ ID NO: 330396 - DNA, 25 bp, Artificial
  Probe
tcccatgttctctgtgtcacagact

SEQ ID NO: 330397 - DNA, 25 bp, Artificial
  Probe
agctttccagccttcagagctttgt

SEQ ID NO: 330398 - DNA, 25 bp, Artificial
  Probe
aataggattgtttcactcccatgtt

SEQ ID NO: 330399 - DNA, 25 bp, Artificial
  Probe
gtccagcaccattgatttgacactt

SEQ ID NO: 330400 - DNA, 25 bp, Artificial
  Probe
ctctgtgtcacagactgttcaagta

SEQ ID NO: 330401 - DNA, 25 bp, Artificial
  Probe
accattgatttgacacttgggtagc

SEQ ID NO: 330402 - DNA, 25 bp, Artificial
  Probe
gttctctgtgtcacagactgttcaa

SEQ ID NO: 330403 - DNA, 25 bp, Artificial
  Probe
gacacttgggtagcattgagaaggc

SEQ ID NO: 330404 - DNA, 25 bp, Artificial
  Probe
gccttcagagctttgttattacttc

SEQ ID NO: 330405 - DNA, 25 bp, Artificial
  Probe
atagagctttccagccttcagagct

SEQ ID NO: 330406 - DNA, 25 bp, Artificial
  Probe
ctgccagaaaaccttggtgtttaag

SEQ ID NO: 330407 - DNA, 25 bp, Artificial
  Probe
cattgatttgacacttgggtagcat

SEQ ID NO: 330408 - DNA, 25 bp, Artificial
  Probe
ggattgtttcactcccatgttctct

SEQ ID NO: 330409 - DNA, 25 bp, Artificial
  Probe
tgtgtcacagactgttcaagtatca

SEQ ID NO: 330410 - DNA, 25 bp, Artificial
  Probe
atgtcccatagatcctcttttgtcg

SEQ ID NO: 330411 - DNA, 25 bp, Artificial
  Probe
gaaatagagctttccagccttcaga

SEQ ID NO: 330412 - DNA, 25 bp, Artificial
  Probe
ctcctgccagaaaaccttggtgttt

SEQ ID NO: 330413 - DNA, 25 bp, Artificial
  Probe
tccagcaccattgatttgacacttg

SEQ ID NO: 330414 - DNA, 25 bp, Artificial
  Probe
agtcaggtccagcaccattgatttg

SEQ ID NO: 330415 - DNA, 25 bp, Artificial
  Probe
ccatgttctctgtgtcacagactgt

SEQ ID NO: 330416 - DNA, 25 bp, Artificial
  Probe
aatagagctttccagccttcagagc

SEQ ID NO: 330417 - DNA, 25 bp, Artificial
  Probe
ccagccttcagagctttgttattac

SEQ ID NO: 330418 - DNA, 25 bp, Artificial
  Probe
ttctctgtgtcacagactgttcaag

SEQ ID NO: 330419 - DNA, 25 bp, Artificial
  Probe
accacacggagttgtattggaaaca

SEQ ID NO: 330420 - DNA, 25 bp, Artificial
  Probe
atttgtctagtaatgtaatgtgatc

SEQ ID NO: 330421 - DNA, 25 bp, Artificial
  Probe
ttattatgtgcttaagatataatag

SEQ ID NO: 330422 - DNA, 25 bp, Artificial
  Probe
ggtctatagacatgcatgcttcctt

SEQ ID NO: 330423 - DNA, 25 bp, Artificial
  Probe
tcttctctttttaagactatttgga

SEQ ID NO: 330424 - DNA, 25 bp, Artificial
  Probe
tatagacatgcatgcttcctttagt

SEQ ID NO: 330425 - DNA, 25 bp, Artificial
  Probe
tcaggtctatcatatggtttgacag

SEQ ID NO: 330426 - DNA, 25 bp, Artificial
  Probe
tcatatggtttgacagagtttttaa

SEQ ID NO: 330427 - DNA, 25 bp, Artificial
  Probe
gcaactgtccccagggaaatagaag

SEQ ID NO: 330428 - DNA, 25 bp, Artificial
  Probe
tatacacaaccacacggagttgtat

SEQ ID NO: 330429 - DNA, 25 bp, Artificial
  Probe
gaaattcagcctggatctattacaa

SEQ ID NO: 330430 - DNA, 25 bp, Artificial
  Probe
caaagtgttgcaactgtccccaggg

SEQ ID NO: 330431 - DNA, 25 bp, Artificial
  Probe
gacatgcatgcttcctttagtcttc

SEQ ID NO: 330432 - DNA, 25 bp, Artificial
  Probe
caaccacacggagttgtattggaaa

SEQ ID NO: 330433 - DNA, 25 bp, Artificial
  Probe
ccacacggagttgtattggaaacag

SEQ ID NO: 330434 - DNA, 25 bp, Artificial
  Probe
atacacaaccacacggagttgtatt

SEQ ID NO: 330435 - DNA, 25 bp, Artificial
  Probe
caggtctatcatatggtttgacaga

SEQ ID NO: 330436 - DNA, 25 bp, Artificial
  Probe
tgtgttacactcctttgaataatgc

SEQ ID NO: 330437 - DNA, 25 bp, Artificial
  Probe
agaagtgaaattcagcctggatcta

SEQ ID NO: 330438 - DNA, 25 bp, Artificial
  Probe
gtccccagggaaatagaagtgaaat

SEQ ID NO: 330439 - DNA, 25 bp, Artificial
  Probe
agcctggatctattacaatatcagc

SEQ ID NO: 330440 - DNA, 25 bp, Artificial
  Probe
caggtctatagacatgcatgcttcc

SEQ ID NO: 330441 - DNA, 25 bp, Artificial
  Probe
taaatttcaaaatgacatttgtcta

SEQ ID NO: 330442 - DNA, 25 bp, Artificial
  Probe
aggtctatagacatgcatgcttcct

SEQ ID NO: 330443 - DNA, 25 bp, Artificial
  Probe
agacatgcatgcttcctttagtctt

SEQ ID NO: 330444 - DNA, 25 bp, Artificial
  Probe
atagacatgcatgcttcctttagtc

SEQ ID NO: 330445 - DNA, 25 bp, Artificial
  Probe
agtgttgcaactgtccccagggaaa

SEQ ID NO: 330446 - DNA, 25 bp, Artificial
  Probe
tgaaattcagcctggatctattaca

SEQ ID NO: 330447 - DNA, 25 bp, Artificial
  Probe
tattatacacaaccacacggagttg

SEQ ID NO: 330448 - DNA, 25 bp, Artificial
  Probe
aaaaatattcaggtctatcatatgg

SEQ ID NO: 330449 - DNA, 25 bp, Artificial
  Probe
cacacggagttgtattggaaacagg

SEQ ID NO: 330450 - DNA, 25 bp, Artificial
  Probe
cagcctggatctattacaatatcag

SEQ ID NO: 330451 - DNA, 25 bp, Artificial
  Probe
ctgtgttacactcctttgaataatg

SEQ ID NO: 330452 - DNA, 25 bp, Artificial
  Probe
gttttttgtaccactataatctcta

SEQ ID NO: 330453 - DNA, 25 bp, Artificial
  Probe
ttatacacaaccacacggagttgta

SEQ ID NO: 330454 - DNA, 25 bp, Artificial
  Probe
gcttattatacacaaccacacggag

SEQ ID NO: 330455 - DNA, 25 bp, Artificial
  Probe
gtctatagacatgcatgcttccttt

SEQ ID NO: 330456 - DNA, 25 bp, Artificial
  Probe
attatacacaaccacacggagttgt

SEQ ID NO: 330457 - DNA, 25 bp, Artificial
  Probe
aaagtgttgcaactgtccccaggga

SEQ ID NO: 330458 - DNA, 25 bp, Artificial
  Probe
aagtgttgcaactgtccccagggaa

SEQ ID NO: 330459 - DNA, 25 bp, Artificial
  Probe
acaaccacacggagttgtattggaa

SEQ ID NO: 330460 - DNA, 25 bp, Artificial
  Probe
tagacatgcatgcttcctttagtct

SEQ ID NO: 330461 - DNA, 25 bp, Artificial
  Probe
attcaggtctatcatatggtttgac

SEQ ID NO: 330462 - DNA, 25 bp, Artificial
  Probe
gtgttacactcctttgaataatgca

SEQ ID NO: 330463 - DNA, 25 bp, Artificial
  Probe
ttcaggtctatcatatggtttgaca

SEQ ID NO: 330464 - DNA, 25 bp, Artificial
  Probe
gtgttgcaactgtccccagggaaat

SEQ ID NO: 330465 - DNA, 25 bp, Artificial
  Probe
aatggatatactttacgcaggtcga

SEQ ID NO: 330466 - DNA, 25 bp, Artificial
  Probe
caggtaacgtgttcccaggccgagg

SEQ ID NO: 330467 - DNA, 25 bp, Artificial
  Probe
gcgccgtgtgatttacgttggtaaa

SEQ ID NO: 330468 - DNA, 25 bp, Artificial
  Probe
aggaagctcagagaagcttgcgcag

SEQ ID NO: 330469 - DNA, 25 bp, Artificial
  Probe
gctatggtttcattacctaccgtta

SEQ ID NO: 330470 - DNA, 25 bp, Artificial
  Probe
atttacgttggtaaaatcagacctg

SEQ ID NO: 330471 - DNA, 25 bp, Artificial
  Probe
caagtatgactctctggattttgat

SEQ ID NO: 330472 - DNA, 25 bp, Artificial
  Probe
cagacgattttgaccctgcttccac

SEQ ID NO: 330473 - DNA, 25 bp, Artificial
  Probe
ctgagagaccgctttgaagtttttg

SEQ ID NO: 330474 - DNA, 25 bp, Artificial
  Probe
acgcggacagaactgagagaccgct

SEQ ID NO: 330475 - DNA, 25 bp, Artificial
  Probe
atctgcgggatgatggagacagcta

SEQ ID NO: 330476 - DNA, 25 bp, Artificial
  Probe
ccaccaagagcaagtatgactctct

SEQ ID NO: 330477 - DNA, 25 bp, Artificial
  Probe
gactctctggattttgatagtttac

SEQ ID NO: 330478 - DNA, 25 bp, Artificial
  Probe
ggtcaatacctcacgggacagcgtg

SEQ ID NO: 330479 - DNA, 25 bp, Artificial
  Probe
acagaactgagagaccgctttgaag

SEQ ID NO: 330480 - DNA, 25 bp, Artificial
  Probe
ttacgcaggtcgaatgaaactgact

SEQ ID NO: 330481 - DNA, 25 bp, Artificial
  Probe
taacgtgttcccaggccgaggatga

SEQ ID NO: 330482 - DNA, 25 bp, Artificial
  Probe
ctctctggattttgatagtttactg

SEQ ID NO: 330483 - DNA, 25 bp, Artificial
  Probe
tttactgaaggaagctcagagaagc

SEQ ID NO: 330484 - DNA, 25 bp, Artificial
  Probe
ttcaagtctaactatgcagacctag

SEQ ID NO: 330485 - DNA, 25 bp, Artificial
  Probe
cgaatgaaactgacttcgagctgta

SEQ ID NO: 330486 - DNA, 25 bp, Artificial
  Probe
cagaactgagagaccgctttgaagt

SEQ ID NO: 330487 - DNA, 25 bp, Artificial
  Probe
cccaggccgaggatgacagagagat

SEQ ID NO: 330488 - DNA, 25 bp, Artificial
  Probe
aaattgaggaatgcaccgtaaatct

SEQ ID NO: 330489 - DNA, 25 bp, Artificial
  Probe
gagatggtcaatacctcacgggaca

SEQ ID NO: 330490 - DNA, 25 bp, Artificial
  Probe
ctgtacttttgtggacggaagcaat

SEQ ID NO: 330491 - DNA, 25 bp, Artificial
  Probe
agacctgacacaacgcggacagaac

SEQ ID NO: 330492 - DNA, 25 bp, Artificial
  Probe
agaagcttgcgcaggtaacgtgttc

SEQ ID NO: 330493 - DNA, 25 bp, Artificial
  Probe
gtctaactatgcagacctagattca

SEQ ID NO: 330494 - DNA, 25 bp, Artificial
  Probe
agagcaagtatgactctctggattt

SEQ ID NO: 330495 - DNA, 25 bp, Artificial
  Probe
gagacagctatggtttcattaccta

SEQ ID NO: 330496 - DNA, 25 bp, Artificial
  Probe
gacacaacgcggacagaactgagag

SEQ ID NO: 330497 - DNA, 25 bp, Artificial
  Probe
aggaatgcaccgtaaatctgcggga

SEQ ID NO: 330498 - DNA, 25 bp, Artificial
  Probe
ttactgaaggaagctcagagaagct

SEQ ID NO: 330499 - DNA, 25 bp, Artificial
  Probe
gttcccaggccgaggatgacagaga

SEQ ID NO: 330500 - DNA, 25 bp, Artificial
  Probe
gtcctttcccaagactcttgcaagt

SEQ ID NO: 330501 - DNA, 25 bp, Artificial
  Probe
tatgcagacctagattcaaactcag

SEQ ID NO: 330502 - DNA, 25 bp, Artificial
  Probe
tggtaaaatcagacctgacacaacg

SEQ ID NO: 330503 - DNA, 25 bp, Artificial
  Probe
tatactttacgcaggtcgaatgaaa

SEQ ID NO: 330504 - DNA, 25 bp, Artificial
  Probe
aaatctgcgggatgatggagacagc

SEQ ID NO: 330505 - DNA, 25 bp, Artificial
  Probe
atacctcacgggacagcgtgtcctt

SEQ ID NO: 330506 - DNA, 25 bp, Artificial
  Probe
caagactcttgcaagtcatacttag

SEQ ID NO: 330507 - DNA, 25 bp, Artificial
  Probe
gcaccgtaaatctgcgggatgatgg

SEQ ID NO: 330508 - DNA, 25 bp, Artificial
  Probe
attacctaccgttacacctgtgacg

SEQ ID NO: 330509 - DNA, 25 bp, Artificial
  Probe
ctgctcttgagaatggatatacttt

SEQ ID NO: 330510 - DNA, 25 bp, Artificial
  Probe
ctcagagaagcttgcgcaggtaacg

SEQ ID NO: 330511 - DNA, 25 bp, Artificial
  Probe
aagcctggtgcctcggggcctgacc

SEQ ID NO: 330512 - DNA, 25 bp, Artificial
  Probe
tgcagagaaatctgccagttattct

SEQ ID NO: 330513 - DNA, 25 bp, Artificial
  Probe
ctctgctgtgaccagagcgggtgca

SEQ ID NO: 330514 - DNA, 25 bp, Artificial
  Probe
acctccatgctctgctgtgaccaga

SEQ ID NO: 330515 - DNA, 25 bp, Artificial
  Probe
ggatgccttaccacctggtgaagac

SEQ ID NO: 330516 - DNA, 25 bp, Artificial
  Probe
gagaaatctgccagttattcttctg

SEQ ID NO: 330517 - DNA, 25 bp, Artificial
  Probe
caaaggcagccctcacagcagcagt

SEQ ID NO: 330518 - DNA, 25 bp, Artificial
  Probe
atcgctggccatttccgaaaggagc

SEQ ID NO: 330519 - DNA, 25 bp, Artificial
  Probe
acagcagcagtgcagagaaatctgc

SEQ ID NO: 330520 - DNA, 25 bp, Artificial
  Probe
gacagcttcctcatgaatgtctttc

SEQ ID NO: 330521 - DNA, 25 bp, Artificial
  Probe
tgccctgtgctggatgccttaccac

SEQ ID NO: 330522 - DNA, 25 bp, Artificial
  Probe
agagcgggtgcaaaggcagccctca

SEQ ID NO: 330523 - DNA, 25 bp, Artificial
  Probe
tcttcattgcccaaaccatcgctgg

SEQ ID NO: 330524 - DNA, 25 bp, Artificial
  Probe
gctgacctgttacttcttcattgcc

SEQ ID NO: 330525 - DNA, 25 bp, Artificial
  Probe
ctctctacatgctgggcaatttgct

SEQ ID NO: 330526 - DNA, 25 bp, Artificial
  Probe
atttccgaaaggagcgcatcgaggg

SEQ ID NO: 330527 - DNA, 25 bp, Artificial
  Probe
catcgctggccatttccgaaaggag

SEQ ID NO: 330528 - DNA, 25 bp, Artificial
  Probe
caagaaacccttgtggactagggct

SEQ ID NO: 330529 - DNA, 25 bp, Artificial
  Probe
aggtagcatggcttctcctggactc

SEQ ID NO: 330530 - DNA, 25 bp, Artificial
  Probe
tatagccaagaaacccttgtggact

SEQ ID NO: 330531 - DNA, 25 bp, Artificial
  Probe
aatttgctgcactggccctgtgact

SEQ ID NO: 330532 - DNA, 25 bp, Artificial
  Probe
atcagttacgtcaacagctgcctca

SEQ ID NO: 330533 - DNA, 25 bp, Artificial
  Probe
attcttctgggcacagccagggccc

SEQ ID NO: 330534 - DNA, 25 bp, Artificial
  Probe
aggagaaccgatgcatgagaaatct

SEQ ID NO: 330535 - DNA, 25 bp, Artificial
  Probe
ctgcactggccctgtgactttgaca

SEQ ID NO: 330536 - DNA, 25 bp, Artificial
  Probe
cagttattcttctgggcacagccag

SEQ ID NO: 330537 - DNA, 25 bp, Artificial
  Probe
cccctatagccaagaaacccttgtg

SEQ ID NO: 330538 - DNA, 25 bp, Artificial
  Probe
attgcccaaaccatcgctggccatt

SEQ ID NO: 330539 - DNA, 25 bp, Artificial
  Probe
tacatgctgggcaatttgctgcact

SEQ ID NO: 330540 - DNA, 25 bp, Artificial
  Probe
ttgcccaaaccatcgctggccattt

SEQ ID NO: 330541 - DNA, 25 bp, Artificial
  Probe
cggccccaacatgtgcaagggagga

SEQ ID NO: 330542 - DNA, 25 bp, Artificial
  Probe
tcatcctcacgctctgagaaccagg

SEQ ID NO: 330543 - DNA, 25 bp, Artificial
  Probe
catgctctgctgtgaccagagcggg

SEQ ID NO: 330544 - DNA, 25 bp, Artificial
  Probe
ctgctgtgaccagagcgggtgcaaa

SEQ ID NO: 330545 - DNA, 25 bp, Artificial
  Probe
tctgagaaccaggtagcatggcttc

SEQ ID NO: 330546 - DNA, 25 bp, Artificial
  Probe
tttgccctgtgctggatgccttacc

SEQ ID NO: 330547 - DNA, 25 bp, Artificial
  Probe
tggccatttccgaaaggagcgcatc

SEQ ID NO: 330548 - DNA, 25 bp, Artificial
  Probe
cggctgctgagcatcatcgtggtgc

SEQ ID NO: 330549 - DNA, 25 bp, Artificial
  Probe
gccaagaaacccttgtggactaggg

SEQ ID NO: 330550 - DNA, 25 bp, Artificial
  Probe
ccctattgcacctgcatcagttacg

SEQ ID NO: 330551 - DNA, 25 bp, Artificial
  Probe
agaaccgatgcatgagaaatctatc

SEQ ID NO: 330552 - DNA, 25 bp, Artificial
  Probe
accagagcgggtgcaaaggcagccc

SEQ ID NO: 330553 - DNA, 25 bp, Artificial
  Probe
gcatgagaaatctatcccctatagc

SEQ ID NO: 330554 - DNA, 25 bp, Artificial
  Probe
ctccatgctctgctgtgaccagagc

SEQ ID NO: 330555 - DNA, 25 bp, Artificial
  Probe
atgccttctttgacccccgatttcg

SEQ ID NO: 330556 - DNA, 25 bp, Artificial
  Probe
aggcgccggctgctgagcatcatcg

SEQ ID NO: 330557 - DNA, 25 bp, Artificial
  Probe
tgccattgcaccagagtatgaaata

SEQ ID NO: 330558 - DNA, 25 bp, Artificial
  Probe
tttttgccattgcaccagagtatga

SEQ ID NO: 330559 - DNA, 25 bp, Artificial
  Probe
cttttttttttgccattgcaccaga

SEQ ID NO: 330560 - DNA, 25 bp, Artificial
  Probe
tacacacctacgtgaaagggacggt

SEQ ID NO: 330561 - DNA, 25 bp, Artificial
  Probe
ttttgccattgcaccagagtatgaa

SEQ ID NO: 330562 - DNA, 25 bp, Artificial
  Probe
ccatcgtgccctgttcccatcctag

SEQ ID NO: 330563 - DNA, 25 bp, Artificial
  Probe
tgttgtggtgtggttttcttccttt

SEQ ID NO: 330564 - DNA, 25 bp, Artificial
  Probe
tcaggacttaattcttccttgtgtt

SEQ ID NO: 330565 - DNA, 25 bp, Artificial
  Probe
cttccttgtgttgtggtgtggtttt

SEQ ID NO: 330566 - DNA, 25 bp, Artificial
  Probe
acttaattcttccttgtgttgtggt

SEQ ID NO: 330567 - DNA, 25 bp, Artificial
  Probe
gacttaattcttccttgtgttgtgg

SEQ ID NO: 330568 - DNA, 25 bp, Artificial
  Probe
ttgcaccagagtatgaaatagcttc

SEQ ID NO: 330569 - DNA, 25 bp, Artificial
  Probe
tcccatcgtgccctgttcccatcct

SEQ ID NO: 330570 - DNA, 25 bp, Artificial
  Probe
ttgtggtgtggttttcttcctttct

SEQ ID NO: 330571 - DNA, 25 bp, Artificial
  Probe
tttgccattgcaccagagtatgaaa

SEQ ID NO: 330572 - DNA, 25 bp, Artificial
  Probe
ttttttgccattgcaccagagtatg

SEQ ID NO: 330573 - DNA, 25 bp, Artificial
  Probe
tttttttgccattgcaccagagtat

SEQ ID NO: 330574 - DNA, 25 bp, Artificial
  Probe
cattgcaccagagtatgaaatagct

SEQ ID NO: 330575 - DNA, 25 bp, Artificial
  Probe
tgccctgttcccatcctagcccatc

SEQ ID NO: 330576 - DNA, 25 bp, Artificial
  Probe
attgcaccagagtatgaaatagctt

SEQ ID NO: 330577 - DNA, 25 bp, Artificial
  Probe
caggacttaattcttccttgtgttg

SEQ ID NO: 330578 - DNA, 25 bp, Artificial
  Probe
tccttttttttttgccattgcacca

SEQ ID NO: 330579 - DNA, 25 bp, Artificial
  Probe
taattcttccttgtgttgtggtgtg

SEQ ID NO: 330580 - DNA, 25 bp, Artificial
  Probe
cttaattcttccttgtgttgtggtg

SEQ ID NO: 330581 - DNA, 25 bp, Artificial
  Probe
tgtggtgtggttttcttcctttctt

SEQ ID NO: 330582 - DNA, 25 bp, Artificial
  Probe
tgtggttttcttcctttcttctgtt

SEQ ID NO: 330583 - DNA, 25 bp, Artificial
  Probe
cttgtgttgtggtgtggttttcttc

SEQ ID NO: 330584 - DNA, 25 bp, Artificial
  Probe
ttgccattgcaccagagtatgaaat

SEQ ID NO: 330585 - DNA, 25 bp, Artificial
  Probe
tggtgtggttttcttcctttcttct

SEQ ID NO: 330586 - DNA, 25 bp, Artificial
  Probe
ggacttaattcttccttgtgttgtg

SEQ ID NO: 330587 - DNA, 25 bp, Artificial
  Probe
gccattgcaccagagtatgaaatag

SEQ ID NO: 330588 - DNA, 25 bp, Artificial
  Probe
catcgtgccctgttcccatcctagc

SEQ ID NO: 330589 - DNA, 25 bp, Artificial
  Probe
ccattgcaccagagtatgaaatagc

SEQ ID NO: 330590 - DNA, 25 bp, Artificial
  Probe
aattcttccttgtgttgtggtgtgg

SEQ ID NO: 330591 - DNA, 25 bp, Artificial
  Probe
atcgtgccctgttcccatcctagcc

SEQ ID NO: 330592 - DNA, 25 bp, Artificial
  Probe
aggacttaattcttccttgtgttgt

SEQ ID NO: 330593 - DNA, 25 bp, Artificial
  Probe
gtgttgtggtgtggttttcttcctt

SEQ ID NO: 330594 - DNA, 25 bp, Artificial
  Probe
gtgtggttttcttcctttcttctgt

SEQ ID NO: 330595 - DNA, 25 bp, Artificial
  Probe
ttccttgtgttgtggtgtggttttc

SEQ ID NO: 330596 - DNA, 25 bp, Artificial
  Probe
tgtgttgtggtgtggttttcttcct

SEQ ID NO: 330597 - DNA, 25 bp, Artificial
  Probe
ttttttttttgccattgcaccagag

SEQ ID NO: 330598 - DNA, 25 bp, Artificial
  Probe
ttaattcttccttgtgttgtggtgt

SEQ ID NO: 330599 - DNA, 25 bp, Artificial
  Probe
ccttttttttttgccattgcaccag

SEQ ID NO: 330600 - DNA, 25 bp, Artificial
  Probe
cccatcgtgccctgttcccatccta

SEQ ID NO: 330601 - DNA, 25 bp, Artificial
  Probe
tcttccttgtgttgtggtgtggttt

SEQ ID NO: 330602 - DNA, 25 bp, Artificial
  Probe
ttcccatcgtgccctgttcccatcc

SEQ ID NO: 330603 - DNA, 25 bp, Artificial
  Probe
agatttttctggaccgaccatctat

SEQ ID NO: 330604 - DNA, 25 bp, Artificial
  Probe
cctaggaaaggctgccaaggatgtc

SEQ ID NO: 330605 - DNA, 25 bp, Artificial
  Probe
catcaataaacctggcatggacagc

SEQ ID NO: 330606 - DNA, 25 bp, Artificial
  Probe
caccctcgggttgtagatatgtgta

SEQ ID NO: 330607 - DNA, 25 bp, Artificial
  Probe
cacccaaaagtggaatacagacaat

SEQ ID NO: 330608 - DNA, 25 bp, Artificial
  Probe
atcttcacccaaaagtggaatacag

SEQ ID NO: 330609 - DNA, 25 bp, Artificial
  Probe
ctgccaaggatgtctttaacaaagg

SEQ ID NO: 330610 - DNA, 25 bp, Artificial
  Probe
caactgcatactcatgtaaacgatg

SEQ ID NO: 330611 - DNA, 25 bp, Artificial
  Probe
tcatgtaaacgatggcactgaattt

SEQ ID NO: 330612 - DNA, 25 bp, Artificial
  Probe
tggcactgaatttggaggctccatc

SEQ ID NO: 330613 - DNA, 25 bp, Artificial
  Probe
accatctatggctgggccgtgttgg

SEQ ID NO: 330614 - DNA, 25 bp, Artificial
  Probe
aagcatcaggcaacctagagaccaa

SEQ ID NO: 330615 - DNA, 25 bp, Artificial
  Probe
tactgcgacctaggaaaggctgcca

SEQ ID NO: 330616 - DNA, 25 bp, Artificial
  Probe
gttgacatagatttttctggaccga

SEQ ID NO: 330617 - DNA, 25 bp, Artificial
  Probe
ctaccagatgagttttgacacagcc

SEQ ID NO: 330618 - DNA, 25 bp, Artificial
  Probe
tgcgacctaggaaaggctgccaagg

SEQ ID NO: 330619 - DNA, 25 bp, Artificial
  Probe
ttatactgatacagggaaagcatca

SEQ ID NO: 330620 - DNA, 25 bp, Artificial
  Probe
tgaaactgacggttgataccatatt

SEQ ID NO: 330621 - DNA, 25 bp, Artificial
  Probe
accgaccatctatggctgggccgtg

SEQ ID NO: 330622 - DNA, 25 bp, Artificial
  Probe
ataattttgctcttggttacaaggc

SEQ ID NO: 330623 - DNA, 25 bp, Artificial
  Probe
ctcttggttacaaggctgaagactt

SEQ ID NO: 330624 - DNA, 25 bp, Artificial
  Probe
aatactcttgggacagaaatctctt

SEQ ID NO: 330625 - DNA, 25 bp, Artificial
  Probe
tctacttctggtcatgcttatactg

SEQ ID NO: 330626 - DNA, 25 bp, Artificial
  Probe
cactgaatttggaggctccatctac

SEQ ID NO: 330627 - DNA, 25 bp, Artificial
  Probe
gaagacttccaactgcatactcatg

SEQ ID NO: 330628 - DNA, 25 bp, Artificial
  Probe
ctgaaaaccaagtcttgtagtggag

SEQ ID NO: 330629 - DNA, 25 bp, Artificial
  Probe
acctagagaccaaatataaggtctg

SEQ ID NO: 330630 - DNA, 25 bp, Artificial
  Probe
agatctgaaaaccaagtcttgtagt

SEQ ID NO: 330631 - DNA, 25 bp, Artificial
  Probe
tccatctaccagagagttaatgaga

SEQ ID NO: 330632 - DNA, 25 bp, Artificial
  Probe
atgagttttgacacagccaaatcca

SEQ ID NO: 330633 - DNA, 25 bp, Artificial
  Probe
acaaggctgaagacttccaactgca

SEQ ID NO: 330634 - DNA, 25 bp, Artificial
  Probe
agtggaattttctacttctggtcat

SEQ ID NO: 330635 - DNA, 25 bp, Artificial
  Probe
gacggcgttggttcgagaagacctt

SEQ ID NO: 330636 - DNA, 25 bp, Artificial
  Probe
gaattttctacttctggtcatgctt

SEQ ID NO: 330637 - DNA, 25 bp, Artificial
  Probe
tggttcgagaagaccttcagcgttg

SEQ ID NO: 330638 - DNA, 25 bp, Artificial
  Probe
gagaagaccttcagcgttgccttgg

SEQ ID NO: 330639 - DNA, 25 bp, Artificial
  Probe
cagcaacaacactcgttttggcatc

SEQ ID NO: 330640 - DNA, 25 bp, Artificial
  Probe
ttttggcatcgctgctaagtatagg

SEQ ID NO: 330641 - DNA, 25 bp, Artificial
  Probe
gccaaatccaaactgtgtcagaata

SEQ ID NO: 330642 - DNA, 25 bp, Artificial
  Probe
attaaaggcctcctatagacgggat

SEQ ID NO: 330643 - DNA, 25 bp, Artificial
  Probe
ggcctcctatagacgggattgtttt

SEQ ID NO: 330644 - DNA, 25 bp, Artificial
  Probe
tcgaaacatcaataaacctggcatg

SEQ ID NO: 330645 - DNA, 25 bp, Artificial
  Probe
ggaggctccatctaccagagagtta

SEQ ID NO: 330646 - DNA, 25 bp, Artificial
  Probe
ttgacacagccaaatccaaactgtg

SEQ ID NO: 330647 - DNA, 25 bp, Artificial
  Probe
aaacgatggcactgaatttggaggc

SEQ ID NO: 330648 - DNA, 25 bp, Artificial
  Probe
gaaactgacggttgataccatattt

SEQ ID NO: 330649 - DNA, 25 bp, Artificial
  Probe
cactgtctagaactttccaacctgg

SEQ ID NO: 330650 - DNA, 25 bp, Artificial
  Probe
cttaagcttggagcacaataaagat

SEQ ID NO: 330651 - DNA, 25 bp, Artificial
  Probe
cacgccgcggaatgacatcttccat

SEQ ID NO: 330652 - DNA, 25 bp, Artificial
  Probe
cagatgtttgacttttccaattggt

SEQ ID NO: 330653 - DNA, 25 bp, Artificial
  Probe
gctgtctagtgcagcctgaccaaat

SEQ ID NO: 330654 - DNA, 25 bp, Artificial
  Probe
gccgaaccaggacttggaaatttct

SEQ ID NO: 330655 - DNA, 25 bp, Artificial
  Probe
cctgagggcaagatgcctggctgca

SEQ ID NO: 330656 - DNA, 25 bp, Artificial
  Probe
ccgatggggcagatgtttgactttt

SEQ ID NO: 330657 - DNA, 25 bp, Artificial
  Probe
caacctggccaaagtgtggacgggt

SEQ ID NO: 330658 - DNA, 25 bp, Artificial
  Probe
tgccaagtactgacctctgctcggc

SEQ ID NO: 330659 - DNA, 25 bp, Artificial
  Probe
gtgtgggaaccctgctattgcaaag

SEQ ID NO: 330660 - DNA, 25 bp, Artificial
  Probe
agaactttccaacctggccaaagtg

SEQ ID NO: 330661 - DNA, 25 bp, Artificial
  Probe
ttcttgcccaggaaacctgggccca

SEQ ID NO: 330662 - DNA, 25 bp, Artificial
  Probe
ggccagtgtgggaaccctgctattg

SEQ ID NO: 330663 - DNA, 25 bp, Artificial
  Probe
aagctgcgtccctgggtgtcccctg

SEQ ID NO: 330664 - DNA, 25 bp, Artificial
  Probe
agtccttgccgaaccaggacttgga

SEQ ID NO: 330665 - DNA, 25 bp, Artificial
  Probe
catgccttacccatgctgtctagtg

SEQ ID NO: 330666 - DNA, 25 bp, Artificial
  Probe
ccctgagggcaagatgcctggctgc

SEQ ID NO: 330667 - DNA, 25 bp, Artificial
  Probe
aagcctatcctgacgctgatgtttg

SEQ ID NO: 330668 - DNA, 25 bp, Artificial
  Probe
agacttacccgatggggcagatgtt

SEQ ID NO: 330669 - DNA, 25 bp, Artificial
  Probe
gacctacctgcgtttcttgcccagg

SEQ ID NO: 330670 - DNA, 25 bp, Artificial
  Probe
gccagtgtgggaaccctgctattgc

SEQ ID NO: 330671 - DNA, 25 bp, Artificial
  Probe
tccaacctggccaaagtgtggacgg

SEQ ID NO: 330672 - DNA, 25 bp, Artificial
  Probe
tctagtgcagcctgaccaaatgcca

SEQ ID NO: 330673 - DNA, 25 bp, Artificial
  Probe
ctgacgctgatgtttggccagtgtg

SEQ ID NO: 330674 - DNA, 25 bp, Artificial
  Probe
ttgcccaggaaacctgggcccatgc

SEQ ID NO: 330675 - DNA, 25 bp, Artificial
  Probe
acccgatggggcagatgtttgactt

SEQ ID NO: 330676 - DNA, 25 bp, Artificial
  Probe
tacctgcgtttcttgcccaggaaac

SEQ ID NO: 330677 - DNA, 25 bp, Artificial
  Probe
gggcaagatgcctggctgcaccctt

SEQ ID NO: 330678 - DNA, 25 bp, Artificial
  Probe
cgccgcggaatgacatcttccatct

SEQ ID NO: 330679 - DNA, 25 bp, Artificial
  Probe
ctatcctgacgctgatgtttggcca

SEQ ID NO: 330680 - DNA, 25 bp, Artificial
  Probe
agcctgaccaaatgccaagtactga

SEQ ID NO: 330681 - DNA, 25 bp, Artificial
  Probe
tgaccaaatgccaagtactgacctc

SEQ ID NO: 330682 - DNA, 25 bp, Artificial
  Probe
ctggaggactctgctgaaaatatga

SEQ ID NO: 330683 - DNA, 25 bp, Artificial
  Probe
ggtggacctacctgcgtttcttgcc

SEQ ID NO: 330684 - DNA, 25 bp, Artificial
  Probe
gaaccaggacttggaaatttctcag

SEQ ID NO: 330685 - DNA, 25 bp, Artificial
  Probe
aagatgcctggctgcacccttcttc

SEQ ID NO: 330686 - DNA, 25 bp, Artificial
  Probe
tgtttggccagtgtgggaaccctgc

SEQ ID NO: 330687 - DNA, 25 bp, Artificial
  Probe
tgatgtttggccagtgtgggaaccc

SEQ ID NO: 330688 - DNA, 25 bp, Artificial
  Probe
tttatcaattaacttgaactgctgg

SEQ ID NO: 330689 - DNA, 25 bp, Artificial
  Probe
gggtgtcccctggtggacctacctg

SEQ ID NO: 330690 - DNA, 25 bp, Artificial
  Probe
tgggcccatgccttacccatgctgt

SEQ ID NO: 330691 - DNA, 25 bp, Artificial
  Probe
tcttccgaagcctatcctgacgctg

SEQ ID NO: 330692 - DNA, 25 bp, Artificial
  Probe
gtttggccagtgtgggaaccctgct

SEQ ID NO: 330693 - DNA, 25 bp, Artificial
  Probe
tttatacaaaggatccttaagcttg

SEQ ID NO: 330694 - DNA, 25 bp, Artificial
  Probe
ggaatgacatcttccatctcccagt

SEQ ID NO: 330695 - DNA, 25 bp, Artificial
  Probe
aaatgcctcgtgctgtctgacccat

SEQ ID NO: 330696 - DNA, 25 bp, Artificial
  Probe
agagccataagaaaaccgtggcaca

SEQ ID NO: 330697 - DNA, 25 bp, Artificial
  Probe
ctgagttctttcattgatgctgaaa

SEQ ID NO: 330698 - DNA, 25 bp, Artificial
  Probe
tctttgaagaagagcccgtcctctg

SEQ ID NO: 330699 - DNA, 25 bp, Artificial
  Probe
ggctgcactattcctaatgccttcc

SEQ ID NO: 330700 - DNA, 25 bp, Artificial
  Probe
tggtacatcagcacctctcaagcag

SEQ ID NO: 330701 - DNA, 25 bp, Artificial
  Probe
tctcacagcagcatctcgacaagag

SEQ ID NO: 330702 - DNA, 25 bp, Artificial
  Probe
ggtattctccatgagctttgtacaa

SEQ ID NO: 330703 - DNA, 25 bp, Artificial
  Probe
ggacatagttgacttcaccatggaa

SEQ ID NO: 330704 - DNA, 25 bp, Artificial
  Probe
agcagagcacagacctgtcttccta

SEQ ID NO: 330705 - DNA, 25 bp, Artificial
  Probe
ggttgaatctatacctgtcctgtgt

SEQ ID NO: 330706 - DNA, 25 bp, Artificial
  Probe
gaaacagcaatggtcgggacatagt

SEQ ID NO: 330707 - DNA, 25 bp, Artificial
  Probe
tcctgtgtgatgaaagacggcacac

SEQ ID NO: 330708 - DNA, 25 bp, Artificial
  Probe
cctgcagctggagagtgtggatccc

SEQ ID NO: 330709 - DNA, 25 bp, Artificial
  Probe
atccctgtggccttgggcctcaagg

SEQ ID NO: 330710 - DNA, 25 bp, Artificial
  Probe
ttttccttcatctttgaagaagagc

SEQ ID NO: 330711 - DNA, 25 bp, Artificial
  Probe
actcaactgtgaaatagcagctttc

SEQ ID NO: 330712 - DNA, 25 bp, Artificial
  Probe
agattaaggattgcttccaagccct

SEQ ID NO: 330713 - DNA, 25 bp, Artificial
  Probe
ctacctatgtcttgcccgtggagct

SEQ ID NO: 330714 - DNA, 25 bp, Artificial
  Probe
gccagcactgagttctttcattgat

SEQ ID NO: 330715 - DNA, 25 bp, Artificial
  Probe
agaacataagccaacaagtggtatt

SEQ ID NO: 330716 - DNA, 25 bp, Artificial
  Probe
aatggtcgggacatagttgacttca

SEQ ID NO: 330717 - DNA, 25 bp, Artificial
  Probe
ggcctcaaggggttgaatctatacc

SEQ ID NO: 330718 - DNA, 25 bp, Artificial
  Probe
acctcaatggacagaacataagcca

SEQ ID NO: 330719 - DNA, 25 bp, Artificial
  Probe
tttcgacagtgaggagaatgacctg

SEQ ID NO: 330720 - DNA, 25 bp, Artificial
  Probe
agaagagcccgtcctctgtgactcg

SEQ ID NO: 330721 - DNA, 25 bp, Artificial
  Probe
gaccccaaaagattaaggattgctt

SEQ ID NO: 330722 - DNA, 25 bp, Artificial
  Probe
actcgtgggatgatgacgacctgct

SEQ ID NO: 330723 - DNA, 25 bp, Artificial
  Probe
aaagcggtttgtcttcaacaagata

SEQ ID NO: 330724 - DNA, 25 bp, Artificial
  Probe
gaatgaagcacaagcacatcatttt

SEQ ID NO: 330725 - DNA, 25 bp, Artificial
  Probe
tgaaatagcagctttcgacagtgag

SEQ ID NO: 330726 - DNA, 25 bp, Artificial
  Probe
caccctgcagctggagagtgtggat

SEQ ID NO: 330727 - DNA, 25 bp, Artificial
  Probe
ctcattgtggctgtggagaagctgt

SEQ ID NO: 330728 - DNA, 25 bp, Artificial
  Probe
ggagaatgacctgttctttgaggct

SEQ ID NO: 330729 - DNA, 25 bp, Artificial
  Probe
ctgtggagaagctgtggcagctacc

SEQ ID NO: 330730 - DNA, 25 bp, Artificial
  Probe
tgtcttgcccgtggagcttccagga

SEQ ID NO: 330731 - DNA, 25 bp, Artificial
  Probe
agtctccaggggaagcctttgtcct

SEQ ID NO: 330732 - DNA, 25 bp, Artificial
  Probe
gagcatccagcttcaaatctcacag

SEQ ID NO: 330733 - DNA, 25 bp, Artificial
  Probe
gaggacccaagcaccttcttttcct

SEQ ID NO: 330734 - DNA, 25 bp, Artificial
  Probe
gagacaagcaacgacaaaatccctg

SEQ ID NO: 330735 - DNA, 25 bp, Artificial
  Probe
gctctccacctcaatggacagaaca

SEQ ID NO: 330736 - DNA, 25 bp, Artificial
  Probe
gccttgggcctcaaggggttgaatc

SEQ ID NO: 330737 - DNA, 25 bp, Artificial
  Probe
gggtcacgaggcagcattgtcgaca

SEQ ID NO: 330738 - DNA, 25 bp, Artificial
  Probe
tgcaggcttcgagatgaacaacaaa

SEQ ID NO: 330739 - DNA, 25 bp, Artificial
  Probe
gcggtttgtcttcaacaagatagaa

SEQ ID NO: 330740 - DNA, 25 bp, Artificial
  Probe
gaggcagcattgtcgacagaagaat

SEQ ID NO: 330741 - DNA, 25 bp, Artificial
  Probe
tgctcttccaccagggactccagat

SEQ ID NO: 330742 - DNA, 25 bp, Artificial
  Probe
acgttggattgcaggactattgcct

SEQ ID NO: 330743 - DNA, 25 bp, Artificial
  Probe
cagatgcccaccatttactcaggac

SEQ ID NO: 330744 - DNA, 25 bp, Artificial
  Probe
tgccttggagattttggtgaagctc

SEQ ID NO: 330745 - DNA, 25 bp, Artificial
  Probe
gacaatggttcttgccagctctacc

SEQ ID NO: 330746 - DNA, 25 bp, Artificial
  Probe
gctcctgatgctcttccaccaggga

SEQ ID NO: 330747 - DNA, 25 bp, Artificial
  Probe
tcaggacgttggattgcaggactat

SEQ ID NO: 330748 - DNA, 25 bp, Artificial
  Probe
cgttggattgcaggactattgcctt

SEQ ID NO: 330749 - DNA, 25 bp, Artificial
  Probe
caggtatctggactcaataatagtg

SEQ ID NO: 330750 - DNA, 25 bp, Artificial
  Probe
caggggctcagatgcccaccattta

SEQ ID NO: 330751 - DNA, 25 bp, Artificial
  Probe
cagatttcagacaggggctcagatg

SEQ ID NO: 330752 - DNA, 25 bp, Artificial
  Probe
agattttggtgaagctcccatatcc

SEQ ID NO: 330753 - DNA, 25 bp, Artificial
  Probe
ccaccagggactccagatttcagac

SEQ ID NO: 330754 - DNA, 25 bp, Artificial
  Probe
accagggactccagatttcagacag

SEQ ID NO: 330755 - DNA, 25 bp, Artificial
  Probe
agctcccatatcctcaggtatctgg

SEQ ID NO: 330756 - DNA, 25 bp, Artificial
  Probe
ccatttactcaggacgttggattgc

SEQ ID NO: 330757 - DNA, 25 bp, Artificial
  Probe
atggttcttgccagctctaccacca

SEQ ID NO: 330758 - DNA, 25 bp, Artificial
  Probe
acaggggctcagatgcccaccattt

SEQ ID NO: 330759 - DNA, 25 bp, Artificial
  Probe
ggtatctggactcaataatagtgac

SEQ ID NO: 330760 - DNA, 25 bp, Artificial
  Probe
ggtgaagctcccatatcctcaggta

SEQ ID NO: 330761 - DNA, 25 bp, Artificial
  Probe
tttggaggaccagaacgagacaatg

SEQ ID NO: 330762 - DNA, 25 bp, Artificial
  Probe
tcagacaggggctcagatgcccacc

SEQ ID NO: 330763 - DNA, 25 bp, Artificial
  Probe
gaccagaacgagacaatggttcttg

SEQ ID NO: 330764 - DNA, 25 bp, Artificial
  Probe
ttttggtgaagctcccatatcctca

SEQ ID NO: 330765 - DNA, 25 bp, Artificial
  Probe
tactcaggacgttggattgcaggac

SEQ ID NO: 330766 - DNA, 25 bp, Artificial
  Probe
caaagccaatctgaggaatagtacc

SEQ ID NO: 330767 - DNA, 25 bp, Artificial
  Probe
gaacgagacaatggttcttgccagc

SEQ ID NO: 330768 - DNA, 25 bp, Artificial
  Probe
tcccatatcctcaggtatctggact

SEQ ID NO: 330769 - DNA, 25 bp, Artificial
  Probe
cgagacaatggttcttgccagctct

SEQ ID NO: 330770 - DNA, 25 bp, Artificial
  Probe
ctcaggtatctggactcaataatag

SEQ ID NO: 330771 - DNA, 25 bp, Artificial
  Probe
ttgcaggactattgccttggagatt

SEQ ID NO: 330772 - DNA, 25 bp, Artificial
  Probe
aggaccagaacgagacaatggttct

SEQ ID NO: 330773 - DNA, 25 bp, Artificial
  Probe
gacaaagccaatctgaggaatagta

SEQ ID NO: 330774 - DNA, 25 bp, Artificial
  Probe
tggttcttgccagctctaccaccag

SEQ ID NO: 330775 - DNA, 25 bp, Artificial
  Probe
ccttggagattttggtgaagctccc

SEQ ID NO: 330776 - DNA, 25 bp, Artificial
  Probe
gacgacaaagccaatctgaggaata

SEQ ID NO: 330777 - DNA, 25 bp, Artificial
  Probe
cttccaccagggactccagatttca

SEQ ID NO: 330778 - DNA, 25 bp, Artificial
  Probe
cccatatcctcaggtatctggactc

SEQ ID NO: 330779 - DNA, 25 bp, Artificial
  Probe
atctggactcaataatagtgacgac

SEQ ID NO: 330780 - DNA, 25 bp, Artificial
  Probe
caggacgttggattgcaggactatt

SEQ ID NO: 330781 - DNA, 25 bp, Artificial
  Probe
tgatgctcttccaccagggactcca

SEQ ID NO: 330782 - DNA, 25 bp, Artificial
  Probe
ttccaccagggactccagatttcag

SEQ ID NO: 330783 - DNA, 25 bp, Artificial
  Probe
taccaccagcatcctctgtatgctg

SEQ ID NO: 330784 - DNA, 25 bp, Artificial
  Probe
ggattgcaggactattgccttggag

SEQ ID NO: 330785 - DNA, 25 bp, Artificial
  Probe
atagtgacgacaaagccaatctgag

SEQ ID NO: 330786 - DNA, 25 bp, Artificial
  Probe
gctcagatgcccaccatttactcag

SEQ ID NO: 330787 - DNA, 25 bp, Artificial
  Probe
gacagttttcagctcagctctttga

SEQ ID NO: 330788 - DNA, 25 bp, Artificial
  Probe
tccgtgtgatttacatgagggctgc

SEQ ID NO: 330789 - DNA, 25 bp, Artificial
  Probe
ctgatctataataactacatgatac

SEQ ID NO: 330790 - DNA, 25 bp, Artificial
  Probe
gtatcatactttggcatccgtgtga

SEQ ID NO: 330791 - DNA, 25 bp, Artificial
  Probe
tgtgtatcatactttggcatccgtg

SEQ ID NO: 330792 - DNA, 25 bp, Artificial
  Probe
tggcatccgtgtgatttacatgagg

SEQ ID NO: 330793 - DNA, 25 bp, Artificial
  Probe
agctcagctctttgagaaatgaaaa

SEQ ID NO: 330794 - DNA, 25 bp, Artificial
  Probe
ggtgcacggcactcactgcgtcatc

SEQ ID NO: 330795 - DNA, 25 bp, Artificial
  Probe
ttcagctcagctctttgagaaatga

SEQ ID NO: 330796 - DNA, 25 bp, Artificial
  Probe
gcatccgtgtgatttacatgagggc

SEQ ID NO: 330797 - DNA, 25 bp, Artificial
  Probe
taccacgtggtgtgtatcatacttt

SEQ ID NO: 330798 - DNA, 25 bp, Artificial
  Probe
tggtgtgtatcatactttggcatcc

SEQ ID NO: 330799 - DNA, 25 bp, Artificial
  Probe
tggtgcacggcactcactgcgtcat

SEQ ID NO: 330800 - DNA, 25 bp, Artificial
  Probe
ttaccacgtggtgtgtatcatactt

SEQ ID NO: 330801 - DNA, 25 bp, Artificial
  Probe
gcgtctcccctggcaaaagaagaaa

SEQ ID NO: 330802 - DNA, 25 bp, Artificial
  Probe
acagttttcagctcagctctttgag

SEQ ID NO: 330803 - DNA, 25 bp, Artificial
  Probe
catccgtgtgatttacatgagggct

SEQ ID NO: 330804 - DNA, 25 bp, Artificial
  Probe
atgttttttaatttttccatagctg

SEQ ID NO: 330805 - DNA, 25 bp, Artificial
  Probe
ggatttttatgtaccatctgtaacc

SEQ ID NO: 330806 - DNA, 25 bp, Artificial
  Probe
catactttggcatccgtgtgattta

SEQ ID NO: 330807 - DNA, 25 bp, Artificial
  Probe
tcatactttggcatccgtgtgattt

SEQ ID NO: 330808 - DNA, 25 bp, Artificial
  Probe
accacgtggtgtgtatcatactttg

SEQ ID NO: 330809 - DNA, 25 bp, Artificial
  Probe
ggcatccgtgtgatttacatgaggg

SEQ ID NO: 330810 - DNA, 25 bp, Artificial
  Probe
tgtatcatactttggcatccgtgtg

SEQ ID NO: 330811 - DNA, 25 bp, Artificial
  Probe
aattttgcagtgtaagagatgcaca

SEQ ID NO: 330812 - DNA, 25 bp, Artificial
  Probe
tttggcatccgtgtgatttacatga

SEQ ID NO: 330813 - DNA, 25 bp, Artificial
  Probe
ccatagctgatctataataactaca

SEQ ID NO: 330814 - DNA, 25 bp, Artificial
  Probe
ctttggcatccgtgtgatttacatg

SEQ ID NO: 330815 - DNA, 25 bp, Artificial
  Probe
taaattttgcagtgtaagagatgca

SEQ ID NO: 330816 - DNA, 25 bp, Artificial
  Probe
tatgtaccatctgtaacccaccgca

SEQ ID NO: 330817 - DNA, 25 bp, Artificial
  Probe
gcgtcatcgcgtctcccctggcaaa

SEQ ID NO: 330818 - DNA, 25 bp, Artificial
  Probe
tttcagctcagctctttgagaaatg

SEQ ID NO: 330819 - DNA, 25 bp, Artificial
  Probe
gtgtgtatcatactttggcatccgt

SEQ ID NO: 330820 - DNA, 25 bp, Artificial
  Probe
gtgtatcatactttggcatccgtgt

SEQ ID NO: 330821 - DNA, 25 bp, Artificial
  Probe
gctcagctctttgagaaatgaaaaa

SEQ ID NO: 330822 - DNA, 25 bp, Artificial
  Probe
ccgtgtgatttacatgagggctgct

SEQ ID NO: 330823 - DNA, 25 bp, Artificial
  Probe
ctcagctctttgagaaatgaaaaaa

SEQ ID NO: 330824 - DNA, 25 bp, Artificial
  Probe
tgcacggcactcactgcgtcatcgc

SEQ ID NO: 330825 - DNA, 25 bp, Artificial
  Probe
gtctcccctggcaaaagaagaaaat

SEQ ID NO: 330826 - DNA, 25 bp, Artificial
  Probe
ttttcagctcagctctttgagaaat

SEQ ID NO: 330827 - DNA, 25 bp, Artificial
  Probe
atccgtgtgatttacatgagggctg

SEQ ID NO: 330828 - DNA, 25 bp, Artificial
  Probe
ccacgtggtgtgtatcatactttgg

SEQ ID NO: 330829 - DNA, 25 bp, Artificial
  Probe
actttggcatccgtgtgatttacat

SEQ ID NO: 330830 - DNA, 25 bp, Artificial
  Probe
tcagctctttgagaaatgaaaaaag

SEQ ID NO: 330831 - DNA, 25 bp, Artificial
  Probe
ttggcatccgtgtgatttacatgag

SEQ ID NO: 330832 - DNA, 25 bp, Artificial
  Probe
gtgcacggcactcactgcgtcatcg

SEQ ID NO: 330833 - DNA, 25 bp, Artificial
  Probe
tacagcttcacttgagaccttgtgg

SEQ ID NO: 330834 - DNA, 25 bp, Artificial
  Probe
taaagacctgagactctgtcttggg

SEQ ID NO: 330835 - DNA, 25 bp, Artificial
  Probe
gttgattccttgctagttctctacc

SEQ ID NO: 330836 - DNA, 25 bp, Artificial
  Probe
tgtgttccacgtagtcatcaaatgg

SEQ ID NO: 330837 - DNA, 25 bp, Artificial
  Probe
gacagtggaaaccttcttttctcta

SEQ ID NO: 330838 - DNA, 25 bp, Artificial
  Probe
ctgagactctgtcttggggtttggt

SEQ ID NO: 330839 - DNA, 25 bp, Artificial
  Probe
ttcgtgcaaactgtcagcttttatc

SEQ ID NO: 330840 - DNA, 25 bp, Artificial
  Probe
gccagtattccctgggttttggact

SEQ ID NO: 330841 - DNA, 25 bp, Artificial
  Probe
gattcacttccagcatgtcctagaa

SEQ ID NO: 330842 - DNA, 25 bp, Artificial
  Probe
aattacagcttcacttgagaccttg

SEQ ID NO: 330843 - DNA, 25 bp, Artificial
  Probe
gtggaaaccttcttttctctaagtg

SEQ ID NO: 330844 - DNA, 25 bp, Artificial
  Probe
gggtttggtgcatgcagttgattcc

SEQ ID NO: 330845 - DNA, 25 bp, Artificial
  Probe
cagtggaaaccttcttttctctaag

SEQ ID NO: 330846 - DNA, 25 bp, Artificial
  Probe
agactaaagacctgagactctgtct

SEQ ID NO: 330847 - DNA, 25 bp, Artificial
  Probe
acctgagactctgtcttggggtttg

SEQ ID NO: 330848 - DNA, 25 bp, Artificial
  Probe
cacgtagtcatcaaatggattcatt

SEQ ID NO: 330849 - DNA, 25 bp, Artificial
  Probe
ttgctagttctctaccaactgtgaa

SEQ ID NO: 330850 - DNA, 25 bp, Artificial
  Probe
tggaaaccttcttttctctaagtgc

SEQ ID NO: 330851 - DNA, 25 bp, Artificial
  Probe
tctgtcttggggtttggtgcatgca

SEQ ID NO: 330852 - DNA, 25 bp, Artificial
  Probe
ctaaagacctgagactctgtcttgg

SEQ ID NO: 330853 - DNA, 25 bp, Artificial
  Probe
ggtgcatgcagttgattccttgcta

SEQ ID NO: 330854 - DNA, 25 bp, Artificial
  Probe
tatgggcttccctttgattcacttc

SEQ ID NO: 330855 - DNA, 25 bp, Artificial
  Probe
tctctaagtgccagtattccctggg

SEQ ID NO: 330856 - DNA, 25 bp, Artificial
  Probe
aagtgccagtattccctgggttttg

SEQ ID NO: 330857 - DNA, 25 bp, Artificial
  Probe
gtgcaaactgtcagcttttatctta

SEQ ID NO: 330858 - DNA, 25 bp, Artificial
  Probe
aagacctgagactctgtcttggggt

SEQ ID NO: 330859 - DNA, 25 bp, Artificial
  Probe
ttacagcttcacttgagaccttgtg

SEQ ID NO: 330860 - DNA, 25 bp, Artificial
  Probe
agtaattacagcttcacttgagacc

SEQ ID NO: 330861 - DNA, 25 bp, Artificial
  Probe
agttgattccttgctagttctctac

SEQ ID NO: 330862 - DNA, 25 bp, Artificial
  Probe
agttctctaccaactgtgaacattg

SEQ ID NO: 330863 - DNA, 25 bp, Artificial
  Probe
gctagttctctaccaactgtgaaca

SEQ ID NO: 330864 - DNA, 25 bp, Artificial
  Probe
attagtaattacagcttcacttgag

SEQ ID NO: 330865 - DNA, 25 bp, Artificial
  Probe
taagtgccagtattccctgggtttt

SEQ ID NO: 330866 - DNA, 25 bp, Artificial
  Probe
agacctgagactctgtcttggggtt

SEQ ID NO: 330867 - DNA, 25 bp, Artificial
  Probe
atgcagttgattccttgctagttct

SEQ ID NO: 330868 - DNA, 25 bp, Artificial
  Probe
gtaattacagcttcacttgagacct

SEQ ID NO: 330869 - DNA, 25 bp, Artificial
  Probe
gcatgcagttgattccttgctagtt

SEQ ID NO: 330870 - DNA, 25 bp, Artificial
  Probe
tagtaattacagcttcacttgagac

SEQ ID NO: 330871 - DNA, 25 bp, Artificial
  Probe
ttgattcacttccagcatgtcctag

SEQ ID NO: 330872 - DNA, 25 bp, Artificial
  Probe
ggcttccctttgattcacttccagc

SEQ ID NO: 330873 - DNA, 25 bp, Artificial
  Probe
gtttggtgcatgcagttgattcctt

SEQ ID NO: 330874 - DNA, 25 bp, Artificial
  Probe
cttgctagttctctaccaactgtga

SEQ ID NO: 330875 - DNA, 25 bp, Artificial
  Probe
ctctaagtgccagtattccctgggt

SEQ ID NO: 330876 - DNA, 25 bp, Artificial
  Probe
gttccacgtagtcatcaaatggatt

SEQ ID NO: 330877 - DNA, 25 bp, Artificial
  Probe
ttctctaccaactgtgaacattggt

SEQ ID NO: 330878 - DNA, 25 bp, Artificial
  Probe
ccttgctagttctctaccaactgtg

SEQ ID NO: 330879 - DNA, 25 bp, Artificial
  Probe
catgtgaacgctacttatgtgaatg

SEQ ID NO: 330880 - DNA, 25 bp, Artificial
  Probe
ccatgtgaacgctacttatgtgaat

SEQ ID NO: 330881 - DNA, 25 bp, Artificial
  Probe
agactcttgcaaccagagtactgtc

SEQ ID NO: 330882 - DNA, 25 bp, Artificial
  Probe
aagacaacattgacggcgaagcgaa

SEQ ID NO: 330883 - DNA, 25 bp, Artificial
  Probe
gcttctctgggagctcatgacgaga

SEQ ID NO: 330884 - DNA, 25 bp, Artificial
  Probe
acggcgaagcgaacacatgacggat

SEQ ID NO: 330885 - DNA, 25 bp, Artificial
  Probe
tgtgttgctccatatccttctctgt

SEQ ID NO: 330886 - DNA, 25 bp, Artificial
  Probe
tgtccagacgccttgtatgaagtga

SEQ ID NO: 330887 - DNA, 25 bp, Artificial
  Probe
ttctctgggagctcatgacgagagg

SEQ ID NO: 330888 - DNA, 25 bp, Artificial
  Probe
ttcggtgtgcttctctgggagctca

SEQ ID NO: 330889 - DNA, 25 bp, Artificial
  Probe
ccttatcctgacgtgaacacatttg

SEQ ID NO: 330890 - DNA, 25 bp, Artificial
  Probe
gcgaagcgaacacatgacggataag

SEQ ID NO: 330891 - DNA, 25 bp, Artificial
  Probe
tcattggcgagcactatgtccatgt

SEQ ID NO: 330892 - DNA, 25 bp, Artificial
  Probe
aggcagaagactcttgcaaccagag

SEQ ID NO: 330893 - DNA, 25 bp, Artificial
  Probe
aaggcagaagactcttgcaaccaga

SEQ ID NO: 330894 - DNA, 25 bp, Artificial
  Probe
agtactgtccagacgccttgtatga

SEQ ID NO: 330895 - DNA, 25 bp, Artificial
  Probe
tctctgggagctcatgacgagagga

SEQ ID NO: 330896 - DNA, 25 bp, Artificial
  Probe
aatcttctccactttcattggcgag

SEQ ID NO: 330897 - DNA, 25 bp, Artificial
  Probe
cgccttgtatgaagtgatgctaaaa

SEQ ID NO: 330898 - DNA, 25 bp, Artificial
  Probe
atgctaaaatgctggcaccccaaag

SEQ ID NO: 330899 - DNA, 25 bp, Artificial
  Probe
ctccactttcattggcgagcactat

SEQ ID NO: 330900 - DNA, 25 bp, Artificial
  Probe
tgacgtgaacacatttgatatcact

SEQ ID NO: 330901 - DNA, 25 bp, Artificial
  Probe
gcagaagactcttgcaaccagagta

SEQ ID NO: 330902 - DNA, 25 bp, Artificial
  Probe
agcgaacacatgacggataagaggc

SEQ ID NO: 330903 - DNA, 25 bp, Artificial
  Probe
tgcttctctgggagctcatgacgag

SEQ ID NO: 330904 - DNA, 25 bp, Artificial
  Probe
gccagcccacttccaagaaacagtt

SEQ ID NO: 330905 - DNA, 25 bp, Artificial
  Probe
tgctggcaccccaaagcagaaatgc

SEQ ID NO: 330906 - DNA, 25 bp, Artificial
  Probe
aacacatgacggataagaggcccgc

SEQ ID NO: 330907 - DNA, 25 bp, Artificial
  Probe
ctttcattggcgagcactatgtcca

SEQ ID NO: 330908 - DNA, 25 bp, Artificial
  Probe
tgcaaggcagaagactcttgcaacc

SEQ ID NO: 330909 - DNA, 25 bp, Artificial
  Probe
cattgacggcgaagcgaacacatga

SEQ ID NO: 330910 - DNA, 25 bp, Artificial
  Probe
gttgctccatatccttctctgttgc

SEQ ID NO: 330911 - DNA, 25 bp, Artificial
  Probe
acacatgacggataagaggcccgcc

SEQ ID NO: 330912 - DNA, 25 bp, Artificial
  Probe
tggcaccccaaagcagaaatgcgcc

SEQ ID NO: 330913 - DNA, 25 bp, Artificial
  Probe
gatatcactatatacctgttgcaag

SEQ ID NO: 330914 - DNA, 25 bp, Artificial
  Probe
gaagactcttgcaaccagagtactg

SEQ ID NO: 330915 - DNA, 25 bp, Artificial
  Probe
attggcgagcactatgtccatgtga

SEQ ID NO: 330916 - DNA, 25 bp, Artificial
  Probe
ggtgtgcttctctgggagctcatga

SEQ ID NO: 330917 - DNA, 25 bp, Artificial
  Probe
atgtccatgtgaacgctacttatgt

SEQ ID NO: 330918 - DNA, 25 bp, Artificial
  Probe
gacggcgaagcgaacacatgacgga

SEQ ID NO: 330919 - DNA, 25 bp, Artificial
  Probe
tgttgccatcccaagacaacattga

SEQ ID NO: 330920 - DNA, 25 bp, Artificial
  Probe
acattgacggcgaagcgaacacatg

SEQ ID NO: 330921 - DNA, 25 bp, Artificial
  Probe
ccttcggtgtgcttctctgggagct

SEQ ID NO: 330922 - DNA, 25 bp, Artificial
  Probe
ctgttgcaaggcagaagactcttgc

SEQ ID NO: 330923 - DNA, 25 bp, Artificial
  Probe
atacctgttgcaaggcagaagactc

SEQ ID NO: 330924 - DNA, 25 bp, Artificial
  Probe
gtaaaatgtgttgctccatatcctt

SEQ ID NO: 330925 - DNA, 25 bp, Artificial
  Probe
tctgtcctgccgacaggtaccttag

SEQ ID NO: 330926 - DNA, 25 bp, Artificial
  Probe
gctgtctcggtgagcaaactgtgag

SEQ ID NO: 330927 - DNA, 25 bp, Artificial
  Probe
gaatcctgcttcagactaggtacaa

SEQ ID NO: 330928 - DNA, 25 bp, Artificial
  Probe
gcagactgaatcctgcttcagacta

SEQ ID NO: 330929 - DNA, 25 bp, Artificial
  Probe
tctgcatgctctgtcctgccgacag

SEQ ID NO: 330930 - DNA, 25 bp, Artificial
  Probe
ggtaccttagttctgtgttcatgtg

SEQ ID NO: 330931 - DNA, 25 bp, Artificial
  Probe
gtctctcatttcctctgaatagtga

SEQ ID NO: 330932 - DNA, 25 bp, Artificial
  Probe
atcctgcttcagactaggtacaatt

SEQ ID NO: 330933 - DNA, 25 bp, Artificial
  Probe
tgtctcggtgagcaaactgtgagaa

SEQ ID NO: 330934 - DNA, 25 bp, Artificial
  Probe
ttgggaagcagcatccatttggggt

SEQ ID NO: 330935 - DNA, 25 bp, Artificial
  Probe
tgtctctcatttcctctgaatagtg

SEQ ID NO: 330936 - DNA, 25 bp, Artificial
  Probe
gaaacaaactccagaccctttgttg

SEQ ID NO: 330937 - DNA, 25 bp, Artificial
  Probe
cctttgttgccagtggctgggcctg

SEQ ID NO: 330938 - DNA, 25 bp, Artificial
  Probe
gtgatcgctgtctcggtgagcaaac

SEQ ID NO: 330939 - DNA, 25 bp, Artificial
  Probe
ctgaatcctgcttcagactaggtac

SEQ ID NO: 330940 - DNA, 25 bp, Artificial
  Probe
cttagttctgtgttcatgtggccct

SEQ ID NO: 330941 - DNA, 25 bp, Artificial
  Probe
gttgccccggggacgttgctcagtt

SEQ ID NO: 330942 - DNA, 25 bp, Artificial
  Probe
gactaggtacaattgccccttttat

SEQ ID NO: 330943 - DNA, 25 bp, Artificial
  Probe
atagtgatcgctgtctcggtgagca

SEQ ID NO: 330944 - DNA, 25 bp, Artificial
  Probe
cggtcttagagcattgtgaacccaa

SEQ ID NO: 330945 - DNA, 25 bp, Artificial
  Probe
agagcattgtgaacccaacctgcac

SEQ ID NO: 330946 - DNA, 25 bp, Artificial
  Probe
ggggacgttgctcagttgctctgca

SEQ ID NO: 330947 - DNA, 25 bp, Artificial
  Probe
ttcagactaggtacaattgcccctt

SEQ ID NO: 330948 - DNA, 25 bp, Artificial
  Probe
tctcggtgagcaaactgtgagaagg

SEQ ID NO: 330949 - DNA, 25 bp, Artificial
  Probe
acacccggtcttagagcattgtgaa

SEQ ID NO: 330950 - DNA, 25 bp, Artificial
  Probe
tgctctgcatgctctgtcctgccga

SEQ ID NO: 330951 - DNA, 25 bp, Artificial
  Probe
cgacaggtaccttagttctgtgttc

SEQ ID NO: 330952 - DNA, 25 bp, Artificial
  Probe
gtgaacccaacctgcacttgtctct

SEQ ID NO: 330953 - DNA, 25 bp, Artificial
  Probe
caggtaccttagttctgtgttcatg

SEQ ID NO: 330954 - DNA, 25 bp, Artificial
  Probe
tctgtgttcatgtggccctgaccct

SEQ ID NO: 330955 - DNA, 25 bp, Artificial
  Probe
actccagaccctttgttgccagtgg

SEQ ID NO: 330956 - DNA, 25 bp, Artificial
  Probe
ccggggacgttgctcagttgctctg

SEQ ID NO: 330957 - DNA, 25 bp, Artificial
  Probe
ggacgttgctcagttgctctgcatg

SEQ ID NO: 330958 - DNA, 25 bp, Artificial
  Probe
agactgaatcctgcttcagactagg

SEQ ID NO: 330959 - DNA, 25 bp, Artificial
  Probe
cattgtgaacccaacctgcacttgt

SEQ ID NO: 330960 - DNA, 25 bp, Artificial
  Probe
gcatgctctgtcctgccgacaggta

SEQ ID NO: 330961 - DNA, 25 bp, Artificial
  Probe
ttcatcaagagaccattttatgatg

SEQ ID NO: 330962 - DNA, 25 bp, Artificial
  Probe
ttagagcattgtgaacccaacctgc

SEQ ID NO: 330963 - DNA, 25 bp, Artificial
  Probe
tctcatttcctctgaatagtgatcg

SEQ ID NO: 330964 - DNA, 25 bp, Artificial
  Probe
gccgacaggtaccttagttctgtgt

SEQ ID NO: 330965 - DNA, 25 bp, Artificial
  Probe
ccctttgttgccagtggctgggcct

SEQ ID NO: 330966 - DNA, 25 bp, Artificial
  Probe
aactccagaccctttgttgccagtg

SEQ ID NO: 330967 - DNA, 25 bp, Artificial
  Probe
ctctgaatagtgatcgctgtctcgg

SEQ ID NO: 330968 - DNA, 25 bp, Artificial
  Probe
cagaccctttgttgccagtggctgg

SEQ ID NO: 330969 - DNA, 25 bp, Artificial
  Probe
catgctctgtcctgccgacaggtac

SEQ ID NO: 330970 - DNA, 25 bp, Artificial
  Probe
cacacccggtcttagagcattgtga

SEQ ID NO: 330971 - DNA, 25 bp, Artificial
  Probe
caccactgacagagcccgagaaggg

SEQ ID NO: 330972 - DNA, 25 bp, Artificial
  Probe
gacagagcccgagaagggtcctgta

SEQ ID NO: 330973 - DNA, 25 bp, Artificial
  Probe
cacaccactgacagagcccgagaag

SEQ ID NO: 330974 - DNA, 25 bp, Artificial
  Probe
agggaagcacacagagcccaacgag

SEQ ID NO: 330975 - DNA, 25 bp, Artificial
  Probe
tgacacagcggcttcaccagagcat

SEQ ID NO: 330976 - DNA, 25 bp, Artificial
  Probe
aagcatgatgggtaccagcaaaaag

SEQ ID NO: 330977 - DNA, 25 bp, Artificial
  Probe
gcccgagaagggtcctgtagaaaca

SEQ ID NO: 330978 - DNA, 25 bp, Artificial
  Probe
aaagccagcgccaactgaagtcaag

SEQ ID NO: 330979 - DNA, 25 bp, Artificial
  Probe
ggactccaaaccatgacggagggaa

SEQ ID NO: 330980 - DNA, 25 bp, Artificial
  Probe
aggaacggactccaaaccatgacgg

SEQ ID NO: 330981 - DNA, 25 bp, Artificial
  Probe
atctaggaagctcagactgaagaga

SEQ ID NO: 330982 - DNA, 25 bp, Artificial
  Probe
gccccaggagtcagaagcaaagcca

SEQ ID NO: 330983 - DNA, 25 bp, Artificial
  Probe
tgatgggtaccagcaaaaagcaaag

SEQ ID NO: 330984 - DNA, 25 bp, Artificial
  Probe
aagacggtccccaatgaagccacac

SEQ ID NO: 330985 - DNA, 25 bp, Artificial
  Probe
ggtccccaatgaagccacacaaacg

SEQ ID NO: 330986 - DNA, 25 bp, Artificial
  Probe
tgacagagcccgagaagggtcctgt

SEQ ID NO: 330987 - DNA, 25 bp, Artificial
  Probe
gccaactgaagtcaagacggtcccc

SEQ ID NO: 330988 - DNA, 25 bp, Artificial
  Probe
ccaactgaagtcaagacggtcccca

SEQ ID NO: 330989 - DNA, 25 bp, Artificial
  Probe
ctccaaaccatgacggagggaagca

SEQ ID NO: 330990 - DNA, 25 bp, Artificial
  Probe
agtcagaagcaaagccagcgccaac

SEQ ID NO: 330991 - DNA, 25 bp, Artificial
  Probe
ccagcgccaactgaagtcaagacgg

SEQ ID NO: 330992 - DNA, 25 bp, Artificial
  Probe
acggactccaaaccatgacggaggg

SEQ ID NO: 330993 - DNA, 25 bp, Artificial
  Probe
acaccactgacagagcccgagaagg

SEQ ID NO: 330994 - DNA, 25 bp, Artificial
  Probe
aaaccatgacggagggaagcacaca

SEQ ID NO: 330995 - DNA, 25 bp, Artificial
  Probe
aatctaggaagctcagactgaagag

SEQ ID NO: 330996 - DNA, 25 bp, Artificial
  Probe
atgatgggtaccagcaaaaagcaaa

SEQ ID NO: 330997 - DNA, 25 bp, Artificial
  Probe
taacaaattgacacagcggcttcac

SEQ ID NO: 330998 - DNA, 25 bp, Artificial
  Probe
ctaggaagctcagactgaagagaaa

SEQ ID NO: 330999 - DNA, 25 bp, Artificial
  Probe
cccaatgaagccacacaaacgaaag

SEQ ID NO: 331000 - DNA, 25 bp, Artificial
  Probe
actccaaaccatgacggagggaagc

SEQ ID NO: 331001 - DNA, 25 bp, Artificial
  Probe
gggaagcacacagagcccaacgaga

SEQ ID NO: 331002 - DNA, 25 bp, Artificial
  Probe
ggccccaaattaagaatctaggaag

SEQ ID NO: 331003 - DNA, 25 bp, Artificial
  Probe
agaagcaaagccagcgccaactgaa

SEQ ID NO: 331004 - DNA, 25 bp, Artificial
  Probe
gacggtccccaatgaagccacacaa

SEQ ID NO: 331005 - DNA, 25 bp, Artificial
  Probe
agcatgatgggtaccagcaaaaagc

SEQ ID NO: 331006 - DNA, 25 bp, Artificial
  Probe
cagcgccaactgaagtcaagacggt

SEQ ID NO: 331007 - DNA, 25 bp, Artificial
  Probe
cagagcccgagaagggtcctgtaga

SEQ ID NO: 331008 - DNA, 25 bp, Artificial
  Probe
ggaagcacacagagcccaacgagac

SEQ ID NO: 331009 - DNA, 25 bp, Artificial
  Probe
aagccagcgccaactgaagtcaaga

SEQ ID NO: 331010 - DNA, 25 bp, Artificial
  Probe
acggtccccaatgaagccacacaaa

SEQ ID NO: 331011 - DNA, 25 bp, Artificial
  Probe
taggacactccgttccctgaaacca

SEQ ID NO: 331012 - DNA, 25 bp, Artificial
  Probe
atgggtaccagcaaaaagcaaagat

SEQ ID NO: 331013 - DNA, 25 bp, Artificial
  Probe
ccccaggagtcagaagcaaagccag

SEQ ID NO: 331014 - DNA, 25 bp, Artificial
  Probe
ccccaaattaagaatctaggaagct

SEQ ID NO: 331015 - DNA, 25 bp, Artificial
  Probe
gacacagcggcttcaccagagcatc

SEQ ID NO: 331016 - DNA, 25 bp, Artificial
  Probe
ataacaaattgacacagcggcttca

SEQ ID NO: 331017 - DNA, 25 bp, Artificial
  Probe
ctgcttcggatggtgacagaagatg

SEQ ID NO: 331018 - DNA, 25 bp, Artificial
  Probe
tgactctgtggacagaggcctggac

SEQ ID NO: 331019 - DNA, 25 bp, Artificial
  Probe
gtcttcatcaccagcaaacaccagg

SEQ ID NO: 331020 - DNA, 25 bp, Artificial
  Probe
tctgccttcctactggccatgtgac

SEQ ID NO: 331021 - DNA, 25 bp, Artificial
  Probe
gactctgtggacagaggcctggacc

SEQ ID NO: 331022 - DNA, 25 bp, Artificial
  Probe
ttcctactggccatgtgacctatca

SEQ ID NO: 331023 - DNA, 25 bp, Artificial
  Probe
cttcggatggtgacagaagatgccc

SEQ ID NO: 331024 - DNA, 25 bp, Artificial
  Probe
accctgagatggactgctctctcct

SEQ ID NO: 331025 - DNA, 25 bp, Artificial
  Probe
gcttcggatggtgacagaagatgcc

SEQ ID NO: 331026 - DNA, 25 bp, Artificial
  Probe
ctctgtggacagaggcctggaccct

SEQ ID NO: 331027 - DNA, 25 bp, Artificial
  Probe
tgagatggactgctctctcctggca

SEQ ID NO: 331028 - DNA, 25 bp, Artificial
  Probe
tggacagaggcctggaccctgagat

SEQ ID NO: 331029 - DNA, 25 bp, Artificial
  Probe
agatggactgctctctcctggcagc

SEQ ID NO: 331030 - DNA, 25 bp, Artificial
  Probe
ggactgctctctcctggcagcctgg

SEQ ID NO: 331031 - DNA, 25 bp, Artificial
  Probe
ccctgcttcggatggtgacagaaga

SEQ ID NO: 331032 - DNA, 25 bp, Artificial
  Probe
gagatggactgctctctcctggcag

SEQ ID NO: 331033 - DNA, 25 bp, Artificial
  Probe
tggccatgtgacctatcagcccagc

SEQ ID NO: 331034 - DNA, 25 bp, Artificial
  Probe
tggactgctctctcctggcagcctg

SEQ ID NO: 331035 - DNA, 25 bp, Artificial
  Probe
cctggaccctgagatggactgctct

SEQ ID NO: 331036 - DNA, 25 bp, Artificial
  Probe
gcttgccatgtcttcatcaccagca

SEQ ID NO: 331037 - DNA, 25 bp, Artificial
  Probe
actctgtggacagaggcctggaccc

SEQ ID NO: 331038 - DNA, 25 bp, Artificial
  Probe
cagcttgccatgtcttcatcaccag

SEQ ID NO: 331039 - DNA, 25 bp, Artificial
  Probe
atgaccacctcgacacatggacagc

SEQ ID NO: 331040 - DNA, 25 bp, Artificial
  Probe
ctctgccttcctactggccatgtga

SEQ ID NO: 331041 - DNA, 25 bp, Artificial
  Probe
actggccatgtgacctatcagccca

SEQ ID NO: 331042 - DNA, 25 bp, Artificial
  Probe
ctcctggcagcctgggctggcatca

SEQ ID NO: 331043 - DNA, 25 bp, Artificial
  Probe
atcaccagcaaacaccagggcctgg

SEQ ID NO: 331044 - DNA, 25 bp, Artificial
  Probe
ggaccctgagatggactgctctctc

SEQ ID NO: 331045 - DNA, 25 bp, Artificial
  Probe
agcttgccatgtcttcatcaccagc

SEQ ID NO: 331046 - DNA, 25 bp, Artificial
  Probe
ccctgagatggactgctctctcctg

SEQ ID NO: 331047 - DNA, 25 bp, Artificial
  Probe
gcatcaggggccaggcattgagcca

SEQ ID NO: 331048 - DNA, 25 bp, Artificial
  Probe
cctactggccatgtgacctatcagc

SEQ ID NO: 331049 - DNA, 25 bp, Artificial
  Probe
catgaccacctcgacacatggacag

SEQ ID NO: 331050 - DNA, 25 bp, Artificial
  Probe
gaccctgagatggactgctctctcc

SEQ ID NO: 331051 - DNA, 25 bp, Artificial
  Probe
tgcttcggatggtgacagaagatgc

SEQ ID NO: 331052 - DNA, 25 bp, Artificial
  Probe
tttctctgccttcctactggccatg

SEQ ID NO: 331053 - DNA, 25 bp, Artificial
  Probe
ttctctgccttcctactggccatgt

SEQ ID NO: 331054 - DNA, 25 bp, Artificial
  Probe
tcctactggccatgtgacctatcag

SEQ ID NO: 331055 - DNA, 25 bp, Artificial
  Probe
cccctgcttcggatggtgacagaag

SEQ ID NO: 331056 - DNA, 25 bp, Artificial
  Probe
ggcctggaccctgagatggactgct

SEQ ID NO: 331057 - DNA, 25 bp, Artificial
  Probe
ctgagatggactgctctctcctggc

SEQ ID NO: 331058 - DNA, 25 bp, Artificial
  Probe
tcttcatcaccagcaaacaccaggg

SEQ ID NO: 331059 - DNA, 25 bp, Artificial
  Probe
atggactgctctctcctggcagcct

SEQ ID NO: 331060 - DNA, 25 bp, Artificial
  Probe
acagaggcctggaccctgagatgga

SEQ ID NO: 331061 - DNA, 25 bp, Artificial
  Probe
tggaccctgagatggactgctctct

SEQ ID NO: 331062 - DNA, 25 bp, Artificial
  Probe
tactggccatgtgacctatcagccc

SEQ ID NO: 331063 - DNA, 25 bp, Artificial
  Probe
tgaccccaataaggaatgggtccag

SEQ ID NO: 331064 - DNA, 25 bp, Artificial
  Probe
tggaccagaaccaagtgagatcaga

SEQ ID NO: 331065 - DNA, 25 bp, Artificial
  Probe
cacctttgaatgtgaacttgaccca

SEQ ID NO: 331066 - DNA, 25 bp, Artificial
  Probe
tgtgctgaccccaataaggaatggg

SEQ ID NO: 331067 - DNA, 25 bp, Artificial
  Probe
agagagatctgtgctgaccccaata

SEQ ID NO: 331068 - DNA, 25 bp, Artificial
  Probe
tcaacactttcaatgtatgagagat

SEQ ID NO: 331069 - DNA, 25 bp, Artificial
  Probe
agatctgtgctgaccccaataagga

SEQ ID NO: 331070 - DNA, 25 bp, Artificial
  Probe
acttctgtagaagtgaccagtatga

SEQ ID NO: 331071 - DNA, 25 bp, Artificial
  Probe
gagatctgtgctgaccccaataagg

SEQ ID NO: 331072 - DNA, 25 bp, Artificial
  Probe
gcacttctgtagaagtgaccagtat

SEQ ID NO: 331073 - DNA, 25 bp, Artificial
  Probe
gaacttgacccataaatctgaagct

SEQ ID NO: 331074 - DNA, 25 bp, Artificial
  Probe
ttgacccataaatctgaagctaatg

SEQ ID NO: 331075 - DNA, 25 bp, Artificial
  Probe
gcacctttgaatgtgaacttgaccc

SEQ ID NO: 331076 - DNA, 25 bp, Artificial
  Probe
ggaccagaaccaagtgagatcagaa

SEQ ID NO: 331077 - DNA, 25 bp, Artificial
  Probe
tgaatgtgaacttgacccataaatc

SEQ ID NO: 331078 - DNA, 25 bp, Artificial
  Probe
gctgaccccaataaggaatgggtcc

SEQ ID NO: 331079 - DNA, 25 bp, Artificial
  Probe
cacttctgtagaagtgaccagtatg

SEQ ID NO: 331080 - DNA, 25 bp, Artificial
  Probe
gacccataaatctgaagctaatgca

SEQ ID NO: 331081 - DNA, 25 bp, Artificial
  Probe
tgaacttgacccataaatctgaagc

SEQ ID NO: 331082 - DNA, 25 bp, Artificial
  Probe
agtgaccagtatgacagagaactag

SEQ ID NO: 331083 - DNA, 25 bp, Artificial
  Probe
ctgaccccaataaggaatgggtcca

SEQ ID NO: 331084 - DNA, 25 bp, Artificial
  Probe
cttctgtagaagtgaccagtatgac

SEQ ID NO: 331085 - DNA, 25 bp, Artificial
  Probe
tcaagcacttctgtagaagtgacca

SEQ ID NO: 331086 - DNA, 25 bp, Artificial
  Probe
ctggaccagaaccaagtgagatcag

SEQ ID NO: 331087 - DNA, 25 bp, Artificial
  Probe
gaatgtgaacttgacccataaatct

SEQ ID NO: 331088 - DNA, 25 bp, Artificial
  Probe
tggttcaacactttcaatgtatgag

SEQ ID NO: 331089 - DNA, 25 bp, Artificial
  Probe
gaagtgaccagtatgacagagaact

SEQ ID NO: 331090 - DNA, 25 bp, Artificial
  Probe
ctcaagcacttctgtagaagtgacc

SEQ ID NO: 331091 - DNA, 25 bp, Artificial
  Probe
cctcaagcacttctgtagaagtgac

SEQ ID NO: 331092 - DNA, 25 bp, Artificial
  Probe
caacactttcaatgtatgagagatg

SEQ ID NO: 331093 - DNA, 25 bp, Artificial
  Probe
acctcaagcacttctgtagaagtga

SEQ ID NO: 331094 - DNA, 25 bp, Artificial
  Probe
tgctgaccccaataaggaatgggtc

SEQ ID NO: 331095 - DNA, 25 bp, Artificial
  Probe
ttcagcacctttgaatgtgaacttg

SEQ ID NO: 331096 - DNA, 25 bp, Artificial
  Probe
tccttaaatgcaagatgtagatcca

SEQ ID NO: 331097 - DNA, 25 bp, Artificial
  Probe
ttctgtagaagtgaccagtatgaca

SEQ ID NO: 331098 - DNA, 25 bp, Artificial
  Probe
gaccccaataaggaatgggtccaga

SEQ ID NO: 331099 - DNA, 25 bp, Artificial
  Probe
agaagtgaccagtatgacagagaac

SEQ ID NO: 331100 - DNA, 25 bp, Artificial
  Probe
acctttgaatgtgaacttgacccat

SEQ ID NO: 331101 - DNA, 25 bp, Artificial
  Probe
cagcacctttgaatgtgaacttgac

SEQ ID NO: 331102 - DNA, 25 bp, Artificial
  Probe
ccacctcaagcacttctgtagaagt

SEQ ID NO: 331103 - DNA, 25 bp, Artificial
  Probe
cttcagcacctttgaatgtgaactt

SEQ ID NO: 331104 - DNA, 25 bp, Artificial
  Probe
gtgctgaccccaataaggaatgggt

SEQ ID NO: 331105 - DNA, 25 bp, Artificial
  Probe
gagagatctgtgctgaccccaataa

SEQ ID NO: 331106 - DNA, 25 bp, Artificial
  Probe
accacctcaagcacttctgtagaag

SEQ ID NO: 331107 - DNA, 25 bp, Artificial
  Probe
aatgtgaacttgacccataaatctg

SEQ ID NO: 331108 - DNA, 25 bp, Artificial
  Probe
aagtgaccagtatgacagagaacta

SEQ ID NO: 331109 - DNA, 25 bp, Artificial
  Probe
tgaggagctgaactgcactgttgtg

SEQ ID NO: 331110 - DNA, 25 bp, Artificial
  Probe
tggtgcccagtgctgcctcactatt

SEQ ID NO: 331111 - DNA, 25 bp, Artificial
  Probe
tccagtctgagttctactctggcaa

SEQ ID NO: 331112 - DNA, 25 bp, Artificial
  Probe
gggccccatcaggttgtctcagtcc

SEQ ID NO: 331113 - DNA, 25 bp, Artificial
  Probe
ttcctgatgattatctctgacacag

SEQ ID NO: 331114 - DNA, 25 bp, Artificial
  Probe
cctgtctgtgggtctctgtgtgcat

SEQ ID NO: 331115 - DNA, 25 bp, Artificial
  Probe
tgccatgctcccaaacttcttggta

SEQ ID NO: 331116 - DNA, 25 bp, Artificial
  Probe
gaaactgcaatagctccctttttgg

SEQ ID NO: 331117 - DNA, 25 bp, Artificial
  Probe
aacccacatggaccaagaagaacac

SEQ ID NO: 331118 - DNA, 25 bp, Artificial
  Probe
aaactggaccctctgattatagctt

SEQ ID NO: 331119 - DNA, 25 bp, Artificial
  Probe
ctgcaaaactggaccctctgattat

SEQ ID NO: 331120 - DNA, 25 bp, Artificial
  Probe
tgtctgcaaaactggaccctctgat

SEQ ID NO: 331121 - DNA, 25 bp, Artificial
  Probe
cggccaacccacatggaccaagaag

SEQ ID NO: 331122 - DNA, 25 bp, Artificial
  Probe
ggccaagatatttaaccccaaatga

SEQ ID NO: 331123 - DNA, 25 bp, Artificial
  Probe
agccagggccccatcaggttgtctc

SEQ ID NO: 331124 - DNA, 25 bp, Artificial
  Probe
gagtcgctgccatgctcccaaactt

SEQ ID NO: 331125 - DNA, 25 bp, Artificial
  Probe
gccatgctcccaaacttcttggtac

SEQ ID NO: 331126 - DNA, 25 bp, Artificial
  Probe
gtgcagagtcgctgccatgctccca

SEQ ID NO: 331127 - DNA, 25 bp, Artificial
  Probe
ttatatcttccttcagcgttgctgt

SEQ ID NO: 331128 - DNA, 25 bp, Artificial
  Probe
aactgcactgttgtggagctgaagt

SEQ ID NO: 331129 - DNA, 25 bp, Artificial
  Probe
aatgagattcgaacttcccaagagt

SEQ ID NO: 331130 - DNA, 25 bp, Artificial
  Probe
tagctccctttttggccaagatatt

SEQ ID NO: 331131 - DNA, 25 bp, Artificial
  Probe
ttatagctttcgaccggcctttcct

SEQ ID NO: 331132 - DNA, 25 bp, Artificial
  Probe
tgagttctactctggcaaaaggagg

SEQ ID NO: 331133 - DNA, 25 bp, Artificial
  Probe
agtgcccatgatgaagcttgaggac

SEQ ID NO: 331134 - DNA, 25 bp, Artificial
  Probe
agctaagaagacatccatggtactg

SEQ ID NO: 331135 - DNA, 25 bp, Artificial
  Probe
gtctgtgggtctctgtgtgcatttt

SEQ ID NO: 331136 - DNA, 25 bp, Artificial
  Probe
cgggacacattccagtctgagttct

SEQ ID NO: 331137 - DNA, 25 bp, Artificial
  Probe
cgaccggcctttcctgatgattatc

SEQ ID NO: 331138 - DNA, 25 bp, Artificial
  Probe
gccttttgaccctcgggacacattc

SEQ ID NO: 331139 - DNA, 25 bp, Artificial
  Probe
ttggtaccactagctcatatttctg

SEQ ID NO: 331140 - DNA, 25 bp, Artificial
  Probe
atctctgacacagaaactgcaatag

SEQ ID NO: 331141 - DNA, 25 bp, Artificial
  Probe
gcctgtgcagagtcgctgccatgct

SEQ ID NO: 331142 - DNA, 25 bp, Artificial
  Probe
gacacagaaactgcaatagctccct

SEQ ID NO: 331143 - DNA, 25 bp, Artificial
  Probe
gccaagatatttaaccccaaatgag

SEQ ID NO: 331144 - DNA, 25 bp, Artificial
  Probe
aactgcaatagctccctttttggcc

SEQ ID NO: 331145 - DNA, 25 bp, Artificial
  Probe
gagattcgaacttcccaagagttga

SEQ ID NO: 331146 - DNA, 25 bp, Artificial
  Probe
gtaccactagctcatatttctgagc

SEQ ID NO: 331147 - DNA, 25 bp, Artificial
  Probe
tgtacagacgcctgtgcagagtcgc

SEQ ID NO: 331148 - DNA, 25 bp, Artificial
  Probe
gtatctgcctcaacccagaagccag

SEQ ID NO: 331149 - DNA, 25 bp, Artificial
  Probe
tagttatatcttccttcagcgttgc

SEQ ID NO: 331150 - DNA, 25 bp, Artificial
  Probe
tgccacaggggtcaaatttgttcca

SEQ ID NO: 331151 - DNA, 25 bp, Artificial
  Probe
atgcctggatgagacagtaactaac

SEQ ID NO: 331152 - DNA, 25 bp, Artificial
  Probe
gcggcatgcctggatgagacagtaa

SEQ ID NO: 331153 - DNA, 25 bp, Artificial
  Probe
cctcatgtacagacgcctgtgcaga

SEQ ID NO: 331154 - DNA, 25 bp, Artificial
  Probe
ttgaccctcgggacacattccagtc

SEQ ID NO: 331155 - DNA, 25 bp, Artificial
  Probe
ggtctctgcccactcttgattaact

SEQ ID NO: 331156 - DNA, 25 bp, Artificial
  Probe
ggtccgacccggagacagtccagcg

SEQ ID NO: 331157 - DNA, 25 bp, Artificial
  Probe
ttaagctgtcccacttacagatgca

SEQ ID NO: 331158 - DNA, 25 bp, Artificial
  Probe
cggtggcacagttgtcagaaaaagt

SEQ ID NO: 331159 - DNA, 25 bp, Artificial
  Probe
tgatggtggatcttcatccgacttc

SEQ ID NO: 331160 - DNA, 25 bp, Artificial
  Probe
gacagtccagcgtcccaggcaagaa

SEQ ID NO: 331161 - DNA, 25 bp, Artificial
  Probe
ctctcacctacaaaaggacatgatg

SEQ ID NO: 331162 - DNA, 25 bp, Artificial
  Probe
gtgcttaaactgcttccaaatctga

SEQ ID NO: 331163 - DNA, 25 bp, Artificial
  Probe
tcctatcaggtttgccggaaggagt

SEQ ID NO: 331164 - DNA, 25 bp, Artificial
  Probe
tcccaggcaagaaagtgtgtgctta

SEQ ID NO: 331165 - DNA, 25 bp, Artificial
  Probe
aaggagtcggtctctgcccactctt

SEQ ID NO: 331166 - DNA, 25 bp, Artificial
  Probe
aggtgtgaaaccattccagtgtaaa

SEQ ID NO: 331167 - DNA, 25 bp, Artificial
  Probe
gtgtgcgtacccaggctgcaataag

SEQ ID NO: 331168 - DNA, 25 bp, Artificial
  Probe
agtgtgtgcttaaactgcttccaaa

SEQ ID NO: 331169 - DNA, 25 bp, Artificial
  Probe
tgcaccagagaaacatgaccaaact

SEQ ID NO: 331170 - DNA, 25 bp, Artificial
  Probe
cgacttccaagacagcacacctgtt

SEQ ID NO: 331171 - DNA, 25 bp, Artificial
  Probe
aaggagacacacaggtgtgaaacca

SEQ ID NO: 331172 - DNA, 25 bp, Artificial
  Probe
tttgccggaaggagtcggtctctgc

SEQ ID NO: 331173 - DNA, 25 bp, Artificial
  Probe
ccacaccaggactcatacaggtaaa

SEQ ID NO: 331174 - DNA, 25 bp, Artificial
  Probe
tgtcagcgaaagttttcccggtccg

SEQ ID NO: 331175 - DNA, 25 bp, Artificial
  Probe
gtccgacccggagacagtccagcgt

SEQ ID NO: 331176 - DNA, 25 bp, Artificial
  Probe
ctcacctacaaaaggacatgatggt

SEQ ID NO: 331177 - DNA, 25 bp, Artificial
  Probe
ttacagatgcacagccggaagcaca

SEQ ID NO: 331178 - DNA, 25 bp, Artificial
  Probe
caaggactgcgagagaaggttttct

SEQ ID NO: 331179 - DNA, 25 bp, Artificial
  Probe
atgcacagccggaagcacactggtg

SEQ ID NO: 331180 - DNA, 25 bp, Artificial
  Probe
agagaaggttttctcgctcagacca

SEQ ID NO: 331181 - DNA, 25 bp, Artificial
  Probe
acccaggctgcaataagagatattt

SEQ ID NO: 331182 - DNA, 25 bp, Artificial
  Probe
ttcagctgtcggtggcacagttgtc

SEQ ID NO: 331183 - DNA, 25 bp, Artificial
  Probe
agtgaaaagcccttcagctgtcggt

SEQ ID NO: 331184 - DNA, 25 bp, Artificial
  Probe
cagacgaattagtccgccatcacaa

SEQ ID NO: 331185 - DNA, 25 bp, Artificial
  Probe
aaaggcaccaaaggagacacacagg

SEQ ID NO: 331186 - DNA, 25 bp, Artificial
  Probe
gactcatacaggtaaaacaagtgaa

SEQ ID NO: 331187 - DNA, 25 bp, Artificial
  Probe
cggagacagtccagcgtcccaggca

SEQ ID NO: 331188 - DNA, 25 bp, Artificial
  Probe
tgccggaaggagtcggtctctgccc

SEQ ID NO: 331189 - DNA, 25 bp, Artificial
  Probe
gccatcacaacatgcaccagagaaa

SEQ ID NO: 331190 - DNA, 25 bp, Artificial
  Probe
cggtcagacgaattagtccgccatc

SEQ ID NO: 331191 - DNA, 25 bp, Artificial
  Probe
tgagaaaccataccagtgtgacttc

SEQ ID NO: 331192 - DNA, 25 bp, Artificial
  Probe
aagtttgcgcggtcagacgaattag

SEQ ID NO: 331193 - DNA, 25 bp, Artificial
  Probe
gtccagcgtcccaggcaagaaagtg

SEQ ID NO: 331194 - DNA, 25 bp, Artificial
  Probe
cagtgtaaaacttgtcagcgaaagt

SEQ ID NO: 331195 - DNA, 25 bp, Artificial
  Probe
cattccagtgtaaaacttgtcagcg

SEQ ID NO: 331196 - DNA, 25 bp, Artificial
  Probe
gatcttcatccgacttccaagacag

SEQ ID NO: 331197 - DNA, 25 bp, Artificial
  Probe
acacacaggtgtgaaaccattccag

SEQ ID NO: 331198 - DNA, 25 bp, Artificial
  Probe
ccggaagcacactggtgagaaacca

SEQ ID NO: 331199 - DNA, 25 bp, Artificial
  Probe
tgcccactcttgattaactcccagg

SEQ ID NO: 331200 - DNA, 25 bp, Artificial
  Probe
aggagtcggtctctgcccactcttg

SEQ ID NO: 331201 - DNA, 25 bp, Artificial
  Probe
ctataaagatcttgccttgggctgg

SEQ ID NO: 331202 - DNA, 25 bp, Artificial
  Probe
agacaattgtactgaactagcattc

SEQ ID NO: 331203 - DNA, 25 bp, Artificial
  Probe
ctattaaaccgaagagttgagcaga

SEQ ID NO: 331204 - DNA, 25 bp, Artificial
  Probe
ccctctctcagcacggatcaaaaga

SEQ ID NO: 331205 - DNA, 25 bp, Artificial
  Probe
gacttcattaagatacacgccatgg

SEQ ID NO: 331206 - DNA, 25 bp, Artificial
  Probe
catcatttctggaaaagtagtagca

SEQ ID NO: 331207 - DNA, 25 bp, Artificial
  Probe
tgtttagttataaccatcaatgctg

SEQ ID NO: 331208 - DNA, 25 bp, Artificial
  Probe
caaaccagggtcacctgggaagagg

SEQ ID NO: 331209 - DNA, 25 bp, Artificial
  Probe
aggacaaacataagcctgaggagcc

SEQ ID NO: 331210 - DNA, 25 bp, Artificial
  Probe
cctgtctccaagttcctaccttgag

SEQ ID NO: 331211 - DNA, 25 bp, Artificial
  Probe
ttgctgctgtgctccctgccatcat

SEQ ID NO: 331212 - DNA, 25 bp, Artificial
  Probe
ctccatcagattggtttgtagaaaa

SEQ ID NO: 331213 - DNA, 25 bp, Artificial
  Probe
gcgtcttcacagcaatagaaaagaa

SEQ ID NO: 331214 - DNA, 25 bp, Artificial
  Probe
gagggaacctcaacagagaaaaatg

SEQ ID NO: 331215 - DNA, 25 bp, Artificial
  Probe
ccattgtctttacaacccaatggtg

SEQ ID NO: 331216 - DNA, 25 bp, Artificial
  Probe
aaattcgtggagcatttccttgatt

SEQ ID NO: 331217 - DNA, 25 bp, Artificial
  Probe
tgccctggctttcctccacggtgta

SEQ ID NO: 331218 - DNA, 25 bp, Artificial
  Probe
tctcggcaacactggggattgattg

SEQ ID NO: 331219 - DNA, 25 bp, Artificial
  Probe
tacctcctgtgtcagtgggagcccc

SEQ ID NO: 331220 - DNA, 25 bp, Artificial
  Probe
ttgatgtttgatgtgggaccaagcc

SEQ ID NO: 331221 - DNA, 25 bp, Artificial
  Probe
accttgagatcctgccctggctttc

SEQ ID NO: 331222 - DNA, 25 bp, Artificial
  Probe
gcccattaatgtgtctccattgtct

SEQ ID NO: 331223 - DNA, 25 bp, Artificial
  Probe
cctaaagtgcacaggggcacagacg

SEQ ID NO: 331224 - DNA, 25 bp, Artificial
  Probe
catttctataaagatcttgccttgg

SEQ ID NO: 331225 - DNA, 25 bp, Artificial
  Probe
gaacctcaacagagaaaaatgcctc

SEQ ID NO: 331226 - DNA, 25 bp, Artificial
  Probe
ctgcaacttgaagaacgtgatcatc

SEQ ID NO: 331227 - DNA, 25 bp, Artificial
  Probe
ataagcctgaggagccagtcagtaa

SEQ ID NO: 331228 - DNA, 25 bp, Artificial
  Probe
tcttttggaaatttccttggtcatg

SEQ ID NO: 331229 - DNA, 25 bp, Artificial
  Probe
aagacgagctcagcaactgctccca

SEQ ID NO: 331230 - DNA, 25 bp, Artificial
  Probe
ttaaaatcgatacctcctgtgtcag

SEQ ID NO: 331231 - DNA, 25 bp, Artificial
  Probe
tgctgtgctccctgccatcatggtc

SEQ ID NO: 331232 - DNA, 25 bp, Artificial
  Probe
gtgaacgctcagtaaactctttctt

SEQ ID NO: 331233 - DNA, 25 bp, Artificial
  Probe
cttgccaacttgacacaaaccaggg

SEQ ID NO: 331234 - DNA, 25 bp, Artificial
  Probe
attcgtggagcatttccttgattga

SEQ ID NO: 331235 - DNA, 25 bp, Artificial
  Probe
ctacttctattaaaccgaagagttg

SEQ ID NO: 331236 - DNA, 25 bp, Artificial
  Probe
agtgcaacaacaagcccattaatgt

SEQ ID NO: 331237 - DNA, 25 bp, Artificial
  Probe
gaaactaagacatcatttctggaaa

SEQ ID NO: 331238 - DNA, 25 bp, Artificial
  Probe
agacgacgtgtgttaatgtcactgg

SEQ ID NO: 331239 - DNA, 25 bp, Artificial
  Probe
ccacactgtgcctgcttgctgctgt

SEQ ID NO: 331240 - DNA, 25 bp, Artificial
  Probe
aatagcaagaaccagaaccggctaa

SEQ ID NO: 331241 - DNA, 25 bp, Artificial
  Probe
aggaatttgcagtcccactacttct

SEQ ID NO: 331242 - DNA, 25 bp, Artificial
  Probe
agaaccggctaaagtgatctcattt

SEQ ID NO: 331243 - DNA, 25 bp, Artificial
  Probe
ctgttctgaagacaattgtactgaa

SEQ ID NO: 331244 - DNA, 25 bp, Artificial
  Probe
agtaccatccctaggcaagtggtcc

SEQ ID NO: 331245 - DNA, 25 bp, Artificial
  Probe
tgcctccatcagattggtttgtaga

SEQ ID NO: 331246 - DNA, 25 bp, Artificial
  Probe
gagcagagaggctgttctgaagaca

SEQ ID NO: 331247 - DNA, 25 bp, Artificial
  Probe
ctattatcaccaagccggtgacgcg

SEQ ID NO: 331248 - DNA, 25 bp, Artificial
  Probe
gctgccacaggaaccgaaggcgtgt

SEQ ID NO: 331249 - DNA, 25 bp, Artificial
  Probe
cacaggaaccgaaggcgtgtttgca

SEQ ID NO: 331250 - DNA, 25 bp, Artificial
  Probe
caccagagatagtcccagtttcagg

SEQ ID NO: 331251 - DNA, 25 bp, Artificial
  Probe
tcagtcctctggtgccggtgtttca

SEQ ID NO: 331252 - DNA, 25 bp, Artificial
  Probe
aaatggcgccactaggaagccacaa

SEQ ID NO: 331253 - DNA, 25 bp, Artificial
  Probe
ttggccggaatctgcgcggttcttc

SEQ ID NO: 331254 - DNA, 25 bp, Artificial
  Probe
cgaaggcgtgtttgcaaatgtccca

SEQ ID NO: 331255 - DNA, 25 bp, Artificial
  Probe
agagatagtcccagtttcagggtca

SEQ ID NO: 331256 - DNA, 25 bp, Artificial
  Probe
aagatcagactgtaacaccagagat

SEQ ID NO: 331257 - DNA, 25 bp, Artificial
  Probe
agtgaactctattatcaccaagccg

SEQ ID NO: 331258 - DNA, 25 bp, Artificial
  Probe
ttctgctgtccctggtcatcactct

SEQ ID NO: 331259 - DNA, 25 bp, Artificial
  Probe
gcgccactaggaagccacaactact

SEQ ID NO: 331260 - DNA, 25 bp, Artificial
  Probe
ggaagccacaactactacatgactt

SEQ ID NO: 331261 - DNA, 25 bp, Artificial
  Probe
tcatctgctgccacaggaaccgaag

SEQ ID NO: 331262 - DNA, 25 bp, Artificial
  Probe
atcactctcatctgctgccacagga

SEQ ID NO: 331263 - DNA, 25 bp, Artificial
  Probe
gcttcgcctgcgatatttacatctg

SEQ ID NO: 331264 - DNA, 25 bp, Artificial
  Probe
acccttggccggaatctgcgcggtt

SEQ ID NO: 331265 - DNA, 25 bp, Artificial
  Probe
gtatgcacacaatggggtaaagatc

SEQ ID NO: 331266 - DNA, 25 bp, Artificial
  Probe
tgggattgggcttcgcctgcgatat

SEQ ID NO: 331267 - DNA, 25 bp, Artificial
  Probe
gaatctgcgcggttcttctgctgtc

SEQ ID NO: 331268 - DNA, 25 bp, Artificial
  Probe
ctctggtgccggtgtttcagaaagt

SEQ ID NO: 331269 - DNA, 25 bp, Artificial
  Probe
tctgggcacccttggccggaatctg

SEQ ID NO: 331270 - DNA, 25 bp, Artificial
  Probe
atttctcacaagagaccgggccctc

SEQ ID NO: 331271 - DNA, 25 bp, Artificial
  Probe
agtcccagtttcagggtcagcgtag

SEQ ID NO: 331272 - DNA, 25 bp, Artificial
  Probe
ggccctcctttttcagagtttcctg

SEQ ID NO: 331273 - DNA, 25 bp, Artificial
  Probe
gagaccgggccctcctttttcagag

SEQ ID NO: 331274 - DNA, 25 bp, Artificial
  Probe
atctgggcacccttggccggaatct

SEQ ID NO: 331275 - DNA, 25 bp, Artificial
  Probe
ttacatctgggcacccttggccgga

SEQ ID NO: 331276 - DNA, 25 bp, Artificial
  Probe
cttgtcaagcccagaccttcagaga

SEQ ID NO: 331277 - DNA, 25 bp, Artificial
  Probe
actaggaagccacaactactacatg

SEQ ID NO: 331278 - DNA, 25 bp, Artificial
  Probe
gatatttacatctgggcacccttgg

SEQ ID NO: 331279 - DNA, 25 bp, Artificial
  Probe
tcactctcatctgctgccacaggaa

SEQ ID NO: 331280 - DNA, 25 bp, Artificial
  Probe
cgaccagaagcttgccgacccgggg

SEQ ID NO: 331281 - DNA, 25 bp, Artificial
  Probe
aacatacttgtatgcacacaatggg

SEQ ID NO: 331282 - DNA, 25 bp, Artificial
  Probe
tacgaccagaagcttgccgacccgg

SEQ ID NO: 331283 - DNA, 25 bp, Artificial
  Probe
tgccggtgtttcagaaagtgaactc

SEQ ID NO: 331284 - DNA, 25 bp, Artificial
  Probe
catgacttcagagatttctcacaag

SEQ ID NO: 331285 - DNA, 25 bp, Artificial
  Probe
cgtgtttgcaaatgtcccaggcccc

SEQ ID NO: 331286 - DNA, 25 bp, Artificial
  Probe
ccttcagagaaattcgtgtaaaatg

SEQ ID NO: 331287 - DNA, 25 bp, Artificial
  Probe
ttgggcttcgcctgcgatatttaca

SEQ ID NO: 331288 - DNA, 25 bp, Artificial
  Probe
tgcaaatgtcccaggccccttgtca

SEQ ID NO: 331289 - DNA, 25 bp, Artificial
  Probe
ccagtttcagggtcagcgtagctgg

SEQ ID NO: 331290 - DNA, 25 bp, Artificial
  Probe
cagagtttcctgctggcttatatat

SEQ ID NO: 331291 - DNA, 25 bp, Artificial
  Probe
atgggattgggcttcgcctgcgata

SEQ ID NO: 331292 - DNA, 25 bp, Artificial
  Probe
gaaccgaaggcgtgtttgcaaatgt

SEQ ID NO: 331293 - DNA, 25 bp, Artificial
  Probe
accttggatggcagccttgcagcca

SEQ ID NO: 331294 - DNA, 25 bp, Artificial
  Probe
agcatgactggctttttggcgtctc

SEQ ID NO: 331295 - DNA, 25 bp, Artificial
  Probe
ttcttaagcttcttctccctcgtgg

SEQ ID NO: 331296 - DNA, 25 bp, Artificial
  Probe
gctacaaaggactcaatataaagca

SEQ ID NO: 331297 - DNA, 25 bp, Artificial
  Probe
tgggcccttggcagccatcttgctc

SEQ ID NO: 331298 - DNA, 25 bp, Artificial
  Probe
tgactggctttttggcgtctcatgg

SEQ ID NO: 331299 - DNA, 25 bp, Artificial
  Probe
cagaatccaggctcactcacggagt

SEQ ID NO: 331300 - DNA, 25 bp, Artificial
  Probe
cacagagaggccacctcatgaataa

SEQ ID NO: 331301 - DNA, 25 bp, Artificial
  Probe
gctcagaagacagacttctacttca

SEQ ID NO: 331302 - DNA, 25 bp, Artificial
  Probe
ggcacgttacctggagtctcacaga

SEQ ID NO: 331303 - DNA, 25 bp, Artificial
  Probe
tcttctgggcccttggcagccatct

SEQ ID NO: 331304 - DNA, 25 bp, Artificial
  Probe
ttacctggagtctcacagagaaggc

SEQ ID NO: 331305 - DNA, 25 bp, Artificial
  Probe
tgcacatcctcacacagagaggcca

SEQ ID NO: 331306 - DNA, 25 bp, Artificial
  Probe
gcttttgtacccttcttggactgga

SEQ ID NO: 331307 - DNA, 25 bp, Artificial
  Probe
agccctgcagaagactgcacatcct

SEQ ID NO: 331308 - DNA, 25 bp, Artificial
  Probe
gaaggccccagaatccaggctcact

SEQ ID NO: 331309 - DNA, 25 bp, Artificial
  Probe
tcacggagtgtgctgaagaaccaag

SEQ ID NO: 331310 - DNA, 25 bp, Artificial
  Probe
ttgggaagctgttggctcagaagac

SEQ ID NO: 331311 - DNA, 25 bp, Artificial
  Probe
ccttgctgtggttttgggaagctgt

SEQ ID NO: 331312 - DNA, 25 bp, Artificial
  Probe
agccatcttgctctctcaggccttg

SEQ ID NO: 331313 - DNA, 25 bp, Artificial
  Probe
gcagccctgcagaagactgcacatc

SEQ ID NO: 331314 - DNA, 25 bp, Artificial
  Probe
ttaagcttcttctccctcgtggctt

SEQ ID NO: 331315 - DNA, 25 bp, Artificial
  Probe
gacttctacttcatctcctagtagg

SEQ ID NO: 331316 - DNA, 25 bp, Artificial
  Probe
tctcctagtaggaaatttcttaagc

SEQ ID NO: 331317 - DNA, 25 bp, Artificial
  Probe
gtctcacagagaaggccccagaatc

SEQ ID NO: 331318 - DNA, 25 bp, Artificial
  Probe
gctcactcacggagtgtgctgaaga

SEQ ID NO: 331319 - DNA, 25 bp, Artificial
  Probe
tcaatataaagcaagacctggacca

SEQ ID NO: 331320 - DNA, 25 bp, Artificial
  Probe
aagctgttggctcagaagacagact

SEQ ID NO: 331321 - DNA, 25 bp, Artificial
  Probe
tcaggccttgctgtggttttgggaa

SEQ ID NO: 331322 - DNA, 25 bp, Artificial
  Probe
aagttgcttggtagggcagcatgac

SEQ ID NO: 331323 - DNA, 25 bp, Artificial
  Probe
gctttttggcgtctcatgggagaga

SEQ ID NO: 331324 - DNA, 25 bp, Artificial
  Probe
ctgtcctttttatgaaaatgtcctg

SEQ ID NO: 331325 - DNA, 25 bp, Artificial
  Probe
tcttgctctctcaggccttgctgtg

SEQ ID NO: 331326 - DNA, 25 bp, Artificial
  Probe
cttggcagccatcttgctctctcag

SEQ ID NO: 331327 - DNA, 25 bp, Artificial
  Probe
ccctgtggcttttgtacccttcttg

SEQ ID NO: 331328 - DNA, 25 bp, Artificial
  Probe
tttggcgtctcatgggagagagcta

SEQ ID NO: 331329 - DNA, 25 bp, Artificial
  Probe
ttggctcagaagacagacttctact

SEQ ID NO: 331330 - DNA, 25 bp, Artificial
  Probe
atgacacccctgtggcttttgtacc

SEQ ID NO: 331331 - DNA, 25 bp, Artificial
  Probe
agagaaggccccagaatccaggctc

SEQ ID NO: 331332 - DNA, 25 bp, Artificial
  Probe
cttggtagggcagcatgactggctt

SEQ ID NO: 331333 - DNA, 25 bp, Artificial
  Probe
ccatgacacccctgtggcttttgta

SEQ ID NO: 331334 - DNA, 25 bp, Artificial
  Probe
ctcatgaataaggtttcctgcaaac

SEQ ID NO: 331335 - DNA, 25 bp, Artificial
  Probe
atctcctagtaggaaatttcttaag

SEQ ID NO: 331336 - DNA, 25 bp, Artificial
  Probe
ccatctttgtaagttgcttggtagg

SEQ ID NO: 331337 - DNA, 25 bp, Artificial
  Probe
cacgacactgacagcctgctacaaa

SEQ ID NO: 331338 - DNA, 25 bp, Artificial
  Probe
gcaaacatcttctgggcccttggca

SEQ ID NO: 331339 - DNA, 25 bp, Artificial
  Probe
tccgtctacccacctaatgaaggct

SEQ ID NO: 331340 - DNA, 25 bp, Artificial
  Probe
gtagtcctgccattgctgtggttcg

SEQ ID NO: 331341 - DNA, 25 bp, Artificial
  Probe
ttcactacgcgcagtatgtgctgct

SEQ ID NO: 331342 - DNA, 25 bp, Artificial
  Probe
agtagtcctgccattgctgtggttc

SEQ ID NO: 331343 - DNA, 25 bp, Artificial
  Probe
ccccgtgctgtcagaagctgttctt

SEQ ID NO: 331344 - DNA, 25 bp, Artificial
  Probe
ttcagaatgtcagcacctgcaggtt

SEQ ID NO: 331345 - DNA, 25 bp, Artificial
  Probe
acttctacaatgctgaccccgtgct

SEQ ID NO: 331346 - DNA, 25 bp, Artificial
  Probe
caagaccctgaacacgttctacacg

SEQ ID NO: 331347 - DNA, 25 bp, Artificial
  Probe
actacgcgcagtatgtgctgctggg

SEQ ID NO: 331348 - DNA, 25 bp, Artificial
  Probe
gaagatcgagccagtagtcctgcca

SEQ ID NO: 331349 - DNA, 25 bp, Artificial
  Probe
agaatgtcagcacctgcaggtttgg

SEQ ID NO: 331350 - DNA, 25 bp, Artificial
  Probe
ctgccattgctgtggttcgaacaga

SEQ ID NO: 331351 - DNA, 25 bp, Artificial
  Probe
cgagtccggcattcagaatgtcagc

SEQ ID NO: 331352 - DNA, 25 bp, Artificial
  Probe
ccgtgccgcgagtccggcattcaga

SEQ ID NO: 331353 - DNA, 25 bp, Artificial
  Probe
tgatgggtggcaagaccctgaacac

SEQ ID NO: 331354 - DNA, 25 bp, Artificial
  Probe
tcagaatgtcagcacctgcaggttt

SEQ ID NO: 331355 - DNA, 25 bp, Artificial
  Probe
aatgaaggcttctgcccgtgccgcg

SEQ ID NO: 331356 - DNA, 25 bp, Artificial
  Probe
acacgcagctggtgctgatgcccca

SEQ ID NO: 331357 - DNA, 25 bp, Artificial
  Probe
agaccctgaacacgttctacacgca

SEQ ID NO: 331358 - DNA, 25 bp, Artificial
  Probe
cctaatgaaggcttctgcccgtgcc

SEQ ID NO: 331359 - DNA, 25 bp, Artificial
  Probe
ctgcaggtttggtgcgcccctgttt

SEQ ID NO: 331360 - DNA, 25 bp, Artificial
  Probe
gaccctgaacacgttctacacgcag

SEQ ID NO: 331361 - DNA, 25 bp, Artificial
  Probe
catcatttaccaactgcgcagccag

SEQ ID NO: 331362 - DNA, 25 bp, Artificial
  Probe
tctacaatgctgaccccgtgctgtc

SEQ ID NO: 331363 - DNA, 25 bp, Artificial
  Probe
agatcgagccagtagtcctgccatt

SEQ ID NO: 331364 - DNA, 25 bp, Artificial
  Probe
gcattcagaatgtcagcacctgcag

SEQ ID NO: 331365 - DNA, 25 bp, Artificial
  Probe
atgctgaccccgtgctgtcagaagc

SEQ ID NO: 331366 - DNA, 25 bp, Artificial
  Probe
tacccacctaatgaaggcttctgcc

SEQ ID NO: 331367 - DNA, 25 bp, Artificial
  Probe
gtggcaagaccctgaacacgttcta

SEQ ID NO: 331368 - DNA, 25 bp, Artificial
  Probe
cgagccagtagtcctgccattgctg

SEQ ID NO: 331369 - DNA, 25 bp, Artificial
  Probe
atgggtggcaagaccctgaacacgt

SEQ ID NO: 331370 - DNA, 25 bp, Artificial
  Probe
gcccccgatactttgtttgccaacg

SEQ ID NO: 331371 - DNA, 25 bp, Artificial
  Probe
tcatttaccaactgcgcagccagga

SEQ ID NO: 331372 - DNA, 25 bp, Artificial
  Probe
cggcattcagaatgtcagcacctgc

SEQ ID NO: 331373 - DNA, 25 bp, Artificial
  Probe
taccaactgcgcagccaggagaaat

SEQ ID NO: 331374 - DNA, 25 bp, Artificial
  Probe
aactgcgcagccaggagaaatgctt

SEQ ID NO: 331375 - DNA, 25 bp, Artificial
  Probe
cgttctacacgcagctggtgctgat

SEQ ID NO: 331376 - DNA, 25 bp, Artificial
  Probe
cctgcaggtttggtgcgcccctgtt

SEQ ID NO: 331377 - DNA, 25 bp, Artificial
  Probe
ctggtgcccatcatttaccaactgc

SEQ ID NO: 331378 - DNA, 25 bp, Artificial
  Probe
tgcccatcatttaccaactgcgcag

SEQ ID NO: 331379 - DNA, 25 bp, Artificial
  Probe
cgcgagtccggcattcagaatgtca

SEQ ID NO: 331380 - DNA, 25 bp, Artificial
  Probe
cgtctacccacctaatgaaggcttc

SEQ ID NO: 331381 - DNA, 25 bp, Artificial
  Probe
cctgaacacgttctacacgcagctg

SEQ ID NO: 331382 - DNA, 25 bp, Artificial
  Probe
aacacgttctacacgcagctggtgc

SEQ ID NO: 331383 - DNA, 25 bp, Artificial
  Probe
agccagtagtcctgccattgctgtg

SEQ ID NO: 331384 - DNA, 25 bp, Artificial
  Probe
ctacacgcagctggtgctgatgccc

SEQ ID NO: 331385 - DNA, 25 bp, Artificial
  Probe
ttctgttgtaaaaccaataggtctt

SEQ ID NO: 331386 - DNA, 25 bp, Artificial
  Probe
gagggacccagttccccttggagca

SEQ ID NO: 331387 - DNA, 25 bp, Artificial
  Probe
cgcatttgtttactctacagatgct

SEQ ID NO: 331388 - DNA, 25 bp, Artificial
  Probe
attgacgcatttgtttactctacag

SEQ ID NO: 331389 - DNA, 25 bp, Artificial
  Probe
ggtcacgaacatgaagcatgctatt

SEQ ID NO: 331390 - DNA, 25 bp, Artificial
  Probe
gaatacacttattgacgcatttgtt

SEQ ID NO: 331391 - DNA, 25 bp, Artificial
  Probe
aaaggaggcccactttcaggagagg

SEQ ID NO: 331392 - DNA, 25 bp, Artificial
  Probe
gcttatacaggtgctgaagggagac

SEQ ID NO: 331393 - DNA, 25 bp, Artificial
  Probe
tcagaaggccagtggcgtttctctc

SEQ ID NO: 331394 - DNA, 25 bp, Artificial
  Probe
ctactgatcagcaaagttatcgaag

SEQ ID NO: 331395 - DNA, 25 bp, Artificial
  Probe
gccaactttatttgctgggaacttt

SEQ ID NO: 331396 - DNA, 25 bp, Artificial
  Probe
ccttccagccaccttgttctgaagt

SEQ ID NO: 331397 - DNA, 25 bp, Artificial
  Probe
gctccagctttaccagcccagggag

SEQ ID NO: 331398 - DNA, 25 bp, Artificial
  Probe
tggatggcagccaagtcttgtagtg

SEQ ID NO: 331399 - DNA, 25 bp, Artificial
  Probe
tgagaacatcgacacattttacaag

SEQ ID NO: 331400 - DNA, 25 bp, Artificial
  Probe
agcaacctccagtggcggccggagt

SEQ ID NO: 331401 - DNA, 25 bp, Artificial
  Probe
cgagtgccttcatttattagtggtg

SEQ ID NO: 331402 - DNA, 25 bp, Artificial
  Probe
caccttgttctgaagtggatgtagt

SEQ ID NO: 331403 - DNA, 25 bp, Artificial
  Probe
cccttcagcaaactgtcagatccag

SEQ ID NO: 331404 - DNA, 25 bp, Artificial
  Probe
ctttcggtgtcaaaatcgaagaata

SEQ ID NO: 331405 - DNA, 25 bp, Artificial
  Probe
agccaccacggagctgtggcaccaa

SEQ ID NO: 331406 - DNA, 25 bp, Artificial
  Probe
aaactgtcagatccagccttccagc

SEQ ID NO: 331407 - DNA, 25 bp, Artificial
  Probe
gagcagggcgccatttcagaaggcc

SEQ ID NO: 331408 - DNA, 25 bp, Artificial
  Probe
ggaaattggctgctgagacagttcc

SEQ ID NO: 331409 - DNA, 25 bp, Artificial
  Probe
agctgtggcaccaaatacccaacac

SEQ ID NO: 331410 - DNA, 25 bp, Artificial
  Probe
tacctggtaactctttaggattaga

SEQ ID NO: 331411 - DNA, 25 bp, Artificial
  Probe
tttgagtggcccagcatccagttaa

SEQ ID NO: 331412 - DNA, 25 bp, Artificial
  Probe
cggccggagtccacgtcacgagtgc

SEQ ID NO: 331413 - DNA, 25 bp, Artificial
  Probe
atgagattgaggaccccaagacctg

SEQ ID NO: 331414 - DNA, 25 bp, Artificial
  Probe
tccagctttaccagcccagggagct

SEQ ID NO: 331415 - DNA, 25 bp, Artificial
  Probe
cagtgattccacaaggacagaagga

SEQ ID NO: 331416 - DNA, 25 bp, Artificial
  Probe
agacataaagccacgtgtgcttatt

SEQ ID NO: 331417 - DNA, 25 bp, Artificial
  Probe
tgctgcacaccgacggggaaatcta

SEQ ID NO: 331418 - DNA, 25 bp, Artificial
  Probe
gtgattccacaaggacagaaggacc

SEQ ID NO: 331419 - DNA, 25 bp, Artificial
  Probe
atacaggtgctgaagggagacagtc

SEQ ID NO: 331420 - DNA, 25 bp, Artificial
  Probe
ttccgtattctctgccagtccaaag

SEQ ID NO: 331421 - DNA, 25 bp, Artificial
  Probe
tgaggaccccaagacctgtcgaaaa

SEQ ID NO: 331422 - DNA, 25 bp, Artificial
  Probe
ccactcagcctggatggcagccaag

SEQ ID NO: 331423 - DNA, 25 bp, Artificial
  Probe
cagggagctccttcccttcagcaaa

SEQ ID NO: 331424 - DNA, 25 bp, Artificial
  Probe
aaagttatcgaagtcctttatcatg

SEQ ID NO: 331425 - DNA, 25 bp, Artificial
  Probe
tccacttgctctgcttcagaccttg

SEQ ID NO: 331426 - DNA, 25 bp, Artificial
  Probe
tccccttggagcagggcgccatttc

SEQ ID NO: 331427 - DNA, 25 bp, Artificial
  Probe
agcctggatggcagccaagtcttgt

SEQ ID NO: 331428 - DNA, 25 bp, Artificial
  Probe
cacattttacaaggaggcagaaaag

SEQ ID NO: 331429 - DNA, 25 bp, Artificial
  Probe
cagtgagaccctgctccagctttac

SEQ ID NO: 331430 - DNA, 25 bp, Artificial
  Probe
atgaagcatgctattgagaacatcg

SEQ ID NO: 331431 - DNA, 25 bp, Artificial
  Probe
tcctgtcacagttggctttggcagt

SEQ ID NO: 331432 - DNA, 25 bp, Artificial
  Probe
aattgtttctgctcctgtctgctat

SEQ ID NO: 331433 - DNA, 25 bp, Artificial
  Probe
gatatgccctacatggatgctgtgg

SEQ ID NO: 331434 - DNA, 25 bp, Artificial
  Probe
cccatgaagcaaccagagatactgt

SEQ ID NO: 331435 - DNA, 25 bp, Artificial
  Probe
agtctctggttgaccctaaggatat

SEQ ID NO: 331436 - DNA, 25 bp, Artificial
  Probe
tctggttgaccctaaggatatcgac

SEQ ID NO: 331437 - DNA, 25 bp, Artificial
  Probe
gccctacatggatgctgtggtgcat

SEQ ID NO: 331438 - DNA, 25 bp, Artificial
  Probe
aactctgtgtcattccccgttcatg

SEQ ID NO: 331439 - DNA, 25 bp, Artificial
  Probe
taaggatatcgacctcagtcctgtc

SEQ ID NO: 331440 - DNA, 25 bp, Artificial
  Probe
gagttcctatcataaaatgaaaccg

SEQ ID NO: 331441 - DNA, 25 bp, Artificial
  Probe
agatactgtgttccaaggatatgtc

SEQ ID NO: 331442 - DNA, 25 bp, Artificial
  Probe
tgctattctgcagcattttaacctg

SEQ ID NO: 331443 - DNA, 25 bp, Artificial
  Probe
gatatcgacctcagtcctgtcacag

SEQ ID NO: 331444 - DNA, 25 bp, Artificial
  Probe
tattctgcagcattttaacctgaag

SEQ ID NO: 331445 - DNA, 25 bp, Artificial
  Probe
gtcacagttggctttggcagtatcc

SEQ ID NO: 331446 - DNA, 25 bp, Artificial
  Probe
tgtcattccccgttcatgagacctg

SEQ ID NO: 331447 - DNA, 25 bp, Artificial
  Probe
gtttctgctcctgtctgctattctg

SEQ ID NO: 331448 - DNA, 25 bp, Artificial
  Probe
tggatgctgtggtgcatgagatcca

SEQ ID NO: 331449 - DNA, 25 bp, Artificial
  Probe
ctgcagcattttaacctgaagtctc

SEQ ID NO: 331450 - DNA, 25 bp, Artificial
  Probe
accagagatactgtgttccaaggat

SEQ ID NO: 331451 - DNA, 25 bp, Artificial
  Probe
tccaaggatatgtcatccccaaggg

SEQ ID NO: 331452 - DNA, 25 bp, Artificial
  Probe
gctattctgcagcattttaacctga

SEQ ID NO: 331453 - DNA, 25 bp, Artificial
  Probe
catgaagcaaccagagatactgtgt

SEQ ID NO: 331454 - DNA, 25 bp, Artificial
  Probe
aacctgaagtctctggttgacccta

SEQ ID NO: 331455 - DNA, 25 bp, Artificial
  Probe
catggaattgtttctgctcctgtct

SEQ ID NO: 331456 - DNA, 25 bp, Artificial
  Probe
cacagttggctttggcagtatccca

SEQ ID NO: 331457 - DNA, 25 bp, Artificial
  Probe
gtctgctattctgcagcattttaac

SEQ ID NO: 331458 - DNA, 25 bp, Artificial
  Probe
catggatgctgtggtgcatgagatc

SEQ ID NO: 331459 - DNA, 25 bp, Artificial
  Probe
gaagtctctggttgaccctaaggat

SEQ ID NO: 331460 - DNA, 25 bp, Artificial
  Probe
tttaacctgaagtctctggttgacc

SEQ ID NO: 331461 - DNA, 25 bp, Artificial
  Probe
aagcaaccagagatactgtgttcca

SEQ ID NO: 331462 - DNA, 25 bp, Artificial
  Probe
agcaaccagagatactgtgttccaa

SEQ ID NO: 331463 - DNA, 25 bp, Artificial
  Probe
cagagatactgtgttccaaggatat

SEQ ID NO: 331464 - DNA, 25 bp, Artificial
  Probe
tgttccaaggatatgtcatccccaa

SEQ ID NO: 331465 - DNA, 25 bp, Artificial
  Probe
gttgaccctaaggatatcgacctca

SEQ ID NO: 331466 - DNA, 25 bp, Artificial
  Probe
ctacatggatgctgtggtgcatgag

SEQ ID NO: 331467 - DNA, 25 bp, Artificial
  Probe
gagacctgaaaacttcctgatatcc

SEQ ID NO: 331468 - DNA, 25 bp, Artificial
  Probe
attctgcagcattttaacctgaagt

SEQ ID NO: 331469 - DNA, 25 bp, Artificial
  Probe
cctcagtcctgtcacagttggcttt

SEQ ID NO: 331470 - DNA, 25 bp, Artificial
  Probe
attccccgttcatgagacctgaaaa

SEQ ID NO: 331471 - DNA, 25 bp, Artificial
  Probe
actctgtgtcattccccgttcatga

SEQ ID NO: 331472 - DNA, 25 bp, Artificial
  Probe
gatactgtgttccaaggatatgtca

SEQ ID NO: 331473 - DNA, 25 bp, Artificial
  Probe
caaggatatgtcatccccaagggta

SEQ ID NO: 331474 - DNA, 25 bp, Artificial
  Probe
gttcatgagacctgaaaacttcctg

SEQ ID NO: 331475 - DNA, 25 bp, Artificial
  Probe
atgccctacatggatgctgtggtgc

SEQ ID NO: 331476 - DNA, 25 bp, Artificial
  Probe
caaccagagatactgtgttccaagg

SEQ ID NO: 331477 - DNA, 25 bp, Artificial
  Probe
ttcccccaggagtcagaccagggac

SEQ ID NO: 331478 - DNA, 25 bp, Artificial
  Probe
gtttctgagccagaggctggctctc

SEQ ID NO: 331479 - DNA, 25 bp, Artificial
  Probe
taaagaatcactgtaacagtgcatt

SEQ ID NO: 331480 - DNA, 25 bp, Artificial
  Probe
cctgtgattaccaatgtttatatgg

SEQ ID NO: 331481 - DNA, 25 bp, Artificial
  Probe
cactcctaggcctggggaagataca

SEQ ID NO: 331482 - DNA, 25 bp, Artificial
  Probe
gaatgagtcatctcaaaccatgttc

SEQ ID NO: 331483 - DNA, 25 bp, Artificial
  Probe
gtcctgtaccatacttagatgaacc

SEQ ID NO: 331484 - DNA, 25 bp, Artificial
  Probe
cacacagcgtatggaaggaaccatg

SEQ ID NO: 331485 - DNA, 25 bp, Artificial
  Probe
ctgtctggtgtctgccacagtcctc

SEQ ID NO: 331486 - DNA, 25 bp, Artificial
  Probe
gaaggaaccatgtcatgccttacta

SEQ ID NO: 331487 - DNA, 25 bp, Artificial
  Probe
aacgcaccctctgaggtcatcactt

SEQ ID NO: 331488 - DNA, 25 bp, Artificial
  Probe
ccctacatagctgattatgaaaccg

SEQ ID NO: 331489 - DNA, 25 bp, Artificial
  Probe
atgaaaccgaatgaaacctgtcgtt

SEQ ID NO: 331490 - DNA, 25 bp, Artificial
  Probe
aagatcttcctaactgttcacaagg

SEQ ID NO: 331491 - DNA, 25 bp, Artificial
  Probe
ggctctcttccatggggctctggga

SEQ ID NO: 331492 - DNA, 25 bp, Artificial
  Probe
gtcatctcaaaccatgttctgtgaa

SEQ ID NO: 331493 - DNA, 25 bp, Artificial
  Probe
gtttaatgtggactctagctttatc

SEQ ID NO: 331494 - DNA, 25 bp, Artificial
  Probe
aaatgtttcaggacatacaggacta

SEQ ID NO: 331495 - DNA, 25 bp, Artificial
  Probe
ctacatagctgattatgaaaccgaa

SEQ ID NO: 331496 - DNA, 25 bp, Artificial
  Probe
actacaaataaagtctgttaggact

SEQ ID NO: 331497 - DNA, 25 bp, Artificial
  Probe
ccatgttctgtgaacccatctcatg

SEQ ID NO: 331498 - DNA, 25 bp, Artificial
  Probe
atttgcccaaacatagcaagtattg

SEQ ID NO: 331499 - DNA, 25 bp, Artificial
  Probe
tagtgcctagaacatagtaggtgct

SEQ ID NO: 331500 - DNA, 25 bp, Artificial
  Probe
taaagggctacctagagaaaataca

SEQ ID NO: 331501 - DNA, 25 bp, Artificial
  Probe
ttaaagaatcactgtaacagtgcat

SEQ ID NO: 331502 - DNA, 25 bp, Artificial
  Probe
tcccagggaccaggtagagttaagt

SEQ ID NO: 331503 - DNA, 25 bp, Artificial
  Probe
ccaaacatagcaagtattgtacagt

SEQ ID NO: 331504 - DNA, 25 bp, Artificial
  Probe
ctgctgacgattgtgcacttttaaa

SEQ ID NO: 331505 - DNA, 25 bp, Artificial
  Probe
ctcatctaggaatgagtcatctcaa

SEQ ID NO: 331506 - DNA, 25 bp, Artificial
  Probe
gctgggactttgcaaggctgaatgc

SEQ ID NO: 331507 - DNA, 25 bp, Artificial
  Probe
ttttaaagcagatttcttcagaagc

SEQ ID NO: 331508 - DNA, 25 bp, Artificial
  Probe
gttgcactttatgaacatgctcact

SEQ ID NO: 331509 - DNA, 25 bp, Artificial
  Probe
ccctccttcctgtctaggtaggaag

SEQ ID NO: 331510 - DNA, 25 bp, Artificial
  Probe
gtaggaagcccaacgcaccctctga

SEQ ID NO: 331511 - DNA, 25 bp, Artificial
  Probe
tcacacagcgtatggaaggaaccat

SEQ ID NO: 331512 - DNA, 25 bp, Artificial
  Probe
cgattgtgcacttttaaaacagttt

SEQ ID NO: 331513 - DNA, 25 bp, Artificial
  Probe
tattttcctcatctaggaatgagtc

SEQ ID NO: 331514 - DNA, 25 bp, Artificial
  Probe
tacaaagctccctgctgacgattgt

SEQ ID NO: 331515 - DNA, 25 bp, Artificial
  Probe
gagccaagttcctgatccagtcaca

SEQ ID NO: 331516 - DNA, 25 bp, Artificial
  Probe
ccagggactgactcctcaggggagt

SEQ ID NO: 331517 - DNA, 25 bp, Artificial
  Probe
gtcatgccttactaggcaaataaac

SEQ ID NO: 331518 - DNA, 25 bp, Artificial
  Probe
ctgggagctggcactgtgtacacct

SEQ ID NO: 331519 - DNA, 25 bp, Artificial
  Probe
ggactctagctttatcagactactc

SEQ ID NO: 331520 - DNA, 25 bp, Artificial
  Probe
acctggaagatgctcatgtaactaa

SEQ ID NO: 331521 - DNA, 25 bp, Artificial
  Probe
cgaatgaaacctgtcgttatgaggg

SEQ ID NO: 331522 - DNA, 25 bp, Artificial
  Probe
gcaccctctgaggtcatcacttctg

SEQ ID NO: 331523 - DNA, 25 bp, Artificial
  Probe
tttgtggatgagtcaccccataagc

SEQ ID NO: 331524 - DNA, 25 bp, Artificial
  Probe
cagctagatgcttggtagccgggca

SEQ ID NO: 331525 - DNA, 25 bp, Artificial
  Probe
gtatcagagtggttgcgtgagccac

SEQ ID NO: 331526 - DNA, 25 bp, Artificial
  Probe
gcgtgagccacctagctccttctgg

SEQ ID NO: 331527 - DNA, 25 bp, Artificial
  Probe
tccctgtcatttccaatacgggtgg

SEQ ID NO: 331528 - DNA, 25 bp, Artificial
  Probe
aaggcctgcggtttatagcctccac

SEQ ID NO: 331529 - DNA, 25 bp, Artificial
  Probe
caaggcctgcggtttatagcctcca

SEQ ID NO: 331530 - DNA, 25 bp, Artificial
  Probe
gggttcttccctgtcatttccaata

SEQ ID NO: 331531 - DNA, 25 bp, Artificial
  Probe
ctccttctggcctggagatcagtgg

SEQ ID NO: 331532 - DNA, 25 bp, Artificial
  Probe
tgtggtgatcagaaccatggacagc

SEQ ID NO: 331533 - DNA, 25 bp, Artificial
  Probe
ggccctacagctagatgcttggtag

SEQ ID NO: 331534 - DNA, 25 bp, Artificial
  Probe
agagtggttgcgtgagccacctagc

SEQ ID NO: 331535 - DNA, 25 bp, Artificial
  Probe
aacactccacagaggcacagagggg

SEQ ID NO: 331536 - DNA, 25 bp, Artificial
  Probe
gaaggtcacgtgtggtgatcagaac

SEQ ID NO: 331537 - DNA, 25 bp, Artificial
  Probe
acaacgaacactccacagaggcaca

SEQ ID NO: 331538 - DNA, 25 bp, Artificial
  Probe
ctgaaatcttcacagggttttggag

SEQ ID NO: 331539 - DNA, 25 bp, Artificial
  Probe
tattaaaggccctcaggttttgcat

SEQ ID NO: 331540 - DNA, 25 bp, Artificial
  Probe
actctcccagagaggctggtgatgg

SEQ ID NO: 331541 - DNA, 25 bp, Artificial
  Probe
tgtggatgagtcaccccataagccc

SEQ ID NO: 331542 - DNA, 25 bp, Artificial
  Probe
gtgatcagaaccatggacagctacc

SEQ ID NO: 331543 - DNA, 25 bp, Artificial
  Probe
ccatgcctatacaaggcctgcggtt

SEQ ID NO: 331544 - DNA, 25 bp, Artificial
  Probe
cctcaggttttgcatgatagaaggg

SEQ ID NO: 331545 - DNA, 25 bp, Artificial
  Probe
ccggccctacagctagatgcttggt

SEQ ID NO: 331546 - DNA, 25 bp, Artificial
  Probe
ggacactctcccagagaggctggtg

SEQ ID NO: 331547 - DNA, 25 bp, Artificial
  Probe
agctcagcaggcaggaatgtgtctg

SEQ ID NO: 331548 - DNA, 25 bp, Artificial
  Probe
tactccatgagaagggctggccgga

SEQ ID NO: 331549 - DNA, 25 bp, Artificial
  Probe
cagctaccagagtgcccggaagtgg

SEQ ID NO: 331550 - DNA, 25 bp, Artificial
  Probe
tggagctgaaatcttcacagggttt

SEQ ID NO: 331551 - DNA, 25 bp, Artificial
  Probe
gggtgaattctcaggtcctgagctc

SEQ ID NO: 331552 - DNA, 25 bp, Artificial
  Probe
tcttccctgtcatttccaatacggg

SEQ ID NO: 331553 - DNA, 25 bp, Artificial
  Probe
tctttggagctgaaatcttcacagg

SEQ ID NO: 331554 - DNA, 25 bp, Artificial
  Probe
catgagaagggctggccggacaccc

SEQ ID NO: 331555 - DNA, 25 bp, Artificial
  Probe
cttctggcctggagatcagtggaga

SEQ ID NO: 331556 - DNA, 25 bp, Artificial
  Probe
tcacgtgtggtgatcagaaccatgg

SEQ ID NO: 331557 - DNA, 25 bp, Artificial
  Probe
tcagcaggcaggaatgtgtctgata

SEQ ID NO: 331558 - DNA, 25 bp, Artificial
  Probe
gttgcgtgagccacctagctccttc

SEQ ID NO: 331559 - DNA, 25 bp, Artificial
  Probe
agcccatgcctatacaaggcctgcg

SEQ ID NO: 331560 - DNA, 25 bp, Artificial
  Probe
tcgaggacactctcccagagaggct

SEQ ID NO: 331561 - DNA, 25 bp, Artificial
  Probe
tatcagagtggttgcgtgagccacc

SEQ ID NO: 331562 - DNA, 25 bp, Artificial
  Probe
ggggttcttccctgtcatttccaat

SEQ ID NO: 331563 - DNA, 25 bp, Artificial
  Probe
ccctacagctagatgcttggtagcc

SEQ ID NO: 331564 - DNA, 25 bp, Artificial
  Probe
cctgagctcagcaggcaggaatgtg

SEQ ID NO: 331565 - DNA, 25 bp, Artificial
  Probe
ggcctggattacaggttcgaggaca

SEQ ID NO: 331566 - DNA, 25 bp, Artificial
  Probe
acccctactccatgagaagggctgg

SEQ ID NO: 331567 - DNA, 25 bp, Artificial
  Probe
catgcctatacaaggcctgcggttt

SEQ ID NO: 331568 - DNA, 25 bp, Artificial
  Probe
agtggttgcgtgagccacctagctc

SEQ ID NO: 331569 - DNA, 25 bp, Artificial
  Probe
gtgcagattcgaactgcgaggaccc

SEQ ID NO: 331570 - DNA, 25 bp, Artificial
  Probe
ggagggcttcctagacactctggta

SEQ ID NO: 331571 - DNA, 25 bp, Artificial
  Probe
cgtcaaagtggcagctctcctgctc

SEQ ID NO: 331572 - DNA, 25 bp, Artificial
  Probe
tggtgcagattcgaactgcgaggac

SEQ ID NO: 331573 - DNA, 25 bp, Artificial
  Probe
gacgtcgtgcggtatttgcggtatc

SEQ ID NO: 331574 - DNA, 25 bp, Artificial
  Probe
gggcaacgtcaaagtggcagctctc

SEQ ID NO: 331575 - DNA, 25 bp, Artificial
  Probe
gggacatcacgacgtcgtgcggtat

SEQ ID NO: 331576 - DNA, 25 bp, Artificial
  Probe
tttctccttggcttcacttctggca

SEQ ID NO: 331577 - DNA, 25 bp, Artificial
  Probe
ccaaagcagcgctaagttaggcctc

SEQ ID NO: 331578 - DNA, 25 bp, Artificial
  Probe
gtttcccgggtcaccgacaggcata

SEQ ID NO: 331579 - DNA, 25 bp, Artificial
  Probe
tctggcaacgcgagactagcatatg

SEQ ID NO: 331580 - DNA, 25 bp, Artificial
  Probe
tcgtgcggtatttgcggtatctact

SEQ ID NO: 331581 - DNA, 25 bp, Artificial
  Probe
cgcgagactagcatatggctttaaa

SEQ ID NO: 331582 - DNA, 25 bp, Artificial
  Probe
gcaacgtcaaagtggcagctctcct

SEQ ID NO: 331583 - DNA, 25 bp, Artificial
  Probe
agcacgcccaggtgcctaggacttc

SEQ ID NO: 331584 - DNA, 25 bp, Artificial
  Probe
acttctgctcaagcacgcccaggtg

SEQ ID NO: 331585 - DNA, 25 bp, Artificial
  Probe
tctggtagtactgcaccaggcaggg

SEQ ID NO: 331586 - DNA, 25 bp, Artificial
  Probe
ataacttctgctcaagcacgcccag

SEQ ID NO: 331587 - DNA, 25 bp, Artificial
  Probe
cggtatttgcggtatctactctcct

SEQ ID NO: 331588 - DNA, 25 bp, Artificial
  Probe
gcagattcgaactgcgaggacccca

SEQ ID NO: 331589 - DNA, 25 bp, Artificial
  Probe
gtgcctaggacttcgaggccaaccc

SEQ ID NO: 331590 - DNA, 25 bp, Artificial
  Probe
cgcccaggtgcctaggacttcgagg

SEQ ID NO: 331591 - DNA, 25 bp, Artificial
  Probe
ttcacttctggcaacgcgagactag

SEQ ID NO: 331592 - DNA, 25 bp, Artificial
  Probe
tggcagctctcctgctctcctatgg

SEQ ID NO: 331593 - DNA, 25 bp, Artificial
  Probe
tcaccgacaggcataacttctgctc

SEQ ID NO: 331594 - DNA, 25 bp, Artificial
  Probe
gatgggcaacgtcaaagtggcagct

SEQ ID NO: 331595 - DNA, 25 bp, Artificial
  Probe
tgatgggcaacgtcaaagtggcagc

SEQ ID NO: 331596 - DNA, 25 bp, Artificial
  Probe
ctaagttaggcctcagccctccttt

SEQ ID NO: 331597 - DNA, 25 bp, Artificial
  Probe
cccgggtcaccgacaggcataactt

SEQ ID NO: 331598 - DNA, 25 bp, Artificial
  Probe
aaagtggcagctctcctgctctcct

SEQ ID NO: 331599 - DNA, 25 bp, Artificial
  Probe
tcaagcacgcccaggtgcctaggac

SEQ ID NO: 331600 - DNA, 25 bp, Artificial
  Probe
tcacttctggcaacgcgagactagc

SEQ ID NO: 331601 - DNA, 25 bp, Artificial
  Probe
aacccccaaagcagcgctaagttag

SEQ ID NO: 331602 - DNA, 25 bp, Artificial
  Probe
cggtatctactctcctccgctggga

SEQ ID NO: 331603 - DNA, 25 bp, Artificial
  Probe
tcaaagtggcagctctcctgctctc

SEQ ID NO: 331604 - DNA, 25 bp, Artificial
  Probe
taagttaggcctcagccctcctttt

SEQ ID NO: 331605 - DNA, 25 bp, Artificial
  Probe
cgggtcaccgacaggcataacttct

SEQ ID NO: 331606 - DNA, 25 bp, Artificial
  Probe
gctctcctgctctcctatggtgcag

SEQ ID NO: 331607 - DNA, 25 bp, Artificial
  Probe
atcacgacgtcgtgcggtatttgcg

SEQ ID NO: 331608 - DNA, 25 bp, Artificial
  Probe
cataatgctttttgcaatcacgcgg

SEQ ID NO: 331609 - DNA, 25 bp, Artificial
  Probe
cagcgctaagttaggcctcagccct

SEQ ID NO: 331610 - DNA, 25 bp, Artificial
  Probe
taccccgatacaggtgatgatgatg

SEQ ID NO: 331611 - DNA, 25 bp, Artificial
  Probe
cactctggtagtactgcaccaggca

SEQ ID NO: 331612 - DNA, 25 bp, Artificial
  Probe
tggcttcacttctggcaacgcgaga

SEQ ID NO: 331613 - DNA, 25 bp, Artificial
  Probe
cgtttcccgggtcaccgacaggcat

SEQ ID NO: 331614 - DNA, 25 bp, Artificial
  Probe
ggcataacttctgctcaagcacgcc

SEQ ID NO: 331615 - DNA, 25 bp, Artificial
  Probe
tttatatgtccaaaagtgactgacc

SEQ ID NO: 331616 - DNA, 25 bp, Artificial
  Probe
aattcatctctttttatatgtccaa

SEQ ID NO: 331617 - DNA, 25 bp, Artificial
  Probe
actgaccttttcagcagtaaactat

SEQ ID NO: 331618 - DNA, 25 bp, Artificial
  Probe
caaaagtgactgaccttttcagcag

SEQ ID NO: 331619 - DNA, 25 bp, Artificial
  Probe
ttgaaaactttcaaattcatctctt

SEQ ID NO: 331620 - DNA, 25 bp, Artificial
  Probe
gaccttttcagcagtaaactattgc

SEQ ID NO: 331621 - DNA, 25 bp, Artificial
  Probe
tttcaaattcatctctttttatatg

SEQ ID NO: 331622 - DNA, 25 bp, Artificial
  Probe
ctctttttatatgtccaaaagtgac

SEQ ID NO: 331623 - DNA, 25 bp, Artificial
  Probe
tatatagcaaactggactttaaaac

SEQ ID NO: 331624 - DNA, 25 bp, Artificial
  Probe
aagtgactgaccttttcagcagtaa

SEQ ID NO: 331625 - DNA, 25 bp, Artificial
  Probe
accttttcagcagtaaactattgca

SEQ ID NO: 331626 - DNA, 25 bp, Artificial
  Probe
agtgactgaccttttcagcagtaaa

SEQ ID NO: 331627 - DNA, 25 bp, Artificial
  Probe
tagcaaactggactttaaaactgga

SEQ ID NO: 331628 - DNA, 25 bp, Artificial
  Probe
tatatgtccaaaagtgactgacctt

SEQ ID NO: 331629 - DNA, 25 bp, Artificial
  Probe
ttttatatgtccaaaagtgactgac

SEQ ID NO: 331630 - DNA, 25 bp, Artificial
  Probe
gaaaactttcaaattcatctctttt

SEQ ID NO: 331631 - DNA, 25 bp, Artificial
  Probe
tttttatatgtccaaaagtgactga

SEQ ID NO: 331632 - DNA, 25 bp, Artificial
  Probe
tcaaattcatctctttttatatgtc

SEQ ID NO: 331633 - DNA, 25 bp, Artificial
  Probe
gtgactgaccttttcagcagtaaac

SEQ ID NO: 331634 - DNA, 25 bp, Artificial
  Probe
ccaaaagtgactgaccttttcagca

SEQ ID NO: 331635 - DNA, 25 bp, Artificial
  Probe
tccaaaagtgactgaccttttcagc

SEQ ID NO: 331636 - DNA, 25 bp, Artificial
  Probe
gactgaccttttcagcagtaaacta

SEQ ID NO: 331637 - DNA, 25 bp, Artificial
  Probe
tctctttttatatgtccaaaagtga

SEQ ID NO: 331638 - DNA, 25 bp, Artificial
  Probe
tatagcaaactggactttaaaactg

SEQ ID NO: 331639 - DNA, 25 bp, Artificial
  Probe
tgactgaccttttcagcagtaaact

SEQ ID NO: 331640 - DNA, 25 bp, Artificial
  Probe
attgaaaactttcaaattcatctct

SEQ ID NO: 331641 - DNA, 25 bp, Artificial
  Probe
catctctttttatatgtccaaaagt

SEQ ID NO: 331642 - DNA, 25 bp, Artificial
  Probe
atagcaaactggactttaaaactgg

SEQ ID NO: 331643 - DNA, 25 bp, Artificial
  Probe
ctttttatatgtccaaaagtgactg

SEQ ID NO: 331644 - DNA, 25 bp, Artificial
  Probe
ttatatgtccaaaagtgactgacct

SEQ ID NO: 331645 - DNA, 25 bp, Artificial
  Probe
attcatctctttttatatgtccaaa

SEQ ID NO: 331646 - DNA, 25 bp, Artificial
  Probe
ttcaaattcatctctttttatatgt

SEQ ID NO: 331647 - DNA, 25 bp, Artificial
  Probe
tgaccttttcagcagtaaactattg

SEQ ID NO: 331648 - DNA, 25 bp, Artificial
  Probe
atatgtccaaaagtgactgaccttt

SEQ ID NO: 331649 - DNA, 25 bp, Artificial
  Probe
ctgaccttttcagcagtaaactatt

SEQ ID NO: 331650 - DNA, 25 bp, Artificial
  Probe
tgaaaactttcaaattcatctcttt

SEQ ID NO: 331651 - DNA, 25 bp, Artificial
  Probe
aaaagtgactgaccttttcagcagt

SEQ ID NO: 331652 - DNA, 25 bp, Artificial
  Probe
ttcatctctttttatatgtccaaaa

SEQ ID NO: 331653 - DNA, 25 bp, Artificial
  Probe
tatgtccaaaagtgactgacctttt

SEQ ID NO: 331654 - DNA, 25 bp, Artificial
  Probe
ccttttcagcagtaaactattgcac

SEQ ID NO: 331655 - DNA, 25 bp, Artificial
  Probe
gtccaaaagtgactgaccttttcag

SEQ ID NO: 331656 - DNA, 25 bp, Artificial
  Probe
tgtccaaaagtgactgaccttttca

SEQ ID NO: 331657 - DNA, 25 bp, Artificial
  Probe
aaagtgactgaccttttcagcagta

SEQ ID NO: 331658 - DNA, 25 bp, Artificial
  Probe
atatagcaaactggactttaaaact

SEQ ID NO: 331659 - DNA, 25 bp, Artificial
  Probe
atgtccaaaagtgactgaccttttc

SEQ ID NO: 331660 - DNA, 25 bp, Artificial
  Probe
aactttcaaattcatctctttttat

SEQ ID NO: 331661 - DNA, 25 bp, Artificial
  Probe
ccaggctgcctagctcttttgaaaa

SEQ ID NO: 331662 - DNA, 25 bp, Artificial
  Probe
caagttccaggctgcctagctcttt

SEQ ID NO: 331663 - DNA, 25 bp, Artificial
  Probe
taatatgttctgttcctcgccatga

SEQ ID NO: 331664 - DNA, 25 bp, Artificial
  Probe
ctttgttcctcatcgaagtaaactg

SEQ ID NO: 331665 - DNA, 25 bp, Artificial
  Probe
gttgtcaagttccaggctgcctagc

SEQ ID NO: 331666 - DNA, 25 bp, Artificial
  Probe
gccacaactaatgtaacttcagaga

SEQ ID NO: 331667 - DNA, 25 bp, Artificial
  Probe
tccttggcaacaacaaggccaggta

SEQ ID NO: 331668 - DNA, 25 bp, Artificial
  Probe
caggctgcctagctcttttgaaaac

SEQ ID NO: 331669 - DNA, 25 bp, Artificial
  Probe
ctcatcgaagtaaactgttatcatg

SEQ ID NO: 331670 - DNA, 25 bp, Artificial
  Probe
aacgctttgttcctcatcgaagtaa

SEQ ID NO: 331671 - DNA, 25 bp, Artificial
  Probe
cacaactaatgtaacttcagagagc

SEQ ID NO: 331672 - DNA, 25 bp, Artificial
  Probe
ttgtcaagttccaggctgcctagct

SEQ ID NO: 331673 - DNA, 25 bp, Artificial
  Probe
gtccttggcaacaacaaggccaggt

SEQ ID NO: 331674 - DNA, 25 bp, Artificial
  Probe
tgtccttggcaacaacaaggccagg

SEQ ID NO: 331675 - DNA, 25 bp, Artificial
  Probe
gaaacgctttgttcctcatcgaagt

SEQ ID NO: 331676 - DNA, 25 bp, Artificial
  Probe
gtgtccttggcaacaacaaggccag

SEQ ID NO: 331677 - DNA, 25 bp, Artificial
  Probe
ccttggcaacaacaaggccaggtat

SEQ ID NO: 331678 - DNA, 25 bp, Artificial
  Probe
ttgttcctcatcgaagtaaactgtt

SEQ ID NO: 331679 - DNA, 25 bp, Artificial
  Probe
aggctgcctagctcttttgaaaact

SEQ ID NO: 331680 - DNA, 25 bp, Artificial
  Probe
tgttcctcatcgaagtaaactgtta

SEQ ID NO: 331681 - DNA, 25 bp, Artificial
  Probe
cttggcaacaacaaggccaggtatc

SEQ ID NO: 331682 - DNA, 25 bp, Artificial
  Probe
tatgttctgttcctcgccatgaaat

SEQ ID NO: 331683 - DNA, 25 bp, Artificial
  Probe
acgctttgttcctcatcgaagtaaa

SEQ ID NO: 331684 - DNA, 25 bp, Artificial
  Probe
agccacaactaatgtaacttcagag

SEQ ID NO: 331685 - DNA, 25 bp, Artificial
  Probe
cgctttgttcctcatcgaagtaaac

SEQ ID NO: 331686 - DNA, 25 bp, Artificial
  Probe
tccaggctgcctagctcttttgaaa

SEQ ID NO: 331687 - DNA, 25 bp, Artificial
  Probe
gctttgttcctcatcgaagtaaact

SEQ ID NO: 331688 - DNA, 25 bp, Artificial
  Probe
atatgttctgttcctcgccatgaaa

SEQ ID NO: 331689 - DNA, 25 bp, Artificial
  Probe
ggctgcctagctcttttgaaaactg

SEQ ID NO: 331690 - DNA, 25 bp, Artificial
  Probe
tttgttcctcatcgaagtaaactgt

SEQ ID NO: 331691 - DNA, 25 bp, Artificial
  Probe
gttcctcatcgaagtaaactgttat

SEQ ID NO: 331692 - DNA, 25 bp, Artificial
  Probe
gcttaatatgttctgttcctcgcca

SEQ ID NO: 331693 - DNA, 25 bp, Artificial
  Probe
ttccaggctgcctagctcttttgaa

SEQ ID NO: 331694 - DNA, 25 bp, Artificial
  Probe
ccacaactaatgtaacttcagagag

SEQ ID NO: 331695 - DNA, 25 bp, Artificial
  Probe
aaacgctttgttcctcatcgaagta

SEQ ID NO: 331696 - DNA, 25 bp, Artificial
  Probe
aatatgttctgttcctcgccatgaa

SEQ ID NO: 331697 - DNA, 25 bp, Artificial
  Probe
atgttctgttcctcgccatgaaatg

SEQ ID NO: 331698 - DNA, 25 bp, Artificial
  Probe
agcttaatatgttctgttcctcgcc

SEQ ID NO: 331699 - DNA, 25 bp, Artificial
  Probe
ttaatatgttctgttcctcgccatg

SEQ ID NO: 331700 - DNA, 25 bp, Artificial
  Probe
ttctggacaagctcatccggaatcc

SEQ ID NO: 331701 - DNA, 25 bp, Artificial
  Probe
ggccatcaaaccttcttctggacca

SEQ ID NO: 331702 - DNA, 25 bp, Artificial
  Probe
gtatgaggacagcacactgtaagga

SEQ ID NO: 331703 - DNA, 25 bp, Artificial
  Probe
cacaacaggtgattggcttaacggt

SEQ ID NO: 331704 - DNA, 25 bp, Artificial
  Probe
gaagatcatcagttccattaaagct

SEQ ID NO: 331705 - DNA, 25 bp, Artificial
  Probe
gaaacacaatctaagaatggtccag

SEQ ID NO: 331706 - DNA, 25 bp, Artificial
  Probe
cagtctgaagatcatcacaagcgcg

SEQ ID NO: 331707 - DNA, 25 bp, Artificial
  Probe
ctccacagatgacatgaaaaaggtt

SEQ ID NO: 331708 - DNA, 25 bp, Artificial
  Probe
aagctcatccggaatccaggcagtc

SEQ ID NO: 331709 - DNA, 25 bp, Artificial
  Probe
aagatcatcacaagcgcggctgcaa

SEQ ID NO: 331710 - DNA, 25 bp, Artificial
  Probe
agaagatcatcagttccattaaagc

SEQ ID NO: 331711 - DNA, 25 bp, Artificial
  Probe
agcgcggctgcaaggccatcaaacc

SEQ ID NO: 331712 - DNA, 25 bp, Artificial
  Probe
catccggaatccaggcagtctgaag

SEQ ID NO: 331713 - DNA, 25 bp, Artificial
  Probe
gatgtcttacggagaaaggccgtat

SEQ ID NO: 331714 - DNA, 25 bp, Artificial
  Probe
aacagacccaagtttgagcagatcg

SEQ ID NO: 331715 - DNA, 25 bp, Artificial
  Probe
tgtggttgggccacagaagaagatc

SEQ ID NO: 331716 - DNA, 25 bp, Artificial
  Probe
tcccgtgtaaagtactggaaggatg

SEQ ID NO: 331717 - DNA, 25 bp, Artificial
  Probe
acaacagacccaagtttgagcagat

SEQ ID NO: 331718 - DNA, 25 bp, Artificial
  Probe
acagcacactgtaaggaaatcttca

SEQ ID NO: 331719 - DNA, 25 bp, Artificial
  Probe
tgttactgtggttgggccacagaag

SEQ ID NO: 331720 - DNA, 25 bp, Artificial
  Probe
ctgtatcagttgatgttggactgct

SEQ ID NO: 331721 - DNA, 25 bp, Artificial
  Probe
ggttgggccacagaagaagatcatc

SEQ ID NO: 331722 - DNA, 25 bp, Artificial
  Probe
caggaacaacagacccaagtttgag

SEQ ID NO: 331723 - DNA, 25 bp, Artificial
  Probe
gaagatgcagcgtcatccagcaaac

SEQ ID NO: 331724 - DNA, 25 bp, Artificial
  Probe
gacaccattgccaagatctccacag

SEQ ID NO: 331725 - DNA, 25 bp, Artificial
  Probe
ggctgcaaggccatcaaaccttctt

SEQ ID NO: 331726 - DNA, 25 bp, Artificial
  Probe
tgtggagtacagctcctgtgacacc

SEQ ID NO: 331727 - DNA, 25 bp, Artificial
  Probe
acccaagtttgagcagatcgtcagc

SEQ ID NO: 331728 - DNA, 25 bp, Artificial
  Probe
tccaggcagtctgaagatcatcaca

SEQ ID NO: 331729 - DNA, 25 bp, Artificial
  Probe
ttaacggtatgaggacagcacactg

SEQ ID NO: 331730 - DNA, 25 bp, Artificial
  Probe
gtccagttcccgtgtaaagtactgg

SEQ ID NO: 331731 - DNA, 25 bp, Artificial
  Probe
ggaatccaggcagtctgaagatcat

SEQ ID NO: 331732 - DNA, 25 bp, Artificial
  Probe
tggatgagggttatcgcctgccact

SEQ ID NO: 331733 - DNA, 25 bp, Artificial
  Probe
catccagcaaacagatagaaatggt

SEQ ID NO: 331734 - DNA, 25 bp, Artificial
  Probe
cagatcgtcagcattctggacaagc

SEQ ID NO: 331735 - DNA, 25 bp, Artificial
  Probe
gctctagaaacacaatctaagaatg

SEQ ID NO: 331736 - DNA, 25 bp, Artificial
  Probe
agggttatcgcctgccacttcccat

SEQ ID NO: 331737 - DNA, 25 bp, Artificial
  Probe
gacaggaacaacagacccaagtttg

SEQ ID NO: 331738 - DNA, 25 bp, Artificial
  Probe
aaccttcttctggaccaaagcaatg

SEQ ID NO: 331739 - DNA, 25 bp, Artificial
  Probe
agcaatgtcgatattgctacgttcc

SEQ ID NO: 331740 - DNA, 25 bp, Artificial
  Probe
ttggtgttactgtggttgggccaca

SEQ ID NO: 331741 - DNA, 25 bp, Artificial
  Probe
ccagctgccctgtatcagttgatgt

SEQ ID NO: 331742 - DNA, 25 bp, Artificial
  Probe
ttggcttaacggtatgaggacagca

SEQ ID NO: 331743 - DNA, 25 bp, Artificial
  Probe
cacaagcgcggctgcaaggccatca

SEQ ID NO: 331744 - DNA, 25 bp, Artificial
  Probe
gaatggtccagttcccgtgtaaagt

SEQ ID NO: 331745 - DNA, 25 bp, Artificial
  Probe
aatggtggagatgctgcagaagctc

SEQ ID NO: 331746 - DNA, 25 bp, Artificial
  Probe
aaccaagtacggtggtaggagatca

SEQ ID NO: 331747 - DNA, 25 bp, Artificial
  Probe
gggcagctcacatggaagatggttt

SEQ ID NO: 331748 - DNA, 25 bp, Artificial
  Probe
gattgtctcccgtggacatagagat

SEQ ID NO: 331749 - DNA, 25 bp, Artificial
  Probe
ggctttgaggagacttcagaactgt

SEQ ID NO: 331750 - DNA, 25 bp, Artificial
  Probe
cagggcagctcacatggaagatggt

SEQ ID NO: 331751 - DNA, 25 bp, Artificial
  Probe
tatgaacgggagctctgccagcctc

SEQ ID NO: 331752 - DNA, 25 bp, Artificial
  Probe
acatgtggactcaaactgaaaaata

SEQ ID NO: 331753 - DNA, 25 bp, Artificial
  Probe
atcaaaaatgaaaccaagtacggtg

SEQ ID NO: 331754 - DNA, 25 bp, Artificial
  Probe
tcatcaaaaatgaaaccaagtacgg

SEQ ID NO: 331755 - DNA, 25 bp, Artificial
  Probe
ctatgaacgggagctctgccagcct

SEQ ID NO: 331756 - DNA, 25 bp, Artificial
  Probe
ctggtctgagcttctggctatgaag

SEQ ID NO: 331757 - DNA, 25 bp, Artificial
  Probe
atcctcagggcagctcacatggaag

SEQ ID NO: 331758 - DNA, 25 bp, Artificial
  Probe
gacacactgagctatgaacgggagc

SEQ ID NO: 331759 - DNA, 25 bp, Artificial
  Probe
attgtctcccgtggacatagagatg

SEQ ID NO: 331760 - DNA, 25 bp, Artificial
  Probe
gagcttctggctatgaagccactgc

SEQ ID NO: 331761 - DNA, 25 bp, Artificial
  Probe
tgaacgggagctctgccagcctcat

SEQ ID NO: 331762 - DNA, 25 bp, Artificial
  Probe
tggccaaggctttgaggagacttca

SEQ ID NO: 331763 - DNA, 25 bp, Artificial
  Probe
cacatggaagatggttttggccaag

SEQ ID NO: 331764 - DNA, 25 bp, Artificial
  Probe
aggctttgaggagacttcagaactg

SEQ ID NO: 331765 - DNA, 25 bp, Artificial
  Probe
tgtctcccgtggacatagagatgct

SEQ ID NO: 331766 - DNA, 25 bp, Artificial
  Probe
tttgcacatgtggactcaaactgaa

SEQ ID NO: 331767 - DNA, 25 bp, Artificial
  Probe
gctatgaacgggagctctgccagcc

SEQ ID NO: 331768 - DNA, 25 bp, Artificial
  Probe
ctcagggcagctcacatggaagatg

SEQ ID NO: 331769 - DNA, 25 bp, Artificial
  Probe
agctcacatggaagatggttttggc

SEQ ID NO: 331770 - DNA, 25 bp, Artificial
  Probe
gatatttgcacatgtggactcaaac

SEQ ID NO: 331771 - DNA, 25 bp, Artificial
  Probe
tgagcttctggctatgaagccactg

SEQ ID NO: 331772 - DNA, 25 bp, Artificial
  Probe
aggatatttgcacatgtggactcaa

SEQ ID NO: 331773 - DNA, 25 bp, Artificial
  Probe
tcagtgattgtctcccgtggacata

SEQ ID NO: 331774 - DNA, 25 bp, Artificial
  Probe
atttgcacatgtggactcaaactga

SEQ ID NO: 331775 - DNA, 25 bp, Artificial
  Probe
tttggccaaggctttgaggagactt

SEQ ID NO: 331776 - DNA, 25 bp, Artificial
  Probe
ttgtctcccgtggacatagagatgc

SEQ ID NO: 331777 - DNA, 25 bp, Artificial
  Probe
actgagctatgaacgggagctctgc

SEQ ID NO: 331778 - DNA, 25 bp, Artificial
  Probe
ttgcacatgtggactcaaactgaaa

SEQ ID NO: 331779 - DNA, 25 bp, Artificial
  Probe
agggcagctcacatggaagatggtt

SEQ ID NO: 331780 - DNA, 25 bp, Artificial
  Probe
tgcacatgtggactcaaactgaaaa

SEQ ID NO: 331781 - DNA, 25 bp, Artificial
  Probe
ttggccaaggctttgaggagacttc

SEQ ID NO: 331782 - DNA, 25 bp, Artificial
  Probe
gaatcccaatggacagggcctgccc

SEQ ID NO: 331783 - DNA, 25 bp, Artificial
  Probe
tgcaggacacactgagctatgaacg

SEQ ID NO: 331784 - DNA, 25 bp, Artificial
  Probe
ggccaaggctttgaggagacttcag

SEQ ID NO: 331785 - DNA, 25 bp, Artificial
  Probe
ccaaggctttgaggagacttcagaa

SEQ ID NO: 331786 - DNA, 25 bp, Artificial
  Probe
aggacacactgagctatgaacggga

SEQ ID NO: 331787 - DNA, 25 bp, Artificial
  Probe
cactgagctatgaacgggagctctg

SEQ ID NO: 331788 - DNA, 25 bp, Artificial
  Probe
ctcaacaagcccagaagctaaaaga

SEQ ID NO: 331789 - DNA, 25 bp, Artificial
  Probe
catcctcagggcagctcacatggaa

SEQ ID NO: 331790 - DNA, 25 bp, Artificial
  Probe
ggtctgagcttctggctatgaagcc

SEQ ID NO: 331791 - DNA, 25 bp, Artificial
  Probe
ccaagtacggtggtaggagatcatg

SEQ ID NO: 331792 - DNA, 25 bp, Artificial
  Probe
atctgaagatcacatgaagactgaa

SEQ ID NO: 331793 - DNA, 25 bp, Artificial
  Probe
gtgtctgtactgctcaaaacagcca

SEQ ID NO: 331794 - DNA, 25 bp, Artificial
  Probe
agcaggcgagagctactatttactg

SEQ ID NO: 331795 - DNA, 25 bp, Artificial
  Probe
acagacaggcaagcagcaggcgaga

SEQ ID NO: 331796 - DNA, 25 bp, Artificial
  Probe
ccccttgtggctcacttctgagagc

SEQ ID NO: 331797 - DNA, 25 bp, Artificial
  Probe
acgtgtgccccacatgccgtctgtg

SEQ ID NO: 331798 - DNA, 25 bp, Artificial
  Probe
ctcaaaacagccaggggcttcagca

SEQ ID NO: 331799 - DNA, 25 bp, Artificial
  Probe
gcctctgagcacctatcctgtgtct

SEQ ID NO: 331800 - DNA, 25 bp, Artificial
  Probe
cctgtgtctgtactgctcaaaacag

SEQ ID NO: 331801 - DNA, 25 bp, Artificial
  Probe
cgtgtgccccacatgccgtctgtgt

SEQ ID NO: 331802 - DNA, 25 bp, Artificial
  Probe
gctctgtcagggaacccacgtgtgc

SEQ ID NO: 331803 - DNA, 25 bp, Artificial
  Probe
cttctgagagccaatagagactcgt

SEQ ID NO: 331804 - DNA, 25 bp, Artificial
  Probe
tcacatgaagactgaattggaattc

SEQ ID NO: 331805 - DNA, 25 bp, Artificial
  Probe
atcctgtgtctgtactgctcaaaac

SEQ ID NO: 331806 - DNA, 25 bp, Artificial
  Probe
acaggcaagcagcaggcgagagcta

SEQ ID NO: 331807 - DNA, 25 bp, Artificial
  Probe
actgctcaaaacagccaggggcttc

SEQ ID NO: 331808 - DNA, 25 bp, Artificial
  Probe
tgtgtctgtactgctcaaaacagcc

SEQ ID NO: 331809 - DNA, 25 bp, Artificial
  Probe
cttgtggctcacttctgagagccaa

SEQ ID NO: 331810 - DNA, 25 bp, Artificial
  Probe
atgccgtctgtgtctttgtccaaaa

SEQ ID NO: 331811 - DNA, 25 bp, Artificial
  Probe
aagacagggactggttctatgcctg

SEQ ID NO: 331812 - DNA, 25 bp, Artificial
  Probe
agggaacccacgtgtgccccacatg

SEQ ID NO: 331813 - DNA, 25 bp, Artificial
  Probe
agctatgcagcctggagcaggctct

SEQ ID NO: 331814 - DNA, 25 bp, Artificial
  Probe
acagccaggggcttcagcagaaagg

SEQ ID NO: 331815 - DNA, 25 bp, Artificial
  Probe
tgtctttgtccaaaagacagggact

SEQ ID NO: 331816 - DNA, 25 bp, Artificial
  Probe
agagccaatagagactcgtgtatgt

SEQ ID NO: 331817 - DNA, 25 bp, Artificial
  Probe
tatgcctggggcttgtgatctgaag

SEQ ID NO: 331818 - DNA, 25 bp, Artificial
  Probe
ctgtactgctcaaaacagccagggg

SEQ ID NO: 331819 - DNA, 25 bp, Artificial
  Probe
ttctgagagccaatagagactcgtg

SEQ ID NO: 331820 - DNA, 25 bp, Artificial
  Probe
tggttctatgcctggggcttgtgat

SEQ ID NO: 331821 - DNA, 25 bp, Artificial
  Probe
gagcaggctctgtcagggaacccac

SEQ ID NO: 331822 - DNA, 25 bp, Artificial
  Probe
agccaatagagactcgtgtatgtga

SEQ ID NO: 331823 - DNA, 25 bp, Artificial
  Probe
cgtctgtgtctttgtccaaaagaca

SEQ ID NO: 331824 - DNA, 25 bp, Artificial
  Probe
tgtccaaaagacagggactggttct

SEQ ID NO: 331825 - DNA, 25 bp, Artificial
  Probe
tggggcttgtgatctgaagatcaca

SEQ ID NO: 331826 - DNA, 25 bp, Artificial
  Probe
actcgtgtatgtgagagagacagac

SEQ ID NO: 331827 - DNA, 25 bp, Artificial
  Probe
tatgcagcctggagcaggctctgtc

SEQ ID NO: 331828 - DNA, 25 bp, Artificial
  Probe
aagcagcaggcgagagctactattt

SEQ ID NO: 331829 - DNA, 25 bp, Artificial
  Probe
ctcacttctgagagccaatagagac

SEQ ID NO: 331830 - DNA, 25 bp, Artificial
  Probe
agacagggactggttctatgcctgg

SEQ ID NO: 331831 - DNA, 25 bp, Artificial
  Probe
ggctcacttctgagagccaatagag

SEQ ID NO: 331832 - DNA, 25 bp, Artificial
  Probe
ctctgtcagggaacccacgtgtgcc

SEQ ID NO: 331833 - DNA, 25 bp, Artificial
  Probe
ccaatagagactcgtgtatgtgaga

SEQ ID NO: 331834 - DNA, 25 bp, Artificial
  Probe
cctggagcaggctctgtcagggaac

SEQ ID NO: 331835 - DNA, 25 bp, Artificial
  Probe
cctggggcttgtgatctgaagatca

SEQ ID NO: 331836 - DNA, 25 bp, Artificial
  Probe
gcaggctctgtcagggaacccacgt

SEQ ID NO: 331837 - DNA, 25 bp, Artificial
  Probe
caggcaagcagcaggcgagagctac

SEQ ID NO: 331838 - DNA, 25 bp, Artificial
  Probe
taggctggttcctgtgtcagagaga

SEQ ID NO: 331839 - DNA, 25 bp, Artificial
  Probe
aggctggttcctgtgtcagagagac

SEQ ID NO: 331840 - DNA, 25 bp, Artificial
  Probe
agtcaggatgtgttctactctatat

SEQ ID NO: 331841 - DNA, 25 bp, Artificial
  Probe
gctgatgcctaaagtggctcatttg

SEQ ID NO: 331842 - DNA, 25 bp, Artificial
  Probe
tgatgcctaaagtggctcatttgca

SEQ ID NO: 331843 - DNA, 25 bp, Artificial
  Probe
gctcatttgcaaggactattatggt

SEQ ID NO: 331844 - DNA, 25 bp, Artificial
  Probe
tgtgttctactctatatccacagtg

SEQ ID NO: 331845 - DNA, 25 bp, Artificial
  Probe
atcaaaataccagcaacgttggata

SEQ ID NO: 331846 - DNA, 25 bp, Artificial
  Probe
gatgtgttctactctatatccacag

SEQ ID NO: 331847 - DNA, 25 bp, Artificial
  Probe
ggctggttcctgtgtcagagagacc

SEQ ID NO: 331848 - DNA, 25 bp, Artificial
  Probe
gcctgagtgtgctgccaaattggag

SEQ ID NO: 331849 - DNA, 25 bp, Artificial
  Probe
ctaaagtggctcatttgcaaggact

SEQ ID NO: 331850 - DNA, 25 bp, Artificial
  Probe
gtaaggcctgagtgtgctgccaaat

SEQ ID NO: 331851 - DNA, 25 bp, Artificial
  Probe
agctgatgcctaaagtggctcattt

SEQ ID NO: 331852 - DNA, 25 bp, Artificial
  Probe
cctaaagtggctcatttgcaaggac

SEQ ID NO: 331853 - DNA, 25 bp, Artificial
  Probe
tcaaaataccagcaacgttggatag

SEQ ID NO: 331854 - DNA, 25 bp, Artificial
  Probe
tggctcatttgcaaggactattatg

SEQ ID NO: 331855 - DNA, 25 bp, Artificial
  Probe
atatcaaaataccagcaacgttgga

SEQ ID NO: 331856 - DNA, 25 bp, Artificial
  Probe
gtggctcatttgcaaggactattat

SEQ ID NO: 331857 - DNA, 25 bp, Artificial
  Probe
aagtggctcatttgcaaggactatt

SEQ ID NO: 331858 - DNA, 25 bp, Artificial
  Probe
taaggcctgagtgtgctgccaaatt

SEQ ID NO: 331859 - DNA, 25 bp, Artificial
  Probe
acgccctttctatgggtcagatatc

SEQ ID NO: 331860 - DNA, 25 bp, Artificial
  Probe
cagtcaggatgtgttctactctata

SEQ ID NO: 331861 - DNA, 25 bp, Artificial
  Probe
tggttcctgtgtcagagagacctgg

SEQ ID NO: 331862 - DNA, 25 bp, Artificial
  Probe
gagctgatgcctaaagtggctcatt

SEQ ID NO: 331863 - DNA, 25 bp, Artificial
  Probe
gtcagatatcaaaataccagcaacg

SEQ ID NO: 331864 - DNA, 25 bp, Artificial
  Probe
ttctatgggtcagatatcaaaatac

SEQ ID NO: 331865 - DNA, 25 bp, Artificial
  Probe
ggatgtgttctactctatatccaca

SEQ ID NO: 331866 - DNA, 25 bp, Artificial
  Probe
tcaggatgtgttctactctatatcc

SEQ ID NO: 331867 - DNA, 25 bp, Artificial
  Probe
ctttctatgggtcagatatcaaaat

SEQ ID NO: 331868 - DNA, 25 bp, Artificial
  Probe
gctggttcctgtgtcagagagacct

SEQ ID NO: 331869 - DNA, 25 bp, Artificial
  Probe
gcctaaagtggctcatttgcaagga

SEQ ID NO: 331870 - DNA, 25 bp, Artificial
  Probe
agagctgatgcctaaagtggctcat

SEQ ID NO: 331871 - DNA, 25 bp, Artificial
  Probe
agtggctcatttgcaaggactatta

SEQ ID NO: 331872 - DNA, 25 bp, Artificial
  Probe
ctgatgcctaaagtggctcatttgc

SEQ ID NO: 331873 - DNA, 25 bp, Artificial
  Probe
gatatcaaaataccagcaacgttgg

SEQ ID NO: 331874 - DNA, 25 bp, Artificial
  Probe
agatatcaaaataccagcaacgttg

SEQ ID NO: 331875 - DNA, 25 bp, Artificial
  Probe
aggatgtgttctactctatatccac

SEQ ID NO: 331876 - DNA, 25 bp, Artificial
  Probe
cctttctatgggtcagatatcaaaa

SEQ ID NO: 331877 - DNA, 25 bp, Artificial
  Probe
aaagtggctcatttgcaaggactat

SEQ ID NO: 331878 - DNA, 25 bp, Artificial
  Probe
ggctcatttgcaaggactattatgg

SEQ ID NO: 331879 - DNA, 25 bp, Artificial
  Probe
aaggcctgagtgtgctgccaaattg

SEQ ID NO: 331880 - DNA, 25 bp, Artificial
  Probe
gtgttctactctatatccacagtga

SEQ ID NO: 331881 - DNA, 25 bp, Artificial
  Probe
ggcctgagtgtgctgccaaattgga

SEQ ID NO: 331882 - DNA, 25 bp, Artificial
  Probe
agtaaggcctgagtgtgctgccaaa

SEQ ID NO: 331883 - DNA, 25 bp, Artificial
  Probe
gtcaggatgtgttctactctatatc

SEQ ID NO: 331884 - DNA, 25 bp, Artificial
  Probe
ccctcgagggaagttcaaggtcatc

SEQ ID NO: 331885 - DNA, 25 bp, Artificial
  Probe
tgaagccggtaaccagggagatcgt

SEQ ID NO: 331886 - DNA, 25 bp, Artificial
  Probe
aagaggtgcggcacttcagccctcg

SEQ ID NO: 331887 - DNA, 25 bp, Artificial
  Probe
cggccattgcgcagactcatcgacg

SEQ ID NO: 331888 - DNA, 25 bp, Artificial
  Probe
ttctgcaaaggagctgtgaccctac

SEQ ID NO: 331889 - DNA, 25 bp, Artificial
  Probe
gcagaacagagctgccctcttcgag

SEQ ID NO: 331890 - DNA, 25 bp, Artificial
  Probe
gtgcggcacttcagccctcgaggga

SEQ ID NO: 331891 - DNA, 25 bp, Artificial
  Probe
ggaagttcaaggtcatctgtctaac

SEQ ID NO: 331892 - DNA, 25 bp, Artificial
  Probe
gcggaagaggccttggcgcatcctt

SEQ ID NO: 331893 - DNA, 25 bp, Artificial
  Probe
cccagaactgtgagaagaggatgcc

SEQ ID NO: 331894 - DNA, 25 bp, Artificial
  Probe
acagagctgccctcttcgagaacac

SEQ ID NO: 331895 - DNA, 25 bp, Artificial
  Probe
aaggatctactaccagtaccgtcgg

SEQ ID NO: 331896 - DNA, 25 bp, Artificial
  Probe
agccctcgagggaagttcaaggtca

SEQ ID NO: 331897 - DNA, 25 bp, Artificial
  Probe
cccaggaccgctgctcggcggaaga

SEQ ID NO: 331898 - DNA, 25 bp, Artificial
  Probe
ggccattgcgcagactcatcgacgc

SEQ ID NO: 331899 - DNA, 25 bp, Artificial
  Probe
tgctggcctcggtaaggatctacta

SEQ ID NO: 331900 - DNA, 25 bp, Artificial
  Probe
cttcagccctcgagggaagttcaag

SEQ ID NO: 331901 - DNA, 25 bp, Artificial
  Probe
aagacttggtatctcgcttcttggt

SEQ ID NO: 331902 - DNA, 25 bp, Artificial
  Probe
actcagataccgtgaaagacttggt

SEQ ID NO: 331903 - DNA, 25 bp, Artificial
  Probe
ctaccagtaccgtcgggtgaagccg

SEQ ID NO: 331904 - DNA, 25 bp, Artificial
  Probe
cggtaaccagggagatcgtcatccg

SEQ ID NO: 331905 - DNA, 25 bp, Artificial
  Probe
agagctgccctcttcgagaacacgc

SEQ ID NO: 331906 - DNA, 25 bp, Artificial
  Probe
actgtgctggcctcggtaaggatct

SEQ ID NO: 331907 - DNA, 25 bp, Artificial
  Probe
aagccggtaaccagggagatcgtca

SEQ ID NO: 331908 - DNA, 25 bp, Artificial
  Probe
gtgctcctctccttggctgaggagg

SEQ ID NO: 331909 - DNA, 25 bp, Artificial
  Probe
cggtaaggatctactaccagtaccg

SEQ ID NO: 331910 - DNA, 25 bp, Artificial
  Probe
gcccccagaactgtgagaagaggat

SEQ ID NO: 331911 - DNA, 25 bp, Artificial
  Probe
tgaaagacttggtatctcgcttctt

SEQ ID NO: 331912 - DNA, 25 bp, Artificial
  Probe
aaaggagctgtgaccctactctgca

SEQ ID NO: 331913 - DNA, 25 bp, Artificial
  Probe
ctcttcgagaacacgcccaaggcag

SEQ ID NO: 331914 - DNA, 25 bp, Artificial
  Probe
gcgcatcctttcttccaggagtacg

SEQ ID NO: 331915 - DNA, 25 bp, Artificial
  Probe
aggtgcggcacttcagccctcgagg

SEQ ID NO: 331916 - DNA, 25 bp, Artificial
  Probe
taccgtgaaagacttggtatctcgc

SEQ ID NO: 331917 - DNA, 25 bp, Artificial
  Probe
gactactcagataccgtgaaagact

SEQ ID NO: 331918 - DNA, 25 bp, Artificial
  Probe
gggagatcgtcatccgagaccccta

SEQ ID NO: 331919 - DNA, 25 bp, Artificial
  Probe
agacttggtatctcgcttcttggtg

SEQ ID NO: 331920 - DNA, 25 bp, Artificial
  Probe
cggaagaggccttggcgcatccttt

SEQ ID NO: 331921 - DNA, 25 bp, Artificial
  Probe
gtctaactgtgctggcctcggtaag

SEQ ID NO: 331922 - DNA, 25 bp, Artificial
  Probe
tcttccaggagtacgtggtggaaga

SEQ ID NO: 331923 - DNA, 25 bp, Artificial
  Probe
gaggcttctgcaaaggagctgtgac

SEQ ID NO: 331924 - DNA, 25 bp, Artificial
  Probe
gcctcggtaaggatctactaccagt

SEQ ID NO: 331925 - DNA, 25 bp, Artificial
  Probe
cagggagatcgtcatccgagacccc

SEQ ID NO: 331926 - DNA, 25 bp, Artificial
  Probe
ttggtatctcgcttcttggtggtgc

SEQ ID NO: 331927 - DNA, 25 bp, Artificial
  Probe
caaggcagtgctcctctccttggct

SEQ ID NO: 331928 - DNA, 25 bp, Artificial
  Probe
gcacttcagccctcgagggaagttc

SEQ ID NO: 331929 - DNA, 25 bp, Artificial
  Probe
cttggtggtgcaaccccaggaccgc

SEQ ID NO: 331930 - DNA, 25 bp, Artificial
  Probe
aggttgcctttctacaaccaggatc

SEQ ID NO: 331931 - DNA, 25 bp, Artificial
  Probe
taattgatttggaccaatctggttc

SEQ ID NO: 331932 - DNA, 25 bp, Artificial
  Probe
gcattatcttagtgttcttcataag

SEQ ID NO: 331933 - DNA, 25 bp, Artificial
  Probe
agataatgactatggccgagctgtg

SEQ ID NO: 331934 - DNA, 25 bp, Artificial
  Probe
gaacactctcttcagatgcaaagtc

SEQ ID NO: 331935 - DNA, 25 bp, Artificial
  Probe
ctggcaccagaggtattagaagata

SEQ ID NO: 331936 - DNA, 25 bp, Artificial
  Probe
ttttaagcctcaagtaacatctgag

SEQ ID NO: 331937 - DNA, 25 bp, Artificial
  Probe
tctcttcagatgcaaagtcattgct

SEQ ID NO: 331938 - DNA, 25 bp, Artificial
  Probe
gaagacttgcattatcttagtgttc

SEQ ID NO: 331939 - DNA, 25 bp, Artificial
  Probe
tggaagacatcaaattcccccgaac

SEQ ID NO: 331940 - DNA, 25 bp, Artificial
  Probe
ggaagacatcaaattcccccgaaca

SEQ ID NO: 331941 - DNA, 25 bp, Artificial
  Probe
gaggttgcctttctacaaccaggat

SEQ ID NO: 331942 - DNA, 25 bp, Artificial
  Probe
tcaatttcaggaagacttgcattat

SEQ ID NO: 331943 - DNA, 25 bp, Artificial
  Probe
cttcagatgcaaagtcattgctttc

SEQ ID NO: 331944 - DNA, 25 bp, Artificial
  Probe
tcaagtaacatctgagacagacacc

SEQ ID NO: 331945 - DNA, 25 bp, Artificial
  Probe
ctggttcaatttcaggaagacttgc

SEQ ID NO: 331946 - DNA, 25 bp, Artificial
  Probe
gtcattgctttcagggctcttgata

SEQ ID NO: 331947 - DNA, 25 bp, Artificial
  Probe
accaatctggttcaatttcaggaag

SEQ ID NO: 331948 - DNA, 25 bp, Artificial
  Probe
agtaacatctgagacagacaccaga

SEQ ID NO: 331949 - DNA, 25 bp, Artificial
  Probe
cattatcttagtgttcttcataagg

SEQ ID NO: 331950 - DNA, 25 bp, Artificial
  Probe
tgctttcagggctcttgataaagga

SEQ ID NO: 331951 - DNA, 25 bp, Artificial
  Probe
gaactaatactcatggaagacatca

SEQ ID NO: 331952 - DNA, 25 bp, Artificial
  Probe
tttcaggaagacttgcattatctta

SEQ ID NO: 331953 - DNA, 25 bp, Artificial
  Probe
ttatcttagtgttcttcataaggac

SEQ ID NO: 331954 - DNA, 25 bp, Artificial
  Probe
tcagggctcttgataaaggatccaa

SEQ ID NO: 331955 - DNA, 25 bp, Artificial
  Probe
caccagatatttcgatgaagaattt

SEQ ID NO: 331956 - DNA, 25 bp, Artificial
  Probe
agtaaactggcaggacgtatatgac

SEQ ID NO: 331957 - DNA, 25 bp, Artificial
  Probe
ttcttttctggagtaaactggcagg

SEQ ID NO: 331958 - DNA, 25 bp, Artificial
  Probe
ggatccaaataaacgccttggtgga

SEQ ID NO: 331959 - DNA, 25 bp, Artificial
  Probe
aactggcaggacgtatatgacaaaa

SEQ ID NO: 331960 - DNA, 25 bp, Artificial
  Probe
agggccagatgatccaaaagagata

SEQ ID NO: 331961 - DNA, 25 bp, Artificial
  Probe
gacttgcattatcttagtgttcttc

SEQ ID NO: 331962 - DNA, 25 bp, Artificial
  Probe
gttcaatttcaggaagacttgcatt

SEQ ID NO: 331963 - DNA, 25 bp, Artificial
  Probe
gggaggttgcctttctacaaccagg

SEQ ID NO: 331964 - DNA, 25 bp, Artificial
  Probe
aagataatgactatggccgagctgt

SEQ ID NO: 331965 - DNA, 25 bp, Artificial
  Probe
ctcaagtaacatctgagacagacac

SEQ ID NO: 331966 - DNA, 25 bp, Artificial
  Probe
atgcaaagtcattgctttcagggct

SEQ ID NO: 331967 - DNA, 25 bp, Artificial
  Probe
actctcttcagatgcaaagtcattg

SEQ ID NO: 331968 - DNA, 25 bp, Artificial
  Probe
ttaagcctcaagtaacatctgagac

SEQ ID NO: 331969 - DNA, 25 bp, Artificial
  Probe
tgggaggttgcctttctacaaccag

SEQ ID NO: 331970 - DNA, 25 bp, Artificial
  Probe
ttctggagtaaactggcaggacgta

SEQ ID NO: 331971 - DNA, 25 bp, Artificial
  Probe
aaggatccaaataaacgccttggtg

SEQ ID NO: 331972 - DNA, 25 bp, Artificial
  Probe
agatgcaaagtcattgctttcaggg

SEQ ID NO: 331973 - DNA, 25 bp, Artificial
  Probe
ccgaacactctcttcagatgcaaag

SEQ ID NO: 331974 - DNA, 25 bp, Artificial
  Probe
agacaccagatatttcgatgaagaa

SEQ ID NO: 331975 - DNA, 25 bp, Artificial
  Probe
ctctttgaactaatactcatggaag

SEQ ID NO: 331976 - DNA, 25 bp, Artificial
  Probe
aactagctgtacacgcccagtttat

SEQ ID NO: 331977 - DNA, 25 bp, Artificial
  Probe
aaggagcacatggatgccataaatc

SEQ ID NO: 331978 - DNA, 25 bp, Artificial
  Probe
gggctctgggtcacaaagcagcgtt

SEQ ID NO: 331979 - DNA, 25 bp, Artificial
  Probe
caggagtcgggatcagggtatcatt

SEQ ID NO: 331980 - DNA, 25 bp, Artificial
  Probe
ctgccgtcttggaagatgtgtatag

SEQ ID NO: 331981 - DNA, 25 bp, Artificial
  Probe
gcagccagtctcaggacgaaggaga

SEQ ID NO: 331982 - DNA, 25 bp, Artificial
  Probe
agaagatccgagagctggggtccct

SEQ ID NO: 331983 - DNA, 25 bp, Artificial
  Probe
atggccaaagactttgtagaagacg

SEQ ID NO: 331984 - DNA, 25 bp, Artificial
  Probe
ttgaaaagtaccagacactgagcct

SEQ ID NO: 331985 - DNA, 25 bp, Artificial
  Probe
tccccaggaagcatttgaaaagtac

SEQ ID NO: 331986 - DNA, 25 bp, Artificial
  Probe
tgtatagtaatgtggtccgtacctg

SEQ ID NO: 331987 - DNA, 25 bp, Artificial
  Probe
agaagatgaccaaccgacagggcat

SEQ ID NO: 331988 - DNA, 25 bp, Artificial
  Probe
taatgtggtccgtacctgggaacgt

SEQ ID NO: 331989 - DNA, 25 bp, Artificial
  Probe
cactaccacttttaggcctgaactg

SEQ ID NO: 331990 - DNA, 25 bp, Artificial
  Probe
taacgcctgccgtcttggaagatgt

SEQ ID NO: 331991 - DNA, 25 bp, Artificial
  Probe
gcaaaagcgaccttggtgatgaaga

SEQ ID NO: 331992 - DNA, 25 bp, Artificial
  Probe
tgaagttttccagaagttggtacct

SEQ ID NO: 331993 - DNA, 25 bp, Artificial
  Probe
gctatccagttaaccttcaaacagg

SEQ ID NO: 331994 - DNA, 25 bp, Artificial
  Probe
tttcaggagggcagaagtctctggt

SEQ ID NO: 331995 - DNA, 25 bp, Artificial
  Probe
cctgaagcagttgtttcggaaactt

SEQ ID NO: 331996 - DNA, 25 bp, Artificial
  Probe
tcatttacaggaaagcaaggcgaga

SEQ ID NO: 331997 - DNA, 25 bp, Artificial
  Probe
cgacagggcatgctgttgaagaaga

SEQ ID NO: 331998 - DNA, 25 bp, Artificial
  Probe
agatcgaccaagctttggatgctca

SEQ ID NO: 331999 - DNA, 25 bp, Artificial
  Probe
gaactgcttgagtctgctgataaat

SEQ ID NO: 332000 - DNA, 25 bp, Artificial
  Probe
cacagaaaagctgtgtcagatatga

SEQ ID NO: 332001 - DNA, 25 bp, Artificial
  Probe
cttccccaggaagcatttgaaaagt

SEQ ID NO: 332002 - DNA, 25 bp, Artificial
  Probe
gtgtgaccctgctcctttctacctg

SEQ ID NO: 332003 - DNA, 25 bp, Artificial
  Probe
tactcgaacttagaaaatatgaagc

SEQ ID NO: 332004 - DNA, 25 bp, Artificial
  Probe
cattgacaaaacagaagctggaatt

SEQ ID NO: 332005 - DNA, 25 bp, Artificial
  Probe
agaagtacagccatgtcaacaagaa

SEQ ID NO: 332006 - DNA, 25 bp, Artificial
  Probe
cagccagtctcaggacgaaggagag

SEQ ID NO: 332007 - DNA, 25 bp, Artificial
  Probe
tctctgagcagaaggagaaactgat

SEQ ID NO: 332008 - DNA, 25 bp, Artificial
  Probe
gatggccaaagactttgtagaagac

SEQ ID NO: 332009 - DNA, 25 bp, Artificial
  Probe
attatggaactagctgtacacgccc

SEQ ID NO: 332010 - DNA, 25 bp, Artificial
  Probe
ctccagaaaagcatggagcgctgga

SEQ ID NO: 332011 - DNA, 25 bp, Artificial
  Probe
agatccgagagctggggtcccttcc

SEQ ID NO: 332012 - DNA, 25 bp, Artificial
  Probe
aattaaagagctccagaaaagcatg

SEQ ID NO: 332013 - DNA, 25 bp, Artificial
  Probe
gagaaatgcagcagctttcaggagg

SEQ ID NO: 332014 - DNA, 25 bp, Artificial
  Probe
acactaaagagctggagaagatgac

SEQ ID NO: 332015 - DNA, 25 bp, Artificial
  Probe
gttaaccttcaaacaggtatctaag

SEQ ID NO: 332016 - DNA, 25 bp, Artificial
  Probe
ataaggtagtcacatcgacgtgatc

SEQ ID NO: 332017 - DNA, 25 bp, Artificial
  Probe
ctacaagtcaatcatggagttgatg

SEQ ID NO: 332018 - DNA, 25 bp, Artificial
  Probe
aatgttacatttctacgtatagtcg

SEQ ID NO: 332019 - DNA, 25 bp, Artificial
  Probe
ggggctacaagtcaatcatggagtt

SEQ ID NO: 332020 - DNA, 25 bp, Artificial
  Probe
taccagacactgagcctgaagcagt

SEQ ID NO: 332021 - DNA, 25 bp, Artificial
  Probe
gtgcaacacagagttgaagaagtac

SEQ ID NO: 332022 - DNA, 25 bp, Artificial
  Probe
gggcctcatcatgcacatgggcctt

SEQ ID NO: 332023 - DNA, 25 bp, Artificial
  Probe
tgttgctacctgagaccaaagggaa

SEQ ID NO: 332024 - DNA, 25 bp, Artificial
  Probe
ggtctctcttcagaacctgacacca

SEQ ID NO: 332025 - DNA, 25 bp, Artificial
  Probe
tcctggacttggtcagaacccctca

SEQ ID NO: 332026 - DNA, 25 bp, Artificial
  Probe
gctgaaaattaccattgcatgcttg

SEQ ID NO: 332027 - DNA, 25 bp, Artificial
  Probe
atcctcaccatcgaccgggttggtc

SEQ ID NO: 332028 - DNA, 25 bp, Artificial
  Probe
atctacagtggctgaaaattaccat

SEQ ID NO: 332029 - DNA, 25 bp, Artificial
  Probe
cattgctttactggattcgttatgg

SEQ ID NO: 332030 - DNA, 25 bp, Artificial
  Probe
gaaagggcatcattgctgctggagc

SEQ ID NO: 332031 - DNA, 25 bp, Artificial
  Probe
tatgaaatggtctgcctggtcaatg

SEQ ID NO: 332032 - DNA, 25 bp, Artificial
  Probe
tgtcaaatatggtggcaggagcagc

SEQ ID NO: 332033 - DNA, 25 bp, Artificial
  Probe
ggatttgctatcaaatcgccttcac

SEQ ID NO: 332034 - DNA, 25 bp, Artificial
  Probe
gagatggctacaatttgctgtgact

SEQ ID NO: 332035 - DNA, 25 bp, Artificial
  Probe
taaggaaacacacgttgatcttgat

SEQ ID NO: 332036 - DNA, 25 bp, Artificial
  Probe
aggagcagcctgtctagcctctgtt

SEQ ID NO: 332037 - DNA, 25 bp, Artificial
  Probe
atcaaatcgccttcaccgttggcct

SEQ ID NO: 332038 - DNA, 25 bp, Artificial
  Probe
tcgaggatgccgagaatatgcagag

SEQ ID NO: 332039 - DNA, 25 bp, Artificial
  Probe
aagagaatttacctccaagtcaagc

SEQ ID NO: 332040 - DNA, 25 bp, Artificial
  Probe
caccagatgaggacgctggcaagaa

SEQ ID NO: 332041 - DNA, 25 bp, Artificial
  Probe
ttgctgtgactctgcccaacttctg

SEQ ID NO: 332042 - DNA, 25 bp, Artificial
  Probe
accgttggcctcctgatcctggctg

SEQ ID NO: 332043 - DNA, 25 bp, Artificial
  Probe
cagaccgtccgctaagctaaaaaga

SEQ ID NO: 332044 - DNA, 25 bp, Artificial
  Probe
tctacagtggctgaaaattaccatt

SEQ ID NO: 332045 - DNA, 25 bp, Artificial
  Probe
catcaaaccaaaatacccaagggag

SEQ ID NO: 332046 - DNA, 25 bp, Artificial
  Probe
aatacccaagggagctgtgggccag

SEQ ID NO: 332047 - DNA, 25 bp, Artificial
  Probe
agctctgttctctaccagggcctca

SEQ ID NO: 332048 - DNA, 25 bp, Artificial
  Probe
cgctggggcacttgtgctgttgcta

SEQ ID NO: 332049 - DNA, 25 bp, Artificial
  Probe
gctgatctcccagaacaaaatcgta

SEQ ID NO: 332050 - DNA, 25 bp, Artificial
  Probe
tcgtctaccgtctcacggacatctg

SEQ ID NO: 332051 - DNA, 25 bp, Artificial
  Probe
tctgctctcagcactcccaggaaat

SEQ ID NO: 332052 - DNA, 25 bp, Artificial
  Probe
tacccctgaactccatcagcaagag

SEQ ID NO: 332053 - DNA, 25 bp, Artificial
  Probe
cctggtggagtttccagccgccttc

SEQ ID NO: 332054 - DNA, 25 bp, Artificial
  Probe
gagctgtgggccaggacaaccaact

SEQ ID NO: 332055 - DNA, 25 bp, Artificial
  Probe
tatggtggcaggagcagcctgtcta

SEQ ID NO: 332056 - DNA, 25 bp, Artificial
  Probe
ctgaggccagagatggagcttctct

SEQ ID NO: 332057 - DNA, 25 bp, Artificial
  Probe
ttatccctgatgatctacagtggct

SEQ ID NO: 332058 - DNA, 25 bp, Artificial
  Probe
atgccgagaatatgcagaggccaag

SEQ ID NO: 332059 - DNA, 25 bp, Artificial
  Probe
acccctcagataaggaaacacacgt

SEQ ID NO: 332060 - DNA, 25 bp, Artificial
  Probe
atttgctgtggttggccttgtcgct

SEQ ID NO: 332061 - DNA, 25 bp, Artificial
  Probe
ctctgcctgagaccatcgaggatgc

SEQ ID NO: 332062 - DNA, 25 bp, Artificial
  Probe
gatgtgtcaagctcttcctcccagc

SEQ ID NO: 332063 - DNA, 25 bp, Artificial
  Probe
tctgcttcctgctctatttctggtg

SEQ ID NO: 332064 - DNA, 25 bp, Artificial
  Probe
ttggcggcatcatcacgcctttcct

SEQ ID NO: 332065 - DNA, 25 bp, Artificial
  Probe
tccgccctggtggagtttccagccg

SEQ ID NO: 332066 - DNA, 25 bp, Artificial
  Probe
cacatacatcaggaatcttggtgtc

SEQ ID NO: 332067 - DNA, 25 bp, Artificial
  Probe
ccttgcaggggacaacatctacctg

SEQ ID NO: 332068 - DNA, 25 bp, Artificial
  Probe
ctttgctcacagcaggcgttactgc

SEQ ID NO: 332069 - DNA, 25 bp, Artificial
  Probe
agtgatcccctgagggagtacaaca

SEQ ID NO: 332070 - DNA, 25 bp, Artificial
  Probe
ggagtacaacaactacggctgctac

SEQ ID NO: 332071 - DNA, 25 bp, Artificial
  Probe
tcacagcaggcgttactgcacacag

SEQ ID NO: 332072 - DNA, 25 bp, Artificial
  Probe
gctttgctcacagcaggcgttactg

SEQ ID NO: 332073 - DNA, 25 bp, Artificial
  Probe
agcaggcgttactgcacacagcatc

SEQ ID NO: 332074 - DNA, 25 bp, Artificial
  Probe
tcaggcaccccagtggacgacttag

SEQ ID NO: 332075 - DNA, 25 bp, Artificial
  Probe
gagtacaacaactacggctgctact

SEQ ID NO: 332076 - DNA, 25 bp, Artificial
  Probe
gttactgcacacagcatcagcactc

SEQ ID NO: 332077 - DNA, 25 bp, Artificial
  Probe
ggagtgatcccctgagggagtacaa

SEQ ID NO: 332078 - DNA, 25 bp, Artificial
  Probe
atccccgggagtgatcccctgaggg

SEQ ID NO: 332079 - DNA, 25 bp, Artificial
  Probe
tcccctgagggagtacaacaactac

SEQ ID NO: 332080 - DNA, 25 bp, Artificial
  Probe
ggacgacttagacaggtgctgccag

SEQ ID NO: 332081 - DNA, 25 bp, Artificial
  Probe
tactgcacacagcatcagcactcgg

SEQ ID NO: 332082 - DNA, 25 bp, Artificial
  Probe
cacagcatcagcactcgggctgtgt

SEQ ID NO: 332083 - DNA, 25 bp, Artificial
  Probe
agcttcatctgcaactgtgaccggc

SEQ ID NO: 332084 - DNA, 25 bp, Artificial
  Probe
tgcacacagcatcagcactcgggct

SEQ ID NO: 332085 - DNA, 25 bp, Artificial
  Probe
gagtgatcccctgagggagtacaac

SEQ ID NO: 332086 - DNA, 25 bp, Artificial
  Probe
catctgcaactgtgaccggcaggcc

SEQ ID NO: 332087 - DNA, 25 bp, Artificial
  Probe
atctgcaactgtgaccggcaggccg

SEQ ID NO: 332088 - DNA, 25 bp, Artificial
  Probe
ggcgttactgcacacagcatcagca

SEQ ID NO: 332089 - DNA, 25 bp, Artificial
  Probe
gcaccccagtggacgacttagacag

SEQ ID NO: 332090 - DNA, 25 bp, Artificial
  Probe
caggcgttactgcacacagcatcag

SEQ ID NO: 332091 - DNA, 25 bp, Artificial
  Probe
tttgctcacagcaggcgttactgca

SEQ ID NO: 332092 - DNA, 25 bp, Artificial
  Probe
atcccctgagggagtacaacaacta

SEQ ID NO: 332093 - DNA, 25 bp, Artificial
  Probe
cgttactgcacacagcatcagcact

SEQ ID NO: 332094 - DNA, 25 bp, Artificial
  Probe
actgcacacagcatcagcactcggg

SEQ ID NO: 332095 - DNA, 25 bp, Artificial
  Probe
caggcaccccagtggacgacttaga

SEQ ID NO: 332096 - DNA, 25 bp, Artificial
  Probe
cagcaggcgttactgcacacagcat

SEQ ID NO: 332097 - DNA, 25 bp, Artificial
  Probe
gggagtacaacaactacggctgcta

SEQ ID NO: 332098 - DNA, 25 bp, Artificial
  Probe
ccccagtggacgacttagacaggtg

SEQ ID NO: 332099 - DNA, 25 bp, Artificial
  Probe
tctgcaactgtgaccggcaggccgc

SEQ ID NO: 332100 - DNA, 25 bp, Artificial
  Probe
agtacaacaactacggctgctactg

SEQ ID NO: 332101 - DNA, 25 bp, Artificial
  Probe
ttactgcacacagcatcagcactcg

SEQ ID NO: 332102 - DNA, 25 bp, Artificial
  Probe
acagcaggcgttactgcacacagca

SEQ ID NO: 332103 - DNA, 25 bp, Artificial
  Probe
gcacacagcatcagcactcgggctg

SEQ ID NO: 332104 - DNA, 25 bp, Artificial
  Probe
ttcatctgcaactgtgaccggcagg

SEQ ID NO: 332105 - DNA, 25 bp, Artificial
  Probe
tgctttgctcacagcaggcgttact

SEQ ID NO: 332106 - DNA, 25 bp, Artificial
  Probe
catccccgggagtgatcccctgagg

SEQ ID NO: 332107 - DNA, 25 bp, Artificial
  Probe
cacagcaggcgttactgcacacagc

SEQ ID NO: 332108 - DNA, 25 bp, Artificial
  Probe
cacacagcatcagcactcgggctgt

SEQ ID NO: 332109 - DNA, 25 bp, Artificial
  Probe
ctgctttgctcacagcaggcgttac

SEQ ID NO: 332110 - DNA, 25 bp, Artificial
  Probe
aggcaccccagtggacgacttagac

SEQ ID NO: 332111 - DNA, 25 bp, Artificial
  Probe
aggcgttactgcacacagcatcagc

SEQ ID NO: 332112 - DNA, 25 bp, Artificial
  Probe
cagcactcgggctgtgtggcagttc

SEQ ID NO: 332113 - DNA, 25 bp, Artificial
  Probe
ggcaccccagtggacgacttagaca

SEQ ID NO: 332114 - DNA, 25 bp, Artificial
  Probe
catatgacgaccaaccaaccacagg

SEQ ID NO: 332115 - DNA, 25 bp, Artificial
  Probe
ggactggcacatccatccaaatacc

SEQ ID NO: 332116 - DNA, 25 bp, Artificial
  Probe
gttctctctactctgtcagccaaag

SEQ ID NO: 332117 - DNA, 25 bp, Artificial
  Probe
actggactctgagataatagtagac

SEQ ID NO: 332118 - DNA, 25 bp, Artificial
  Probe
tctatcgacgtagatagattcaact

SEQ ID NO: 332119 - DNA, 25 bp, Artificial
  Probe
atgaaatgagttctctctactctgt

SEQ ID NO: 332120 - DNA, 25 bp, Artificial
  Probe
agataatagtagacccagcagcatg

SEQ ID NO: 332121 - DNA, 25 bp, Artificial
  Probe
atagcaggaaactgcaccaagtaat

SEQ ID NO: 332122 - DNA, 25 bp, Artificial
  Probe
ctattacgtatagcaggaaactgca

SEQ ID NO: 332123 - DNA, 25 bp, Artificial
  Probe
ttgctcttggtaaaaggagctacca

SEQ ID NO: 332124 - DNA, 25 bp, Artificial
  Probe
aatgatccagccactcatatgacga

SEQ ID NO: 332125 - DNA, 25 bp, Artificial
  Probe
aatagtagacccagcagcatgctac

SEQ ID NO: 332126 - DNA, 25 bp, Artificial
  Probe
ctctactctgtcagccaaaggtttg

SEQ ID NO: 332127 - DNA, 25 bp, Artificial
  Probe
ctttgctttcccaatatgaaatgag

SEQ ID NO: 332128 - DNA, 25 bp, Artificial
  Probe
tgcaccaagtaatgtccaataatag

SEQ ID NO: 332129 - DNA, 25 bp, Artificial
  Probe
gtttgcttcactggactctgagata

SEQ ID NO: 332130 - DNA, 25 bp, Artificial
  Probe
tgggttctggcctgctatcaggata

SEQ ID NO: 332131 - DNA, 25 bp, Artificial
  Probe
actctgtcagccaaaggtttgcttc

SEQ ID NO: 332132 - DNA, 25 bp, Artificial
  Probe
ttacgtatagcaggaaactgcacca

SEQ ID NO: 332133 - DNA, 25 bp, Artificial
  Probe
gatccagccactcatatgacgacca

SEQ ID NO: 332134 - DNA, 25 bp, Artificial
  Probe
gaaactgcaccaagtaatgtccaat

SEQ ID NO: 332135 - DNA, 25 bp, Artificial
  Probe
tggactggcacatccatccaaatac

SEQ ID NO: 332136 - DNA, 25 bp, Artificial
  Probe
cagcttcaagtacagcctagaaaaa

SEQ ID NO: 332137 - DNA, 25 bp, Artificial
  Probe
atagtagacccagcagcatgctact

SEQ ID NO: 332138 - DNA, 25 bp, Artificial
  Probe
caaagagtaacagcttcaagtacag

SEQ ID NO: 332139 - DNA, 25 bp, Artificial
  Probe
actcagtttcactttctgtcttggg

SEQ ID NO: 332140 - DNA, 25 bp, Artificial
  Probe
actgtcttggactggcacatccatc

SEQ ID NO: 332141 - DNA, 25 bp, Artificial
  Probe
ttgttcttgacaaagagtaacagct

SEQ ID NO: 332142 - DNA, 25 bp, Artificial
  Probe
aagagtaacagcttcaagtacagcc

SEQ ID NO: 332143 - DNA, 25 bp, Artificial
  Probe
tttcactttctgtcttgggggaaat

SEQ ID NO: 332144 - DNA, 25 bp, Artificial
  Probe
cagtttcactttctgtcttggggga

SEQ ID NO: 332145 - DNA, 25 bp, Artificial
  Probe
ttattaatcagaagacagcttgctc

SEQ ID NO: 332146 - DNA, 25 bp, Artificial
  Probe
cactttctgtcttgggggaaatgat

SEQ ID NO: 332147 - DNA, 25 bp, Artificial
  Probe
gagtaacagcttcaagtacagccta

SEQ ID NO: 332148 - DNA, 25 bp, Artificial
  Probe
cctgctatcaggataaatctatcga

SEQ ID NO: 332149 - DNA, 25 bp, Artificial
  Probe
attaatcagaagacagcttgctctt

SEQ ID NO: 332150 - DNA, 25 bp, Artificial
  Probe
gagctaccattgactctaattttga

SEQ ID NO: 332151 - DNA, 25 bp, Artificial
  Probe
aaaggagctaccattgactctaatt

SEQ ID NO: 332152 - DNA, 25 bp, Artificial
  Probe
attgttcttgacaaagagtaacagc

SEQ ID NO: 332153 - DNA, 25 bp, Artificial
  Probe
agtagacccagcagcatgctactat

SEQ ID NO: 332154 - DNA, 25 bp, Artificial
  Probe
atctatcgacgtagatagattcaac

SEQ ID NO: 332155 - DNA, 25 bp, Artificial
  Probe
gagttctctctactctgtcagccaa

SEQ ID NO: 332156 - DNA, 25 bp, Artificial
  Probe
ccaagtaatgtccaataataggaag

SEQ ID NO: 332157 - DNA, 25 bp, Artificial
  Probe
gctttcccaatatgaaatgagttct

SEQ ID NO: 332158 - DNA, 25 bp, Artificial
  Probe
gggaaatgatccagccactcatatg

SEQ ID NO: 332159 - DNA, 25 bp, Artificial
  Probe
aggtttgcttcactggactctgaga

SEQ ID NO: 332160 - DNA, 25 bp, Artificial
  Probe
gttgtcttcttcttgcttcgaaata

SEQ ID NO: 332161 - DNA, 25 bp, Artificial
  Probe
cctatctctgggtgctctccactgg

SEQ ID NO: 332162 - DNA, 25 bp, Artificial
  Probe
cttctgggtggcagaagtgatctgt

SEQ ID NO: 332163 - DNA, 25 bp, Artificial
  Probe
tgctcatccacaacgaacctgctga

SEQ ID NO: 332164 - DNA, 25 bp, Artificial
  Probe
gctcatgatggctggcatggcagca

SEQ ID NO: 332165 - DNA, 25 bp, Artificial
  Probe
agtcatagctaatgagagtgcacct

SEQ ID NO: 332166 - DNA, 25 bp, Artificial
  Probe
actggggccagttcttccttatcca

SEQ ID NO: 332167 - DNA, 25 bp, Artificial
  Probe
tcgccacagcctgttgctgctcatg

SEQ ID NO: 332168 - DNA, 25 bp, Artificial
  Probe
gttacccttcagtaccatcgccaag

SEQ ID NO: 332169 - DNA, 25 bp, Artificial
  Probe
cctggccctgtctgggtcactgtgt

SEQ ID NO: 332170 - DNA, 25 bp, Artificial
  Probe
taccatcgccaagcactatagctgg

SEQ ID NO: 332171 - DNA, 25 bp, Artificial
  Probe
tgctgtacagactggggccagttct

SEQ ID NO: 332172 - DNA, 25 bp, Artificial
  Probe
ggctcgtcaaaggaggagagcaccc

SEQ ID NO: 332173 - DNA, 25 bp, Artificial
  Probe
ctcgtcaaaggaggagagcacccta

SEQ ID NO: 332174 - DNA, 25 bp, Artificial
  Probe
gggtcactgtgtgtggttgtctcct

SEQ ID NO: 332175 - DNA, 25 bp, Artificial
  Probe
ttgccttgtttggagtcatagctaa

SEQ ID NO: 332176 - DNA, 25 bp, Artificial
  Probe
gaagtgatctgtatagccagcacag

SEQ ID NO: 332177 - DNA, 25 bp, Artificial
  Probe
tagctggagcacagccttctgggtg

SEQ ID NO: 332178 - DNA, 25 bp, Artificial
  Probe
cctcttccgggtaacagtgaccagc

SEQ ID NO: 332179 - DNA, 25 bp, Artificial
  Probe
tgccctagaggttggaggccttgta

SEQ ID NO: 332180 - DNA, 25 bp, Artificial
  Probe
accctggccctgtctgggtcactgt

SEQ ID NO: 332181 - DNA, 25 bp, Artificial
  Probe
acctcccaacttgtgtggtacctct

SEQ ID NO: 332182 - DNA, 25 bp, Artificial
  Probe
tattgtggggctcatggccaatgtg

SEQ ID NO: 332183 - DNA, 25 bp, Artificial
  Probe
aagcactatagctggagcacagcct

SEQ ID NO: 332184 - DNA, 25 bp, Artificial
  Probe
ctatcttggcgacaatccttgctca

SEQ ID NO: 332185 - DNA, 25 bp, Artificial
  Probe
caagatgggccgagtatccaagaag

SEQ ID NO: 332186 - DNA, 25 bp, Artificial
  Probe
gcaaaaagggctcgtcaaaggagga

SEQ ID NO: 332187 - DNA, 25 bp, Artificial
  Probe
tcagacagggctatggcaaaggcag

SEQ ID NO: 332188 - DNA, 25 bp, Artificial
  Probe
ggctggcatggcagcatccatgttc

SEQ ID NO: 332189 - DNA, 25 bp, Artificial
  Probe
accagcatgaacctggctggaagcc

SEQ ID NO: 332190 - DNA, 25 bp, Artificial
  Probe
tggctacctcgtggtctttggggta

SEQ ID NO: 332191 - DNA, 25 bp, Artificial
  Probe
gctgtctgtgtatgggaaccctcgc

SEQ ID NO: 332192 - DNA, 25 bp, Artificial
  Probe
tgttggactccgaaatctggaccct

SEQ ID NO: 332193 - DNA, 25 bp, Artificial
  Probe
actgtgtgtggttgtctccttcttc

SEQ ID NO: 332194 - DNA, 25 bp, Artificial
  Probe
ggtaaagacttgctgtacagactgg

SEQ ID NO: 332195 - DNA, 25 bp, Artificial
  Probe
atatccgcaccaagatgggccgagt

SEQ ID NO: 332196 - DNA, 25 bp, Artificial
  Probe
ttggaggccttgtaggcagcattgc

SEQ ID NO: 332197 - DNA, 25 bp, Artificial
  Probe
agtaccatcgccaagcactatagct

SEQ ID NO: 332198 - DNA, 25 bp, Artificial
  Probe
ctggatcctggtattgggagctgta

SEQ ID NO: 332199 - DNA, 25 bp, Artificial
  Probe
ggtttctcttcttatggtcccattg

SEQ ID NO: 332200 - DNA, 25 bp, Artificial
  Probe
cagggctgtctgtgtatgggaaccc

SEQ ID NO: 332201 - DNA, 25 bp, Artificial
  Probe
cagccttctgggtggcagaagtgat

SEQ ID NO: 332202 - DNA, 25 bp, Artificial
  Probe
gtgggtagttcctacatcagtgccc

SEQ ID NO: 332203 - DNA, 25 bp, Artificial
  Probe
tggatttctggctgggttacccttc

SEQ ID NO: 332204 - DNA, 25 bp, Artificial
  Probe
cttgcttcgaaatatccgcaccaag

SEQ ID NO: 332205 - DNA, 25 bp, Artificial
  Probe
gcatccatgttcctcttccgggtaa

SEQ ID NO: 332206 - DNA, 25 bp, Artificial
  Probe
gggacagcagagtactctcgtctgg

SEQ ID NO: 332207 - DNA, 25 bp, Artificial
  Probe
tgaccagggagtgacaccggcgatc

SEQ ID NO: 332208 - DNA, 25 bp, Artificial
  Probe
atgaatgaactcgtaagtgtacctt

SEQ ID NO: 332209 - DNA, 25 bp, Artificial
  Probe
aattcccttcttggacttctgtatg

SEQ ID NO: 332210 - DNA, 25 bp, Artificial
  Probe
ctgggcatagccacccgagtgtcca

SEQ ID NO: 332211 - DNA, 25 bp, Artificial
  Probe
ccctgctctgtctgaggtaggcgga

SEQ ID NO: 332212 - DNA, 25 bp, Artificial
  Probe
accgtgctggggataaggtcaatgt

SEQ ID NO: 332213 - DNA, 25 bp, Artificial
  Probe
cagaattctctgtgaacatgaagag

SEQ ID NO: 332214 - DNA, 25 bp, Artificial
  Probe
tgctgccccgagtgggtatgtgacc

SEQ ID NO: 332215 - DNA, 25 bp, Artificial
  Probe
tgcctctgctgatgctccttggcca

SEQ ID NO: 332216 - DNA, 25 bp, Artificial
  Probe
agacctttaaacctaggctatactg

SEQ ID NO: 332217 - DNA, 25 bp, Artificial
  Probe
tcccgctgtgcagtgaggatgtgac

SEQ ID NO: 332218 - DNA, 25 bp, Artificial
  Probe
actggagatccaacgccgcctgtgt

SEQ ID NO: 332219 - DNA, 25 bp, Artificial
  Probe
gaataaacacccaaatcaagcgtga

SEQ ID NO: 332220 - DNA, 25 bp, Artificial
  Probe
gaggactagtctagcctagaataaa

SEQ ID NO: 332221 - DNA, 25 bp, Artificial
  Probe
ctcccgctgtgcagtgaggatgtga

SEQ ID NO: 332222 - DNA, 25 bp, Artificial
  Probe
ctgtatgcttgtaaccaaagatgat

SEQ ID NO: 332223 - DNA, 25 bp, Artificial
  Probe
tcttcagcatgagaaagacaaggga

SEQ ID NO: 332224 - DNA, 25 bp, Artificial
  Probe
gtgtaccttccctgacctgagaaca

SEQ ID NO: 332225 - DNA, 25 bp, Artificial
  Probe
cctgctcgggaagtattcaggggca

SEQ ID NO: 332226 - DNA, 25 bp, Artificial
  Probe
agcagattgcctgaaacttccaatt

SEQ ID NO: 332227 - DNA, 25 bp, Artificial
  Probe
agccagggcctggtttgtcagcctg

SEQ ID NO: 332228 - DNA, 25 bp, Artificial
  Probe
taggcggagcaggtgaccagctcca

SEQ ID NO: 332229 - DNA, 25 bp, Artificial
  Probe
gatgacggtggcttcacctgcctcc

SEQ ID NO: 332230 - DNA, 25 bp, Artificial
  Probe
gagatgaatcacactgtccttaaga

SEQ ID NO: 332231 - DNA, 25 bp, Artificial
  Probe
tgtggctgctgtaaagtgtgtgcac

SEQ ID NO: 332232 - DNA, 25 bp, Artificial
  Probe
ctcttggatgaggatgacggtgact

SEQ ID NO: 332233 - DNA, 25 bp, Artificial
  Probe
tctcttggatgaggatgacggtgac

SEQ ID NO: 332234 - DNA, 25 bp, Artificial
  Probe
gaggctgacggagtcctgcgaacac

SEQ ID NO: 332235 - DNA, 25 bp, Artificial
  Probe
ccagggagtgacaccggcgatccag

SEQ ID NO: 332236 - DNA, 25 bp, Artificial
  Probe
tcctgcctctgctgatgctccttgg

SEQ ID NO: 332237 - DNA, 25 bp, Artificial
  Probe
cttaagaaattcctcaaagtccagg

SEQ ID NO: 332238 - DNA, 25 bp, Artificial
  Probe
acgccccaagagaatacaggtgcca

SEQ ID NO: 332239 - DNA, 25 bp, Artificial
  Probe
tggagcacagcctggggcccctgct

SEQ ID NO: 332240 - DNA, 25 bp, Artificial
  Probe
tgcctggcagccaggagccacagct

SEQ ID NO: 332241 - DNA, 25 bp, Artificial
  Probe
ccgcaggtacctggatggagagacc

SEQ ID NO: 332242 - DNA, 25 bp, Artificial
  Probe
tccgcggcgcaaggacaccaacttt

SEQ ID NO: 332243 - DNA, 25 bp, Artificial
  Probe
ccatggggctgtgtgtctcttggat

SEQ ID NO: 332244 - DNA, 25 bp, Artificial
  Probe
ggatgcggatacagggcctgccatc

SEQ ID NO: 332245 - DNA, 25 bp, Artificial
  Probe
ctgagaacaccctgcctgctcggga

SEQ ID NO: 332246 - DNA, 25 bp, Artificial
  Probe
gatgaatcacactgtccttaagaaa

SEQ ID NO: 332247 - DNA, 25 bp, Artificial
  Probe
caggaaggctccacacctctaacag

SEQ ID NO: 332248 - DNA, 25 bp, Artificial
  Probe
tcaatgttaggaccagacagcagat

SEQ ID NO: 332249 - DNA, 25 bp, Artificial
  Probe
ggttctcctggctcattcctcaaaa

SEQ ID NO: 332250 - DNA, 25 bp, Artificial
  Probe
acagccagggcctttctcttcagca

SEQ ID NO: 332251 - DNA, 25 bp, Artificial
  Probe
aaggacaccaactttctgcccttgt

SEQ ID NO: 332252 - DNA, 25 bp, Artificial
  Probe
cccgccagtgtgatttgcagggtcc

SEQ ID NO: 332253 - DNA, 25 bp, Artificial
  Probe
ttctcttctctcaccatgggtcagc

SEQ ID NO: 332254 - DNA, 25 bp, Artificial
  Probe
acagaccggagagcaacgggctttg

SEQ ID NO: 332255 - DNA, 25 bp, Artificial
  Probe
aaatgtagctgtgtattgtccccgc

SEQ ID NO: 332256 - DNA, 25 bp, Artificial
  Probe
agccattctcttctctcaccatggg

SEQ ID NO: 332257 - DNA, 25 bp, Artificial
  Probe
actctgtaaagcagcggccgtcctg

SEQ ID NO: 332258 - DNA, 25 bp, Artificial
  Probe
caagaacccaggttctgatgtgaca

SEQ ID NO: 332259 - DNA, 25 bp, Artificial
  Probe
tcaccatgggtcagccctattgcct

SEQ ID NO: 332260 - DNA, 25 bp, Artificial
  Probe
ccaggttctgatgtgacaaaagcca

SEQ ID NO: 332261 - DNA, 25 bp, Artificial
  Probe
tggctccatggtgctctcggggatc

SEQ ID NO: 332262 - DNA, 25 bp, Artificial
  Probe
ccagtgtgatttgcagggtcctccc

SEQ ID NO: 332263 - DNA, 25 bp, Artificial
  Probe
tataccccacagaccggagagcaac

SEQ ID NO: 332264 - DNA, 25 bp, Artificial
  Probe
tctcaccatgggtcagccctattgc

SEQ ID NO: 332265 - DNA, 25 bp, Artificial
  Probe
atgggtcagccctattgcctgactc

SEQ ID NO: 332266 - DNA, 25 bp, Artificial
  Probe
caccgtgctcgtgtgtggaggactc

SEQ ID NO: 332267 - DNA, 25 bp, Artificial
  Probe
cccacagaccggagagcaacgggct

SEQ ID NO: 332268 - DNA, 25 bp, Artificial
  Probe
atccatgatgataggcatgctgtgc

SEQ ID NO: 332269 - DNA, 25 bp, Artificial
  Probe
agagcaacgggctttggcttcttga

SEQ ID NO: 332270 - DNA, 25 bp, Artificial
  Probe
gccgtcctgggaaacttaatattcg

SEQ ID NO: 332271 - DNA, 25 bp, Artificial
  Probe
ctaggtggctccatggtgctctcgg

SEQ ID NO: 332272 - DNA, 25 bp, Artificial
  Probe
cccgacacaagaacccaggttctga

SEQ ID NO: 332273 - DNA, 25 bp, Artificial
  Probe
gtaaatgtagctgtgtattgtcccc

SEQ ID NO: 332274 - DNA, 25 bp, Artificial
  Probe
cttcttgaacgcactctgtaaagca

SEQ ID NO: 332275 - DNA, 25 bp, Artificial
  Probe
cttttcctaattgtgatgttcctgc

SEQ ID NO: 332276 - DNA, 25 bp, Artificial
  Probe
cttttgctgtgacgtaaatgtagct

SEQ ID NO: 332277 - DNA, 25 bp, Artificial
  Probe
gaaacttaatattcggctccttggt

SEQ ID NO: 332278 - DNA, 25 bp, Artificial
  Probe
gatgataggcatgctgtgcttgtac

SEQ ID NO: 332279 - DNA, 25 bp, Artificial
  Probe
tggccaagtatcagaactcaaactt

SEQ ID NO: 332280 - DNA, 25 bp, Artificial
  Probe
aggatcgggcgcttaacgatgctag

SEQ ID NO: 332281 - DNA, 25 bp, Artificial
  Probe
ctgctggcttccaccgtgctcgtgt

SEQ ID NO: 332282 - DNA, 25 bp, Artificial
  Probe
aaaggtggccaagtatcagaactca

SEQ ID NO: 332283 - DNA, 25 bp, Artificial
  Probe
tccatggtgctctcggggatcagct

SEQ ID NO: 332284 - DNA, 25 bp, Artificial
  Probe
gcgccttgttatcttttcctaattg

SEQ ID NO: 332285 - DNA, 25 bp, Artificial
  Probe
aagcaatccctatcctgctggcttc

SEQ ID NO: 332286 - DNA, 25 bp, Artificial
  Probe
ttaatattcggctccttggtcagca

SEQ ID NO: 332287 - DNA, 25 bp, Artificial
  Probe
caaagcaatccctatcctgctggct

SEQ ID NO: 332288 - DNA, 25 bp, Artificial
  Probe
ttggcttcttgaacgcactctgtaa

SEQ ID NO: 332289 - DNA, 25 bp, Artificial
  Probe
tgcccgacacaagaacccaggttct

SEQ ID NO: 332290 - DNA, 25 bp, Artificial
  Probe
agtatcagaactcaaacttttgctg

SEQ ID NO: 332291 - DNA, 25 bp, Artificial
  Probe
cggtggaactataccccacagaccg

SEQ ID NO: 332292 - DNA, 25 bp, Artificial
  Probe
aagcagcggccgtcctgggaaactt

SEQ ID NO: 332293 - DNA, 25 bp, Artificial
  Probe
ctcaaggcttcagagtttttatgta

SEQ ID NO: 332294 - DNA, 25 bp, Artificial
  Probe
gaacgcactctgtaaagcagcggcc

SEQ ID NO: 332295 - DNA, 25 bp, Artificial
  Probe
gtgctctcggggatcagctgcttct

SEQ ID NO: 332296 - DNA, 25 bp, Artificial
  Probe
tgatggacaggatcgggcgcttaac

SEQ ID NO: 332297 - DNA, 25 bp, Artificial
  Probe
ggtcagcatcaccaaagcaatccct

SEQ ID NO: 332298 - DNA, 25 bp, Artificial
  Probe
tcctgtgtcagaacaaaggactgtt

SEQ ID NO: 332299 - DNA, 25 bp, Artificial
  Probe
agaagcaacatcaggatttctccgc

SEQ ID NO: 332300 - DNA, 25 bp, Artificial
  Probe
agtccggaggagatggtgactttca

SEQ ID NO: 332301 - DNA, 25 bp, Artificial
  Probe
ctctgaatcagatggcgaagagaac

SEQ ID NO: 332302 - DNA, 25 bp, Artificial
  Probe
cagcaactgcagcagctgcgggaca

SEQ ID NO: 332303 - DNA, 25 bp, Artificial
  Probe
ttggcgaagaccagactcaggacgg

SEQ ID NO: 332304 - DNA, 25 bp, Artificial
  Probe
gcactctgggggaaatccccactta

SEQ ID NO: 332305 - DNA, 25 bp, Artificial
  Probe
tgagacgggcaggaaactgactccc

SEQ ID NO: 332306 - DNA, 25 bp, Artificial
  Probe
gaaactggagtctcgccaacgtggc

SEQ ID NO: 332307 - DNA, 25 bp, Artificial
  Probe
gagtacaggggcttcacccaggact

SEQ ID NO: 332308 - DNA, 25 bp, Artificial
  Probe
gcggctgccctgctcctgtgtcaga

SEQ ID NO: 332309 - DNA, 25 bp, Artificial
  Probe
caagcccgatgttaagattgaatat

SEQ ID NO: 332310 - DNA, 25 bp, Artificial
  Probe
tcagaacaaaggactgttggagacc

SEQ ID NO: 332311 - DNA, 25 bp, Artificial
  Probe
agtacagccgacgtgaggagtacag

SEQ ID NO: 332312 - DNA, 25 bp, Artificial
  Probe
taaaggctcccaataagtcactgcc

SEQ ID NO: 332313 - DNA, 25 bp, Artificial
  Probe
tgactttcaaaaagaccaaacggag

SEQ ID NO: 332314 - DNA, 25 bp, Artificial
  Probe
cacttacggattagctggcaaccga

SEQ ID NO: 332315 - DNA, 25 bp, Artificial
  Probe
gccaatggtggctctgaatcagatg

SEQ ID NO: 332316 - DNA, 25 bp, Artificial
  Probe
agtctcgccaacgtggctgggaaga

SEQ ID NO: 332317 - DNA, 25 bp, Artificial
  Probe
aaggatggctacaagcccgatgtta

SEQ ID NO: 332318 - DNA, 25 bp, Artificial
  Probe
agggccccggcttgcctctgagtac

SEQ ID NO: 332319 - DNA, 25 bp, Artificial
  Probe
ctgttggagaccacggtacaaaagg

SEQ ID NO: 332320 - DNA, 25 bp, Artificial
  Probe
ataatgcgggcagatgacttgctgc

SEQ ID NO: 332321 - DNA, 25 bp, Artificial
  Probe
ggaaatccccacttacggattagct

SEQ ID NO: 332322 - DNA, 25 bp, Artificial
  Probe
ccaggacttcaaggagaaggatggc

SEQ ID NO: 332323 - DNA, 25 bp, Artificial
  Probe
gccaccatcagatgacactcgcgta

SEQ ID NO: 332324 - DNA, 25 bp, Artificial
  Probe
gaacaaaggactgttggagaccacg

SEQ ID NO: 332325 - DNA, 25 bp, Artificial
  Probe
ggagcaccgtcaacctggatgagga

SEQ ID NO: 332326 - DNA, 25 bp, Artificial
  Probe
ccaataagtcactgccttcagcagt

SEQ ID NO: 332327 - DNA, 25 bp, Artificial
  Probe
gaagagcccattgtgaacagagggc

SEQ ID NO: 332328 - DNA, 25 bp, Artificial
  Probe
caacctggatgaggagaagcaacat

SEQ ID NO: 332329 - DNA, 25 bp, Artificial
  Probe
attggctggagcaccgtcaacctgg

SEQ ID NO: 332330 - DNA, 25 bp, Artificial
  Probe
ctgcatcgaggataagatggccatt

SEQ ID NO: 332331 - DNA, 25 bp, Artificial
  Probe
gattagctggcaaccgagaggagca

SEQ ID NO: 332332 - DNA, 25 bp, Artificial
  Probe
gagaacattggctggagcaccgtca

SEQ ID NO: 332333 - DNA, 25 bp, Artificial
  Probe
ggcaggaaactgactcccaaggagg

SEQ ID NO: 332334 - DNA, 25 bp, Artificial
  Probe
taagatggccattgatgacaagtac

SEQ ID NO: 332335 - DNA, 25 bp, Artificial
  Probe
ctctaccaccatcctggatgaagag

SEQ ID NO: 332336 - DNA, 25 bp, Artificial
  Probe
tcactgccttcagcagtgtactgca

SEQ ID NO: 332337 - DNA, 25 bp, Artificial
  Probe
tctgaacactgtagggccccggctt

SEQ ID NO: 332338 - DNA, 25 bp, Artificial
  Probe
ttcaaaaagaccaaacggagagtga

SEQ ID NO: 332339 - DNA, 25 bp, Artificial
  Probe
actcgcgtagagaacatggacatca

SEQ ID NO: 332340 - DNA, 25 bp, Artificial
  Probe
caactgcagcagctgcgggacagcg

SEQ ID NO: 332341 - DNA, 25 bp, Artificial
  Probe
gcaacatcaggatttctccgcttcc

SEQ ID NO: 332342 - DNA, 25 bp, Artificial
  Probe
atgagacgggcaggaaactgactcc

SEQ ID NO: 332343 - DNA, 25 bp, Artificial
  Probe
gaaggggaccatcgtgttcaatgcc

SEQ ID NO: 332344 - DNA, 25 bp, Artificial
  Probe
caatgttgtctttttagagcacata

SEQ ID NO: 332345 - DNA, 25 bp, Artificial
  Probe
ggcttctgcataacctcttgtctcc

SEQ ID NO: 332346 - DNA, 25 bp, Artificial
  Probe
cctttcttcttcaagttgcctttgg

SEQ ID NO: 332347 - DNA, 25 bp, Artificial
  Probe
ttggtctgtatcagccaatacatat

SEQ ID NO: 332348 - DNA, 25 bp, Artificial
  Probe
ggcacaccagtagacagcacttctc

SEQ ID NO: 332349 - DNA, 25 bp, Artificial
  Probe
gtctaggatttcctctgtaaattaa

SEQ ID NO: 332350 - DNA, 25 bp, Artificial
  Probe
cgtagcaatgcaggatgagcaaggc

SEQ ID NO: 332351 - DNA, 25 bp, Artificial
  Probe
gatgttcctggatgccgtagcaatg

SEQ ID NO: 332352 - DNA, 25 bp, Artificial
  Probe
cttcaagttgcctttggtcgtggta

SEQ ID NO: 332353 - DNA, 25 bp, Artificial
  Probe
ttagagccatctgaagagaagatac

SEQ ID NO: 332354 - DNA, 25 bp, Artificial
  Probe
tcagtcctagcctgatgttcctgga

SEQ ID NO: 332355 - DNA, 25 bp, Artificial
  Probe
taatgtctccattagatcaggctgt

SEQ ID NO: 332356 - DNA, 25 bp, Artificial
  Probe
cctttggtcgtggtatttcattata

SEQ ID NO: 332357 - DNA, 25 bp, Artificial
  Probe
taacaatgttgtctttttagagcac

SEQ ID NO: 332358 - DNA, 25 bp, Artificial
  Probe
ccatggcttctgcataacctcttgt

SEQ ID NO: 332359 - DNA, 25 bp, Artificial
  Probe
tacctcaatggagataatgtctcca

SEQ ID NO: 332360 - DNA, 25 bp, Artificial
  Probe
gttgtctttttagagcacataaggc

SEQ ID NO: 332361 - DNA, 25 bp, Artificial
  Probe
agagccatctgaagagaagatacct

SEQ ID NO: 332362 - DNA, 25 bp, Artificial
  Probe
ggagataatgtctccattagatcag

SEQ ID NO: 332363 - DNA, 25 bp, Artificial
  Probe
agatctgtgacttcagatctaaata

SEQ ID NO: 332364 - DNA, 25 bp, Artificial
  Probe
attaaagatctgtgacttcagatct

SEQ ID NO: 332365 - DNA, 25 bp, Artificial
  Probe
cctggatgccgtagcaatgcaggat

SEQ ID NO: 332366 - DNA, 25 bp, Artificial
  Probe
gcaatgcaggatgagcaaggcatga

SEQ ID NO: 332367 - DNA, 25 bp, Artificial
  Probe
agcaaggcatgatgggcacaccagt

SEQ ID NO: 332368 - DNA, 25 bp, Artificial
  Probe
aagatacctcaatggagataatgtc

SEQ ID NO: 332369 - DNA, 25 bp, Artificial
  Probe
ttggtcgtggtatttcattatagcc

SEQ ID NO: 332370 - DNA, 25 bp, Artificial
  Probe
agcacataaggcaggtgacagaata

SEQ ID NO: 332371 - DNA, 25 bp, Artificial
  Probe
acagaatatcatcaagcatggttaa

SEQ ID NO: 332372 - DNA, 25 bp, Artificial
  Probe
gatgagcaaggcatgatgggcacac

SEQ ID NO: 332373 - DNA, 25 bp, Artificial
  Probe
ttctgcataacctcttgtctccagg

SEQ ID NO: 332374 - DNA, 25 bp, Artificial
  Probe
tcttcttcaagttgcctttggtcgt

SEQ ID NO: 332375 - DNA, 25 bp, Artificial
  Probe
ttagagcacataaggcaggtgacag

SEQ ID NO: 332376 - DNA, 25 bp, Artificial
  Probe
caccagtagacagcacttctccatg

SEQ ID NO: 332377 - DNA, 25 bp, Artificial
  Probe
ctcttgtctccaggtcctacctggt

SEQ ID NO: 332378 - DNA, 25 bp, Artificial
  Probe
gacttcagatctaaatatgtgccaa

SEQ ID NO: 332379 - DNA, 25 bp, Artificial
  Probe
gctgtaggcaagcttgtagggcatt

SEQ ID NO: 332380 - DNA, 25 bp, Artificial
  Probe
tatgtcacttgacacaaattagagc

SEQ ID NO: 332381 - DNA, 25 bp, Artificial
  Probe
gcataacctcttgtctccaggtcct

SEQ ID NO: 332382 - DNA, 25 bp, Artificial
  Probe
ctagcccattgtaggtggtgtcagt

SEQ ID NO: 332383 - DNA, 25 bp, Artificial
  Probe
acataaggcaggtgacagaatatca

SEQ ID NO: 332384 - DNA, 25 bp, Artificial
  Probe
gtcacttgacacaaattagagccat

SEQ ID NO: 332385 - DNA, 25 bp, Artificial
  Probe
ggcatgatgggcacaccagtagaca

SEQ ID NO: 332386 - DNA, 25 bp, Artificial
  Probe
cccattgtaggtggtgtcagtccta

SEQ ID NO: 332387 - DNA, 25 bp, Artificial
  Probe
agttcaaacagttaacaatgttgtc

SEQ ID NO: 332388 - DNA, 25 bp, Artificial
  Probe
ggtgtcagtcctagcctgatgttcc

SEQ ID NO: 332389 - DNA, 25 bp, Artificial
  Probe
ttcttcttcaagttgcctttggtcg

SEQ ID NO: 332390 - DNA, 25 bp, Artificial
  Probe
gcccttctgtcttcacccagaagga

SEQ ID NO: 332391 - DNA, 25 bp, Artificial
  Probe
accaagttccccagtgatcaagaaa

SEQ ID NO: 332392 - DNA, 25 bp, Artificial
  Probe
atgactgttgttacaaccgtctgga

SEQ ID NO: 332393 - DNA, 25 bp, Artificial
  Probe
ttgttacaaccgtctggagaaacgt

SEQ ID NO: 332394 - DNA, 25 bp, Artificial
  Probe
ggcccttctgtcttcacccagaagg

SEQ ID NO: 332395 - DNA, 25 bp, Artificial
  Probe
ctcatgactgttgttacaaccgtct

SEQ ID NO: 332396 - DNA, 25 bp, Artificial
  Probe
gcatccaacttcctgctgcgtagta

SEQ ID NO: 332397 - DNA, 25 bp, Artificial
  Probe
ccaacttcctgctgcgtagtaccta

SEQ ID NO: 332398 - DNA, 25 bp, Artificial
  Probe
agaggctctcgcaagtaaagcaatt

SEQ ID NO: 332399 - DNA, 25 bp, Artificial
  Probe
aaggagccgctgaagcctgatcttt

SEQ ID NO: 332400 - DNA, 25 bp, Artificial
  Probe
tcctgagaggctctcgcaagtaaag

SEQ ID NO: 332401 - DNA, 25 bp, Artificial
  Probe
caacaagttttgcaaagggaagacg

SEQ ID NO: 332402 - DNA, 25 bp, Artificial
  Probe
tcacccagaaggagccgctgaagcc

SEQ ID NO: 332403 - DNA, 25 bp, Artificial
  Probe
ccttctgtcttcacccagaaggagc

SEQ ID NO: 332404 - DNA, 25 bp, Artificial
  Probe
ttgcccggaacaagaaaagctacag

SEQ ID NO: 332405 - DNA, 25 bp, Artificial
  Probe
aggatcccccaaggatgccacagat

SEQ ID NO: 332406 - DNA, 25 bp, Artificial
  Probe
cttcacccagaaggagccgctgaag

SEQ ID NO: 332407 - DNA, 25 bp, Artificial
  Probe
aagttccccagtgatcaagaaaaca

SEQ ID NO: 332408 - DNA, 25 bp, Artificial
  Probe
ctgtcttcacccagaaggagccgct

SEQ ID NO: 332409 - DNA, 25 bp, Artificial
  Probe
tttgcccggaacaagaaaagctaca

SEQ ID NO: 332410 - DNA, 25 bp, Artificial
  Probe
gctgtgtgactcatgactgttgtta

SEQ ID NO: 332411 - DNA, 25 bp, Artificial
  Probe
tgctgtgtgactcatgactgttgtt

SEQ ID NO: 332412 - DNA, 25 bp, Artificial
  Probe
atgccacagattggtgctgtgtgac

SEQ ID NO: 332413 - DNA, 25 bp, Artificial
  Probe
cggaaacagctgtgccagtgcgata

SEQ ID NO: 332414 - DNA, 25 bp, Artificial
  Probe
catccaacttcctgctgcgtagtac

SEQ ID NO: 332415 - DNA, 25 bp, Artificial
  Probe
actgttgttacaaccgtctggagaa

SEQ ID NO: 332416 - DNA, 25 bp, Artificial
  Probe
agaaggagccgctgaagcctgatct

SEQ ID NO: 332417 - DNA, 25 bp, Artificial
  Probe
gaggctctcgcaagtaaagcaattc

SEQ ID NO: 332418 - DNA, 25 bp, Artificial
  Probe
actcatgactgttgttacaaccgtc

SEQ ID NO: 332419 - DNA, 25 bp, Artificial
  Probe
acagattggtgctgtgtgactcatg

SEQ ID NO: 332420 - DNA, 25 bp, Artificial
  Probe
gtcctgagaggctctcgcaagtaaa

SEQ ID NO: 332421 - DNA, 25 bp, Artificial
  Probe
ctcctgccggaaacagctgtgccag

SEQ ID NO: 332422 - DNA, 25 bp, Artificial
  Probe
gccacagattggtgctgtgtgactc

SEQ ID NO: 332423 - DNA, 25 bp, Artificial
  Probe
gccggaaacagctgtgccagtgcga

SEQ ID NO: 332424 - DNA, 25 bp, Artificial
  Probe
cttcctgctgcgtagtacctaagag

SEQ ID NO: 332425 - DNA, 25 bp, Artificial
  Probe
gttccccagtgatcaagaaaacacc

SEQ ID NO: 332426 - DNA, 25 bp, Artificial
  Probe
cctgagaggctctcgcaagtaaagc

SEQ ID NO: 332427 - DNA, 25 bp, Artificial
  Probe
tgtgtgactcatgactgttgttaca

SEQ ID NO: 332428 - DNA, 25 bp, Artificial
  Probe
tagcccaaccaagttccccagtgat

SEQ ID NO: 332429 - DNA, 25 bp, Artificial
  Probe
ctggagaaacgtggatgtggcacaa

SEQ ID NO: 332430 - DNA, 25 bp, Artificial
  Probe
agttccccagtgatcaagaaaacac

SEQ ID NO: 332431 - DNA, 25 bp, Artificial
  Probe
tgttttgcccggaacaagaaaagct

SEQ ID NO: 332432 - DNA, 25 bp, Artificial
  Probe
tacaaccgtctggagaaacgtggat

SEQ ID NO: 332433 - DNA, 25 bp, Artificial
  Probe
agattggtgctgtgtgactcatgac

SEQ ID NO: 332434 - DNA, 25 bp, Artificial
  Probe
aaccgtctggagaaacgtggatgtg

SEQ ID NO: 332435 - DNA, 25 bp, Artificial
  Probe
ttacaaccgtctggagaaacgtgga

SEQ ID NO: 332436 - DNA, 25 bp, Artificial
  Probe
tcgttgagggctgcagaactccaca

SEQ ID NO: 332437 - DNA, 25 bp, Artificial
  Probe
gatgtaaatccaagcacagcccttc

SEQ ID NO: 332438 - DNA, 25 bp, Artificial
  Probe
atgcttctgcacagctcaagctctg

SEQ ID NO: 332439 - DNA, 25 bp, Artificial
  Probe
ctgcagaactccacaggatgggtgc

SEQ ID NO: 332440 - DNA, 25 bp, Artificial
  Probe
gcctctcatgccacaggaaaatgct

SEQ ID NO: 332441 - DNA, 25 bp, Artificial
  Probe
tctatgtcagcctctcatgccacag

SEQ ID NO: 332442 - DNA, 25 bp, Artificial
  Probe
ctctggtgacaggaacggatgtaat

SEQ ID NO: 332443 - DNA, 25 bp, Artificial
  Probe
ttgagggctgcagaactccacagga

SEQ ID NO: 332444 - DNA, 25 bp, Artificial
  Probe
gagaagcaccactggcttgtcttcc

SEQ ID NO: 332445 - DNA, 25 bp, Artificial
  Probe
actggcttgtcttccgcaccaggct

SEQ ID NO: 332446 - DNA, 25 bp, Artificial
  Probe
atgtcagcctctcatgccacaggaa

SEQ ID NO: 332447 - DNA, 25 bp, Artificial
  Probe
ttcagtcccacgagggcctttttat

SEQ ID NO: 332448 - DNA, 25 bp, Artificial
  Probe
taccgagcgatcgttgagggctgca

SEQ ID NO: 332449 - DNA, 25 bp, Artificial
  Probe
cgcaccaggctcataccaggggctt

SEQ ID NO: 332450 - DNA, 25 bp, Artificial
  Probe
gagcaaggcttcctgggttctttct

SEQ ID NO: 332451 - DNA, 25 bp, Artificial
  Probe
taccaggggcttctacatcactggg

SEQ ID NO: 332452 - DNA, 25 bp, Artificial
  Probe
agagcagttcagtcccacgagggcc

SEQ ID NO: 332453 - DNA, 25 bp, Artificial
  Probe
gcttctgcacagctcaagctctggt

SEQ ID NO: 332454 - DNA, 25 bp, Artificial
  Probe
caggctcataccaggggcttctaca

SEQ ID NO: 332455 - DNA, 25 bp, Artificial
  Probe
atcgttgagggctgcagaactccac

SEQ ID NO: 332456 - DNA, 25 bp, Artificial
  Probe
tccagagcctgagaagcaccactgg

SEQ ID NO: 332457 - DNA, 25 bp, Artificial
  Probe
ggggcttctacatcactgggatttc

SEQ ID NO: 332458 - DNA, 25 bp, Artificial
  Probe
ggaaaatgcttctgcacagctcaag

SEQ ID NO: 332459 - DNA, 25 bp, Artificial
  Probe
tctgcacagctcaagctctggtgac

SEQ ID NO: 332460 - DNA, 25 bp, Artificial
  Probe
ttctccagagcctgagaagcaccac

SEQ ID NO: 332461 - DNA, 25 bp, Artificial
  Probe
cacagctcaagctctggtgacagga

SEQ ID NO: 332462 - DNA, 25 bp, Artificial
  Probe
caggaaaatgcttctgcacagctca

SEQ ID NO: 332463 - DNA, 25 bp, Artificial
  Probe
attgtctatgtcagcctctcatgcc

SEQ ID NO: 332464 - DNA, 25 bp, Artificial
  Probe
ctgggttctttctttcctaagaatg

SEQ ID NO: 332465 - DNA, 25 bp, Artificial
  Probe
aattaccgagcgatcgttgagggct

SEQ ID NO: 332466 - DNA, 25 bp, Artificial
  Probe
agatgtaaatccaagcacagccctt

SEQ ID NO: 332467 - DNA, 25 bp, Artificial
  Probe
aactccacaggatgggtgcactccg

SEQ ID NO: 332468 - DNA, 25 bp, Artificial
  Probe
agggctgcagaactccacaggatgg

SEQ ID NO: 332469 - DNA, 25 bp, Artificial
  Probe
acattgtctatgtcagcctctcatg

SEQ ID NO: 332470 - DNA, 25 bp, Artificial
  Probe
ggctgcagaactccacaggatgggt

SEQ ID NO: 332471 - DNA, 25 bp, Artificial
  Probe
cagttcagtcccacgagggcctttt

SEQ ID NO: 332472 - DNA, 25 bp, Artificial
  Probe
atgccacaggaaaatgcttctgcac

SEQ ID NO: 332473 - DNA, 25 bp, Artificial
  Probe
gcttctacatcactgggatttcact

SEQ ID NO: 332474 - DNA, 25 bp, Artificial
  Probe
cataccaggggcttctacatcactg

SEQ ID NO: 332475 - DNA, 25 bp, Artificial
  Probe
gtcagcctctcatgccacaggaaaa

SEQ ID NO: 332476 - DNA, 25 bp, Artificial
  Probe
tgggagcaaggcttcctgggttctt

SEQ ID NO: 332477 - DNA, 25 bp, Artificial
  Probe
gccacaggaaaatgcttctgcacag

SEQ ID NO: 332478 - DNA, 25 bp, Artificial
  Probe
gcacagctcaagctctggtgacagg

SEQ ID NO: 332479 - DNA, 25 bp, Artificial
  Probe
aaatgcttctgcacagctcaagctc

SEQ ID NO: 332480 - DNA, 25 bp, Artificial
  Probe
tgagagcagttcagtcccacgaggg

SEQ ID NO: 332481 - DNA, 25 bp, Artificial
  Probe
gcagaactccacaggatgggtgcac

SEQ ID NO: 332482 - DNA, 25 bp, Artificial
  Probe
tctcccagtgtcctgggaaaaggat

SEQ ID NO: 332483 - DNA, 25 bp, Artificial
  Probe
gtctaggcctgctggagtcctactc

SEQ ID NO: 332484 - DNA, 25 bp, Artificial
  Probe
gtgcgcattagtaacgtctgacatc

SEQ ID NO: 332485 - DNA, 25 bp, Artificial
  Probe
accttaaaccggaggcctatgagca

SEQ ID NO: 332486 - DNA, 25 bp, Artificial
  Probe
agtgtcctgggaaaaggatactatc

SEQ ID NO: 332487 - DNA, 25 bp, Artificial
  Probe
cggaggcctatgagcagtctaggcc

SEQ ID NO: 332488 - DNA, 25 bp, Artificial
  Probe
ctcccagtgtcctgggaaaaggata

SEQ ID NO: 332489 - DNA, 25 bp, Artificial
  Probe
tggaagtacccatcctctactttac

SEQ ID NO: 332490 - DNA, 25 bp, Artificial
  Probe
attagtaacgtctgacatcctgttc

SEQ ID NO: 332491 - DNA, 25 bp, Artificial
  Probe
aaggatactatctgggttcgctgga

SEQ ID NO: 332492 - DNA, 25 bp, Artificial
  Probe
tgtgcgcattagtaacgtctgacat

SEQ ID NO: 332493 - DNA, 25 bp, Artificial
  Probe
agtaacgtctgacatcctgttctct

SEQ ID NO: 332494 - DNA, 25 bp, Artificial
  Probe
ggcctatgagcagtctaggcctgct

SEQ ID NO: 332495 - DNA, 25 bp, Artificial
  Probe
gtgtgcgcattagtaacgtctgaca

SEQ ID NO: 332496 - DNA, 25 bp, Artificial
  Probe
tggagagccctggaagtacccatcc

SEQ ID NO: 332497 - DNA, 25 bp, Artificial
  Probe
ctaggcctgctggagtcctactctt

SEQ ID NO: 332498 - DNA, 25 bp, Artificial
  Probe
gcctatgagcagtctaggcctgctg

SEQ ID NO: 332499 - DNA, 25 bp, Artificial
  Probe
cagtgtcctgggaaaaggatactat

SEQ ID NO: 332500 - DNA, 25 bp, Artificial
  Probe
taggcctgctggagtcctactcttt

SEQ ID NO: 332501 - DNA, 25 bp, Artificial
  Probe
gctggagagccctggaagtacccat

SEQ ID NO: 332502 - DNA, 25 bp, Artificial
  Probe
aaccggaggcctatgagcagtctag

SEQ ID NO: 332503 - DNA, 25 bp, Artificial
  Probe
agcagtctaggcctgctggagtcct

SEQ ID NO: 332504 - DNA, 25 bp, Artificial
  Probe
cattagtaacgtctgacatcctgtt

SEQ ID NO: 332505 - DNA, 25 bp, Artificial
  Probe
cctatgagcagtctaggcctgctgg

SEQ ID NO: 332506 - DNA, 25 bp, Artificial
  Probe
ccggaggcctatgagcagtctaggc

SEQ ID NO: 332507 - DNA, 25 bp, Artificial
  Probe
tgcgcattagtaacgtctgacatcc

SEQ ID NO: 332508 - DNA, 25 bp, Artificial
  Probe
aaaccggaggcctatgagcagtcta

SEQ ID NO: 332509 - DNA, 25 bp, Artificial
  Probe
ttagtaacgtctgacatcctgttct

SEQ ID NO: 332510 - DNA, 25 bp, Artificial
  Probe
tactatctgggttcgctggagagcc

SEQ ID NO: 332511 - DNA, 25 bp, Artificial
  Probe
tagtaacgtctgacatcctgttctc

SEQ ID NO: 332512 - DNA, 25 bp, Artificial
  Probe
gagccctggaagtacccatcctcta

SEQ ID NO: 332513 - DNA, 25 bp, Artificial
  Probe
agtgtgcgcattagtaacgtctgac

SEQ ID NO: 332514 - DNA, 25 bp, Artificial
  Probe
gcattagtaacgtctgacatcctgt

SEQ ID NO: 332515 - DNA, 25 bp, Artificial
  Probe
tctaggcctgctggagtcctactct

SEQ ID NO: 332516 - DNA, 25 bp, Artificial
  Probe
agtctaggcctgctggagtcctact

SEQ ID NO: 332517 - DNA, 25 bp, Artificial
  Probe
gcagtctaggcctgctggagtccta

SEQ ID NO: 332518 - DNA, 25 bp, Artificial
  Probe
agagccctggaagtacccatcctct

SEQ ID NO: 332519 - DNA, 25 bp, Artificial
  Probe
gtaacgtctgacatcctgttctctc

SEQ ID NO: 332520 - DNA, 25 bp, Artificial
  Probe
ctggagagccctggaagtacccatc

SEQ ID NO: 332521 - DNA, 25 bp, Artificial
  Probe
atactatctgggttcgctggagagc

SEQ ID NO: 332522 - DNA, 25 bp, Artificial
  Probe
ttaccttaaaccggaggcctatgag

SEQ ID NO: 332523 - DNA, 25 bp, Artificial
  Probe
accggaggcctatgagcagtctagg

SEQ ID NO: 332524 - DNA, 25 bp, Artificial
  Probe
ctctcccagtgtcctgggaaaagga

SEQ ID NO: 332525 - DNA, 25 bp, Artificial
  Probe
cgcattagtaacgtctgacatcctg

SEQ ID NO: 332526 - DNA, 25 bp, Artificial
  Probe
cctcagccctctggccttttcctct

SEQ ID NO: 332527 - DNA, 25 bp, Artificial
  Probe
cagtctaggcctgctggagtcctac

SEQ ID NO: 332528 - DNA, 25 bp, Artificial
  Probe
agccctgttggcacagcatagctag

SEQ ID NO: 332529 - DNA, 25 bp, Artificial
  Probe
atgtgggagcgctgctaagcccttg

SEQ ID NO: 332530 - DNA, 25 bp, Artificial
  Probe
tgtcagtgcgtgaatgggccttgcc

SEQ ID NO: 332531 - DNA, 25 bp, Artificial
  Probe
tgagcccttctgcaccctgatcatg

SEQ ID NO: 332532 - DNA, 25 bp, Artificial
  Probe
ttctctcctagaaggggatattgct

SEQ ID NO: 332533 - DNA, 25 bp, Artificial
  Probe
gagccctcaggatgcaaggggtccc

SEQ ID NO: 332534 - DNA, 25 bp, Artificial
  Probe
ctggcctccagacagatagccctat

SEQ ID NO: 332535 - DNA, 25 bp, Artificial
  Probe
tcgggcgtttgtgtcaccctacaac

SEQ ID NO: 332536 - DNA, 25 bp, Artificial
  Probe
gcttccggaccttagattcccttct

SEQ ID NO: 332537 - DNA, 25 bp, Artificial
  Probe
gggagcgctgctaagcccttgccgc

SEQ ID NO: 332538 - DNA, 25 bp, Artificial
  Probe
tcaggaagatgctgctgtcaccctt

SEQ ID NO: 332539 - DNA, 25 bp, Artificial
  Probe
gatggcaatgggttctctcctagaa

SEQ ID NO: 332540 - DNA, 25 bp, Artificial
  Probe
gttggccctacctgggccatctcaa

SEQ ID NO: 332541 - DNA, 25 bp, Artificial
  Probe
gagctggatggctgtgcctgatacc

SEQ ID NO: 332542 - DNA, 25 bp, Artificial
  Probe
catcccctaatggtgagccaacctg

SEQ ID NO: 332543 - DNA, 25 bp, Artificial
  Probe
ctaccagagcagatgtgggagcgct

SEQ ID NO: 332544 - DNA, 25 bp, Artificial
  Probe
acccgactccgctggcagggacagt

SEQ ID NO: 332545 - DNA, 25 bp, Artificial
  Probe
ctttgtccagcctctccagtgagta

SEQ ID NO: 332546 - DNA, 25 bp, Artificial
  Probe
ctgggtctctttctcccaagccttg

SEQ ID NO: 332547 - DNA, 25 bp, Artificial
  Probe
gctggatggctgtgcctgataccca

SEQ ID NO: 332548 - DNA, 25 bp, Artificial
  Probe
atattgcttatggaacatacccgac

SEQ ID NO: 332549 - DNA, 25 bp, Artificial
  Probe
catctcaaaggttccaggataaccc

SEQ ID NO: 332550 - DNA, 25 bp, Artificial
  Probe
tttcgactgagagctggatggctgt

SEQ ID NO: 332551 - DNA, 25 bp, Artificial
  Probe
cacgccttggaggaagatggcaatg

SEQ ID NO: 332552 - DNA, 25 bp, Artificial
  Probe
cctcaggatgcaaggggtccctcat

SEQ ID NO: 332553 - DNA, 25 bp, Artificial
  Probe
ggcctccagacagatagccctattc

SEQ ID NO: 332554 - DNA, 25 bp, Artificial
  Probe
gcagggcgcatgctcagagcagctc

SEQ ID NO: 332555 - DNA, 25 bp, Artificial
  Probe
cttatggaacatacccgactccgct

SEQ ID NO: 332556 - DNA, 25 bp, Artificial
  Probe
tctcctttgagcacattcgggaagg

SEQ ID NO: 332557 - DNA, 25 bp, Artificial
  Probe
caaggggtccctcatcagtccagga

SEQ ID NO: 332558 - DNA, 25 bp, Artificial
  Probe
gctggccttccctgggtctctttct

SEQ ID NO: 332559 - DNA, 25 bp, Artificial
  Probe
cctgtccccgctgtgactcatttag

SEQ ID NO: 332560 - DNA, 25 bp, Artificial
  Probe
atgctcagagcagctctcctgcctg

SEQ ID NO: 332561 - DNA, 25 bp, Artificial
  Probe
tcctgcctgcctctacagtgactgt

SEQ ID NO: 332562 - DNA, 25 bp, Artificial
  Probe
gatgctgctgtcaccctttgtccag

SEQ ID NO: 332563 - DNA, 25 bp, Artificial
  Probe
tacctcatgtactgtggatctcaga

SEQ ID NO: 332564 - DNA, 25 bp, Artificial
  Probe
agtgactgtgtctcttgcctgctgg

SEQ ID NO: 332565 - DNA, 25 bp, Artificial
  Probe
aggaaactcagttggccctacctgg

SEQ ID NO: 332566 - DNA, 25 bp, Artificial
  Probe
tgatcatgatgtcctgaggctgtgg

SEQ ID NO: 332567 - DNA, 25 bp, Artificial
  Probe
gcatagctagcatccgtagaatggg

SEQ ID NO: 332568 - DNA, 25 bp, Artificial
  Probe
tgagtctcaggcagggcgcatgctc

SEQ ID NO: 332569 - DNA, 25 bp, Artificial
  Probe
gagggtcgcactgacttgcagcacc

SEQ ID NO: 332570 - DNA, 25 bp, Artificial
  Probe
ttctcccaagccttgggtgttacgt

SEQ ID NO: 332571 - DNA, 25 bp, Artificial
  Probe
gtgaatgggccttgccaacactaca

SEQ ID NO: 332572 - DNA, 25 bp, Artificial
  Probe
acacataggggcacggagccctcag

SEQ ID NO: 332573 - DNA, 25 bp, Artificial
  Probe
cagcaccgggcttccggaccttaga

SEQ ID NO: 332574 - DNA, 25 bp, Artificial
  Probe
tccagagaatgaaccttttgatgaa

SEQ ID NO: 332575 - DNA, 25 bp, Artificial
  Probe
gcatcggggcaagtttttaaaggca

SEQ ID NO: 332576 - DNA, 25 bp, Artificial
  Probe
tgtgtagctgtgtcatgtatatacc

SEQ ID NO: 332577 - DNA, 25 bp, Artificial
  Probe
tccagacgttagtgacaatgaacct

SEQ ID NO: 332578 - DNA, 25 bp, Artificial
  Probe
ctttgtgatcaggaaatcgatagca

SEQ ID NO: 332579 - DNA, 25 bp, Artificial
  Probe
atgacaccgccaaatttaactgcag

SEQ ID NO: 332580 - DNA, 25 bp, Artificial
  Probe
tcactgtaaagctgggaaaggacgg

SEQ ID NO: 332581 - DNA, 25 bp, Artificial
  Probe
agagacattatgacaccgccaaatt

SEQ ID NO: 332582 - DNA, 25 bp, Artificial
  Probe
gtttttaaaggcacaagaggccctg

SEQ ID NO: 332583 - DNA, 25 bp, Artificial
  Probe
tagctgtgtcatgtatatacctttt

SEQ ID NO: 332584 - DNA, 25 bp, Artificial
  Probe
ctgccagctaaaggtgaagatctac

SEQ ID NO: 332585 - DNA, 25 bp, Artificial
  Probe
accagaggaaacctcagaaaaagtg

SEQ ID NO: 332586 - DNA, 25 bp, Artificial
  Probe
ccatcaaatccagaggctagcagtt

SEQ ID NO: 332587 - DNA, 25 bp, Artificial
  Probe
caaagtagagttcttccacaaacag

SEQ ID NO: 332588 - DNA, 25 bp, Artificial
  Probe
agggagtaactattcccagtcagag

SEQ ID NO: 332589 - DNA, 25 bp, Artificial
  Probe
aggtgaagatctactcctccaactc

SEQ ID NO: 332590 - DNA, 25 bp, Artificial
  Probe
agtgacaatgaacctgatcattata

SEQ ID NO: 332591 - DNA, 25 bp, Artificial
  Probe
tgaagacgacaatcatgttgcagca

SEQ ID NO: 332592 - DNA, 25 bp, Artificial
  Probe
ggagtatcttgtgctcaccctgaca

SEQ ID NO: 332593 - DNA, 25 bp, Artificial
  Probe
caaggagtatcttgtgctcaccctg

SEQ ID NO: 332594 - DNA, 25 bp, Artificial
  Probe
aagacaaggccaaccgatacttctc

SEQ ID NO: 332595 - DNA, 25 bp, Artificial
  Probe
aatgaaccttttgatgaagatcagc

SEQ ID NO: 332596 - DNA, 25 bp, Artificial
  Probe
agatattctgacaccactgactctg

SEQ ID NO: 332597 - DNA, 25 bp, Artificial
  Probe
caataggacattgtgtcagattgca

SEQ ID NO: 332598 - DNA, 25 bp, Artificial
  Probe
gcacagtatccttttgaagaccata

SEQ ID NO: 332599 - DNA, 25 bp, Artificial
  Probe
cagggttttgacacttgttgtccag

SEQ ID NO: 332600 - DNA, 25 bp, Artificial
  Probe
gaacctgatcattatagatattctg

SEQ ID NO: 332601 - DNA, 25 bp, Artificial
  Probe
atcaaacccttttgtgaagatcttg

SEQ ID NO: 332602 - DNA, 25 bp, Artificial
  Probe
ggtaaatacgttcttcataccagga

SEQ ID NO: 332603 - DNA, 25 bp, Artificial
  Probe
gttcttccacaaacagaacaagatg

SEQ ID NO: 332604 - DNA, 25 bp, Artificial
  Probe
tgaccaatggctaagtgaagacgac

SEQ ID NO: 332605 - DNA, 25 bp, Artificial
  Probe
aggacaagctcatgtactttgagtt

SEQ ID NO: 332606 - DNA, 25 bp, Artificial
  Probe
tagctacctgttaaagaatcacctg

SEQ ID NO: 332607 - DNA, 25 bp, Artificial
  Probe
accttttgatgaagatcagcattca

SEQ ID NO: 332608 - DNA, 25 bp, Artificial
  Probe
gaagatctactcctccaactcagga

SEQ ID NO: 332609 - DNA, 25 bp, Artificial
  Probe
tgtttgaaactattccaatgttcag

SEQ ID NO: 332610 - DNA, 25 bp, Artificial
  Probe
cactgttgtttcacaagatgatgtt

SEQ ID NO: 332611 - DNA, 25 bp, Artificial
  Probe
attcccagtcagaggcgctatgtat

SEQ ID NO: 332612 - DNA, 25 bp, Artificial
  Probe
caagaggccctggatttttatgggg

SEQ ID NO: 332613 - DNA, 25 bp, Artificial
  Probe
ctatgtgctgagagacattatgaca

SEQ ID NO: 332614 - DNA, 25 bp, Artificial
  Probe
gtcatgtatatacctttttgtgtca

SEQ ID NO: 332615 - DNA, 25 bp, Artificial
  Probe
tctttgtgatcaggaaatcgatagc

SEQ ID NO: 332616 - DNA, 25 bp, Artificial
  Probe
gagacattatgacaccgccaaattt

SEQ ID NO: 332617 - DNA, 25 bp, Artificial
  Probe
cctgtgtgtggtgacatcaaagtag

SEQ ID NO: 332618 - DNA, 25 bp, Artificial
  Probe
tgcatcggggcaagtttttaaaggc

SEQ ID NO: 332619 - DNA, 25 bp, Artificial
  Probe
tgtttcaccctatacatccacaggg

SEQ ID NO: 332620 - DNA, 25 bp, Artificial
  Probe
gcttcccaactttttggtcgcgtag

SEQ ID NO: 332621 - DNA, 25 bp, Artificial
  Probe
tctcagaaccgcagctgaggactct

SEQ ID NO: 332622 - DNA, 25 bp, Artificial
  Probe
tgccaaggtccagtgggatgaagca

SEQ ID NO: 332623 - DNA, 25 bp, Artificial
  Probe
tctttgcatagaggtgtggcccgtg

SEQ ID NO: 332624 - DNA, 25 bp, Artificial
  Probe
tcacaagcaaactgggcgccatgcc

SEQ ID NO: 332625 - DNA, 25 bp, Artificial
  Probe
gacctaacatatctgacaggcattc

SEQ ID NO: 332626 - DNA, 25 bp, Artificial
  Probe
gctccaaatcagaaaatgaaatagc

SEQ ID NO: 332627 - DNA, 25 bp, Artificial
  Probe
aactgggcgccatgccacgctgctg

SEQ ID NO: 332628 - DNA, 25 bp, Artificial
  Probe
agcacatctgccaaggtccagtggg

SEQ ID NO: 332629 - DNA, 25 bp, Artificial
  Probe
agcagaaacctgagagtgaatccat

SEQ ID NO: 332630 - DNA, 25 bp, Artificial
  Probe
ctccattgtataacctggaaccctg

SEQ ID NO: 332631 - DNA, 25 bp, Artificial
  Probe
attgtataacctggaaccctgtgaa

SEQ ID NO: 332632 - DNA, 25 bp, Artificial
  Probe
tgctgtttgatgtggcgcgattccg

SEQ ID NO: 332633 - DNA, 25 bp, Artificial
  Probe
gaaacaccgtcatgagtctgaggaa

SEQ ID NO: 332634 - DNA, 25 bp, Artificial
  Probe
ctaacatatctgacaggcattcatg

SEQ ID NO: 332635 - DNA, 25 bp, Artificial
  Probe
accgtcatgagtctgaggaaaaggg

SEQ ID NO: 332636 - DNA, 25 bp, Artificial
  Probe
tgacctctcagaaccgcagctgagg

SEQ ID NO: 332637 - DNA, 25 bp, Artificial
  Probe
ccaactttttggtcgcgtagtgata

SEQ ID NO: 332638 - DNA, 25 bp, Artificial
  Probe
caaagaaggcagcacatctgccaag

SEQ ID NO: 332639 - DNA, 25 bp, Artificial
  Probe
aaactgggcgccatgccacgctgct

SEQ ID NO: 332640 - DNA, 25 bp, Artificial
  Probe
gatactccattgtataacctggaac

SEQ ID NO: 332641 - DNA, 25 bp, Artificial
  Probe
ggcgcgattccgaggcctgacagct

SEQ ID NO: 332642 - DNA, 25 bp, Artificial
  Probe
atgtggcgcgattccgaggcctgac

SEQ ID NO: 332643 - DNA, 25 bp, Artificial
  Probe
aaacctgagagtgaatccattttag

SEQ ID NO: 332644 - DNA, 25 bp, Artificial
  Probe
gtataacctggaaccctgtgaacca

SEQ ID NO: 332645 - DNA, 25 bp, Artificial
  Probe
ctgacaggcattcatgaagatattg

SEQ ID NO: 332646 - DNA, 25 bp, Artificial
  Probe
aacatatctgacaggcattcatgaa

SEQ ID NO: 332647 - DNA, 25 bp, Artificial
  Probe
gacattgagcagaaacctgagagtg

SEQ ID NO: 332648 - DNA, 25 bp, Artificial
  Probe
aaagtcagggtaccacaagctccaa

SEQ ID NO: 332649 - DNA, 25 bp, Artificial
  Probe
catcagcttcccaactttttggtcg

SEQ ID NO: 332650 - DNA, 25 bp, Artificial
  Probe
ccctgtgaaccactgctgtttgatg

SEQ ID NO: 332651 - DNA, 25 bp, Artificial
  Probe
ttggaggtcggtgtgttcacaagca

SEQ ID NO: 332652 - DNA, 25 bp, Artificial
  Probe
agaaggcagcacatctgccaaggtc

SEQ ID NO: 332653 - DNA, 25 bp, Artificial
  Probe
ctgacagcttctgtgctgctggacc

SEQ ID NO: 332654 - DNA, 25 bp, Artificial
  Probe
ccattttagatgtgcgaacagggtt

SEQ ID NO: 332655 - DNA, 25 bp, Artificial
  Probe
gattccgaggcctgacagcttctgt

SEQ ID NO: 332656 - DNA, 25 bp, Artificial
  Probe
gtgaatccattttagatgtgcgaac

SEQ ID NO: 332657 - DNA, 25 bp, Artificial
  Probe
aggactctttgcatagaggtgtggc

SEQ ID NO: 332658 - DNA, 25 bp, Artificial
  Probe
gaggcctgacagcttctgtgctgct

SEQ ID NO: 332659 - DNA, 25 bp, Artificial
  Probe
ggtaccacaagctccaaatcagaaa

SEQ ID NO: 332660 - DNA, 25 bp, Artificial
  Probe
tttttggtcgcgtagtgatactcca

SEQ ID NO: 332661 - DNA, 25 bp, Artificial
  Probe
aggcagcacatctgccaaggtccag

SEQ ID NO: 332662 - DNA, 25 bp, Artificial
  Probe
tatctgacaggcattcatgaagata

SEQ ID NO: 332663 - DNA, 25 bp, Artificial
  Probe
aacctggaaccctgtgaaccactgc

SEQ ID NO: 332664 - DNA, 25 bp, Artificial
  Probe
tgatactccattgtataacctggaa

SEQ ID NO: 332665 - DNA, 25 bp, Artificial
  Probe
cgtagtgatactccattgtataacc

SEQ ID NO: 332666 - DNA, 25 bp, Artificial
  Probe
cactccttggactgcccttggagac

SEQ ID NO: 332667 - DNA, 25 bp, Artificial
  Probe
gcaaggatccctttggcccatcttc

SEQ ID NO: 332668 - DNA, 25 bp, Artificial
  Probe
atttggatgattccatttctcttgc

SEQ ID NO: 332669 - DNA, 25 bp, Artificial
  Probe
catttggatgattccatttctcttg

SEQ ID NO: 332670 - DNA, 25 bp, Artificial
  Probe
tctcttgcaaggatccctttggccc

SEQ ID NO: 332671 - DNA, 25 bp, Artificial
  Probe
tggactgcccttggagacccagctt

SEQ ID NO: 332672 - DNA, 25 bp, Artificial
  Probe
ctcacccctcatttggatgattcca

SEQ ID NO: 332673 - DNA, 25 bp, Artificial
  Probe
aaggatccctttggcccatcttcct

SEQ ID NO: 332674 - DNA, 25 bp, Artificial
  Probe
ccatttctcttgcaaggatcccttt

SEQ ID NO: 332675 - DNA, 25 bp, Artificial
  Probe
gcgtggtctcacccctcatttggat

SEQ ID NO: 332676 - DNA, 25 bp, Artificial
  Probe
ctcttctgggagtaattttgccaaa

SEQ ID NO: 332677 - DNA, 25 bp, Artificial
  Probe
gatccctttggcccatcttcctggc

SEQ ID NO: 332678 - DNA, 25 bp, Artificial
  Probe
actccttggactgcccttggagacc

SEQ ID NO: 332679 - DNA, 25 bp, Artificial
  Probe
tactcttctgggagtaattttgcca

SEQ ID NO: 332680 - DNA, 25 bp, Artificial
  Probe
gccactccttggactgcccttggag

SEQ ID NO: 332681 - DNA, 25 bp, Artificial
  Probe
ccactccttggactgcccttggaga

SEQ ID NO: 332682 - DNA, 25 bp, Artificial
  Probe
attccatttctcttgcaaggatccc

SEQ ID NO: 332683 - DNA, 25 bp, Artificial
  Probe
ctcttgcaaggatccctttggccca

SEQ ID NO: 332684 - DNA, 25 bp, Artificial
  Probe
tcttcctggccactccttggactgc

SEQ ID NO: 332685 - DNA, 25 bp, Artificial
  Probe
tcttgcaaggatccctttggcccat

SEQ ID NO: 332686 - DNA, 25 bp, Artificial
  Probe
ttctcttgcaaggatccctttggcc

SEQ ID NO: 332687 - DNA, 25 bp, Artificial
  Probe
ttgcaaggatccctttggcccatct

SEQ ID NO: 332688 - DNA, 25 bp, Artificial
  Probe
tcatttggatgattccatttctctt

SEQ ID NO: 332689 - DNA, 25 bp, Artificial
  Probe
ctggccactccttggactgcccttg

SEQ ID NO: 332690 - DNA, 25 bp, Artificial
  Probe
atgattccatttctcttgcaaggat

SEQ ID NO: 332691 - DNA, 25 bp, Artificial
  Probe
ggatgattccatttctcttgcaagg

SEQ ID NO: 332692 - DNA, 25 bp, Artificial
  Probe
cttggactgcccttggagacccagc

SEQ ID NO: 332693 - DNA, 25 bp, Artificial
  Probe
tgattccatttctcttgcaaggatc

SEQ ID NO: 332694 - DNA, 25 bp, Artificial
  Probe
tttggatgattccatttctcttgca

SEQ ID NO: 332695 - DNA, 25 bp, Artificial
  Probe
ctaatggcgtggtctcacccctcat

SEQ ID NO: 332696 - DNA, 25 bp, Artificial
  Probe
ttggcccatcttcctggccactcct

SEQ ID NO: 332697 - DNA, 25 bp, Artificial
  Probe
ttggatgattccatttctcttgcaa

SEQ ID NO: 332698 - DNA, 25 bp, Artificial
  Probe
ttggactgcccttggagacccagct

SEQ ID NO: 332699 - DNA, 25 bp, Artificial
  Probe
actcttctgggagtaattttgccaa

SEQ ID NO: 332700 - DNA, 25 bp, Artificial
  Probe
gattccatttctcttgcaaggatcc

SEQ ID NO: 332701 - DNA, 25 bp, Artificial
  Probe
tctcacccctcatttggatgattcc

SEQ ID NO: 332702 - DNA, 25 bp, Artificial
  Probe
tcttctgggagtaattttgccaaaa

SEQ ID NO: 332703 - DNA, 25 bp, Artificial
  Probe
tggcccatcttcctggccactcctt

SEQ ID NO: 332704 - DNA, 25 bp, Artificial
  Probe
ggccactccttggactgcccttgga

SEQ ID NO: 332705 - DNA, 25 bp, Artificial
  Probe
tggccactccttggactgcccttgg

SEQ ID NO: 332706 - DNA, 25 bp, Artificial
  Probe
tgcaaggatccctttggcccatctt

SEQ ID NO: 332707 - DNA, 25 bp, Artificial
  Probe
ggactgcccttggagacccagcttc

SEQ ID NO: 332708 - DNA, 25 bp, Artificial
  Probe
atttctcttgcaaggatccctttgg

SEQ ID NO: 332709 - DNA, 25 bp, Artificial
  Probe
gatgattccatttctcttgcaagga

SEQ ID NO: 332710 - DNA, 25 bp, Artificial
  Probe
gcccatcttcctggccactccttgg

SEQ ID NO: 332711 - DNA, 25 bp, Artificial
  Probe
caaggatccctttggcccatcttcc

SEQ ID NO: 332712 - DNA, 25 bp, Artificial
  Probe
aaaccatggtcactttggcaaattt

SEQ ID NO: 332713 - DNA, 25 bp, Artificial
  Probe
cggcagtgtgtgtccctgccgctgc

SEQ ID NO: 332714 - DNA, 25 bp, Artificial
  Probe
tgaggaccgcgcagacaggtttccc

SEQ ID NO: 332715 - DNA, 25 bp, Artificial
  Probe
ggtcttctgtccaaactgagaaaaa

SEQ ID NO: 332716 - DNA, 25 bp, Artificial
  Probe
caaatttccggcagtgtgtgtccct

SEQ ID NO: 332717 - DNA, 25 bp, Artificial
  Probe
ccacagagaccctggcaggaacagc

SEQ ID NO: 332718 - DNA, 25 bp, Artificial
  Probe
ctttggcaaatttccggcagtgtgt

SEQ ID NO: 332719 - DNA, 25 bp, Artificial
  Probe
ctaagtgcgctgagatggttctcaa

SEQ ID NO: 332720 - DNA, 25 bp, Artificial
  Probe
gttttaagcttatgtcccataagaa

SEQ ID NO: 332721 - DNA, 25 bp, Artificial
  Probe
catcttctgaggtaatggctttata

SEQ ID NO: 332722 - DNA, 25 bp, Artificial
  Probe
gctctttccgcacacagcatatgca

SEQ ID NO: 332723 - DNA, 25 bp, Artificial
  Probe
cggtgacttggctaatctactcaga

SEQ ID NO: 332724 - DNA, 25 bp, Artificial
  Probe
ttggctaatctactcagactcattg

SEQ ID NO: 332725 - DNA, 25 bp, Artificial
  Probe
tctgtccaaactgagaaaaaccatg

SEQ ID NO: 332726 - DNA, 25 bp, Artificial
  Probe
agtgtgtgtccctgccgctgcttag

SEQ ID NO: 332727 - DNA, 25 bp, Artificial
  Probe
gaccctggcaggaacagcattgctg

SEQ ID NO: 332728 - DNA, 25 bp, Artificial
  Probe
taataagtttaggtcttctgtccaa

SEQ ID NO: 332729 - DNA, 25 bp, Artificial
  Probe
agaactccattcacaggcaagcagc

SEQ ID NO: 332730 - DNA, 25 bp, Artificial
  Probe
tctcctggtacagttactgtctgct

SEQ ID NO: 332731 - DNA, 25 bp, Artificial
  Probe
ttctgttcagtgagcccacagagac

SEQ ID NO: 332732 - DNA, 25 bp, Artificial
  Probe
ggctaatctactcagactcattgca

SEQ ID NO: 332733 - DNA, 25 bp, Artificial
  Probe
tgtccctgccgctgcttagcaaggg

SEQ ID NO: 332734 - DNA, 25 bp, Artificial
  Probe
tagttttaagcttatgtcccataag

SEQ ID NO: 332735 - DNA, 25 bp, Artificial
  Probe
agactcattgcatggctcttgggta

SEQ ID NO: 332736 - DNA, 25 bp, Artificial
  Probe
agagcctgaccagcagtaaatgtct

SEQ ID NO: 332737 - DNA, 25 bp, Artificial
  Probe
tccctgccgctgcttagcaagggcg

SEQ ID NO: 332738 - DNA, 25 bp, Artificial
  Probe
tgaccagcagtaaatgtctctcctg

SEQ ID NO: 332739 - DNA, 25 bp, Artificial
  Probe
ccgcacacagcatatgcatcttctg

SEQ ID NO: 332740 - DNA, 25 bp, Artificial
  Probe
gcggcggtgacttggctaatctact

SEQ ID NO: 332741 - DNA, 25 bp, Artificial
  Probe
gagaaaaaccatggtcactttggca

SEQ ID NO: 332742 - DNA, 25 bp, Artificial
  Probe
ccaaactgagaaaaaccatggtcac

SEQ ID NO: 332743 - DNA, 25 bp, Artificial
  Probe
ttcagtgagcccacagagaccctgg

SEQ ID NO: 332744 - DNA, 25 bp, Artificial
  Probe
ggcaagcagctctttccgcacacag

SEQ ID NO: 332745 - DNA, 25 bp, Artificial
  Probe
ggtcactttggcaaatttccggcag

SEQ ID NO: 332746 - DNA, 25 bp, Artificial
  Probe
cgctgagatggttctcaatggagaa

SEQ ID NO: 332747 - DNA, 25 bp, Artificial
  Probe
cagcattgctgctgggcttttccag

SEQ ID NO: 332748 - DNA, 25 bp, Artificial
  Probe
ttgctgctgggcttttccagtgtag

SEQ ID NO: 332749 - DNA, 25 bp, Artificial
  Probe
cataagaactccattcacaggcaag

SEQ ID NO: 332750 - DNA, 25 bp, Artificial
  Probe
cgatgcctgaggaccgcgcagacag

SEQ ID NO: 332751 - DNA, 25 bp, Artificial
  Probe
agagaccctggcaggaacagcattg

SEQ ID NO: 332752 - DNA, 25 bp, Artificial
  Probe
ccattcacaggcaagcagctctttc

SEQ ID NO: 332753 - DNA, 25 bp, Artificial
  Probe
ccatggtcactttggcaaatttccg

SEQ ID NO: 332754 - DNA, 25 bp, Artificial
  Probe
agtgtagttcttgctcctaggtcac

SEQ ID NO: 332755 - DNA, 25 bp, Artificial
  Probe
gtcccataagaactccattcacagg

SEQ ID NO: 332756 - DNA, 25 bp, Artificial
  Probe
tttctgttcagtgagcccacagaga

SEQ ID NO: 332757 - DNA, 25 bp, Artificial
  Probe
gaacacgatgcctgaggaccgcgca

SEQ ID NO: 332758 - DNA, 25 bp, Artificial
  Probe
gtgtcgtcaccgttagagaagcgat

SEQ ID NO: 332759 - DNA, 25 bp, Artificial
  Probe
tcaccgttagagaagcgatgcatta

SEQ ID NO: 332760 - DNA, 25 bp, Artificial
  Probe
gcaagataatccagtaactgcattt

SEQ ID NO: 332761 - DNA, 25 bp, Artificial
  Probe
agaagcgatgcattacctgttttag

SEQ ID NO: 332762 - DNA, 25 bp, Artificial
  Probe
tgcattacctgttttagatcaggat

SEQ ID NO: 332763 - DNA, 25 bp, Artificial
  Probe
gtacagatctaagagcagtgcgttc

SEQ ID NO: 332764 - DNA, 25 bp, Artificial
  Probe
tcgtttggttagtccgcattccttg

SEQ ID NO: 332765 - DNA, 25 bp, Artificial
  Probe
aagagcagtgcgttcataacaagct

SEQ ID NO: 332766 - DNA, 25 bp, Artificial
  Probe
cgttcataacaagctgataagaata

SEQ ID NO: 332767 - DNA, 25 bp, Artificial
  Probe
tcataacaagctgataagaatagca

SEQ ID NO: 332768 - DNA, 25 bp, Artificial
  Probe
acctgttttagatcaggatcttgct

SEQ ID NO: 332769 - DNA, 25 bp, Artificial
  Probe
gataatccagtaactgcatttcgtt

SEQ ID NO: 332770 - DNA, 25 bp, Artificial
  Probe
tccagtaactgcatttcgtttggtt

SEQ ID NO: 332771 - DNA, 25 bp, Artificial
  Probe
tgctgtacagatctaagagcagtgc

SEQ ID NO: 332772 - DNA, 25 bp, Artificial
  Probe
cattacctgttttagatcaggatct

SEQ ID NO: 332773 - DNA, 25 bp, Artificial
  Probe
ccttgaactgccttacgtgtcgtca

SEQ ID NO: 332774 - DNA, 25 bp, Artificial
  Probe
ccgcattccttgaactgccttacgt

SEQ ID NO: 332775 - DNA, 25 bp, Artificial
  Probe
ctggcactttagaacagattaatcg

SEQ ID NO: 332776 - DNA, 25 bp, Artificial
  Probe
actggcactttagaacagattaatc

SEQ ID NO: 332777 - DNA, 25 bp, Artificial
  Probe
gccttacgtgtcgtcaccgttagag

SEQ ID NO: 332778 - DNA, 25 bp, Artificial
  Probe
atctaagagcagtgcgttcataaca

SEQ ID NO: 332779 - DNA, 25 bp, Artificial
  Probe
aagataatccagtaactgcatttcg

SEQ ID NO: 332780 - DNA, 25 bp, Artificial
  Probe
gtaactgcatttcgtttggttagtc

SEQ ID NO: 332781 - DNA, 25 bp, Artificial
  Probe
catttcgtttggttagtccgcattc

SEQ ID NO: 332782 - DNA, 25 bp, Artificial
  Probe
ttacgtgtcgtcaccgttagagaag

SEQ ID NO: 332783 - DNA, 25 bp, Artificial
  Probe
ttttagatcaggatcttgctattca

SEQ ID NO: 332784 - DNA, 25 bp, Artificial
  Probe
gtgctgtacagatctaagagcagtg

SEQ ID NO: 332785 - DNA, 25 bp, Artificial
  Probe
gatctaagagcagtgcgttcataac

SEQ ID NO: 332786 - DNA, 25 bp, Artificial
  Probe
cagtaactgcatttcgtttggttag

SEQ ID NO: 332787 - DNA, 25 bp, Artificial
  Probe
ttcataacaagctgataagaatagc

SEQ ID NO: 332788 - DNA, 25 bp, Artificial
  Probe
gagaagcgatgcattacctgtttta

SEQ ID NO: 332789 - DNA, 25 bp, Artificial
  Probe
gttttagatcaggatcttgctattc

SEQ ID NO: 332790 - DNA, 25 bp, Artificial
  Probe
aatccagtaactgcatttcgtttgg

SEQ ID NO: 332791 - DNA, 25 bp, Artificial
  Probe
cattccttgaactgccttacgtgtc

SEQ ID NO: 332792 - DNA, 25 bp, Artificial
  Probe
gagtgctgtacagatctaagagcag

SEQ ID NO: 332793 - DNA, 25 bp, Artificial
  Probe
tgcatttcgtttggttagtccgcat

SEQ ID NO: 332794 - DNA, 25 bp, Artificial
  Probe
cgtcaccgttagagaagcgatgcat

SEQ ID NO: 332795 - DNA, 25 bp, Artificial
  Probe
tttcgtttggttagtccgcattcct

SEQ ID NO: 332796 - DNA, 25 bp, Artificial
  Probe
ttacctgttttagatcaggatcttg

SEQ ID NO: 332797 - DNA, 25 bp, Artificial
  Probe
taatactggcactttagaacagatt

SEQ ID NO: 332798 - DNA, 25 bp, Artificial
  Probe
tggttagtccgcattccttgaactg

SEQ ID NO: 332799 - DNA, 25 bp, Artificial
  Probe
ctgtacagatctaagagcagtgcgt

SEQ ID NO: 332800 - DNA, 25 bp, Artificial
  Probe
acagatctaagagcagtgcgttcat

SEQ ID NO: 332801 - DNA, 25 bp, Artificial
  Probe
tgaactgccttacgtgtcgtcaccg

SEQ ID NO: 332802 - DNA, 25 bp, Artificial
  Probe
ttagtccgcattccttgaactgcct

SEQ ID NO: 332803 - DNA, 25 bp, Artificial
  Probe
taatccagtaactgcatttcgtttg

SEQ ID NO: 332804 - DNA, 25 bp, Artificial
  Probe
actccgaagtgcagccgagcctgtg

SEQ ID NO: 332805 - DNA, 25 bp, Artificial
  Probe
tctcccagagcgatctcacgggcag

SEQ ID NO: 332806 - DNA, 25 bp, Artificial
  Probe
gtgagcatgagactccacagaggtg

SEQ ID NO: 332807 - DNA, 25 bp, Artificial
  Probe
ccgccatcggaggtgcctgaagagc

SEQ ID NO: 332808 - DNA, 25 bp, Artificial
  Probe
tcctaggagatttcatcgagccttg

SEQ ID NO: 332809 - DNA, 25 bp, Artificial
  Probe
cctcactgggcgacaagaggtctcc

SEQ ID NO: 332810 - DNA, 25 bp, Artificial
  Probe
tgacgcgccatcagccctcgggtga

SEQ ID NO: 332811 - DNA, 25 bp, Artificial
  Probe
atacttctcccagagcgatctcacg

SEQ ID NO: 332812 - DNA, 25 bp, Artificial
  Probe
catccagcaagctggcaatacttct

SEQ ID NO: 332813 - DNA, 25 bp, Artificial
  Probe
actccacagaggtgcgcctgccaat

SEQ ID NO: 332814 - DNA, 25 bp, Artificial
  Probe
gggcgacaagaggtctcccgaattg

SEQ ID NO: 332815 - DNA, 25 bp, Artificial
  Probe
cctcgggtgatgacagtggccagct

SEQ ID NO: 332816 - DNA, 25 bp, Artificial
  Probe
ggtgcgcctgccaatgtctcatcct

SEQ ID NO: 332817 - DNA, 25 bp, Artificial
  Probe
gtctcccgaattgcagcctcacaga

SEQ ID NO: 332818 - DNA, 25 bp, Artificial
  Probe
cactgggcgacaagaggtctcccga

SEQ ID NO: 332819 - DNA, 25 bp, Artificial
  Probe
tgtctcatcctcagacctcactggg

SEQ ID NO: 332820 - DNA, 25 bp, Artificial
  Probe
agtggtttggccagtcaaagacaag

SEQ ID NO: 332821 - DNA, 25 bp, Artificial
  Probe
agtcaaagacaagtcctaggagatt

SEQ ID NO: 332822 - DNA, 25 bp, Artificial
  Probe
atctcacgggcagaccgagagagga

SEQ ID NO: 332823 - DNA, 25 bp, Artificial
  Probe
cgaattgcagcctcacagacaagcg

SEQ ID NO: 332824 - DNA, 25 bp, Artificial
  Probe
tttcatcgagccttggatgacgcgc

SEQ ID NO: 332825 - DNA, 25 bp, Artificial
  Probe
atgacagtggccagctttgtattgg

SEQ ID NO: 332826 - DNA, 25 bp, Artificial
  Probe
tcccgcatccagcaagctggcaata

SEQ ID NO: 332827 - DNA, 25 bp, Artificial
  Probe
agcaagctggcaatacttctcccag

SEQ ID NO: 332828 - DNA, 25 bp, Artificial
  Probe
tcagccctcgggtgatgacagtggc

SEQ ID NO: 332829 - DNA, 25 bp, Artificial
  Probe
gaagtgcagccgagcctgtggcttc

SEQ ID NO: 332830 - DNA, 25 bp, Artificial
  Probe
cctgaagagcttgcatcagggagtg

SEQ ID NO: 332831 - DNA, 25 bp, Artificial
  Probe
cgacaagaggtctcccgaattgcag

SEQ ID NO: 332832 - DNA, 25 bp, Artificial
  Probe
atgtctcatcctcagacctcactgg

SEQ ID NO: 332833 - DNA, 25 bp, Artificial
  Probe
tctcacgggcagaccgagagaggaa

SEQ ID NO: 332834 - DNA, 25 bp, Artificial
  Probe
cagagcgatctcacgggcagaccga

SEQ ID NO: 332835 - DNA, 25 bp, Artificial
  Probe
agaggtctcccgaattgcagcctca

SEQ ID NO: 332836 - DNA, 25 bp, Artificial
  Probe
gctttgtattggactttcccacaat

SEQ ID NO: 332837 - DNA, 25 bp, Artificial
  Probe
tggcaatacttctcccagagcgatc

SEQ ID NO: 332838 - DNA, 25 bp, Artificial
  Probe
ggatgacgcgccatcagccctcggg

SEQ ID NO: 332839 - DNA, 25 bp, Artificial
  Probe
tacttctcccagagcgatctcacgg

SEQ ID NO: 332840 - DNA, 25 bp, Artificial
  Probe
cgccatcggaggtgcctgaagagct

SEQ ID NO: 332841 - DNA, 25 bp, Artificial
  Probe
ctcagacctcactgggcgacaagag

SEQ ID NO: 332842 - DNA, 25 bp, Artificial
  Probe
atcggaggtgcctgaagagcttgca

SEQ ID NO: 332843 - DNA, 25 bp, Artificial
  Probe
tgcagcctcacagacaagcgtgcca

SEQ ID NO: 332844 - DNA, 25 bp, Artificial
  Probe
gagccttggatgacgcgccatcagc

SEQ ID NO: 332845 - DNA, 25 bp, Artificial
  Probe
ttggccagtcaaagacaagtcctag

SEQ ID NO: 332846 - DNA, 25 bp, Artificial
  Probe
aggagatttcatcgagccttggatg

SEQ ID NO: 332847 - DNA, 25 bp, Artificial
  Probe
atcctcagacctcactgggcgacaa

SEQ ID NO: 332848 - DNA, 25 bp, Artificial
  Probe
tctcacctctctgcagagatcctga

SEQ ID NO: 332849 - DNA, 25 bp, Artificial
  Probe
cagaggtgcgcctgccaatgtctca

SEQ ID NO: 332850 - DNA, 25 bp, Artificial
  Probe
cagtcttgggccagacaacactatt

SEQ ID NO: 332851 - DNA, 25 bp, Artificial
  Probe
taagcagcattgtgaccacaggatc

SEQ ID NO: 332852 - DNA, 25 bp, Artificial
  Probe
cttgtctttaccagcatccacatgg

SEQ ID NO: 332853 - DNA, 25 bp, Artificial
  Probe
acatctgtctaatggccagcgtgtg

SEQ ID NO: 332854 - DNA, 25 bp, Artificial
  Probe
agcagcattgtgaccacaggatcag

SEQ ID NO: 332855 - DNA, 25 bp, Artificial
  Probe
cttgtttaaatgttaccttggtgca

SEQ ID NO: 332856 - DNA, 25 bp, Artificial
  Probe
taatggccagcgtgtggctggaata

SEQ ID NO: 332857 - DNA, 25 bp, Artificial
  Probe
ggtcaactaacctgccttgtcttta

SEQ ID NO: 332858 - DNA, 25 bp, Artificial
  Probe
cctacaatgtacaaattgctgtatg

SEQ ID NO: 332859 - DNA, 25 bp, Artificial
  Probe
ataagcagcattgtgaccacaggat

SEQ ID NO: 332860 - DNA, 25 bp, Artificial
  Probe
ccacacaaggcaggatgggtcagtg

SEQ ID NO: 332861 - DNA, 25 bp, Artificial
  Probe
agagacagagcagctcaacagtcct

SEQ ID NO: 332862 - DNA, 25 bp, Artificial
  Probe
taacaagcaccagcaccaaagagtt

SEQ ID NO: 332863 - DNA, 25 bp, Artificial
  Probe
acaagcaccagcaccaaagagttag

SEQ ID NO: 332864 - DNA, 25 bp, Artificial
  Probe
accagcatccacatggctttatctg

SEQ ID NO: 332865 - DNA, 25 bp, Artificial
  Probe
gaccacaggatcaggggacttcatc

SEQ ID NO: 332866 - DNA, 25 bp, Artificial
  Probe
ggtcagtggccactagagacagagc

SEQ ID NO: 332867 - DNA, 25 bp, Artificial
  Probe
ccattacagtcttgggccagacaac

SEQ ID NO: 332868 - DNA, 25 bp, Artificial
  Probe
gagtactcaactcagactaacaagc

SEQ ID NO: 332869 - DNA, 25 bp, Artificial
  Probe
actgcctcctgacgagacacatctg

SEQ ID NO: 332870 - DNA, 25 bp, Artificial
  Probe
gtctttaccagcatccacatggctt

SEQ ID NO: 332871 - DNA, 25 bp, Artificial
  Probe
gctcagtctcttgtttaaatgttac

SEQ ID NO: 332872 - DNA, 25 bp, Artificial
  Probe
agcaccaaagagttaggtcaactaa

SEQ ID NO: 332873 - DNA, 25 bp, Artificial
  Probe
tcttcctgaggctcagtctcttgtt

SEQ ID NO: 332874 - DNA, 25 bp, Artificial
  Probe
tcatcttctatcattagagcagaag

SEQ ID NO: 332875 - DNA, 25 bp, Artificial
  Probe
ggacttcatcttctatcattagagc

SEQ ID NO: 332876 - DNA, 25 bp, Artificial
  Probe
gaatagtgaccattacagtcttggg

SEQ ID NO: 332877 - DNA, 25 bp, Artificial
  Probe
agagcagctcaacagtcctgaaccc

SEQ ID NO: 332878 - DNA, 25 bp, Artificial
  Probe
aatggccagcgtgtggctggaataa

SEQ ID NO: 332879 - DNA, 25 bp, Artificial
  Probe
agtctcttgtttaaatgttaccttg

SEQ ID NO: 332880 - DNA, 25 bp, Artificial
  Probe
aggatcaggggacttcatcttctat

SEQ ID NO: 332881 - DNA, 25 bp, Artificial
  Probe
agactaacaagcaccagcaccaaag

SEQ ID NO: 332882 - DNA, 25 bp, Artificial
  Probe
aattacgtcgcctcttcctgaggct

SEQ ID NO: 332883 - DNA, 25 bp, Artificial
  Probe
gtcgcctcttcctgaggctcagtct

SEQ ID NO: 332884 - DNA, 25 bp, Artificial
  Probe
gtactgtacgagtaacttattcttg

SEQ ID NO: 332885 - DNA, 25 bp, Artificial
  Probe
tatgtactgtacgagtaacttattc

SEQ ID NO: 332886 - DNA, 25 bp, Artificial
  Probe
gagttaggtcaactaacctgccttg

SEQ ID NO: 332887 - DNA, 25 bp, Artificial
  Probe
gggccagacaacactatttttacct

SEQ ID NO: 332888 - DNA, 25 bp, Artificial
  Probe
cctttgatcatttctggatggtgta

SEQ ID NO: 332889 - DNA, 25 bp, Artificial
  Probe
agcgtgtggctggaataagcagcat

SEQ ID NO: 332890 - DNA, 25 bp, Artificial
  Probe
ccagcgtgtggctggaataagcagc

SEQ ID NO: 332891 - DNA, 25 bp, Artificial
  Probe
actagagacagagcagctcaacagt

SEQ ID NO: 332892 - DNA, 25 bp, Artificial
  Probe
ccagcatccacatggctttatctgt

SEQ ID NO: 332893 - DNA, 25 bp, Artificial
  Probe
cgagtactcaactcagactaacaag

SEQ ID NO: 332894 - DNA, 25 bp, Artificial
  Probe
cttctatcattagagcagaaggtat

SEQ ID NO: 332895 - DNA, 25 bp, Artificial
  Probe
atcttctgcctttgatcatttctgg

SEQ ID NO: 332896 - DNA, 25 bp, Artificial
  Probe
gatctgagaagtcagcttgtcccga

SEQ ID NO: 332897 - DNA, 25 bp, Artificial
  Probe
aggtgcttgatctatctacaaagaa

SEQ ID NO: 332898 - DNA, 25 bp, Artificial
  Probe
ttgtcccgaggctgtccatgtacgt

SEQ ID NO: 332899 - DNA, 25 bp, Artificial
  Probe
ttcccgtttggcactatggtttgtt

SEQ ID NO: 332900 - DNA, 25 bp, Artificial
  Probe
aggctgtccatgtacgttaagtaaa

SEQ ID NO: 332901 - DNA, 25 bp, Artificial
  Probe
tgcctgccgagctgatctgagaagt

SEQ ID NO: 332902 - DNA, 25 bp, Artificial
  Probe
tgatctgagaagtcagcttgtcccg

SEQ ID NO: 332903 - DNA, 25 bp, Artificial
  Probe
cctgccgagctgatctgagaagtca

SEQ ID NO: 332904 - DNA, 25 bp, Artificial
  Probe
cagcttgtcccgaggctgtccatgt

SEQ ID NO: 332905 - DNA, 25 bp, Artificial
  Probe
atgctcctagaagtcttaatggtgt

SEQ ID NO: 332906 - DNA, 25 bp, Artificial
  Probe
ctgagaagtcagcttgtcccgaggc

SEQ ID NO: 332907 - DNA, 25 bp, Artificial
  Probe
ttgcctgccgagctgatctgagaag

SEQ ID NO: 332908 - DNA, 25 bp, Artificial
  Probe
ccttcttcccgtttggcactatggt

SEQ ID NO: 332909 - DNA, 25 bp, Artificial
  Probe
cccttcttcccgtttggcactatgg

SEQ ID NO: 332910 - DNA, 25 bp, Artificial
  Probe
tcccgtttggcactatggtttgttg

SEQ ID NO: 332911 - DNA, 25 bp, Artificial
  Probe
gtcccgaggctgtccatgtacgtta

SEQ ID NO: 332912 - DNA, 25 bp, Artificial
  Probe
gaggctgtccatgtacgttaagtaa

SEQ ID NO: 332913 - DNA, 25 bp, Artificial
  Probe
ctgtccatgtacgttaagtaaagtg

SEQ ID NO: 332914 - DNA, 25 bp, Artificial
  Probe
gagaagtcagcttgtcccgaggctg

SEQ ID NO: 332915 - DNA, 25 bp, Artificial
  Probe
tgtcccgaggctgtccatgtacgtt

SEQ ID NO: 332916 - DNA, 25 bp, Artificial
  Probe
ccgtttggcactatggtttgttgcc

SEQ ID NO: 332917 - DNA, 25 bp, Artificial
  Probe
tggcactatggtttgttgcctgccg

SEQ ID NO: 332918 - DNA, 25 bp, Artificial
  Probe
ccgaggctgtccatgtacgttaagt

SEQ ID NO: 332919 - DNA, 25 bp, Artificial
  Probe
cttcttcccgtttggcactatggtt

SEQ ID NO: 332920 - DNA, 25 bp, Artificial
  Probe
tttggaggtgcttgatctatctaca

SEQ ID NO: 332921 - DNA, 25 bp, Artificial
  Probe
tttggcactatggtttgttgcctgc

SEQ ID NO: 332922 - DNA, 25 bp, Artificial
  Probe
ttttggaggtgcttgatctatctac

SEQ ID NO: 332923 - DNA, 25 bp, Artificial
  Probe
tggtttgttgcctgccgagctgatc

SEQ ID NO: 332924 - DNA, 25 bp, Artificial
  Probe
actatggtttgttgcctgccgagct

SEQ ID NO: 332925 - DNA, 25 bp, Artificial
  Probe
cccgaggctgtccatgtacgttaag

SEQ ID NO: 332926 - DNA, 25 bp, Artificial
  Probe
tgttgcctgccgagctgatctgaga

SEQ ID NO: 332927 - DNA, 25 bp, Artificial
  Probe
gagctgatctgagaagtcagcttgt

SEQ ID NO: 332928 - DNA, 25 bp, Artificial
  Probe
aaatgctcctagaagtcttaatggt

SEQ ID NO: 332929 - DNA, 25 bp, Artificial
  Probe
aatgctcctagaagtcttaatggtg

SEQ ID NO: 332930 - DNA, 25 bp, Artificial
  Probe
gcactatggtttgttgcctgccgag

SEQ ID NO: 332931 - DNA, 25 bp, Artificial
  Probe
gctcctagaagtcttaatggtgttt

SEQ ID NO: 332932 - DNA, 25 bp, Artificial
  Probe
cgtttggcactatggtttgttgcct

SEQ ID NO: 332933 - DNA, 25 bp, Artificial
  Probe
tgccgagctgatctgagaagtcagc

SEQ ID NO: 332934 - DNA, 25 bp, Artificial
  Probe
tccatgtacgttaagtaaagtgctc

SEQ ID NO: 332935 - DNA, 25 bp, Artificial
  Probe
gcctgccgagctgatctgagaagtc

SEQ ID NO: 332936 - DNA, 25 bp, Artificial
  Probe
gaagtcagcttgtcccgaggctgtc

SEQ ID NO: 332937 - DNA, 25 bp, Artificial
  Probe
gccgagctgatctgagaagtcagct

SEQ ID NO: 332938 - DNA, 25 bp, Artificial
  Probe
cactatggtttgttgcctgccgagc

SEQ ID NO: 332939 - DNA, 25 bp, Artificial
  Probe
gtccatgtacgttaagtaaagtgct

SEQ ID NO: 332940 - DNA, 25 bp, Artificial
  Probe
ggctgtccatgtacgttaagtaaag

SEQ ID NO: 332941 - DNA, 25 bp, Artificial
  Probe
atctgagaagtcagcttgtcccgag

SEQ ID NO: 332942 - DNA, 25 bp, Artificial
  Probe
tgtcaatgagtcacggacaaaagat

SEQ ID NO: 332943 - DNA, 25 bp, Artificial
  Probe
agaagattcacctgtgggttacaaa

SEQ ID NO: 332944 - DNA, 25 bp, Artificial
  Probe
ctgtgactcgttaaactatggaaga

SEQ ID NO: 332945 - DNA, 25 bp, Artificial
  Probe
atagtcagagtaaccccagaacttt

SEQ ID NO: 332946 - DNA, 25 bp, Artificial
  Probe
ttctaccagctcaacaagggggtcc

SEQ ID NO: 332947 - DNA, 25 bp, Artificial
  Probe
aagggggtccttccttgcaagctga

SEQ ID NO: 332948 - DNA, 25 bp, Artificial
  Probe
ggagttctaccagctcaacaagggg

SEQ ID NO: 332949 - DNA, 25 bp, Artificial
  Probe
tcaacaagggggtccttccttgcaa

SEQ ID NO: 332950 - DNA, 25 bp, Artificial
  Probe
caacaagggggtccttccttgcaag

SEQ ID NO: 332951 - DNA, 25 bp, Artificial
  Probe
gaagattcacctgtgggttacaaaa

SEQ ID NO: 332952 - DNA, 25 bp, Artificial
  Probe
ccagctcgtggagttctaccagctc

SEQ ID NO: 332953 - DNA, 25 bp, Artificial
  Probe
ccacagaatttctagagatgaagct

SEQ ID NO: 332954 - DNA, 25 bp, Artificial
  Probe
gagtaaccccagaacttttgtactg

SEQ ID NO: 332955 - DNA, 25 bp, Artificial
  Probe
aacttttgtactgtcaatgagtcac

SEQ ID NO: 332956 - DNA, 25 bp, Artificial
  Probe
ccttgcaagctgaagcattactgtg

SEQ ID NO: 332957 - DNA, 25 bp, Artificial
  Probe
gccatacgaagttcacagatctcat

SEQ ID NO: 332958 - DNA, 25 bp, Artificial
  Probe
caaactgtctgtgactcgttaaact

SEQ ID NO: 332959 - DNA, 25 bp, Artificial
  Probe
ctcagcagttgattacccggcaggg

SEQ ID NO: 332960 - DNA, 25 bp, Artificial
  Probe
tcacgtattgcaaattagtgaagac

SEQ ID NO: 332961 - DNA, 25 bp, Artificial
  Probe
gagatgaagctcagcagttgattac

SEQ ID NO: 332962 - DNA, 25 bp, Artificial
  Probe
ctttcaaattatacccgtggaagat

SEQ ID NO: 332963 - DNA, 25 bp, Artificial
  Probe
catggtttcaccacagaatttctag

SEQ ID NO: 332964 - DNA, 25 bp, Artificial
  Probe
ggctgtttagccaaactgtctgtga

SEQ ID NO: 332965 - DNA, 25 bp, Artificial
  Probe
agacttggattcgtattactctcgt

SEQ ID NO: 332966 - DNA, 25 bp, Artificial
  Probe
cttgcaagctgaagcattactgtgc

SEQ ID NO: 332967 - DNA, 25 bp, Artificial
  Probe
tctcatccagctcgtggagttctac

SEQ ID NO: 332968 - DNA, 25 bp, Artificial
  Probe
gatagtcagagtaaccccagaactt

SEQ ID NO: 332969 - DNA, 25 bp, Artificial
  Probe
acaccctggatgatggccatacgaa

SEQ ID NO: 332970 - DNA, 25 bp, Artificial
  Probe
agggggtccttccttgcaagctgaa

SEQ ID NO: 332971 - DNA, 25 bp, Artificial
  Probe
cactttcaaattatacccgtggaag

SEQ ID NO: 332972 - DNA, 25 bp, Artificial
  Probe
ttggtacgggatagtcagagtaacc

SEQ ID NO: 332973 - DNA, 25 bp, Artificial
  Probe
cacaccctggatgatggccatacga

SEQ ID NO: 332974 - DNA, 25 bp, Artificial
  Probe
gccatggtttcaccacagaatttct

SEQ ID NO: 332975 - DNA, 25 bp, Artificial
  Probe
acaagggggtccttccttgcaagct

SEQ ID NO: 332976 - DNA, 25 bp, Artificial
  Probe
gatgatggccatacgaagttcacag

SEQ ID NO: 332977 - DNA, 25 bp, Artificial
  Probe
taccagctcaacaagggggtccttc

SEQ ID NO: 332978 - DNA, 25 bp, Artificial
  Probe
agatctcatccagctcgtggagttc

SEQ ID NO: 332979 - DNA, 25 bp, Artificial
  Probe
tacgaagttcacagatctcatccag

SEQ ID NO: 332980 - DNA, 25 bp, Artificial
  Probe
ggggtccttccttgcaagctgaagc

SEQ ID NO: 332981 - DNA, 25 bp, Artificial
  Probe
cttggtacgggatagtcagagtaac

SEQ ID NO: 332982 - DNA, 25 bp, Artificial
  Probe
ccccagaacttttgtactgtcaatg

SEQ ID NO: 332983 - DNA, 25 bp, Artificial
  Probe
gtttagccaaactgtctgtgactcg

SEQ ID NO: 332984 - DNA, 25 bp, Artificial
  Probe
atttctagagatgaagctcagcagt

SEQ ID NO: 332985 - DNA, 25 bp, Artificial
  Probe
ctcgtggagttctaccagctcaaca

SEQ ID NO: 332986 - DNA, 25 bp, Artificial
  Probe
tcaccacagaatttctagagatgaa

SEQ ID NO: 332987 - DNA, 25 bp, Artificial
  Probe
ccagccatggtttcaccacagaatt

SEQ ID NO: 332988 - DNA, 25 bp, Artificial
  Probe
tgattttcaaagagcagctcagcag

SEQ ID NO: 332989 - DNA, 25 bp, Artificial
  Probe
ttcaaagagcagctcagcagcagga

SEQ ID NO: 332990 - DNA, 25 bp, Artificial
  Probe
agtacggagccttaccagatcgggg

SEQ ID NO: 332991 - DNA, 25 bp, Artificial
  Probe
gcaaccggcagaacatgggctagtc

SEQ ID NO: 332992 - DNA, 25 bp, Artificial
  Probe
gattttcaaagagcagctcagcagc

SEQ ID NO: 332993 - DNA, 25 bp, Artificial
  Probe
atcagctgattttcaaagagcagct

SEQ ID NO: 332994 - DNA, 25 bp, Artificial
  Probe
cttcacaccaaggacaacttcagga

SEQ ID NO: 332995 - DNA, 25 bp, Artificial
  Probe
agccgccatcagctgattttcaaag

SEQ ID NO: 332996 - DNA, 25 bp, Artificial
  Probe
acggagccttaccagatcggggaat

SEQ ID NO: 332997 - DNA, 25 bp, Artificial
  Probe
agagcagctcagcagcaggaagatc

SEQ ID NO: 332998 - DNA, 25 bp, Artificial
  Probe
agctcagcagcaggaagatcaagag

SEQ ID NO: 332999 - DNA, 25 bp, Artificial
  Probe
caaccggcagaacatgggctagtca

SEQ ID NO: 333000 - DNA, 25 bp, Artificial
  Probe
tcacaccaaggacaacttcaggagg

SEQ ID NO: 333001 - DNA, 25 bp, Artificial
  Probe
agccaagccgccatcagctgatttt

SEQ ID NO: 333002 - DNA, 25 bp, Artificial
  Probe
aaccggcagaacatgggctagtcat

SEQ ID NO: 333003 - DNA, 25 bp, Artificial
  Probe
agccttaccagatcggggaatagcc

SEQ ID NO: 333004 - DNA, 25 bp, Artificial
  Probe
accggcagaacatgggctagtcatt

SEQ ID NO: 333005 - DNA, 25 bp, Artificial
  Probe
agcagctcagcagcaggaagatcaa

SEQ ID NO: 333006 - DNA, 25 bp, Artificial
  Probe
gccaagccgccatcagctgattttc

SEQ ID NO: 333007 - DNA, 25 bp, Artificial
  Probe
aggagaaagccttgcacaggatgcg

SEQ ID NO: 333008 - DNA, 25 bp, Artificial
  Probe
gagaaagccttgcacaggatgcgag

SEQ ID NO: 333009 - DNA, 25 bp, Artificial
  Probe
cagctcagcagcaggaagatcaaga

SEQ ID NO: 333010 - DNA, 25 bp, Artificial
  Probe
cggagccttaccagatcggggaata

SEQ ID NO: 333011 - DNA, 25 bp, Artificial
  Probe
ccgccatcagctgattttcaaagag

SEQ ID NO: 333012 - DNA, 25 bp, Artificial
  Probe
tcagctgattttcaaagagcagctc

SEQ ID NO: 333013 - DNA, 25 bp, Artificial
  Probe
cagaacatgggctagtcattccaga

SEQ ID NO: 333014 - DNA, 25 bp, Artificial
  Probe
ctcagcagcaggaagatcaagagca

SEQ ID NO: 333015 - DNA, 25 bp, Artificial
  Probe
ccaagccgccatcagctgattttca

SEQ ID NO: 333016 - DNA, 25 bp, Artificial
  Probe
tcaaagagcagctcagcagcaggaa

SEQ ID NO: 333017 - DNA, 25 bp, Artificial
  Probe
ccatcagctgattttcaaagagcag

SEQ ID NO: 333018 - DNA, 25 bp, Artificial
  Probe
ccttcacaccaaggacaacttcagg

SEQ ID NO: 333019 - DNA, 25 bp, Artificial
  Probe
tcagcagcaggaagatcaagagcaa

SEQ ID NO: 333020 - DNA, 25 bp, Artificial
  Probe
acaccaaggacaacttcaggagggt

SEQ ID NO: 333021 - DNA, 25 bp, Artificial
  Probe
tttcaaagagcagctcagcagcagg

SEQ ID NO: 333022 - DNA, 25 bp, Artificial
  Probe
cgccatcagctgattttcaaagagc

SEQ ID NO: 333023 - DNA, 25 bp, Artificial
  Probe
ggcaaccggcagaacatgggctagt

SEQ ID NO: 333024 - DNA, 25 bp, Artificial
  Probe
tggcaaccggcagaacatgggctag

SEQ ID NO: 333025 - DNA, 25 bp, Artificial
  Probe
ggagccttaccagatcggggaatag

SEQ ID NO: 333026 - DNA, 25 bp, Artificial
  Probe
gccatcagctgattttcaaagagca

SEQ ID NO: 333027 - DNA, 25 bp, Artificial
  Probe
aaagccttgcacaggatgcgagagt

SEQ ID NO: 333028 - DNA, 25 bp, Artificial
  Probe
aagccttgcacaggatgcgagagtg

SEQ ID NO: 333029 - DNA, 25 bp, Artificial
  Probe
aagccgccatcagctgattttcaaa

SEQ ID NO: 333030 - DNA, 25 bp, Artificial
  Probe
atggcaaccggcagaacatgggcta

SEQ ID NO: 333031 - DNA, 25 bp, Artificial
  Probe
caaagagcagctcagcagcaggaag

SEQ ID NO: 333032 - DNA, 25 bp, Artificial
  Probe
gtacggagccttaccagatcgggga

SEQ ID NO: 333033 - DNA, 25 bp, Artificial
  Probe
attttcaaagagcagctcagcagca

SEQ ID NO: 333034 - DNA, 25 bp, Artificial
  Probe
ggtgtctacttgcagatggacgctt

SEQ ID NO: 333035 - DNA, 25 bp, Artificial
  Probe
gtgtctacttgcagatggacgcttc

SEQ ID NO: 333036 - DNA, 25 bp, Artificial
  Probe
gtggtgtctacttgcagatggacgc

SEQ ID NO: 333037 - DNA, 25 bp, Artificial
  Probe
ttcgcattgcgtctccaggacaaga

SEQ ID NO: 333038 - DNA, 25 bp, Artificial
  Probe
tccaggacaagaagctgccgccttt

SEQ ID NO: 333039 - DNA, 25 bp, Artificial
  Probe
ctttgctgtccgagatctgggatgt

SEQ ID NO: 333040 - DNA, 25 bp, Artificial
  Probe
ccgagatctgggatgtgcatgagta

SEQ ID NO: 333041 - DNA, 25 bp, Artificial
  Probe
tgtctacttgcagatggacgcttcc

SEQ ID NO: 333042 - DNA, 25 bp, Artificial
  Probe
ccgcctttgctgtccgagatctggg

SEQ ID NO: 333043 - DNA, 25 bp, Artificial
  Probe
aggacaagaagctgccgcctttgct

SEQ ID NO: 333044 - DNA, 25 bp, Artificial
  Probe
gtctccaggacaagaagctgccgcc

SEQ ID NO: 333045 - DNA, 25 bp, Artificial
  Probe
tttcgcattgcgtctccaggacaag

SEQ ID NO: 333046 - DNA, 25 bp, Artificial
  Probe
tctacttgcagatggacgcttcctt

SEQ ID NO: 333047 - DNA, 25 bp, Artificial
  Probe
catgcaccttgagtggagagaggtt

SEQ ID NO: 333048 - DNA, 25 bp, Artificial
  Probe
cgcattgcgtctccaggacaagaag

SEQ ID NO: 333049 - DNA, 25 bp, Artificial
  Probe
taccacaccatgcaccttgagtgga

SEQ ID NO: 333050 - DNA, 25 bp, Artificial
  Probe
gctgccgcctttgctgtccgagatc

SEQ ID NO: 333051 - DNA, 25 bp, Artificial
  Probe
acttgcagatggacgcttcctttgc

SEQ ID NO: 333052 - DNA, 25 bp, Artificial
  Probe
caggttttcgcattgcgtctccagg

SEQ ID NO: 333053 - DNA, 25 bp, Artificial
  Probe
tggtgtctacttgcagatggacgct

SEQ ID NO: 333054 - DNA, 25 bp, Artificial
  Probe
tacttgcagatggacgcttcctttg

SEQ ID NO: 333055 - DNA, 25 bp, Artificial
  Probe
gaagctgccgcctttgctgtccgag

SEQ ID NO: 333056 - DNA, 25 bp, Artificial
  Probe
cacaccatgcaccttgagtggagag

SEQ ID NO: 333057 - DNA, 25 bp, Artificial
  Probe
accacaccatgcaccttgagtggag

SEQ ID NO: 333058 - DNA, 25 bp, Artificial
  Probe
gatggacgcttcctttgcctttcct

SEQ ID NO: 333059 - DNA, 25 bp, Artificial
  Probe
tgggaggacactgtcacagcccagt

SEQ ID NO: 333060 - DNA, 25 bp, Artificial
  Probe
aggttttcgcattgcgtctccagga

SEQ ID NO: 333061 - DNA, 25 bp, Artificial
  Probe
gcagatggacgcttcctttgccttt

SEQ ID NO: 333062 - DNA, 25 bp, Artificial
  Probe
caccatgcaccttgagtggagagag

SEQ ID NO: 333063 - DNA, 25 bp, Artificial
  Probe
gcaggttttcgcattgcgtctccag

SEQ ID NO: 333064 - DNA, 25 bp, Artificial
  Probe
tctccaggacaagaagctgccgcct

SEQ ID NO: 333065 - DNA, 25 bp, Artificial
  Probe
accatgcaccttgagtggagagagg

SEQ ID NO: 333066 - DNA, 25 bp, Artificial
  Probe
ctgccgcctttgctgtccgagatct

SEQ ID NO: 333067 - DNA, 25 bp, Artificial
  Probe
ccatgcaccttgagtggagagaggt

SEQ ID NO: 333068 - DNA, 25 bp, Artificial
  Probe
cagatggacgcttcctttgcctttc

SEQ ID NO: 333069 - DNA, 25 bp, Artificial
  Probe
ctccaggacaagaagctgccgcctt

SEQ ID NO: 333070 - DNA, 25 bp, Artificial
  Probe
gcgtctccaggacaagaagctgccg

SEQ ID NO: 333071 - DNA, 25 bp, Artificial
  Probe
tgccgcctttgctgtccgagatctg

SEQ ID NO: 333072 - DNA, 25 bp, Artificial
  Probe
tggtggtgtctacttgcagatggac

SEQ ID NO: 333073 - DNA, 25 bp, Artificial
  Probe
tttgctgtccgagatctgggatgtg

SEQ ID NO: 333074 - DNA, 25 bp, Artificial
  Probe
cgtctccaggacaagaagctgccgc

SEQ ID NO: 333075 - DNA, 25 bp, Artificial
  Probe
gtctacttgcagatggacgcttcct

SEQ ID NO: 333076 - DNA, 25 bp, Artificial
  Probe
acaccatgcaccttgagtggagaga

SEQ ID NO: 333077 - DNA, 25 bp, Artificial
  Probe
ggaggacactgtcacagcccagtcc

SEQ ID NO: 333078 - DNA, 25 bp, Artificial
  Probe
agctgccgcctttgctgtccgagat

SEQ ID NO: 333079 - DNA, 25 bp, Artificial
  Probe
atggacgcttcctttgcctttcctg

SEQ ID NO: 333080 - DNA, 25 bp, Artificial
  Probe
tatcctttgtttgcagtgaccttta

SEQ ID NO: 333081 - DNA, 25 bp, Artificial
  Probe
gtatcaagtcaagatacctttggcc

SEQ ID NO: 333082 - DNA, 25 bp, Artificial
  Probe
catagtgtccttatttgtatgaaca

SEQ ID NO: 333083 - DNA, 25 bp, Artificial
  Probe
gacctttaaggcagcactgtttagc

SEQ ID NO: 333084 - DNA, 25 bp, Artificial
  Probe
gttctattgtaatcgctttgcctgt

SEQ ID NO: 333085 - DNA, 25 bp, Artificial
  Probe
gcaagaccaccagctcctggaggct

SEQ ID NO: 333086 - DNA, 25 bp, Artificial
  Probe
tcgttgcatagtgtccttatttgta

SEQ ID NO: 333087 - DNA, 25 bp, Artificial
  Probe
cactgtttagcactttgatatgaaa

SEQ ID NO: 333088 - DNA, 25 bp, Artificial
  Probe
tgcctgtatttattgcaagaccacc

SEQ ID NO: 333089 - DNA, 25 bp, Artificial
  Probe
gaccaccagctcctggaggctgagt

SEQ ID NO: 333090 - DNA, 25 bp, Artificial
  Probe
cagtgacctttaaggcagcactgtt

SEQ ID NO: 333091 - DNA, 25 bp, Artificial
  Probe
tgtatttattgcaagaccaccagct

SEQ ID NO: 333092 - DNA, 25 bp, Artificial
  Probe
gttttgctaagactcaaactttgaa

SEQ ID NO: 333093 - DNA, 25 bp, Artificial
  Probe
tatgaacatttgtatgcacgttcta

SEQ ID NO: 333094 - DNA, 25 bp, Artificial
  Probe
gctaagactcaaactttgaatgtca

SEQ ID NO: 333095 - DNA, 25 bp, Artificial
  Probe
aatcgctttgcctgtatttattgca

SEQ ID NO: 333096 - DNA, 25 bp, Artificial
  Probe
tacctttggccgttttgctaagact

SEQ ID NO: 333097 - DNA, 25 bp, Artificial
  Probe
gcatagtgtccttatttgtatgaac

SEQ ID NO: 333098 - DNA, 25 bp, Artificial
  Probe
ggtgttcgtggtgacttggatacac

SEQ ID NO: 333099 - DNA, 25 bp, Artificial
  Probe
caaaccaatgtcacggtagcttctg

SEQ ID NO: 333100 - DNA, 25 bp, Artificial
  Probe
tggtgacttggatacaccggttaga

SEQ ID NO: 333101 - DNA, 25 bp, Artificial
  Probe
tttgtatgcacgttctattgtaatc

SEQ ID NO: 333102 - DNA, 25 bp, Artificial
  Probe
caagtcaagatacctttggccgttt

SEQ ID NO: 333103 - DNA, 25 bp, Artificial
  Probe
tattgcaagaccaccagctcctgga

SEQ ID NO: 333104 - DNA, 25 bp, Artificial
  Probe
ttcgtggtgacttggatacaccggt

SEQ ID NO: 333105 - DNA, 25 bp, Artificial
  Probe
cgttgcatagtgtccttatttgtat

SEQ ID NO: 333106 - DNA, 25 bp, Artificial
  Probe
tttgctaagactcaaactttgaatg

SEQ ID NO: 333107 - DNA, 25 bp, Artificial
  Probe
catttgtatgcacgttctattgtaa

SEQ ID NO: 333108 - DNA, 25 bp, Artificial
  Probe
cctttggccgttttgctaagactca

SEQ ID NO: 333109 - DNA, 25 bp, Artificial
  Probe
attcgttgcatagtgtccttatttg

SEQ ID NO: 333110 - DNA, 25 bp, Artificial
  Probe
gctcctggaggctgagttacagaat

SEQ ID NO: 333111 - DNA, 25 bp, Artificial
  Probe
taaggcagcactgtttagcactttg

SEQ ID NO: 333112 - DNA, 25 bp, Artificial
  Probe
ccgttttgctaagactcaaactttg

SEQ ID NO: 333113 - DNA, 25 bp, Artificial
  Probe
aagaccaccagctcctggaggctga

SEQ ID NO: 333114 - DNA, 25 bp, Artificial
  Probe
tgtcacggtagcttctgttagcttt

SEQ ID NO: 333115 - DNA, 25 bp, Artificial
  Probe
agtcaagatacctttggccgttttg

SEQ ID NO: 333116 - DNA, 25 bp, Artificial
  Probe
tcaagatacctttggccgttttgct

SEQ ID NO: 333117 - DNA, 25 bp, Artificial
  Probe
tgaacatttgtatgcacgttctatt

SEQ ID NO: 333118 - DNA, 25 bp, Artificial
  Probe
tttattgcaagaccaccagctcctg

SEQ ID NO: 333119 - DNA, 25 bp, Artificial
  Probe
tgacttggatacaccggttagaaat

SEQ ID NO: 333120 - DNA, 25 bp, Artificial
  Probe
ctttgaatgtcaaaccaatgtcacg

SEQ ID NO: 333121 - DNA, 25 bp, Artificial
  Probe
attttatcctttgtttgcagtgacc

SEQ ID NO: 333122 - DNA, 25 bp, Artificial
  Probe
attgtaatcgctttgcctgtattta

SEQ ID NO: 333123 - DNA, 25 bp, Artificial
  Probe
cctggaggctgagttacagaataat

SEQ ID NO: 333124 - DNA, 25 bp, Artificial
  Probe
gtatttattgcaagaccaccagctc

SEQ ID NO: 333125 - DNA, 25 bp, Artificial
  Probe
ccaatgtcacggtagcttctgttag

SEQ ID NO: 333126 - DNA, 25 bp, Artificial
  Probe
tgctcttcctacaatggagactagc

SEQ ID NO: 333127 - DNA, 25 bp, Artificial
  Probe
cctgagcccaggagttgactgaggt

SEQ ID NO: 333128 - DNA, 25 bp, Artificial
  Probe
ctgagtatttctctgtgttccaagg

SEQ ID NO: 333129 - DNA, 25 bp, Artificial
  Probe
tcatgtgtgccctgggggacattac

SEQ ID NO: 333130 - DNA, 25 bp, Artificial
  Probe
tgtctgttggttaccctagtgggga

SEQ ID NO: 333131 - DNA, 25 bp, Artificial
  Probe
atctggactgcgtctcatcaaagtt

SEQ ID NO: 333132 - DNA, 25 bp, Artificial
  Probe
accctagtggggacacctggacagt

SEQ ID NO: 333133 - DNA, 25 bp, Artificial
  Probe
cagtgactgggcaacagtgacatgc

SEQ ID NO: 333134 - DNA, 25 bp, Artificial
  Probe
gctaagtgagcctggtcctccagtg

SEQ ID NO: 333135 - DNA, 25 bp, Artificial
  Probe
catcaaagtttccagaagggttaat

SEQ ID NO: 333136 - DNA, 25 bp, Artificial
  Probe
tccttgctaagtgagcctggtcctc

SEQ ID NO: 333137 - DNA, 25 bp, Artificial
  Probe
gaagggttaattcttccttgagcac

SEQ ID NO: 333138 - DNA, 25 bp, Artificial
  Probe
atgtcttcaggcattgtcatgtgtg

SEQ ID NO: 333139 - DNA, 25 bp, Artificial
  Probe
ccagtggcagtgactgggcaacagt

SEQ ID NO: 333140 - DNA, 25 bp, Artificial
  Probe
gctgcagacaccagcatcactgctt

SEQ ID NO: 333141 - DNA, 25 bp, Artificial
  Probe
tcaagtctcctgtctgttggttacc

SEQ ID NO: 333142 - DNA, 25 bp, Artificial
  Probe
gactagctttttcctgagtatttct

SEQ ID NO: 333143 - DNA, 25 bp, Artificial
  Probe
cattgtcatgtgtgccctgggggac

SEQ ID NO: 333144 - DNA, 25 bp, Artificial
  Probe
actgatcaagtctcctgtctgttgg

SEQ ID NO: 333145 - DNA, 25 bp, Artificial
  Probe
ggacacctggacagtgtctcccagt

SEQ ID NO: 333146 - DNA, 25 bp, Artificial
  Probe
gtgtcttccttgctaagtgagcctg

SEQ ID NO: 333147 - DNA, 25 bp, Artificial
  Probe
ctggtcctccagtggcagtgactgg

SEQ ID NO: 333148 - DNA, 25 bp, Artificial
  Probe
agtggggacacctggacagtgtctc

SEQ ID NO: 333149 - DNA, 25 bp, Artificial
  Probe
cccactgatcaagtctcctgtctgt

SEQ ID NO: 333150 - DNA, 25 bp, Artificial
  Probe
ctggacagtgtctcccagtgtcttc

SEQ ID NO: 333151 - DNA, 25 bp, Artificial
  Probe
tgccctgggggacattacagcaccc

SEQ ID NO: 333152 - DNA, 25 bp, Artificial
  Probe
catccccgtctttaaagctgttctg

SEQ ID NO: 333153 - DNA, 25 bp, Artificial
  Probe
ctacaatggagactagctttttcct

SEQ ID NO: 333154 - DNA, 25 bp, Artificial
  Probe
atggagactagctttttcctgagta

SEQ ID NO: 333155 - DNA, 25 bp, Artificial
  Probe
gtgccctgggggacattacagcacc

SEQ ID NO: 333156 - DNA, 25 bp, Artificial
  Probe
gggtctgtggctgcagacaccagca

SEQ ID NO: 333157 - DNA, 25 bp, Artificial
  Probe
gactgggcaacagtgacatgctggc

SEQ ID NO: 333158 - DNA, 25 bp, Artificial
  Probe
aggtctcggcctgagcccaggagtt

SEQ ID NO: 333159 - DNA, 25 bp, Artificial
  Probe
cacaggggtctgtggctgcagacac

SEQ ID NO: 333160 - DNA, 25 bp, Artificial
  Probe
tgttccaaggtctcggcctgagccc

SEQ ID NO: 333161 - DNA, 25 bp, Artificial
  Probe
aaggtctcggcctgagcccaggagt

SEQ ID NO: 333162 - DNA, 25 bp, Artificial
  Probe
tccagctggcccagtgtgaatacct

SEQ ID NO: 333163 - DNA, 25 bp, Artificial
  Probe
tcctccagtggcagtgactgggcaa

SEQ ID NO: 333164 - DNA, 25 bp, Artificial
  Probe
tggttaccctagtggggacacctgg

SEQ ID NO: 333165 - DNA, 25 bp, Artificial
  Probe
ttggttaccctagtggggacacctg

SEQ ID NO: 333166 - DNA, 25 bp, Artificial
  Probe
agagtccccactgatcaagtctcct

SEQ ID NO: 333167 - DNA, 25 bp, Artificial
  Probe
cccacaggggtctgtggctgcagac

SEQ ID NO: 333168 - DNA, 25 bp, Artificial
  Probe
cggcctgagcccaggagttgactga

SEQ ID NO: 333169 - DNA, 25 bp, Artificial
  Probe
ccttgctaagtgagcctggtcctcc

SEQ ID NO: 333170 - DNA, 25 bp, Artificial
  Probe
gttaattcttccttgagcacagtat

SEQ ID NO: 333171 - DNA, 25 bp, Artificial
  Probe
ggcaacagtgacatgctggcctccc

SEQ ID NO: 333172 - DNA, 25 bp, Artificial
  Probe
gtttctctgatcgtgttcccaatca

SEQ ID NO: 333173 - DNA, 25 bp, Artificial
  Probe
tcctggacacaatgaatgatagcct

SEQ ID NO: 333174 - DNA, 25 bp, Artificial
  Probe
aggaggaccctctgggccctgacaa

SEQ ID NO: 333175 - DNA, 25 bp, Artificial
  Probe
cccctggttctaagccagtggtact

SEQ ID NO: 333176 - DNA, 25 bp, Artificial
  Probe
gacgggtgtgcctgaagcaaaagca

SEQ ID NO: 333177 - DNA, 25 bp, Artificial
  Probe
atttggaagccaagccaggctcccc

SEQ ID NO: 333178 - DNA, 25 bp, Artificial
  Probe
aggaagtgaccactgacttgcctgg

SEQ ID NO: 333179 - DNA, 25 bp, Artificial
  Probe
aaagcatgggtactcacgtgagtcc

SEQ ID NO: 333180 - DNA, 25 bp, Artificial
  Probe
agcaataggatctcccagagtcctc

SEQ ID NO: 333181 - DNA, 25 bp, Artificial
  Probe
agggctgagcggtgccctttgacct

SEQ ID NO: 333182 - DNA, 25 bp, Artificial
  Probe
tgaatgatagcctcagcaagatcct

SEQ ID NO: 333183 - DNA, 25 bp, Artificial
  Probe
tcatccctgagctgcgatagaggca

SEQ ID NO: 333184 - DNA, 25 bp, Artificial
  Probe
agggtcttacccttgccactcaagc

SEQ ID NO: 333185 - DNA, 25 bp, Artificial
  Probe
ggttgtctctccacatccttctttg

SEQ ID NO: 333186 - DNA, 25 bp, Artificial
  Probe
accgtctgagggagctagcaggcaa

SEQ ID NO: 333187 - DNA, 25 bp, Artificial
  Probe
gatgggcaggcctgcacctgctgca

SEQ ID NO: 333188 - DNA, 25 bp, Artificial
  Probe
tgcctgaagcaaaagcatgggtact

SEQ ID NO: 333189 - DNA, 25 bp, Artificial
  Probe
gaataccacacctctgaaaagtgtt

SEQ ID NO: 333190 - DNA, 25 bp, Artificial
  Probe
cacctgagttttgcaaaaagccacc

SEQ ID NO: 333191 - DNA, 25 bp, Artificial
  Probe
ctccctgctggcaagtgaagtgggt

SEQ ID NO: 333192 - DNA, 25 bp, Artificial
  Probe
ctctgggccctgacaacatcaactg

SEQ ID NO: 333193 - DNA, 25 bp, Artificial
  Probe
atgaagaaatcctgcggcaaagcct

SEQ ID NO: 333194 - DNA, 25 bp, Artificial
  Probe
aactacctactgaataaagcccagg

SEQ ID NO: 333195 - DNA, 25 bp, Artificial
  Probe
tgacagagccgtgaggaccaggaaa

SEQ ID NO: 333196 - DNA, 25 bp, Artificial
  Probe
cattagtcacctgctgctcctggca

SEQ ID NO: 333197 - DNA, 25 bp, Artificial
  Probe
gccgtgaggaccaggaaatgcccac

SEQ ID NO: 333198 - DNA, 25 bp, Artificial
  Probe
cacttgtgtggctggatagtgcaag

SEQ ID NO: 333199 - DNA, 25 bp, Artificial
  Probe
catcagtttccctggcctggaggag

SEQ ID NO: 333200 - DNA, 25 bp, Artificial
  Probe
gctagcacaagaacactactgtaac

SEQ ID NO: 333201 - DNA, 25 bp, Artificial
  Probe
gaataaagcccaggtggcctgatct

SEQ ID NO: 333202 - DNA, 25 bp, Artificial
  Probe
aggggttgcattagcttctgcttgt

SEQ ID NO: 333203 - DNA, 25 bp, Artificial
  Probe
actcaagccaccagttatcctggca

SEQ ID NO: 333204 - DNA, 25 bp, Artificial
  Probe
tctgaaaagtgttcccctcttcgac

SEQ ID NO: 333205 - DNA, 25 bp, Artificial
  Probe
accaccacatttggaagccaagcca

SEQ ID NO: 333206 - DNA, 25 bp, Artificial
  Probe
tcagccaaccgttctctcacagaag

SEQ ID NO: 333207 - DNA, 25 bp, Artificial
  Probe
ggtgtccttgccaggaccccactta

SEQ ID NO: 333208 - DNA, 25 bp, Artificial
  Probe
cttagctctcattatccagagactg

SEQ ID NO: 333209 - DNA, 25 bp, Artificial
  Probe
gggcaggacctgcagttcagcctct

SEQ ID NO: 333210 - DNA, 25 bp, Artificial
  Probe
ttatgccaaggtaaaagccacgtct

SEQ ID NO: 333211 - DNA, 25 bp, Artificial
  Probe
ttatccagagactgccaggatgggt

SEQ ID NO: 333212 - DNA, 25 bp, Artificial
  Probe
ccccgggagctccttaactcagaag

SEQ ID NO: 333213 - DNA, 25 bp, Artificial
  Probe
gcctctgatccctttagcagttctc

SEQ ID NO: 333214 - DNA, 25 bp, Artificial
  Probe
atagtgcaaggctcagtgtacccca

SEQ ID NO: 333215 - DNA, 25 bp, Artificial
  Probe
acaagctagcacaagaacactactg

SEQ ID NO: 333216 - DNA, 25 bp, Artificial
  Probe
gttccccaagttgtcctgtaattat

SEQ ID NO: 333217 - DNA, 25 bp, Artificial
  Probe
cctctgaaaagtgttcccctcttcg

SEQ ID NO: 333218 - DNA, 25 bp, Artificial
  Probe
cacgtgatgaggtgcccctgggact

SEQ ID NO: 333219 - DNA, 25 bp, Artificial
  Probe
ggtgcccctgggactttctaccctg

SEQ ID NO: 333220 - DNA, 25 bp, Artificial
  Probe
tgtactgctggcttgcagctctgaa

SEQ ID NO: 333221 - DNA, 25 bp, Artificial
  Probe
tgctggcttgcagctctgaacagtg

SEQ ID NO: 333222 - DNA, 25 bp, Artificial
  Probe
ctgggactttctaccctgtactgct

SEQ ID NO: 333223 - DNA, 25 bp, Artificial
  Probe
tggacaactgcacagcttgtgaagt

SEQ ID NO: 333224 - DNA, 25 bp, Artificial
  Probe
aacacccagcagaagcgcagagaag

SEQ ID NO: 333225 - DNA, 25 bp, Artificial
  Probe
gactttctaccctgtactgctggct

SEQ ID NO: 333226 - DNA, 25 bp, Artificial
  Probe
accctgtactgctggcttgcagctc

SEQ ID NO: 333227 - DNA, 25 bp, Artificial
  Probe
actctggacaactgcacagcttgtg

SEQ ID NO: 333228 - DNA, 25 bp, Artificial
  Probe
tgcccctgggactttctaccctgta

SEQ ID NO: 333229 - DNA, 25 bp, Artificial
  Probe
gaaagacagactctggacaactgca

SEQ ID NO: 333230 - DNA, 25 bp, Artificial
  Probe
aagacagactctggacaactgcaca

SEQ ID NO: 333231 - DNA, 25 bp, Artificial
  Probe
gttgttctcataaacacccagcaga

SEQ ID NO: 333232 - DNA, 25 bp, Artificial
  Probe
aagagacgaggacgatcggaaagac

SEQ ID NO: 333233 - DNA, 25 bp, Artificial
  Probe
cataaacacccagcagaagcgcaga

SEQ ID NO: 333234 - DNA, 25 bp, Artificial
  Probe
aggtgcaaacccatcagagttgttg

SEQ ID NO: 333235 - DNA, 25 bp, Artificial
  Probe
atcggaaagacagactctggacaac

SEQ ID NO: 333236 - DNA, 25 bp, Artificial
  Probe
taagtgctataccaaagacttggat

SEQ ID NO: 333237 - DNA, 25 bp, Artificial
  Probe
acacccagcagaagcgcagagaaga

SEQ ID NO: 333238 - DNA, 25 bp, Artificial
  Probe
ctaacggctacagaaagtatcttat

SEQ ID NO: 333239 - DNA, 25 bp, Artificial
  Probe
tgctataccaaagacttggatttgg

SEQ ID NO: 333240 - DNA, 25 bp, Artificial
  Probe
gttctcataaacacccagcagaagc

SEQ ID NO: 333241 - DNA, 25 bp, Artificial
  Probe
cagcagaagcgcagagaagagacga

SEQ ID NO: 333242 - DNA, 25 bp, Artificial
  Probe
agacgaggacgatcggaaagacaga

SEQ ID NO: 333243 - DNA, 25 bp, Artificial
  Probe
tggcttgcagctctgaacagtgcaa

SEQ ID NO: 333244 - DNA, 25 bp, Artificial
  Probe
agcccacgtgatgaggtgcccctgg

SEQ ID NO: 333245 - DNA, 25 bp, Artificial
  Probe
ctataccaaagacttggatttggta

SEQ ID NO: 333246 - DNA, 25 bp, Artificial
  Probe
agttgttgttctcataaacacccag

SEQ ID NO: 333247 - DNA, 25 bp, Artificial
  Probe
ccctgggactttctaccctgtactg

SEQ ID NO: 333248 - DNA, 25 bp, Artificial
  Probe
gcgaaacagcccacgtgatgaggtg

SEQ ID NO: 333249 - DNA, 25 bp, Artificial
  Probe
agtaagtgctataccaaagacttgg

SEQ ID NO: 333250 - DNA, 25 bp, Artificial
  Probe
taaacacccagcagaagcgcagaga

SEQ ID NO: 333251 - DNA, 25 bp, Artificial
  Probe
cagtgcaagctaacggctacagaaa

SEQ ID NO: 333252 - DNA, 25 bp, Artificial
  Probe
atgaggtgcccctgggactttctac

SEQ ID NO: 333253 - DNA, 25 bp, Artificial
  Probe
caagctaacggctacagaaagtatc

SEQ ID NO: 333254 - DNA, 25 bp, Artificial
  Probe
agagttgttgttctcataaacaccc

SEQ ID NO: 333255 - DNA, 25 bp, Artificial
  Probe
taccaaagacttggatttggtattc

SEQ ID NO: 333256 - DNA, 25 bp, Artificial
  Probe
gttgttgttctcataaacacccagc

SEQ ID NO: 333257 - DNA, 25 bp, Artificial
  Probe
tgcagctctgaacagtgcaagctaa

SEQ ID NO: 333258 - DNA, 25 bp, Artificial
  Probe
agtgagcgaaacagcccacgtgatg

SEQ ID NO: 333259 - DNA, 25 bp, Artificial
  Probe
tcataaacacccagcagaagcgcag

SEQ ID NO: 333260 - DNA, 25 bp, Artificial
  Probe
ctgaacagtgcaagctaacggctac

SEQ ID NO: 333261 - DNA, 25 bp, Artificial
  Probe
gaccaggtgcaaacccatcagagtt

SEQ ID NO: 333262 - DNA, 25 bp, Artificial
  Probe
cagcttgtgaagtgagcgaaacagc

SEQ ID NO: 333263 - DNA, 25 bp, Artificial
  Probe
gaaacagcccacgtgatgaggtgcc

SEQ ID NO: 333264 - DNA, 25 bp, Artificial
  Probe
atgctgtctacagcagccgcctggc

SEQ ID NO: 333265 - DNA, 25 bp, Artificial
  Probe
gctgcggatggcatctgaaggcatc

SEQ ID NO: 333266 - DNA, 25 bp, Artificial
  Probe
ctagctaaaagtcctgtttgcgttc

SEQ ID NO: 333267 - DNA, 25 bp, Artificial
  Probe
ctggaaccacacacggtactctgtg

SEQ ID NO: 333268 - DNA, 25 bp, Artificial
  Probe
agtgcctttcctgtgtgtctgggga

SEQ ID NO: 333269 - DNA, 25 bp, Artificial
  Probe
acagcagccgcctggccgtagcgtt

SEQ ID NO: 333270 - DNA, 25 bp, Artificial
  Probe
gatggcatctgaaggcatcagtggt

SEQ ID NO: 333271 - DNA, 25 bp, Artificial
  Probe
aaccacacacggtactctgtgcttg

SEQ ID NO: 333272 - DNA, 25 bp, Artificial
  Probe
tctgagcccagtacagaatgttctg

SEQ ID NO: 333273 - DNA, 25 bp, Artificial
  Probe
gccgcctggccgtagcgtttgagtc

SEQ ID NO: 333274 - DNA, 25 bp, Artificial
  Probe
ctaaaagtcctgtttgcgttcattt

SEQ ID NO: 333275 - DNA, 25 bp, Artificial
  Probe
ttatagcgcttttcactgaaaatcg

SEQ ID NO: 333276 - DNA, 25 bp, Artificial
  Probe
ctggccgtagcgtttgagtctccac

SEQ ID NO: 333277 - DNA, 25 bp, Artificial
  Probe
tttatagtcttctctctaggcacag

SEQ ID NO: 333278 - DNA, 25 bp, Artificial
  Probe
cacagacaccagactgcaccaagaa

SEQ ID NO: 333279 - DNA, 25 bp, Artificial
  Probe
ctgaagcaggtttggttgtagcagc

SEQ ID NO: 333280 - DNA, 25 bp, Artificial
  Probe
ctccggaagttgcttggaaacagca

SEQ ID NO: 333281 - DNA, 25 bp, Artificial
  Probe
aacttgcatgctcacggtccccaga

SEQ ID NO: 333282 - DNA, 25 bp, Artificial
  Probe
tggaaggtgcctgctgtgcgccatc

SEQ ID NO: 333283 - DNA, 25 bp, Artificial
  Probe
tggccataccacacgcacgggcagg

SEQ ID NO: 333284 - DNA, 25 bp, Artificial
  Probe
cataccacacgcacgggcaggcaaa

SEQ ID NO: 333285 - DNA, 25 bp, Artificial
  Probe
gagtctccacgtgctggccatacca

SEQ ID NO: 333286 - DNA, 25 bp, Artificial
  Probe
gtccccagacgctctactagctaaa

SEQ ID NO: 333287 - DNA, 25 bp, Artificial
  Probe
ccgcctggccgtagcgtttgagtct

SEQ ID NO: 333288 - DNA, 25 bp, Artificial
  Probe
agtactgtacggatgttctggaacc

SEQ ID NO: 333289 - DNA, 25 bp, Artificial
  Probe
gttgtagcagcgttacctctgtcta

SEQ ID NO: 333290 - DNA, 25 bp, Artificial
  Probe
accagaatccgcaaacttgcatgct

SEQ ID NO: 333291 - DNA, 25 bp, Artificial
  Probe
tgtgacctcacgtttgacttttatt

SEQ ID NO: 333292 - DNA, 25 bp, Artificial
  Probe
aaacttgcatgctcacggtccccag

SEQ ID NO: 333293 - DNA, 25 bp, Artificial
  Probe
tggacactccggaagttgcttggaa

SEQ ID NO: 333294 - DNA, 25 bp, Artificial
  Probe
gtgctggccataccacacgcacggg

SEQ ID NO: 333295 - DNA, 25 bp, Artificial
  Probe
gcgcttttcactgaaaatcgaaata

SEQ ID NO: 333296 - DNA, 25 bp, Artificial
  Probe
tccgcaaacttgcatgctcacggtc

SEQ ID NO: 333297 - DNA, 25 bp, Artificial
  Probe
catggcagtgcctttcctgtgtgtc

SEQ ID NO: 333298 - DNA, 25 bp, Artificial
  Probe
gacaccagactgcaccaagaactag

SEQ ID NO: 333299 - DNA, 25 bp, Artificial
  Probe
gcaggtttggttgtagcagcgttac

SEQ ID NO: 333300 - DNA, 25 bp, Artificial
  Probe
ctgctgtgcgccatctctgaagcag

SEQ ID NO: 333301 - DNA, 25 bp, Artificial
  Probe
tttggttgtagcagcgttacctctg

SEQ ID NO: 333302 - DNA, 25 bp, Artificial
  Probe
ttgcgttcatttattccttgctgga

SEQ ID NO: 333303 - DNA, 25 bp, Artificial
  Probe
ccagtacagaatgttctggaaggga

SEQ ID NO: 333304 - DNA, 25 bp, Artificial
  Probe
tgagatgatgctgtctacagcagcc

SEQ ID NO: 333305 - DNA, 25 bp, Artificial
  Probe
aggtgcctgctgtgcgccatctctg

SEQ ID NO: 333306 - DNA, 25 bp, Artificial
  Probe
agtcttctctctaggcacagccatc

SEQ ID NO: 333307 - DNA, 25 bp, Artificial
  Probe
acacgcacgggcaggcaaatgtctg

SEQ ID NO: 333308 - DNA, 25 bp, Artificial
  Probe
ctctgtctagaggaaagcttgtgtg

SEQ ID NO: 333309 - DNA, 25 bp, Artificial
  Probe
cttgctggacactccggaagttgct

SEQ ID NO: 333310 - DNA, 25 bp, Artificial
  Probe
agcttttcgccgtgagcatgcgcac

SEQ ID NO: 333311 - DNA, 25 bp, Artificial
  Probe
cctgtaccagccaaagcatgccatt

SEQ ID NO: 333312 - DNA, 25 bp, Artificial
  Probe
tccagaggcctctctttggaaggtc

SEQ ID NO: 333313 - DNA, 25 bp, Artificial
  Probe
accagccaaagcatgccattgcttc

SEQ ID NO: 333314 - DNA, 25 bp, Artificial
  Probe
cttctgagaggctctaagcttttcg

SEQ ID NO: 333315 - DNA, 25 bp, Artificial
  Probe
ctctttggaaggtcttttgagggct

SEQ ID NO: 333316 - DNA, 25 bp, Artificial
  Probe
cctgcacatgaagaggcatctctga

SEQ ID NO: 333317 - DNA, 25 bp, Artificial
  Probe
ggcatagcacccacggtgcatggtg

SEQ ID NO: 333318 - DNA, 25 bp, Artificial
  Probe
atcctgtaggctaaaagaggcttcc

SEQ ID NO: 333319 - DNA, 25 bp, Artificial
  Probe
ctaaaagaggcttccaggctaagag

SEQ ID NO: 333320 - DNA, 25 bp, Artificial
  Probe
tacaaaagtcatgtcagaagcggca

SEQ ID NO: 333321 - DNA, 25 bp, Artificial
  Probe
agtcatgtcagaagcggcatagcac

SEQ ID NO: 333322 - DNA, 25 bp, Artificial
  Probe
gatacctgtaccagccaaagcatgc

SEQ ID NO: 333323 - DNA, 25 bp, Artificial
  Probe
atgaagaggcatctctgagggagca

SEQ ID NO: 333324 - DNA, 25 bp, Artificial
  Probe
catgcgcactgagaatgttaatggg

SEQ ID NO: 333325 - DNA, 25 bp, Artificial
  Probe
ttccaggctaagaggcggccatgga

SEQ ID NO: 333326 - DNA, 25 bp, Artificial
  Probe
gtcagaagcggcatagcacccacgg

SEQ ID NO: 333327 - DNA, 25 bp, Artificial
  Probe
gctaaaagaggcttccaggctaaga

SEQ ID NO: 333328 - DNA, 25 bp, Artificial
  Probe
aggcttccaggctaagaggcggcca

SEQ ID NO: 333329 - DNA, 25 bp, Artificial
  Probe
ggtgaccccggactcaccactggtt

SEQ ID NO: 333330 - DNA, 25 bp, Artificial
  Probe
cagttacctccagaggcctctcttt

SEQ ID NO: 333331 - DNA, 25 bp, Artificial
  Probe
cacccacggtgcatggtgtttgggt

SEQ ID NO: 333332 - DNA, 25 bp, Artificial
  Probe
aagcggcatagcacccacggtgcat

SEQ ID NO: 333333 - DNA, 25 bp, Artificial
  Probe
aaagtcatgtcagaagcggcatagc

SEQ ID NO: 333334 - DNA, 25 bp, Artificial
  Probe
tagcacccacggtgcatggtgtttg

SEQ ID NO: 333335 - DNA, 25 bp, Artificial
  Probe
ggctacaaaagtcatgtcagaagcg

SEQ ID NO: 333336 - DNA, 25 bp, Artificial
  Probe
cggactcaccactggtttctaacct

SEQ ID NO: 333337 - DNA, 25 bp, Artificial
  Probe
gactgtatggcgaggcagacttttt

SEQ ID NO: 333338 - DNA, 25 bp, Artificial
  Probe
tggtgtttgggtgaccccggactca

SEQ ID NO: 333339 - DNA, 25 bp, Artificial
  Probe
tcgccgtgagcatgcgcactgagaa

SEQ ID NO: 333340 - DNA, 25 bp, Artificial
  Probe
agttacctccagaggcctctctttg

SEQ ID NO: 333341 - DNA, 25 bp, Artificial
  Probe
gcatgccattgcttcctacccagtt

SEQ ID NO: 333342 - DNA, 25 bp, Artificial
  Probe
aggatctattactgactgtatggcg

SEQ ID NO: 333343 - DNA, 25 bp, Artificial
  Probe
ggactcaccactggtttctaacctt

SEQ ID NO: 333344 - DNA, 25 bp, Artificial
  Probe
aggagggatacctgtaccagccaaa

SEQ ID NO: 333345 - DNA, 25 bp, Artificial
  Probe
aatcctgtaggctaaaagaggcttc

SEQ ID NO: 333346 - DNA, 25 bp, Artificial
  Probe
gctctaagcttttcgccgtgagcat

SEQ ID NO: 333347 - DNA, 25 bp, Artificial
  Probe
ctctgagggagcagaggatgaatcc

SEQ ID NO: 333348 - DNA, 25 bp, Artificial
  Probe
ttactgactgtatggcgaggcagac

SEQ ID NO: 333349 - DNA, 25 bp, Artificial
  Probe
caccactggtttctaaccttctgag

SEQ ID NO: 333350 - DNA, 25 bp, Artificial
  Probe
taaccttctgagaggctctaagctt

SEQ ID NO: 333351 - DNA, 25 bp, Artificial
  Probe
gggtgaccccggactcaccactggt

SEQ ID NO: 333352 - DNA, 25 bp, Artificial
  Probe
catctctgagggagcagaggatgaa

SEQ ID NO: 333353 - DNA, 25 bp, Artificial
  Probe
aagcatgccattgcttcctacccag

SEQ ID NO: 333354 - DNA, 25 bp, Artificial
  Probe
gtgagcatgcgcactgagaatgtta

SEQ ID NO: 333355 - DNA, 25 bp, Artificial
  Probe
cttttgagggctacaaaagtcatgt

SEQ ID NO: 333356 - DNA, 25 bp, Artificial
  Probe
aaacgtgtatagtgcctacaaattg

SEQ ID NO: 333357 - DNA, 25 bp, Artificial
  Probe
ccaatgctattgtaaacgtgtatag

SEQ ID NO: 333358 - DNA, 25 bp, Artificial
  Probe
cttctgagacccttcacaggcagtg

SEQ ID NO: 333359 - DNA, 25 bp, Artificial
  Probe
aatgagcaccagaacgtgtacatca

SEQ ID NO: 333360 - DNA, 25 bp, Artificial
  Probe
gagacccttcacaggcagtgcatgc

SEQ ID NO: 333361 - DNA, 25 bp, Artificial
  Probe
ctgtctactgtggtgattttagact

SEQ ID NO: 333362 - DNA, 25 bp, Artificial
  Probe
tgctgctactgaaatgagcaccaga

SEQ ID NO: 333363 - DNA, 25 bp, Artificial
  Probe
agggggccttctgagacccttcaca

SEQ ID NO: 333364 - DNA, 25 bp, Artificial
  Probe
gtctaagtaccaatgctattgtaaa

SEQ ID NO: 333365 - DNA, 25 bp, Artificial
  Probe
taaccagagcccatcactgccatga

SEQ ID NO: 333366 - DNA, 25 bp, Artificial
  Probe
agagcccatcactgccatgatagct

SEQ ID NO: 333367 - DNA, 25 bp, Artificial
  Probe
tgagcaccagaacgtgtacatcatg

SEQ ID NO: 333368 - DNA, 25 bp, Artificial
  Probe
tggtgacctctcagtctgaggagag

SEQ ID NO: 333369 - DNA, 25 bp, Artificial
  Probe
gggccttctgagacccttcacaggc

SEQ ID NO: 333370 - DNA, 25 bp, Artificial
  Probe
tttgctgctactgaaatgagcacca

SEQ ID NO: 333371 - DNA, 25 bp, Artificial
  Probe
ttgctggtgacctctcagtctgagg

SEQ ID NO: 333372 - DNA, 25 bp, Artificial
  Probe
taaacgtgtatagtgcctacaaatt

SEQ ID NO: 333373 - DNA, 25 bp, Artificial
  Probe
attctcggacccttggtacttcact

SEQ ID NO: 333374 - DNA, 25 bp, Artificial
  Probe
cccatcactgccatgatagctgggg

SEQ ID NO: 333375 - DNA, 25 bp, Artificial
  Probe
tgccatgatagctggggcttcagtc

SEQ ID NO: 333376 - DNA, 25 bp, Artificial
  Probe
tttgcttttggtatagaactcagca

SEQ ID NO: 333377 - DNA, 25 bp, Artificial
  Probe
ctaagtaccaatgctattgtaaacg

SEQ ID NO: 333378 - DNA, 25 bp, Artificial
  Probe
ctactgtggtgattttagacttctg

SEQ ID NO: 333379 - DNA, 25 bp, Artificial
  Probe
cagaacgtgtacatcatggtatttt

SEQ ID NO: 333380 - DNA, 25 bp, Artificial
  Probe
tgaaaagcatgctttgctgctactg

SEQ ID NO: 333381 - DNA, 25 bp, Artificial
  Probe
gatagctggggcttcagtctgtcta

SEQ ID NO: 333382 - DNA, 25 bp, Artificial
  Probe
gctggtgacctctcagtctgaggag

SEQ ID NO: 333383 - DNA, 25 bp, Artificial
  Probe
tcacaggcagtgcatgcatgaaaag

SEQ ID NO: 333384 - DNA, 25 bp, Artificial
  Probe
caggattctcggacccttggtactt

SEQ ID NO: 333385 - DNA, 25 bp, Artificial
  Probe
gtctactgtggtgattttagacttc

SEQ ID NO: 333386 - DNA, 25 bp, Artificial
  Probe
aaagcatgctttgctgctactgaaa

SEQ ID NO: 333387 - DNA, 25 bp, Artificial
  Probe
cagtctgtctactgtggtgatttta

SEQ ID NO: 333388 - DNA, 25 bp, Artificial
  Probe
gctttgctgctactgaaatgagcac

SEQ ID NO: 333389 - DNA, 25 bp, Artificial
  Probe
tagtgcctacaaattgtatgaaaac

SEQ ID NO: 333390 - DNA, 25 bp, Artificial
  Probe
tactgaaatgagcaccagaacgtgt

SEQ ID NO: 333391 - DNA, 25 bp, Artificial
  Probe
tattgtaaacgtgtatagtgcctac

SEQ ID NO: 333392 - DNA, 25 bp, Artificial
  Probe
ttttgcttttggtatagaactcagc

SEQ ID NO: 333393 - DNA, 25 bp, Artificial
  Probe
gcttcagtctgtctactgtggtgat

SEQ ID NO: 333394 - DNA, 25 bp, Artificial
  Probe
cccttcacaggcagtgcatgcatga

SEQ ID NO: 333395 - DNA, 25 bp, Artificial
  Probe
ctattgtaaacgtgtatagtgccta

SEQ ID NO: 333396 - DNA, 25 bp, Artificial
  Probe
gctactgaaatgagcaccagaacgt

SEQ ID NO: 333397 - DNA, 25 bp, Artificial
  Probe
tccagtctaagtaccaatgctattg

SEQ ID NO: 333398 - DNA, 25 bp, Artificial
  Probe
acaggcagtgcatgcatgaaaagca

SEQ ID NO: 333399 - DNA, 25 bp, Artificial
  Probe
ctgaaatgagcaccagaacgtgtac

SEQ ID NO: 333400 - DNA, 25 bp, Artificial
  Probe
tctgtctactgtggtgattttagac

SEQ ID NO: 333401 - DNA, 25 bp, Artificial
  Probe
gtatagaactcagcagttcccattt

SEQ ID NO: 333402 - DNA, 25 bp, Artificial
  Probe
aaagcccgacctgttgggcatctac

SEQ ID NO: 333403 - DNA, 25 bp, Artificial
  Probe
ttaaagcccgacctgttgggcatct

SEQ ID NO: 333404 - DNA, 25 bp, Artificial
  Probe
atttggacacatacttaggagacaa

SEQ ID NO: 333405 - DNA, 25 bp, Artificial
  Probe
ccagactggtgtcactacggaacaa

SEQ ID NO: 333406 - DNA, 25 bp, Artificial
  Probe
gacctgttgggcatctaccccagac

SEQ ID NO: 333407 - DNA, 25 bp, Artificial
  Probe
ggcatctaccccagactggtgtcac

SEQ ID NO: 333408 - DNA, 25 bp, Artificial
  Probe
cggacgttcaatgacttgctcacac

SEQ ID NO: 333409 - DNA, 25 bp, Artificial
  Probe
atctgcagcaccacacttttggtct

SEQ ID NO: 333410 - DNA, 25 bp, Artificial
  Probe
tgacttgctcacacgtcaagcacct

SEQ ID NO: 333411 - DNA, 25 bp, Artificial
  Probe
tcactctttccatgggcagaggaaa

SEQ ID NO: 333412 - DNA, 25 bp, Artificial
  Probe
tcactacggaacaaagtccaagcta

SEQ ID NO: 333413 - DNA, 25 bp, Artificial
  Probe
ggacacatacttaggagacaaagag

SEQ ID NO: 333414 - DNA, 25 bp, Artificial
  Probe
cacctcatcttctgaaagatttgga

SEQ ID NO: 333415 - DNA, 25 bp, Artificial
  Probe
aagtggatgcagtggtggataccct

SEQ ID NO: 333416 - DNA, 25 bp, Artificial
  Probe
aagcccgacctgttgggcatctacc

SEQ ID NO: 333417 - DNA, 25 bp, Artificial
  Probe
ttgggatatctgcagcaccacactt

SEQ ID NO: 333418 - DNA, 25 bp, Artificial
  Probe
ggacgttcaatgacttgctcacacg

SEQ ID NO: 333419 - DNA, 25 bp, Artificial
  Probe
catgtcactctttccatgggcagag

SEQ ID NO: 333420 - DNA, 25 bp, Artificial
  Probe
gcagtggtggataccctggacgatt

SEQ ID NO: 333421 - DNA, 25 bp, Artificial
  Probe
cgtcaagcacctcatcttctgaaag

SEQ ID NO: 333422 - DNA, 25 bp, Artificial
  Probe
actggtgtcactacggaacaaagtc

SEQ ID NO: 333423 - DNA, 25 bp, Artificial
  Probe
atttctattgggatatctgcagcac

SEQ ID NO: 333424 - DNA, 25 bp, Artificial
  Probe
gcaccacacttttggtcttaaagcc

SEQ ID NO: 333425 - DNA, 25 bp, Artificial
  Probe
cagcaccacacttttggtcttaaag

SEQ ID NO: 333426 - DNA, 25 bp, Artificial
  Probe
tcctgctatttctgcctggatccta

SEQ ID NO: 333427 - DNA, 25 bp, Artificial
  Probe
cacatacttaggagacaaagagtgg

SEQ ID NO: 333428 - DNA, 25 bp, Artificial
  Probe
ctttccatgggcagaggaaaatcaa

SEQ ID NO: 333429 - DNA, 25 bp, Artificial
  Probe
tcttctgaaagatttggacacatac

SEQ ID NO: 333430 - DNA, 25 bp, Artificial
  Probe
agcggacgttcaatgacttgctcac

SEQ ID NO: 333431 - DNA, 25 bp, Artificial
  Probe
gtccaagctattcctgctatttctg

SEQ ID NO: 333432 - DNA, 25 bp, Artificial
  Probe
cggaacaaagtccaagctattcctg

SEQ ID NO: 333433 - DNA, 25 bp, Artificial
  Probe
ttcctgctatttctgcctggatcct

SEQ ID NO: 333434 - DNA, 25 bp, Artificial
  Probe
caattatgtaacttgggcagatttc

SEQ ID NO: 333435 - DNA, 25 bp, Artificial
  Probe
aagctattcctgctatttctgcctg

SEQ ID NO: 333436 - DNA, 25 bp, Artificial
  Probe
gctatttctgcctggatcctaaaga

SEQ ID NO: 333437 - DNA, 25 bp, Artificial
  Probe
gtcaagcacctcatcttctgaaaga

SEQ ID NO: 333438 - DNA, 25 bp, Artificial
  Probe
atgacttgctcacacgtcaagcacc

SEQ ID NO: 333439 - DNA, 25 bp, Artificial
  Probe
atgcagtggtggataccctggacga

SEQ ID NO: 333440 - DNA, 25 bp, Artificial
  Probe
catctaccccagactggtgtcacta

SEQ ID NO: 333441 - DNA, 25 bp, Artificial
  Probe
agcacctcatcttctgaaagatttg

SEQ ID NO: 333442 - DNA, 25 bp, Artificial
  Probe
gaacaaagtccaagctattcctgct

SEQ ID NO: 333443 - DNA, 25 bp, Artificial
  Probe
agatttggacacatacttaggagac

SEQ ID NO: 333444 - DNA, 25 bp, Artificial
  Probe
tcttaaagcccgacctgttgggcat

SEQ ID NO: 333445 - DNA, 25 bp, Artificial
  Probe
tgttgggcatctaccccagactggt

SEQ ID NO: 333446 - DNA, 25 bp, Artificial
  Probe
ttccatgggcagaggaaaatcaaga

SEQ ID NO: 333447 - DNA, 25 bp, Artificial
  Probe
gtgtcactacggaacaaagtccaag

SEQ ID NO: 333448 - DNA, 25 bp, Artificial
  Probe
ctctgtttacctctgaaagagcgct

SEQ ID NO: 333449 - DNA, 25 bp, Artificial
  Probe
cactgctcatgactgccctggtggt

SEQ ID NO: 333450 - DNA, 25 bp, Artificial
  Probe
agcaagcgcacagagggcatcgtgt

SEQ ID NO: 333451 - DNA, 25 bp, Artificial
  Probe
cttcatcaccaccatcatgtgggca

SEQ ID NO: 333452 - DNA, 25 bp, Artificial
  Probe
gcccaatccggaagtggacaagttc

SEQ ID NO: 333453 - DNA, 25 bp, Artificial
  Probe
ctgtttacctctgaaagagcgctaa

SEQ ID NO: 333454 - DNA, 25 bp, Artificial
  Probe
cacactgctcatgactgccctggtg

SEQ ID NO: 333455 - DNA, 25 bp, Artificial
  Probe
cgacctctgaggaagactgcacaga

SEQ ID NO: 333456 - DNA, 25 bp, Artificial
  Probe
ctgcctctgtttacctctgaaagag

SEQ ID NO: 333457 - DNA, 25 bp, Artificial
  Probe
actcgtggcaaacaagattggctgt

SEQ ID NO: 333458 - DNA, 25 bp, Artificial
  Probe
gattggctgtttctggcccaatccg

SEQ ID NO: 333459 - DNA, 25 bp, Artificial
  Probe
tcatgactgccctggtggtctggag

SEQ ID NO: 333460 - DNA, 25 bp, Artificial
  Probe
gtttctggcccaatccggaagtgga

SEQ ID NO: 333461 - DNA, 25 bp, Artificial
  Probe
ccgacctctgaggaagactgcacag

SEQ ID NO: 333462 - DNA, 25 bp, Artificial
  Probe
tgcaccaaactcgtggcaaacaaga

SEQ ID NO: 333463 - DNA, 25 bp, Artificial
  Probe
ttacctctgaaagagcgctaagcgc

SEQ ID NO: 333464 - DNA, 25 bp, Artificial
  Probe
ctgaaagagcgctaagcgccaggtc

SEQ ID NO: 333465 - DNA, 25 bp, Artificial
  Probe
acctgcctctgtttacctctgaaag

SEQ ID NO: 333466 - DNA, 25 bp, Artificial
  Probe
ggtcacactgctcatgactgccctg

SEQ ID NO: 333467 - DNA, 25 bp, Artificial
  Probe
caaactcgtggcaaacaagattggc

SEQ ID NO: 333468 - DNA, 25 bp, Artificial
  Probe
tgtttctggcccaatccggaagtgg

SEQ ID NO: 333469 - DNA, 25 bp, Artificial
  Probe
aagtggacaagttcttcattgctgt

SEQ ID NO: 333470 - DNA, 25 bp, Artificial
  Probe
aagattggctgtttctggcccaatc

SEQ ID NO: 333471 - DNA, 25 bp, Artificial
  Probe
ctcgtggcaaacaagattggctgtt

SEQ ID NO: 333472 - DNA, 25 bp, Artificial
  Probe
agattggctgtttctggcccaatcc

SEQ ID NO: 333473 - DNA, 25 bp, Artificial
  Probe
attggctgtttctggcccaatccgg

SEQ ID NO: 333474 - DNA, 25 bp, Artificial
  Probe
gtcacactgctcatgactgccctgg

SEQ ID NO: 333475 - DNA, 25 bp, Artificial
  Probe
tttctggcccaatccggaagtggac

SEQ ID NO: 333476 - DNA, 25 bp, Artificial
  Probe
cctctgaggaagactgcacagatgt

SEQ ID NO: 333477 - DNA, 25 bp, Artificial
  Probe
aatccggaagtggacaagttcttca

SEQ ID NO: 333478 - DNA, 25 bp, Artificial
  Probe
ccaatccggaagtggacaagttctt

SEQ ID NO: 333479 - DNA, 25 bp, Artificial
  Probe
gacctgcctctgtttacctctgaaa

SEQ ID NO: 333480 - DNA, 25 bp, Artificial
  Probe
tgaaagagcgctaagcgccaggtct

SEQ ID NO: 333481 - DNA, 25 bp, Artificial
  Probe
agtggacaagttcttcattgctgtc

SEQ ID NO: 333482 - DNA, 25 bp, Artificial
  Probe
gaaagagcgctaagcgccaggtctc

SEQ ID NO: 333483 - DNA, 25 bp, Artificial
  Probe
tcacactgctcatgactgccctggt

SEQ ID NO: 333484 - DNA, 25 bp, Artificial
  Probe
gcctctgtttacctctgaaagagcg

SEQ ID NO: 333485 - DNA, 25 bp, Artificial
  Probe
ggcccaatccggaagtggacaagtt

SEQ ID NO: 333486 - DNA, 25 bp, Artificial
  Probe
gcaccaaactcgtggcaaacaagat

SEQ ID NO: 333487 - DNA, 25 bp, Artificial
  Probe
gtggacaagttcttcattgctgtcc

SEQ ID NO: 333488 - DNA, 25 bp, Artificial
  Probe
tttacctctgaaagagcgctaagcg

SEQ ID NO: 333489 - DNA, 25 bp, Artificial
  Probe
tacctctgaaagagcgctaagcgcc

SEQ ID NO: 333490 - DNA, 25 bp, Artificial
  Probe
gacctctgaggaagactgcacagat

SEQ ID NO: 333491 - DNA, 25 bp, Artificial
  Probe
acaagattggctgtttctggcccaa

SEQ ID NO: 333492 - DNA, 25 bp, Artificial
  Probe
gcaagcgcacagagggcatcgtgta

SEQ ID NO: 333493 - DNA, 25 bp, Artificial
  Probe
tgtttacctctgaaagagcgctaag

SEQ ID NO: 333494 - DNA, 25 bp, Artificial
  Probe
ctggtgcaactggactttgattagc

SEQ ID NO: 333495 - DNA, 25 bp, Artificial
  Probe
gaaacaaatgtcctaccttgctggt

SEQ ID NO: 333496 - DNA, 25 bp, Artificial
  Probe
gtattacagcaacctgcggtattgc

SEQ ID NO: 333497 - DNA, 25 bp, Artificial
  Probe
gtattattacaagacttccatggac

SEQ ID NO: 333498 - DNA, 25 bp, Artificial
  Probe
actttgattagcaggtattacagca

SEQ ID NO: 333499 - DNA, 25 bp, Artificial
  Probe
caaatgtcctaccttgctggtatta

SEQ ID NO: 333500 - DNA, 25 bp, Artificial
  Probe
acaagacttccatggactctgtcaa

SEQ ID NO: 333501 - DNA, 25 bp, Artificial
  Probe
aggtattacagcaacctgcggtatt

SEQ ID NO: 333502 - DNA, 25 bp, Artificial
  Probe
tattacaagacttccatggactctg

SEQ ID NO: 333503 - DNA, 25 bp, Artificial
  Probe
tcatcctactgaggacagccttctg

SEQ ID NO: 333504 - DNA, 25 bp, Artificial
  Probe
cctaccttgctggtattattacaag

SEQ ID NO: 333505 - DNA, 25 bp, Artificial
  Probe
agccttctgtcaaaagggaagatgg

SEQ ID NO: 333506 - DNA, 25 bp, Artificial
  Probe
ccttctgtcaaaagggaagatggag

SEQ ID NO: 333507 - DNA, 25 bp, Artificial
  Probe
aatgtcctaccttgctggtattatt

SEQ ID NO: 333508 - DNA, 25 bp, Artificial
  Probe
cgaaacaaatgtcctaccttgctgg

SEQ ID NO: 333509 - DNA, 25 bp, Artificial
  Probe
tgattagcaggtattacagcaacct

SEQ ID NO: 333510 - DNA, 25 bp, Artificial
  Probe
attacagcaacctgcggtattgctt

SEQ ID NO: 333511 - DNA, 25 bp, Artificial
  Probe
tctgtcaaggactggtgcaactgga

SEQ ID NO: 333512 - DNA, 25 bp, Artificial
  Probe
tgaggacagccttctgtcaaaaggg

SEQ ID NO: 333513 - DNA, 25 bp, Artificial
  Probe
ttgcttggagtacgaggcagacaag

SEQ ID NO: 333514 - DNA, 25 bp, Artificial
  Probe
gtcctaccttgctggtattattaca

SEQ ID NO: 333515 - DNA, 25 bp, Artificial
  Probe
gaatcaatctcatcctactgaggac

SEQ ID NO: 333516 - DNA, 25 bp, Artificial
  Probe
gacagccttctgtcaaaagggaaga

SEQ ID NO: 333517 - DNA, 25 bp, Artificial
  Probe
agcaacctgcggtattgcttggagt

SEQ ID NO: 333518 - DNA, 25 bp, Artificial
  Probe
cttgctggtattattacaagacttc

SEQ ID NO: 333519 - DNA, 25 bp, Artificial
  Probe
caactggactttgattagcaggtat

SEQ ID NO: 333520 - DNA, 25 bp, Artificial
  Probe
aaggactggtgcaactggactttga

SEQ ID NO: 333521 - DNA, 25 bp, Artificial
  Probe
cctactgaggacagccttctgtcaa

SEQ ID NO: 333522 - DNA, 25 bp, Artificial
  Probe
gtattgcttggagtacgaggcagac

SEQ ID NO: 333523 - DNA, 25 bp, Artificial
  Probe
ctgaggacagccttctgtcaaaagg

SEQ ID NO: 333524 - DNA, 25 bp, Artificial
  Probe
acgaaacaaatgtcctaccttgctg

SEQ ID NO: 333525 - DNA, 25 bp, Artificial
  Probe
actctgtcaaggactggtgcaactg

SEQ ID NO: 333526 - DNA, 25 bp, Artificial
  Probe
atctcatcctactgaggacagcctt

SEQ ID NO: 333527 - DNA, 25 bp, Artificial
  Probe
atcaatctcatcctactgaggacag

SEQ ID NO: 333528 - DNA, 25 bp, Artificial
  Probe
tcaaggactggtgcaactggacttt

SEQ ID NO: 333529 - DNA, 25 bp, Artificial
  Probe
aggactggtgcaactggactttgat

SEQ ID NO: 333530 - DNA, 25 bp, Artificial
  Probe
tattacagcaacctgcggtattgct

SEQ ID NO: 333531 - DNA, 25 bp, Artificial
  Probe
catggactctgtcaaggactggtgc

SEQ ID NO: 333532 - DNA, 25 bp, Artificial
  Probe
cctgcggtattgcttggagtacgag

SEQ ID NO: 333533 - DNA, 25 bp, Artificial
  Probe
atggactctgtcaaggactggtgca

SEQ ID NO: 333534 - DNA, 25 bp, Artificial
  Probe
gcaggtattacagcaacctgcggta

SEQ ID NO: 333535 - DNA, 25 bp, Artificial
  Probe
gaggacagccttctgtcaaaaggga

SEQ ID NO: 333536 - DNA, 25 bp, Artificial
  Probe
ttccatggactctgtcaaggactgg

SEQ ID NO: 333537 - DNA, 25 bp, Artificial
  Probe
ccatggactctgtcaaggactggtg

SEQ ID NO: 333538 - DNA, 25 bp, Artificial
  Probe
ctggactttgattagcaggtattac

SEQ ID NO: 333539 - DNA, 25 bp, Artificial
  Probe
ccttgctggtattattacaagactt

SEQ ID NO: 333540 - DNA, 25 bp, Artificial
  Probe
tggaccacaccaatttggttatttt

SEQ ID NO: 333541 - DNA, 25 bp, Artificial
  Probe
gagcagtttgccaactgagaaggac

SEQ ID NO: 333542 - DNA, 25 bp, Artificial
  Probe
tgccaactgagaaggacaagcagac

SEQ ID NO: 333543 - DNA, 25 bp, Artificial
  Probe
cccactgttgttgtgtttttaagct

SEQ ID NO: 333544 - DNA, 25 bp, Artificial
  Probe
ctctgtagattgaactctgttctct

SEQ ID NO: 333545 - DNA, 25 bp, Artificial
  Probe
agcacagtgcagcaagccctttgcc

SEQ ID NO: 333546 - DNA, 25 bp, Artificial
  Probe
ggtgcctaaggcacggcagtgcccc

SEQ ID NO: 333547 - DNA, 25 bp, Artificial
  Probe
ccatcacatagagagaatcaagttt

SEQ ID NO: 333548 - DNA, 25 bp, Artificial
  Probe
atcaagtttgcgttctatgagcagt

SEQ ID NO: 333549 - DNA, 25 bp, Artificial
  Probe
tcaagctctgccatcacatagagag

SEQ ID NO: 333550 - DNA, 25 bp, Artificial
  Probe
tagattgaactctgttctctgcttt

SEQ ID NO: 333551 - DNA, 25 bp, Artificial
  Probe
gcctgcaagtgctggcttgctatct

SEQ ID NO: 333552 - DNA, 25 bp, Artificial
  Probe
aaggcacggcagtgccccactgttg

SEQ ID NO: 333553 - DNA, 25 bp, Artificial
  Probe
agaatgactgtgacagctggaccac

SEQ ID NO: 333554 - DNA, 25 bp, Artificial
  Probe
gactgagctgggtctttgaagcaca

SEQ ID NO: 333555 - DNA, 25 bp, Artificial
  Probe
cgtcctgggctatcggcctgcaagt

SEQ ID NO: 333556 - DNA, 25 bp, Artificial
  Probe
catagctttaagtcggcactggctt

SEQ ID NO: 333557 - DNA, 25 bp, Artificial
  Probe
gtcgtcctgggctatcggcctgcaa

SEQ ID NO: 333558 - DNA, 25 bp, Artificial
  Probe
ttaaaagtctgagtgaccattaacg

SEQ ID NO: 333559 - DNA, 25 bp, Artificial
  Probe
ggctatcggcctgcaagtgctggct

SEQ ID NO: 333560 - DNA, 25 bp, Artificial
  Probe
gcaagtgctggcttgctatctttgc

SEQ ID NO: 333561 - DNA, 25 bp, Artificial
  Probe
ctacgggcagctgcagtcgtcctgg

SEQ ID NO: 333562 - DNA, 25 bp, Artificial
  Probe
ggcagctgcagtcgtcctgggctat

SEQ ID NO: 333563 - DNA, 25 bp, Artificial
  Probe
gagtgaccattaacgggacctgaaa

SEQ ID NO: 333564 - DNA, 25 bp, Artificial
  Probe
gccatcaagctctgccatcacatag

SEQ ID NO: 333565 - DNA, 25 bp, Artificial
  Probe
tgtggacttctgtttagaagattcc

SEQ ID NO: 333566 - DNA, 25 bp, Artificial
  Probe
agcagactgagctgggtctttgaag

SEQ ID NO: 333567 - DNA, 25 bp, Artificial
  Probe
ctaaggcacggcagtgccccactgt

SEQ ID NO: 333568 - DNA, 25 bp, Artificial
  Probe
ccattaacgggacctgaaatcaaag

SEQ ID NO: 333569 - DNA, 25 bp, Artificial
  Probe
ctttgcactttcagggaaggaggga

SEQ ID NO: 333570 - DNA, 25 bp, Artificial
  Probe
aggacaagcagactgagctgggtct

SEQ ID NO: 333571 - DNA, 25 bp, Artificial
  Probe
cggcagtgccccactgttgttgtgt

SEQ ID NO: 333572 - DNA, 25 bp, Artificial
  Probe
aacccttaaaagtctgagtgaccat

SEQ ID NO: 333573 - DNA, 25 bp, Artificial
  Probe
tgctctacgggcagctgcagtcgtc

SEQ ID NO: 333574 - DNA, 25 bp, Artificial
  Probe
gattgaactctgttctctgctttct

SEQ ID NO: 333575 - DNA, 25 bp, Artificial
  Probe
aggacatagctttaagtcggcactg

SEQ ID NO: 333576 - DNA, 25 bp, Artificial
  Probe
ctatgagcagtttgccaactgagaa

SEQ ID NO: 333577 - DNA, 25 bp, Artificial
  Probe
ctttgccctgctctacgggcagctg

SEQ ID NO: 333578 - DNA, 25 bp, Artificial
  Probe
cttctgtttagaagattccagttta

SEQ ID NO: 333579 - DNA, 25 bp, Artificial
  Probe
ctgttccttccctctgtagattgaa

SEQ ID NO: 333580 - DNA, 25 bp, Artificial
  Probe
gttccttccctctgtagattgaact

SEQ ID NO: 333581 - DNA, 25 bp, Artificial
  Probe
ctgcagtcgtcctgggctatcggcc

SEQ ID NO: 333582 - DNA, 25 bp, Artificial
  Probe
aacgggacctgaaatcaaagaatga

SEQ ID NO: 333583 - DNA, 25 bp, Artificial
  Probe
tttaagtcggcactggcttgggatg

SEQ ID NO: 333584 - DNA, 25 bp, Artificial
  Probe
ttgccctgctctacgggcagctgca

SEQ ID NO: 333585 - DNA, 25 bp, Artificial
  Probe
ctttaagtcggcactggcttgggat

SEQ ID NO: 333586 - DNA, 25 bp, Artificial
  Probe
catgagccttctctccgccatttgg

SEQ ID NO: 333587 - DNA, 25 bp, Artificial
  Probe
tcaaccagggcctggccctatactg

SEQ ID NO: 333588 - DNA, 25 bp, Artificial
  Probe
ggaacaaatcgcattccaagaaata

SEQ ID NO: 333589 - DNA, 25 bp, Artificial
  Probe
ggctaggccttctcgctaatccagg

SEQ ID NO: 333590 - DNA, 25 bp, Artificial
  Probe
cgcctccaactggaatacgttgaca

SEQ ID NO: 333591 - DNA, 25 bp, Artificial
  Probe
aaggctgaaagaaccctaggcaaca

SEQ ID NO: 333592 - DNA, 25 bp, Artificial
  Probe
atacgttgacatagtatttgccaat

SEQ ID NO: 333593 - DNA, 25 bp, Artificial
  Probe
gtgtcagctcagttttactgggggt

SEQ ID NO: 333594 - DNA, 25 bp, Artificial
  Probe
caagggctaccagtggctcaaagaa

SEQ ID NO: 333595 - DNA, 25 bp, Artificial
  Probe
agtcacttggtctcccctggcgtgc

SEQ ID NO: 333596 - DNA, 25 bp, Artificial
  Probe
ccgcggcagaatcagggtagccccg

SEQ ID NO: 333597 - DNA, 25 bp, Artificial
  Probe
cctcaagagcaaaggttggaggaga

SEQ ID NO: 333598 - DNA, 25 bp, Artificial
  Probe
attgtaagagccatgacctatgtca

SEQ ID NO: 333599 - DNA, 25 bp, Artificial
  Probe
gccatatcctttcaccgtggggcac

SEQ ID NO: 333600 - DNA, 25 bp, Artificial
  Probe
gccgcaaacggtgatggaaatagat

SEQ ID NO: 333601 - DNA, 25 bp, Artificial
  Probe
taggctgcaccgtggcccaacttgc

SEQ ID NO: 333602 - DNA, 25 bp, Artificial
  Probe
ctatactgggggacatccaggtgga

SEQ ID NO: 333603 - DNA, 25 bp, Artificial
  Probe
tggcgtgcagcctcattactagcaa

SEQ ID NO: 333604 - DNA, 25 bp, Artificial
  Probe
ggcttgcaaggatccctggaccgcc

SEQ ID NO: 333605 - DNA, 25 bp, Artificial
  Probe
tccaagaaatagtccgttgtgggcg

SEQ ID NO: 333606 - DNA, 25 bp, Artificial
  Probe
atttggtctcgcaccgctctgctca

SEQ ID NO: 333607 - DNA, 25 bp, Artificial
  Probe
ctgaaacctagaaaacatggagcag

SEQ ID NO: 333608 - DNA, 25 bp, Artificial
  Probe
tctaccacaaaattggtgttggctc

SEQ ID NO: 333609 - DNA, 25 bp, Artificial
  Probe
ttccccctgttgctgaaacctagaa

SEQ ID NO: 333610 - DNA, 25 bp, Artificial
  Probe
cagcagtcctatggaggagattgta

SEQ ID NO: 333611 - DNA, 25 bp, Artificial
  Probe
gaacatctggggtccctacaggtgc

SEQ ID NO: 333612 - DNA, 25 bp, Artificial
  Probe
ttgtagtatttgtccaatagaagcc

SEQ ID NO: 333613 - DNA, 25 bp, Artificial
  Probe
caaagccatatcctttcaccgtggg

SEQ ID NO: 333614 - DNA, 25 bp, Artificial
  Probe
agagtgacggaccttctccccatcg

SEQ ID NO: 333615 - DNA, 25 bp, Artificial
  Probe
gcatctcaaaaatgggccttgaaat

SEQ ID NO: 333616 - DNA, 25 bp, Artificial
  Probe
gtggagatgcagctgcctgagctct

SEQ ID NO: 333617 - DNA, 25 bp, Artificial
  Probe
cgccgcggcagaatcagggtagccc

SEQ ID NO: 333618 - DNA, 25 bp, Artificial
  Probe
tggaaaaccactttcctgcatcctg

SEQ ID NO: 333619 - DNA, 25 bp, Artificial
  Probe
gcatcctgcaatcagctctggatcc

SEQ ID NO: 333620 - DNA, 25 bp, Artificial
  Probe
ccaggtggagtgctgcagaaatcat

SEQ ID NO: 333621 - DNA, 25 bp, Artificial
  Probe
catggaggcctactccatggccaga

SEQ ID NO: 333622 - DNA, 25 bp, Artificial
  Probe
acaggcagaaactgagcgaggcttg

SEQ ID NO: 333623 - DNA, 25 bp, Artificial
  Probe
ttgtaagagccatgacctatgtcat

SEQ ID NO: 333624 - DNA, 25 bp, Artificial
  Probe
gcaagaagcaacaagccagagtgac

SEQ ID NO: 333625 - DNA, 25 bp, Artificial
  Probe
gattgcaccctttggaaaaccactt

SEQ ID NO: 333626 - DNA, 25 bp, Artificial
  Probe
aacattgaaagcatctcaaaaatgg

SEQ ID NO: 333627 - DNA, 25 bp, Artificial
  Probe
ctgggtcagctgacgccgcaaacgg

SEQ ID NO: 333628 - DNA, 25 bp, Artificial
  Probe
cgcgggaacccaacgcggagtgatt

SEQ ID NO: 333629 - DNA, 25 bp, Artificial
  Probe
gaaccacttctttcagagggagaag

SEQ ID NO: 333630 - DNA, 25 bp, Artificial
  Probe
tgtccagtgcagagcagctgatgga

SEQ ID NO: 333631 - DNA, 25 bp, Artificial
  Probe
tacgcagcaggaaaggctgaaagaa

SEQ ID NO: 333632 - DNA, 25 bp, Artificial
  Probe
acctaagagctgaggtgacaggcac

SEQ ID NO: 333633 - DNA, 25 bp, Artificial
  Probe
gcctctgcctctctagttactatgc

SEQ ID NO: 333634 - DNA, 25 bp, Artificial
  Probe
gggagacagacaaccttctgcccgg

SEQ ID NO: 333635 - DNA, 25 bp, Artificial
  Probe
ttctgcccggaccaagatgctgcca

SEQ ID NO: 333636 - DNA, 25 bp, Artificial
  Probe
ttgttttactgacctaggatctcta

SEQ ID NO: 333637 - DNA, 25 bp, Artificial
  Probe
tatagcccaggctgggtttcagtcc

SEQ ID NO: 333638 - DNA, 25 bp, Artificial
  Probe
gcccaggctgggtttcagtccacag

SEQ ID NO: 333639 - DNA, 25 bp, Artificial
  Probe
tcacgtgtggcacttttgtgggtgt

SEQ ID NO: 333640 - DNA, 25 bp, Artificial
  Probe
acccatgtgtccagacgtgagacag

SEQ ID NO: 333641 - DNA, 25 bp, Artificial
  Probe
gtttcagtccacagcgatcagatcc

SEQ ID NO: 333642 - DNA, 25 bp, Artificial
  Probe
gaggtgacaggcacaccatcacgtg

SEQ ID NO: 333643 - DNA, 25 bp, Artificial
  Probe
ggagggttactctattgctgactcc

SEQ ID NO: 333644 - DNA, 25 bp, Artificial
  Probe
catctctcagggagacagacaacct

SEQ ID NO: 333645 - DNA, 25 bp, Artificial
  Probe
ccatgtgtccagacgtgagacagca

SEQ ID NO: 333646 - DNA, 25 bp, Artificial
  Probe
gctgccatgttttctaacccagagc

SEQ ID NO: 333647 - DNA, 25 bp, Artificial
  Probe
cagtccacagcgatcagatcctttc

SEQ ID NO: 333648 - DNA, 25 bp, Artificial
  Probe
caccatcacgtgtggcacttttgtg

SEQ ID NO: 333649 - DNA, 25 bp, Artificial
  Probe
gagacagacaaccttctgcccggac

SEQ ID NO: 333650 - DNA, 25 bp, Artificial
  Probe
gcctggcctccgtggcttcctaggg

SEQ ID NO: 333651 - DNA, 25 bp, Artificial
  Probe
tgcagcgctgagatctggtggttct

SEQ ID NO: 333652 - DNA, 25 bp, Artificial
  Probe
gacctcagtaaatctcctgcctcag

SEQ ID NO: 333653 - DNA, 25 bp, Artificial
  Probe
gcagacctcagtaaatctcctgcct

SEQ ID NO: 333654 - DNA, 25 bp, Artificial
  Probe
acctaggatctctatagcccaggct

SEQ ID NO: 333655 - DNA, 25 bp, Artificial
  Probe
atcacgtgtggcacttttgtgggtg

SEQ ID NO: 333656 - DNA, 25 bp, Artificial
  Probe
gggttactctattgctgactcccca

SEQ ID NO: 333657 - DNA, 25 bp, Artificial
  Probe
tcagcagacctcagtaaatctcctg

SEQ ID NO: 333658 - DNA, 25 bp, Artificial
  Probe
tgcctctctagttactatgcccagc

SEQ ID NO: 333659 - DNA, 25 bp, Artificial
  Probe
tccccacgtctagtgcagcgctgag

SEQ ID NO: 333660 - DNA, 25 bp, Artificial
  Probe
atctcctgcctcagatcccggaatt

SEQ ID NO: 333661 - DNA, 25 bp, Artificial
  Probe
taagagctgaggtgacaggcacacc

SEQ ID NO: 333662 - DNA, 25 bp, Artificial
  Probe
agagtgtactggatgctgctgtatc

SEQ ID NO: 333663 - DNA, 25 bp, Artificial
  Probe
taggatctctatagcccaggctggg

SEQ ID NO: 333664 - DNA, 25 bp, Artificial
  Probe
tactggatgctgctgtatccctctc

SEQ ID NO: 333665 - DNA, 25 bp, Artificial
  Probe
cacgtctagtgcagcgctgagatct

SEQ ID NO: 333666 - DNA, 25 bp, Artificial
  Probe
gttttctaacccagagcctgtcttt

SEQ ID NO: 333667 - DNA, 25 bp, Artificial
  Probe
ggaccaagatgctgccatgttttct

SEQ ID NO: 333668 - DNA, 25 bp, Artificial
  Probe
gcgctgagatctggtggttctattt

SEQ ID NO: 333669 - DNA, 25 bp, Artificial
  Probe
caagatgctgccatgttttctaacc

SEQ ID NO: 333670 - DNA, 25 bp, Artificial
  Probe
tctcctccatctctcagggagacag

SEQ ID NO: 333671 - DNA, 25 bp, Artificial
  Probe
cctccatctctcagggagacagaca

SEQ ID NO: 333672 - DNA, 25 bp, Artificial
  Probe
ctttctcaaccacctaagagctgag

SEQ ID NO: 333673 - DNA, 25 bp, Artificial
  Probe
gttactatgcccagccttcttttgt

SEQ ID NO: 333674 - DNA, 25 bp, Artificial
  Probe
ctgcctctctagttactatgcccag

SEQ ID NO: 333675 - DNA, 25 bp, Artificial
  Probe
gtccacagcgatcagatcctttctc

SEQ ID NO: 333676 - DNA, 25 bp, Artificial
  Probe
ccagacgtgagacagcagagtagag

SEQ ID NO: 333677 - DNA, 25 bp, Artificial
  Probe
ccatgttttctaacccagagcctgt

SEQ ID NO: 333678 - DNA, 25 bp, Artificial
  Probe
agactggcctcttgacaggagggat

SEQ ID NO: 333679 - DNA, 25 bp, Artificial
  Probe
agccagtttgagagcctggatgctg

SEQ ID NO: 333680 - DNA, 25 bp, Artificial
  Probe
acaatctgccctacagggctgtgag

SEQ ID NO: 333681 - DNA, 25 bp, Artificial
  Probe
gagtgctgcaagacagcttgtcagc

SEQ ID NO: 333682 - DNA, 25 bp, Artificial
  Probe
aattggtatgggatctgtcaccaaa

SEQ ID NO: 333683 - DNA, 25 bp, Artificial
  Probe
gcctcttgacaggagggatgaagca

SEQ ID NO: 333684 - DNA, 25 bp, Artificial
  Probe
tccagcttggaaacaatctgcccta

SEQ ID NO: 333685 - DNA, 25 bp, Artificial
  Probe
gagccagtttgagagcctggatgct

SEQ ID NO: 333686 - DNA, 25 bp, Artificial
  Probe
tgctgggaccttcctaggcaaaagg

SEQ ID NO: 333687 - DNA, 25 bp, Artificial
  Probe
ccaggccaagcctggtgagtgctgc

SEQ ID NO: 333688 - DNA, 25 bp, Artificial
  Probe
gaagaagatcccttctcttttgctc

SEQ ID NO: 333689 - DNA, 25 bp, Artificial
  Probe
tgatgtcatctgtctgcagccctga

SEQ ID NO: 333690 - DNA, 25 bp, Artificial
  Probe
ggatgctgatgtcatctgtctgcag

SEQ ID NO: 333691 - DNA, 25 bp, Artificial
  Probe
cccagcatgacctcagttcctagaa

SEQ ID NO: 333692 - DNA, 25 bp, Artificial
  Probe
ttggaaacaatctgccctacagggc

SEQ ID NO: 333693 - DNA, 25 bp, Artificial
  Probe
tgggatctgtcaccaaacaccttcc

SEQ ID NO: 333694 - DNA, 25 bp, Artificial
  Probe
ctcagccccaggtctgacagaactt

SEQ ID NO: 333695 - DNA, 25 bp, Artificial
  Probe
cagcttgtcagcagggccctgtgag

SEQ ID NO: 333696 - DNA, 25 bp, Artificial
  Probe
gggccctgtgagaacaaaagtatgc

SEQ ID NO: 333697 - DNA, 25 bp, Artificial
  Probe
acagaactttgactgggaccatccc

SEQ ID NO: 333698 - DNA, 25 bp, Artificial
  Probe
aaagtatgcatctccagcttggaaa

SEQ ID NO: 333699 - DNA, 25 bp, Artificial
  Probe
accagtttcaccaggccaagcctgg

SEQ ID NO: 333700 - DNA, 25 bp, Artificial
  Probe
aagacccggtagagctggctggtca

SEQ ID NO: 333701 - DNA, 25 bp, Artificial
  Probe
gaacacctagtgtggcaagaatcaa

SEQ ID NO: 333702 - DNA, 25 bp, Artificial
  Probe
ccttcctaggcaaaaggagttccag

SEQ ID NO: 333703 - DNA, 25 bp, Artificial
  Probe
aatctgccctacagggctgtgagtg

SEQ ID NO: 333704 - DNA, 25 bp, Artificial
  Probe
gcttggaaacaatctgccctacagg

SEQ ID NO: 333705 - DNA, 25 bp, Artificial
  Probe
ctggcctcttgacaggagggatgaa

SEQ ID NO: 333706 - DNA, 25 bp, Artificial
  Probe
ggtatgggatctgtcaccaaacacc

SEQ ID NO: 333707 - DNA, 25 bp, Artificial
  Probe
ttcctaggcaaaaggagttccagtc

SEQ ID NO: 333708 - DNA, 25 bp, Artificial
  Probe
aaggagttccagtccaagggaccag

SEQ ID NO: 333709 - DNA, 25 bp, Artificial
  Probe
tcagcagggccctgtgagaacaaaa

SEQ ID NO: 333710 - DNA, 25 bp, Artificial
  Probe
tgaggtgctgggaccttcctaggca

SEQ ID NO: 333711 - DNA, 25 bp, Artificial
  Probe
tcatctgtctgcagccctgaggtgc

SEQ ID NO: 333712 - DNA, 25 bp, Artificial
  Probe
cagagactggcctcttgacaggagg

SEQ ID NO: 333713 - DNA, 25 bp, Artificial
  Probe
tacctcagccccaggtctgacagaa

SEQ ID NO: 333714 - DNA, 25 bp, Artificial
  Probe
gagttccagtccaagggaccagttt

SEQ ID NO: 333715 - DNA, 25 bp, Artificial
  Probe
ccctacagggctgtgagtggaagaa

SEQ ID NO: 333716 - DNA, 25 bp, Artificial
  Probe
ctcagttcctagaaaggagaaggtg

SEQ ID NO: 333717 - DNA, 25 bp, Artificial
  Probe
gctgcaagacagcttgtcagcaggg

SEQ ID NO: 333718 - DNA, 25 bp, Artificial
  Probe
tcttttgctctctgaacacctagtg

SEQ ID NO: 333719 - DNA, 25 bp, Artificial
  Probe
gccctgaggtgctgggaccttccta

SEQ ID NO: 333720 - DNA, 25 bp, Artificial
  Probe
tctgcagccctgaggtgctgggacc

SEQ ID NO: 333721 - DNA, 25 bp, Artificial
  Probe
tgggaccttcctaggcaaaaggagt

SEQ ID NO: 333722 - DNA, 25 bp, Artificial
  Probe
gtttgagagcctggatgctgatgtc

SEQ ID NO: 333723 - DNA, 25 bp, Artificial
  Probe
ccagtccaagggaccagtttcacca

SEQ ID NO: 333724 - DNA, 25 bp, Artificial
  Probe
acctcttgaaggacttacttctaag

SEQ ID NO: 333725 - DNA, 25 bp, Artificial
  Probe
tcacccgagagagactgctcctggc

SEQ ID NO: 333726 - DNA, 25 bp, Artificial
  Probe
aaccttctggatgatcttgtcaccc

SEQ ID NO: 333727 - DNA, 25 bp, Artificial
  Probe
ttctaagagctgtgtcgacgcgcca

SEQ ID NO: 333728 - DNA, 25 bp, Artificial
  Probe
cacccgagagagactgctcctggca

SEQ ID NO: 333729 - DNA, 25 bp, Artificial
  Probe
acgcgccagataacacaactggagg

SEQ ID NO: 333730 - DNA, 25 bp, Artificial
  Probe
tcttgtcacccgagagagactgctc

SEQ ID NO: 333731 - DNA, 25 bp, Artificial
  Probe
ctggatgatcttgtcacccgagaga

SEQ ID NO: 333732 - DNA, 25 bp, Artificial
  Probe
gacttacttctaagagctgtgtcga

SEQ ID NO: 333733 - DNA, 25 bp, Artificial
  Probe
taccctgacaatcagaactttgttg

SEQ ID NO: 333734 - DNA, 25 bp, Artificial
  Probe
agagctgtgtcgacgcgccagataa

SEQ ID NO: 333735 - DNA, 25 bp, Artificial
  Probe
cccgagagagactgctcctggcatc

SEQ ID NO: 333736 - DNA, 25 bp, Artificial
  Probe
ggttctccacgtacgattctacttg

SEQ ID NO: 333737 - DNA, 25 bp, Artificial
  Probe
gcttaccctgacaatcagaactttg

SEQ ID NO: 333738 - DNA, 25 bp, Artificial
  Probe
cgacctcttgaaggacttacttcta

SEQ ID NO: 333739 - DNA, 25 bp, Artificial
  Probe
ccctggttctccacgtacgattcta

SEQ ID NO: 333740 - DNA, 25 bp, Artificial
  Probe
gttctccacgtacgattctacttgt

SEQ ID NO: 333741 - DNA, 25 bp, Artificial
  Probe
accctgacaatcagaactttgttga

SEQ ID NO: 333742 - DNA, 25 bp, Artificial
  Probe
tacttgtcagattgcccaagaaatc

SEQ ID NO: 333743 - DNA, 25 bp, Artificial
  Probe
cgcgccagataacacaactggaggg

SEQ ID NO: 333744 - DNA, 25 bp, Artificial
  Probe
caatcagaactttgttgaagaatct

SEQ ID NO: 333745 - DNA, 25 bp, Artificial
  Probe
aagagctgtgtcgacgcgccagata

SEQ ID NO: 333746 - DNA, 25 bp, Artificial
  Probe
ccttctggatgatcttgtcacccga

SEQ ID NO: 333747 - DNA, 25 bp, Artificial
  Probe
gaagacagaaccttctggatgatct

SEQ ID NO: 333748 - DNA, 25 bp, Artificial
  Probe
ctccacgtacgattctacttgtcag

SEQ ID NO: 333749 - DNA, 25 bp, Artificial
  Probe
gatgatcttgtcacccgagagagac

SEQ ID NO: 333750 - DNA, 25 bp, Artificial
  Probe
aagatcgacctcttgaaggacttac

SEQ ID NO: 333751 - DNA, 25 bp, Artificial
  Probe
tgagaagacacctaagcttaccctg

SEQ ID NO: 333752 - DNA, 25 bp, Artificial
  Probe
ttgcccaagaaatcgctgagaagat

SEQ ID NO: 333753 - DNA, 25 bp, Artificial
  Probe
gaagacacctaagcttaccctgaca

SEQ ID NO: 333754 - DNA, 25 bp, Artificial
  Probe
atcgacctcttgaaggacttacttc

SEQ ID NO: 333755 - DNA, 25 bp, Artificial
  Probe
atcgaagacagaaccttctggatga

SEQ ID NO: 333756 - DNA, 25 bp, Artificial
  Probe
tacgattctacttgtcagattgccc

SEQ ID NO: 333757 - DNA, 25 bp, Artificial
  Probe
ccaagaaatcgctgagaagattcaa

SEQ ID NO: 333758 - DNA, 25 bp, Artificial
  Probe
ttctacttgtcagattgcccaagaa

SEQ ID NO: 333759 - DNA, 25 bp, Artificial
  Probe
taaagatcgacctcttgaaggactt

SEQ ID NO: 333760 - DNA, 25 bp, Artificial
  Probe
acaatcagaactttgttgaagaatc

SEQ ID NO: 333761 - DNA, 25 bp, Artificial
  Probe
tgtcgacgcgccagataacacaact

SEQ ID NO: 333762 - DNA, 25 bp, Artificial
  Probe
ctgacaatcagaactttgttgaaga

SEQ ID NO: 333763 - DNA, 25 bp, Artificial
  Probe
cttgaaggacttacttctaagagct

SEQ ID NO: 333764 - DNA, 25 bp, Artificial
  Probe
agacagaaccttctggatgatcttg

SEQ ID NO: 333765 - DNA, 25 bp, Artificial
  Probe
aggtaaagatcgacctcttgaagga

SEQ ID NO: 333766 - DNA, 25 bp, Artificial
  Probe
gacccctggttctccacgtacgatt

SEQ ID NO: 333767 - DNA, 25 bp, Artificial
  Probe
cacgtacgattctacttgtcagatt

SEQ ID NO: 333768 - DNA, 25 bp, Artificial
  Probe
aatcgctgagaagattcaagaacga

SEQ ID NO: 333769 - DNA, 25 bp, Artificial
  Probe
ctaagagctgtgtcgacgcgccaga

SEQ ID NO: 333770 - DNA, 25 bp, Artificial
  Probe
cagctcccagagcacattggtcctt

SEQ ID NO: 333771 - DNA, 25 bp, Artificial
  Probe
ctatgaccaatgtaagctgccatgt

SEQ ID NO: 333772 - DNA, 25 bp, Artificial
  Probe
tctatgaccaatgtaagctgccatg

SEQ ID NO: 333773 - DNA, 25 bp, Artificial
  Probe
gctttttgccttccagctcccagag

SEQ ID NO: 333774 - DNA, 25 bp, Artificial
  Probe
accactgccccagatgggttgcttt

SEQ ID NO: 333775 - DNA, 25 bp, Artificial
  Probe
tgaccaatgtaagctgccatgtgtc

SEQ ID NO: 333776 - DNA, 25 bp, Artificial
  Probe
ccagagcacattggtccttattctg

SEQ ID NO: 333777 - DNA, 25 bp, Artificial
  Probe
atgggttgctttttgccttccagct

SEQ ID NO: 333778 - DNA, 25 bp, Artificial
  Probe
ctcccagagcacattggtccttatt

SEQ ID NO: 333779 - DNA, 25 bp, Artificial
  Probe
gaccaatgtaagctgccatgtgtct

SEQ ID NO: 333780 - DNA, 25 bp, Artificial
  Probe
ttgctttttgccttccagctcccag

SEQ ID NO: 333781 - DNA, 25 bp, Artificial
  Probe
atgaccaatgtaagctgccatgtgt

SEQ ID NO: 333782 - DNA, 25 bp, Artificial
  Probe
agctcccagagcacattggtcctta

SEQ ID NO: 333783 - DNA, 25 bp, Artificial
  Probe
caccactgccccagatgggttgctt

SEQ ID NO: 333784 - DNA, 25 bp, Artificial
  Probe
ttccagctcccagagcacattggtc

SEQ ID NO: 333785 - DNA, 25 bp, Artificial
  Probe
gatgggttgctttttgccttccagc

SEQ ID NO: 333786 - DNA, 25 bp, Artificial
  Probe
tcccagagcacattggtccttattc

SEQ ID NO: 333787 - DNA, 25 bp, Artificial
  Probe
cttattctgggtcatatccaggcca

SEQ ID NO: 333788 - DNA, 25 bp, Artificial
  Probe
ccccagatgggttgctttttgcctt

SEQ ID NO: 333789 - DNA, 25 bp, Artificial
  Probe
cccagagcacattggtccttattct

SEQ ID NO: 333790 - DNA, 25 bp, Artificial
  Probe
ttattctgggtcatatccaggccat

SEQ ID NO: 333791 - DNA, 25 bp, Artificial
  Probe
cattggtccttattctgggtcatat

SEQ ID NO: 333792 - DNA, 25 bp, Artificial
  Probe
tatgaccaatgtaagctgccatgtg

SEQ ID NO: 333793 - DNA, 25 bp, Artificial
  Probe
tttttgccttccagctcccagagca

SEQ ID NO: 333794 - DNA, 25 bp, Artificial
  Probe
ttggtccttattctgggtcatatcc

SEQ ID NO: 333795 - DNA, 25 bp, Artificial
  Probe
accaatgtaagctgccatgtgtctg

SEQ ID NO: 333796 - DNA, 25 bp, Artificial
  Probe
agcacattggtccttattctgggtc

SEQ ID NO: 333797 - DNA, 25 bp, Artificial
  Probe
agatgggttgctttttgccttccag

SEQ ID NO: 333798 - DNA, 25 bp, Artificial
  Probe
cagatgggttgctttttgccttcca

SEQ ID NO: 333799 - DNA, 25 bp, Artificial
  Probe
agagcacattggtccttattctggg

SEQ ID NO: 333800 - DNA, 25 bp, Artificial
  Probe
tggtccttattctgggtcatatcca

SEQ ID NO: 333801 - DNA, 25 bp, Artificial
  Probe
gctcccagagcacattggtccttat

SEQ ID NO: 333802 - DNA, 25 bp, Artificial
  Probe
ccttattctgggtcatatccaggcc

SEQ ID NO: 333803 - DNA, 25 bp, Artificial
  Probe
gcacattggtccttattctgggtca

SEQ ID NO: 333804 - DNA, 25 bp, Artificial
  Probe
cccagatgggttgctttttgccttc

SEQ ID NO: 333805 - DNA, 25 bp, Artificial
  Probe
gagcacattggtccttattctgggt

SEQ ID NO: 333806 - DNA, 25 bp, Artificial
  Probe
cagagcacattggtccttattctgg

SEQ ID NO: 333807 - DNA, 25 bp, Artificial
  Probe
cacattggtccttattctgggtcat

SEQ ID NO: 333808 - DNA, 25 bp, Artificial
  Probe
gccccagatgggttgctttttgcct

SEQ ID NO: 333809 - DNA, 25 bp, Artificial
  Probe
ccagatgggttgctttttgccttcc

SEQ ID NO: 333810 - DNA, 25 bp, Artificial
  Probe
tgctttttgccttccagctcccaga

SEQ ID NO: 333811 - DNA, 25 bp, Artificial
  Probe
ccactgccccagatgggttgctttt

SEQ ID NO: 333812 - DNA, 25 bp, Artificial
  Probe
cactgccccagatgggttgcttttt

SEQ ID NO: 333813 - DNA, 25 bp, Artificial
  Probe
acattggtccttattctgggtcata

SEQ ID NO: 333814 - DNA, 25 bp, Artificial
  Probe
tgggttgctttttgccttccagctc

SEQ ID NO: 333815 - DNA, 25 bp, Artificial
  Probe
attggtccttattctgggtcatatc

SEQ ID NO: 333816 - DNA, 25 bp, Artificial
  Probe
ctggaggcttgtgtcgatggtaccc

SEQ ID NO: 333817 - DNA, 25 bp, Artificial
  Probe
atggacatagccactttcaagaagc

SEQ ID NO: 333818 - DNA, 25 bp, Artificial
  Probe
ggatctgcacgctataccctccagt

SEQ ID NO: 333819 - DNA, 25 bp, Artificial
  Probe
aagatggatgctcaggtgattgcct

SEQ ID NO: 333820 - DNA, 25 bp, Artificial
  Probe
tccagggaggacctgcgggccctca

SEQ ID NO: 333821 - DNA, 25 bp, Artificial
  Probe
tagacttcaatgtccgagaggcctt

SEQ ID NO: 333822 - DNA, 25 bp, Artificial
  Probe
accaggggtcattgccaaagtttga

SEQ ID NO: 333823 - DNA, 25 bp, Artificial
  Probe
agtgttggatgagtccattgtccac

SEQ ID NO: 333824 - DNA, 25 bp, Artificial
  Probe
tgcttaaagtcagcaaaggacaaaa

SEQ ID NO: 333825 - DNA, 25 bp, Artificial
  Probe
ccctgcagggtttgctggtagtgtt

SEQ ID NO: 333826 - DNA, 25 bp, Artificial
  Probe
tggacaagacctacccacaaggcta

SEQ ID NO: 333827 - DNA, 25 bp, Artificial
  Probe
tagggccacacattggggacctgaa

SEQ ID NO: 333828 - DNA, 25 bp, Artificial
  Probe
ggtggcatccccaatggctacctga

SEQ ID NO: 333829 - DNA, 25 bp, Artificial
  Probe
caagaagctgcaggtggatgccctg

SEQ ID NO: 333830 - DNA, 25 bp, Artificial
  Probe
gggccctcagccagcacaatgtgag

SEQ ID NO: 333831 - DNA, 25 bp, Artificial
  Probe
aggcaagctggacgaggacatagta

SEQ ID NO: 333832 - DNA, 25 bp, Artificial
  Probe
caggatttgtgtttgcatggattcc

SEQ ID NO: 333833 - DNA, 25 bp, Artificial
  Probe
ggatgaaaacctcatcttctaccag

SEQ ID NO: 333834 - DNA, 25 bp, Artificial
  Probe
ccgacagcagcagaaagacctggac

SEQ ID NO: 333835 - DNA, 25 bp, Artificial
  Probe
ccttaagttacctatgtgacttcag

SEQ ID NO: 333836 - DNA, 25 bp, Artificial
  Probe
caagctggacgaggacatagtaaaa

SEQ ID NO: 333837 - DNA, 25 bp, Artificial
  Probe
gtttgggacttcagggtggcatccc

SEQ ID NO: 333838 - DNA, 25 bp, Artificial
  Probe
tcagctttaagactgagctgagacc

SEQ ID NO: 333839 - DNA, 25 bp, Artificial
  Probe
aaggctatcccgagtccctgatcaa

SEQ ID NO: 333840 - DNA, 25 bp, Artificial
  Probe
aggcatctccagagagccctccagg

SEQ ID NO: 333841 - DNA, 25 bp, Artificial
  Probe
actccttgggccaggatttgtgttt

SEQ ID NO: 333842 - DNA, 25 bp, Artificial
  Probe
tagtaaaagccctggacaacatccc

SEQ ID NO: 333843 - DNA, 25 bp, Artificial
  Probe
agctgagaccaccactcctaaggct

SEQ ID NO: 333844 - DNA, 25 bp, Artificial
  Probe
cagcacaatgtgagtatggacatag

SEQ ID NO: 333845 - DNA, 25 bp, Artificial
  Probe
aagttacctatgtgacttcagcccc

SEQ ID NO: 333846 - DNA, 25 bp, Artificial
  Probe
ttggtcgcctgctatcttcggggag

SEQ ID NO: 333847 - DNA, 25 bp, Artificial
  Probe
gacagcagcagaaagacctggacag

SEQ ID NO: 333848 - DNA, 25 bp, Artificial
  Probe
ggataccaggggtcattgccaaagt

SEQ ID NO: 333849 - DNA, 25 bp, Artificial
  Probe
ttgaacccaataaacagtggcatgt

SEQ ID NO: 333850 - DNA, 25 bp, Artificial
  Probe
agatggaccttgtgaatgaaattcc

SEQ ID NO: 333851 - DNA, 25 bp, Artificial
  Probe
gctggggtctaagtggactgtcaca

SEQ ID NO: 333852 - DNA, 25 bp, Artificial
  Probe
ccctggatgccctgcagggtttgct

SEQ ID NO: 333853 - DNA, 25 bp, Artificial
  Probe
ggataaaagccctgtccgggactgg

SEQ ID NO: 333854 - DNA, 25 bp, Artificial
  Probe
ccaaggccaggcaaaggctgtcagg

SEQ ID NO: 333855 - DNA, 25 bp, Artificial
  Probe
tgggtatcctctatcagaaggcctg

SEQ ID NO: 333856 - DNA, 25 bp, Artificial
  Probe
acattggggacctgaagactgagga

SEQ ID NO: 333857 - DNA, 25 bp, Artificial
  Probe
gaacagaaagcctgccctccaggga

SEQ ID NO: 333858 - DNA, 25 bp, Artificial
  Probe
ttctaccagaattgggagctggagg

SEQ ID NO: 333859 - DNA, 25 bp, Artificial
  Probe
ttccagaacgtgagcgggctggaat

SEQ ID NO: 333860 - DNA, 25 bp, Artificial
  Probe
tgaaattccctttacctacgagcag

SEQ ID NO: 333861 - DNA, 25 bp, Artificial
  Probe
gccctggacaacatccccttaagtt

SEQ ID NO: 333862 - DNA, 25 bp, Artificial
  Probe
tgccctcaggctttgatgggtggca

SEQ ID NO: 333863 - DNA, 25 bp, Artificial
  Probe
agaagtggtattagccccaggagcc

SEQ ID NO: 333864 - DNA, 25 bp, Artificial
  Probe
aatgtgtatgccacccgggactctg

SEQ ID NO: 333865 - DNA, 25 bp, Artificial
  Probe
tggcttagtctacatgaagtatgac

SEQ ID NO: 333866 - DNA, 25 bp, Artificial
  Probe
tcaccaacgttgtcttccggctcga

SEQ ID NO: 333867 - DNA, 25 bp, Artificial
  Probe
aatgtgaagtccagatcgtgttcaa

SEQ ID NO: 333868 - DNA, 25 bp, Artificial
  Probe
catttttgccgaggtaaacagtgat

SEQ ID NO: 333869 - DNA, 25 bp, Artificial
  Probe
acctttgtgtcacctactacactgg

SEQ ID NO: 333870 - DNA, 25 bp, Artificial
  Probe
agttggccaggaatgtgaagtccag

SEQ ID NO: 333871 - DNA, 25 bp, Artificial
  Probe
cagctcattgccagtctggacagtc

SEQ ID NO: 333872 - DNA, 25 bp, Artificial
  Probe
cacacctttcatttttgccgaggta

SEQ ID NO: 333873 - DNA, 25 bp, Artificial
  Probe
ggcaatgttgctcaatgtctcaggc

SEQ ID NO: 333874 - DNA, 25 bp, Artificial
  Probe
tacacggtgtcattcaagtggatgt

SEQ ID NO: 333875 - DNA, 25 bp, Artificial
  Probe
cagaaggctcagaagcagagaggaa

SEQ ID NO: 333876 - DNA, 25 bp, Artificial
  Probe
agctgcagtagttggccaggaatgt

SEQ ID NO: 333877 - DNA, 25 bp, Artificial
  Probe
cagcttcaagatcgtgtatgtggaa

SEQ ID NO: 333878 - DNA, 25 bp, Artificial
  Probe
atcaagaatggcttagtctacatga

SEQ ID NO: 333879 - DNA, 25 bp, Artificial
  Probe
cattgccccaagatggggtcctacc

SEQ ID NO: 333880 - DNA, 25 bp, Artificial
  Probe
cacccgggactctgctgaggatgtg

SEQ ID NO: 333881 - DNA, 25 bp, Artificial
  Probe
gaagaggccagatctgccctcaggc

SEQ ID NO: 333882 - DNA, 25 bp, Artificial
  Probe
gctcgaaggttctgggttacagaga

SEQ ID NO: 333883 - DNA, 25 bp, Artificial
  Probe
aagtagctcccctggctcggacaag

SEQ ID NO: 333884 - DNA, 25 bp, Artificial
  Probe
gcctgtggcctacaaggaatacaag

SEQ ID NO: 333885 - DNA, 25 bp, Artificial
  Probe
taccttcaaggagaccaagaaagaa

SEQ ID NO: 333886 - DNA, 25 bp, Artificial
  Probe
tactgggagctgcagtagttggcca

SEQ ID NO: 333887 - DNA, 25 bp, Artificial
  Probe
actctgctgaggatgtggcaatgca

SEQ ID NO: 333888 - DNA, 25 bp, Artificial
  Probe
cccacatctataagcacccagaagg

SEQ ID NO: 333889 - DNA, 25 bp, Artificial
  Probe
tctcaggccatgtcaaggagagtgg

SEQ ID NO: 333890 - DNA, 25 bp, Artificial
  Probe
ccagatcgtgttcaagaaccccctg

SEQ ID NO: 333891 - DNA, 25 bp, Artificial
  Probe
acaccccaggagaccagcagtggca

SEQ ID NO: 333892 - DNA, 25 bp, Artificial
  Probe
ggcttagtctacatgaagtatgaca

SEQ ID NO: 333893 - DNA, 25 bp, Artificial
  Probe
atgaacaaggacattgccccaagat

SEQ ID NO: 333894 - DNA, 25 bp, Artificial
  Probe
cccaccttgtggaccagggggcaat

SEQ ID NO: 333895 - DNA, 25 bp, Artificial
  Probe
ggaccagggggcaatgttgctcaat

SEQ ID NO: 333896 - DNA, 25 bp, Artificial
  Probe
gtggccatgcctgtggcctacaagg

SEQ ID NO: 333897 - DNA, 25 bp, Artificial
  Probe
aaagccattggcacactgattgtca

SEQ ID NO: 333898 - DNA, 25 bp, Artificial
  Probe
tgacacacctttcatttttgccgag

SEQ ID NO: 333899 - DNA, 25 bp, Artificial
  Probe
cagcggcaggatgacggcagcttca

SEQ ID NO: 333900 - DNA, 25 bp, Artificial
  Probe
ctgctggatgaagaggccagatctg

SEQ ID NO: 333901 - DNA, 25 bp, Artificial
  Probe
ctctgctgaggatgtggcaatgcag

SEQ ID NO: 333902 - DNA, 25 bp, Artificial
  Probe
tggcagtagccgacgcactgtgaag

SEQ ID NO: 333903 - DNA, 25 bp, Artificial
  Probe
ggcaggatctgactgtctctgtggt

SEQ ID NO: 333904 - DNA, 25 bp, Artificial
  Probe
gttgcacctctacctttgtgtcacc

SEQ ID NO: 333905 - DNA, 25 bp, Artificial
  Probe
ccagacctctctctgacattactgg

SEQ ID NO: 333906 - DNA, 25 bp, Artificial
  Probe
aggctgcggcccatggcagcaaacc

SEQ ID NO: 333907 - DNA, 25 bp, Artificial
  Probe
cgagaggacatcacccacatctata

SEQ ID NO: 333908 - DNA, 25 bp, Artificial
  Probe
tctaatgaataccctagcccctcgc

SEQ ID NO: 333909 - DNA, 25 bp, Artificial
  Probe
cgtcctgaattcctttgctggaatc

SEQ ID NO: 333910 - DNA, 25 bp, Artificial
  Probe
cccacctcctctaatgaatacccta

SEQ ID NO: 333911 - DNA, 25 bp, Artificial
  Probe
cccgtcctgaattcctttgctggaa

SEQ ID NO: 333912 - DNA, 25 bp, Artificial
  Probe
gcttggggcccacctcctctaatga

SEQ ID NO: 333913 - DNA, 25 bp, Artificial
  Probe
tcctctaatgaataccctagcccct

SEQ ID NO: 333914 - DNA, 25 bp, Artificial
  Probe
ccacctcctctaatgaataccctag

SEQ ID NO: 333915 - DNA, 25 bp, Artificial
  Probe
aatgaataccctagcccctcgcccg

SEQ ID NO: 333916 - DNA, 25 bp, Artificial
  Probe
ctcgcccgtcctgaattcctttgct

SEQ ID NO: 333917 - DNA, 25 bp, Artificial
  Probe
ggcttggggcccacctcctctaatg

SEQ ID NO: 333918 - DNA, 25 bp, Artificial
  Probe
ttggcttggggcccacctcctctaa

SEQ ID NO: 333919 - DNA, 25 bp, Artificial
  Probe
tttggcttggggcccacctcctcta

SEQ ID NO: 333920 - DNA, 25 bp, Artificial
  Probe
ccgtcctgaattcctttgctggaat

SEQ ID NO: 333921 - DNA, 25 bp, Artificial
  Probe
gcccacctcctctaatgaataccct

SEQ ID NO: 333922 - DNA, 25 bp, Artificial
  Probe
ccaaacacactcgtattcattgggg

SEQ ID NO: 333923 - DNA, 25 bp, Artificial
  Probe
cctcctctaatgaataccctagccc

SEQ ID NO: 333924 - DNA, 25 bp, Artificial
  Probe
cccaaacacactcgtattcattggg

SEQ ID NO: 333925 - DNA, 25 bp, Artificial
  Probe
acctcctctaatgaataccctagcc

SEQ ID NO: 333926 - DNA, 25 bp, Artificial
  Probe
cttggggcccacctcctctaatgaa

SEQ ID NO: 333927 - DNA, 25 bp, Artificial
  Probe
ctccccaaacacactcgtattcatt

SEQ ID NO: 333928 - DNA, 25 bp, Artificial
  Probe
ctctaatgaataccctagcccctcg

SEQ ID NO: 333929 - DNA, 25 bp, Artificial
  Probe
tcgcccgtcctgaattcctttgctg

SEQ ID NO: 333930 - DNA, 25 bp, Artificial
  Probe
cgcccgtcctgaattcctttgctgg

SEQ ID NO: 333931 - DNA, 25 bp, Artificial
  Probe
ctaatgaataccctagcccctcgcc

SEQ ID NO: 333932 - DNA, 25 bp, Artificial
  Probe
taatgaataccctagcccctcgccc

SEQ ID NO: 333933 - DNA, 25 bp, Artificial
  Probe
ccccaaacacactcgtattcattgg

SEQ ID NO: 333934 - DNA, 25 bp, Artificial
  Probe
cctctaatgaataccctagcccctc

SEQ ID NO: 333935 - DNA, 25 bp, Artificial
  Probe
ctttggcttggggcccacctcctct

SEQ ID NO: 333936 - DNA, 25 bp, Artificial
  Probe
tccccaaacacactcgtattcattg

SEQ ID NO: 333937 - DNA, 25 bp, Artificial
  Probe
ctcctctaatgaataccctagcccc

SEQ ID NO: 333938 - DNA, 25 bp, Artificial
  Probe
tggcttggggcccacctcctctaat

SEQ ID NO: 333939 - DNA, 25 bp, Artificial
  Probe
gaattaataaaccatatctatctga

SEQ ID NO: 333940 - DNA, 25 bp, Artificial
  Probe
gcccgtcctgaattcctttgctgga

SEQ ID NO: 333941 - DNA, 25 bp, Artificial
  Probe
cacctcctctaatgaataccctagc

SEQ ID NO: 333942 - DNA, 25 bp, Artificial
  Probe
ctcggcaaattgtcagggacatgaa

SEQ ID NO: 333943 - DNA, 25 bp, Artificial
  Probe
aacagcaggatgagcagttggagct

SEQ ID NO: 333944 - DNA, 25 bp, Artificial
  Probe
agaacatgtcccagcgcatcggagg

SEQ ID NO: 333945 - DNA, 25 bp, Artificial
  Probe
aaacttgcaaaagtgtctcacatga

SEQ ID NO: 333946 - DNA, 25 bp, Artificial
  Probe
ttctgcacgaggacccagggaagag

SEQ ID NO: 333947 - DNA, 25 bp, Artificial
  Probe
cagcagccagaattgggatgctgga

SEQ ID NO: 333948 - DNA, 25 bp, Artificial
  Probe
gtgccttggcgcttctgcacgagga

SEQ ID NO: 333949 - DNA, 25 bp, Artificial
  Probe
atggtggtgccttggcgcttctgca

SEQ ID NO: 333950 - DNA, 25 bp, Artificial
  Probe
ctcacgagttggagagcactcagtc

SEQ ID NO: 333951 - DNA, 25 bp, Artificial
  Probe
tgctgaagaacatgtcccagcgcat

SEQ ID NO: 333952 - DNA, 25 bp, Artificial
  Probe
aagcactcggccacttacactcgtg

SEQ ID NO: 333953 - DNA, 25 bp, Artificial
  Probe
aggaacaggcagtcatgctggatga

SEQ ID NO: 333954 - DNA, 25 bp, Artificial
  Probe
ctactaggagatagcagcagccaga

SEQ ID NO: 333955 - DNA, 25 bp, Artificial
  Probe
cagttggagctggtctctggcagca

SEQ ID NO: 333956 - DNA, 25 bp, Artificial
  Probe
taggagatagcagcagccagaattg

SEQ ID NO: 333957 - DNA, 25 bp, Artificial
  Probe
actggacaacgtgatgaagaaactt

SEQ ID NO: 333958 - DNA, 25 bp, Artificial
  Probe
tcatcgaggagcagcaggcacagca

SEQ ID NO: 333959 - DNA, 25 bp, Artificial
  Probe
ttggagagcactcagtctcgactgg

SEQ ID NO: 333960 - DNA, 25 bp, Artificial
  Probe
agtgacggatcgatatgggcgcctt

SEQ ID NO: 333961 - DNA, 25 bp, Artificial
  Probe
gagcagcaggcacagcagcagttga

SEQ ID NO: 333962 - DNA, 25 bp, Artificial
  Probe
catcacaagtactcggcaaattgtc

SEQ ID NO: 333963 - DNA, 25 bp, Artificial
  Probe
catcggggtgctgaagaacatgtcc

SEQ ID NO: 333964 - DNA, 25 bp, Artificial
  Probe
catgaccagtgatcggcgccagtgg

SEQ ID NO: 333965 - DNA, 25 bp, Artificial
  Probe
cctagtgctgtgatggtggtgcctt

SEQ ID NO: 333966 - DNA, 25 bp, Artificial
  Probe
tgatcggcgccagtggtgtgccata

SEQ ID NO: 333967 - DNA, 25 bp, Artificial
  Probe
tgacggatcgatatgggcgccttga

SEQ ID NO: 333968 - DNA, 25 bp, Artificial
  Probe
gtgccatagccatcctcttcgcggt

SEQ ID NO: 333969 - DNA, 25 bp, Artificial
  Probe
ccttgatcgggagctgcagctggcc

SEQ ID NO: 333970 - DNA, 25 bp, Artificial
  Probe
acagacaggcgctactaggagatag

SEQ ID NO: 333971 - DNA, 25 bp, Artificial
  Probe
tggccaactcccatttcatcgagga

SEQ ID NO: 333972 - DNA, 25 bp, Artificial
  Probe
agcagcaagcactcggccacttaca

SEQ ID NO: 333973 - DNA, 25 bp, Artificial
  Probe
agaggagcagcaagcactcggccac

SEQ ID NO: 333974 - DNA, 25 bp, Artificial
  Probe
acccagggaagaggagcagcaagca

SEQ ID NO: 333975 - DNA, 25 bp, Artificial
  Probe
caagtactcggcaaattgtcaggga

SEQ ID NO: 333976 - DNA, 25 bp, Artificial
  Probe
tcctcttcgcggtcctgctggtcgt

SEQ ID NO: 333977 - DNA, 25 bp, Artificial
  Probe
tcgtgctgaccctcttcctagtgct

SEQ ID NO: 333978 - DNA, 25 bp, Artificial
  Probe
atagcagcagccagaattgggatgc

SEQ ID NO: 333979 - DNA, 25 bp, Artificial
  Probe
tgcagctggccaactcccatttcat

SEQ ID NO: 333980 - DNA, 25 bp, Artificial
  Probe
aggatcagatgtcagcttcatctgt

SEQ ID NO: 333981 - DNA, 25 bp, Artificial
  Probe
agcagcagttgattgtggaacagca

SEQ ID NO: 333982 - DNA, 25 bp, Artificial
  Probe
gcaagcgttggcagaaaggaaaaac

SEQ ID NO: 333983 - DNA, 25 bp, Artificial
  Probe
gcagcatcggggtgctgaagaacat

SEQ ID NO: 333984 - DNA, 25 bp, Artificial
  Probe
ctgaagaacatgtcccagcgcatcg

SEQ ID NO: 333985 - DNA, 25 bp, Artificial
  Probe
tctctggcagcatcggggtgctgaa

SEQ ID NO: 333986 - DNA, 25 bp, Artificial
  Probe
gggagctgcagctggccaactccca

SEQ ID NO: 333987 - DNA, 25 bp, Artificial
  Probe
ttggagctggtctctggcagcatcg

SEQ ID NO: 333988 - DNA, 25 bp, Artificial
  Probe
gggctggacttaggactctgatttc

SEQ ID NO: 333989 - DNA, 25 bp, Artificial
  Probe
aagctgcttgcaggtcaggggacca

SEQ ID NO: 333990 - DNA, 25 bp, Artificial
  Probe
ctctcacatctctgctctttggctg

SEQ ID NO: 333991 - DNA, 25 bp, Artificial
  Probe
agtaccagcgcgtcctgaaagctgc

SEQ ID NO: 333992 - DNA, 25 bp, Artificial
  Probe
ttgctgatcccctgaaattggcctc

SEQ ID NO: 333993 - DNA, 25 bp, Artificial
  Probe
tagagattcccctgatgagctcagg

SEQ ID NO: 333994 - DNA, 25 bp, Artificial
  Probe
gcagtcccaggtttgtaaggttaca

SEQ ID NO: 333995 - DNA, 25 bp, Artificial
  Probe
tgccgggcgctcaggcatctcttca

SEQ ID NO: 333996 - DNA, 25 bp, Artificial
  Probe
agattcccctgatgagctcaggagg

SEQ ID NO: 333997 - DNA, 25 bp, Artificial
  Probe
ctgagttacaaatcctgaggtctgt

SEQ ID NO: 333998 - DNA, 25 bp, Artificial
  Probe
gatcccctgaaattggcctctcttt

SEQ ID NO: 333999 - DNA, 25 bp, Artificial
  Probe
tcaccgcaggagaaaagtctgctct

SEQ ID NO: 334000 - DNA, 25 bp, Artificial
  Probe
caaatcctgaggtctgtagtaagtg

SEQ ID NO: 334001 - DNA, 25 bp, Artificial
  Probe
tctttggctgagttacaaatcctga

SEQ ID NO: 334002 - DNA, 25 bp, Artificial
  Probe
gactctgatttctccagaaggagca

SEQ ID NO: 334003 - DNA, 25 bp, Artificial
  Probe
gtgaacagtaccagcgcgtcctgaa

SEQ ID NO: 334004 - DNA, 25 bp, Artificial
  Probe
actggcttttacttttccagaactg

SEQ ID NO: 334005 - DNA, 25 bp, Artificial
  Probe
agagcgaggtacctgtgaacagtac

SEQ ID NO: 334006 - DNA, 25 bp, Artificial
  Probe
agcaatggagggttcacctagagcg

SEQ ID NO: 334007 - DNA, 25 bp, Artificial
  Probe
cagttttccatcaccgcaggagaaa

SEQ ID NO: 334008 - DNA, 25 bp, Artificial
  Probe
tcacctagagcgaggtacctgtgaa

SEQ ID NO: 334009 - DNA, 25 bp, Artificial
  Probe
gaaataagatgtccatgtggccctc

SEQ ID NO: 334010 - DNA, 25 bp, Artificial
  Probe
gttacactggcttttacttttccag

SEQ ID NO: 334011 - DNA, 25 bp, Artificial
  Probe
tctgctcttgtaaagccccatgtcc

SEQ ID NO: 334012 - DNA, 25 bp, Artificial
  Probe
tttccagaactgtgccgggcgctca

SEQ ID NO: 334013 - DNA, 25 bp, Artificial
  Probe
ttgtaaggttacactggcttttact

SEQ ID NO: 334014 - DNA, 25 bp, Artificial
  Probe
tagtaggcagccagtgactagagat

SEQ ID NO: 334015 - DNA, 25 bp, Artificial
  Probe
cagccagtgactagagattcccctg

SEQ ID NO: 334016 - DNA, 25 bp, Artificial
  Probe
gtcctgaaagctgcttgcaggtcag

SEQ ID NO: 334017 - DNA, 25 bp, Artificial
  Probe
gacttaggactctgatttctccaga

SEQ ID NO: 334018 - DNA, 25 bp, Artificial
  Probe
aaagctgcttgcaggtcaggggacc

SEQ ID NO: 334019 - DNA, 25 bp, Artificial
  Probe
gtgactagagattcccctgatgagc

SEQ ID NO: 334020 - DNA, 25 bp, Artificial
  Probe
gagaaaagtctgctcttgtaaagcc

SEQ ID NO: 334021 - DNA, 25 bp, Artificial
  Probe
tgtatttgctgatcccctgaaattg

SEQ ID NO: 334022 - DNA, 25 bp, Artificial
  Probe
ctccagaaggagcaatggagggttc

SEQ ID NO: 334023 - DNA, 25 bp, Artificial
  Probe
ctgaaattggcctctctttatcagg

SEQ ID NO: 334024 - DNA, 25 bp, Artificial
  Probe
gggttcacctagagcgaggtacctg

SEQ ID NO: 334025 - DNA, 25 bp, Artificial
  Probe
tggtgggctcttcatcagtggtcag

SEQ ID NO: 334026 - DNA, 25 bp, Artificial
  Probe
ttccatcaccgcaggagaaaagtct

SEQ ID NO: 334027 - DNA, 25 bp, Artificial
  Probe
gagggttcacctagagcgaggtacc

SEQ ID NO: 334028 - DNA, 25 bp, Artificial
  Probe
aagatgtccatgtggccctctgtgg

SEQ ID NO: 334029 - DNA, 25 bp, Artificial
  Probe
tgtaaggttacactggcttttactt

SEQ ID NO: 334030 - DNA, 25 bp, Artificial
  Probe
tgtgccgggcgctcaggcatctctt

SEQ ID NO: 334031 - DNA, 25 bp, Artificial
  Probe
cctctctttatcaggcttctctggg

SEQ ID NO: 334032 - DNA, 25 bp, Artificial
  Probe
caatggagggttcacctagagcgag

SEQ ID NO: 334033 - DNA, 25 bp, Artificial
  Probe
atcaggcttctctgggttattccag

SEQ ID NO: 334034 - DNA, 25 bp, Artificial
  Probe
agtcatcaaatggacaaggacctgc

SEQ ID NO: 334035 - DNA, 25 bp, Artificial
  Probe
agtgcccatgaaaaatacaaatgtg

SEQ ID NO: 334036 - DNA, 25 bp, Artificial
  Probe
gatttaccacagtggtttatcaact

SEQ ID NO: 334037 - DNA, 25 bp, Artificial
  Probe
agtaccgagatttcagaaagcataa

SEQ ID NO: 334038 - DNA, 25 bp, Artificial
  Probe
cagtcgtataacttcgctattcatg

SEQ ID NO: 334039 - DNA, 25 bp, Artificial
  Probe
gtgatgtctctcaggctggcccagt

SEQ ID NO: 334040 - DNA, 25 bp, Artificial
  Probe
ctggttttccaagtttctttatcag

SEQ ID NO: 334041 - DNA, 25 bp, Artificial
  Probe
ccatgttgaattgcacattattagt

SEQ ID NO: 334042 - DNA, 25 bp, Artificial
  Probe
taaactgtgctagtcatcaaatgga

SEQ ID NO: 334043 - DNA, 25 bp, Artificial
  Probe
cattgtctcacgtgtaataacgtgg

SEQ ID NO: 334044 - DNA, 25 bp, Artificial
  Probe
tggtttatcaacttacccaaccagg

SEQ ID NO: 334045 - DNA, 25 bp, Artificial
  Probe
taaagaactctcctgctcctggcct

SEQ ID NO: 334046 - DNA, 25 bp, Artificial
  Probe
ttcagtgcatcttattctgcgtatt

SEQ ID NO: 334047 - DNA, 25 bp, Artificial
  Probe
tacactgttcccttcaacggccatg

SEQ ID NO: 334048 - DNA, 25 bp, Artificial
  Probe
tcacgtgtaataacgtgggtcaggg

SEQ ID NO: 334049 - DNA, 25 bp, Artificial
  Probe
caggcttttccgtggcgctgggaca

SEQ ID NO: 334050 - DNA, 25 bp, Artificial
  Probe
ccaaccaggcttttctcagatcctg

SEQ ID NO: 334051 - DNA, 25 bp, Artificial
  Probe
tactttcctcagatgacttaatgag

SEQ ID NO: 334052 - DNA, 25 bp, Artificial
  Probe
ctattcatgaggatgtcaaaaaacg

SEQ ID NO: 334053 - DNA, 25 bp, Artificial
  Probe
atgacttaatgagaacctgtccaga

SEQ ID NO: 334054 - DNA, 25 bp, Artificial
  Probe
accacaattaaggacagtagtcaga

SEQ ID NO: 334055 - DNA, 25 bp, Artificial
  Probe
gggtctgctaagtttgagggattcc

SEQ ID NO: 334056 - DNA, 25 bp, Artificial
  Probe
aatacttcagtatttaagtaccgag

SEQ ID NO: 334057 - DNA, 25 bp, Artificial
  Probe
gttttccaagtttctttatcagtcg

SEQ ID NO: 334058 - DNA, 25 bp, Artificial
  Probe
gacagtagtcagaatcgtggggaca

SEQ ID NO: 334059 - DNA, 25 bp, Artificial
  Probe
cagtagtcagaatcgtggggacacg

SEQ ID NO: 334060 - DNA, 25 bp, Artificial
  Probe
gacagcttatctttttcagtgcatc

SEQ ID NO: 334061 - DNA, 25 bp, Artificial
  Probe
catttctccctttgggcttagcagt

SEQ ID NO: 334062 - DNA, 25 bp, Artificial
  Probe
tatagctctacttgtcgatgtgttg

SEQ ID NO: 334063 - DNA, 25 bp, Artificial
  Probe
ctacttgtcgatgtgttggttacag

SEQ ID NO: 334064 - DNA, 25 bp, Artificial
  Probe
tcaggctggcccagtatctccgagt

SEQ ID NO: 334065 - DNA, 25 bp, Artificial
  Probe
aatggcgttgtatctacacatggaa

SEQ ID NO: 334066 - DNA, 25 bp, Artificial
  Probe
gatgtcaggactgtgtcatgtattc

SEQ ID NO: 334067 - DNA, 25 bp, Artificial
  Probe
gtggtttatcaacttacccaaccag

SEQ ID NO: 334068 - DNA, 25 bp, Artificial
  Probe
ttgtcagctaggaagtctaacatga

SEQ ID NO: 334069 - DNA, 25 bp, Artificial
  Probe
actttgcaacccaggcttttccgtg

SEQ ID NO: 334070 - DNA, 25 bp, Artificial
  Probe
caggcttttctcagatcctgaaaac

SEQ ID NO: 334071 - DNA, 25 bp, Artificial
  Probe
caatccagaggctagcttgtcagct

SEQ ID NO: 334072 - DNA, 25 bp, Artificial
  Probe
cagatcctgaaaaccacaattaagg

SEQ ID NO: 334073 - DNA, 25 bp, Artificial
  Probe
tgcatcttattctgcgtattacagc

SEQ ID NO: 334074 - DNA, 25 bp, Artificial
  Probe
tacatttctccctttgggcttagca

SEQ ID NO: 334075 - DNA, 25 bp, Artificial
  Probe
tgctcctctgtgaacatctgtctaa

SEQ ID NO: 334076 - DNA, 25 bp, Artificial
  Probe
ctggcctgggcgtgctcctctgtga

SEQ ID NO: 334077 - DNA, 25 bp, Artificial
  Probe
tattcctaggagaaaacgttccctg

SEQ ID NO: 334078 - DNA, 25 bp, Artificial
  Probe
gattcctttaccaggtatttggagc

SEQ ID NO: 334079 - DNA, 25 bp, Artificial
  Probe
ttacagaatactggttttccaagtt

SEQ ID NO: 334080 - DNA, 25 bp, Artificial
  Probe
ctcctttggatccttgctgcagtta

SEQ ID NO: 334081 - DNA, 25 bp, Artificial
  Probe
cttgctgcagttagttcggggttgt

SEQ ID NO: 334082 - DNA, 25 bp, Artificial
  Probe
gatccttgctgcagttagttcgggg

SEQ ID NO: 334083 - DNA, 25 bp, Artificial
  Probe
tcagacttcctcctttggatccttg

SEQ ID NO: 334084 - DNA, 25 bp, Artificial
  Probe
gaaccatgcccagattcagacttcc

SEQ ID NO: 334085 - DNA, 25 bp, Artificial
  Probe
tgtttttctacagtttcctggtcac

SEQ ID NO: 334086 - DNA, 25 bp, Artificial
  Probe
acagtttcctggtcaccgctgtttc

SEQ ID NO: 334087 - DNA, 25 bp, Artificial
  Probe
cttcctcctttggatccttgctgca

SEQ ID NO: 334088 - DNA, 25 bp, Artificial
  Probe
tttggatccttgctgcagttagttc

SEQ ID NO: 334089 - DNA, 25 bp, Artificial
  Probe
tttctacagtttcctggtcaccgct

SEQ ID NO: 334090 - DNA, 25 bp, Artificial
  Probe
cagtttcctggtcaccgctgtttct

SEQ ID NO: 334091 - DNA, 25 bp, Artificial
  Probe
cccagattcagacttcctcctttgg

SEQ ID NO: 334092 - DNA, 25 bp, Artificial
  Probe
tcaccgctgtttctttgaacaggac

SEQ ID NO: 334093 - DNA, 25 bp, Artificial
  Probe
cctggtcaccgctgtttctttgaac

SEQ ID NO: 334094 - DNA, 25 bp, Artificial
  Probe
ccagattcagacttcctcctttgga

SEQ ID NO: 334095 - DNA, 25 bp, Artificial
  Probe
tacagtttcctggtcaccgctgttt

SEQ ID NO: 334096 - DNA, 25 bp, Artificial
  Probe
ctttggatccttgctgcagttagtt

SEQ ID NO: 334097 - DNA, 25 bp, Artificial
  Probe
tctacagtttcctggtcaccgctgt

SEQ ID NO: 334098 - DNA, 25 bp, Artificial
  Probe
ctggtcaccgctgtttctttgaaca

SEQ ID NO: 334099 - DNA, 25 bp, Artificial
  Probe
ggatccttgctgcagttagttcggg

SEQ ID NO: 334100 - DNA, 25 bp, Artificial
  Probe
gattcagacttcctcctttggatcc

SEQ ID NO: 334101 - DNA, 25 bp, Artificial
  Probe
caccgctgtttctttgaacaggacg

SEQ ID NO: 334102 - DNA, 25 bp, Artificial
  Probe
atccttgctgcagttagttcggggt

SEQ ID NO: 334103 - DNA, 25 bp, Artificial
  Probe
tcctcctttggatccttgctgcagt

SEQ ID NO: 334104 - DNA, 25 bp, Artificial
  Probe
ccttgctgcagttagttcggggttg

SEQ ID NO: 334105 - DNA, 25 bp, Artificial
  Probe
ttggatccttgctgcagttagttcg

SEQ ID NO: 334106 - DNA, 25 bp, Artificial
  Probe
tggtcaccgctgtttctttgaacag

SEQ ID NO: 334107 - DNA, 25 bp, Artificial
  Probe
agattcagacttcctcctttggatc

SEQ ID NO: 334108 - DNA, 25 bp, Artificial
  Probe
agaaccatgcccagattcagacttc

SEQ ID NO: 334109 - DNA, 25 bp, Artificial
  Probe
gcccagattcagacttcctcctttg

SEQ ID NO: 334110 - DNA, 25 bp, Artificial
  Probe
gatccagaaccatgcccagattcag

SEQ ID NO: 334111 - DNA, 25 bp, Artificial
  Probe
cctcctttggatccttgctgcagtt

SEQ ID NO: 334112 - DNA, 25 bp, Artificial
  Probe
ttttctacagtttcctggtcaccgc

SEQ ID NO: 334113 - DNA, 25 bp, Artificial
  Probe
agtttcctggtcaccgctgtttctt

SEQ ID NO: 334114 - DNA, 25 bp, Artificial
  Probe
ttcctcctttggatccttgctgcag

SEQ ID NO: 334115 - DNA, 25 bp, Artificial
  Probe
tggatccttgctgcagttagttcgg

SEQ ID NO: 334116 - DNA, 25 bp, Artificial
  Probe
cagattcagacttcctcctttggat

SEQ ID NO: 334117 - DNA, 25 bp, Artificial
  Probe
gtcaccgctgtttctttgaacagga

SEQ ID NO: 334118 - DNA, 25 bp, Artificial
  Probe
ctacagtttcctggtcaccgctgtt

SEQ ID NO: 334119 - DNA, 25 bp, Artificial
  Probe
cctttggatccttgctgcagttagt

SEQ ID NO: 334120 - DNA, 25 bp, Artificial
  Probe
ggtcaccgctgtttctttgaacagg

SEQ ID NO: 334121 - DNA, 25 bp, Artificial
  Probe
tcctttggatccttgctgcagttag

SEQ ID NO: 334122 - DNA, 25 bp, Artificial
  Probe
gacttcctcctttggatccttgctg

SEQ ID NO: 334123 - DNA, 25 bp, Artificial
  Probe
acttcctcctttggatccttgctgc

SEQ ID NO: 334124 - DNA, 25 bp, Artificial
  Probe
tttttctacagtttcctggtcaccg

SEQ ID NO: 334125 - DNA, 25 bp, Artificial
  Probe
ttctacagtttcctggtcaccgctg

SEQ ID NO: 334126 - DNA, 25 bp, Artificial
  Probe
agaagaccatcatgccaggtacccg

SEQ ID NO: 334127 - DNA, 25 bp, Artificial
  Probe
ctctctatggcaagaagtacattct

SEQ ID NO: 334128 - DNA, 25 bp, Artificial
  Probe
tactcgtccaagtgccaggagtgta

SEQ ID NO: 334129 - DNA, 25 bp, Artificial
  Probe
acccgcactgtgtggcctgcttcga

SEQ ID NO: 334130 - DNA, 25 bp, Artificial
  Probe
tacattctaaaggaggagaacccgc

SEQ ID NO: 334131 - DNA, 25 bp, Artificial
  Probe
cgctggtggacaagccctttgcggc

SEQ ID NO: 334132 - DNA, 25 bp, Artificial
  Probe
agacctgcttcacctgtcagcgctg

SEQ ID NO: 334133 - DNA, 25 bp, Artificial
  Probe
agtgtgtgcagtgcaaaaagccaat

SEQ ID NO: 334134 - DNA, 25 bp, Artificial
  Probe
gagctctatgccaacacctgtgagg

SEQ ID NO: 334135 - DNA, 25 bp, Artificial
  Probe
tacccgcaagatggaatacaagggc

SEQ ID NO: 334136 - DNA, 25 bp, Artificial
  Probe
gccaacacctgtgaggagtgtggaa

SEQ ID NO: 334137 - DNA, 25 bp, Artificial
  Probe
gtaagaagaccatcatgccaggtac

SEQ ID NO: 334138 - DNA, 25 bp, Artificial
  Probe
aagtgccaggagtgtaagaagacca

SEQ ID NO: 334139 - DNA, 25 bp, Artificial
  Probe
catacctaaggagaatcagaacttc

SEQ ID NO: 334140 - DNA, 25 bp, Artificial
  Probe
aaggctgcttccactgctcccggtg

SEQ ID NO: 334141 - DNA, 25 bp, Artificial
  Probe
gagaatcagaacttctgcgtgccct

SEQ ID NO: 334142 - DNA, 25 bp, Artificial
  Probe
gaggagcagctgctgtgcaccgact

SEQ ID NO: 334143 - DNA, 25 bp, Artificial
  Probe
taccacaggaggtgttacttaccgg

SEQ ID NO: 334144 - DNA, 25 bp, Artificial
  Probe
agcagtatgccctgcagtgtgtgca

SEQ ID NO: 334145 - DNA, 25 bp, Artificial
  Probe
ccctgctatgagaagcagtatgccc

SEQ ID NO: 334146 - DNA, 25 bp, Artificial
  Probe
ggcacgagacctgcttcacctgtca

SEQ ID NO: 334147 - DNA, 25 bp, Artificial
  Probe
gcacagggagtgctttgtgtgcaca

SEQ ID NO: 334148 - DNA, 25 bp, Artificial
  Probe
ggagctcgctggtggacaagccctt

SEQ ID NO: 334149 - DNA, 25 bp, Artificial
  Probe
atgagaagcagtatgccctgcagtg

SEQ ID NO: 334150 - DNA, 25 bp, Artificial
  Probe
gtacattctaaaggaggagaacccg

SEQ ID NO: 334151 - DNA, 25 bp, Artificial
  Probe
gtgcaaaaagccaattaccacagga

SEQ ID NO: 334152 - DNA, 25 bp, Artificial
  Probe
gcaaaaagccaattaccacaggagg

SEQ ID NO: 334153 - DNA, 25 bp, Artificial
  Probe
agaacttctgcgtgccctgctatga

SEQ ID NO: 334154 - DNA, 25 bp, Artificial
  Probe
gtggaacacccatcggctgtgactg

SEQ ID NO: 334155 - DNA, 25 bp, Artificial
  Probe
caagggcagcagctggcacgagacc

SEQ ID NO: 334156 - DNA, 25 bp, Artificial
  Probe
atcatgccaggtacccgcaagatgg

SEQ ID NO: 334157 - DNA, 25 bp, Artificial
  Probe
tcgaggagctctatgccaacacctg

SEQ ID NO: 334158 - DNA, 25 bp, Artificial
  Probe
cactgtgtggcctgcttcgaggagc

SEQ ID NO: 334159 - DNA, 25 bp, Artificial
  Probe
aggaggtgttacttaccgggatcag

SEQ ID NO: 334160 - DNA, 25 bp, Artificial
  Probe
gcaaggacttgtcctacaaggatcg

SEQ ID NO: 334161 - DNA, 25 bp, Artificial
  Probe
ccaggtacccgcaagatggaataca

SEQ ID NO: 334162 - DNA, 25 bp, Artificial
  Probe
aggagaacccgcactgtgtggcctg

SEQ ID NO: 334163 - DNA, 25 bp, Artificial
  Probe
tgtggaacacccatcggctgtgact

SEQ ID NO: 334164 - DNA, 25 bp, Artificial
  Probe
cacctgtgaggagtgtggaacaccc

SEQ ID NO: 334165 - DNA, 25 bp, Artificial
  Probe
cagctgctgtgcaccgactgctatt

SEQ ID NO: 334166 - DNA, 25 bp, Artificial
  Probe
acacccatcggctgtgactgcaagg

SEQ ID NO: 334167 - DNA, 25 bp, Artificial
  Probe
gaatacaagggcagcagctggcacg

SEQ ID NO: 334168 - DNA, 25 bp, Artificial
  Probe
tggcatgaaggctgcttccactgct

SEQ ID NO: 334169 - DNA, 25 bp, Artificial
  Probe
ttctgcgtgccctgctatgagaagc

SEQ ID NO: 334170 - DNA, 25 bp, Artificial
  Probe
gctctatgccaacacctgtgaggag

SEQ ID NO: 334171 - DNA, 25 bp, Artificial
  Probe
gcagcccatcggaaccaagagcttc

SEQ ID NO: 334172 - DNA, 25 bp, Artificial
  Probe
tttctctgaccagagtagagaattc

SEQ ID NO: 334173 - DNA, 25 bp, Artificial
  Probe
tctatccctacctggggccactgtt

SEQ ID NO: 334174 - DNA, 25 bp, Artificial
  Probe
gtttgaaggagctactcctctgcct

SEQ ID NO: 334175 - DNA, 25 bp, Artificial
  Probe
agaacctcagtatcatttgcccagg

SEQ ID NO: 334176 - DNA, 25 bp, Artificial
  Probe
gagcttgttagtatcacttgacagg

SEQ ID NO: 334177 - DNA, 25 bp, Artificial
  Probe
ttgcccaggtccttccatggcatgg

SEQ ID NO: 334178 - DNA, 25 bp, Artificial
  Probe
gtttctagaacctcagtatcatttg

SEQ ID NO: 334179 - DNA, 25 bp, Artificial
  Probe
atagccgaagtttgaaggagctact

SEQ ID NO: 334180 - DNA, 25 bp, Artificial
  Probe
agtatcacttgacaggggcatcagc

SEQ ID NO: 334181 - DNA, 25 bp, Artificial
  Probe
tccttccatggcatggatttctctg

SEQ ID NO: 334182 - DNA, 25 bp, Artificial
  Probe
ctcagtatcatttgcccaggtcctt

SEQ ID NO: 334183 - DNA, 25 bp, Artificial
  Probe
tcagctgtcctcttttatagccgaa

SEQ ID NO: 334184 - DNA, 25 bp, Artificial
  Probe
ctgtcctcttttatagccgaagttt

SEQ ID NO: 334185 - DNA, 25 bp, Artificial
  Probe
tgaagggaactaactgcagggcaga

SEQ ID NO: 334186 - DNA, 25 bp, Artificial
  Probe
ggggccactgttcctgtttctagaa

SEQ ID NO: 334187 - DNA, 25 bp, Artificial
  Probe
tgttagtatcacttgacaggggcat

SEQ ID NO: 334188 - DNA, 25 bp, Artificial
  Probe
ctacctggggccactgttcctgttt

SEQ ID NO: 334189 - DNA, 25 bp, Artificial
  Probe
aggggcatcagctgtcctcttttat

SEQ ID NO: 334190 - DNA, 25 bp, Artificial
  Probe
cttccatggcatggatttctctgac

SEQ ID NO: 334191 - DNA, 25 bp, Artificial
  Probe
agcttgttagtatcacttgacaggg

SEQ ID NO: 334192 - DNA, 25 bp, Artificial
  Probe
gcccaggtccttccatggcatggat

SEQ ID NO: 334193 - DNA, 25 bp, Artificial
  Probe
cttgacaggggcatcagctgtcctc

SEQ ID NO: 334194 - DNA, 25 bp, Artificial
  Probe
ggatttctctgaccagagtagagaa

SEQ ID NO: 334195 - DNA, 25 bp, Artificial
  Probe
ctgttcctgtttctagaacctcagt

SEQ ID NO: 334196 - DNA, 25 bp, Artificial
  Probe
gaaggagctactcctctgcctctac

SEQ ID NO: 334197 - DNA, 25 bp, Artificial
  Probe
aacctcagtatcatttgcccaggtc

SEQ ID NO: 334198 - DNA, 25 bp, Artificial
  Probe
cttgttagtatcacttgacaggggc

SEQ ID NO: 334199 - DNA, 25 bp, Artificial
  Probe
tagaacctcagtatcatttgcccag

SEQ ID NO: 334200 - DNA, 25 bp, Artificial
  Probe
tatagccgaagtttgaaggagctac

SEQ ID NO: 334201 - DNA, 25 bp, Artificial
  Probe
tgaaggagctactcctctgcctcta

SEQ ID NO: 334202 - DNA, 25 bp, Artificial
  Probe
atggcatggatttctctgaccagag

SEQ ID NO: 334203 - DNA, 25 bp, Artificial
  Probe
atcatttgcccaggtccttccatgg

SEQ ID NO: 334204 - DNA, 25 bp, Artificial
  Probe
actgttcctgtttctagaacctcag

SEQ ID NO: 334205 - DNA, 25 bp, Artificial
  Probe
tctcttcttctatccctacctgggg

SEQ ID NO: 334206 - DNA, 25 bp, Artificial
  Probe
gttcctgtttctagaacctcagtat

SEQ ID NO: 334207 - DNA, 25 bp, Artificial
  Probe
gtatcacttgacaggggcatcagct

SEQ ID NO: 334208 - DNA, 25 bp, Artificial
  Probe
gtcctcttttatagccgaagtttga

SEQ ID NO: 334209 - DNA, 25 bp, Artificial
  Probe
tatcatttgcccaggtccttccatg

SEQ ID NO: 334210 - DNA, 25 bp, Artificial
  Probe
tttgcccaggtccttccatggcatg

SEQ ID NO: 334211 - DNA, 25 bp, Artificial
  Probe
gccactgttcctgtttctagaacct

SEQ ID NO: 334212 - DNA, 25 bp, Artificial
  Probe
gttagtatcacttgacaggggcatc

SEQ ID NO: 334213 - DNA, 25 bp, Artificial
  Probe
tccatggcatggatttctctgacca

SEQ ID NO: 334214 - DNA, 25 bp, Artificial
  Probe
ggagctactcctctgcctctacttt

SEQ ID NO: 334215 - DNA, 25 bp, Artificial
  Probe
caggtccttccatggcatggatttc

SEQ ID NO: 334216 - DNA, 25 bp, Artificial
  Probe
ttctatccctacctggggccactgt

SEQ ID NO: 334217 - DNA, 25 bp, Artificial
  Probe
tggatttctctgaccagagtagaga

SEQ ID NO: 334218 - DNA, 25 bp, Artificial
  Probe
cttggaggacttccagcgggttatc

SEQ ID NO: 334219 - DNA, 25 bp, Artificial
  Probe
caggcattgcagtggccattaagac

SEQ ID NO: 334220 - DNA, 25 bp, Artificial
  Probe
ttggcctgtctacagccaaaagact

SEQ ID NO: 334221 - DNA, 25 bp, Artificial
  Probe
ggacaaggagccacagctgtacttc

SEQ ID NO: 334222 - DNA, 25 bp, Artificial
  Probe
tgcagtggccattaagacataccac

SEQ ID NO: 334223 - DNA, 25 bp, Artificial
  Probe
tccctaactcagagggtgagaccga

SEQ ID NO: 334224 - DNA, 25 bp, Artificial
  Probe
ccagcgggttatcaatgtgaatctc

SEQ ID NO: 334225 - DNA, 25 bp, Artificial
  Probe
gtggccattaagacataccacgaaa

SEQ ID NO: 334226 - DNA, 25 bp, Artificial
  Probe
acttccagcgggttatcaatgtgaa

SEQ ID NO: 334227 - DNA, 25 bp, Artificial
  Probe
tggctgtcaactgtgcaggcattgc

SEQ ID NO: 334228 - DNA, 25 bp, Artificial
  Probe
tatttgccccagcaaatgtgacctc

SEQ ID NO: 334229 - DNA, 25 bp, Artificial
  Probe
aagactggtgggacaaggagccaca

SEQ ID NO: 334230 - DNA, 25 bp, Artificial
  Probe
gagaccgaagccaagaagttaggag

SEQ ID NO: 334231 - DNA, 25 bp, Artificial
  Probe
cgggccttggcctgtctacagccaa

SEQ ID NO: 334232 - DNA, 25 bp, Artificial
  Probe
agcagctttgactctagcaaaagaa

SEQ ID NO: 334233 - DNA, 25 bp, Artificial
  Probe
gtttggccgtatagatgtggctgtc

SEQ ID NO: 334234 - DNA, 25 bp, Artificial
  Probe
agcctcgggccttggcctgtctaca

SEQ ID NO: 334235 - DNA, 25 bp, Artificial
  Probe
ctgtgcaggcattgcagtggccatt

SEQ ID NO: 334236 - DNA, 25 bp, Artificial
  Probe
ggccattaagacataccacgaaaag

SEQ ID NO: 334237 - DNA, 25 bp, Artificial
  Probe
ggccttggcctgtctacagccaaaa

SEQ ID NO: 334238 - DNA, 25 bp, Artificial
  Probe
actcagagggtgagaccgaagccaa

SEQ ID NO: 334239 - DNA, 25 bp, Artificial
  Probe
aggtacaagcagctttgactctagc

SEQ ID NO: 334240 - DNA, 25 bp, Artificial
  Probe
gccacagctgtacttctggacgtcc

SEQ ID NO: 334241 - DNA, 25 bp, Artificial
  Probe
ggaaactgcatatttgccccagcaa

SEQ ID NO: 334242 - DNA, 25 bp, Artificial
  Probe
tacttctggacgtccctaactcaga

SEQ ID NO: 334243 - DNA, 25 bp, Artificial
  Probe
cagccaaaagactggtgggacaagg

SEQ ID NO: 334244 - DNA, 25 bp, Artificial
  Probe
tatagatgtggctgtcaactgtgca

SEQ ID NO: 334245 - DNA, 25 bp, Artificial
  Probe
gccccagcaaatgtgacctctgaga

SEQ ID NO: 334246 - DNA, 25 bp, Artificial
  Probe
ggccgtatagatgtggctgtcaact

SEQ ID NO: 334247 - DNA, 25 bp, Artificial
  Probe
taataaccggaggagcctcgggcct

SEQ ID NO: 334248 - DNA, 25 bp, Artificial
  Probe
attgcagtggccattaagacatacc

SEQ ID NO: 334249 - DNA, 25 bp, Artificial
  Probe
atgtgatccgcctggttgctggtgt

SEQ ID NO: 334250 - DNA, 25 bp, Artificial
  Probe
tgtcaactgtgcaggcattgcagtg

SEQ ID NO: 334251 - DNA, 25 bp, Artificial
  Probe
gaaactgcatatttgccccagcaaa

SEQ ID NO: 334252 - DNA, 25 bp, Artificial
  Probe
agggtgagaccgaagccaagaagtt

SEQ ID NO: 334253 - DNA, 25 bp, Artificial
  Probe
gagcctcgggccttggcctgtctac

SEQ ID NO: 334254 - DNA, 25 bp, Artificial
  Probe
ccccagcaaatgtgacctctgagaa

SEQ ID NO: 334255 - DNA, 25 bp, Artificial
  Probe
gaccgaagccaagaagttaggagga

SEQ ID NO: 334256 - DNA, 25 bp, Artificial
  Probe
cacagctgtacttctggacgtccct

SEQ ID NO: 334257 - DNA, 25 bp, Artificial
  Probe
tgatccgcctggttgctggtgtgat

SEQ ID NO: 334258 - DNA, 25 bp, Artificial
  Probe
tggaggacttccagcgggttatcaa

SEQ ID NO: 334259 - DNA, 25 bp, Artificial
  Probe
tctggacgtccctaactcagagggt

SEQ ID NO: 334260 - DNA, 25 bp, Artificial
  Probe
ctgtctacagccaaaagactggtgg

SEQ ID NO: 334261 - DNA, 25 bp, Artificial
  Probe
tgaagggcctggtggcagtaataac

SEQ ID NO: 334262 - DNA, 25 bp, Artificial
  Probe
tggcctgtctacagccaaaagactg

SEQ ID NO: 334263 - DNA, 25 bp, Artificial
  Probe
catatttgccccagcaaatgtgacc

SEQ ID NO: 334264 - DNA, 25 bp, Artificial
  Probe
ggatggaattctaccgacattacct

SEQ ID NO: 334265 - DNA, 25 bp, Artificial
  Probe
cgacattacctgcagctcaaccttg

SEQ ID NO: 334266 - DNA, 25 bp, Artificial
  Probe
tgcttcgggcccaagaaagtcaaac

SEQ ID NO: 334267 - DNA, 25 bp, Artificial
  Probe
tggttgccggtcctggtcgcctgca

SEQ ID NO: 334268 - DNA, 25 bp, Artificial
  Probe
caagttggatctcatcagtgaagga

SEQ ID NO: 334269 - DNA, 25 bp, Artificial
  Probe
gaattctaccgacattacctgcagc

SEQ ID NO: 334270 - DNA, 25 bp, Artificial
  Probe
ctttgactggctaggccggagcctc

SEQ ID NO: 334271 - DNA, 25 bp, Artificial
  Probe
tcaaagccatactgaagagtatctg

SEQ ID NO: 334272 - DNA, 25 bp, Artificial
  Probe
tgacggacagctctgactgatccct

SEQ ID NO: 334273 - DNA, 25 bp, Artificial
  Probe
cctggtcaggacagccgctggttgc

SEQ ID NO: 334274 - DNA, 25 bp, Artificial
  Probe
tcgccagcctctgcatgtgcttcgg

SEQ ID NO: 334275 - DNA, 25 bp, Artificial
  Probe
ggcctggctggcttcttcacctctg

SEQ ID NO: 334276 - DNA, 25 bp, Artificial
  Probe
cccctgctgatgctctgcaatgtga

SEQ ID NO: 334277 - DNA, 25 bp, Artificial
  Probe
cacaagtccctggaaaaactgctac

SEQ ID NO: 334278 - DNA, 25 bp, Artificial
  Probe
tgccggaaacatcatgtccttcttt

SEQ ID NO: 334279 - DNA, 25 bp, Artificial
  Probe
tcctgctcacttccttcgctgttag

SEQ ID NO: 334280 - DNA, 25 bp, Artificial
  Probe
acagccgctggttgccggtcctggt

SEQ ID NO: 334281 - DNA, 25 bp, Artificial
  Probe
tcatcagtgaaggagaggagccaag

SEQ ID NO: 334282 - DNA, 25 bp, Artificial
  Probe
cttgtgtgagcgaccctgtgtggac

SEQ ID NO: 334283 - DNA, 25 bp, Artificial
  Probe
ctgcagggttgtgtttatccccctg

SEQ ID NO: 334284 - DNA, 25 bp, Artificial
  Probe
agcctctgaggatggacttgggatt

SEQ ID NO: 334285 - DNA, 25 bp, Artificial
  Probe
gttacctggccctgccttggatgga

SEQ ID NO: 334286 - DNA, 25 bp, Artificial
  Probe
agagcaggagaccaagttggatctc

SEQ ID NO: 334287 - DNA, 25 bp, Artificial
  Probe
ctgtggcctgcttcctgaatttcaa

SEQ ID NO: 334288 - DNA, 25 bp, Artificial
  Probe
ctgctgaggtggaatccagcatcgc

SEQ ID NO: 334289 - DNA, 25 bp, Artificial
  Probe
aggaatctggggtgccaggccccaa

SEQ ID NO: 334290 - DNA, 25 bp, Artificial
  Probe
tttgccttctccaatggctacctcg

SEQ ID NO: 334291 - DNA, 25 bp, Artificial
  Probe
tcctggtcgcctgcagggttgtgtt

SEQ ID NO: 334292 - DNA, 25 bp, Artificial
  Probe
cttgttaagggcacttgtgtgagcg

SEQ ID NO: 334293 - DNA, 25 bp, Artificial
  Probe
tccaggtccccgatccttgtcattt

SEQ ID NO: 334294 - DNA, 25 bp, Artificial
  Probe
tgactgctgaggtggaatccagcat

SEQ ID NO: 334295 - DNA, 25 bp, Artificial
  Probe
catgtggcctggtcaggacagccgc

SEQ ID NO: 334296 - DNA, 25 bp, Artificial
  Probe
atctggggtgccaggccccaactct

SEQ ID NO: 334297 - DNA, 25 bp, Artificial
  Probe
agcatcgcaggcacaagtccctgga

SEQ ID NO: 334298 - DNA, 25 bp, Artificial
  Probe
acggacagctctgactgatccctgc

SEQ ID NO: 334299 - DNA, 25 bp, Artificial
  Probe
tttcggtctggcaggcgtcctgccg

SEQ ID NO: 334300 - DNA, 25 bp, Artificial
  Probe
tccttcgctgttagggacgagcagg

SEQ ID NO: 334301 - DNA, 25 bp, Artificial
  Probe
ctccctctttaagcatgatgtctgg

SEQ ID NO: 334302 - DNA, 25 bp, Artificial
  Probe
ggttgttccctgctgtgactgctga

SEQ ID NO: 334303 - DNA, 25 bp, Artificial
  Probe
ggcctgcagagcaggagaccaagtt

SEQ ID NO: 334304 - DNA, 25 bp, Artificial
  Probe
gttcatcaccttcatggccgccttt

SEQ ID NO: 334305 - DNA, 25 bp, Artificial
  Probe
tggctaggccggagcctcacagcta

SEQ ID NO: 334306 - DNA, 25 bp, Artificial
  Probe
atgtgaagcagcaccactacctgcc

SEQ ID NO: 334307 - DNA, 25 bp, Artificial
  Probe
gcagctcaaccttgcggggcctgca

SEQ ID NO: 334308 - DNA, 25 bp, Artificial
  Probe
cagttgtcattctggccatactgtg

SEQ ID NO: 334309 - DNA, 25 bp, Artificial
  Probe
ccccatcatgagtggccagggcctg

SEQ ID NO: 334310 - DNA, 25 bp, Artificial
  Probe
cctatctctgcaatgaagattggtc

SEQ ID NO: 334311 - DNA, 25 bp, Artificial
  Probe
ggagtatgctcagtatccaatgtgt

SEQ ID NO: 334312 - DNA, 25 bp, Artificial
  Probe
aggcatttctgagagcccaggtgga

SEQ ID NO: 334313 - DNA, 25 bp, Artificial
  Probe
cctgcctatctctgcaatgaagatt

SEQ ID NO: 334314 - DNA, 25 bp, Artificial
  Probe
tactggcatgggaacgagttcccta

SEQ ID NO: 334315 - DNA, 25 bp, Artificial
  Probe
tcacagccggccaggcagatttcgg

SEQ ID NO: 334316 - DNA, 25 bp, Artificial
  Probe
gtggtactgtacaagcttggcttct

SEQ ID NO: 334317 - DNA, 25 bp, Artificial
  Probe
atgctggacggcaaggctgcagatc

SEQ ID NO: 334318 - DNA, 25 bp, Artificial
  Probe
gctgttactggctctcatcacagtg

SEQ ID NO: 334319 - DNA, 25 bp, Artificial
  Probe
gagtctactggcatgggaacgagtt

SEQ ID NO: 334320 - DNA, 25 bp, Artificial
  Probe
ccggccaggcagatttcggctgtga

SEQ ID NO: 334321 - DNA, 25 bp, Artificial
  Probe
acaggaggcatttctgagagcccag

SEQ ID NO: 334322 - DNA, 25 bp, Artificial
  Probe
agatcctgtcacagccggccaggca

SEQ ID NO: 334323 - DNA, 25 bp, Artificial
  Probe
acgtggtctatgagcccatcttcct

SEQ ID NO: 334324 - DNA, 25 bp, Artificial
  Probe
agcccaggtggagacaacgttagaa

SEQ ID NO: 334325 - DNA, 25 bp, Artificial
  Probe
gtcagacttcagtgctgatccactt

SEQ ID NO: 334326 - DNA, 25 bp, Artificial
  Probe
tctctgcaatgaagattggtcctgc

SEQ ID NO: 334327 - DNA, 25 bp, Artificial
  Probe
gctaggaatccactctcctgcctat

SEQ ID NO: 334328 - DNA, 25 bp, Artificial
  Probe
gtctgctgttactggctctcatcac

SEQ ID NO: 334329 - DNA, 25 bp, Artificial
  Probe
tacctcctgagatgggagattttta

SEQ ID NO: 334330 - DNA, 25 bp, Artificial
  Probe
ctatgagtctactggcatgggaacg

SEQ ID NO: 334331 - DNA, 25 bp, Artificial
  Probe
ttctgagagcccaggtggagacaac

SEQ ID NO: 334332 - DNA, 25 bp, Artificial
  Probe
gacttcagtgctgatccactttttt

SEQ ID NO: 334333 - DNA, 25 bp, Artificial
  Probe
agccggccaggcagatttcggctgt

SEQ ID NO: 334334 - DNA, 25 bp, Artificial
  Probe
gccaggcagatttcggctgtgagac

SEQ ID NO: 334335 - DNA, 25 bp, Artificial
  Probe
ggctgcagatcctgtcacagccggc

SEQ ID NO: 334336 - DNA, 25 bp, Artificial
  Probe
tgggaggtctgctgttactggctct

SEQ ID NO: 334337 - DNA, 25 bp, Artificial
  Probe
aggacaggaggcatttctgagagcc

SEQ ID NO: 334338 - DNA, 25 bp, Artificial
  Probe
tgctggacggcaaggctgcagatcc

SEQ ID NO: 334339 - DNA, 25 bp, Artificial
  Probe
tttttatgcttttgccgaagtgtca

SEQ ID NO: 334340 - DNA, 25 bp, Artificial
  Probe
atgcttttgccgaagtgtcagactt

SEQ ID NO: 334341 - DNA, 25 bp, Artificial
  Probe
gcagatttcggctgtgagactcctc

SEQ ID NO: 334342 - DNA, 25 bp, Artificial
  Probe
tatgagcccatcttcctcgtggcgg

SEQ ID NO: 334343 - DNA, 25 bp, Artificial
  Probe
ccaatatagactgacaggagtatgc

SEQ ID NO: 334344 - DNA, 25 bp, Artificial
  Probe
agtctactggcatgggaacgagttc

SEQ ID NO: 334345 - DNA, 25 bp, Artificial
  Probe
attggtcctgcctatgagtctactg

SEQ ID NO: 334346 - DNA, 25 bp, Artificial
  Probe
aatgaagattggtcctgcctatgag

SEQ ID NO: 334347 - DNA, 25 bp, Artificial
  Probe
ggacggcaaggctgcagatcctgtc

SEQ ID NO: 334348 - DNA, 25 bp, Artificial
  Probe
gtctatgagcccatcttcctcgtgg

SEQ ID NO: 334349 - DNA, 25 bp, Artificial
  Probe
ctgacaggagtatgctcagtatcca

SEQ ID NO: 334350 - DNA, 25 bp, Artificial
  Probe
ctcgtgagctaggaatccactctcc

SEQ ID NO: 334351 - DNA, 25 bp, Artificial
  Probe
atttttatgcttttgccgaagtgtc

SEQ ID NO: 334352 - DNA, 25 bp, Artificial
  Probe
gtcccaggcgtgatgtcatacctcc

SEQ ID NO: 334353 - DNA, 25 bp, Artificial
  Probe
gaagtgtcagacttcagtgctgatc

SEQ ID NO: 334354 - DNA, 25 bp, Artificial
  Probe
ctcctgcctatctctgcaatgaaga

SEQ ID NO: 334355 - DNA, 25 bp, Artificial
  Probe
agaagaatacgtggtctatgagccc

SEQ ID NO: 334356 - DNA, 25 bp, Artificial
  Probe
gctctgtgatggttagcttcctggc

SEQ ID NO: 334357 - DNA, 25 bp, Artificial
  Probe
atttcagttaggaatacagttgttt

SEQ ID NO: 334358 - DNA, 25 bp, Artificial
  Probe
tctatcagtgtacaagtgtattttc

SEQ ID NO: 334359 - DNA, 25 bp, Artificial
  Probe
tgtgacttccccaggagacaaattg

SEQ ID NO: 334360 - DNA, 25 bp, Artificial
  Probe
atatgctctgtgatggttagcttcc

SEQ ID NO: 334361 - DNA, 25 bp, Artificial
  Probe
tggcatatgctctgtgatggttagc

SEQ ID NO: 334362 - DNA, 25 bp, Artificial
  Probe
catatgctctgtgatggttagcttc

SEQ ID NO: 334363 - DNA, 25 bp, Artificial
  Probe
tccccaggagacaaattgctaagtg

SEQ ID NO: 334364 - DNA, 25 bp, Artificial
  Probe
caaattgctaagtggcatatgctct

SEQ ID NO: 334365 - DNA, 25 bp, Artificial
  Probe
gcatatgctctgtgatggttagctt

SEQ ID NO: 334366 - DNA, 25 bp, Artificial
  Probe
acttccccaggagacaaattgctaa

SEQ ID NO: 334367 - DNA, 25 bp, Artificial
  Probe
tatgctctgtgatggttagcttcct

SEQ ID NO: 334368 - DNA, 25 bp, Artificial
  Probe
tgctaagtggcatatgctctgtgat

SEQ ID NO: 334369 - DNA, 25 bp, Artificial
  Probe
gtggacatggccacctaagtttttt

SEQ ID NO: 334370 - DNA, 25 bp, Artificial
  Probe
aggtttttactaggcgagaagcaat

SEQ ID NO: 334371 - DNA, 25 bp, Artificial
  Probe
ggcatatgctctgtgatggttagct

SEQ ID NO: 334372 - DNA, 25 bp, Artificial
  Probe
ttactaggcgagaagcaattttctt

SEQ ID NO: 334373 - DNA, 25 bp, Artificial
  Probe
tgacttccccaggagacaaattgct

SEQ ID NO: 334374 - DNA, 25 bp, Artificial
  Probe
tcacagtggacatggccacctaagt

SEQ ID NO: 334375 - DNA, 25 bp, Artificial
  Probe
ctaagtggcatatgctctgtgatgg

SEQ ID NO: 334376 - DNA, 25 bp, Artificial
  Probe
atgctctgtgatggttagcttcctg

SEQ ID NO: 334377 - DNA, 25 bp, Artificial
  Probe
aaacaaacctaagctagaatttcag

SEQ ID NO: 334378 - DNA, 25 bp, Artificial
  Probe
cttccccaggagacaaattgctaag

SEQ ID NO: 334379 - DNA, 25 bp, Artificial
  Probe
aacctaagctagaatttcagttagg

SEQ ID NO: 334380 - DNA, 25 bp, Artificial
  Probe
aggagatctgtgacttccccaggag

SEQ ID NO: 334381 - DNA, 25 bp, Artificial
  Probe
ggagatctgtgacttccccaggaga

SEQ ID NO: 334382 - DNA, 25 bp, Artificial
  Probe
agatctgtgacttccccaggagaca

SEQ ID NO: 334383 - DNA, 25 bp, Artificial
  Probe
ctcacagtggacatggccacctaag

SEQ ID NO: 334384 - DNA, 25 bp, Artificial
  Probe
tggacatggccacctaagtttttta

SEQ ID NO: 334385 - DNA, 25 bp, Artificial
  Probe
tttactaggcgagaagcaattttct

SEQ ID NO: 334386 - DNA, 25 bp, Artificial
  Probe
ttgctaagtggcatatgctctgtga

SEQ ID NO: 334387 - DNA, 25 bp, Artificial
  Probe
aaacctaagctagaatttcagttag

SEQ ID NO: 334388 - DNA, 25 bp, Artificial
  Probe
acctaagctagaatttcagttagga

SEQ ID NO: 334389 - DNA, 25 bp, Artificial
  Probe
ctctgtgatggttagcttcctggcc

SEQ ID NO: 334390 - DNA, 25 bp, Artificial
  Probe
tttatataaaaatctatcagtgtac

SEQ ID NO: 334391 - DNA, 25 bp, Artificial
  Probe
tgctctgtgatggttagcttcctgg

SEQ ID NO: 334392 - DNA, 25 bp, Artificial
  Probe
gctaagtggcatatgctctgtgatg

SEQ ID NO: 334393 - DNA, 25 bp, Artificial
  Probe
cctcacagtggacatggccacctaa

SEQ ID NO: 334394 - DNA, 25 bp, Artificial
  Probe
gtgacttccccaggagacaaattgc

SEQ ID NO: 334395 - DNA, 25 bp, Artificial
  Probe
ttccccaggagacaaattgctaagt

SEQ ID NO: 334396 - DNA, 25 bp, Artificial
  Probe
gacttccccaggagacaaattgcta

SEQ ID NO: 334397 - DNA, 25 bp, Artificial
  Probe
gagatctgtgacttccccaggagac

SEQ ID NO: 334398 - DNA, 25 bp, Artificial
  Probe
tttcttatacgcgattgtaagcttg

SEQ ID NO: 334399 - DNA, 25 bp, Artificial
  Probe
tttctttcttatacgcgattgtaag

SEQ ID NO: 334400 - DNA, 25 bp, Artificial
  Probe
gtggcatatgctctgtgatggttag

SEQ ID NO: 334401 - DNA, 25 bp, Artificial
  Probe
ttttactaggcgagaagcaattttc

SEQ ID NO: 334402 - DNA, 25 bp, Artificial
  Probe
cataaagcggtcctcttcctgtgaa

SEQ ID NO: 334403 - DNA, 25 bp, Artificial
  Probe
ggaacaaggcaactctgataacctc

SEQ ID NO: 334404 - DNA, 25 bp, Artificial
  Probe
atgtgcctttaatcctagcagttag

SEQ ID NO: 334405 - DNA, 25 bp, Artificial
  Probe
cccataaagcggtcctcttcctgtg

SEQ ID NO: 334406 - DNA, 25 bp, Artificial
  Probe
attcctctaaaagagtaatgccttg

SEQ ID NO: 334407 - DNA, 25 bp, Artificial
  Probe
tagcagttaggagtctgcagcagga

SEQ ID NO: 334408 - DNA, 25 bp, Artificial
  Probe
cagattcctctaaaagagtaatgcc

SEQ ID NO: 334409 - DNA, 25 bp, Artificial
  Probe
gttcacctgaaatggccttttgtaa

SEQ ID NO: 334410 - DNA, 25 bp, Artificial
  Probe
tgccaggcatggtggtatgtgcctt

SEQ ID NO: 334411 - DNA, 25 bp, Artificial
  Probe
atggccttttgtaaatacagggtct

SEQ ID NO: 334412 - DNA, 25 bp, Artificial
  Probe
gtgcctttaatcctagcagttagga

SEQ ID NO: 334413 - DNA, 25 bp, Artificial
  Probe
cctagcagttaggagtctgcagcag

SEQ ID NO: 334414 - DNA, 25 bp, Artificial
  Probe
tggccttttgtaaatacagggtctt

SEQ ID NO: 334415 - DNA, 25 bp, Artificial
  Probe
gagaagccttttcatgggctctgca

SEQ ID NO: 334416 - DNA, 25 bp, Artificial
  Probe
ttcagattcctctaaaagagtaatg

SEQ ID NO: 334417 - DNA, 25 bp, Artificial
  Probe
tatgccaggcatggtggtatgtgcc

SEQ ID NO: 334418 - DNA, 25 bp, Artificial
  Probe
gcctttaatcctagcagttaggagt

SEQ ID NO: 334419 - DNA, 25 bp, Artificial
  Probe
tggtatgtgcctttaatcctagcag

SEQ ID NO: 334420 - DNA, 25 bp, Artificial
  Probe
gaagaatttctggttcacctgaaat

SEQ ID NO: 334421 - DNA, 25 bp, Artificial
  Probe
cctgaaatggccttttgtaaataca

SEQ ID NO: 334422 - DNA, 25 bp, Artificial
  Probe
ctggttcacctgaaatggccttttg

SEQ ID NO: 334423 - DNA, 25 bp, Artificial
  Probe
ctagcagttaggagtctgcagcagg

SEQ ID NO: 334424 - DNA, 25 bp, Artificial
  Probe
catggtggtatgtgcctttaatcct

SEQ ID NO: 334425 - DNA, 25 bp, Artificial
  Probe
tggttcacctgaaatggccttttgt

SEQ ID NO: 334426 - DNA, 25 bp, Artificial
  Probe
gtatgtgcctttaatcctagcagtt

SEQ ID NO: 334427 - DNA, 25 bp, Artificial
  Probe
ctgaaatggccttttgtaaatacag

SEQ ID NO: 334428 - DNA, 25 bp, Artificial
  Probe
ttaatcctagcagttaggagtctgc

SEQ ID NO: 334429 - DNA, 25 bp, Artificial
  Probe
cagttaggagtctgcagcaggaaag

SEQ ID NO: 334430 - DNA, 25 bp, Artificial
  Probe
taaagcggtcctcttcctgtgaaaa

SEQ ID NO: 334431 - DNA, 25 bp, Artificial
  Probe
aatttctggttcacctgaaatggcc

SEQ ID NO: 334432 - DNA, 25 bp, Artificial
  Probe
tatatgagaccctttctcaagggga

SEQ ID NO: 334433 - DNA, 25 bp, Artificial
  Probe
ccaggcatggtggtatgtgccttta

SEQ ID NO: 334434 - DNA, 25 bp, Artificial
  Probe
ttcctctaaaagagtaatgccttgg

SEQ ID NO: 334435 - DNA, 25 bp, Artificial
  Probe
ggttcacctgaaatggccttttgta

SEQ ID NO: 334436 - DNA, 25 bp, Artificial
  Probe
ttatgccaggcatggtggtatgtgc

SEQ ID NO: 334437 - DNA, 25 bp, Artificial
  Probe
tatggtaactttcaaactaacctgg

SEQ ID NO: 334438 - DNA, 25 bp, Artificial
  Probe
tcagattcctctaaaagagtaatgc

SEQ ID NO: 334439 - DNA, 25 bp, Artificial
  Probe
gattcctctaaaagagtaatgcctt

SEQ ID NO: 334440 - DNA, 25 bp, Artificial
  Probe
agaagccttttcatgggctctgcac

SEQ ID NO: 334441 - DNA, 25 bp, Artificial
  Probe
taatcctagcagttaggagtctgca

SEQ ID NO: 334442 - DNA, 25 bp, Artificial
  Probe
gaagccttttcatgggctctgcact

SEQ ID NO: 334443 - DNA, 25 bp, Artificial
  Probe
atttctggttcacctgaaatggcct

SEQ ID NO: 334444 - DNA, 25 bp, Artificial
  Probe
ggcatggtggtatgtgcctttaatc

SEQ ID NO: 334445 - DNA, 25 bp, Artificial
  Probe
tttaatcctagcagttaggagtctg

SEQ ID NO: 334446 - DNA, 25 bp, Artificial
  Probe
agaatttctggttcacctgaaatgg

SEQ ID NO: 334447 - DNA, 25 bp, Artificial
  Probe
tatgagaccctttctcaaggggaaa

SEQ ID NO: 334448 - DNA, 25 bp, Artificial
  Probe
ccttgccatgtttctggtagcgctc

SEQ ID NO: 334449 - DNA, 25 bp, Artificial
  Probe
cacaggactgactccttttagtttt

SEQ ID NO: 334450 - DNA, 25 bp, Artificial
  Probe
gggaatctgataccttgccatgttt

SEQ ID NO: 334451 - DNA, 25 bp, Artificial
  Probe
gcgttgttcttgtttctcaaagatg

SEQ ID NO: 334452 - DNA, 25 bp, Artificial
  Probe
tctagataagcgttgttcttgtttc

SEQ ID NO: 334453 - DNA, 25 bp, Artificial
  Probe
gcctgcgagtgttggagttactgct

SEQ ID NO: 334454 - DNA, 25 bp, Artificial
  Probe
tccaaaacacgactgatacagagtg

SEQ ID NO: 334455 - DNA, 25 bp, Artificial
  Probe
ttgtttctcaaagatgatgcaaacc

SEQ ID NO: 334456 - DNA, 25 bp, Artificial
  Probe
ccatgtttctggtagcgctcccggg

SEQ ID NO: 334457 - DNA, 25 bp, Artificial
  Probe
atacagagtgacttcttttgttggc

SEQ ID NO: 334458 - DNA, 25 bp, Artificial
  Probe
gcgccacgtgggagacttttgatta

SEQ ID NO: 334459 - DNA, 25 bp, Artificial
  Probe
cttgccatgtttctggtagcgctcc

SEQ ID NO: 334460 - DNA, 25 bp, Artificial
  Probe
agctctgtcaaccagccactctaga

SEQ ID NO: 334461 - DNA, 25 bp, Artificial
  Probe
aatctgataccttgccatgtttctg

SEQ ID NO: 334462 - DNA, 25 bp, Artificial
  Probe
ccacaggactgactccttttagttt

SEQ ID NO: 334463 - DNA, 25 bp, Artificial
  Probe
tttctttctgtaaacactgaggaat

SEQ ID NO: 334464 - DNA, 25 bp, Artificial
  Probe
ctttctgtaaacactgaggaatggg

SEQ ID NO: 334465 - DNA, 25 bp, Artificial
  Probe
gattttctaaagctctgtcaaccag

SEQ ID NO: 334466 - DNA, 25 bp, Artificial
  Probe
acgcctaggcgctgcctgcgagtgt

SEQ ID NO: 334467 - DNA, 25 bp, Artificial
  Probe
ccagccactctagataagcgttgtt

SEQ ID NO: 334468 - DNA, 25 bp, Artificial
  Probe
gtttctcaaagatgatgcaaaccag

SEQ ID NO: 334469 - DNA, 25 bp, Artificial
  Probe
tgtcaaccagccactctagataagc

SEQ ID NO: 334470 - DNA, 25 bp, Artificial
  Probe
taccttgccatgtttctggtagcgc

SEQ ID NO: 334471 - DNA, 25 bp, Artificial
  Probe
tccttacattggtctgagaaaagaa

SEQ ID NO: 334472 - DNA, 25 bp, Artificial
  Probe
cgactgatacagagtgacttctttt

SEQ ID NO: 334473 - DNA, 25 bp, Artificial
  Probe
cagagtgacttcttttgttggctgt

SEQ ID NO: 334474 - DNA, 25 bp, Artificial
  Probe
ccaaaacacgactgatacagagtga

SEQ ID NO: 334475 - DNA, 25 bp, Artificial
  Probe
cgttgttcttgtttctcaaagatga

SEQ ID NO: 334476 - DNA, 25 bp, Artificial
  Probe
tgataccttgccatgtttctggtag

SEQ ID NO: 334477 - DNA, 25 bp, Artificial
  Probe
gatgcaaaccagtttcctctctgtc

SEQ ID NO: 334478 - DNA, 25 bp, Artificial
  Probe
gctctgtcaaccagccactctagat

SEQ ID NO: 334479 - DNA, 25 bp, Artificial
  Probe
ccacgtgggagacttttgattaatt

SEQ ID NO: 334480 - DNA, 25 bp, Artificial
  Probe
aagctctgtcaaccagccactctag

SEQ ID NO: 334481 - DNA, 25 bp, Artificial
  Probe
gtgattttctaaagctctgtcaacc

SEQ ID NO: 334482 - DNA, 25 bp, Artificial
  Probe
atgatgcaaaccagtttcctctctg

SEQ ID NO: 334483 - DNA, 25 bp, Artificial
  Probe
tgttcttgtttctcaaagatgatgc

SEQ ID NO: 334484 - DNA, 25 bp, Artificial
  Probe
acacgactgatacagagtgacttct

SEQ ID NO: 334485 - DNA, 25 bp, Artificial
  Probe
gtttcctctctgtccttacaatgtg

SEQ ID NO: 334486 - DNA, 25 bp, Artificial
  Probe
tccttttagttttaaagtagcgctg

SEQ ID NO: 334487 - DNA, 25 bp, Artificial
  Probe
tagataagcgttgttcttgtttctc

SEQ ID NO: 334488 - DNA, 25 bp, Artificial
  Probe
aacacgactgatacagagtgacttc

SEQ ID NO: 334489 - DNA, 25 bp, Artificial
  Probe
ttcttgtttctcaaagatgatgcaa

SEQ ID NO: 334490 - DNA, 25 bp, Artificial
  Probe
aaccagccactctagataagcgttg

SEQ ID NO: 334491 - DNA, 25 bp, Artificial
  Probe
ccactctagataagcgttgttcttg

SEQ ID NO: 334492 - DNA, 25 bp, Artificial
  Probe
tttctcaaagatgatgcaaaccagt

SEQ ID NO: 334493 - DNA, 25 bp, Artificial
  Probe
aatgggaatctgataccttgccatg

SEQ ID NO: 334494 - DNA, 25 bp, Artificial
  Probe
ctcaacccgtacttcatccaggagg

SEQ ID NO: 334495 - DNA, 25 bp, Artificial
  Probe
actatgaaactgtgcgcatggcagc

SEQ ID NO: 334496 - DNA, 25 bp, Artificial
  Probe
aaggacgtgggcagcaagaccaccc

SEQ ID NO: 334497 - DNA, 25 bp, Artificial
  Probe
atcacctaccctgaaggtgccatgc

SEQ ID NO: 334498 - DNA, 25 bp, Artificial
  Probe
gctgaagtacatcgtctacaaggag

SEQ ID NO: 334499 - DNA, 25 bp, Artificial
  Probe
tctctctttgtactagctggcttca

SEQ ID NO: 334500 - DNA, 25 bp, Artificial
  Probe
atcggactgcccttcaacaatggcc

SEQ ID NO: 334501 - DNA, 25 bp, Artificial
  Probe
ggcctcatgggcagagggaacatcc

SEQ ID NO: 334502 - DNA, 25 bp, Artificial
  Probe
tctgcggaagctagtgaaagcacgc

SEQ ID NO: 334503 - DNA, 25 bp, Artificial
  Probe
ggcttctggaagtccgtggccaccc

SEQ ID NO: 334504 - DNA, 25 bp, Artificial
  Probe
atgacattgtgatcagattgaactc

SEQ ID NO: 334505 - DNA, 25 bp, Artificial
  Probe
agtttctgcggaagctagtgaaagc

SEQ ID NO: 334506 - DNA, 25 bp, Artificial
  Probe
actcgatggctgtgatgaagtggca

SEQ ID NO: 334507 - DNA, 25 bp, Artificial
  Probe
cactcgatggctgtgatgaagtggc

SEQ ID NO: 334508 - DNA, 25 bp, Artificial
  Probe
ccaacccttggcagtgtggcagtga

SEQ ID NO: 334509 - DNA, 25 bp, Artificial
  Probe
aatatgaacgagactctctctttgt

SEQ ID NO: 334510 - DNA, 25 bp, Artificial
  Probe
aaggtgccatgcagcggcctgagca

SEQ ID NO: 334511 - DNA, 25 bp, Artificial
  Probe
gaaactgtgcgcatggcagccatca

SEQ ID NO: 334512 - DNA, 25 bp, Artificial
  Probe
gctatgacatgaacacacccaacgc

SEQ ID NO: 334513 - DNA, 25 bp, Artificial
  Probe
cggcctgagcaatatgaacgagact

SEQ ID NO: 334514 - DNA, 25 bp, Artificial
  Probe
gaggctgccttcacgctcatcggac

SEQ ID NO: 334515 - DNA, 25 bp, Artificial
  Probe
gcagtgtggcagtgaccatggcact

SEQ ID NO: 334516 - DNA, 25 bp, Artificial
  Probe
aacgagactctctctttgtactagc

SEQ ID NO: 334517 - DNA, 25 bp, Artificial
  Probe
cctcatgggcagagggaacatccca

SEQ ID NO: 334518 - DNA, 25 bp, Artificial
  Probe
catggcactcgatggctgtgatgaa

SEQ ID NO: 334519 - DNA, 25 bp, Artificial
  Probe
gagagtgagcgcatccgatggcttc

SEQ ID NO: 334520 - DNA, 25 bp, Artificial
  Probe
cgcatggcagccatcaaagagtcct

SEQ ID NO: 334521 - DNA, 25 bp, Artificial
  Probe
tgatcagattgaactcagcacctgt

SEQ ID NO: 334522 - DNA, 25 bp, Artificial
  Probe
cccctgcactactatgaaactgtgc

SEQ ID NO: 334523 - DNA, 25 bp, Artificial
  Probe
cgtggccacccgagtgcccaaggag

SEQ ID NO: 334524 - DNA, 25 bp, Artificial
  Probe
acttcatccaggaggctgccttcac

SEQ ID NO: 334525 - DNA, 25 bp, Artificial
  Probe
caggacttcaagtggctgaagtaca

SEQ ID NO: 334526 - DNA, 25 bp, Artificial
  Probe
tgtgcgcatggcagccatcaaagag

SEQ ID NO: 334527 - DNA, 25 bp, Artificial
  Probe
gcccttcaacaatggcctcatgggc

SEQ ID NO: 334528 - DNA, 25 bp, Artificial
  Probe
gcagtcgcgggctttggctatgaca

SEQ ID NO: 334529 - DNA, 25 bp, Artificial
  Probe
cgtctacaaggagagagtgagcgca

SEQ ID NO: 334530 - DNA, 25 bp, Artificial
  Probe
gtgggcagcaagaccaccctgcgca

SEQ ID NO: 334531 - DNA, 25 bp, Artificial
  Probe
tctggaagtccgtggccacccgagt

SEQ ID NO: 334532 - DNA, 25 bp, Artificial
  Probe
tgaaagcacgcgtcatcactgactt

SEQ ID NO: 334533 - DNA, 25 bp, Artificial
  Probe
catgcagcggcctgagcaatatgaa

SEQ ID NO: 334534 - DNA, 25 bp, Artificial
  Probe
caggaggctgccttcacgctcatcg

SEQ ID NO: 334535 - DNA, 25 bp, Artificial
  Probe
gtggccacccgagtgcccaaggagc

SEQ ID NO: 334536 - DNA, 25 bp, Artificial
  Probe
tgggcagcaagaccaccctgcgcat

SEQ ID NO: 334537 - DNA, 25 bp, Artificial
  Probe
cagcacctgtgaagggctttgagaa

SEQ ID NO: 334538 - DNA, 25 bp, Artificial
  Probe
cccttggcagtgtggcagtgaccat

SEQ ID NO: 334539 - DNA, 25 bp, Artificial
  Probe
catccagcgagagaaagagtttctg

SEQ ID NO: 334540 - DNA, 25 bp, Artificial
  Probe
tctcctttcggctccagtagcaagc

SEQ ID NO: 334541 - DNA, 25 bp, Artificial
  Probe
agtggcctagaaaaggcctgtctcc

SEQ ID NO: 334542 - DNA, 25 bp, Artificial
  Probe
gctccagtagcaagcactttgtagg

SEQ ID NO: 334543 - DNA, 25 bp, Artificial
  Probe
tcctttcggctccagtagcaagcac

SEQ ID NO: 334544 - DNA, 25 bp, Artificial
  Probe
ttcttaacagtactgcaagtggcct

SEQ ID NO: 334545 - DNA, 25 bp, Artificial
  Probe
cttgtctttggagagtcttctgtgt

SEQ ID NO: 334546 - DNA, 25 bp, Artificial
  Probe
ctcctttcggctccagtagcaagca

SEQ ID NO: 334547 - DNA, 25 bp, Artificial
  Probe
tagaaaaggcctgtctcctttcggc

SEQ ID NO: 334548 - DNA, 25 bp, Artificial
  Probe
aaggcctgtctcctttcggctccag

SEQ ID NO: 334549 - DNA, 25 bp, Artificial
  Probe
aatacctgctccaggcttttggctt

SEQ ID NO: 334550 - DNA, 25 bp, Artificial
  Probe
agtcttctgtgtttagccacaaata

SEQ ID NO: 334551 - DNA, 25 bp, Artificial
  Probe
tccagtagcaagcactttgtaggag

SEQ ID NO: 334552 - DNA, 25 bp, Artificial
  Probe
gccacaaatacctgctccaggcttt

SEQ ID NO: 334553 - DNA, 25 bp, Artificial
  Probe
cctgctccaggcttttggcttgagc

SEQ ID NO: 334554 - DNA, 25 bp, Artificial
  Probe
ttgtaggagccatgcttgtctttgg

SEQ ID NO: 334555 - DNA, 25 bp, Artificial
  Probe
ctagaaaaggcctgtctcctttcgg

SEQ ID NO: 334556 - DNA, 25 bp, Artificial
  Probe
gcactttgtaggagccatgcttgtc

SEQ ID NO: 334557 - DNA, 25 bp, Artificial
  Probe
taacagtactgcaagtggcctagaa

SEQ ID NO: 334558 - DNA, 25 bp, Artificial
  Probe
tttggagagtcttctgtgtttagcc

SEQ ID NO: 334559 - DNA, 25 bp, Artificial
  Probe
cagtactgcaagtggcctagaaaag

SEQ ID NO: 334560 - DNA, 25 bp, Artificial
  Probe
gcttttggcttgagcgtttgggctt

SEQ ID NO: 334561 - DNA, 25 bp, Artificial
  Probe
gcctgtctcctttcggctccagtag

SEQ ID NO: 334562 - DNA, 25 bp, Artificial
  Probe
ctgtgtttagccacaaatacctgct

SEQ ID NO: 334563 - DNA, 25 bp, Artificial
  Probe
gctccaggcttttggcttgagcgtt

SEQ ID NO: 334564 - DNA, 25 bp, Artificial
  Probe
agtcttcagttggtccatctcaccc

SEQ ID NO: 334565 - DNA, 25 bp, Artificial
  Probe
agagtcttctgtgtttagccacaaa

SEQ ID NO: 334566 - DNA, 25 bp, Artificial
  Probe
aattgtctcggtaaataaagctgac

SEQ ID NO: 334567 - DNA, 25 bp, Artificial
  Probe
gagggctccgcagtcttcagttggt

SEQ ID NO: 334568 - DNA, 25 bp, Artificial
  Probe
aagcactttgtaggagccatgcttg

SEQ ID NO: 334569 - DNA, 25 bp, Artificial
  Probe
tttgtaggagccatgcttgtctttg

SEQ ID NO: 334570 - DNA, 25 bp, Artificial
  Probe
tgcaagtggcctagaaaaggcctgt

SEQ ID NO: 334571 - DNA, 25 bp, Artificial
  Probe
ctgcaagtggcctagaaaaggcctg

SEQ ID NO: 334572 - DNA, 25 bp, Artificial
  Probe
catgcttgtctttggagagtcttct

SEQ ID NO: 334573 - DNA, 25 bp, Artificial
  Probe
gcagtcttcagttggtccatctcac

SEQ ID NO: 334574 - DNA, 25 bp, Artificial
  Probe
gtgtttagccacaaatacctgctcc

SEQ ID NO: 334575 - DNA, 25 bp, Artificial
  Probe
ttagccacaaatacctgctccaggc

SEQ ID NO: 334576 - DNA, 25 bp, Artificial
  Probe
cagtcttcagttggtccatctcacc

SEQ ID NO: 334577 - DNA, 25 bp, Artificial
  Probe
gtagcaagcactttgtaggagccat

SEQ ID NO: 334578 - DNA, 25 bp, Artificial
  Probe
gccatgcttgtctttggagagtctt

SEQ ID NO: 334579 - DNA, 25 bp, Artificial
  Probe
aaaggcctgtctcctttcggctcca

SEQ ID NO: 334580 - DNA, 25 bp, Artificial
  Probe
ctttggagagtcttctgtgtttagc

SEQ ID NO: 334581 - DNA, 25 bp, Artificial
  Probe
gtaggagccatgcttgtctttggag

SEQ ID NO: 334582 - DNA, 25 bp, Artificial
  Probe
ccctttcttaacagtactgcaagtg

SEQ ID NO: 334583 - DNA, 25 bp, Artificial
  Probe
cctttcttaacagtactgcaagtgg

SEQ ID NO: 334584 - DNA, 25 bp, Artificial
  Probe
gtttagccacaaatacctgctccag

SEQ ID NO: 334585 - DNA, 25 bp, Artificial
  Probe
tttagccacaaatacctgctccagg

SEQ ID NO: 334586 - DNA, 25 bp, Artificial
  Probe
gtgactctcaatctgccaaacatgc

SEQ ID NO: 334587 - DNA, 25 bp, Artificial
  Probe
atgaaacacactggttctggatttg

SEQ ID NO: 334588 - DNA, 25 bp, Artificial
  Probe
ctggatttggcctctgctgtgaagt

SEQ ID NO: 334589 - DNA, 25 bp, Artificial
  Probe
gttgtctctaccatgagatttttat

SEQ ID NO: 334590 - DNA, 25 bp, Artificial
  Probe
gccactgagcctgtgcagggtagtt

SEQ ID NO: 334591 - DNA, 25 bp, Artificial
  Probe
cctctgctgtgaagtggcagggaac

SEQ ID NO: 334592 - DNA, 25 bp, Artificial
  Probe
ggcctggaacccttctggaaggaca

SEQ ID NO: 334593 - DNA, 25 bp, Artificial
  Probe
tacagttgcacaaacctgactttgg

SEQ ID NO: 334594 - DNA, 25 bp, Artificial
  Probe
tggttctggatttggcctctgctgt

SEQ ID NO: 334595 - DNA, 25 bp, Artificial
  Probe
gccactccatggagggcctggaacc

SEQ ID NO: 334596 - DNA, 25 bp, Artificial
  Probe
ctcccctaaaggtaactggcagcaa

SEQ ID NO: 334597 - DNA, 25 bp, Artificial
  Probe
gtcatctagaacttgactgccacct

SEQ ID NO: 334598 - DNA, 25 bp, Artificial
  Probe
gaaacacactggttctggatttggc

SEQ ID NO: 334599 - DNA, 25 bp, Artificial
  Probe
tggaacccttctggaaggacaggtg

SEQ ID NO: 334600 - DNA, 25 bp, Artificial
  Probe
tctcaatctgccaaacatgctgcag

SEQ ID NO: 334601 - DNA, 25 bp, Artificial
  Probe
gctgcagcctgtttcctcccaatta

SEQ ID NO: 334602 - DNA, 25 bp, Artificial
  Probe
gaacccttctggaaggacaggtggc

SEQ ID NO: 334603 - DNA, 25 bp, Artificial
  Probe
acccttctggaaggacaggtggcca

SEQ ID NO: 334604 - DNA, 25 bp, Artificial
  Probe
taactggcagcaagaggaaacaatg

SEQ ID NO: 334605 - DNA, 25 bp, Artificial
  Probe
tttggcctctgctgtgaagtggcag

SEQ ID NO: 334606 - DNA, 25 bp, Artificial
  Probe
ccatggagggcctggaacccttctg

SEQ ID NO: 334607 - DNA, 25 bp, Artificial
  Probe
caaacctgactttggctactggtga

SEQ ID NO: 334608 - DNA, 25 bp, Artificial
  Probe
ttctggaaggacaggtggccactat

SEQ ID NO: 334609 - DNA, 25 bp, Artificial
  Probe
gcctggaacccttctggaaggacag

SEQ ID NO: 334610 - DNA, 25 bp, Artificial
  Probe
ggtggccactattgccactgagcct

SEQ ID NO: 334611 - DNA, 25 bp, Artificial
  Probe
cctgactttggctactggtgactct

SEQ ID NO: 334612 - DNA, 25 bp, Artificial
  Probe
cccctaaaggtaactggcagcaaga

SEQ ID NO: 334613 - DNA, 25 bp, Artificial
  Probe
gagccactccatggagggcctggaa

SEQ ID NO: 334614 - DNA, 25 bp, Artificial
  Probe
gcagcctgtttcctcccaattacag

SEQ ID NO: 334615 - DNA, 25 bp, Artificial
  Probe
ggacaggtggccactattgccactg

SEQ ID NO: 334616 - DNA, 25 bp, Artificial
  Probe
actattgccactgagcctgtgcagg

SEQ ID NO: 334617 - DNA, 25 bp, Artificial
  Probe
aaggtaactggcagcaagaggaaac

SEQ ID NO: 334618 - DNA, 25 bp, Artificial
  Probe
cacaaacctgactttggctactggt

SEQ ID NO: 334619 - DNA, 25 bp, Artificial
  Probe
ctcccaattacagcaagactgtcag

SEQ ID NO: 334620 - DNA, 25 bp, Artificial
  Probe
ttctgagccactccatggagggcct

SEQ ID NO: 334621 - DNA, 25 bp, Artificial
  Probe
ccatgaaacacactggttctggatt

SEQ ID NO: 334622 - DNA, 25 bp, Artificial
  Probe
tgctgcagcctgtttcctcccaatt

SEQ ID NO: 334623 - DNA, 25 bp, Artificial
  Probe
tggagggcctggaacccttctggaa

SEQ ID NO: 334624 - DNA, 25 bp, Artificial
  Probe
tcaggcccatgaaacacactggttc

SEQ ID NO: 334625 - DNA, 25 bp, Artificial
  Probe
gggaggttgtctctaccatgagatt

SEQ ID NO: 334626 - DNA, 25 bp, Artificial
  Probe
ctggaacccttctggaaggacaggt

SEQ ID NO: 334627 - DNA, 25 bp, Artificial
  Probe
ctctgctgtgaagtggcagggaaca

SEQ ID NO: 334628 - DNA, 25 bp, Artificial
  Probe
tgccactgagcctgtgcagggtagt

SEQ ID NO: 334629 - DNA, 25 bp, Artificial
  Probe
ctgccaaacatgctgcagcctgttt

SEQ ID NO: 334630 - DNA, 25 bp, Artificial
  Probe
gatttggcctctgctgtgaagtggc

SEQ ID NO: 334631 - DNA, 25 bp, Artificial
  Probe
gccactattgccactgagcctgtgc

SEQ ID NO: 334632 - DNA, 25 bp, Artificial
  Probe
ctgctgctgccaggatcctgggtgt

SEQ ID NO: 334633 - DNA, 25 bp, Artificial
  Probe
cagctggccagactaacattcccaa

SEQ ID NO: 334634 - DNA, 25 bp, Artificial
  Probe
gatcctgggtgtcctcctcacctgt

SEQ ID NO: 334635 - DNA, 25 bp, Artificial
  Probe
aagatgtggacaccatctcgccaac

SEQ ID NO: 334636 - DNA, 25 bp, Artificial
  Probe
ggagcaccggggattcaagctgaac

SEQ ID NO: 334637 - DNA, 25 bp, Artificial
  Probe
ataagcaccagctggccagactaac

SEQ ID NO: 334638 - DNA, 25 bp, Artificial
  Probe
ctcatccgacaccagccggagggat

SEQ ID NO: 334639 - DNA, 25 bp, Artificial
  Probe
gctgctcatgcttggcttggacaat

SEQ ID NO: 334640 - DNA, 25 bp, Artificial
  Probe
gtggacaccatctcgccaacactgg

SEQ ID NO: 334641 - DNA, 25 bp, Artificial
  Probe
cgccatgccaaaaggaaagactggg

SEQ ID NO: 334642 - DNA, 25 bp, Artificial
  Probe
tcctgtaatgctattcaggaggccc

SEQ ID NO: 334643 - DNA, 25 bp, Artificial
  Probe
agccgccatgccaaaaggaaagact

SEQ ID NO: 334644 - DNA, 25 bp, Artificial
  Probe
tgcctggcatcgactggctcctcga

SEQ ID NO: 334645 - DNA, 25 bp, Artificial
  Probe
cctggcatcgactggctcctcgatg

SEQ ID NO: 334646 - DNA, 25 bp, Artificial
  Probe
caagctgaacatctgggatgtgggt

SEQ ID NO: 334647 - DNA, 25 bp, Artificial
  Probe
gactgcctgctgctgccaggatcct

SEQ ID NO: 334648 - DNA, 25 bp, Artificial
  Probe
tctcgccaacactgggcttcaacat

SEQ ID NO: 334649 - DNA, 25 bp, Artificial
  Probe
tgctggcaaaacaaccatcctcaag

SEQ ID NO: 334650 - DNA, 25 bp, Artificial
  Probe
aaagtggcctgcagccgccatgcca

SEQ ID NO: 334651 - DNA, 25 bp, Artificial
  Probe
gctacgggatcatggggcttctgac

SEQ ID NO: 334652 - DNA, 25 bp, Artificial
  Probe
ttcaggaggccctagagctggactc

SEQ ID NO: 334653 - DNA, 25 bp, Artificial
  Probe
ccaacactgggcttcaacatcaaga

SEQ ID NO: 334654 - DNA, 25 bp, Artificial
  Probe
cgtgcggctgctcatgcttggcttg

SEQ ID NO: 334655 - DNA, 25 bp, Artificial
  Probe
agggataagcaccagctggccagac

SEQ ID NO: 334656 - DNA, 25 bp, Artificial
  Probe
atgctattcaggaggccctagagct

SEQ ID NO: 334657 - DNA, 25 bp, Artificial
  Probe
agctggccagactaacattcccaac

SEQ ID NO: 334658 - DNA, 25 bp, Artificial
  Probe
gacaccagccggagggataagcacc

SEQ ID NO: 334659 - DNA, 25 bp, Artificial
  Probe
aggagggctgtcacccatctcccaa

SEQ ID NO: 334660 - DNA, 25 bp, Artificial
  Probe
ggatcatggggcttctgaccattct

SEQ ID NO: 334661 - DNA, 25 bp, Artificial
  Probe
caaccatcctcaagaagttcaatgg

SEQ ID NO: 334662 - DNA, 25 bp, Artificial
  Probe
gggtggccagaagtctctgcgctcc

SEQ ID NO: 334663 - DNA, 25 bp, Artificial
  Probe
cactgtcctgtaatgctattcagga

SEQ ID NO: 334664 - DNA, 25 bp, Artificial
  Probe
gaccattctgaagaagatgaagcag

SEQ ID NO: 334665 - DNA, 25 bp, Artificial
  Probe
cctcaagaagttcaatggagaagat

SEQ ID NO: 334666 - DNA, 25 bp, Artificial
  Probe
ggattcaagctgaacatctgggatg

SEQ ID NO: 334667 - DNA, 25 bp, Artificial
  Probe
ccagccggagggataagcaccagct

SEQ ID NO: 334668 - DNA, 25 bp, Artificial
  Probe
tgggtggccagaagtctctgcgctc

SEQ ID NO: 334669 - DNA, 25 bp, Artificial
  Probe
ggcaaaacaaccatcctcaagaagt

SEQ ID NO: 334670 - DNA, 25 bp, Artificial
  Probe
cctcacctgtccagcagtgagaata

SEQ ID NO: 334671 - DNA, 25 bp, Artificial
  Probe
tcatccgacaccagccggagggata

SEQ ID NO: 334672 - DNA, 25 bp, Artificial
  Probe
agggactgcctgctgctgccaggat

SEQ ID NO: 334673 - DNA, 25 bp, Artificial
  Probe
ggacctgcctggagcactgtcctgt

SEQ ID NO: 334674 - DNA, 25 bp, Artificial
  Probe
atctcgccaacactgggcttcaaca

SEQ ID NO: 334675 - DNA, 25 bp, Artificial
  Probe
agaccctggagcaccggggattcaa

SEQ ID NO: 334676 - DNA, 25 bp, Artificial
  Probe
caccggggattcaagctgaacatct

SEQ ID NO: 334677 - DNA, 25 bp, Artificial
  Probe
agacgtgcggctgctcatgcttggc

SEQ ID NO: 334678 - DNA, 25 bp, Artificial
  Probe
cttgaaagcctagcactttggagga

SEQ ID NO: 334679 - DNA, 25 bp, Artificial
  Probe
agaggcaatccaggaacacactaga

SEQ ID NO: 334680 - DNA, 25 bp, Artificial
  Probe
catcttcagatacataggagcctac

SEQ ID NO: 334681 - DNA, 25 bp, Artificial
  Probe
tcaaacaatgttagccaccaaaggc

SEQ ID NO: 334682 - DNA, 25 bp, Artificial
  Probe
taatatcttaagttcaatcagcagg

SEQ ID NO: 334683 - DNA, 25 bp, Artificial
  Probe
aatagggccagtaggatgactcaga

SEQ ID NO: 334684 - DNA, 25 bp, Artificial
  Probe
agacatgtttcaaacaatgttagcc

SEQ ID NO: 334685 - DNA, 25 bp, Artificial
  Probe
acaatgttagccaccaaaggccagg

SEQ ID NO: 334686 - DNA, 25 bp, Artificial
  Probe
aggtcatcttcagatacataggagc

SEQ ID NO: 334687 - DNA, 25 bp, Artificial
  Probe
ggaacacactagacactgtaaaaat

SEQ ID NO: 334688 - DNA, 25 bp, Artificial
  Probe
agaccagataatctacatagtaagc

SEQ ID NO: 334689 - DNA, 25 bp, Artificial
  Probe
atagggccagtaggatgactcagaa

SEQ ID NO: 334690 - DNA, 25 bp, Artificial
  Probe
cctagcactttggaggagtggaaag

SEQ ID NO: 334691 - DNA, 25 bp, Artificial
  Probe
ttcagatacataggagcctacgagt

SEQ ID NO: 334692 - DNA, 25 bp, Artificial
  Probe
cttggtagtgcatgccttcagtctc

SEQ ID NO: 334693 - DNA, 25 bp, Artificial
  Probe
aaaggcacttgcaaccatgactaat

SEQ ID NO: 334694 - DNA, 25 bp, Artificial
  Probe
cagatacataggagcctacgagtaa

SEQ ID NO: 334695 - DNA, 25 bp, Artificial
  Probe
agcctacgagtaagaggcaatccag

SEQ ID NO: 334696 - DNA, 25 bp, Artificial
  Probe
tatgtacttgaaagcctagcacttt

SEQ ID NO: 334697 - DNA, 25 bp, Artificial
  Probe
aggagcctacgagtaagaggcaatc

SEQ ID NO: 334698 - DNA, 25 bp, Artificial
  Probe
gtatgtacttgaaagcctagcactt

SEQ ID NO: 334699 - DNA, 25 bp, Artificial
  Probe
tacttgaaagcctagcactttggag

SEQ ID NO: 334700 - DNA, 25 bp, Artificial
  Probe
aagaccagataatctacatagtaag

SEQ ID NO: 334701 - DNA, 25 bp, Artificial
  Probe
agtaaaggcacttgcaaccatgact

SEQ ID NO: 334702 - DNA, 25 bp, Artificial
  Probe
ttcaaacaatgttagccaccaaagg

SEQ ID NO: 334703 - DNA, 25 bp, Artificial
  Probe
taagctccaatacagccagggacat

SEQ ID NO: 334704 - DNA, 25 bp, Artificial
  Probe
tagtaagctccaatacagccaggga

SEQ ID NO: 334705 - DNA, 25 bp, Artificial
  Probe
tacataggagcctacgagtaagagg

SEQ ID NO: 334706 - DNA, 25 bp, Artificial
  Probe
gtaagctccaatacagccagggaca

SEQ ID NO: 334707 - DNA, 25 bp, Artificial
  Probe
aggcaatccaggaacacactagaca

SEQ ID NO: 334708 - DNA, 25 bp, Artificial
  Probe
taagttcaatcagcaggaaaactag

SEQ ID NO: 334709 - DNA, 25 bp, Artificial
  Probe
gaatttcatgataccctggggtaca

SEQ ID NO: 334710 - DNA, 25 bp, Artificial
  Probe
ccaccaaaggccagggtggaagtat

SEQ ID NO: 334711 - DNA, 25 bp, Artificial
  Probe
atacagccagggacatacacataaa

SEQ ID NO: 334712 - DNA, 25 bp, Artificial
  Probe
gagcctacgagtaagaggcaatcca

SEQ ID NO: 334713 - DNA, 25 bp, Artificial
  Probe
tacagccagggacatacacataaat

SEQ ID NO: 334714 - DNA, 25 bp, Artificial
  Probe
ttcatgataccctggggtacatagt

SEQ ID NO: 334715 - DNA, 25 bp, Artificial
  Probe
ataccctggggtacatagtgagaca

SEQ ID NO: 334716 - DNA, 25 bp, Artificial
  Probe
gtctcagcactaagaaagtagagac

SEQ ID NO: 334717 - DNA, 25 bp, Artificial
  Probe
tcaatcagcaggaaaactagaatga

SEQ ID NO: 334718 - DNA, 25 bp, Artificial
  Probe
aaaggaactccaagaaatgttatct

SEQ ID NO: 334719 - DNA, 25 bp, Artificial
  Probe
ggcacttgcaaccatgactaatatc

SEQ ID NO: 334720 - DNA, 25 bp, Artificial
  Probe
caaaggccagggtggaagtatgtac

SEQ ID NO: 334721 - DNA, 25 bp, Artificial
  Probe
gttagccaccaaaggccagggtgga

SEQ ID NO: 334722 - DNA, 25 bp, Artificial
  Probe
caggaacacactagacactgtaaaa

SEQ ID NO: 334723 - DNA, 25 bp, Artificial
  Probe
ccctggggtacatagtgagacatgt

SEQ ID NO: 334724 - DNA, 25 bp, Artificial
  Probe
tttgaccgttccaatggcccaggaa

SEQ ID NO: 334725 - DNA, 25 bp, Artificial
  Probe
ccagtctggctccaacctgtgcaag

SEQ ID NO: 334726 - DNA, 25 bp, Artificial
  Probe
atggcccaggaaagtgctgctcagg

SEQ ID NO: 334727 - DNA, 25 bp, Artificial
  Probe
agtcagccctctgtggcccaggact

SEQ ID NO: 334728 - DNA, 25 bp, Artificial
  Probe
tcagtttctgttcctattttgaccg

SEQ ID NO: 334729 - DNA, 25 bp, Artificial
  Probe
agttgtcagaaatcctaatgggaca

SEQ ID NO: 334730 - DNA, 25 bp, Artificial
  Probe
cctctgtggcccaggacttcacaat

SEQ ID NO: 334731 - DNA, 25 bp, Artificial
  Probe
tgaccgttccaatggcccaggaaag

SEQ ID NO: 334732 - DNA, 25 bp, Artificial
  Probe
tgctgctcaggctcagacaatgggt

SEQ ID NO: 334733 - DNA, 25 bp, Artificial
  Probe
tgcaaagcagtcagccctctgtggc

SEQ ID NO: 334734 - DNA, 25 bp, Artificial
  Probe
ctgtggcccaggacttcacaattga

SEQ ID NO: 334735 - DNA, 25 bp, Artificial
  Probe
ggaaagtgctgctcaggctcagaca

SEQ ID NO: 334736 - DNA, 25 bp, Artificial
  Probe
cctttcagacacatggatgggattg

SEQ ID NO: 334737 - DNA, 25 bp, Artificial
  Probe
acaatgaaagccaagcctgacccca

SEQ ID NO: 334738 - DNA, 25 bp, Artificial
  Probe
tggctccaacctgtgcaagttgtca

SEQ ID NO: 334739 - DNA, 25 bp, Artificial
  Probe
acctgtgcaagttgtcagaaatcct

SEQ ID NO: 334740 - DNA, 25 bp, Artificial
  Probe
caatgaaagccaagcctgaccccag

SEQ ID NO: 334741 - DNA, 25 bp, Artificial
  Probe
aggctcagacaatgggtccctcctt

SEQ ID NO: 334742 - DNA, 25 bp, Artificial
  Probe
gcccaggacttcacaattgagcctt

SEQ ID NO: 334743 - DNA, 25 bp, Artificial
  Probe
tgaactgttcacaatgaaagccaag

SEQ ID NO: 334744 - DNA, 25 bp, Artificial
  Probe
cctgtgcaagttgtcagaaatccta

SEQ ID NO: 334745 - DNA, 25 bp, Artificial
  Probe
ctgttcacaatgaaagccaagcctg

SEQ ID NO: 334746 - DNA, 25 bp, Artificial
  Probe
agcagtcagccctctgtggcccagg

SEQ ID NO: 334747 - DNA, 25 bp, Artificial
  Probe
gttcacaatgaaagccaagcctgac

SEQ ID NO: 334748 - DNA, 25 bp, Artificial
  Probe
aaagtgctgctcaggctcagacaat

SEQ ID NO: 334749 - DNA, 25 bp, Artificial
  Probe
ctattttgaccgttccaatggccca

SEQ ID NO: 334750 - DNA, 25 bp, Artificial
  Probe
cagaaatcctaatgggacagtccaa

SEQ ID NO: 334751 - DNA, 25 bp, Artificial
  Probe
caggacttcacaattgagccttatt

SEQ ID NO: 334752 - DNA, 25 bp, Artificial
  Probe
tgttcctattttgaccgttccaatg

SEQ ID NO: 334753 - DNA, 25 bp, Artificial
  Probe
ctcaggctcagacaatgggtccctc

SEQ ID NO: 334754 - DNA, 25 bp, Artificial
  Probe
tggcccaggaaagtgctgctcaggc

SEQ ID NO: 334755 - DNA, 25 bp, Artificial
  Probe
ggacttcacaattgagccttatttc

SEQ ID NO: 334756 - DNA, 25 bp, Artificial
  Probe
ttccaatggcccaggaaagtgctgc

SEQ ID NO: 334757 - DNA, 25 bp, Artificial
  Probe
aatcctaatgggacagtccaaggaa

SEQ ID NO: 334758 - DNA, 25 bp, Artificial
  Probe
atcctttcagacacatggatgggat

SEQ ID NO: 334759 - DNA, 25 bp, Artificial
  Probe
gttcctattttgaccgttccaatgg

SEQ ID NO: 334760 - DNA, 25 bp, Artificial
  Probe
tcctaatgggacagtccaaggaaaa

SEQ ID NO: 334761 - DNA, 25 bp, Artificial
  Probe
caagttgtcagaaatcctaatggga

SEQ ID NO: 334762 - DNA, 25 bp, Artificial
  Probe
gcagtcagccctctgtggcccagga

SEQ ID NO: 334763 - DNA, 25 bp, Artificial
  Probe
cagtctggctccaacctgtgcaagt

SEQ ID NO: 334764 - DNA, 25 bp, Artificial
  Probe
cagtttctgttcctattttgaccgt

SEQ ID NO: 334765 - DNA, 25 bp, Artificial
  Probe
tccaacctgtgcaagttgtcagaaa

SEQ ID NO: 334766 - DNA, 25 bp, Artificial
  Probe
gtcagaaatcctaatgggacagtcc

SEQ ID NO: 334767 - DNA, 25 bp, Artificial
  Probe
tgttgcaaagcagtcagccctctgt

SEQ ID NO: 334768 - DNA, 25 bp, Artificial
  Probe
gcccaggaaagtgctgctcaggctc

SEQ ID NO: 334769 - DNA, 25 bp, Artificial
  Probe
ttgtcagaaatcctaatgggacagt

SEQ ID NO: 334770 - DNA, 25 bp, Artificial
  Probe
cctgggtgcatctgccctctgagtt

SEQ ID NO: 334771 - DNA, 25 bp, Artificial
  Probe
aggtaccagtcctcaggatgagcca

SEQ ID NO: 334772 - DNA, 25 bp, Artificial
  Probe
accacagaggctaggcagagggaat

SEQ ID NO: 334773 - DNA, 25 bp, Artificial
  Probe
tgccctctgagttctttctgtgtga

SEQ ID NO: 334774 - DNA, 25 bp, Artificial
  Probe
ggccatctcttcactctgcttcagt

SEQ ID NO: 334775 - DNA, 25 bp, Artificial
  Probe
tggccttcgctcttgcttcgtgtcc

SEQ ID NO: 334776 - DNA, 25 bp, Artificial
  Probe
gtgcatctgccctctgagttctttc

SEQ ID NO: 334777 - DNA, 25 bp, Artificial
  Probe
tcaaagccactttagtaagaagtag

SEQ ID NO: 334778 - DNA, 25 bp, Artificial
  Probe
tcaggatgagccaggagccctcagg

SEQ ID NO: 334779 - DNA, 25 bp, Artificial
  Probe
atgatgcctgggaacacagctgaca

SEQ ID NO: 334780 - DNA, 25 bp, Artificial
  Probe
cttcgctcttgcttcgtgtccatct

SEQ ID NO: 334781 - DNA, 25 bp, Artificial
  Probe
gctcttgcttcgtgtccatctcatt

SEQ ID NO: 334782 - DNA, 25 bp, Artificial
  Probe
tcgctcttgcttcgtgtccatctca

SEQ ID NO: 334783 - DNA, 25 bp, Artificial
  Probe
agggccatctcttcactctgcttca

SEQ ID NO: 334784 - DNA, 25 bp, Artificial
  Probe
gggccatctcttcactctgcttcag

SEQ ID NO: 334785 - DNA, 25 bp, Artificial
  Probe
agagaggtccagtcccatgtggcca

SEQ ID NO: 334786 - DNA, 25 bp, Artificial
  Probe
gccttcgctcttgcttcgtgtccat

SEQ ID NO: 334787 - DNA, 25 bp, Artificial
  Probe
ggttcatctcagcacccttcctggg

SEQ ID NO: 334788 - DNA, 25 bp, Artificial
  Probe
cactctgcttcagttgaacacctag

SEQ ID NO: 334789 - DNA, 25 bp, Artificial
  Probe
ggtaccagtcctcaggatgagccag

SEQ ID NO: 334790 - DNA, 25 bp, Artificial
  Probe
tcagttgaacacctagggacgtatt

SEQ ID NO: 334791 - DNA, 25 bp, Artificial
  Probe
tccagtcccatgtggccaggcagtg

SEQ ID NO: 334792 - DNA, 25 bp, Artificial
  Probe
ctctgagttctttctgtgtgatcta

SEQ ID NO: 334793 - DNA, 25 bp, Artificial
  Probe
gtggccaggcagtggccttcgctct

SEQ ID NO: 334794 - DNA, 25 bp, Artificial
  Probe
tccctgggtgcatctgccctctgag

SEQ ID NO: 334795 - DNA, 25 bp, Artificial
  Probe
aggtccagtcccatgtggccaggca

SEQ ID NO: 334796 - DNA, 25 bp, Artificial
  Probe
tcccatgtggccaggcagtggcctt

SEQ ID NO: 334797 - DNA, 25 bp, Artificial
  Probe
gatgcctgggaacacagctgacagg

SEQ ID NO: 334798 - DNA, 25 bp, Artificial
  Probe
accagtcctcaggatgagccaggag

SEQ ID NO: 334799 - DNA, 25 bp, Artificial
  Probe
caggcagtggccttcgctcttgctt

SEQ ID NO: 334800 - DNA, 25 bp, Artificial
  Probe
aggcagtggccttcgctcttgcttc

SEQ ID NO: 334801 - DNA, 25 bp, Artificial
  Probe
caccacagaggctaggcagagggaa

SEQ ID NO: 334802 - DNA, 25 bp, Artificial
  Probe
tgcttcagttgaacacctagggacg

SEQ ID NO: 334803 - DNA, 25 bp, Artificial
  Probe
tgcctgggaacacagctgacaggga

SEQ ID NO: 334804 - DNA, 25 bp, Artificial
  Probe
gcatctgccctctgagttctttctg

SEQ ID NO: 334805 - DNA, 25 bp, Artificial
  Probe
tgcttcgtgtccatctcatttcctg

SEQ ID NO: 334806 - DNA, 25 bp, Artificial
  Probe
gtcctcaggatgagccaggagccct

SEQ ID NO: 334807 - DNA, 25 bp, Artificial
  Probe
gtaggtaccagtcctcaggatgagc

SEQ ID NO: 334808 - DNA, 25 bp, Artificial
  Probe
atgtggccaggcagtggccttcgct

SEQ ID NO: 334809 - DNA, 25 bp, Artificial
  Probe
agtggccttcgctcttgcttcgtgt

SEQ ID NO: 334810 - DNA, 25 bp, Artificial
  Probe
gcttcgtgtccatctcatttcctga

SEQ ID NO: 334811 - DNA, 25 bp, Artificial
  Probe
ctgatcaaagccactttagtaagaa

SEQ ID NO: 334812 - DNA, 25 bp, Artificial
  Probe
gagagaggtccagtcccatgtggcc

SEQ ID NO: 334813 - DNA, 25 bp, Artificial
  Probe
ttcgctcttgcttcgtgtccatctc

SEQ ID NO: 334814 - DNA, 25 bp, Artificial
  Probe
gaagtaggtaccagtcctcaggatg

SEQ ID NO: 334815 - DNA, 25 bp, Artificial
  Probe
gcggatgatgcctgggaacacagct

SEQ ID NO: 334816 - DNA, 25 bp, Artificial
  Probe
ctctgcaagctgagcacgctggtgg

SEQ ID NO: 334817 - DNA, 25 bp, Artificial
  Probe
tgtatcaatggcaaagtgctgatca

SEQ ID NO: 334818 - DNA, 25 bp, Artificial
  Probe
gaaccagatctatggcttcgagggc

SEQ ID NO: 334819 - DNA, 25 bp, Artificial
  Probe
tgcccccaattattgtgaccagatg

SEQ ID NO: 334820 - DNA, 25 bp, Artificial
  Probe
tggcacagtgtatcaatggcaaagt

SEQ ID NO: 334821 - DNA, 25 bp, Artificial
  Probe
accctctttggcttcaagctcctgt

SEQ ID NO: 334822 - DNA, 25 bp, Artificial
  Probe
gtgaaggaagtcctctgcaagctga

SEQ ID NO: 334823 - DNA, 25 bp, Artificial
  Probe
attgtgaccagatgggaaacaaagc

SEQ ID NO: 334824 - DNA, 25 bp, Artificial
  Probe
tacatcatccgcagccatgaagtca

SEQ ID NO: 334825 - DNA, 25 bp, Artificial
  Probe
taaccagggcctgcacagctggagg

SEQ ID NO: 334826 - DNA, 25 bp, Artificial
  Probe
agctgagcacgctggtggagacaac

SEQ ID NO: 334827 - DNA, 25 bp, Artificial
  Probe
tcagcaagcgtggtgtgagttgtca

SEQ ID NO: 334828 - DNA, 25 bp, Artificial
  Probe
tttgtggaccgtggttccttctccg

SEQ ID NO: 334829 - DNA, 25 bp, Artificial
  Probe
tgaaggccaagtacacagcccaaat

SEQ ID NO: 334830 - DNA, 25 bp, Artificial
  Probe
ccgatgtcaccaaggccttcctgga

SEQ ID NO: 334831 - DNA, 25 bp, Artificial
  Probe
gtcactctggatgacatccggaaga

SEQ ID NO: 334832 - DNA, 25 bp, Artificial
  Probe
tcctcaacatatttgagctcaacgg

SEQ ID NO: 334833 - DNA, 25 bp, Artificial
  Probe
acagcagtaaccagggcctgcacag

SEQ ID NO: 334834 - DNA, 25 bp, Artificial
  Probe
tatttaacggcgactttgtggaccg

SEQ ID NO: 334835 - DNA, 25 bp, Artificial
  Probe
atccggaagattgagcggaatcggc

SEQ ID NO: 334836 - DNA, 25 bp, Artificial
  Probe
atggccagttttatgacctcctcaa

SEQ ID NO: 334837 - DNA, 25 bp, Artificial
  Probe
atgatgtgaggcagtctacagcagt

SEQ ID NO: 334838 - DNA, 25 bp, Artificial
  Probe
cctagtgcaggtgaaggaagtcctc

SEQ ID NO: 334839 - DNA, 25 bp, Artificial
  Probe
cgctccgtcagcaagcgtggtgtga

SEQ ID NO: 334840 - DNA, 25 bp, Artificial
  Probe
gtcaccaaggccttcctggaggaga

SEQ ID NO: 334841 - DNA, 25 bp, Artificial
  Probe
ggccagttttatgacctcctcaaca

SEQ ID NO: 334842 - DNA, 25 bp, Artificial
  Probe
catggtggccgctgtgtcaccgtct

SEQ ID NO: 334843 - DNA, 25 bp, Artificial
  Probe
cttcctggaggagaatcaactggac

SEQ ID NO: 334844 - DNA, 25 bp, Artificial
  Probe
tgccataggaagaccccaaaagagg

SEQ ID NO: 334845 - DNA, 25 bp, Artificial
  Probe
cagaatgggcgctccgtcagcaagc

SEQ ID NO: 334846 - DNA, 25 bp, Artificial
  Probe
gatgacatccggaagattgagcgga

SEQ ID NO: 334847 - DNA, 25 bp, Artificial
  Probe
gctcaacggtttaccctcagagacc

SEQ ID NO: 334848 - DNA, 25 bp, Artificial
  Probe
gagttgtcagtttgggcccgatgtc

SEQ ID NO: 334849 - DNA, 25 bp, Artificial
  Probe
ggccgctgtgtcaccgtcttctctg

SEQ ID NO: 334850 - DNA, 25 bp, Artificial
  Probe
tgttcgagtggcttccgctggcaca

SEQ ID NO: 334851 - DNA, 25 bp, Artificial
  Probe
aggccttcctggaggagaatcaact

SEQ ID NO: 334852 - DNA, 25 bp, Artificial
  Probe
agtttgggcccgatgtcaccaaggc

SEQ ID NO: 334853 - DNA, 25 bp, Artificial
  Probe
cagatcattttcatctacttcgagg

SEQ ID NO: 334854 - DNA, 25 bp, Artificial
  Probe
cttctccgttgaagtgatcctcacc

SEQ ID NO: 334855 - DNA, 25 bp, Artificial
  Probe
tgtgagttgtcagtttgggcccgat

SEQ ID NO: 334856 - DNA, 25 bp, Artificial
  Probe
agtggcttccgctggcacagtgtat

SEQ ID NO: 334857 - DNA, 25 bp, Artificial
  Probe
tggagacaacgctgaaagagacaga

SEQ ID NO: 334858 - DNA, 25 bp, Artificial
  Probe
tcagcgaggtgttcgagtggcttcc

SEQ ID NO: 334859 - DNA, 25 bp, Artificial
  Probe
gcttcaagctcctgtatccagatca

SEQ ID NO: 334860 - DNA, 25 bp, Artificial
  Probe
gagaatcaactggactacatcatcc

SEQ ID NO: 334861 - DNA, 25 bp, Artificial
  Probe
aagtcaaagctgagggctacgaggt

SEQ ID NO: 334862 - DNA, 25 bp, Artificial
  Probe
agtctagtgtaatcacaaggcacaa

SEQ ID NO: 334863 - DNA, 25 bp, Artificial
  Probe
tgtctgcacgtcatcgtgtaaaaat

SEQ ID NO: 334864 - DNA, 25 bp, Artificial
  Probe
atgaagttgaccactatgtacattt

SEQ ID NO: 334865 - DNA, 25 bp, Artificial
  Probe
cagaccctacaaacacccatatggg

SEQ ID NO: 334866 - DNA, 25 bp, Artificial
  Probe
cacccatatgggttttgggaaggag

SEQ ID NO: 334867 - DNA, 25 bp, Artificial
  Probe
taatcacaaggcacaagtctctgca

SEQ ID NO: 334868 - DNA, 25 bp, Artificial
  Probe
gaccactatgtacatttaagtgaaa

SEQ ID NO: 334869 - DNA, 25 bp, Artificial
  Probe
tttcacccttgaatatccgcagatg

SEQ ID NO: 334870 - DNA, 25 bp, Artificial
  Probe
catccaaggaagcaacaatgtatct

SEQ ID NO: 334871 - DNA, 25 bp, Artificial
  Probe
agagcatgcttttaatgcatccaag

SEQ ID NO: 334872 - DNA, 25 bp, Artificial
  Probe
agcatgcttttaatgcatccaagga

SEQ ID NO: 334873 - DNA, 25 bp, Artificial
  Probe
atgcttttaatgcatccaaggaagc

SEQ ID NO: 334874 - DNA, 25 bp, Artificial
  Probe
gtaccaatatttgatgagagcatgc

SEQ ID NO: 334875 - DNA, 25 bp, Artificial
  Probe
gtctctgcaaaaaatcaagaagaag

SEQ ID NO: 334876 - DNA, 25 bp, Artificial
  Probe
ttaatgcatccaaggaagcaacaat

SEQ ID NO: 334877 - DNA, 25 bp, Artificial
  Probe
agtgtaatcacaaggcacaagtctc

SEQ ID NO: 334878 - DNA, 25 bp, Artificial
  Probe
gatcaactgaaatgcagaggtaaac

SEQ ID NO: 334879 - DNA, 25 bp, Artificial
  Probe
tacattttgagatcaactgaaatgc

SEQ ID NO: 334880 - DNA, 25 bp, Artificial
  Probe
ccaaccagatgttacaaaaagactg

SEQ ID NO: 334881 - DNA, 25 bp, Artificial
  Probe
ccactatgtacatttaagtgaaaag

SEQ ID NO: 334882 - DNA, 25 bp, Artificial
  Probe
tcacccttgaatatccgcagatgtg

SEQ ID NO: 334883 - DNA, 25 bp, Artificial
  Probe
ctgaagtgctttgtgtaccaatatt

SEQ ID NO: 334884 - DNA, 25 bp, Artificial
  Probe
gaagttgaccactatgtacatttaa

SEQ ID NO: 334885 - DNA, 25 bp, Artificial
  Probe
gaccctacaaacacccatatgggtt

SEQ ID NO: 334886 - DNA, 25 bp, Artificial
  Probe
gtaaactgaagtgctttgtgtacca

SEQ ID NO: 334887 - DNA, 25 bp, Artificial
  Probe
cacccttgaatatccgcagatgtgt

SEQ ID NO: 334888 - DNA, 25 bp, Artificial
  Probe
tacaaacacccatatgggttttggg

SEQ ID NO: 334889 - DNA, 25 bp, Artificial
  Probe
gcttttaatgcatccaaggaagcaa

SEQ ID NO: 334890 - DNA, 25 bp, Artificial
  Probe
ctgcctttgtactcccaaccagatg

SEQ ID NO: 334891 - DNA, 25 bp, Artificial
  Probe
acattttgagatcaactgaaatgca

SEQ ID NO: 334892 - DNA, 25 bp, Artificial
  Probe
tagtgtaatcacaaggcacaagtct

SEQ ID NO: 334893 - DNA, 25 bp, Artificial
  Probe
cccattaatgacaggattagtgttt

SEQ ID NO: 334894 - DNA, 25 bp, Artificial
  Probe
atatccgcagatgtgtctgcacgtc

SEQ ID NO: 334895 - DNA, 25 bp, Artificial
  Probe
tctctgcaaaaaatcaagaagaagg

SEQ ID NO: 334896 - DNA, 25 bp, Artificial
  Probe
atccgcagatgtgtctgcacgtcat

SEQ ID NO: 334897 - DNA, 25 bp, Artificial
  Probe
atcaactgaaatgcagaggtaaact

SEQ ID NO: 334898 - DNA, 25 bp, Artificial
  Probe
gcacaagtctctgcaaaaaatcaag

SEQ ID NO: 334899 - DNA, 25 bp, Artificial
  Probe
tgatgaagttgaccactatgtacat

SEQ ID NO: 334900 - DNA, 25 bp, Artificial
  Probe
atgagagcatgcttttaatgcatcc

SEQ ID NO: 334901 - DNA, 25 bp, Artificial
  Probe
gcatgcttttaatgcatccaaggaa

SEQ ID NO: 334902 - DNA, 25 bp, Artificial
  Probe
ttttaatgcatccaaggaagcaaca

SEQ ID NO: 334903 - DNA, 25 bp, Artificial
  Probe
ttgaatatccgcagatgtgtctgca

SEQ ID NO: 334904 - DNA, 25 bp, Artificial
  Probe
gacatgaaatatctctagtgttttc

SEQ ID NO: 334905 - DNA, 25 bp, Artificial
  Probe
ttcacccttgaatatccgcagatgt

SEQ ID NO: 334906 - DNA, 25 bp, Artificial
  Probe
aatgcatccaaggaagcaacaatgt

SEQ ID NO: 334907 - DNA, 25 bp, Artificial
  Probe
aatcacaaggcacaagtctctgcaa

SEQ ID NO: 334908 - DNA, 25 bp, Artificial
  Probe
ttataaatcacagcttctagttagg

SEQ ID NO: 334909 - DNA, 25 bp, Artificial
  Probe
cttgtttgtgacattgtgacagtct

SEQ ID NO: 334910 - DNA, 25 bp, Artificial
  Probe
acactgaagcgatgggatggccaga

SEQ ID NO: 334911 - DNA, 25 bp, Artificial
  Probe
agcaagcggggcagcattctctgtc

SEQ ID NO: 334912 - DNA, 25 bp, Artificial
  Probe
cttcagagggtctggcagtcacagc

SEQ ID NO: 334913 - DNA, 25 bp, Artificial
  Probe
tgatgacttaaactacactgaggag

SEQ ID NO: 334914 - DNA, 25 bp, Artificial
  Probe
gatgtcagggagactcgacaactgc

SEQ ID NO: 334915 - DNA, 25 bp, Artificial
  Probe
ccctcgagaccctcgatttgaatgt

SEQ ID NO: 334916 - DNA, 25 bp, Artificial
  Probe
ttgtacccaaaccaggaaatgaaat

SEQ ID NO: 334917 - DNA, 25 bp, Artificial
  Probe
ccctcgatttgaatgttatataggt

SEQ ID NO: 334918 - DNA, 25 bp, Artificial
  Probe
acctaggcaacataatgggaccctc

SEQ ID NO: 334919 - DNA, 25 bp, Artificial
  Probe
agcaattgtcatggactaatcataa

SEQ ID NO: 334920 - DNA, 25 bp, Artificial
  Probe
tttgtcagccgtgcaggtgctgaga

SEQ ID NO: 334921 - DNA, 25 bp, Artificial
  Probe
agcccggagtttgaggccaacctag

SEQ ID NO: 334922 - DNA, 25 bp, Artificial
  Probe
tgaggcttcagaactcatggggcag

SEQ ID NO: 334923 - DNA, 25 bp, Artificial
  Probe
ccgttgaggctgtctgaagtgtatt

SEQ ID NO: 334924 - DNA, 25 bp, Artificial
  Probe
gccaaatggttaacacaccaatgct

SEQ ID NO: 334925 - DNA, 25 bp, Artificial
  Probe
gttgttggagactaccgtgagctga

SEQ ID NO: 334926 - DNA, 25 bp, Artificial
  Probe
tccaggctttccagctgtcctctga

SEQ ID NO: 334927 - DNA, 25 bp, Artificial
  Probe
tgagaatgtcacttgcgtatgtaca

SEQ ID NO: 334928 - DNA, 25 bp, Artificial
  Probe
ttgttggagactaccgtgagctgag

SEQ ID NO: 334929 - DNA, 25 bp, Artificial
  Probe
aggggcgacacctagtccatggcag

SEQ ID NO: 334930 - DNA, 25 bp, Artificial
  Probe
atataggtcttcaggataaatctgc

SEQ ID NO: 334931 - DNA, 25 bp, Artificial
  Probe
gatttgtcggcctcatccattgtgg

SEQ ID NO: 334932 - DNA, 25 bp, Artificial
  Probe
tccggagcccggagtttgaggccaa

SEQ ID NO: 334933 - DNA, 25 bp, Artificial
  Probe
taacatggctacacggggatgtggc

SEQ ID NO: 334934 - DNA, 25 bp, Artificial
  Probe
ctagtccatggcagcgggatgtcag

SEQ ID NO: 334935 - DNA, 25 bp, Artificial
  Probe
ccgcactctttgctccaggacatag

SEQ ID NO: 334936 - DNA, 25 bp, Artificial
  Probe
cttatgtagcaattgtcatggacta

SEQ ID NO: 334937 - DNA, 25 bp, Artificial
  Probe
gtcggctctcagtctaaacatcctt

SEQ ID NO: 334938 - DNA, 25 bp, Artificial
  Probe
cacactgaagcgatgggatggccag

SEQ ID NO: 334939 - DNA, 25 bp, Artificial
  Probe
tgaaattcacaggtgaactgcagtc

SEQ ID NO: 334940 - DNA, 25 bp, Artificial
  Probe
gggagactcgacaactgctcccgca

SEQ ID NO: 334941 - DNA, 25 bp, Artificial
  Probe
tgaggttcctgttagggacccaggt

SEQ ID NO: 334942 - DNA, 25 bp, Artificial
  Probe
catggagctgttcctgtagtgaaag

SEQ ID NO: 334943 - DNA, 25 bp, Artificial
  Probe
acttttgaaatcttagagagattcc

SEQ ID NO: 334944 - DNA, 25 bp, Artificial
  Probe
tgtacccaaaccaggaaatgaaatt

SEQ ID NO: 334945 - DNA, 25 bp, Artificial
  Probe
gaaactcagtgcttcagccaaatcc

SEQ ID NO: 334946 - DNA, 25 bp, Artificial
  Probe
actctttgctccaggacatagctct

SEQ ID NO: 334947 - DNA, 25 bp, Artificial
  Probe
ggataaatctgcttattttcacagc

SEQ ID NO: 334948 - DNA, 25 bp, Artificial
  Probe
gtatcaagaacgagtcattggccca

SEQ ID NO: 334949 - DNA, 25 bp, Artificial
  Probe
tttctcattcatagtgtgtcacccg

SEQ ID NO: 334950 - DNA, 25 bp, Artificial
  Probe
ctggttaggcctgaagctccaagct

SEQ ID NO: 334951 - DNA, 25 bp, Artificial
  Probe
ccatgtttgctgagtaacctgttcc

SEQ ID NO: 334952 - DNA, 25 bp, Artificial
  Probe
acatgaggcttcagaactcatgggg

SEQ ID NO: 334953 - DNA, 25 bp, Artificial
  Probe
cccatttggcaaatagttgcttatg

SEQ ID NO: 334954 - DNA, 25 bp, Artificial
  Probe
cggcaaatctcatgaatagagagac

SEQ ID NO: 334955 - DNA, 25 bp, Artificial
  Probe
actagcctgtaattgtcttgtttca

SEQ ID NO: 334956 - DNA, 25 bp, Artificial
  Probe
tagcctgtaattgtcttgtttcacg

SEQ ID NO: 334957 - DNA, 25 bp, Artificial
  Probe
aagtgagcactgtgcattaaccaaa

SEQ ID NO: 334958 - DNA, 25 bp, Artificial
  Probe
cttcactagcctgtaattgtcttgt

SEQ ID NO: 334959 - DNA, 25 bp, Artificial
  Probe
gaagtgagcactgtgcattaaccaa

SEQ ID NO: 334960 - DNA, 25 bp, Artificial
  Probe
tcactagcctgtaattgtcttgttt

SEQ ID NO: 334961 - DNA, 25 bp, Artificial
  Probe
agataccttcactagcctgtaattg

SEQ ID NO: 334962 - DNA, 25 bp, Artificial
  Probe
acggcaaatctcatgaatagagaga

SEQ ID NO: 334963 - DNA, 25 bp, Artificial
  Probe
ctgtgcattaaccaaaggctattta

SEQ ID NO: 334964 - DNA, 25 bp, Artificial
  Probe
gtttcacggcaaatctcatgaatag

SEQ ID NO: 334965 - DNA, 25 bp, Artificial
  Probe
agaagtgagcactgtgcattaacca

SEQ ID NO: 334966 - DNA, 25 bp, Artificial
  Probe
agtgagcactgtgcattaaccaaag

SEQ ID NO: 334967 - DNA, 25 bp, Artificial
  Probe
agcactgtgcattaaccaaaggcta

SEQ ID NO: 334968 - DNA, 25 bp, Artificial
  Probe
ttgtcttgtttcacggcaaatctca

SEQ ID NO: 334969 - DNA, 25 bp, Artificial
  Probe
cctttcatgaggaaagggatgcctg

SEQ ID NO: 334970 - DNA, 25 bp, Artificial
  Probe
aaagccaaacgaatgagaagtgagc

SEQ ID NO: 334971 - DNA, 25 bp, Artificial
  Probe
ctttcatgaggaaagggatgcctgg

SEQ ID NO: 334972 - DNA, 25 bp, Artificial
  Probe
gataccttcactagcctgtaattgt

SEQ ID NO: 334973 - DNA, 25 bp, Artificial
  Probe
gagagacacacaaaacaggttagac

SEQ ID NO: 334974 - DNA, 25 bp, Artificial
  Probe
gtaattgtcttgtttcacggcaaat

SEQ ID NO: 334975 - DNA, 25 bp, Artificial
  Probe
tgcctggagactggaagaactactt

SEQ ID NO: 334976 - DNA, 25 bp, Artificial
  Probe
ttcactagcctgtaattgtcttgtt

SEQ ID NO: 334977 - DNA, 25 bp, Artificial
  Probe
cacggcaaatctcatgaatagagag

SEQ ID NO: 334978 - DNA, 25 bp, Artificial
  Probe
tagagagacacacaaaacaggttag

SEQ ID NO: 334979 - DNA, 25 bp, Artificial
  Probe
tcctttcatgaggaaagggatgcct

SEQ ID NO: 334980 - DNA, 25 bp, Artificial
  Probe
tcacggcaaatctcatgaatagaga

SEQ ID NO: 334981 - DNA, 25 bp, Artificial
  Probe
ggatgcctggagactggaagaacta

SEQ ID NO: 334982 - DNA, 25 bp, Artificial
  Probe
cctgtaattgtcttgtttcacggca

SEQ ID NO: 334983 - DNA, 25 bp, Artificial
  Probe
tgtttcacggcaaatctcatgaata

SEQ ID NO: 334984 - DNA, 25 bp, Artificial
  Probe
aattgtcttgtttcacggcaaatct

SEQ ID NO: 334985 - DNA, 25 bp, Artificial
  Probe
tgtaattgtcttgtttcacggcaaa

SEQ ID NO: 334986 - DNA, 25 bp, Artificial
  Probe
ttcacggcaaatctcatgaatagag

SEQ ID NO: 334987 - DNA, 25 bp, Artificial
  Probe
gtgagcactgtgcattaaccaaagg

SEQ ID NO: 334988 - DNA, 25 bp, Artificial
  Probe
gagcactgtgcattaaccaaaggct

SEQ ID NO: 334989 - DNA, 25 bp, Artificial
  Probe
ttgtttcacggcaaatctcatgaat

SEQ ID NO: 334990 - DNA, 25 bp, Artificial
  Probe
attgtcttgtttcacggcaaatctc

SEQ ID NO: 334991 - DNA, 25 bp, Artificial
  Probe
gcctgtaattgtcttgtttcacggc

SEQ ID NO: 334992 - DNA, 25 bp, Artificial
  Probe
agcctgtaattgtcttgtttcacgg

SEQ ID NO: 334993 - DNA, 25 bp, Artificial
  Probe
ccttcactagcctgtaattgtcttg

SEQ ID NO: 334994 - DNA, 25 bp, Artificial
  Probe
aaatctcatgaatagagagacacac

SEQ ID NO: 334995 - DNA, 25 bp, Artificial
  Probe
ctagcctgtaattgtcttgtttcac

SEQ ID NO: 334996 - DNA, 25 bp, Artificial
  Probe
gatgcctggagactggaagaactac

SEQ ID NO: 334997 - DNA, 25 bp, Artificial
  Probe
ctttactgtggcacaaagtgaggat

SEQ ID NO: 334998 - DNA, 25 bp, Artificial
  Probe
cactgtgcattaaccaaaggctatt

SEQ ID NO: 334999 - DNA, 25 bp, Artificial
  Probe
gagacacacaaaacaggttagacat

SEQ ID NO: 335000 - DNA, 25 bp, Artificial
  Probe
cgatgacgtcggtttaaacggatga

SEQ ID NO: 335001 - DNA, 25 bp, Artificial
  Probe
tgaccccctaggtagacttatttat

SEQ ID NO: 335002 - DNA, 25 bp, Artificial
  Probe
taaagccataatgtccacatggacc

SEQ ID NO: 335003 - DNA, 25 bp, Artificial
  Probe
tagaaaaaggctcctttctgagaag

SEQ ID NO: 335004 - DNA, 25 bp, Artificial
  Probe
agaagcctatttattgaccccctag

SEQ ID NO: 335005 - DNA, 25 bp, Artificial
  Probe
gcctatttattgaccccctaggtag

SEQ ID NO: 335006 - DNA, 25 bp, Artificial
  Probe
catttgtgtaattgacctgggacca

SEQ ID NO: 335007 - DNA, 25 bp, Artificial
  Probe
acagaaccaacctgcgactgaagcc

SEQ ID NO: 335008 - DNA, 25 bp, Artificial
  Probe
attgacctgggaccagtcatttcct

SEQ ID NO: 335009 - DNA, 25 bp, Artificial
  Probe
cttgtgttgccctgatcttccttcc

SEQ ID NO: 335010 - DNA, 25 bp, Artificial
  Probe
ctaaaactgtgtgtccttagggcct

SEQ ID NO: 335011 - DNA, 25 bp, Artificial
  Probe
tcaaccaaattgtacactaagcagg

SEQ ID NO: 335012 - DNA, 25 bp, Artificial
  Probe
acctgcgactgaagccgcctgtgga

SEQ ID NO: 335013 - DNA, 25 bp, Artificial
  Probe
gatggtacacacctagataaatttc

SEQ ID NO: 335014 - DNA, 25 bp, Artificial
  Probe
ggtgtattcctttatctccagtaaa

SEQ ID NO: 335015 - DNA, 25 bp, Artificial
  Probe
agcagggagctatgggtgtattcct

SEQ ID NO: 335016 - DNA, 25 bp, Artificial
  Probe
gacatgaaacccaagaagacagtgc

SEQ ID NO: 335017 - DNA, 25 bp, Artificial
  Probe
ctacacagggccattttgatatcgt

SEQ ID NO: 335018 - DNA, 25 bp, Artificial
  Probe
agcaaactttgcagttgtgtcctcg

SEQ ID NO: 335019 - DNA, 25 bp, Artificial
  Probe
attgctttgggctcacagcactgca

SEQ ID NO: 335020 - DNA, 25 bp, Artificial
  Probe
ctttattggtctgtagtaacttcaa

SEQ ID NO: 335021 - DNA, 25 bp, Artificial
  Probe
cctttctgagaagcaattagcattt

SEQ ID NO: 335022 - DNA, 25 bp, Artificial
  Probe
tggtaagcatcatgtatctgacaat

SEQ ID NO: 335023 - DNA, 25 bp, Artificial
  Probe
atgtttatactaaaactgtgtgtcc

SEQ ID NO: 335024 - DNA, 25 bp, Artificial
  Probe
gaggcggagtccagcgccattgctt

SEQ ID NO: 335025 - DNA, 25 bp, Artificial
  Probe
gcactgcagggcttgtgttgccctg

SEQ ID NO: 335026 - DNA, 25 bp, Artificial
  Probe
gtgtaattgacctgggaccagtcat

SEQ ID NO: 335027 - DNA, 25 bp, Artificial
  Probe
ctcctgggaattggtaagcatcatg

SEQ ID NO: 335028 - DNA, 25 bp, Artificial
  Probe
tcatgtatctgacaataaagcagta

SEQ ID NO: 335029 - DNA, 25 bp, Artificial
  Probe
tcctttattggtctgtagtaacttc

SEQ ID NO: 335030 - DNA, 25 bp, Artificial
  Probe
gtctgtagtaacttcaagttcattc

SEQ ID NO: 335031 - DNA, 25 bp, Artificial
  Probe
gagtccagcgccattgctttgggct

SEQ ID NO: 335032 - DNA, 25 bp, Artificial
  Probe
tgcttctgtcacagggcttttgttg

SEQ ID NO: 335033 - DNA, 25 bp, Artificial
  Probe
ttcccaaaagcaaactttgcagttg

SEQ ID NO: 335034 - DNA, 25 bp, Artificial
  Probe
caacctgcgactgaagccgcctgtg

SEQ ID NO: 335035 - DNA, 25 bp, Artificial
  Probe
agctatgggtgtattcctttatctc

SEQ ID NO: 335036 - DNA, 25 bp, Artificial
  Probe
cctgcactacacagggccattttga

SEQ ID NO: 335037 - DNA, 25 bp, Artificial
  Probe
tggtctgtagtaacttcaagttcat

SEQ ID NO: 335038 - DNA, 25 bp, Artificial
  Probe
ttcctgtggagaagcctatttattg

SEQ ID NO: 335039 - DNA, 25 bp, Artificial
  Probe
ttattgaccccctaggtagacttat

SEQ ID NO: 335040 - DNA, 25 bp, Artificial
  Probe
tagttttggtgaatgtccagacaca

SEQ ID NO: 335041 - DNA, 25 bp, Artificial
  Probe
aaacccaagaagacagtgcagtcgt

SEQ ID NO: 335042 - DNA, 25 bp, Artificial
  Probe
tctgccagccgttacctgcaacaga

SEQ ID NO: 335043 - DNA, 25 bp, Artificial
  Probe
gtccagacacatcacagattgtaac

SEQ ID NO: 335044 - DNA, 25 bp, Artificial
  Probe
gtccacatggaccagacaattttat

SEQ ID NO: 335045 - DNA, 25 bp, Artificial
  Probe
cactaagcagggagctatgggtgta

SEQ ID NO: 335046 - DNA, 25 bp, Artificial
  Probe
tttaaacaccgcaaagtgaccctga

SEQ ID NO: 335047 - DNA, 25 bp, Artificial
  Probe
tccccaaaggagaggttggactctt

SEQ ID NO: 335048 - DNA, 25 bp, Artificial
  Probe
gaccgggaccacaaagtgaaaatag

SEQ ID NO: 335049 - DNA, 25 bp, Artificial
  Probe
gaatgtttacggtgtgcccgtgcca

SEQ ID NO: 335050 - DNA, 25 bp, Artificial
  Probe
tgatttgcaaaatcacagagctcac

SEQ ID NO: 335051 - DNA, 25 bp, Artificial
  Probe
tggctatgctggaggaaagacccag

SEQ ID NO: 335052 - DNA, 25 bp, Artificial
  Probe
ggttggactcttgatttgcaaaatc

SEQ ID NO: 335053 - DNA, 25 bp, Artificial
  Probe
aaaggagacgtctacttcaacagtg

SEQ ID NO: 335054 - DNA, 25 bp, Artificial
  Probe
caaatgaccgggaccacaaagtgaa

SEQ ID NO: 335055 - DNA, 25 bp, Artificial
  Probe
ggaaagaaactctttcagcacatct

SEQ ID NO: 335056 - DNA, 25 bp, Artificial
  Probe
accattgagatcaccgggactttta

SEQ ID NO: 335057 - DNA, 25 bp, Artificial
  Probe
tcgctgacattgtgggactggtaga

SEQ ID NO: 335058 - DNA, 25 bp, Artificial
  Probe
gcaggaaatacaacgccactgtcat

SEQ ID NO: 335059 - DNA, 25 bp, Artificial
  Probe
ggatattgcatcaaagtccccaaag

SEQ ID NO: 335060 - DNA, 25 bp, Artificial
  Probe
tggctcctaacacttccagaaagaa

SEQ ID NO: 335061 - DNA, 25 bp, Artificial
  Probe
atagcactaggaaatggcttacgag

SEQ ID NO: 335062 - DNA, 25 bp, Artificial
  Probe
tcacagagctcacaccattttttgg

SEQ ID NO: 335063 - DNA, 25 bp, Artificial
  Probe
gaaggatgagcctgtccgtgatgca

SEQ ID NO: 335064 - DNA, 25 bp, Artificial
  Probe
gtccgtgatgcaaatggatattgca

SEQ ID NO: 335065 - DNA, 25 bp, Artificial
  Probe
cctccacggatgcattgtggttggg

SEQ ID NO: 335066 - DNA, 25 bp, Artificial
  Probe
atggcctcgatcaagatgaaagaaa

SEQ ID NO: 335067 - DNA, 25 bp, Artificial
  Probe
tgggacgactgcaggaaatacaacg

SEQ ID NO: 335068 - DNA, 25 bp, Artificial
  Probe
tggggacattcacatttatgagttc

SEQ ID NO: 335069 - DNA, 25 bp, Artificial
  Probe
ttaattacaccagaacgtttgcaag

SEQ ID NO: 335070 - DNA, 25 bp, Artificial
  Probe
aacgccactgtcattcagtacatcg

SEQ ID NO: 335071 - DNA, 25 bp, Artificial
  Probe
actgcttcggtacctctgcaacacg

SEQ ID NO: 335072 - DNA, 25 bp, Artificial
  Probe
ttcatctattttcacgacagagttg

SEQ ID NO: 335073 - DNA, 25 bp, Artificial
  Probe
ggctcctaacacttccagaaagaaa

SEQ ID NO: 335074 - DNA, 25 bp, Artificial
  Probe
agagaatgtagctaccacggaagtc

SEQ ID NO: 335075 - DNA, 25 bp, Artificial
  Probe
ttcatcaagagatttggggacattc

SEQ ID NO: 335076 - DNA, 25 bp, Artificial
  Probe
ccactgaaggcaacattggatttat

SEQ ID NO: 335077 - DNA, 25 bp, Artificial
  Probe
gttggggctacatttgctttgcgga

SEQ ID NO: 335078 - DNA, 25 bp, Artificial
  Probe
acatacgtgcccatgactgaggaca

SEQ ID NO: 335079 - DNA, 25 bp, Artificial
  Probe
ccttccggtggaaaggagagaatgt

SEQ ID NO: 335080 - DNA, 25 bp, Artificial
  Probe
aagactctgaagctctgaatgttgc

SEQ ID NO: 335081 - DNA, 25 bp, Artificial
  Probe
tttttcaatgtgcacctgccatttg

SEQ ID NO: 335082 - DNA, 25 bp, Artificial
  Probe
ttttggctatgctggaggaaagacc

SEQ ID NO: 335083 - DNA, 25 bp, Artificial
  Probe
taaacaccgcaaagtgaccctgatg

SEQ ID NO: 335084 - DNA, 25 bp, Artificial
  Probe
aagttgtaaggcacgagctgatcaa

SEQ ID NO: 335085 - DNA, 25 bp, Artificial
  Probe
catgaaggtcgcatcgggatggcct

SEQ ID NO: 335086 - DNA, 25 bp, Artificial
  Probe
cgagctgatcaagtatgacgtggag

SEQ ID NO: 335087 - DNA, 25 bp, Artificial
  Probe
caccagaacgtttgcaagtaaaaag

SEQ ID NO: 335088 - DNA, 25 bp, Artificial
  Probe
taattgataagactctgaagctctg

SEQ ID NO: 335089 - DNA, 25 bp, Artificial
  Probe
tgcccatgactgaggacatttataa

SEQ ID NO: 335090 - DNA, 25 bp, Artificial
  Probe
tgatcgaccgtgaaaatttcatcta

SEQ ID NO: 335091 - DNA, 25 bp, Artificial
  Probe
actacgagttcaatggaaagaaact

SEQ ID NO: 335092 - DNA, 25 bp, Artificial
  Probe
gaaaggactacagtaccttgtattt

SEQ ID NO: 335093 - DNA, 25 bp, Artificial
  Probe
ttcggctctgcttctttcctaaccg

SEQ ID NO: 335094 - DNA, 25 bp, Artificial
  Probe
ggaattgttacaagcgctctggtca

SEQ ID NO: 335095 - DNA, 25 bp, Artificial
  Probe
tcagagccaccgagggcagctgcca

SEQ ID NO: 335096 - DNA, 25 bp, Artificial
  Probe
agagatgaactgtactctcgttgat

SEQ ID NO: 335097 - DNA, 25 bp, Artificial
  Probe
gttgacggctctctatgtaaataaa

SEQ ID NO: 335098 - DNA, 25 bp, Artificial
  Probe
tagaaaaacgacgtcatcgccctac

SEQ ID NO: 335099 - DNA, 25 bp, Artificial
  Probe
tgggaatctcagagccaccgagggc

SEQ ID NO: 335100 - DNA, 25 bp, Artificial
  Probe
gaaatgtaatgcactttctgtttca

SEQ ID NO: 335101 - DNA, 25 bp, Artificial
  Probe
ctctggtcagaacataaacgttcca

SEQ ID NO: 335102 - DNA, 25 bp, Artificial
  Probe
taaatcgtgagtcacactgactaga

SEQ ID NO: 335103 - DNA, 25 bp, Artificial
  Probe
aggactacagtaccttgtatttaat

SEQ ID NO: 335104 - DNA, 25 bp, Artificial
  Probe
aaggagcccgccaagtgcactgctc

SEQ ID NO: 335105 - DNA, 25 bp, Artificial
  Probe
caaatccagcggaggcagcctcctg

SEQ ID NO: 335106 - DNA, 25 bp, Artificial
  Probe
ctttgcgagaaccatgaaatgtaat

SEQ ID NO: 335107 - DNA, 25 bp, Artificial
  Probe
gctcgcccggctttactattttcta

SEQ ID NO: 335108 - DNA, 25 bp, Artificial
  Probe
aactcctttctgataaaaatgcgtg

SEQ ID NO: 335109 - DNA, 25 bp, Artificial
  Probe
agcttctcacaccagcctttgggtt

SEQ ID NO: 335110 - DNA, 25 bp, Artificial
  Probe
gcacagtcgtttgttgctatttatt

SEQ ID NO: 335111 - DNA, 25 bp, Artificial
  Probe
acactgactagaagttactttattg

SEQ ID NO: 335112 - DNA, 25 bp, Artificial
  Probe
ttgccttaagggaacatgtacaggt

SEQ ID NO: 335113 - DNA, 25 bp, Artificial
  Probe
ccggtccagctccaagacttgcagt

SEQ ID NO: 335114 - DNA, 25 bp, Artificial
  Probe
ccgcctggtgggaatctcagagcca

SEQ ID NO: 335115 - DNA, 25 bp, Artificial
  Probe
cgttccatttaattgctgtaattga

SEQ ID NO: 335116 - DNA, 25 bp, Artificial
  Probe
gtgcactgctcaaaaaaccccgcag

SEQ ID NO: 335117 - DNA, 25 bp, Artificial
  Probe
ggttcccttccgaatttgcacagtc

SEQ ID NO: 335118 - DNA, 25 bp, Artificial
  Probe
cttagaaaaacgacgtcatcgccct

SEQ ID NO: 335119 - DNA, 25 bp, Artificial
  Probe
gcctcatcagagatctcaaataaag

SEQ ID NO: 335120 - DNA, 25 bp, Artificial
  Probe
ctttctgtttcaaaggataaatcga

SEQ ID NO: 335121 - DNA, 25 bp, Artificial
  Probe
acgttccatttaattgctgtaattg

SEQ ID NO: 335122 - DNA, 25 bp, Artificial
  Probe
gccaccaagggagaaagggacgcta

SEQ ID NO: 335123 - DNA, 25 bp, Artificial
  Probe
cgttccctgagcaccgggccgtgtt

SEQ ID NO: 335124 - DNA, 25 bp, Artificial
  Probe
ggctctgcttctttcctaaccgctt

SEQ ID NO: 335125 - DNA, 25 bp, Artificial
  Probe
agatctcaaataaagtcaagagcac

SEQ ID NO: 335126 - DNA, 25 bp, Artificial
  Probe
cctttctgataaaaatgcgtgttaa

SEQ ID NO: 335127 - DNA, 25 bp, Artificial
  Probe
acgagcttctcacaccagcctttgg

SEQ ID NO: 335128 - DNA, 25 bp, Artificial
  Probe
ttctccttcaccaattcctgcaggg

SEQ ID NO: 335129 - DNA, 25 bp, Artificial
  Probe
tgctcgcccggctttactattttct

SEQ ID NO: 335130 - DNA, 25 bp, Artificial
  Probe
aaaggcagcccctttgcgagaacca

SEQ ID NO: 335131 - DNA, 25 bp, Artificial
  Probe
actgctctgccgaccaagtaacctg

SEQ ID NO: 335132 - DNA, 25 bp, Artificial
  Probe
atagtttgaagacgtctgttgcctt

SEQ ID NO: 335133 - DNA, 25 bp, Artificial
  Probe
tgagatcccgggacccacgagcttc

SEQ ID NO: 335134 - DNA, 25 bp, Artificial
  Probe
ggccgcctttcatattaacttgaaa

SEQ ID NO: 335135 - DNA, 25 bp, Artificial
  Probe
cggtgatatatcagcctctttaaca

SEQ ID NO: 335136 - DNA, 25 bp, Artificial
  Probe
gtccaggctcggtcctttgctttgc

SEQ ID NO: 335137 - DNA, 25 bp, Artificial
  Probe
cttggccgcctttcatattaacttg

SEQ ID NO: 335138 - DNA, 25 bp, Artificial
  Probe
tgtctctcaccatgtgtctggcacc

SEQ ID NO: 335139 - DNA, 25 bp, Artificial
  Probe
gccccgggaagtggagtcagttctt

SEQ ID NO: 335140 - DNA, 25 bp, Artificial
  Probe
cccaggcaggtgctgccgcatgaga

SEQ ID NO: 335141 - DNA, 25 bp, Artificial
  Probe
cggctgcccatcatcttctggcagg

SEQ ID NO: 335142 - DNA, 25 bp, Artificial
  Probe
agccatggtgaccaccagctccaat

SEQ ID NO: 335143 - DNA, 25 bp, Artificial
  Probe
cctctttaaggctttactctgagga

SEQ ID NO: 335144 - DNA, 25 bp, Artificial
  Probe
tgctgtgtcatgtgccccagcgtgc

SEQ ID NO: 335145 - DNA, 25 bp, Artificial
  Probe
ctataccgggtctcttggtctgtgg

SEQ ID NO: 335146 - DNA, 25 bp, Artificial
  Probe
tctggagctggacattcccggggaa

SEQ ID NO: 335147 - DNA, 25 bp, Artificial
  Probe
atctgttgcttcctgctcttcaacg

SEQ ID NO: 335148 - DNA, 25 bp, Artificial
  Probe
ttcgccatttccaacggctacttcg

SEQ ID NO: 335149 - DNA, 25 bp, Artificial
  Probe
ggatgcctacttcatcacattcatg

SEQ ID NO: 335150 - DNA, 25 bp, Artificial
  Probe
tgcccctgctggtgtgcctgcgctt

SEQ ID NO: 335151 - DNA, 25 bp, Artificial
  Probe
tgctcttcgccatttccaacggcta

SEQ ID NO: 335152 - DNA, 25 bp, Artificial
  Probe
tccctcactgctgcttctggagctg

SEQ ID NO: 335153 - DNA, 25 bp, Artificial
  Probe
tggctgggccggagcctgacttcct

SEQ ID NO: 335154 - DNA, 25 bp, Artificial
  Probe
gggaaggacctctgctataccgggt

SEQ ID NO: 335155 - DNA, 25 bp, Artificial
  Probe
atggtgaccaccagctccaatagcc

SEQ ID NO: 335156 - DNA, 25 bp, Artificial
  Probe
cttctggcaggatgcctacttcatc

SEQ ID NO: 335157 - DNA, 25 bp, Artificial
  Probe
tcatgaccttcttcctggccctggg

SEQ ID NO: 335158 - DNA, 25 bp, Artificial
  Probe
tcaccatgtgtctggcacccaggca

SEQ ID NO: 335159 - DNA, 25 bp, Artificial
  Probe
tggcacccaggcaggtgctgccgca

SEQ ID NO: 335160 - DNA, 25 bp, Artificial
  Probe
tgtctggcacccaggcaggtgctgc

SEQ ID NO: 335161 - DNA, 25 bp, Artificial
  Probe
cttcctgtggccagatgaggacagc

SEQ ID NO: 335162 - DNA, 25 bp, Artificial
  Probe
ggccagatgaggacagccagctgct

SEQ ID NO: 335163 - DNA, 25 bp, Artificial
  Probe
tctcaccatgtgtctggcacccagg

SEQ ID NO: 335164 - DNA, 25 bp, Artificial
  Probe
gacctctgctataccgggtctcttg

SEQ ID NO: 335165 - DNA, 25 bp, Artificial
  Probe
atttccaacggctacttcgtgtctc

SEQ ID NO: 335166 - DNA, 25 bp, Artificial
  Probe
tgttcgtgcccctcttcatgctgtg

SEQ ID NO: 335167 - DNA, 25 bp, Artificial
  Probe
agtggagtcagttcttcaaccctat

SEQ ID NO: 335168 - DNA, 25 bp, Artificial
  Probe
gggcagaaactaccttggctggtag

SEQ ID NO: 335169 - DNA, 25 bp, Artificial
  Probe
aatagccccgggaagtggagtcagt

SEQ ID NO: 335170 - DNA, 25 bp, Artificial
  Probe
tcctacttcctgtggccagatgagg

SEQ ID NO: 335171 - DNA, 25 bp, Artificial
  Probe
ggagccctcatgaccttcttcctgg

SEQ ID NO: 335172 - DNA, 25 bp, Artificial
  Probe
atcacagccatggtgaccaccagct

SEQ ID NO: 335173 - DNA, 25 bp, Artificial
  Probe
tcaacgtcatggattggctgggccg

SEQ ID NO: 335174 - DNA, 25 bp, Artificial
  Probe
ctggccctgggactctcctgcggag

SEQ ID NO: 335175 - DNA, 25 bp, Artificial
  Probe
tggccctgggactctcctgcggagc

SEQ ID NO: 335176 - DNA, 25 bp, Artificial
  Probe
tgaccttcttcctggccctgggact

SEQ ID NO: 335177 - DNA, 25 bp, Artificial
  Probe
tcgccatttccaacggctacttcgt

SEQ ID NO: 335178 - DNA, 25 bp, Artificial
  Probe
gtcagttcttcaaccctatctgttg

SEQ ID NO: 335179 - DNA, 25 bp, Artificial
  Probe
ataccgggtctcttggtctgtgggt

SEQ ID NO: 335180 - DNA, 25 bp, Artificial
  Probe
catgtgtctggcacccaggcaggtg

SEQ ID NO: 335181 - DNA, 25 bp, Artificial
  Probe
cagaaactaccttggctggtagcca

SEQ ID NO: 335182 - DNA, 25 bp, Artificial
  Probe
accagctccaatagccccgggaagt

SEQ ID NO: 335183 - DNA, 25 bp, Artificial
  Probe
gctttactctgaggaccaccgcact

SEQ ID NO: 335184 - DNA, 25 bp, Artificial
  Probe
ctgcttcagatcactcctgcgctga

SEQ ID NO: 335185 - DNA, 25 bp, Artificial
  Probe
ttcagatcactcctgcgctgaggac

SEQ ID NO: 335186 - DNA, 25 bp, Artificial
  Probe
gcgcggcatccagtgcacacaaagc

SEQ ID NO: 335187 - DNA, 25 bp, Artificial
  Probe
gagcgcggcatccagtgcacacaaa

SEQ ID NO: 335188 - DNA, 25 bp, Artificial
  Probe
tataccctgctgctacagctgtaat

SEQ ID NO: 335189 - DNA, 25 bp, Artificial
  Probe
ataccctgctgctacagctgtaatt

SEQ ID NO: 335190 - DNA, 25 bp, Artificial
  Probe
tgctgctacagctgtaattccattg

SEQ ID NO: 335191 - DNA, 25 bp, Artificial
  Probe
agcctgagcccgtcctgcttcagat

SEQ ID NO: 335192 - DNA, 25 bp, Artificial
  Probe
gcggcatccagtgcacacaaagcca

SEQ ID NO: 335193 - DNA, 25 bp, Artificial
  Probe
taccctgctgctacagctgtaattc

SEQ ID NO: 335194 - DNA, 25 bp, Artificial
  Probe
ctgctgctacagctgtaattccatt

SEQ ID NO: 335195 - DNA, 25 bp, Artificial
  Probe
ttataccctgctgctacagctgtaa

SEQ ID NO: 335196 - DNA, 25 bp, Artificial
  Probe
cagtgcacacaaagccacagcagct

SEQ ID NO: 335197 - DNA, 25 bp, Artificial
  Probe
gctgtaattccattgcctgtgagtt

SEQ ID NO: 335198 - DNA, 25 bp, Artificial
  Probe
cctttataccctgctgctacagctg

SEQ ID NO: 335199 - DNA, 25 bp, Artificial
  Probe
tcactcctgcgctgaggactgcgcg

SEQ ID NO: 335200 - DNA, 25 bp, Artificial
  Probe
cagctgtaattccattgcctgtgag

SEQ ID NO: 335201 - DNA, 25 bp, Artificial
  Probe
cctgctgctacagctgtaattccat

SEQ ID NO: 335202 - DNA, 25 bp, Artificial
  Probe
tccagtgcacacaaagccacagcag

SEQ ID NO: 335203 - DNA, 25 bp, Artificial
  Probe
ctgtaattccattgcctgtgagttg

SEQ ID NO: 335204 - DNA, 25 bp, Artificial
  Probe
agcgcggcatccagtgcacacaaag

SEQ ID NO: 335205 - DNA, 25 bp, Artificial
  Probe
tgctacagctgtaattccattgcct

SEQ ID NO: 335206 - DNA, 25 bp, Artificial
  Probe
ggaaaaagcaatcctttataccctg

SEQ ID NO: 335207 - DNA, 25 bp, Artificial
  Probe
gcatccagtgcacacaaagccacag

SEQ ID NO: 335208 - DNA, 25 bp, Artificial
  Probe
ctgcgctgaggactgcgcgcctcgt

SEQ ID NO: 335209 - DNA, 25 bp, Artificial
  Probe
ttccattgcctgtgagttgaagtaa

SEQ ID NO: 335210 - DNA, 25 bp, Artificial
  Probe
tgagcccgtcctgcttcagatcact

SEQ ID NO: 335211 - DNA, 25 bp, Artificial
  Probe
ggcatccagtgcacacaaagccaca

SEQ ID NO: 335212 - DNA, 25 bp, Artificial
  Probe
tcagatcactcctgcgctgaggact

SEQ ID NO: 335213 - DNA, 25 bp, Artificial
  Probe
ttgcctgtgagttgaagtaaaaacc

SEQ ID NO: 335214 - DNA, 25 bp, Artificial
  Probe
tttataccctgctgctacagctgta

SEQ ID NO: 335215 - DNA, 25 bp, Artificial
  Probe
cttcagatcactcctgcgctgagga

SEQ ID NO: 335216 - DNA, 25 bp, Artificial
  Probe
aagccacagcagctgcagcctgagc

SEQ ID NO: 335217 - DNA, 25 bp, Artificial
  Probe
ccattgcctgtgagttgaagtaaaa

SEQ ID NO: 335218 - DNA, 25 bp, Artificial
  Probe
aaagccacagcagctgcagcctgag

SEQ ID NO: 335219 - DNA, 25 bp, Artificial
  Probe
acagctgtaattccattgcctgtga

SEQ ID NO: 335220 - DNA, 25 bp, Artificial
  Probe
gcttcagatcactcctgcgctgagg

SEQ ID NO: 335221 - DNA, 25 bp, Artificial
  Probe
gctacagctgtaattccattgcctg

SEQ ID NO: 335222 - DNA, 25 bp, Artificial
  Probe
atccagtgcacacaaagccacagca

SEQ ID NO: 335223 - DNA, 25 bp, Artificial
  Probe
aattccattgcctgtgagttgaagt

SEQ ID NO: 335224 - DNA, 25 bp, Artificial
  Probe
accctgctgctacagctgtaattcc

SEQ ID NO: 335225 - DNA, 25 bp, Artificial
  Probe
ctacagctgtaattccattgcctgt

SEQ ID NO: 335226 - DNA, 25 bp, Artificial
  Probe
tccattgcctgtgagttgaagtaaa

SEQ ID NO: 335227 - DNA, 25 bp, Artificial
  Probe
gctgctacagctgtaattccattgc

SEQ ID NO: 335228 - DNA, 25 bp, Artificial
  Probe
cggagcgcggcatccagtgcacaca

SEQ ID NO: 335229 - DNA, 25 bp, Artificial
  Probe
attccattgcctgtgagttgaagta

SEQ ID NO: 335230 - DNA, 25 bp, Artificial
  Probe
tggagactgtccacattcaagttgc

SEQ ID NO: 335231 - DNA, 25 bp, Artificial
  Probe
ctgactctacacctgtgacttccga

SEQ ID NO: 335232 - DNA, 25 bp, Artificial
  Probe
gccactgactctacacctgtgactt

SEQ ID NO: 335233 - DNA, 25 bp, Artificial
  Probe
gctctcctttcagaagacagaccgc

SEQ ID NO: 335234 - DNA, 25 bp, Artificial
  Probe
gactctacacctgtgacttccgagt

SEQ ID NO: 335235 - DNA, 25 bp, Artificial
  Probe
ttgaccttccttagagccactgact

SEQ ID NO: 335236 - DNA, 25 bp, Artificial
  Probe
gagactgtccacattcaagttgcaa

SEQ ID NO: 335237 - DNA, 25 bp, Artificial
  Probe
ccacattcaagttgcaaggacattc

SEQ ID NO: 335238 - DNA, 25 bp, Artificial
  Probe
gtccacattcaagttgcaaggacat

SEQ ID NO: 335239 - DNA, 25 bp, Artificial
  Probe
ctgtatttcggcatcagttggagac

SEQ ID NO: 335240 - DNA, 25 bp, Artificial
  Probe
cattcaagttgcaaggacattcata

SEQ ID NO: 335241 - DNA, 25 bp, Artificial
  Probe
gaagttcacagctctcctttcagaa

SEQ ID NO: 335242 - DNA, 25 bp, Artificial
  Probe
tacacctgtgacttccgagtcatcc

SEQ ID NO: 335243 - DNA, 25 bp, Artificial
  Probe
agccactgactctacacctgtgact

SEQ ID NO: 335244 - DNA, 25 bp, Artificial
  Probe
agagccactgactctacacctgtga

SEQ ID NO: 335245 - DNA, 25 bp, Artificial
  Probe
gaccttccttagagccactgactct

SEQ ID NO: 335246 - DNA, 25 bp, Artificial
  Probe
ctctacacctgtgacttccgagtca

SEQ ID NO: 335247 - DNA, 25 bp, Artificial
  Probe
attattcagatgctgtatttcggca

SEQ ID NO: 335248 - DNA, 25 bp, Artificial
  Probe
actgtccacattcaagttgcaagga

SEQ ID NO: 335249 - DNA, 25 bp, Artificial
  Probe
gttcacagctctcctttcagaagac

SEQ ID NO: 335250 - DNA, 25 bp, Artificial
  Probe
cggcatcagttggagactgtccaca

SEQ ID NO: 335251 - DNA, 25 bp, Artificial
  Probe
ctacacctgtgacttccgagtcatc

SEQ ID NO: 335252 - DNA, 25 bp, Artificial
  Probe
catcagttggagactgtccacattc

SEQ ID NO: 335253 - DNA, 25 bp, Artificial
  Probe
agactgtccacattcaagttgcaag

SEQ ID NO: 335254 - DNA, 25 bp, Artificial
  Probe
actgactctacacctgtgacttccg

SEQ ID NO: 335255 - DNA, 25 bp, Artificial
  Probe
cttagagccactgactctacacctg

SEQ ID NO: 335256 - DNA, 25 bp, Artificial
  Probe
cagatgctgtatttcggcatcagtt

SEQ ID NO: 335257 - DNA, 25 bp, Artificial
  Probe
tcacagctctcctttcagaagacag

SEQ ID NO: 335258 - DNA, 25 bp, Artificial
  Probe
gttggagactgtccacattcaagtt

SEQ ID NO: 335259 - DNA, 25 bp, Artificial
  Probe
gtatttcggcatcagttggagactg

SEQ ID NO: 335260 - DNA, 25 bp, Artificial
  Probe
ctgtgacttccgagtcatcccatcg

SEQ ID NO: 335261 - DNA, 25 bp, Artificial
  Probe
cagctctcctttcagaagacagacc

SEQ ID NO: 335262 - DNA, 25 bp, Artificial
  Probe
atgagcagttcgtcatcccggggct

SEQ ID NO: 335263 - DNA, 25 bp, Artificial
  Probe
ctgtccacattcaagttgcaaggac

SEQ ID NO: 335264 - DNA, 25 bp, Artificial
  Probe
ttattcagatgctgtatttcggcat

SEQ ID NO: 335265 - DNA, 25 bp, Artificial
  Probe
agatgctgtatttcggcatcagttg

SEQ ID NO: 335266 - DNA, 25 bp, Artificial
  Probe
cttattattcagatgctgtatttcg

SEQ ID NO: 335267 - DNA, 25 bp, Artificial
  Probe
attcagatgctgtatttcggcatca

SEQ ID NO: 335268 - DNA, 25 bp, Artificial
  Probe
tattattcagatgctgtatttcggc

SEQ ID NO: 335269 - DNA, 25 bp, Artificial
  Probe
ttcggcatcagttggagactgtcca

SEQ ID NO: 335270 - DNA, 25 bp, Artificial
  Probe
tctcctttcagaagacagaccgctt

SEQ ID NO: 335271 - DNA, 25 bp, Artificial
  Probe
acattcaagttgcaaggacattcat

SEQ ID NO: 335272 - DNA, 25 bp, Artificial
  Probe
gtgacttccgagtcatcccatcgac

SEQ ID NO: 335273 - DNA, 25 bp, Artificial
  Probe
tcagttggagactgtccacattcaa

SEQ ID NO: 335274 - DNA, 25 bp, Artificial
  Probe
agttcacagctctcctttcagaaga

SEQ ID NO: 335275 - DNA, 25 bp, Artificial
  Probe
tttcggcatcagttggagactgtcc

SEQ ID NO: 335276 - DNA, 25 bp, Artificial
  Probe
tcatggcaaccgtgggtgcaccccg

SEQ ID NO: 335277 - DNA, 25 bp, Artificial
  Probe
tccagccgtcgctcatcatgctggg

SEQ ID NO: 335278 - DNA, 25 bp, Artificial
  Probe
aggcatgaaactgtggcttcctctc

SEQ ID NO: 335279 - DNA, 25 bp, Artificial
  Probe
atgaaatcatcttctaccttgctgg

SEQ ID NO: 335280 - DNA, 25 bp, Artificial
  Probe
ctgccggccgcctggtggatgctct

SEQ ID NO: 335281 - DNA, 25 bp, Artificial
  Probe
aagctctggaggtgctgagcccccg

SEQ ID NO: 335282 - DNA, 25 bp, Artificial
  Probe
actacgccaaggacgcgggtgtgcc

SEQ ID NO: 335283 - DNA, 25 bp, Artificial
  Probe
ggctgggtccccagaacaagaacca

SEQ ID NO: 335284 - DNA, 25 bp, Artificial
  Probe
cctacggcacccttgtggctttctg

SEQ ID NO: 335285 - DNA, 25 bp, Artificial
  Probe
ggctctacttcgagcggcgacggcc

SEQ ID NO: 335286 - DNA, 25 bp, Artificial
  Probe
ctggggtactcacaggcctgggcct

SEQ ID NO: 335287 - DNA, 25 bp, Artificial
  Probe
tcctggagctgtacctgacggctgg

SEQ ID NO: 335288 - DNA, 25 bp, Artificial
  Probe
cattgggcctagtgctgctcgtgga

SEQ ID NO: 335289 - DNA, 25 bp, Artificial
  Probe
gcggcttcctgctgtttggcggtct

SEQ ID NO: 335290 - DNA, 25 bp, Artificial
  Probe
gccttcggcctctcctatggcatgg

SEQ ID NO: 335291 - DNA, 25 bp, Artificial
  Probe
caggcagcccggtgtttctgtccac

SEQ ID NO: 335292 - DNA, 25 bp, Artificial
  Probe
ccagcactgaggagccgggcagcct

SEQ ID NO: 335293 - DNA, 25 bp, Artificial
  Probe
cggcctctcctatggcatggtgggc

SEQ ID NO: 335294 - DNA, 25 bp, Artificial
  Probe
ttgtccagcatcctcgtgacgcgct

SEQ ID NO: 335295 - DNA, 25 bp, Artificial
  Probe
atgctctgaagaactatgaaatcat

SEQ ID NO: 335296 - DNA, 25 bp, Artificial
  Probe
tggtctcttgggaacccaatatgtt

SEQ ID NO: 335297 - DNA, 25 bp, Artificial
  Probe
ccatgaggcacgaggccagaaggca

SEQ ID NO: 335298 - DNA, 25 bp, Artificial
  Probe
tactcacaggcctgggcctggctct

SEQ ID NO: 335299 - DNA, 25 bp, Artificial
  Probe
cccagaacaagaaccagaggaggag

SEQ ID NO: 335300 - DNA, 25 bp, Artificial
  Probe
gattctggcttcctttgcctcgcgc

SEQ ID NO: 335301 - DNA, 25 bp, Artificial
  Probe
gattagcgctcgtgcgcgctcctac

SEQ ID NO: 335302 - DNA, 25 bp, Artificial
  Probe
tcatcaggtcgatctgctgagggag

SEQ ID NO: 335303 - DNA, 25 bp, Artificial
  Probe
ctgtcgcccagtgatgctggctggt

SEQ ID NO: 335304 - DNA, 25 bp, Artificial
  Probe
tgcctgatgccgaggccgccttctt

SEQ ID NO: 335305 - DNA, 25 bp, Artificial
  Probe
cacgaggccagaaggcatgaaactg

SEQ ID NO: 335306 - DNA, 25 bp, Artificial
  Probe
atgctctacggcacgggccccttgt

SEQ ID NO: 335307 - DNA, 25 bp, Artificial
  Probe
tcgtggacatcgtggcacggccagc

SEQ ID NO: 335308 - DNA, 25 bp, Artificial
  Probe
ccgcttccctagtgcattgggccta

SEQ ID NO: 335309 - DNA, 25 bp, Artificial
  Probe
aggctgagagggactctgagccaat

SEQ ID NO: 335310 - DNA, 25 bp, Artificial
  Probe
gactgctggcttcagcgggcatgat

SEQ ID NO: 335311 - DNA, 25 bp, Artificial
  Probe
ctcgccacaggcagctgctggactt

SEQ ID NO: 335312 - DNA, 25 bp, Artificial
  Probe
tcgcgcctcctggagctgtacctga

SEQ ID NO: 335313 - DNA, 25 bp, Artificial
  Probe
tggctttctgcatcgccttcggcct

SEQ ID NO: 335314 - DNA, 25 bp, Artificial
  Probe
atctcttcagcctggccttgttggc

SEQ ID NO: 335315 - DNA, 25 bp, Artificial
  Probe
aggcagtgcctgagctggatcacga

SEQ ID NO: 335316 - DNA, 25 bp, Artificial
  Probe
cgagtccataggtggccatgaggca

SEQ ID NO: 335317 - DNA, 25 bp, Artificial
  Probe
gtgtttctgtccacgctgtcgcctc

SEQ ID NO: 335318 - DNA, 25 bp, Artificial
  Probe
ctgtggggctgtcatgcgtccgccc

SEQ ID NO: 335319 - DNA, 25 bp, Artificial
  Probe
tcctgatggcgctcgggctctttgt

SEQ ID NO: 335320 - DNA, 25 bp, Artificial
  Probe
agccgggcagccttgaagctctgga

SEQ ID NO: 335321 - DNA, 25 bp, Artificial
  Probe
gcttcctctctgagggcctggtaca

SEQ ID NO: 335322 - DNA, 25 bp, Artificial
  Probe
ccagcggctaattgggagttgccag

SEQ ID NO: 335323 - DNA, 25 bp, Artificial
  Probe
ttgtatgcatggtaacagcacctgc

SEQ ID NO: 335324 - DNA, 25 bp, Artificial
  Probe
tccctgcgtgcctttgggaaaaccg

SEQ ID NO: 335325 - DNA, 25 bp, Artificial
  Probe
tgtttcccggtgttcagggcctgga

SEQ ID NO: 335326 - DNA, 25 bp, Artificial
  Probe
aggcctccagatctctttgcactgt

SEQ ID NO: 335327 - DNA, 25 bp, Artificial
  Probe
tttcccggtgttcagggcctggaag

SEQ ID NO: 335328 - DNA, 25 bp, Artificial
  Probe
ccagtccctgcgtgcctttgggaaa

SEQ ID NO: 335329 - DNA, 25 bp, Artificial
  Probe
gttcccagagcactccctggacatt

SEQ ID NO: 335330 - DNA, 25 bp, Artificial
  Probe
atcgtgtactcgtgtgtctgcctag

SEQ ID NO: 335331 - DNA, 25 bp, Artificial
  Probe
tgttcattttcagtagaatccgggt

SEQ ID NO: 335332 - DNA, 25 bp, Artificial
  Probe
gcgcagccacccagcaaagttgcag

SEQ ID NO: 335333 - DNA, 25 bp, Artificial
  Probe
tcattttcagtagaatccgggtgtt

SEQ ID NO: 335334 - DNA, 25 bp, Artificial
  Probe
ctaattgggagttgccagtccctgc

SEQ ID NO: 335335 - DNA, 25 bp, Artificial
  Probe
cgtgtgtctgcctagatcctgtgtg

SEQ ID NO: 335336 - DNA, 25 bp, Artificial
  Probe
gcctccagatctctttgcactgtat

SEQ ID NO: 335337 - DNA, 25 bp, Artificial
  Probe
cggctaattgggagttgccagtccc

SEQ ID NO: 335338 - DNA, 25 bp, Artificial
  Probe
cagagcactccctggacatttacat

SEQ ID NO: 335339 - DNA, 25 bp, Artificial
  Probe
ttcattttcagtagaatccgggtgt

SEQ ID NO: 335340 - DNA, 25 bp, Artificial
  Probe
gcagtgacttcaccagcggctaatt

SEQ ID NO: 335341 - DNA, 25 bp, Artificial
  Probe
gcagccacccagcaaagttgcagtg

SEQ ID NO: 335342 - DNA, 25 bp, Artificial
  Probe
gtgggcgcagccacccagcaaagtt

SEQ ID NO: 335343 - DNA, 25 bp, Artificial
  Probe
aaggctgttcattttcagtagaatc

SEQ ID NO: 335344 - DNA, 25 bp, Artificial
  Probe
agttgtatgcatggtaacagcacct

SEQ ID NO: 335345 - DNA, 25 bp, Artificial
  Probe
taggcctccagatctctttgcactg

SEQ ID NO: 335346 - DNA, 25 bp, Artificial
  Probe
cgcagccacccagcaaagttgcagt

SEQ ID NO: 335347 - DNA, 25 bp, Artificial
  Probe
gcctggaagcagaggtcgcgcaccc

SEQ ID NO: 335348 - DNA, 25 bp, Artificial
  Probe
cccagcaaagttgcagtgacttcac

SEQ ID NO: 335349 - DNA, 25 bp, Artificial
  Probe
tactcgtgtgtctgcctagatcctg

SEQ ID NO: 335350 - DNA, 25 bp, Artificial
  Probe
ttcccggtgttcagggcctggaagc

SEQ ID NO: 335351 - DNA, 25 bp, Artificial
  Probe
ttcaccagcggctaattgggagttg

SEQ ID NO: 335352 - DNA, 25 bp, Artificial
  Probe
gtgtgtctgcctagatcctgtgtgc

SEQ ID NO: 335353 - DNA, 25 bp, Artificial
  Probe
agagcactccctggacatttacata

SEQ ID NO: 335354 - DNA, 25 bp, Artificial
  Probe
caaagttgcagtgacttcaccagcg

SEQ ID NO: 335355 - DNA, 25 bp, Artificial
  Probe
ttcccagagcactccctggacattt

SEQ ID NO: 335356 - DNA, 25 bp, Artificial
  Probe
acgcgcaatcgtgtactcgtgtgtc

SEQ ID NO: 335357 - DNA, 25 bp, Artificial
  Probe
agtgacttcaccagcggctaattgg

SEQ ID NO: 335358 - DNA, 25 bp, Artificial
  Probe
ttgggagttgccagtccctgcgtgc

SEQ ID NO: 335359 - DNA, 25 bp, Artificial
  Probe
cattttcagtagaatccgggtgttt

SEQ ID NO: 335360 - DNA, 25 bp, Artificial
  Probe
tgtctgcctagatcctgtgtgctct

SEQ ID NO: 335361 - DNA, 25 bp, Artificial
  Probe
cagtgacttcaccagcggctaattg

SEQ ID NO: 335362 - DNA, 25 bp, Artificial
  Probe
gttgccagtccctgcgtgcctttgg

SEQ ID NO: 335363 - DNA, 25 bp, Artificial
  Probe
gggagttgccagtccctgcgtgcct

SEQ ID NO: 335364 - DNA, 25 bp, Artificial
  Probe
tgtgtctgcctagatcctgtgtgct

SEQ ID NO: 335365 - DNA, 25 bp, Artificial
  Probe
caatcgtgtactcgtgtgtctgcct

SEQ ID NO: 335366 - DNA, 25 bp, Artificial
  Probe
tgggagttgccagtccctgcgtgcc

SEQ ID NO: 335367 - DNA, 25 bp, Artificial
  Probe
gcacgcgcaatcgtgtactcgtgtg

SEQ ID NO: 335368 - DNA, 25 bp, Artificial
  Probe
ctctcttggctctggccagcatggc

SEQ ID NO: 335369 - DNA, 25 bp, Artificial
  Probe
gagcggaatgcatgcctggaaatgc

SEQ ID NO: 335370 - DNA, 25 bp, Artificial
  Probe
ggtacccggcgtcacctctatgatc

SEQ ID NO: 335371 - DNA, 25 bp, Artificial
  Probe
tatcaacaagctccagccgggatct

SEQ ID NO: 335372 - DNA, 25 bp, Artificial
  Probe
gtaaagaacaagctggcccagaaat

SEQ ID NO: 335373 - DNA, 25 bp, Artificial
  Probe
gaactggcaccagctggagaacata

SEQ ID NO: 335374 - DNA, 25 bp, Artificial
  Probe
tgggtgtccccaacaacacccaaag

SEQ ID NO: 335375 - DNA, 25 bp, Artificial
  Probe
acaggccgccgcatcgggagcaact

SEQ ID NO: 335376 - DNA, 25 bp, Artificial
  Probe
tcagcagggcatgacagcctatggt

SEQ ID NO: 335377 - DNA, 25 bp, Artificial
  Probe
ggacgggatcattctttgcgaattt

SEQ ID NO: 335378 - DNA, 25 bp, Artificial
  Probe
acgtcagcttgcagatgggcagcaa

SEQ ID NO: 335379 - DNA, 25 bp, Artificial
  Probe
catgacggtgtatgggctgccccgc

SEQ ID NO: 335380 - DNA, 25 bp, Artificial
  Probe
accagctggagaacataggaaattt

SEQ ID NO: 335381 - DNA, 25 bp, Artificial
  Probe
ggctgctgctcttggctggacccag

SEQ ID NO: 335382 - DNA, 25 bp, Artificial
  Probe
acgcagtttggttttgcagtgactg

SEQ ID NO: 335383 - DNA, 25 bp, Artificial
  Probe
gacagcctatggtacccggcgtcac

SEQ ID NO: 335384 - DNA, 25 bp, Artificial
  Probe
gctggctgctgctcttggctggacc

SEQ ID NO: 335385 - DNA, 25 bp, Artificial
  Probe
gggatcattctttgcgaatttatca

SEQ ID NO: 335386 - DNA, 25 bp, Artificial
  Probe
ctgtctgctgaggtaaagaacaagc

SEQ ID NO: 335387 - DNA, 25 bp, Artificial
  Probe
gcaactatcagtctacagatgggta

SEQ ID NO: 335388 - DNA, 25 bp, Artificial
  Probe
ggcgtcacctctatgatcccaaact

SEQ ID NO: 335389 - DNA, 25 bp, Artificial
  Probe
gcctgaccccggaatatccagagct

SEQ ID NO: 335390 - DNA, 25 bp, Artificial
  Probe
ccaccagcgtgagcaggagctgaga

SEQ ID NO: 335391 - DNA, 25 bp, Artificial
  Probe
catagaattgggtgtccccaacaac

SEQ ID NO: 335392 - DNA, 25 bp, Artificial
  Probe
actgcaccgggcaccaagcggcaga

SEQ ID NO: 335393 - DNA, 25 bp, Artificial
  Probe
atatccagagctggacgagcccacc

SEQ ID NO: 335394 - DNA, 25 bp, Artificial
  Probe
cagtttggttttgcagtgactggcg

SEQ ID NO: 335395 - DNA, 25 bp, Artificial
  Probe
atggcctcaaggacgggatcattct

SEQ ID NO: 335396 - DNA, 25 bp, Artificial
  Probe
ccaagtactgcctgaccccggaata

SEQ ID NO: 335397 - DNA, 25 bp, Artificial
  Probe
acacaagttcagtctactctcttgg

SEQ ID NO: 335398 - DNA, 25 bp, Artificial
  Probe
tcccaaactgggtacagatcaaccc

SEQ ID NO: 335399 - DNA, 25 bp, Artificial
  Probe
ctgagtaaagccatttcagcttccc

SEQ ID NO: 335400 - DNA, 25 bp, Artificial
  Probe
tgagtaaagccatttcagcttcccc

SEQ ID NO: 335401 - DNA, 25 bp, Artificial
  Probe
aaggtcaatgagtcaacccagaact

SEQ ID NO: 335402 - DNA, 25 bp, Artificial
  Probe
catgacagcctatggtacccggcgt

SEQ ID NO: 335403 - DNA, 25 bp, Artificial
  Probe
cgaatttatcaacaagctccagccg

SEQ ID NO: 335404 - DNA, 25 bp, Artificial
  Probe
tggtacccggcgtcacctctatgat

SEQ ID NO: 335405 - DNA, 25 bp, Artificial
  Probe
caggaacatcattggcctacagatg

SEQ ID NO: 335406 - DNA, 25 bp, Artificial
  Probe
aagtactgcctgaccccggaatatc

SEQ ID NO: 335407 - DNA, 25 bp, Artificial
  Probe
cccgccaggtgtatgatcccaagta

SEQ ID NO: 335408 - DNA, 25 bp, Artificial
  Probe
tatgatcccaagtactgcctgaccc

SEQ ID NO: 335409 - DNA, 25 bp, Artificial
  Probe
tggatgtgacagcagcgtttgtaac

SEQ ID NO: 335410 - DNA, 25 bp, Artificial
  Probe
gcaggaacatcattggcctacagat

SEQ ID NO: 335411 - DNA, 25 bp, Artificial
  Probe
tcaacccagaactggcaccagctgg

SEQ ID NO: 335412 - DNA, 25 bp, Artificial
  Probe
taaagaacaagctggcccagaaata

SEQ ID NO: 335413 - DNA, 25 bp, Artificial
  Probe
catgcctggaaatgcagtggacaca

SEQ ID NO: 335414 - DNA, 25 bp, Artificial
  Probe
gatcttgctggatgtggtccagttc

SEQ ID NO: 335415 - DNA, 25 bp, Artificial
  Probe
ccaaagatttgtctgccatcctctg

SEQ ID NO: 335416 - DNA, 25 bp, Artificial
  Probe
ctctgtcatgatggaatcttggtgg

SEQ ID NO: 335417 - DNA, 25 bp, Artificial
  Probe
accttcgagggctggctgctgatca

SEQ ID NO: 335418 - DNA, 25 bp, Artificial
  Probe
ccaaaggctcttgcagaggactcag

SEQ ID NO: 335419 - DNA, 25 bp, Artificial
  Probe
cgggaattcttaaactcttgagaga

SEQ ID NO: 335420 - DNA, 25 bp, Artificial
  Probe
gctgatcaaggcacagcacggaacc

SEQ ID NO: 335421 - DNA, 25 bp, Artificial
  Probe
cgaaaccaaagatttgtctgccatc

SEQ ID NO: 335422 - DNA, 25 bp, Artificial
  Probe
tttttgattcctgttcatgccatag

SEQ ID NO: 335423 - DNA, 25 bp, Artificial
  Probe
aggatccattagagaccaagtgaaa

SEQ ID NO: 335424 - DNA, 25 bp, Artificial
  Probe
tccagaccttcgagggctggctgct

SEQ ID NO: 335425 - DNA, 25 bp, Artificial
  Probe
gaagctcgaggcttagaagactgca

SEQ ID NO: 335426 - DNA, 25 bp, Artificial
  Probe
atcgaggacctgaggaaagccagag

SEQ ID NO: 335427 - DNA, 25 bp, Artificial
  Probe
gactgcagactggatcatgctctat

SEQ ID NO: 335428 - DNA, 25 bp, Artificial
  Probe
tttatatcacggagtttcaccagac

SEQ ID NO: 335429 - DNA, 25 bp, Artificial
  Probe
catcgagaccccagtgcgttatcag

SEQ ID NO: 335430 - DNA, 25 bp, Artificial
  Probe
tcttgcagaggactcagactccgcc

SEQ ID NO: 335431 - DNA, 25 bp, Artificial
  Probe
gcttagaagactgcagactggatca

SEQ ID NO: 335432 - DNA, 25 bp, Artificial
  Probe
atcatgctctatacgcactgcccgg

SEQ ID NO: 335433 - DNA, 25 bp, Artificial
  Probe
ccagtgcgttatcaggaagagtttg

SEQ ID NO: 335434 - DNA, 25 bp, Artificial
  Probe
gaacacgggtttatatcacggagtt

SEQ ID NO: 335435 - DNA, 25 bp, Artificial
  Probe
agttcctgcccgaggacatcatcat

SEQ ID NO: 335436 - DNA, 25 bp, Artificial
  Probe
cacaccaaaggctcttgcagaggac

SEQ ID NO: 335437 - DNA, 25 bp, Artificial
  Probe
cgggccaaccatcgaggacctgagg

SEQ ID NO: 335438 - DNA, 25 bp, Artificial
  Probe
cacgggtttatatcacggagtttca

SEQ ID NO: 335439 - DNA, 25 bp, Artificial
  Probe
cccgtttccagatcttgctggatgt

SEQ ID NO: 335440 - DNA, 25 bp, Artificial
  Probe
gttcctgcccgaggacatcatcatc

SEQ ID NO: 335441 - DNA, 25 bp, Artificial
  Probe
cttgcagaggactcagactccgccg

SEQ ID NO: 335442 - DNA, 25 bp, Artificial
  Probe
agggctggctgctgatcaaggcaca

SEQ ID NO: 335443 - DNA, 25 bp, Artificial
  Probe
ttagaagactgcagactggatcatg

SEQ ID NO: 335444 - DNA, 25 bp, Artificial
  Probe
agtcgaaaccaaagatttgtctgcc

SEQ ID NO: 335445 - DNA, 25 bp, Artificial
  Probe
gtggtccagttcctgcccgaggaca

SEQ ID NO: 335446 - DNA, 25 bp, Artificial
  Probe
tcaaggcacagcacggaaccagaat

SEQ ID NO: 335447 - DNA, 25 bp, Artificial
  Probe
ctgccagatggagtcgaaaccaaag

SEQ ID NO: 335448 - DNA, 25 bp, Artificial
  Probe
tccattagagaccaagtgaaaactt

SEQ ID NO: 335449 - DNA, 25 bp, Artificial
  Probe
cacggaaccagaatggacgaacacg

SEQ ID NO: 335450 - DNA, 25 bp, Artificial
  Probe
aagccagaggcacaccaaaggctct

SEQ ID NO: 335451 - DNA, 25 bp, Artificial
  Probe
ggctgctgatcaaggcacagcacgg

SEQ ID NO: 335452 - DNA, 25 bp, Artificial
  Probe
gctcgaggcttagaagactgcagac

SEQ ID NO: 335453 - DNA, 25 bp, Artificial
  Probe
gattcctgttcatgccataggagaa

SEQ ID NO: 335454 - DNA, 25 bp, Artificial
  Probe
gacagtacaaactgccagatggagt

SEQ ID NO: 335455 - DNA, 25 bp, Artificial
  Probe
gatttgtctgccatcctctgtcatg

SEQ ID NO: 335456 - DNA, 25 bp, Artificial
  Probe
gaggcacctcatcgagaccccagtg

SEQ ID NO: 335457 - DNA, 25 bp, Artificial
  Probe
gacgaacacgggtttatatcacgga

SEQ ID NO: 335458 - DNA, 25 bp, Artificial
  Probe
ctgttcatgccataggagaaagaag

SEQ ID NO: 335459 - DNA, 25 bp, Artificial
  Probe
ccagaatggacgaacacgggtttat

SEQ ID NO: 335460 - DNA, 25 bp, Artificial
  Probe
ggcctacctccagtagttacaagca

SEQ ID NO: 335461 - DNA, 25 bp, Artificial
  Probe
ggtattgcaccctttatttctctag

SEQ ID NO: 335462 - DNA, 25 bp, Artificial
  Probe
cctaggcctacctccagtagttaca

SEQ ID NO: 335463 - DNA, 25 bp, Artificial
  Probe
ttcatacggggtctctttccggtct

SEQ ID NO: 335464 - DNA, 25 bp, Artificial
  Probe
acacacctccattttcatacggggt

SEQ ID NO: 335465 - DNA, 25 bp, Artificial
  Probe
ctggtccatttaatgatgtaacttt

SEQ ID NO: 335466 - DNA, 25 bp, Artificial
  Probe
tctggtccatttaatgatgtaactt

SEQ ID NO: 335467 - DNA, 25 bp, Artificial
  Probe
attctggtccatttaatgatgtaac

SEQ ID NO: 335468 - DNA, 25 bp, Artificial
  Probe
gaacacacctccattttcatacggg

SEQ ID NO: 335469 - DNA, 25 bp, Artificial
  Probe
caacaaaagaacactgattgtaatg

SEQ ID NO: 335470 - DNA, 25 bp, Artificial
  Probe
tccttctcatggtggcactcctgtg

SEQ ID NO: 335471 - DNA, 25 bp, Artificial
  Probe
tctcatggtggcactcctgtgccct

SEQ ID NO: 335472 - DNA, 25 bp, Artificial
  Probe
atctgttattctggtccatttaatg

SEQ ID NO: 335473 - DNA, 25 bp, Artificial
  Probe
gccaacaaaagaacactgattgtaa

SEQ ID NO: 335474 - DNA, 25 bp, Artificial
  Probe
gacacacatgggactttccttccct

SEQ ID NO: 335475 - DNA, 25 bp, Artificial
  Probe
acctccattttcatacggggtctct

SEQ ID NO: 335476 - DNA, 25 bp, Artificial
  Probe
ccagtagttacaagcaggggcaaga

SEQ ID NO: 335477 - DNA, 25 bp, Artificial
  Probe
ctgttattctggtccatttaatgat

SEQ ID NO: 335478 - DNA, 25 bp, Artificial
  Probe
tagctaccctggacccatgctgcag

SEQ ID NO: 335479 - DNA, 25 bp, Artificial
  Probe
agatctgttattctggtccatttaa

SEQ ID NO: 335480 - DNA, 25 bp, Artificial
  Probe
tactctccttctcatggtggcactc

SEQ ID NO: 335481 - DNA, 25 bp, Artificial
  Probe
ccgttactctccttctcatggtggc

SEQ ID NO: 335482 - DNA, 25 bp, Artificial
  Probe
ggcaagatctgttattctggtccat

SEQ ID NO: 335483 - DNA, 25 bp, Artificial
  Probe
tcaatgtccccaaagggttaaattg

SEQ ID NO: 335484 - DNA, 25 bp, Artificial
  Probe
accgttactctccttctcatggtgg

SEQ ID NO: 335485 - DNA, 25 bp, Artificial
  Probe
gtagttacaagcaggggcaagatct

SEQ ID NO: 335486 - DNA, 25 bp, Artificial
  Probe
tcgtggccctgaactctcttccaaa

SEQ ID NO: 335487 - DNA, 25 bp, Artificial
  Probe
gatgccaacaaaagaacactgattg

SEQ ID NO: 335488 - DNA, 25 bp, Artificial
  Probe
ttctggtccatttaatgatgtaact

SEQ ID NO: 335489 - DNA, 25 bp, Artificial
  Probe
ttactctccttctcatggtggcact

SEQ ID NO: 335490 - DNA, 25 bp, Artificial
  Probe
acctccagtagttacaagcaggggc

SEQ ID NO: 335491 - DNA, 25 bp, Artificial
  Probe
gtggccctgaactctcttccaaatg

SEQ ID NO: 335492 - DNA, 25 bp, Artificial
  Probe
ctcatggtggcactcctgtgccctg

SEQ ID NO: 335493 - DNA, 25 bp, Artificial
  Probe
ctacctccagtagttacaagcaggg

SEQ ID NO: 335494 - DNA, 25 bp, Artificial
  Probe
tacctccagtagttacaagcagggg

SEQ ID NO: 335495 - DNA, 25 bp, Artificial
  Probe
tctccttctcatggtggcactcctg

SEQ ID NO: 335496 - DNA, 25 bp, Artificial
  Probe
caagcaggggcaagatctgttattc

SEQ ID NO: 335497 - DNA, 25 bp, Artificial
  Probe
taccgttactctccttctcatggtg

SEQ ID NO: 335498 - DNA, 25 bp, Artificial
  Probe
ggccctgaactctcttccaaatgtt

SEQ ID NO: 335499 - DNA, 25 bp, Artificial
  Probe
acagacccaggcacattcccgtagt

SEQ ID NO: 335500 - DNA, 25 bp, Artificial
  Probe
ctccattttcatacggggtctcttt

SEQ ID NO: 335501 - DNA, 25 bp, Artificial
  Probe
catacggggtctctttccggtcttg

SEQ ID NO: 335502 - DNA, 25 bp, Artificial
  Probe
tggtggcactcctgtgccctgcctt

SEQ ID NO: 335503 - DNA, 25 bp, Artificial
  Probe
taggcctacctccagtagttacaag

SEQ ID NO: 335504 - DNA, 25 bp, Artificial
  Probe
acaagcaggggcaagatctgttatt

SEQ ID NO: 335505 - DNA, 25 bp, Artificial
  Probe
cacctccattttcatacggggtctc

SEQ ID NO: 335506 - DNA, 25 bp, Artificial
  Probe
atctgtgggtccttccagggcctga

SEQ ID NO: 335507 - DNA, 25 bp, Artificial
  Probe
tgtccccatctgtgggtccttccag

SEQ ID NO: 335508 - DNA, 25 bp, Artificial
  Probe
tccctgttgactcctggcattccaa

SEQ ID NO: 335509 - DNA, 25 bp, Artificial
  Probe
cccagagagggctcagcctagaggc

SEQ ID NO: 335510 - DNA, 25 bp, Artificial
  Probe
cttctgcctgtggtcatctgtctgt

SEQ ID NO: 335511 - DNA, 25 bp, Artificial
  Probe
agcatttcagtgtcggtcacatttt

SEQ ID NO: 335512 - DNA, 25 bp, Artificial
  Probe
tcagatgaagcacaaggaggtctta

SEQ ID NO: 335513 - DNA, 25 bp, Artificial
  Probe
tgaagcacaaggaggtcttatctgc

SEQ ID NO: 335514 - DNA, 25 bp, Artificial
  Probe
cggtcacattttaaactgatcagcc

SEQ ID NO: 335515 - DNA, 25 bp, Artificial
  Probe
tgtctcttctagtcctctcttctgg

SEQ ID NO: 335516 - DNA, 25 bp, Artificial
  Probe
gcaggctccctgttgactcctggca

SEQ ID NO: 335517 - DNA, 25 bp, Artificial
  Probe
ggctccctgttgactcctggcattc

SEQ ID NO: 335518 - DNA, 25 bp, Artificial
  Probe
ggtcatctgtctgtccatcagccca

SEQ ID NO: 335519 - DNA, 25 bp, Artificial
  Probe
ggaacaaagaccagggcatatgtgt

SEQ ID NO: 335520 - DNA, 25 bp, Artificial
  Probe
tctcctcagcttggtgctctcactt

SEQ ID NO: 335521 - DNA, 25 bp, Artificial
  Probe
tttcagtgtcggtcacattttaaac

SEQ ID NO: 335522 - DNA, 25 bp, Artificial
  Probe
cttgaaagctctaggccccgcaggc

SEQ ID NO: 335523 - DNA, 25 bp, Artificial
  Probe
caaggccagctgagaaagagcagga

SEQ ID NO: 335524 - DNA, 25 bp, Artificial
  Probe
ccgggcccagagagggctcagccta

SEQ ID NO: 335525 - DNA, 25 bp, Artificial
  Probe
tgatcagcctttgtacaatgttttt

SEQ ID NO: 335526 - DNA, 25 bp, Artificial
  Probe
cctcagcctgggtgacatcacagca

SEQ ID NO: 335527 - DNA, 25 bp, Artificial
  Probe
ggcctgagatcaatgtctcttctag

SEQ ID NO: 335528 - DNA, 25 bp, Artificial
  Probe
tcttctagtcctctcttctgggcct

SEQ ID NO: 335529 - DNA, 25 bp, Artificial
  Probe
gcacaaggaggtcttatctgcccct

SEQ ID NO: 335530 - DNA, 25 bp, Artificial
  Probe
cagagagggctcagcctagaggctt

SEQ ID NO: 335531 - DNA, 25 bp, Artificial
  Probe
gagatcaatgtctcttctagtcctc

SEQ ID NO: 335532 - DNA, 25 bp, Artificial
  Probe
cctggcattccaaggccagctgaga

SEQ ID NO: 335533 - DNA, 25 bp, Artificial
  Probe
cctgttgactcctggcattccaagg

SEQ ID NO: 335534 - DNA, 25 bp, Artificial
  Probe
cagcctagaggcttccaatcttgga

SEQ ID NO: 335535 - DNA, 25 bp, Artificial
  Probe
ttccaatcttggattcttctgcctg

SEQ ID NO: 335536 - DNA, 25 bp, Artificial
  Probe
ggctgggtctgtgtccccatctgtg

SEQ ID NO: 335537 - DNA, 25 bp, Artificial
  Probe
gcttccaatcttggattcttctgcc

SEQ ID NO: 335538 - DNA, 25 bp, Artificial
  Probe
tctcttctagtcctctcttctgggc

SEQ ID NO: 335539 - DNA, 25 bp, Artificial
  Probe
gtctgtgtccccatctgtgggtcct

SEQ ID NO: 335540 - DNA, 25 bp, Artificial
  Probe
gtgtccccatctgtgggtccttcca

SEQ ID NO: 335541 - DNA, 25 bp, Artificial
  Probe
cacaaggaggtcttatctgcccctg

SEQ ID NO: 335542 - DNA, 25 bp, Artificial
  Probe
ccagggcctgagatcaatgtctctt

SEQ ID NO: 335543 - DNA, 25 bp, Artificial
  Probe
ccttccagggcctgagatcaatgtc

SEQ ID NO: 335544 - DNA, 25 bp, Artificial
  Probe
cattccaaggccagctgagaaagag

SEQ ID NO: 335545 - DNA, 25 bp, Artificial
  Probe
aactgatcagcctttgtacaatgtt

SEQ ID NO: 335546 - DNA, 25 bp, Artificial
  Probe
ttgactcctggcattccaaggccag

SEQ ID NO: 335547 - DNA, 25 bp, Artificial
  Probe
actcctggcattccaaggccagctg

SEQ ID NO: 335548 - DNA, 25 bp, Artificial
  Probe
ctggctgggtctgtgtccccatctg

SEQ ID NO: 335549 - DNA, 25 bp, Artificial
  Probe
cttggattcttctgcctgtggtcat

SEQ ID NO: 335550 - DNA, 25 bp, Artificial
  Probe
ggctcagcctagaggcttccaatct

SEQ ID NO: 335551 - DNA, 25 bp, Artificial
  Probe
gagggctcagcctagaggcttccaa

SEQ ID NO: 335552 - DNA, 25 bp, Artificial
  Probe
gtgtacatagtgctctgtgagacct

SEQ ID NO: 335553 - DNA, 25 bp, Artificial
  Probe
tactgagattaaacccaaggctacc

SEQ ID NO: 335554 - DNA, 25 bp, Artificial
  Probe
cggccatcagcttgggctatgctaa

SEQ ID NO: 335555 - DNA, 25 bp, Artificial
  Probe
cttgggctatgctaacagctgcctg

SEQ ID NO: 335556 - DNA, 25 bp, Artificial
  Probe
cgaaaacgcttggtgttgtcagtga

SEQ ID NO: 335557 - DNA, 25 bp, Artificial
  Probe
tgcctgaacccctttgtgtacatag

SEQ ID NO: 335558 - DNA, 25 bp, Artificial
  Probe
cgcacggtcagcaacgctcagacag

SEQ ID NO: 335559 - DNA, 25 bp, Artificial
  Probe
acccctttgtgtacatagtgctctg

SEQ ID NO: 335560 - DNA, 25 bp, Artificial
  Probe
taacagctgcctgaacccctttgtg

SEQ ID NO: 335561 - DNA, 25 bp, Artificial
  Probe
gcttggtgttgtcagtgaagcctgc

SEQ ID NO: 335562 - DNA, 25 bp, Artificial
  Probe
agcaaaggcacctgacaattcccca

SEQ ID NO: 335563 - DNA, 25 bp, Artificial
  Probe
acgctcagacagctgatgaggagag

SEQ ID NO: 335564 - DNA, 25 bp, Artificial
  Probe
tcagacagctgatgaggagaggaca

SEQ ID NO: 335565 - DNA, 25 bp, Artificial
  Probe
ccaaggctaccctgggagaatgcag

SEQ ID NO: 335566 - DNA, 25 bp, Artificial
  Probe
gcacggtcagcaacgctcagacagc

SEQ ID NO: 335567 - DNA, 25 bp, Artificial
  Probe
ctaccctgggagaatgcagaggctg

SEQ ID NO: 335568 - DNA, 25 bp, Artificial
  Probe
agcttgggctatgctaacagctgcc

SEQ ID NO: 335569 - DNA, 25 bp, Artificial
  Probe
ttggtgttgtcagtgaagcctgcag

SEQ ID NO: 335570 - DNA, 25 bp, Artificial
  Probe
gcctgaacccctttgtgtacatagt

SEQ ID NO: 335571 - DNA, 25 bp, Artificial
  Probe
ttgtgtacatagtgctctgtgagac

SEQ ID NO: 335572 - DNA, 25 bp, Artificial
  Probe
cagtgaagcctgcagcccaggggca

SEQ ID NO: 335573 - DNA, 25 bp, Artificial
  Probe
tttcgaaaacgcttggtgttgtcag

SEQ ID NO: 335574 - DNA, 25 bp, Artificial
  Probe
gacctttcgaaaacgcttggtgttg

SEQ ID NO: 335575 - DNA, 25 bp, Artificial
  Probe
ttcgaaaacgcttggtgttgtcagt

SEQ ID NO: 335576 - DNA, 25 bp, Artificial
  Probe
aaggcacctgacaattccccagtcg

SEQ ID NO: 335577 - DNA, 25 bp, Artificial
  Probe
tcagcaacgctcagacagctgatga

SEQ ID NO: 335578 - DNA, 25 bp, Artificial
  Probe
gctaccctgggagaatgcagaggct

SEQ ID NO: 335579 - DNA, 25 bp, Artificial
  Probe
ggggcttgtagcaaccacattccac

SEQ ID NO: 335580 - DNA, 25 bp, Artificial
  Probe
gagacctttcgaaaacgcttggtgt

SEQ ID NO: 335581 - DNA, 25 bp, Artificial
  Probe
tcagtgaagcctgcagcccaggggc

SEQ ID NO: 335582 - DNA, 25 bp, Artificial
  Probe
aacgcttggtgttgtcagtgaagcc

SEQ ID NO: 335583 - DNA, 25 bp, Artificial
  Probe
gagattaaacccaaggctaccctgg

SEQ ID NO: 335584 - DNA, 25 bp, Artificial
  Probe
tctgtgagacctttcgaaaacgctt

SEQ ID NO: 335585 - DNA, 25 bp, Artificial
  Probe
gaaagcaaaggcacctgacaattcc

SEQ ID NO: 335586 - DNA, 25 bp, Artificial
  Probe
atactgagattaaacccaaggctac

SEQ ID NO: 335587 - DNA, 25 bp, Artificial
  Probe
atcagcttgggctatgctaacagct

SEQ ID NO: 335588 - DNA, 25 bp, Artificial
  Probe
tacatagtgctctgtgagacctttc

SEQ ID NO: 335589 - DNA, 25 bp, Artificial
  Probe
tgttgtcagtgaagcctgcagccca

SEQ ID NO: 335590 - DNA, 25 bp, Artificial
  Probe
ctgaacccctttgtgtacatagtgc

SEQ ID NO: 335591 - DNA, 25 bp, Artificial
  Probe
ctcagacagctgatgaggagaggac

SEQ ID NO: 335592 - DNA, 25 bp, Artificial
  Probe
gggcagctccgcacggtcagcaacg

SEQ ID NO: 335593 - DNA, 25 bp, Artificial
  Probe
gtgagacctttcgaaaacgcttggt

SEQ ID NO: 335594 - DNA, 25 bp, Artificial
  Probe
aaaggcacctgacaattccccagtc

SEQ ID NO: 335595 - DNA, 25 bp, Artificial
  Probe
ctttgtgtacatagtgctctgtgag

SEQ ID NO: 335596 - DNA, 25 bp, Artificial
  Probe
aaacgcttggtgttgtcagtgaagc

SEQ ID NO: 335597 - DNA, 25 bp, Artificial
  Probe
ggtgttgtcagtgaagcctgcagcc

SEQ ID NO: 335598 - DNA, 25 bp, Artificial
  Probe
ccttcaggacagagggttatctctt

SEQ ID NO: 335599 - DNA, 25 bp, Artificial
  Probe
ctggtcaggtgtgttgattgtaccg

SEQ ID NO: 335600 - DNA, 25 bp, Artificial
  Probe
taccgaaggctcagggtattggtgt

SEQ ID NO: 335601 - DNA, 25 bp, Artificial
  Probe
tcactgtacactacagtggatctgc

SEQ ID NO: 335602 - DNA, 25 bp, Artificial
  Probe
gatgtcccttactcttaggaaattc

SEQ ID NO: 335603 - DNA, 25 bp, Artificial
  Probe
ttgattgtaccgaaggctcagggta

SEQ ID NO: 335604 - DNA, 25 bp, Artificial
  Probe
aggacccaaggctactggtatttct

SEQ ID NO: 335605 - DNA, 25 bp, Artificial
  Probe
acctgatgtcccttactcttaggaa

SEQ ID NO: 335606 - DNA, 25 bp, Artificial
  Probe
cagttcaaggccaagagctaaggac

SEQ ID NO: 335607 - DNA, 25 bp, Artificial
  Probe
gccaagagctaaggacccaaggcta

SEQ ID NO: 335608 - DNA, 25 bp, Artificial
  Probe
agctaaggacccaaggctactggta

SEQ ID NO: 335609 - DNA, 25 bp, Artificial
  Probe
catctcccaggctcagggaggccaa

SEQ ID NO: 335610 - DNA, 25 bp, Artificial
  Probe
gggaaagctccctgcgcactgagcc

SEQ ID NO: 335611 - DNA, 25 bp, Artificial
  Probe
ctggcatctcccaggctcagggagg

SEQ ID NO: 335612 - DNA, 25 bp, Artificial
  Probe
gctctctaccaggacttcgactttt

SEQ ID NO: 335613 - DNA, 25 bp, Artificial
  Probe
tcaaggccaagagctaaggacccaa

SEQ ID NO: 335614 - DNA, 25 bp, Artificial
  Probe
tgctgctctgggtagaaactggtca

SEQ ID NO: 335615 - DNA, 25 bp, Artificial
  Probe
gaaggctcagggtattggtgtcact

SEQ ID NO: 335616 - DNA, 25 bp, Artificial
  Probe
cctttaactcctgtgagtagggtgg

SEQ ID NO: 335617 - DNA, 25 bp, Artificial
  Probe
tactcttaggaaattctatgcatgg

SEQ ID NO: 335618 - DNA, 25 bp, Artificial
  Probe
atctgccagtgtgaagcaggggctc

SEQ ID NO: 335619 - DNA, 25 bp, Artificial
  Probe
tgtgttgattgtaccgaaggctcag

SEQ ID NO: 335620 - DNA, 25 bp, Artificial
  Probe
caggggctctctaccaggacttcga

SEQ ID NO: 335621 - DNA, 25 bp, Artificial
  Probe
ggacttcgacttttcattccctgcc

SEQ ID NO: 335622 - DNA, 25 bp, Artificial
  Probe
tctccatcgaggacgccgcggtgag

SEQ ID NO: 335623 - DNA, 25 bp, Artificial
  Probe
cagagggttatctcttgcatctggg

SEQ ID NO: 335624 - DNA, 25 bp, Artificial
  Probe
gaaatgcatccgaatcttaagttgt

SEQ ID NO: 335625 - DNA, 25 bp, Artificial
  Probe
gcgcactgagcctgctctgtaatct

SEQ ID NO: 335626 - DNA, 25 bp, Artificial
  Probe
tagctgcttatctgccggccagtgc

SEQ ID NO: 335627 - DNA, 25 bp, Artificial
  Probe
caggacttcgacttttcattccctg

SEQ ID NO: 335628 - DNA, 25 bp, Artificial
  Probe
ggtagaaactggtcactgtctccat

SEQ ID NO: 335629 - DNA, 25 bp, Artificial
  Probe
tgagccagttcaaggccaagagcta

SEQ ID NO: 335630 - DNA, 25 bp, Artificial
  Probe
gagagcaaggagtcctccttcagga

SEQ ID NO: 335631 - DNA, 25 bp, Artificial
  Probe
tatctgccggccagtgctgctctgg

SEQ ID NO: 335632 - DNA, 25 bp, Artificial
  Probe
cgctggtcaggtgtgttgattgtac

SEQ ID NO: 335633 - DNA, 25 bp, Artificial
  Probe
ctcagggaggccaaggtgacaaaag

SEQ ID NO: 335634 - DNA, 25 bp, Artificial
  Probe
gctgctctgggtagaaactggtcac

SEQ ID NO: 335635 - DNA, 25 bp, Artificial
  Probe
actgtttgagccagttcaaggccaa

SEQ ID NO: 335636 - DNA, 25 bp, Artificial
  Probe
tctcccaggctcagggaggccaagg

SEQ ID NO: 335637 - DNA, 25 bp, Artificial
  Probe
tgaagcaggggctctctaccaggac

SEQ ID NO: 335638 - DNA, 25 bp, Artificial
  Probe
ttactcttaggaaattctatgcatg

SEQ ID NO: 335639 - DNA, 25 bp, Artificial
  Probe
ccagtgtgaagcaggggctctctac

SEQ ID NO: 335640 - DNA, 25 bp, Artificial
  Probe
gctactggtatttcttaactaagtt

SEQ ID NO: 335641 - DNA, 25 bp, Artificial
  Probe
ctacagtggatctgccagtgtgaag

SEQ ID NO: 335642 - DNA, 25 bp, Artificial
  Probe
tgtaccgaaggctcagggtattggt

SEQ ID NO: 335643 - DNA, 25 bp, Artificial
  Probe
cttgcatctgggaaagctccctgcg

SEQ ID NO: 335644 - DNA, 25 bp, Artificial
  Probe
gcctctaagaaatacatggaagtat

SEQ ID NO: 335645 - DNA, 25 bp, Artificial
  Probe
aagatcgctgcgagtgtgtctgtaa

SEQ ID NO: 335646 - DNA, 25 bp, Artificial
  Probe
tttcaaacagggtctcatgattaca

SEQ ID NO: 335647 - DNA, 25 bp, Artificial
  Probe
tgtgtctgtaaagcaccatgtcctg

SEQ ID NO: 335648 - DNA, 25 bp, Artificial
  Probe
aaattgtcttcttgtttcaaacagg

SEQ ID NO: 335649 - DNA, 25 bp, Artificial
  Probe
ctcttaaaggaacacagacgtttgg

SEQ ID NO: 335650 - DNA, 25 bp, Artificial
  Probe
ctgcagttgctttgaatgcaaagaa

SEQ ID NO: 335651 - DNA, 25 bp, Artificial
  Probe
acaagatgtttcaccctgacacctg

SEQ ID NO: 335652 - DNA, 25 bp, Artificial
  Probe
aagatgagaatccactgcctgggac

SEQ ID NO: 335653 - DNA, 25 bp, Artificial
  Probe
ctgcgagtgtgtctgtaaagcacca

SEQ ID NO: 335654 - DNA, 25 bp, Artificial
  Probe
gcccaagcacactcttaaaggaaca

SEQ ID NO: 335655 - DNA, 25 bp, Artificial
  Probe
ccatgcctgccgtcatgctatcatg

SEQ ID NO: 335656 - DNA, 25 bp, Artificial
  Probe
attgtcttcttgtttcaaacagggt

SEQ ID NO: 335657 - DNA, 25 bp, Artificial
  Probe
atttattggggctcttttctctcag

SEQ ID NO: 335658 - DNA, 25 bp, Artificial
  Probe
acacatgatgtttgatgaagatcgc

SEQ ID NO: 335659 - DNA, 25 bp, Artificial
  Probe
ccgctctctgtggaccacacatgat

SEQ ID NO: 335660 - DNA, 25 bp, Artificial
  Probe
tctctgtggaccacacatgatgttt

SEQ ID NO: 335661 - DNA, 25 bp, Artificial
  Probe
tctggaaagctgttgccaaaagcac

SEQ ID NO: 335662 - DNA, 25 bp, Artificial
  Probe
agaagatcaatgtcctcattccaag

SEQ ID NO: 335663 - DNA, 25 bp, Artificial
  Probe
aaggacatactaacctgatttattg

SEQ ID NO: 335664 - DNA, 25 bp, Artificial
  Probe
tattgccatgcctgccgtcatgcta

SEQ ID NO: 335665 - DNA, 25 bp, Artificial
  Probe
gaagatcaatgtcctcattccaaga

SEQ ID NO: 335666 - DNA, 25 bp, Artificial
  Probe
tctcagggcccaagcacactcttaa

SEQ ID NO: 335667 - DNA, 25 bp, Artificial
  Probe
aggaacccgctctctgtggaccaca

SEQ ID NO: 335668 - DNA, 25 bp, Artificial
  Probe
ttcagcacccggaaaactgcagttg

SEQ ID NO: 335669 - DNA, 25 bp, Artificial
  Probe
gatcaatggtcttttcactgtcccc

SEQ ID NO: 335670 - DNA, 25 bp, Artificial
  Probe
taacctgatttattggggctctttt

SEQ ID NO: 335671 - DNA, 25 bp, Artificial
  Probe
atctcattcagcacccggaaaactg

SEQ ID NO: 335672 - DNA, 25 bp, Artificial
  Probe
gccaaaagcacaagatgtttcaccc

SEQ ID NO: 335673 - DNA, 25 bp, Artificial
  Probe
agtctggaaagctgttgccaaaagc

SEQ ID NO: 335674 - DNA, 25 bp, Artificial
  Probe
gaatccactgcctgggacagaagac

SEQ ID NO: 335675 - DNA, 25 bp, Artificial
  Probe
gtggaccacacatgatgtttgatga

SEQ ID NO: 335676 - DNA, 25 bp, Artificial
  Probe
gctcttttctctcagggcccaagca

SEQ ID NO: 335677 - DNA, 25 bp, Artificial
  Probe
aagcacaagatgtttcaccctgaca

SEQ ID NO: 335678 - DNA, 25 bp, Artificial
  Probe
gctgcgagtgtgtctgtaaagcacc

SEQ ID NO: 335679 - DNA, 25 bp, Artificial
  Probe
aacacagacgtttggcctctaagaa

SEQ ID NO: 335680 - DNA, 25 bp, Artificial
  Probe
gaagaccactcttacctccaggaac

SEQ ID NO: 335681 - DNA, 25 bp, Artificial
  Probe
atcccagaagaagatcaatgtcctc

SEQ ID NO: 335682 - DNA, 25 bp, Artificial
  Probe
cattccaagaaactctgtcctgttg

SEQ ID NO: 335683 - DNA, 25 bp, Artificial
  Probe
tgggacagaagaccactcttacctc

SEQ ID NO: 335684 - DNA, 25 bp, Artificial
  Probe
cttcttgtttcaaacagggtctcat

SEQ ID NO: 335685 - DNA, 25 bp, Artificial
  Probe
tcttgtttcaaacagggtctcatga

SEQ ID NO: 335686 - DNA, 25 bp, Artificial
  Probe
attacagacccgtattgccatgcct

SEQ ID NO: 335687 - DNA, 25 bp, Artificial
  Probe
acatgctgtgggataacaccaaatg

SEQ ID NO: 335688 - DNA, 25 bp, Artificial
  Probe
tacagacccgtattgccatgcctgc

SEQ ID NO: 335689 - DNA, 25 bp, Artificial
  Probe
ccttaatttggtttactggtgacat

SEQ ID NO: 335690 - DNA, 25 bp, Artificial
  Probe
gcagcttgcccgagttctactacag

SEQ ID NO: 335691 - DNA, 25 bp, Artificial
  Probe
tctcaggcaaactctgaggaccggc

SEQ ID NO: 335692 - DNA, 25 bp, Artificial
  Probe
tcaggcaaactctgaggaccggcat

SEQ ID NO: 335693 - DNA, 25 bp, Artificial
  Probe
gaatttcgactttcagaatcataag

SEQ ID NO: 335694 - DNA, 25 bp, Artificial
  Probe
tgggtctcaggcaaactctgaggac

SEQ ID NO: 335695 - DNA, 25 bp, Artificial
  Probe
gccttcgacgccagacgtaaacagc

SEQ ID NO: 335696 - DNA, 25 bp, Artificial
  Probe
atttggtggaccaaatgcctgactc

SEQ ID NO: 335697 - DNA, 25 bp, Artificial
  Probe
agtggaatttcgactttcagaatca

SEQ ID NO: 335698 - DNA, 25 bp, Artificial
  Probe
gacttggagaagcactgccgagata

SEQ ID NO: 335699 - DNA, 25 bp, Artificial
  Probe
atgcctgactcgtcagacagtccgg

SEQ ID NO: 335700 - DNA, 25 bp, Artificial
  Probe
gcagaaacctcttcggcccggtcaa

SEQ ID NO: 335701 - DNA, 25 bp, Artificial
  Probe
gcgagccagcgcaagtggaatttcg

SEQ ID NO: 335702 - DNA, 25 bp, Artificial
  Probe
caaactctgaggaccggcatttggt

SEQ ID NO: 335703 - DNA, 25 bp, Artificial
  Probe
cctgactcgtcagacagtccggctg

SEQ ID NO: 335704 - DNA, 25 bp, Artificial
  Probe
ggaccaaatgcctgactcgtcagac

SEQ ID NO: 335705 - DNA, 25 bp, Artificial
  Probe
ggtgccttcaattgggtctcaggca

SEQ ID NO: 335706 - DNA, 25 bp, Artificial
  Probe
acccgggacttggagaagcactgcc

SEQ ID NO: 335707 - DNA, 25 bp, Artificial
  Probe
ccaagagcgcctgcaaggtgccggc

SEQ ID NO: 335708 - DNA, 25 bp, Artificial
  Probe
agccagcgcaagtggaatttcgact

SEQ ID NO: 335709 - DNA, 25 bp, Artificial
  Probe
taacccgggacttggagaagcactg

SEQ ID NO: 335710 - DNA, 25 bp, Artificial
  Probe
ctaacccgggacttggagaagcact

SEQ ID NO: 335711 - DNA, 25 bp, Artificial
  Probe
ccaggcggtgccttcaattgggtct

SEQ ID NO: 335712 - DNA, 25 bp, Artificial
  Probe
aggcaaactctgaggaccggcattt

SEQ ID NO: 335713 - DNA, 25 bp, Artificial
  Probe
tcttcggcccggtcaatcatgaaga

SEQ ID NO: 335714 - DNA, 25 bp, Artificial
  Probe
gacgccagacgtaaacagctccgaa

SEQ ID NO: 335715 - DNA, 25 bp, Artificial
  Probe
ccttcaattgggtctcaggcaaact

SEQ ID NO: 335716 - DNA, 25 bp, Artificial
  Probe
ccagcgcaagtggaatttcgacttt

SEQ ID NO: 335717 - DNA, 25 bp, Artificial
  Probe
ctcgtcagacagtccggctgggtta

SEQ ID NO: 335718 - DNA, 25 bp, Artificial
  Probe
gcttgcccgagttctactacagacc

SEQ ID NO: 335719 - DNA, 25 bp, Artificial
  Probe
ctgaggaccggcatttggtggacca

SEQ ID NO: 335720 - DNA, 25 bp, Artificial
  Probe
tcgacgccagacgtaaacagctccg

SEQ ID NO: 335721 - DNA, 25 bp, Artificial
  Probe
cagcttgcccgagttctactacaga

SEQ ID NO: 335722 - DNA, 25 bp, Artificial
  Probe
agcttgcccgagttctactacagac

SEQ ID NO: 335723 - DNA, 25 bp, Artificial
  Probe
aggaccggcatttggtggaccaaat

SEQ ID NO: 335724 - DNA, 25 bp, Artificial
  Probe
agaggggcagcttgcccgagttcta

SEQ ID NO: 335725 - DNA, 25 bp, Artificial
  Probe
cccaagagcgcctgcaaggtgccgg

SEQ ID NO: 335726 - DNA, 25 bp, Artificial
  Probe
gagccagcgcaagtggaatttcgac

SEQ ID NO: 335727 - DNA, 25 bp, Artificial
  Probe
gtctcaggcaaactctgaggaccgg

SEQ ID NO: 335728 - DNA, 25 bp, Artificial
  Probe
caattgggtctcaggcaaactctga

SEQ ID NO: 335729 - DNA, 25 bp, Artificial
  Probe
ccaaatgcctgactcgtcagacagt

SEQ ID NO: 335730 - DNA, 25 bp, Artificial
  Probe
aatgcctgactcgtcagacagtccg

SEQ ID NO: 335731 - DNA, 25 bp, Artificial
  Probe
tggtggaccaaatgcctgactcgtc

SEQ ID NO: 335732 - DNA, 25 bp, Artificial
  Probe
gccgccaggcggtgccttcaattgg

SEQ ID NO: 335733 - DNA, 25 bp, Artificial
  Probe
ccagacgtaaacagctccgaattaa

SEQ ID NO: 335734 - DNA, 25 bp, Artificial
  Probe
catttggtggaccaaatgcctgact

SEQ ID NO: 335735 - DNA, 25 bp, Artificial
  Probe
ttggagaagcactgccgagatatgg

SEQ ID NO: 335736 - DNA, 25 bp, Artificial
  Probe
ctgtaggcttggaggcaaaccttga

SEQ ID NO: 335737 - DNA, 25 bp, Artificial
  Probe
ggaggcaaaccttgaccctatggac

SEQ ID NO: 335738 - DNA, 25 bp, Artificial
  Probe
gacagtgtttcacatgtgcagagga

SEQ ID NO: 335739 - DNA, 25 bp, Artificial
  Probe
accctatggactggagatgacccag

SEQ ID NO: 335740 - DNA, 25 bp, Artificial
  Probe
atcacagaatttaaactcaaggaag

SEQ ID NO: 335741 - DNA, 25 bp, Artificial
  Probe
tgtttcacatgtgcagaggatcctt

SEQ ID NO: 335742 - DNA, 25 bp, Artificial
  Probe
gtttcacatgtgcagaggatccttt

SEQ ID NO: 335743 - DNA, 25 bp, Artificial
  Probe
taatcggggatttcaggtaaccaga

SEQ ID NO: 335744 - DNA, 25 bp, Artificial
  Probe
tgaccctatggactggagatgaccc

SEQ ID NO: 335745 - DNA, 25 bp, Artificial
  Probe
actggagatgacccagatatttatt

SEQ ID NO: 335746 - DNA, 25 bp, Artificial
  Probe
gaccctatggactggagatgaccca

SEQ ID NO: 335747 - DNA, 25 bp, Artificial
  Probe
ccttgaccctatggactggagatga

SEQ ID NO: 335748 - DNA, 25 bp, Artificial
  Probe
ttaatcggggatttcaggtaaccag

SEQ ID NO: 335749 - DNA, 25 bp, Artificial
  Probe
agtgtttcacatgtgcagaggatcc

SEQ ID NO: 335750 - DNA, 25 bp, Artificial
  Probe
tatcacagaatttaaactcaaggaa

SEQ ID NO: 335751 - DNA, 25 bp, Artificial
  Probe
tggactggagatgacccagatattt

SEQ ID NO: 335752 - DNA, 25 bp, Artificial
  Probe
tggaggcaaaccttgaccctatgga

SEQ ID NO: 335753 - DNA, 25 bp, Artificial
  Probe
aaccttgaccctatggactggagat

SEQ ID NO: 335754 - DNA, 25 bp, Artificial
  Probe
tttttgacagtgtttcacatgtgca

SEQ ID NO: 335755 - DNA, 25 bp, Artificial
  Probe
ggcttggaggcaaaccttgacccta

SEQ ID NO: 335756 - DNA, 25 bp, Artificial
  Probe
gaggcaaaccttgaccctatggact

SEQ ID NO: 335757 - DNA, 25 bp, Artificial
  Probe
accttgaccctatggactggagatg

SEQ ID NO: 335758 - DNA, 25 bp, Artificial
  Probe
gatctgtaggcttggaggcaaacct

SEQ ID NO: 335759 - DNA, 25 bp, Artificial
  Probe
tcacagaatttaaactcaaggaagt

SEQ ID NO: 335760 - DNA, 25 bp, Artificial
  Probe
cagtgtttcacatgtgcagaggatc

SEQ ID NO: 335761 - DNA, 25 bp, Artificial
  Probe
tgatctgtaggcttggaggcaaacc

SEQ ID NO: 335762 - DNA, 25 bp, Artificial
  Probe
acagtgtttcacatgtgcagaggat

SEQ ID NO: 335763 - DNA, 25 bp, Artificial
  Probe
tgacagtgtttcacatgtgcagagg

SEQ ID NO: 335764 - DNA, 25 bp, Artificial
  Probe
tctgtaggcttggaggcaaaccttg

SEQ ID NO: 335765 - DNA, 25 bp, Artificial
  Probe
gatgacccagatatttattttttta

SEQ ID NO: 335766 - DNA, 25 bp, Artificial
  Probe
aggcaaaccttgaccctatggactg

SEQ ID NO: 335767 - DNA, 25 bp, Artificial
  Probe
cttgaccctatggactggagatgac

SEQ ID NO: 335768 - DNA, 25 bp, Artificial
  Probe
aggcttggaggcaaaccttgaccct

SEQ ID NO: 335769 - DNA, 25 bp, Artificial
  Probe
atctgtaggcttggaggcaaacctt

SEQ ID NO: 335770 - DNA, 25 bp, Artificial
  Probe
atggactggagatgacccagatatt

SEQ ID NO: 335771 - DNA, 25 bp, Artificial
  Probe
atttttgacagtgtttcacatgtgc

SEQ ID NO: 335772 - DNA, 25 bp, Artificial
  Probe
ggatttcaggtaaccagagcaaaag

SEQ ID NO: 335773 - DNA, 25 bp, Artificial
  Probe
ccctatggactggagatgacccaga

SEQ ID NO: 335774 - DNA, 25 bp, Artificial
  Probe
ctgctgatctgtaggcttggaggca

SEQ ID NO: 335775 - DNA, 25 bp, Artificial
  Probe
cctatggactggagatgacccagat

SEQ ID NO: 335776 - DNA, 25 bp, Artificial
  Probe
ttgaccctatggactggagatgacc

SEQ ID NO: 335777 - DNA, 25 bp, Artificial
  Probe
aaaccttgaccctatggactggaga

SEQ ID NO: 335778 - DNA, 25 bp, Artificial
  Probe
taaatttttgacagtgtttcacatg

SEQ ID NO: 335779 - DNA, 25 bp, Artificial
  Probe
gtgtttcacatgtgcagaggatcct

SEQ ID NO: 335780 - DNA, 25 bp, Artificial
  Probe
ttttgacagtgtttcacatgtgcag

SEQ ID NO: 335781 - DNA, 25 bp, Artificial
  Probe
gatttcaggtaaccagagcaaaaga

SEQ ID NO: 335782 - DNA, 25 bp, Artificial
  Probe
acccggagctcgtgggcagcctgaa

SEQ ID NO: 335783 - DNA, 25 bp, Artificial
  Probe
tggaccacaagaggagaggaactgc

SEQ ID NO: 335784 - DNA, 25 bp, Artificial
  Probe
gaggaactgccctaatcttcaatca

SEQ ID NO: 335785 - DNA, 25 bp, Artificial
  Probe
ggaaggcaaccacatttacgcatac

SEQ ID NO: 335786 - DNA, 25 bp, Artificial
  Probe
gactcgaaggttctcagagctagga

SEQ ID NO: 335787 - DNA, 25 bp, Artificial
  Probe
ggctcctggtacattcaggatttgt

SEQ ID NO: 335788 - DNA, 25 bp, Artificial
  Probe
tgcaattggcaagaagcaggttccc

SEQ ID NO: 335789 - DNA, 25 bp, Artificial
  Probe
aagcaggttccctgctttgcctcaa

SEQ ID NO: 335790 - DNA, 25 bp, Artificial
  Probe
atctaggaaattactgtgcgcaaat

SEQ ID NO: 335791 - DNA, 25 bp, Artificial
  Probe
ggcacaggcctgcaggagcccagct

SEQ ID NO: 335792 - DNA, 25 bp, Artificial
  Probe
gtggatgctgcctcggtgtacactc

SEQ ID NO: 335793 - DNA, 25 bp, Artificial
  Probe
tcggggcagccagcatgacgtgccc

SEQ ID NO: 335794 - DNA, 25 bp, Artificial
  Probe
cgaaggttctcagagctaggatttg

SEQ ID NO: 335795 - DNA, 25 bp, Artificial
  Probe
catcacagcgccttctgcagtcaga

SEQ ID NO: 335796 - DNA, 25 bp, Artificial
  Probe
gggcggacttcctcatgtgttactc

SEQ ID NO: 335797 - DNA, 25 bp, Artificial
  Probe
gtccgacttgctacaaatgtttcac

SEQ ID NO: 335798 - DNA, 25 bp, Artificial
  Probe
catttcccttctacacagaggccag

SEQ ID NO: 335799 - DNA, 25 bp, Artificial
  Probe
caaggccagacctgggcaggcacct

SEQ ID NO: 335800 - DNA, 25 bp, Artificial
  Probe
gaagaactactgctcaagattcacg

SEQ ID NO: 335801 - DNA, 25 bp, Artificial
  Probe
gcatacgatgccaaaattgaaattc

SEQ ID NO: 335802 - DNA, 25 bp, Artificial
  Probe
caggcctgcaggagcccagctcaag

SEQ ID NO: 335803 - DNA, 25 bp, Artificial
  Probe
tctgtcccaaacctagtaagtaggg

SEQ ID NO: 335804 - DNA, 25 bp, Artificial
  Probe
aacatgacggagacagatggcttct

SEQ ID NO: 335805 - DNA, 25 bp, Artificial
  Probe
cagatggcttctacagaagtaggga

SEQ ID NO: 335806 - DNA, 25 bp, Artificial
  Probe
acagaggccagctggccaaagactc

SEQ ID NO: 335807 - DNA, 25 bp, Artificial
  Probe
ccgtgtggatttctgcaaagaccca

SEQ ID NO: 335808 - DNA, 25 bp, Artificial
  Probe
ggcacctagcactcccagagaggcg

SEQ ID NO: 335809 - DNA, 25 bp, Artificial
  Probe
tgaaattcagaccttgactggcttg

SEQ ID NO: 335810 - DNA, 25 bp, Artificial
  Probe
tgtccacaggggaaagtaaaacatg

SEQ ID NO: 335811 - DNA, 25 bp, Artificial
  Probe
tggttcctctggacgtggtggatca

SEQ ID NO: 335812 - DNA, 25 bp, Artificial
  Probe
taagtagggccgtccgacttgctac

SEQ ID NO: 335813 - DNA, 25 bp, Artificial
  Probe
agacaagtgtcagagcctggttgga

SEQ ID NO: 335814 - DNA, 25 bp, Artificial
  Probe
tgaaatgctttaacgacctccgggc

SEQ ID NO: 335815 - DNA, 25 bp, Artificial
  Probe
ggcaccaacgcagacagggacaacc

SEQ ID NO: 335816 - DNA, 25 bp, Artificial
  Probe
tgctggccaggcacggcagttccct

SEQ ID NO: 335817 - DNA, 25 bp, Artificial
  Probe
acgtagatgccgattgcttcctgtg

SEQ ID NO: 335818 - DNA, 25 bp, Artificial
  Probe
agcctggttggaaaacccaagatat

SEQ ID NO: 335819 - DNA, 25 bp, Artificial
  Probe
aattgaaattcagaccttgactggc

SEQ ID NO: 335820 - DNA, 25 bp, Artificial
  Probe
gggcaccaacgcagacagggacaac

SEQ ID NO: 335821 - DNA, 25 bp, Artificial
  Probe
caccaacggacactgtttgaatttt

SEQ ID NO: 335822 - DNA, 25 bp, Artificial
  Probe
caagatattcatcatccaggcctgt

SEQ ID NO: 335823 - DNA, 25 bp, Artificial
  Probe
gaagtgttggatccagccgagcagt

SEQ ID NO: 335824 - DNA, 25 bp, Artificial
  Probe
gtgtcgacttccagccacgtagatg

SEQ ID NO: 335825 - DNA, 25 bp, Artificial
  Probe
ctaaccaaggccagaccaaggccag

SEQ ID NO: 335826 - DNA, 25 bp, Artificial
  Probe
tgtgtcttcctgagccacggggaag

SEQ ID NO: 335827 - DNA, 25 bp, Artificial
  Probe
gcccaccaacggacactgtttgaat

SEQ ID NO: 335828 - DNA, 25 bp, Artificial
  Probe
agttctggaaaaaccctctgaacat

SEQ ID NO: 335829 - DNA, 25 bp, Artificial
  Probe
gtggagattgcctgcattgcatggt

SEQ ID NO: 335830 - DNA, 25 bp, Artificial
  Probe
acaacatgagacaatgcatgtaaat

SEQ ID NO: 335831 - DNA, 25 bp, Artificial
  Probe
tcattgcgagcacctgcattatctg

SEQ ID NO: 335832 - DNA, 25 bp, Artificial
  Probe
ggaaaaaccctctgaacatcattga

SEQ ID NO: 335833 - DNA, 25 bp, Artificial
  Probe
atcattcccttctatgccacgttgg

SEQ ID NO: 335834 - DNA, 25 bp, Artificial
  Probe
tccggctggttgctgctccatcaca

SEQ ID NO: 335835 - DNA, 25 bp, Artificial
  Probe
tactctgtggagaaagatgaactcg

SEQ ID NO: 335836 - DNA, 25 bp, Artificial
  Probe
gcttcgttctcttggggccacgctg

SEQ ID NO: 335837 - DNA, 25 bp, Artificial
  Probe
gtacacgccttcatcaccagtctgt

SEQ ID NO: 335838 - DNA, 25 bp, Artificial
  Probe
ctaccagaagcagaaggacatggat

SEQ ID NO: 335839 - DNA, 25 bp, Artificial
  Probe
tctctgtgcttatttactctgtgga

SEQ ID NO: 335840 - DNA, 25 bp, Artificial
  Probe
ttgcacggacagctcatgtcccttc

SEQ ID NO: 335841 - DNA, 25 bp, Artificial
  Probe
cattgccgaattctgaaatgataga

SEQ ID NO: 335842 - DNA, 25 bp, Artificial
  Probe
cgaggatgcttacaacaccgcatcc

SEQ ID NO: 335843 - DNA, 25 bp, Artificial
  Probe
accttagctgggaaaatcattgcga

SEQ ID NO: 335844 - DNA, 25 bp, Artificial
  Probe
aatcaatcatttaattctcagggtg

SEQ ID NO: 335845 - DNA, 25 bp, Artificial
  Probe
ccacccagtcaccttagctgggaaa

SEQ ID NO: 335846 - DNA, 25 bp, Artificial
  Probe
gaacatgggcaaggtggtccagatc

SEQ ID NO: 335847 - DNA, 25 bp, Artificial
  Probe
gtgggccactatcagtatgaccaca

SEQ ID NO: 335848 - DNA, 25 bp, Artificial
  Probe
acatggatgtggaccagtgcagcga

SEQ ID NO: 335849 - DNA, 25 bp, Artificial
  Probe
gtggcatcttagtggtagcccttcc

SEQ ID NO: 335850 - DNA, 25 bp, Artificial
  Probe
gggtatctccattttctctgtgctt

SEQ ID NO: 335851 - DNA, 25 bp, Artificial
  Probe
ttcaccggtgagctggccatccggc

SEQ ID NO: 335852 - DNA, 25 bp, Artificial
  Probe
gatgaactcgcgtccagtctcacta

SEQ ID NO: 335853 - DNA, 25 bp, Artificial
  Probe
ctcacgttaggttaacacagcttta

SEQ ID NO: 335854 - DNA, 25 bp, Artificial
  Probe
ccttcctcacgttaggttaacacag

SEQ ID NO: 335855 - DNA, 25 bp, Artificial
  Probe
gtatctgccattcactcacattgag

SEQ ID NO: 335856 - DNA, 25 bp, Artificial
  Probe
gattttccgcatcctgaagctcgcc

SEQ ID NO: 335857 - DNA, 25 bp, Artificial
  Probe
gctccatcacaaaagaagttctgga

SEQ ID NO: 335858 - DNA, 25 bp, Artificial
  Probe
ggcttacgcatcattctgtatctgc

SEQ ID NO: 335859 - DNA, 25 bp, Artificial
  Probe
cagaattccagaacgaggatggaga

SEQ ID NO: 335860 - DNA, 25 bp, Artificial
  Probe
agctcgcccggcattccgtagggct

SEQ ID NO: 335861 - DNA, 25 bp, Artificial
  Probe
ttggggccacgctgaggcacagtta

SEQ ID NO: 335862 - DNA, 25 bp, Artificial
  Probe
atgtaaatccatgttcatgttccag

SEQ ID NO: 335863 - DNA, 25 bp, Artificial
  Probe
ggtatctccattttctctgtgctta

SEQ ID NO: 335864 - DNA, 25 bp, Artificial
  Probe
aattactgatgttagagcagaggcc

SEQ ID NO: 335865 - DNA, 25 bp, Artificial
  Probe
ccactatcagtatgaccacagtggg

SEQ ID NO: 335866 - DNA, 25 bp, Artificial
  Probe
tctcttcctctctgtgggtatctcc

SEQ ID NO: 335867 - DNA, 25 bp, Artificial
  Probe
ttaacattagggacgtttatgcaca

SEQ ID NO: 335868 - DNA, 25 bp, Artificial
  Probe
aactcgcgtccagtctcactagcat

SEQ ID NO: 335869 - DNA, 25 bp, Artificial
  Probe
atgagcaggggcatttgcacggaca

SEQ ID NO: 335870 - DNA, 25 bp, Artificial
  Probe
caagttttccaagtactaccagaag

SEQ ID NO: 335871 - DNA, 25 bp, Artificial
  Probe
aaggatttattgctacggcttacgc

SEQ ID NO: 335872 - DNA, 25 bp, Artificial
  Probe
tgtcgaagacaacgaggatgcttac

SEQ ID NO: 335873 - DNA, 25 bp, Artificial
  Probe
ctgtggacaccaaggaagaagagag

SEQ ID NO: 335874 - DNA, 25 bp, Artificial
  Probe
ctatgtccttactgaaggggagtca

SEQ ID NO: 335875 - DNA, 25 bp, Artificial
  Probe
ttgcggctgatgaagggtgctcaca

SEQ ID NO: 335876 - DNA, 25 bp, Artificial
  Probe
ggagtcacaggacaatcctttgtaa

SEQ ID NO: 335877 - DNA, 25 bp, Artificial
  Probe
ctcacaggtagttctatgtgtggtg

SEQ ID NO: 335878 - DNA, 25 bp, Artificial
  Probe
gtctctactccctgaggctaatgtg

SEQ ID NO: 335879 - DNA, 25 bp, Artificial
  Probe
ccatattttcattgcggctgatgaa

SEQ ID NO: 335880 - DNA, 25 bp, Artificial
  Probe
ctgatgaagggtgctcacaggtagt

SEQ ID NO: 335881 - DNA, 25 bp, Artificial
  Probe
ttctatgtgtggtgtgctgtgtctc

SEQ ID NO: 335882 - DNA, 25 bp, Artificial
  Probe
gtcacaggacaatcctttgtaaaac

SEQ ID NO: 335883 - DNA, 25 bp, Artificial
  Probe
gtcttctgccatattttcattgcgg

SEQ ID NO: 335884 - DNA, 25 bp, Artificial
  Probe
tgaagggagccctctgtgatgcagc

SEQ ID NO: 335885 - DNA, 25 bp, Artificial
  Probe
ccctgaggctaatgtgaatgtggcg

SEQ ID NO: 335886 - DNA, 25 bp, Artificial
  Probe
tcattgcggctgatgaagggtgctc

SEQ ID NO: 335887 - DNA, 25 bp, Artificial
  Probe
actccctgaggctaatgtgaatgtg

SEQ ID NO: 335888 - DNA, 25 bp, Artificial
  Probe
cctctgtgatgcagctgcagccttt

SEQ ID NO: 335889 - DNA, 25 bp, Artificial
  Probe
gaagggtgctcacaggtagttctat

SEQ ID NO: 335890 - DNA, 25 bp, Artificial
  Probe
gtgctcacaggtagttctatgtgtg

SEQ ID NO: 335891 - DNA, 25 bp, Artificial
  Probe
tggtgtgctgtgtctctactccctg

SEQ ID NO: 335892 - DNA, 25 bp, Artificial
  Probe
ctgccatattttcattgcggctgat

SEQ ID NO: 335893 - DNA, 25 bp, Artificial
  Probe
agggtgctcacaggtagttctatgt

SEQ ID NO: 335894 - DNA, 25 bp, Artificial
  Probe
atgtgtggtgtgctgtgtctctact

SEQ ID NO: 335895 - DNA, 25 bp, Artificial
  Probe
gaagggagccctctgtgatgcagct

SEQ ID NO: 335896 - DNA, 25 bp, Artificial
  Probe
ccgcacatctgtgtggctgtgaagg

SEQ ID NO: 335897 - DNA, 25 bp, Artificial
  Probe
tctgtgatgcagctgcagccttttc

SEQ ID NO: 335898 - DNA, 25 bp, Artificial
  Probe
ctgtgtctctactccctgaggctaa

SEQ ID NO: 335899 - DNA, 25 bp, Artificial
  Probe
cccgcacatctgtgtggctgtgaag

SEQ ID NO: 335900 - DNA, 25 bp, Artificial
  Probe
ggtgtgctgtgtctctactccctga

SEQ ID NO: 335901 - DNA, 25 bp, Artificial
  Probe
gtgctgtgtctctactccctgaggc

SEQ ID NO: 335902 - DNA, 25 bp, Artificial
  Probe
ttctgccatattttcattgcggctg

SEQ ID NO: 335903 - DNA, 25 bp, Artificial
  Probe
ggtgctcacaggtagttctatgtgt

SEQ ID NO: 335904 - DNA, 25 bp, Artificial
  Probe
tcttctgccatattttcattgcggc

SEQ ID NO: 335905 - DNA, 25 bp, Artificial
  Probe
ctgtgatgcagctgcagccttttct

SEQ ID NO: 335906 - DNA, 25 bp, Artificial
  Probe
cgcccgcacatctgtgtggctgtga

SEQ ID NO: 335907 - DNA, 25 bp, Artificial
  Probe
aagctatgtccttactgaaggggag

SEQ ID NO: 335908 - DNA, 25 bp, Artificial
  Probe
gcccgcacatctgtgtggctgtgaa

SEQ ID NO: 335909 - DNA, 25 bp, Artificial
  Probe
ctctactccctgaggctaatgtgaa

SEQ ID NO: 335910 - DNA, 25 bp, Artificial
  Probe
gtgtggtgtgctgtgtctctactcc

SEQ ID NO: 335911 - DNA, 25 bp, Artificial
  Probe
atgtccttactgaaggggagtcaca

SEQ ID NO: 335912 - DNA, 25 bp, Artificial
  Probe
agtcttctgccatattttcattgcg

SEQ ID NO: 335913 - DNA, 25 bp, Artificial
  Probe
gggagccctctgtgatgcagctgca

SEQ ID NO: 335914 - DNA, 25 bp, Artificial
  Probe
tactgaaggggagtcacaggacaat

SEQ ID NO: 335915 - DNA, 25 bp, Artificial
  Probe
aagggagccctctgtgatgcagctg

SEQ ID NO: 335916 - DNA, 25 bp, Artificial
  Probe
tgtgtggtgtgctgtgtctctactc

SEQ ID NO: 335917 - DNA, 25 bp, Artificial
  Probe
ttactgaaggggagtcacaggacaa

SEQ ID NO: 335918 - DNA, 25 bp, Artificial
  Probe
tgtccttactgaaggggagtcacag

SEQ ID NO: 335919 - DNA, 25 bp, Artificial
  Probe
tttcattgcggctgatgaagggtgc

SEQ ID NO: 335920 - DNA, 25 bp, Artificial
  Probe
gtgacgctgagtatcatccattgcc

SEQ ID NO: 335921 - DNA, 25 bp, Artificial
  Probe
ctcagtcttgtgctattttctaatg

SEQ ID NO: 335922 - DNA, 25 bp, Artificial
  Probe
cacgggacaggaacagccagtatac

SEQ ID NO: 335923 - DNA, 25 bp, Artificial
  Probe
agtccgcgttggacaccgcatcatt

SEQ ID NO: 335924 - DNA, 25 bp, Artificial
  Probe
cttctgtgtggagaacggcattatt

SEQ ID NO: 335925 - DNA, 25 bp, Artificial
  Probe
cgtgacgctgagtatcatccattgc

SEQ ID NO: 335926 - DNA, 25 bp, Artificial
  Probe
tccgcgttggacaccgcatcattga

SEQ ID NO: 335927 - DNA, 25 bp, Artificial
  Probe
acgctgagtatcatccattgcccac

SEQ ID NO: 335928 - DNA, 25 bp, Artificial
  Probe
actgctcacgggacaggaacagcca

SEQ ID NO: 335929 - DNA, 25 bp, Artificial
  Probe
cgaggtacggcgacactcatccgtg

SEQ ID NO: 335930 - DNA, 25 bp, Artificial
  Probe
acagccagtatacctgtgatcgccc

SEQ ID NO: 335931 - DNA, 25 bp, Artificial
  Probe
agaatcctcagtcttgtgctatttt

SEQ ID NO: 335932 - DNA, 25 bp, Artificial
  Probe
cctaccgactgctcacgggacagga

SEQ ID NO: 335933 - DNA, 25 bp, Artificial
  Probe
gcgcattatccagctgctcacagag

SEQ ID NO: 335934 - DNA, 25 bp, Artificial
  Probe
catcattgaggtcaatgggcagagt

SEQ ID NO: 335935 - DNA, 25 bp, Artificial
  Probe
tccgtgacgctgagtatcatccatt

SEQ ID NO: 335936 - DNA, 25 bp, Artificial
  Probe
atccagctgctcacagagacaagag

SEQ ID NO: 335937 - DNA, 25 bp, Artificial
  Probe
ctgtgcgcgaggtacggcgacactc

SEQ ID NO: 335938 - DNA, 25 bp, Artificial
  Probe
acctaccgactgctcacgggacagg

SEQ ID NO: 335939 - DNA, 25 bp, Artificial
  Probe
ggcttctgtgtggagaacggcatta

SEQ ID NO: 335940 - DNA, 25 bp, Artificial
  Probe
ccgcatcattgaggtcaatgggcag

SEQ ID NO: 335941 - DNA, 25 bp, Artificial
  Probe
aagagaaatccacatcaagaccatg

SEQ ID NO: 335942 - DNA, 25 bp, Artificial
  Probe
tgctcacagagacaagagaaatcca

SEQ ID NO: 335943 - DNA, 25 bp, Artificial
  Probe
cagtcttgtgctattttctaatgta

SEQ ID NO: 335944 - DNA, 25 bp, Artificial
  Probe
gaatcctcagtcttgtgctattttc

SEQ ID NO: 335945 - DNA, 25 bp, Artificial
  Probe
agccagtatacctgtgatcgccccg

SEQ ID NO: 335946 - DNA, 25 bp, Artificial
  Probe
taccgactgctcacgggacaggaac

SEQ ID NO: 335947 - DNA, 25 bp, Artificial
  Probe
gacactcatccgtgacgctgagtat

SEQ ID NO: 335948 - DNA, 25 bp, Artificial
  Probe
accaaagaatcctcagtcttgtgct

SEQ ID NO: 335949 - DNA, 25 bp, Artificial
  Probe
aggaacagccagtatacctgtgatc

SEQ ID NO: 335950 - DNA, 25 bp, Artificial
  Probe
attatccagctgctcacagagacaa

SEQ ID NO: 335951 - DNA, 25 bp, Artificial
  Probe
agctgctcacagagacaagagaaat

SEQ ID NO: 335952 - DNA, 25 bp, Artificial
  Probe
aggtacggcgacactcatccgtgac

SEQ ID NO: 335953 - DNA, 25 bp, Artificial
  Probe
ggggaccaaagaatcctcagtcttg

SEQ ID NO: 335954 - DNA, 25 bp, Artificial
  Probe
acaggaacagccagtatacctgtga

SEQ ID NO: 335955 - DNA, 25 bp, Artificial
  Probe
gcgcgcattatccagctgctcacag

SEQ ID NO: 335956 - DNA, 25 bp, Artificial
  Probe
catccgtgacgctgagtatcatcca

SEQ ID NO: 335957 - DNA, 25 bp, Artificial
  Probe
cactcatccgtgacgctgagtatca

SEQ ID NO: 335958 - DNA, 25 bp, Artificial
  Probe
cggcgacactcatccgtgacgctga

SEQ ID NO: 335959 - DNA, 25 bp, Artificial
  Probe
gctgagtatcatccattgcccacca

SEQ ID NO: 335960 - DNA, 25 bp, Artificial
  Probe
gttggacaccgcatcattgaggtca

SEQ ID NO: 335961 - DNA, 25 bp, Artificial
  Probe
acaccgcatcattgaggtcaatggg

SEQ ID NO: 335962 - DNA, 25 bp, Artificial
  Probe
caaagaatcctcagtcttgtgctat

SEQ ID NO: 335963 - DNA, 25 bp, Artificial
  Probe
atccgtgacgctgagtatcatccat

SEQ ID NO: 335964 - DNA, 25 bp, Artificial
  Probe
gggaccaaagaatcctcagtcttgt

SEQ ID NO: 335965 - DNA, 25 bp, Artificial
  Probe
gctcacgggacaggaacagccagta

SEQ ID NO: 335966 - DNA, 25 bp, Artificial
  Probe
gtttttatgctaaacagtcaagggc

SEQ ID NO: 335967 - DNA, 25 bp, Artificial
  Probe
cttggccacttcttccaattccggg

SEQ ID NO: 335968 - DNA, 25 bp, Artificial
  Probe
acaactctattttgggttgcagatt

SEQ ID NO: 335969 - DNA, 25 bp, Artificial
  Probe
atcttcagcctcttggggaaagggc

SEQ ID NO: 335970 - DNA, 25 bp, Artificial
  Probe
ctttttatccccagagctgtagcag

SEQ ID NO: 335971 - DNA, 25 bp, Artificial
  Probe
ggggctgacatccaaggtttagatt

SEQ ID NO: 335972 - DNA, 25 bp, Artificial
  Probe
tggccacttcttccaattccgggga

SEQ ID NO: 335973 - DNA, 25 bp, Artificial
  Probe
ttggggagctctcaccgcagcgcca

SEQ ID NO: 335974 - DNA, 25 bp, Artificial
  Probe
tcttcagcctcttggggaaagggca

SEQ ID NO: 335975 - DNA, 25 bp, Artificial
  Probe
agcaggacacccttggccacttctt

SEQ ID NO: 335976 - DNA, 25 bp, Artificial
  Probe
gacaactctattttgggttgcagat

SEQ ID NO: 335977 - DNA, 25 bp, Artificial
  Probe
ttctctttggccatactgtcaggtg

SEQ ID NO: 335978 - DNA, 25 bp, Artificial
  Probe
cccttcagggccaaagccctgtgat

SEQ ID NO: 335979 - DNA, 25 bp, Artificial
  Probe
cgctcctggccgtgtcagcagcatt

SEQ ID NO: 335980 - DNA, 25 bp, Artificial
  Probe
ccttagttgtgatccccaggggctc

SEQ ID NO: 335981 - DNA, 25 bp, Artificial
  Probe
ctgacatccaaggtttagatttatt

SEQ ID NO: 335982 - DNA, 25 bp, Artificial
  Probe
tcaccagatcttcagcctcttgggg

SEQ ID NO: 335983 - DNA, 25 bp, Artificial
  Probe
tgagcagatacattgtgggttccca

SEQ ID NO: 335984 - DNA, 25 bp, Artificial
  Probe
gtgatttcctgtctagtctcccact

SEQ ID NO: 335985 - DNA, 25 bp, Artificial
  Probe
gtgatttcactttttatccccagag

SEQ ID NO: 335986 - DNA, 25 bp, Artificial
  Probe
tatgctaaacagtcaagggcctaag

SEQ ID NO: 335987 - DNA, 25 bp, Artificial
  Probe
cttccggtccctctttgactggctg

SEQ ID NO: 335988 - DNA, 25 bp, Artificial
  Probe
gcagagggtccatgttctatccttt

SEQ ID NO: 335989 - DNA, 25 bp, Artificial
  Probe
aagtgttctttgatgtagcacattc

SEQ ID NO: 335990 - DNA, 25 bp, Artificial
  Probe
tttctttccttcagactgagagtca

SEQ ID NO: 335991 - DNA, 25 bp, Artificial
  Probe
tttccagacccatggtttgtggggc

SEQ ID NO: 335992 - DNA, 25 bp, Artificial
  Probe
ttcagttatcacttcactagatgag

SEQ ID NO: 335993 - DNA, 25 bp, Artificial
  Probe
atccccagagctgtagcagagttct

SEQ ID NO: 335994 - DNA, 25 bp, Artificial
  Probe
gatgtagcacattcctttgggtagg

SEQ ID NO: 335995 - DNA, 25 bp, Artificial
  Probe
tcagcagcattgtggctcctgggag

SEQ ID NO: 335996 - DNA, 25 bp, Artificial
  Probe
ggccttagttgtgatccccaggggc

SEQ ID NO: 335997 - DNA, 25 bp, Artificial
  Probe
acgtcatttccttggactgagttat

SEQ ID NO: 335998 - DNA, 25 bp, Artificial
  Probe
tagattgttcttgcaccttttatgg

SEQ ID NO: 335999 - DNA, 25 bp, Artificial
  Probe
cctggctgctctgatccctcagggg

SEQ ID NO: 336000 - DNA, 25 bp, Artificial
  Probe
ttgcaccttttatgggacatggggg

SEQ ID NO: 336001 - DNA, 25 bp, Artificial
  Probe
ccacattggggagctctcaccgcag

SEQ ID NO: 336002 - DNA, 25 bp, Artificial
  Probe
gtctagtctcccactacatgagtac

SEQ ID NO: 336003 - DNA, 25 bp, Artificial
  Probe
cttcaccagatcttcagcctcttgg

SEQ ID NO: 336004 - DNA, 25 bp, Artificial
  Probe
ccctgtgatgtgatttcacttttta

SEQ ID NO: 336005 - DNA, 25 bp, Artificial
  Probe
ttctactggccctagcactgagcag

SEQ ID NO: 336006 - DNA, 25 bp, Artificial
  Probe
cgtcttcggtgctgcggagccctgc

SEQ ID NO: 336007 - DNA, 25 bp, Artificial
  Probe
ccagacccatggtttgtggggcaga

SEQ ID NO: 336008 - DNA, 25 bp, Artificial
  Probe
tggtcaaaggccaggccagatcttc

SEQ ID NO: 336009 - DNA, 25 bp, Artificial
  Probe
gccagtactcaaagggttaacattt

SEQ ID NO: 336010 - DNA, 25 bp, Artificial
  Probe
agtcagcactacagcccttcagtta

SEQ ID NO: 336011 - DNA, 25 bp, Artificial
  Probe
gctgcggagccctgcaatgggtaca

SEQ ID NO: 336012 - DNA, 25 bp, Artificial
  Probe
tcgcctgggcaactacagcgtccta

SEQ ID NO: 336013 - DNA, 25 bp, Artificial
  Probe
caagtctcccggtggtcctggcagt

SEQ ID NO: 336014 - DNA, 25 bp, Artificial
  Probe
atttggagtccgtgggcgctcgcct

SEQ ID NO: 336015 - DNA, 25 bp, Artificial
  Probe
tggccgaatagtggtagcagacagc

SEQ ID NO: 336016 - DNA, 25 bp, Artificial
  Probe
gtacagtgctgatggagagttcctc

SEQ ID NO: 336017 - DNA, 25 bp, Artificial
  Probe
cattattgtggcagactatgacaac

SEQ ID NO: 336018 - DNA, 25 bp, Artificial
  Probe
agtcttgctgtgtcttcaccttcca

SEQ ID NO: 336019 - DNA, 25 bp, Artificial
  Probe
caatggcaagcttgttgggcgtttt

SEQ ID NO: 336020 - DNA, 25 bp, Artificial
  Probe
ctgatggagagttcctcttcaaatt

SEQ ID NO: 336021 - DNA, 25 bp, Artificial
  Probe
cgtgggcatggatgtgcccaatgcc

SEQ ID NO: 336022 - DNA, 25 bp, Artificial
  Probe
cgctgtccgctgctagcagtggccg

SEQ ID NO: 336023 - DNA, 25 bp, Artificial
  Probe
tcctgagggcaagttcaagaccaaa

SEQ ID NO: 336024 - DNA, 25 bp, Artificial
  Probe
aaggcagtgcgtaggccgagctcca

SEQ ID NO: 336025 - DNA, 25 bp, Artificial
  Probe
tcgcagggccccactttgtggctgt

SEQ ID NO: 336026 - DNA, 25 bp, Artificial
  Probe
gctctggttccttcctgtcctatat

SEQ ID NO: 336027 - DNA, 25 bp, Artificial
  Probe
tgtggaccggaatgggcatatcatt

SEQ ID NO: 336028 - DNA, 25 bp, Artificial
  Probe
catgtgcgccagaaggcagtgcgta

SEQ ID NO: 336029 - DNA, 25 bp, Artificial
  Probe
aagacaatccaattgtggatgaact

SEQ ID NO: 336030 - DNA, 25 bp, Artificial
  Probe
ctttgtggctgtgaacaacaagaat

SEQ ID NO: 336031 - DNA, 25 bp, Artificial
  Probe
gctgtggaccggaatgggcatatca

SEQ ID NO: 336032 - DNA, 25 bp, Artificial
  Probe
gtagcagacagcaacaaccaatgta

SEQ ID NO: 336033 - DNA, 25 bp, Artificial
  Probe
tgtgtcttcaccttccagcccaatg

SEQ ID NO: 336034 - DNA, 25 bp, Artificial
  Probe
accttccagcccaatggcaagcttg

SEQ ID NO: 336035 - DNA, 25 bp, Artificial
  Probe
tgaagcgccgggtcaagtctcccgg

SEQ ID NO: 336036 - DNA, 25 bp, Artificial
  Probe
caagggccctgcttggctcatggag

SEQ ID NO: 336037 - DNA, 25 bp, Artificial
  Probe
cgtctttcgtgttggcagtcgtgga

SEQ ID NO: 336038 - DNA, 25 bp, Artificial
  Probe
gtacagcaccggtggcaaacggaaa

SEQ ID NO: 336039 - DNA, 25 bp, Artificial
  Probe
ctgtcctatatcaacacgtctgcag

SEQ ID NO: 336040 - DNA, 25 bp, Artificial
  Probe
aggtgaattcaccaatttacacccg

SEQ ID NO: 336041 - DNA, 25 bp, Artificial
  Probe
agcaacaaccaatgtattcaggttt

SEQ ID NO: 336042 - DNA, 25 bp, Artificial
  Probe
tgtggcagtggacaccaatggagac

SEQ ID NO: 336043 - DNA, 25 bp, Artificial
  Probe
tggataacaagtcttgctgtgtctt

SEQ ID NO: 336044 - DNA, 25 bp, Artificial
  Probe
aagcgccgggtcaagtctcccggtg

SEQ ID NO: 336045 - DNA, 25 bp, Artificial
  Probe
caccggtggcaaacggaaagacaat

SEQ ID NO: 336046 - DNA, 25 bp, Artificial
  Probe
ccaaaattggagctggccgcctcat

SEQ ID NO: 336047 - DNA, 25 bp, Artificial
  Probe
ttcaaatttggctcacatggcgagg

SEQ ID NO: 336048 - DNA, 25 bp, Artificial
  Probe
gcaactacagcgtcctacgggtgtg

SEQ ID NO: 336049 - DNA, 25 bp, Artificial
  Probe
cagatgatgtgaagcgccgggtcaa

SEQ ID NO: 336050 - DNA, 25 bp, Artificial
  Probe
ttggcattgacctcggatggccacg

SEQ ID NO: 336051 - DNA, 25 bp, Artificial
  Probe
ggattccaatggaaacatcatcgtg

SEQ ID NO: 336052 - DNA, 25 bp, Artificial
  Probe
cttggctcatggagggacggacata

SEQ ID NO: 336053 - DNA, 25 bp, Artificial
  Probe
ctggcagtcatgtgcgccagaaggc

SEQ ID NO: 336054 - DNA, 25 bp, Artificial
  Probe
acaccaatggagacattattgtggc

SEQ ID NO: 336055 - DNA, 25 bp, Artificial
  Probe
aatgtattcaggttttctccaatga

SEQ ID NO: 336056 - DNA, 25 bp, Artificial
  Probe
ggtgaattcaccaatttacacccgc

SEQ ID NO: 336057 - DNA, 25 bp, Artificial
  Probe
tgctttaaggcctatcgatacctcc

SEQ ID NO: 336058 - DNA, 25 bp, Artificial
  Probe
cagcaagcatatattcctactagtg

SEQ ID NO: 336059 - DNA, 25 bp, Artificial
  Probe
gcaaaagcccacatcagcattccag

SEQ ID NO: 336060 - DNA, 25 bp, Artificial
  Probe
catcccagtggcatagttcaccaag

SEQ ID NO: 336061 - DNA, 25 bp, Artificial
  Probe
ggatttccattgagtccaacaaaac

SEQ ID NO: 336062 - DNA, 25 bp, Artificial
  Probe
tgggcatcgaagacagcaagcatat

SEQ ID NO: 336063 - DNA, 25 bp, Artificial
  Probe
tctggctggaagtgcgcacctcgga

SEQ ID NO: 336064 - DNA, 25 bp, Artificial
  Probe
gccagtatccatatatgtgaaaact

SEQ ID NO: 336065 - DNA, 25 bp, Artificial
  Probe
attgagtccaacaaaactcagccag

SEQ ID NO: 336066 - DNA, 25 bp, Artificial
  Probe
tagttcaccaagtccccgtgggcat

SEQ ID NO: 336067 - DNA, 25 bp, Artificial
  Probe
ctggaagtgcgcacctcggaggaca

SEQ ID NO: 336068 - DNA, 25 bp, Artificial
  Probe
tcagcatttcggaactgggcatcaa

SEQ ID NO: 336069 - DNA, 25 bp, Artificial
  Probe
gaaactttgggcatcgaagacagca

SEQ ID NO: 336070 - DNA, 25 bp, Artificial
  Probe
acggaagtcccaaccacacagcagt

SEQ ID NO: 336071 - DNA, 25 bp, Artificial
  Probe
cggaagtcccaaccacacagcagtg

SEQ ID NO: 336072 - DNA, 25 bp, Artificial
  Probe
aaagcccacatcagcattccagcag

SEQ ID NO: 336073 - DNA, 25 bp, Artificial
  Probe
gcatcgaagacagcaagcatatatt

SEQ ID NO: 336074 - DNA, 25 bp, Artificial
  Probe
gaggacagcccactctgcttccgta

SEQ ID NO: 336075 - DNA, 25 bp, Artificial
  Probe
aggttcagcatttcggaactgggca

SEQ ID NO: 336076 - DNA, 25 bp, Artificial
  Probe
gcaagcatatattcctactagtgtt

SEQ ID NO: 336077 - DNA, 25 bp, Artificial
  Probe
tgcatgcccatctggctggaagtgc

SEQ ID NO: 336078 - DNA, 25 bp, Artificial
  Probe
atcgaagacagcaagcatatattcc

SEQ ID NO: 336079 - DNA, 25 bp, Artificial
  Probe
cattcttacattgcagcatcgcctg

SEQ ID NO: 336080 - DNA, 25 bp, Artificial
  Probe
ttacattgcagcatcgcctgcatat

SEQ ID NO: 336081 - DNA, 25 bp, Artificial
  Probe
cacatcagcattccagcagcagcat

SEQ ID NO: 336082 - DNA, 25 bp, Artificial
  Probe
agtcccaaccacacagcagtgcatg

SEQ ID NO: 336083 - DNA, 25 bp, Artificial
  Probe
tcagtagtgctgcacccgtggccca

SEQ ID NO: 336084 - DNA, 25 bp, Artificial
  Probe
ggaggacagcccactctgcttccgt

SEQ ID NO: 336085 - DNA, 25 bp, Artificial
  Probe
catcaactgccctcagtagtgctgc

SEQ ID NO: 336086 - DNA, 25 bp, Artificial
  Probe
tcggaactgggcatcaagaatggaa

SEQ ID NO: 336087 - DNA, 25 bp, Artificial
  Probe
aactcagccagtatccatatatgtg

SEQ ID NO: 336088 - DNA, 25 bp, Artificial
  Probe
agcatttgaacctgagccaggttca

SEQ ID NO: 336089 - DNA, 25 bp, Artificial
  Probe
gccctcagtagtgctgcacccgtgg

SEQ ID NO: 336090 - DNA, 25 bp, Artificial
  Probe
tgcccatctggctggaagtgcgcac

SEQ ID NO: 336091 - DNA, 25 bp, Artificial
  Probe
ctctccgtgtacctcaagacctatg

SEQ ID NO: 336092 - DNA, 25 bp, Artificial
  Probe
agtatccatatatgtgaaaactcga

SEQ ID NO: 336093 - DNA, 25 bp, Artificial
  Probe
tgccctcagtagtgctgcacccgtg

SEQ ID NO: 336094 - DNA, 25 bp, Artificial
  Probe
tgaacctgagccaggttcagcattt

SEQ ID NO: 336095 - DNA, 25 bp, Artificial
  Probe
gagtccaacaaaactcagccagtat

SEQ ID NO: 336096 - DNA, 25 bp, Artificial
  Probe
tgcagcatcgcctgcatatactgga

SEQ ID NO: 336097 - DNA, 25 bp, Artificial
  Probe
cagtgcatgcccatctggctggaag

SEQ ID NO: 336098 - DNA, 25 bp, Artificial
  Probe
gaagtgcgcacctcggaggacagcc

SEQ ID NO: 336099 - DNA, 25 bp, Artificial
  Probe
gtacctcaagacctatgttacagca

SEQ ID NO: 336100 - DNA, 25 bp, Artificial
  Probe
aagctcaatgatacaaacgtttgat

SEQ ID NO: 336101 - DNA, 25 bp, Artificial
  Probe
gcatttcggaactgggcatcaagaa

SEQ ID NO: 336102 - DNA, 25 bp, Artificial
  Probe
ctcgaaagcagtttattgaggaagc

SEQ ID NO: 336103 - DNA, 25 bp, Artificial
  Probe
tcaactgccctcagtagtgctgcac

SEQ ID NO: 336104 - DNA, 25 bp, Artificial
  Probe
gaatctaccagtgctttatcctctg

SEQ ID NO: 336105 - DNA, 25 bp, Artificial
  Probe
agtagagtagctgatcctcgaggag

SEQ ID NO: 336106 - DNA, 25 bp, Artificial
  Probe
cagcggcaccagctgtggtggcctc

SEQ ID NO: 336107 - DNA, 25 bp, Artificial
  Probe
gtgctttatcctctgaacaaagctc

SEQ ID NO: 336108 - DNA, 25 bp, Artificial
  Probe
ccagtgtcacctcttaacccaagag

SEQ ID NO: 336109 - DNA, 25 bp, Artificial
  Probe
ccgagtctcaggaaattgatgagga

SEQ ID NO: 336110 - DNA, 25 bp, Artificial
  Probe
tgatggaagtgacctgagcgacaac

SEQ ID NO: 336111 - DNA, 25 bp, Artificial
  Probe
tgtcacctcttaacccaagagtgga

SEQ ID NO: 336112 - DNA, 25 bp, Artificial
  Probe
ccagtgctttatcctctgaacaaag

SEQ ID NO: 336113 - DNA, 25 bp, Artificial
  Probe
acctgagcgacaacatgtctgaggg

SEQ ID NO: 336114 - DNA, 25 bp, Artificial
  Probe
ccttgaagaagcagctgaggagcag

SEQ ID NO: 336115 - DNA, 25 bp, Artificial
  Probe
gcaaacacctcaatcgccatttggt

SEQ ID NO: 336116 - DNA, 25 bp, Artificial
  Probe
ccactgcggtttgtgaaatggaagt

SEQ ID NO: 336117 - DNA, 25 bp, Artificial
  Probe
ttaatgtgtacttccttgaagaagc

SEQ ID NO: 336118 - DNA, 25 bp, Artificial
  Probe
tgatgactcaggactgcatggggct

SEQ ID NO: 336119 - DNA, 25 bp, Artificial
  Probe
ggctgactccactgcggtttgtgaa

SEQ ID NO: 336120 - DNA, 25 bp, Artificial
  Probe
gtagaaccagtgtcacctcttaacc

SEQ ID NO: 336121 - DNA, 25 bp, Artificial
  Probe
gtggaccctgaagcagcggcaccag

SEQ ID NO: 336122 - DNA, 25 bp, Artificial
  Probe
cacagccatgatggaagtgacctga

SEQ ID NO: 336123 - DNA, 25 bp, Artificial
  Probe
agaccgtgtccctctgaaagactca

SEQ ID NO: 336124 - DNA, 25 bp, Artificial
  Probe
acctcaatcgccatttggttaatgt

SEQ ID NO: 336125 - DNA, 25 bp, Artificial
  Probe
tgcaccagatggtgaaacattacac

SEQ ID NO: 336126 - DNA, 25 bp, Artificial
  Probe
actgcatggggctcggccagcacca

SEQ ID NO: 336127 - DNA, 25 bp, Artificial
  Probe
cctcttaacccaagagtggaccctg

SEQ ID NO: 336128 - DNA, 25 bp, Artificial
  Probe
cattcacagccatgatggaagtgac

SEQ ID NO: 336129 - DNA, 25 bp, Artificial
  Probe
tggtgaaacattacacagcgagtgt

SEQ ID NO: 336130 - DNA, 25 bp, Artificial
  Probe
atgcaccagatggtgaaacattaca

SEQ ID NO: 336131 - DNA, 25 bp, Artificial
  Probe
gagtgtcaggctgactccactgcgg

SEQ ID NO: 336132 - DNA, 25 bp, Artificial
  Probe
agcggcaccagctgtggtggcctcc

SEQ ID NO: 336133 - DNA, 25 bp, Artificial
  Probe
ctcctatcactttggccgagtctca

SEQ ID NO: 336134 - DNA, 25 bp, Artificial
  Probe
acagcgagtgtcaggctgactccac

SEQ ID NO: 336135 - DNA, 25 bp, Artificial
  Probe
caggaagctacgtcaaaaagtggaa

SEQ ID NO: 336136 - DNA, 25 bp, Artificial
  Probe
ggacactgagcagaagacagaccgt

SEQ ID NO: 336137 - DNA, 25 bp, Artificial
  Probe
tctgaacaaagctcaaatgcaccag

SEQ ID NO: 336138 - DNA, 25 bp, Artificial
  Probe
gaagtggacactgagcagaagacag

SEQ ID NO: 336139 - DNA, 25 bp, Artificial
  Probe
ctcaggactgcatggggctcggcca

SEQ ID NO: 336140 - DNA, 25 bp, Artificial
  Probe
tcactttggccgagtctcaggaaat

SEQ ID NO: 336141 - DNA, 25 bp, Artificial
  Probe
ggaagtgacctgagcgacaacatgt

SEQ ID NO: 336142 - DNA, 25 bp, Artificial
  Probe
cgccatttggttaatgtgtacttcc

SEQ ID NO: 336143 - DNA, 25 bp, Artificial
  Probe
tcaaatgcaccagatggtgaaacat

SEQ ID NO: 336144 - DNA, 25 bp, Artificial
  Probe
actccactgcggtttgtgaaatgga

SEQ ID NO: 336145 - DNA, 25 bp, Artificial
  Probe
ctggctgctcccatggaatctacca

SEQ ID NO: 336146 - DNA, 25 bp, Artificial
  Probe
tgagcagaagacagaccgtgtccct

SEQ ID NO: 336147 - DNA, 25 bp, Artificial
  Probe
ctgagcgacaacatgtctgagggga

SEQ ID NO: 336148 - DNA, 25 bp, Artificial
  Probe
gaagacagaccgtgtccctctgaaa

SEQ ID NO: 336149 - DNA, 25 bp, Artificial
  Probe
gggctcggccagcaccacaggaagc

SEQ ID NO: 336150 - DNA, 25 bp, Artificial
  Probe
aagcacagccaacacattcttctgg

SEQ ID NO: 336151 - DNA, 25 bp, Artificial
  Probe
tctgactccggcatttcactgaaca

SEQ ID NO: 336152 - DNA, 25 bp, Artificial
  Probe
gagcaattcaacgaagctcagcttg

SEQ ID NO: 336153 - DNA, 25 bp, Artificial
  Probe
ggacctaaagcacagccaacacatt

SEQ ID NO: 336154 - DNA, 25 bp, Artificial
  Probe
gtcgccagctcaagggcacagtgct

SEQ ID NO: 336155 - DNA, 25 bp, Artificial
  Probe
gagtcttccatttacggagacccac

SEQ ID NO: 336156 - DNA, 25 bp, Artificial
  Probe
gacttgggccacttaaaagacgaga

SEQ ID NO: 336157 - DNA, 25 bp, Artificial
  Probe
cttctggggatacagtacagcctct

SEQ ID NO: 336158 - DNA, 25 bp, Artificial
  Probe
aatctccctgttgatgacttcaatg

SEQ ID NO: 336159 - DNA, 25 bp, Artificial
  Probe
ctctgtcgccagctcaagggcacag

SEQ ID NO: 336160 - DNA, 25 bp, Artificial
  Probe
gtcctggtcatcaaaaagtcccatt

SEQ ID NO: 336161 - DNA, 25 bp, Artificial
  Probe
tcagtgactcggaaatggaagagct

SEQ ID NO: 336162 - DNA, 25 bp, Artificial
  Probe
tctcacaagagatgagcttagggca

SEQ ID NO: 336163 - DNA, 25 bp, Artificial
  Probe
cgctcagaactgtaggaaaaggaag

SEQ ID NO: 336164 - DNA, 25 bp, Artificial
  Probe
cgagcatccccagagcactctgtgg

SEQ ID NO: 336165 - DNA, 25 bp, Artificial
  Probe
cacactgaaggcacggtggagttca

SEQ ID NO: 336166 - DNA, 25 bp, Artificial
  Probe
gtacagcctctgtcgccagctcaag

SEQ ID NO: 336167 - DNA, 25 bp, Artificial
  Probe
cagtgactcggaaatggaagagcta

SEQ ID NO: 336168 - DNA, 25 bp, Artificial
  Probe
agcatgccttcctctgctgccatta

SEQ ID NO: 336169 - DNA, 25 bp, Artificial
  Probe
aggcacggtggagttcaatgactct

SEQ ID NO: 336170 - DNA, 25 bp, Artificial
  Probe
actgaacacaagtcccagccgagca

SEQ ID NO: 336171 - DNA, 25 bp, Artificial
  Probe
ggagttcaatgactctgactccggc

SEQ ID NO: 336172 - DNA, 25 bp, Artificial
  Probe
tccccagagcactctgtggagtctt

SEQ ID NO: 336173 - DNA, 25 bp, Artificial
  Probe
atgacttcaatgaaatgatgtccaa

SEQ ID NO: 336174 - DNA, 25 bp, Artificial
  Probe
ctgggttcagtgactcggaaatgga

SEQ ID NO: 336175 - DNA, 25 bp, Artificial
  Probe
cctgttgatgacttcaatgaaatga

SEQ ID NO: 336176 - DNA, 25 bp, Artificial
  Probe
cgaatcccagtgtgaaaatacaaca

SEQ ID NO: 336177 - DNA, 25 bp, Artificial
  Probe
cttgcattaattcgagatatacgca

SEQ ID NO: 336178 - DNA, 25 bp, Artificial
  Probe
gacagtgcccctggaagtgtcaaac

SEQ ID NO: 336179 - DNA, 25 bp, Artificial
  Probe
cccctggaagtgtcaaacagaatgg

SEQ ID NO: 336180 - DNA, 25 bp, Artificial
  Probe
agagctagacagtgcccctggaagt

SEQ ID NO: 336181 - DNA, 25 bp, Artificial
  Probe
taaagttgccgctcagaactgtagg

SEQ ID NO: 336182 - DNA, 25 bp, Artificial
  Probe
aagacaaacattcaagccgattaga

SEQ ID NO: 336183 - DNA, 25 bp, Artificial
  Probe
gtccaaggagcaattcaacgaagct

SEQ ID NO: 336184 - DNA, 25 bp, Artificial
  Probe
gggatacagtacagcctctgtcgcc

SEQ ID NO: 336185 - DNA, 25 bp, Artificial
  Probe
tacagtacagcctctgtcgccagct

SEQ ID NO: 336186 - DNA, 25 bp, Artificial
  Probe
actctgtggagtcttccatttacgg

SEQ ID NO: 336187 - DNA, 25 bp, Artificial
  Probe
agacagtgcccctggaagtgtcaaa

SEQ ID NO: 336188 - DNA, 25 bp, Artificial
  Probe
agaagtacctgtgagtcctggtcat

SEQ ID NO: 336189 - DNA, 25 bp, Artificial
  Probe
aaatgatgtccaaggagcaattcaa

SEQ ID NO: 336190 - DNA, 25 bp, Artificial
  Probe
aagagctagacagtgcccctggaag

SEQ ID NO: 336191 - DNA, 25 bp, Artificial
  Probe
aatgactctgactccggcatttcac

SEQ ID NO: 336192 - DNA, 25 bp, Artificial
  Probe
caaacagaatggacctaaagcacag

SEQ ID NO: 336193 - DNA, 25 bp, Artificial
  Probe
agtcgctctctgaacttctgggcgg

SEQ ID NO: 336194 - DNA, 25 bp, Artificial
  Probe
cccattgagggctgtgatctgtccc

SEQ ID NO: 336195 - DNA, 25 bp, Artificial
  Probe
caccgcctgggttcagtgactcgga

SEQ ID NO: 336196 - DNA, 25 bp, Artificial
  Probe
gcaggggatcccagcaccgtctgct

SEQ ID NO: 336197 - DNA, 25 bp, Artificial
  Probe
ggttaacaaggtctgggaccagtct

SEQ ID NO: 336198 - DNA, 25 bp, Artificial
  Probe
agtctgcaggaagacaactgcgccc

SEQ ID NO: 336199 - DNA, 25 bp, Artificial
  Probe
cagtataagtctcagcctgaagaac

SEQ ID NO: 336200 - DNA, 25 bp, Artificial
  Probe
agtctcagcctgaagaactcctcct

SEQ ID NO: 336201 - DNA, 25 bp, Artificial
  Probe
ccagactgtccttggcacggatacc

SEQ ID NO: 336202 - DNA, 25 bp, Artificial
  Probe
ccactgctactcttaagatccttgg

SEQ ID NO: 336203 - DNA, 25 bp, Artificial
  Probe
cactgtcccaggttaacaaggtctg

SEQ ID NO: 336204 - DNA, 25 bp, Artificial
  Probe
cctgcggtcatctctgcactgttac

SEQ ID NO: 336205 - DNA, 25 bp, Artificial
  Probe
taagtctcagcctgaagaactcctc

SEQ ID NO: 336206 - DNA, 25 bp, Artificial
  Probe
gaagtccactgctactcttaagatc

SEQ ID NO: 336207 - DNA, 25 bp, Artificial
  Probe
gtcttcagtataagtctcagcctga

SEQ ID NO: 336208 - DNA, 25 bp, Artificial
  Probe
agtcttcagtataagtctcagcctg

SEQ ID NO: 336209 - DNA, 25 bp, Artificial
  Probe
gatagccaaggctcttaggcgctgc

SEQ ID NO: 336210 - DNA, 25 bp, Artificial
  Probe
acagctgggtccagactgtccttgg

SEQ ID NO: 336211 - DNA, 25 bp, Artificial
  Probe
ttaggcgctgccagcgctcagttcc

SEQ ID NO: 336212 - DNA, 25 bp, Artificial
  Probe
caaggtctgggaccagtcttcagta

SEQ ID NO: 336213 - DNA, 25 bp, Artificial
  Probe
agtataagtctcagcctgaagaact

SEQ ID NO: 336214 - DNA, 25 bp, Artificial
  Probe
attcggcacagctgggtccagactg

SEQ ID NO: 336215 - DNA, 25 bp, Artificial
  Probe
gcacagctgggtccagactgtcctt

SEQ ID NO: 336216 - DNA, 25 bp, Artificial
  Probe
cacagacttttgtacttagctccag

SEQ ID NO: 336217 - DNA, 25 bp, Artificial
  Probe
ggaccagtcttcagtataagtctca

SEQ ID NO: 336218 - DNA, 25 bp, Artificial
  Probe
gctcttaggcgctgccagcgctcag

SEQ ID NO: 336219 - DNA, 25 bp, Artificial
  Probe
tactcttaagatccttgggttggtt

SEQ ID NO: 336220 - DNA, 25 bp, Artificial
  Probe
cggtcatctctgcactgttactctc

SEQ ID NO: 336221 - DNA, 25 bp, Artificial
  Probe
gttaacaaggtctgggaccagtctt

SEQ ID NO: 336222 - DNA, 25 bp, Artificial
  Probe
cgcattcggcacagctgggtccaga

SEQ ID NO: 336223 - DNA, 25 bp, Artificial
  Probe
tgctcgccgcattcggcacagctgg

SEQ ID NO: 336224 - DNA, 25 bp, Artificial
  Probe
agcattcacagacttttgtacttag

SEQ ID NO: 336225 - DNA, 25 bp, Artificial
  Probe
tctgcaggaagacaactgcgccctg

SEQ ID NO: 336226 - DNA, 25 bp, Artificial
  Probe
gtgcagatagccaaggctcttaggc

SEQ ID NO: 336227 - DNA, 25 bp, Artificial
  Probe
gccctgggtctccaccgcaggggat

SEQ ID NO: 336228 - DNA, 25 bp, Artificial
  Probe
agccaaggctcttaggcgctgccag

SEQ ID NO: 336229 - DNA, 25 bp, Artificial
  Probe
tgcagatagccaaggctcttaggcg

SEQ ID NO: 336230 - DNA, 25 bp, Artificial
  Probe
tcgaaccgtggctggaagtccactg

SEQ ID NO: 336231 - DNA, 25 bp, Artificial
  Probe
tcctcctcatctcagtctgcaggaa

SEQ ID NO: 336232 - DNA, 25 bp, Artificial
  Probe
gccgcattcggcacagctgggtcca

SEQ ID NO: 336233 - DNA, 25 bp, Artificial
  Probe
ttgtacttagctccagcctgaaccc

SEQ ID NO: 336234 - DNA, 25 bp, Artificial
  Probe
caggaagacaactgcgccctgggtc

SEQ ID NO: 336235 - DNA, 25 bp, Artificial
  Probe
ctactcttaagatccttgggttggt

SEQ ID NO: 336236 - DNA, 25 bp, Artificial
  Probe
tgaggaccccactgtcccaggttaa

SEQ ID NO: 336237 - DNA, 25 bp, Artificial
  Probe
ctcttaagatccttgggttggttat

SEQ ID NO: 336238 - DNA, 25 bp, Artificial
  Probe
ctcctgcggtcatctctgcactgtt

SEQ ID NO: 336239 - DNA, 25 bp, Artificial
  Probe
gcattcacagacttttgtacttagc

SEQ ID NO: 336240 - DNA, 25 bp, Artificial
  Probe
aggggatcccagcaccgtctgctcg

SEQ ID NO: 336241 - DNA, 25 bp, Artificial
  Probe
tgtcccaggttaacaaggtctggga

SEQ ID NO: 336242 - DNA, 25 bp, Artificial
  Probe
taggcagttcttgtacacacttgga

SEQ ID NO: 336243 - DNA, 25 bp, Artificial
  Probe
gtattactgtacacaggatagctgg

SEQ ID NO: 336244 - DNA, 25 bp, Artificial
  Probe
cccccaagctcagttcagcagggaa

SEQ ID NO: 336245 - DNA, 25 bp, Artificial
  Probe
tgtcctgtagctcttcctcctactg

SEQ ID NO: 336246 - DNA, 25 bp, Artificial
  Probe
ccagtattactgtacacaggatagc

SEQ ID NO: 336247 - DNA, 25 bp, Artificial
  Probe
gaaatggctcccagtattactgtac

SEQ ID NO: 336248 - DNA, 25 bp, Artificial
  Probe
ccccactgtgacactttctttatgg

SEQ ID NO: 336249 - DNA, 25 bp, Artificial
  Probe
ttttaacagcttgaaatggctccca

SEQ ID NO: 336250 - DNA, 25 bp, Artificial
  Probe
ctcccagtattactgtacacaggat

SEQ ID NO: 336251 - DNA, 25 bp, Artificial
  Probe
cccagtattactgtacacaggatag

SEQ ID NO: 336252 - DNA, 25 bp, Artificial
  Probe
gtggtttccccactgtgacactttc

SEQ ID NO: 336253 - DNA, 25 bp, Artificial
  Probe
aagctcagttcagcagggaactgaa

SEQ ID NO: 336254 - DNA, 25 bp, Artificial
  Probe
gacagggtaggcagttcttgtacac

SEQ ID NO: 336255 - DNA, 25 bp, Artificial
  Probe
agttcagcagggaactgaacggaga

SEQ ID NO: 336256 - DNA, 25 bp, Artificial
  Probe
atttttaacagcttgaaatggctcc

SEQ ID NO: 336257 - DNA, 25 bp, Artificial
  Probe
agtggtttccccactgtgacacttt

SEQ ID NO: 336258 - DNA, 25 bp, Artificial
  Probe
acagggtaggcagttcttgtacaca

SEQ ID NO: 336259 - DNA, 25 bp, Artificial
  Probe
gcttgaaatggctcccagtattact

SEQ ID NO: 336260 - DNA, 25 bp, Artificial
  Probe
gacactttctttatgggttttcaat

SEQ ID NO: 336261 - DNA, 25 bp, Artificial
  Probe
cccaagctcagttcagcagggaact

SEQ ID NO: 336262 - DNA, 25 bp, Artificial
  Probe
ggactggcccaggtagcccccagtg

SEQ ID NO: 336263 - DNA, 25 bp, Artificial
  Probe
taacagcttgaaatggctcccagta

SEQ ID NO: 336264 - DNA, 25 bp, Artificial
  Probe
ggctcccagtattactgtacacagg

SEQ ID NO: 336265 - DNA, 25 bp, Artificial
  Probe
ttaacagcttgaaatggctcccagt

SEQ ID NO: 336266 - DNA, 25 bp, Artificial
  Probe
gttcttgtacacacttggaatactc

SEQ ID NO: 336267 - DNA, 25 bp, Artificial
  Probe
aatggctcccagtattactgtacac

SEQ ID NO: 336268 - DNA, 25 bp, Artificial
  Probe
gggactggcccaggtagcccccagt

SEQ ID NO: 336269 - DNA, 25 bp, Artificial
  Probe
gtgacactttctttatgggttttca

SEQ ID NO: 336270 - DNA, 25 bp, Artificial
  Probe
ccactgtgacactttctttatgggt

SEQ ID NO: 336271 - DNA, 25 bp, Artificial
  Probe
agttcttgtacacacttggaatact

SEQ ID NO: 336272 - DNA, 25 bp, Artificial
  Probe
ggctagcacccatggctgcccaggg

SEQ ID NO: 336273 - DNA, 25 bp, Artificial
  Probe
ggtttccccactgtgacactttctt

SEQ ID NO: 336274 - DNA, 25 bp, Artificial
  Probe
tgtagctcttcctcctactgcctgg

SEQ ID NO: 336275 - DNA, 25 bp, Artificial
  Probe
actgtgacactttctttatgggttt

SEQ ID NO: 336276 - DNA, 25 bp, Artificial
  Probe
ggcagttcttgtacacacttggaat

SEQ ID NO: 336277 - DNA, 25 bp, Artificial
  Probe
gtaggcagttcttgtacacacttgg

SEQ ID NO: 336278 - DNA, 25 bp, Artificial
  Probe
tggtttccccactgtgacactttct

SEQ ID NO: 336279 - DNA, 25 bp, Artificial
  Probe
gctcccagtattactgtacacagga

SEQ ID NO: 336280 - DNA, 25 bp, Artificial
  Probe
acactttctttatgggttttcaatg

SEQ ID NO: 336281 - DNA, 25 bp, Artificial
  Probe
aaatggctcccagtattactgtaca

SEQ ID NO: 336282 - DNA, 25 bp, Artificial
  Probe
cactgtgacactttctttatgggtt

SEQ ID NO: 336283 - DNA, 25 bp, Artificial
  Probe
gactggcccaggtagcccccagtga

SEQ ID NO: 336284 - DNA, 25 bp, Artificial
  Probe
gggctagcacccatggctgcccagg

SEQ ID NO: 336285 - DNA, 25 bp, Artificial
  Probe
ccaagctcagttcagcagggaactg

SEQ ID NO: 336286 - DNA, 25 bp, Artificial
  Probe
tggctcccagtattactgtacacag

SEQ ID NO: 336287 - DNA, 25 bp, Artificial
  Probe
cagttcttgtacacacttggaatac

SEQ ID NO: 336288 - DNA, 25 bp, Artificial
  Probe
agaacatcgtgtagctttgtacagt

SEQ ID NO: 336289 - DNA, 25 bp, Artificial
  Probe
ggatctcaacgcacctaacagggag

SEQ ID NO: 336290 - DNA, 25 bp, Artificial
  Probe
tgttttgcatacacaggtgcatatg

SEQ ID NO: 336291 - DNA, 25 bp, Artificial
  Probe
gctttgtacagttatccagttatgt

SEQ ID NO: 336292 - DNA, 25 bp, Artificial
  Probe
catcgtgtagctttgtacagttatc

SEQ ID NO: 336293 - DNA, 25 bp, Artificial
  Probe
gggcatgggctgaatgctgctatct

SEQ ID NO: 336294 - DNA, 25 bp, Artificial
  Probe
atgttttgcatacacaggtgcatat

SEQ ID NO: 336295 - DNA, 25 bp, Artificial
  Probe
atgggctgaatgctgctatcttgaa

SEQ ID NO: 336296 - DNA, 25 bp, Artificial
  Probe
cttgaaatgtacacagctagacttg

SEQ ID NO: 336297 - DNA, 25 bp, Artificial
  Probe
gtgtagctttgtacagttatccagt

SEQ ID NO: 336298 - DNA, 25 bp, Artificial
  Probe
gatctcaacgcacctaacagggagg

SEQ ID NO: 336299 - DNA, 25 bp, Artificial
  Probe
ctttgtacagttatccagttatgta

SEQ ID NO: 336300 - DNA, 25 bp, Artificial
  Probe
agcaaaccatatcatgtgtggatct

SEQ ID NO: 336301 - DNA, 25 bp, Artificial
  Probe
gaacatagcgcagactttcatcatc

SEQ ID NO: 336302 - DNA, 25 bp, Artificial
  Probe
ctgctatcttgaaatgtacacagct

SEQ ID NO: 336303 - DNA, 25 bp, Artificial
  Probe
tagggcatgggctgaatgctgctat

SEQ ID NO: 336304 - DNA, 25 bp, Artificial
  Probe
agaacatagcgcagactttcatcat

SEQ ID NO: 336305 - DNA, 25 bp, Artificial
  Probe
aaatggatctcaacgcacctaacag

SEQ ID NO: 336306 - DNA, 25 bp, Artificial
  Probe
tgtatgttttgcatacacaggtgca

SEQ ID NO: 336307 - DNA, 25 bp, Artificial
  Probe
attagcaaaccatatcatgtgtgga

SEQ ID NO: 336308 - DNA, 25 bp, Artificial
  Probe
tttgcatacacaggtgcatatgtgt

SEQ ID NO: 336309 - DNA, 25 bp, Artificial
  Probe
atcttgaaatgtacacagctagact

SEQ ID NO: 336310 - DNA, 25 bp, Artificial
  Probe
agtttcagtggagaacatagcgcag

SEQ ID NO: 336311 - DNA, 25 bp, Artificial
  Probe
tagcaaaccatatcatgtgtggatc

SEQ ID NO: 336312 - DNA, 25 bp, Artificial
  Probe
atgctgctatcttgaaatgtacaca

SEQ ID NO: 336313 - DNA, 25 bp, Artificial
  Probe
tgaatgctgctatcttgaaatgtac

SEQ ID NO: 336314 - DNA, 25 bp, Artificial
  Probe
tcgtgtagctttgtacagttatcca

SEQ ID NO: 336315 - DNA, 25 bp, Artificial
  Probe
gtatgttttgcatacacaggtgcat

SEQ ID NO: 336316 - DNA, 25 bp, Artificial
  Probe
atattagcaaaccatatcatgtgtg

SEQ ID NO: 336317 - DNA, 25 bp, Artificial
  Probe
aacatcgtgtagctttgtacagtta

SEQ ID NO: 336318 - DNA, 25 bp, Artificial
  Probe
ttgcatacacaggtgcatatgtgta

SEQ ID NO: 336319 - DNA, 25 bp, Artificial
  Probe
aagtaagcattcaagtcagatcaag

SEQ ID NO: 336320 - DNA, 25 bp, Artificial
  Probe
gttttgcatacacaggtgcatatgt

SEQ ID NO: 336321 - DNA, 25 bp, Artificial
  Probe
ttgccagtgtttcagattttaaagc

SEQ ID NO: 336322 - DNA, 25 bp, Artificial
  Probe
ttagcaaaccatatcatgtgtggat

SEQ ID NO: 336323 - DNA, 25 bp, Artificial
  Probe
atacatcatacgtgtgtgttcaaag

SEQ ID NO: 336324 - DNA, 25 bp, Artificial
  Probe
ggctgaatgctgctatcttgaaatg

SEQ ID NO: 336325 - DNA, 25 bp, Artificial
  Probe
ctatcttgaaatgtacacagctaga

SEQ ID NO: 336326 - DNA, 25 bp, Artificial
  Probe
catacatcatacgtgtgtgttcaaa

SEQ ID NO: 336327 - DNA, 25 bp, Artificial
  Probe
tagctttgtacagttatccagttat

SEQ ID NO: 336328 - DNA, 25 bp, Artificial
  Probe
gcatgggctgaatgctgctatcttg

SEQ ID NO: 336329 - DNA, 25 bp, Artificial
  Probe
taagtaagcattcaagtcagatcaa

SEQ ID NO: 336330 - DNA, 25 bp, Artificial
  Probe
gctgctatcttgaaatgtacacagc

SEQ ID NO: 336331 - DNA, 25 bp, Artificial
  Probe
tgccagtgtttcagattttaaagcg

SEQ ID NO: 336332 - DNA, 25 bp, Artificial
  Probe
gatactagggcatgggctgaatgct

SEQ ID NO: 336333 - DNA, 25 bp, Artificial
  Probe
gggctgaatgctgctatcttgaaat

SEQ ID NO: 336334 - DNA, 25 bp, Artificial
  Probe
atccttccttctgtcagctgtgctg

SEQ ID NO: 336335 - DNA, 25 bp, Artificial
  Probe
aatccttccttctgtcagctgtgct

SEQ ID NO: 336336 - DNA, 25 bp, Artificial
  Probe
agacagatgttccagtgacaccaca

SEQ ID NO: 336337 - DNA, 25 bp, Artificial
  Probe
catacatggaatttgcctggccctg

SEQ ID NO: 336338 - DNA, 25 bp, Artificial
  Probe
gcttcttcctcatacatggaatttg

SEQ ID NO: 336339 - DNA, 25 bp, Artificial
  Probe
taccagacagatgttccagtgacac

SEQ ID NO: 336340 - DNA, 25 bp, Artificial
  Probe
ccttccttctgtcagctgtgctggg

SEQ ID NO: 336341 - DNA, 25 bp, Artificial
  Probe
ctgcctgtgctggaacaattgaatc

SEQ ID NO: 336342 - DNA, 25 bp, Artificial
  Probe
cttccttctgtcagctgtgctgggg

SEQ ID NO: 336343 - DNA, 25 bp, Artificial
  Probe
atcctgtgcatcatctgattggagg

SEQ ID NO: 336344 - DNA, 25 bp, Artificial
  Probe
ccatcctgtgcatcatctgattgga

SEQ ID NO: 336345 - DNA, 25 bp, Artificial
  Probe
gtaccagacagatgttccagtgaca

SEQ ID NO: 336346 - DNA, 25 bp, Artificial
  Probe
ccctgcctgtgctggaacaattgaa

SEQ ID NO: 336347 - DNA, 25 bp, Artificial
  Probe
ggaacaattgaatccttccttctgt

SEQ ID NO: 336348 - DNA, 25 bp, Artificial
  Probe
ggacaagcgccatcaacctattact

SEQ ID NO: 336349 - DNA, 25 bp, Artificial
  Probe
gtgcatcatctgattggaggcccag

SEQ ID NO: 336350 - DNA, 25 bp, Artificial
  Probe
tgttccagtgacaccacatcccaag

SEQ ID NO: 336351 - DNA, 25 bp, Artificial
  Probe
acccatcctgtgcatcatctgattg

SEQ ID NO: 336352 - DNA, 25 bp, Artificial
  Probe
attgaatccttccttctgtcagctg

SEQ ID NO: 336353 - DNA, 25 bp, Artificial
  Probe
tcctgtggcttcttcctcatacatg

SEQ ID NO: 336354 - DNA, 25 bp, Artificial
  Probe
gcatcatctgattggaggcccagga

SEQ ID NO: 336355 - DNA, 25 bp, Artificial
  Probe
gatgttccagtgacaccacatccca

SEQ ID NO: 336356 - DNA, 25 bp, Artificial
  Probe
ctcatacatggaatttgcctggccc

SEQ ID NO: 336357 - DNA, 25 bp, Artificial
  Probe
ctattacttacactggccataagag

SEQ ID NO: 336358 - DNA, 25 bp, Artificial
  Probe
gcctgtgctggaacaattgaatcct

SEQ ID NO: 336359 - DNA, 25 bp, Artificial
  Probe
cagatgttccagtgacaccacatcc

SEQ ID NO: 336360 - DNA, 25 bp, Artificial
  Probe
tcatctgattggaggcccaggacaa

SEQ ID NO: 336361 - DNA, 25 bp, Artificial
  Probe
ggggcagtaccagacagatgttcca

SEQ ID NO: 336362 - DNA, 25 bp, Artificial
  Probe
aggacaagcgccatcaacctattac

SEQ ID NO: 336363 - DNA, 25 bp, Artificial
  Probe
atggaatttgcctggccctgcctca

SEQ ID NO: 336364 - DNA, 25 bp, Artificial
  Probe
gattggaggcccaggacaagcgcca

SEQ ID NO: 336365 - DNA, 25 bp, Artificial
  Probe
tggcttcttcctcatacatggaatt

SEQ ID NO: 336366 - DNA, 25 bp, Artificial
  Probe
cttcctcatacatggaatttgcctg

SEQ ID NO: 336367 - DNA, 25 bp, Artificial
  Probe
ggcagtaccagacagatgttccagt

SEQ ID NO: 336368 - DNA, 25 bp, Artificial
  Probe
ccagacagatgttccagtgacacca

SEQ ID NO: 336369 - DNA, 25 bp, Artificial
  Probe
cctcatacatggaatttgcctggcc

SEQ ID NO: 336370 - DNA, 25 bp, Artificial
  Probe
agccctgcctgtgctggaacaattg

SEQ ID NO: 336371 - DNA, 25 bp, Artificial
  Probe
tgtggcttcttcctcatacatggaa

SEQ ID NO: 336372 - DNA, 25 bp, Artificial
  Probe
atacatggaatttgcctggccctgc

SEQ ID NO: 336373 - DNA, 25 bp, Artificial
  Probe
attggaggcccaggacaagcgccat

SEQ ID NO: 336374 - DNA, 25 bp, Artificial
  Probe
gtctccaaccctactgggaatgcca

SEQ ID NO: 336375 - DNA, 25 bp, Artificial
  Probe
tgaatccttccttctgtcagctgtg

SEQ ID NO: 336376 - DNA, 25 bp, Artificial
  Probe
tgtctccaaccctactgggaatgcc

SEQ ID NO: 336377 - DNA, 25 bp, Artificial
  Probe
tggaggcccaggacaagcgccatca

SEQ ID NO: 336378 - DNA, 25 bp, Artificial
  Probe
ctgtgcatcatctgattggaggccc

SEQ ID NO: 336379 - DNA, 25 bp, Artificial
  Probe
ctgtggcttcttcctcatacatgga

SEQ ID NO: 336380 - DNA, 25 bp, Artificial
  Probe
agcgccagtttgagcgctttaacca

SEQ ID NO: 336381 - DNA, 25 bp, Artificial
  Probe
ctcgacgcattctggcgagactaca

SEQ ID NO: 336382 - DNA, 25 bp, Artificial
  Probe
cgggacctgggctccatcatctgtg

SEQ ID NO: 336383 - DNA, 25 bp, Artificial
  Probe
ctacctcgacgcattctggcgagac

SEQ ID NO: 336384 - DNA, 25 bp, Artificial
  Probe
aaagcagacatgtgacatcaggctg

SEQ ID NO: 336385 - DNA, 25 bp, Artificial
  Probe
cgagactgctctgcaaggcaatgtc

SEQ ID NO: 336386 - DNA, 25 bp, Artificial
  Probe
gtcttctctaataagcaggacccac

SEQ ID NO: 336387 - DNA, 25 bp, Artificial
  Probe
gacatcaagttctctgagctcacct

SEQ ID NO: 336388 - DNA, 25 bp, Artificial
  Probe
ttctctaataagcaggacccacttg

SEQ ID NO: 336389 - DNA, 25 bp, Artificial
  Probe
cacttgagcgccagtttgagcgctt

SEQ ID NO: 336390 - DNA, 25 bp, Artificial
  Probe
ttcgggcggaatactgccagcacga

SEQ ID NO: 336391 - DNA, 25 bp, Artificial
  Probe
cgcattctggcgagactacattaat

SEQ ID NO: 336392 - DNA, 25 bp, Artificial
  Probe
actccagacccgaaggaaaagcaga

SEQ ID NO: 336393 - DNA, 25 bp, Artificial
  Probe
gctccatcatctgtgacatcaagtt

SEQ ID NO: 336394 - DNA, 25 bp, Artificial
  Probe
acacttgggagtcagagaaaacgcc

SEQ ID NO: 336395 - DNA, 25 bp, Artificial
  Probe
agacccgaaggaaaagcagacatgt

SEQ ID NO: 336396 - DNA, 25 bp, Artificial
  Probe
aatgtcttctctaataagcaggacc

SEQ ID NO: 336397 - DNA, 25 bp, Artificial
  Probe
agcagacatgtgacatcaggctgcg

SEQ ID NO: 336398 - DNA, 25 bp, Artificial
  Probe
gctctgcaaggcaatgtcttctcta

SEQ ID NO: 336399 - DNA, 25 bp, Artificial
  Probe
acttgagcgccagtttgagcgcttt

SEQ ID NO: 336400 - DNA, 25 bp, Artificial
  Probe
accacacttgggagtcagagaaaac

SEQ ID NO: 336401 - DNA, 25 bp, Artificial
  Probe
aagtcccgggacctgggctccatca

SEQ ID NO: 336402 - DNA, 25 bp, Artificial
  Probe
agttctctgagctcacctacctcga

SEQ ID NO: 336403 - DNA, 25 bp, Artificial
  Probe
ggacctgggctccatcatctgtgac

SEQ ID NO: 336404 - DNA, 25 bp, Artificial
  Probe
actatcctcaagtcccgggacctgg

SEQ ID NO: 336405 - DNA, 25 bp, Artificial
  Probe
agcgctttaaccaggccaacactat

SEQ ID NO: 336406 - DNA, 25 bp, Artificial
  Probe
ctgtgacatcaagttctctgagctc

SEQ ID NO: 336407 - DNA, 25 bp, Artificial
  Probe
ctaataagcaggacccacttgagcg

SEQ ID NO: 336408 - DNA, 25 bp, Artificial
  Probe
gactgctctgcaaggcaatgtcttc

SEQ ID NO: 336409 - DNA, 25 bp, Artificial
  Probe
agtcccgggacctgggctccatcat

SEQ ID NO: 336410 - DNA, 25 bp, Artificial
  Probe
cggaatactgccagcacgagactgc

SEQ ID NO: 336411 - DNA, 25 bp, Artificial
  Probe
acatgtgacatcaggctgcgagttc

SEQ ID NO: 336412 - DNA, 25 bp, Artificial
  Probe
cggaagtcagtgactccagacccga

SEQ ID NO: 336413 - DNA, 25 bp, Artificial
  Probe
taagcaggacccacttgagcgccag

SEQ ID NO: 336414 - DNA, 25 bp, Artificial
  Probe
ctgggctccatcatctgtgacatca

SEQ ID NO: 336415 - DNA, 25 bp, Artificial
  Probe
tcaagtcccgggacctgggctccat

SEQ ID NO: 336416 - DNA, 25 bp, Artificial
  Probe
tgagcgccagtttgagcgctttaac

SEQ ID NO: 336417 - DNA, 25 bp, Artificial
  Probe
cttgagcgccagtttgagcgcttta

SEQ ID NO: 336418 - DNA, 25 bp, Artificial
  Probe
aagttctctgagctcacctacctcg

SEQ ID NO: 336419 - DNA, 25 bp, Artificial
  Probe
agggagaaccacacttgggagtcag

SEQ ID NO: 336420 - DNA, 25 bp, Artificial
  Probe
gagttcgggcggaatactgccagca

SEQ ID NO: 336421 - DNA, 25 bp, Artificial
  Probe
cagacatgtgacatcaggctgcgag

SEQ ID NO: 336422 - DNA, 25 bp, Artificial
  Probe
cagtttgagcgctttaaccaggcca

SEQ ID NO: 336423 - DNA, 25 bp, Artificial
  Probe
atcatctgtgacatcaagttctctg

SEQ ID NO: 336424 - DNA, 25 bp, Artificial
  Probe
aggacccacttgagcgccagtttga

SEQ ID NO: 336425 - DNA, 25 bp, Artificial
  Probe
cagtgactccagacccgaaggaaaa

SEQ ID NO: 336426 - DNA, 25 bp, Artificial
  Probe
tggagcttcccgttctgtgaaaaaa

SEQ ID NO: 336427 - DNA, 25 bp, Artificial
  Probe
gctgcacatgcatcagtaaactaca

SEQ ID NO: 336428 - DNA, 25 bp, Artificial
  Probe
cttagcagccaccagaaagggtgtg

SEQ ID NO: 336429 - DNA, 25 bp, Artificial
  Probe
aatgtgctctcttggtggccgggtt

SEQ ID NO: 336430 - DNA, 25 bp, Artificial
  Probe
tttggggccagctggctgcccttcg

SEQ ID NO: 336431 - DNA, 25 bp, Artificial
  Probe
aacatgccaagatttctcaacatgg

SEQ ID NO: 336432 - DNA, 25 bp, Artificial
  Probe
gaactttggccgtggtgctaggcac

SEQ ID NO: 336433 - DNA, 25 bp, Artificial
  Probe
aatcgtacatcacatttgtcaagtg

SEQ ID NO: 336434 - DNA, 25 bp, Artificial
  Probe
gtagccaagaggacccggccatcta

SEQ ID NO: 336435 - DNA, 25 bp, Artificial
  Probe
cagtgtatacacgtgtacatatata

SEQ ID NO: 336436 - DNA, 25 bp, Artificial
  Probe
tctgccaggtggtctggcgccacgc

SEQ ID NO: 336437 - DNA, 25 bp, Artificial
  Probe
gatgtgaacgcaacaaactgactca

SEQ ID NO: 336438 - DNA, 25 bp, Artificial
  Probe
ctcttgaggactcagtggttcggcg

SEQ ID NO: 336439 - DNA, 25 bp, Artificial
  Probe
tatttttagctgctgaaatgccaag

SEQ ID NO: 336440 - DNA, 25 bp, Artificial
  Probe
catccccaagagcaggagaaaggga

SEQ ID NO: 336441 - DNA, 25 bp, Artificial
  Probe
aattctcctaaagcaggattcccag

SEQ ID NO: 336442 - DNA, 25 bp, Artificial
  Probe
ctgcccttcgccatctattgtgtgg

SEQ ID NO: 336443 - DNA, 25 bp, Artificial
  Probe
cagtaacattcatgagtcatggagg

SEQ ID NO: 336444 - DNA, 25 bp, Artificial
  Probe
cccttcgccatctattgtgtggtgg

SEQ ID NO: 336445 - DNA, 25 bp, Artificial
  Probe
cgcaaagggactggatgtgaacgca

SEQ ID NO: 336446 - DNA, 25 bp, Artificial
  Probe
ggttgtatactcaatcgtacatcac

SEQ ID NO: 336447 - DNA, 25 bp, Artificial
  Probe
tccaggtcccccagtgaggtctgaa

SEQ ID NO: 336448 - DNA, 25 bp, Artificial
  Probe
cccaagagcaggagaaagggagtca

SEQ ID NO: 336449 - DNA, 25 bp, Artificial
  Probe
tggttgtatactcaatcgtacatca

SEQ ID NO: 336450 - DNA, 25 bp, Artificial
  Probe
tgtatcttctggaggtgttcagggc

SEQ ID NO: 336451 - DNA, 25 bp, Artificial
  Probe
aagacatgtttcagaggtcaaaaca

SEQ ID NO: 336452 - DNA, 25 bp, Artificial
  Probe
atcatctatgccttccgcaaccagg

SEQ ID NO: 336453 - DNA, 25 bp, Artificial
  Probe
gtgtaaactctgaagccacaactta

SEQ ID NO: 336454 - DNA, 25 bp, Artificial
  Probe
atagaatattttgctgcacatgcat

SEQ ID NO: 336455 - DNA, 25 bp, Artificial
  Probe
aatgccaagacagtgttgccatccc

SEQ ID NO: 336456 - DNA, 25 bp, Artificial
  Probe
ggaagtaacattcacacgtggcatc

SEQ ID NO: 336457 - DNA, 25 bp, Artificial
  Probe
accacacttagcagccaccagaaag

SEQ ID NO: 336458 - DNA, 25 bp, Artificial
  Probe
gttactggtgcaagttaatgtgctc

SEQ ID NO: 336459 - DNA, 25 bp, Artificial
  Probe
cacaaatccaacatgccggcctttg

SEQ ID NO: 336460 - DNA, 25 bp, Artificial
  Probe
tgctctccacttccttctttgtggt

SEQ ID NO: 336461 - DNA, 25 bp, Artificial
  Probe
catctatctatcatctgtcccaggg

SEQ ID NO: 336462 - DNA, 25 bp, Artificial
  Probe
cccagaacacgagaaggaaggctgt

SEQ ID NO: 336463 - DNA, 25 bp, Artificial
  Probe
gtgaagacattccaatactgcttaa

SEQ ID NO: 336464 - DNA, 25 bp, Artificial
  Probe
gtttccaatccaaagtgcccttccg

SEQ ID NO: 336465 - DNA, 25 bp, Artificial
  Probe
aaccatgggatgaggcagtaacatt

SEQ ID NO: 336466 - DNA, 25 bp, Artificial
  Probe
gtgcagagcccaataaaaccaataa

SEQ ID NO: 336467 - DNA, 25 bp, Artificial
  Probe
tctgaagggctcctccgtgtctcct

SEQ ID NO: 336468 - DNA, 25 bp, Artificial
  Probe
tttgcaacagcactgcctagcacca

SEQ ID NO: 336469 - DNA, 25 bp, Artificial
  Probe
tgggtagccaagaggacccggccat

SEQ ID NO: 336470 - DNA, 25 bp, Artificial
  Probe
ggttcggcgcgagtctgactgcccc

SEQ ID NO: 336471 - DNA, 25 bp, Artificial
  Probe
caccagatcgctttgcaacagcact

SEQ ID NO: 336472 - DNA, 25 bp, Artificial
  Probe
cctctgacacactgcactagtctag

SEQ ID NO: 336473 - DNA, 25 bp, Artificial
  Probe
ctaacattttcttagggctattgaa

SEQ ID NO: 336474 - DNA, 25 bp, Artificial
  Probe
gtcaagcactaagtttgcagtcctg

SEQ ID NO: 336475 - DNA, 25 bp, Artificial
  Probe
atagcttctgtcaagcactaagttt

SEQ ID NO: 336476 - DNA, 25 bp, Artificial
  Probe
gatctgtgtagcttaaagaaacctt

SEQ ID NO: 336477 - DNA, 25 bp, Artificial
  Probe
gtgatgatgccctggctgaataggc

SEQ ID NO: 336478 - DNA, 25 bp, Artificial
  Probe
ttcctgcctcatgcaagtgtgtgct

SEQ ID NO: 336479 - DNA, 25 bp, Artificial
  Probe
tatagatttccagtgatgatgccct

SEQ ID NO: 336480 - DNA, 25 bp, Artificial
  Probe
agcacagtttagcacttggtttcca

SEQ ID NO: 336481 - DNA, 25 bp, Artificial
  Probe
gtgatctgtgtagcttaaagaaacc

SEQ ID NO: 336482 - DNA, 25 bp, Artificial
  Probe
ccttggtttcagtccccatgtgcta

SEQ ID NO: 336483 - DNA, 25 bp, Artificial
  Probe
gtttcagtccccatgtgctataatc

SEQ ID NO: 336484 - DNA, 25 bp, Artificial
  Probe
aagctgaaaggcttccttctatcaa

SEQ ID NO: 336485 - DNA, 25 bp, Artificial
  Probe
tgctatagatttccagtgatgatgc

SEQ ID NO: 336486 - DNA, 25 bp, Artificial
  Probe
acttgctggtacagctgaagtttgt

SEQ ID NO: 336487 - DNA, 25 bp, Artificial
  Probe
tcagtccccatgtgctataatcatg

SEQ ID NO: 336488 - DNA, 25 bp, Artificial
  Probe
ttctaagctgaaaggcttccttcta

SEQ ID NO: 336489 - DNA, 25 bp, Artificial
  Probe
gtccccatgtgctataatcatgcaa

SEQ ID NO: 336490 - DNA, 25 bp, Artificial
  Probe
tcacttgctggtacagctgaagttt

SEQ ID NO: 336491 - DNA, 25 bp, Artificial
  Probe
tccttgtcacttgctggtacagctg

SEQ ID NO: 336492 - DNA, 25 bp, Artificial
  Probe
aataggctttggtttcctgcctcat

SEQ ID NO: 336493 - DNA, 25 bp, Artificial
  Probe
ataggctttggtttcctgcctcatg

SEQ ID NO: 336494 - DNA, 25 bp, Artificial
  Probe
tcaatagcttctgtcaagcactaag

SEQ ID NO: 336495 - DNA, 25 bp, Artificial
  Probe
cttgcctctgacacactgcactagt

SEQ ID NO: 336496 - DNA, 25 bp, Artificial
  Probe
ctgcactagtctagagggtgtcatt

SEQ ID NO: 336497 - DNA, 25 bp, Artificial
  Probe
tggtttcctgcctcatgcaagtgtg

SEQ ID NO: 336498 - DNA, 25 bp, Artificial
  Probe
ttccagtgatgatgccctggctgaa

SEQ ID NO: 336499 - DNA, 25 bp, Artificial
  Probe
ctaatgttttcaagtgccttacttg

SEQ ID NO: 336500 - DNA, 25 bp, Artificial
  Probe
ttcctccttggtttcagtccccatg

SEQ ID NO: 336501 - DNA, 25 bp, Artificial
  Probe
cagtttagcacttggtttccagggt

SEQ ID NO: 336502 - DNA, 25 bp, Artificial
  Probe
tctaacattttcttagggctattga

SEQ ID NO: 336503 - DNA, 25 bp, Artificial
  Probe
taagtttgcagtcctggggtcgctt

SEQ ID NO: 336504 - DNA, 25 bp, Artificial
  Probe
tagcacttggtttccagggttttat

SEQ ID NO: 336505 - DNA, 25 bp, Artificial
  Probe
gtcacttgctggtacagctgaagtt

SEQ ID NO: 336506 - DNA, 25 bp, Artificial
  Probe
tctgtcaagcactaagtttgcagtc

SEQ ID NO: 336507 - DNA, 25 bp, Artificial
  Probe
cttgtcacttgctggtacagctgaa

SEQ ID NO: 336508 - DNA, 25 bp, Artificial
  Probe
cctcatgcaagtgtgtgcttgcttg

SEQ ID NO: 336509 - DNA, 25 bp, Artificial
  Probe
gctttggtttcctgcctcatgcaag

SEQ ID NO: 336510 - DNA, 25 bp, Artificial
  Probe
ggtttcctgcctcatgcaagtgtgt

SEQ ID NO: 336511 - DNA, 25 bp, Artificial
  Probe
actaagtttgcagtcctggggtcgc

SEQ ID NO: 336512 - DNA, 25 bp, Artificial
  Probe
cttgctggtacagctgaagtttgtt

SEQ ID NO: 336513 - DNA, 25 bp, Artificial
  Probe
gctgaaaggcttccttctatcaaac

SEQ ID NO: 336514 - DNA, 25 bp, Artificial
  Probe
gcactagtctagagggtgtcattgg

SEQ ID NO: 336515 - DNA, 25 bp, Artificial
  Probe
atctaacattttcttagggctattg

SEQ ID NO: 336516 - DNA, 25 bp, Artificial
  Probe
ttataccttaaggattcctaccagg

SEQ ID NO: 336517 - DNA, 25 bp, Artificial
  Probe
attctaagctgaaaggcttccttct

SEQ ID NO: 336518 - DNA, 25 bp, Artificial
  Probe
atcctggtgatcgagaagcccggcc

SEQ ID NO: 336519 - DNA, 25 bp, Artificial
  Probe
cactcctggctatagcacgcagctt

SEQ ID NO: 336520 - DNA, 25 bp, Artificial
  Probe
ccgagcaaggggtctgcaccctgga

SEQ ID NO: 336521 - DNA, 25 bp, Artificial
  Probe
cgtgactgcagtaaactccgcaggg

SEQ ID NO: 336522 - DNA, 25 bp, Artificial
  Probe
acacaggcagagactgggacaagga

SEQ ID NO: 336523 - DNA, 25 bp, Artificial
  Probe
tgggagagtctgtcaacttgcaaat

SEQ ID NO: 336524 - DNA, 25 bp, Artificial
  Probe
tgctgcccttgagtggatgccaccc

SEQ ID NO: 336525 - DNA, 25 bp, Artificial
  Probe
ccaggacacgggaaacacagagctc

SEQ ID NO: 336526 - DNA, 25 bp, Artificial
  Probe
ccaagggtgcagagactggcacccc

SEQ ID NO: 336527 - DNA, 25 bp, Artificial
  Probe
tcaacgtgctaggagagcctgccgt

SEQ ID NO: 336528 - DNA, 25 bp, Artificial
  Probe
ggggtgaacctccagaacctgctgg

SEQ ID NO: 336529 - DNA, 25 bp, Artificial
  Probe
gactgcagtaaactccgcaggggcg

SEQ ID NO: 336530 - DNA, 25 bp, Artificial
  Probe
ctcagacctcatcattggcaactcg

SEQ ID NO: 336531 - DNA, 25 bp, Artificial
  Probe
ccagcccttttgattctggggtcta

SEQ ID NO: 336532 - DNA, 25 bp, Artificial
  Probe
gacaccttcgtcagacctatatccg

SEQ ID NO: 336533 - DNA, 25 bp, Artificial
  Probe
ggggaccaggactccatcctcttca

SEQ ID NO: 336534 - DNA, 25 bp, Artificial
  Probe
gagtctgtcaacttgcaaatcccct

SEQ ID NO: 336535 - DNA, 25 bp, Artificial
  Probe
tctgcagaattgtacactgtgtgag

SEQ ID NO: 336536 - DNA, 25 bp, Artificial
  Probe
taccacaagaacagctaatgggggt

SEQ ID NO: 336537 - DNA, 25 bp, Artificial
  Probe
cctggctctgggagacaagttcttc

SEQ ID NO: 336538 - DNA, 25 bp, Artificial
  Probe
ctgcagcgtccgagcgtcacctaag

SEQ ID NO: 336539 - DNA, 25 bp, Artificial
  Probe
gtcagacctatatccgccaggtggg

SEQ ID NO: 336540 - DNA, 25 bp, Artificial
  Probe
actgaagcccccaagatccgtgttc

SEQ ID NO: 336541 - DNA, 25 bp, Artificial
  Probe
agaccaagataccacaagaacagct

SEQ ID NO: 336542 - DNA, 25 bp, Artificial
  Probe
ttgtcggttggaggttaaagcctct

SEQ ID NO: 336543 - DNA, 25 bp, Artificial
  Probe
gagcgagacttctcagaaccgccct

SEQ ID NO: 336544 - DNA, 25 bp, Artificial
  Probe
tcacagtgttggagcgataccaccc

SEQ ID NO: 336545 - DNA, 25 bp, Artificial
  Probe
gggccccaggtcatacctcctgggt

SEQ ID NO: 336546 - DNA, 25 bp, Artificial
  Probe
tccaccagaggttgggtccagaccc

SEQ ID NO: 336547 - DNA, 25 bp, Artificial
  Probe
gcaggcctcttggacccacaatggc

SEQ ID NO: 336548 - DNA, 25 bp, Artificial
  Probe
ccccctagtagcatcaagctattgg

SEQ ID NO: 336549 - DNA, 25 bp, Artificial
  Probe
acaagatgagtatccagggggaccc

SEQ ID NO: 336550 - DNA, 25 bp, Artificial
  Probe
gggccctccagctgtgctagaccag

SEQ ID NO: 336551 - DNA, 25 bp, Artificial
  Probe
cacgccctggacagccagagagtta

SEQ ID NO: 336552 - DNA, 25 bp, Artificial
  Probe
caggggaagcccaagccgcaggcct

SEQ ID NO: 336553 - DNA, 25 bp, Artificial
  Probe
tgcaccgtctcagacctcatcattg

SEQ ID NO: 336554 - DNA, 25 bp, Artificial
  Probe
tacacagtgcagaaggcagacaaaa

SEQ ID NO: 336555 - DNA, 25 bp, Artificial
  Probe
ttcattcgctcagctcagcgctcag

SEQ ID NO: 336556 - DNA, 25 bp, Artificial
  Probe
agacagggcaatggttcacagtgtt

SEQ ID NO: 336557 - DNA, 25 bp, Artificial
  Probe
cagtggggaccaggactccatcctc

SEQ ID NO: 336558 - DNA, 25 bp, Artificial
  Probe
acagccagagagttaatgtgcgcag

SEQ ID NO: 336559 - DNA, 25 bp, Artificial
  Probe
gtggcctcagtgacttagccaccac

SEQ ID NO: 336560 - DNA, 25 bp, Artificial
  Probe
tctggggtctacacttgcaaggcca

SEQ ID NO: 336561 - DNA, 25 bp, Artificial
  Probe
caaggagctggctcacatccacaag

SEQ ID NO: 336562 - DNA, 25 bp, Artificial
  Probe
gacctgaggatcaggcgcccaggca

SEQ ID NO: 336563 - DNA, 25 bp, Artificial
  Probe
acaaggagacagcttggtcacatac

SEQ ID NO: 336564 - DNA, 25 bp, Artificial
  Probe
acccagaaggcctggggatctggct

SEQ ID NO: 336565 - DNA, 25 bp, Artificial
  Probe
acggggactgtcagggtcaccagct

SEQ ID NO: 336566 - DNA, 25 bp, Artificial
  Probe
gtcagggtcaccagctgtggtccag

SEQ ID NO: 336567 - DNA, 25 bp, Artificial
  Probe
tctggctgcagctgaaaaagctggc

SEQ ID NO: 336568 - DNA, 25 bp, Artificial
  Probe
gctggcaaggcactgacagcaccca

SEQ ID NO: 336569 - DNA, 25 bp, Artificial
  Probe
ctgtggtccagttgctacccctact

SEQ ID NO: 336570 - DNA, 25 bp, Artificial
  Probe
cagagacctggtccacctggagctc

SEQ ID NO: 336571 - DNA, 25 bp, Artificial
  Probe
agctgtcagaaggtgtgtcatgtac

SEQ ID NO: 336572 - DNA, 25 bp, Artificial
  Probe
agggtcaccagctgtggtccagttg

SEQ ID NO: 336573 - DNA, 25 bp, Artificial
  Probe
agagacctggtccacctggagctct

SEQ ID NO: 336574 - DNA, 25 bp, Artificial
  Probe
tggtccagttgctacccctacttgt

SEQ ID NO: 336575 - DNA, 25 bp, Artificial
  Probe
tgtggtccagttgctacccctactt

SEQ ID NO: 336576 - DNA, 25 bp, Artificial
  Probe
gacctggtccacctggagctctgag

SEQ ID NO: 336577 - DNA, 25 bp, Artificial
  Probe
accagctgtggtccagttgctaccc

SEQ ID NO: 336578 - DNA, 25 bp, Artificial
  Probe
tcaccagctgtggtccagttgctac

SEQ ID NO: 336579 - DNA, 25 bp, Artificial
  Probe
agacctggtccacctggagctctga

SEQ ID NO: 336580 - DNA, 25 bp, Artificial
  Probe
tgtcagggtcaccagctgtggtcca

SEQ ID NO: 336581 - DNA, 25 bp, Artificial
  Probe
ggctgcagctgaaaaagctggcaag

SEQ ID NO: 336582 - DNA, 25 bp, Artificial
  Probe
tggctgcagctgaaaaagctggcaa

SEQ ID NO: 336583 - DNA, 25 bp, Artificial
  Probe
gtcaccagctgtggtccagttgcta

SEQ ID NO: 336584 - DNA, 25 bp, Artificial
  Probe
gggtcaccagctgtggtccagttgc

SEQ ID NO: 336585 - DNA, 25 bp, Artificial
  Probe
agctgtggtccagttgctaccccta

SEQ ID NO: 336586 - DNA, 25 bp, Artificial
  Probe
tcagggtcaccagctgtggtccagt

SEQ ID NO: 336587 - DNA, 25 bp, Artificial
  Probe
ctgtcagggtcaccagctgtggtcc

SEQ ID NO: 336588 - DNA, 25 bp, Artificial
  Probe
agctggcaaggcactgacagcaccc

SEQ ID NO: 336589 - DNA, 25 bp, Artificial
  Probe
ggtcaccagctgtggtccagttgct

SEQ ID NO: 336590 - DNA, 25 bp, Artificial
  Probe
gctgcagctgaaaaagctggcaagg

SEQ ID NO: 336591 - DNA, 25 bp, Artificial
  Probe
gtggtccagttgctacccctacttg

SEQ ID NO: 336592 - DNA, 25 bp, Artificial
  Probe
gagacctggtccacctggagctctg

SEQ ID NO: 336593 - DNA, 25 bp, Artificial
  Probe
ggatctggctgcagctgaaaaagct

SEQ ID NO: 336594 - DNA, 25 bp, Artificial
  Probe
tggggatctggctgcagctgaaaaa

SEQ ID NO: 336595 - DNA, 25 bp, Artificial
  Probe
cagggtcaccagctgtggtccagtt

SEQ ID NO: 336596 - DNA, 25 bp, Artificial
  Probe
ccagagacctggtccacctggagct

SEQ ID NO: 336597 - DNA, 25 bp, Artificial
  Probe
ctggctgcagctgaaaaagctggca

SEQ ID NO: 336598 - DNA, 25 bp, Artificial
  Probe
caccagctgtggtccagttgctacc

SEQ ID NO: 336599 - DNA, 25 bp, Artificial
  Probe
actgtcagggtcaccagctgtggtc

SEQ ID NO: 336600 - DNA, 25 bp, Artificial
  Probe
ggtccagttgctacccctacttgta

SEQ ID NO: 336601 - DNA, 25 bp, Artificial
  Probe
gggatctggctgcagctgaaaaagc

SEQ ID NO: 336602 - DNA, 25 bp, Artificial
  Probe
gatctggctgcagctgaaaaagctg

SEQ ID NO: 336603 - DNA, 25 bp, Artificial
  Probe
gctgtggtccagttgctacccctac

SEQ ID NO: 336604 - DNA, 25 bp, Artificial
  Probe
atctggctgcagctgaaaaagctgg

SEQ ID NO: 336605 - DNA, 25 bp, Artificial
  Probe
ctgtcagaaggtgtgtcatgtacat

SEQ ID NO: 336606 - DNA, 25 bp, Artificial
  Probe
cagctgtggtccagttgctacccct

SEQ ID NO: 336607 - DNA, 25 bp, Artificial
  Probe
gactgtcagggtcaccagctgtggt

SEQ ID NO: 336608 - DNA, 25 bp, Artificial
  Probe
tcaagaccagccttcatagtgaatg

SEQ ID NO: 336609 - DNA, 25 bp, Artificial
  Probe
gagttcaagaccagccttcatagtg

SEQ ID NO: 336610 - DNA, 25 bp, Artificial
  Probe
cagccttcatagtgaatgctgggct

SEQ ID NO: 336611 - DNA, 25 bp, Artificial
  Probe
gtattatatgatacagccgatgaca

SEQ ID NO: 336612 - DNA, 25 bp, Artificial
  Probe
accggcttgcagtgcccatagaggt

SEQ ID NO: 336613 - DNA, 25 bp, Artificial
  Probe
tgtgtatgatgagtcttaggcctgc

SEQ ID NO: 336614 - DNA, 25 bp, Artificial
  Probe
atgatgagtcttaggcctgcaccgg

SEQ ID NO: 336615 - DNA, 25 bp, Artificial
  Probe
ttctgtgggaacagggtttacactt

SEQ ID NO: 336616 - DNA, 25 bp, Artificial
  Probe
aacagcccacgctatcttggaactc

SEQ ID NO: 336617 - DNA, 25 bp, Artificial
  Probe
agcccacgctatcttggaactctca

SEQ ID NO: 336618 - DNA, 25 bp, Artificial
  Probe
ttgtttggaaacagcccacgctatc

SEQ ID NO: 336619 - DNA, 25 bp, Artificial
  Probe
gacatgtgcacacacagtcacacat

SEQ ID NO: 336620 - DNA, 25 bp, Artificial
  Probe
gcccacgctatcttggaactctcaa

SEQ ID NO: 336621 - DNA, 25 bp, Artificial
  Probe
gtgtctgttaacagaactcaggtcc

SEQ ID NO: 336622 - DNA, 25 bp, Artificial
  Probe
ccctcctgccctggaattaaaggca

SEQ ID NO: 336623 - DNA, 25 bp, Artificial
  Probe
tggaaacagcccacgctatcttgga

SEQ ID NO: 336624 - DNA, 25 bp, Artificial
  Probe
catgtgcacacacagtcacacattg

SEQ ID NO: 336625 - DNA, 25 bp, Artificial
  Probe
caggtccacagtaagagaaacaaac

SEQ ID NO: 336626 - DNA, 25 bp, Artificial
  Probe
tgaatgctgggctagcctgagctat

SEQ ID NO: 336627 - DNA, 25 bp, Artificial
  Probe
attatatgatacagccgatgacatt

SEQ ID NO: 336628 - DNA, 25 bp, Artificial
  Probe
gagacatgtgcacacacagtcacac

SEQ ID NO: 336629 - DNA, 25 bp, Artificial
  Probe
agcagtgtgagctgcctgtgtctgt

SEQ ID NO: 336630 - DNA, 25 bp, Artificial
  Probe
agaccagccttcatagtgaatgctg

SEQ ID NO: 336631 - DNA, 25 bp, Artificial
  Probe
tatgatgagtcttaggcctgcaccg

SEQ ID NO: 336632 - DNA, 25 bp, Artificial
  Probe
aattaaaggctgagctacctctcca

SEQ ID NO: 336633 - DNA, 25 bp, Artificial
  Probe
cctgagacatgtgcacacacagtca

SEQ ID NO: 336634 - DNA, 25 bp, Artificial
  Probe
catagtgaatgctgggctagcctga

SEQ ID NO: 336635 - DNA, 25 bp, Artificial
  Probe
gcacacacagtcacacattgttttg

SEQ ID NO: 336636 - DNA, 25 bp, Artificial
  Probe
gtgtgagctgcctgtgtctgttaac

SEQ ID NO: 336637 - DNA, 25 bp, Artificial
  Probe
agttagagcagtgtgagctgcctgt

SEQ ID NO: 336638 - DNA, 25 bp, Artificial
  Probe
gtgagttcaagaccagccttcatag

SEQ ID NO: 336639 - DNA, 25 bp, Artificial
  Probe
gagtcttaggcctgcaccggcttgc

SEQ ID NO: 336640 - DNA, 25 bp, Artificial
  Probe
acaacaaagactaagtagtgagtct

SEQ ID NO: 336641 - DNA, 25 bp, Artificial
  Probe
tctccacctgagacatgtgcacaca

SEQ ID NO: 336642 - DNA, 25 bp, Artificial
  Probe
tgcctgtgtctgttaacagaactca

SEQ ID NO: 336643 - DNA, 25 bp, Artificial
  Probe
tgatacagccgatgacattgtggct

SEQ ID NO: 336644 - DNA, 25 bp, Artificial
  Probe
ctttccagagtgtattatatgatac

SEQ ID NO: 336645 - DNA, 25 bp, Artificial
  Probe
gccgatgacattgtggcttatatat

SEQ ID NO: 336646 - DNA, 25 bp, Artificial
  Probe
gccgtgagttcaagaccagccttca

SEQ ID NO: 336647 - DNA, 25 bp, Artificial
  Probe
ctgcaccggcttgcagtgcccatag

SEQ ID NO: 336648 - DNA, 25 bp, Artificial
  Probe
ggctgagctacctctccacctgaga

SEQ ID NO: 336649 - DNA, 25 bp, Artificial
  Probe
ttgcagtgcccatagaggtcagaag

SEQ ID NO: 336650 - DNA, 25 bp, Artificial
  Probe
gaggacgctggatccttggaactaa

SEQ ID NO: 336651 - DNA, 25 bp, Artificial
  Probe
tcttaggcctgcaccggcttgcagt

SEQ ID NO: 336652 - DNA, 25 bp, Artificial
  Probe
atccttggaactaaagttagagcag

SEQ ID NO: 336653 - DNA, 25 bp, Artificial
  Probe
gaatgctgggctagcctgagctatg

SEQ ID NO: 336654 - DNA, 25 bp, Artificial
  Probe
agaggtcaccaaaaggaaggctatg

SEQ ID NO: 336655 - DNA, 25 bp, Artificial
  Probe
catctgatgaccatactgtctgcct

SEQ ID NO: 336656 - DNA, 25 bp, Artificial
  Probe
atgcaggaccaaaggaaggcaaaat

SEQ ID NO: 336657 - DNA, 25 bp, Artificial
  Probe
tcctggaattctaatttgagtggac

SEQ ID NO: 336658 - DNA, 25 bp, Artificial
  Probe
attctaatttgagtggacatctcct

SEQ ID NO: 336659 - DNA, 25 bp, Artificial
  Probe
atccctacagcgagtttattctggc

SEQ ID NO: 336660 - DNA, 25 bp, Artificial
  Probe
tgcctctgggatataaatgcaggac

SEQ ID NO: 336661 - DNA, 25 bp, Artificial
  Probe
ttaagaggtcaccaaaaggaaggct

SEQ ID NO: 336662 - DNA, 25 bp, Artificial
  Probe
cacacactgcggaggtcaactgcct

SEQ ID NO: 336663 - DNA, 25 bp, Artificial
  Probe
agatccaagtggagagtgtaatcct

SEQ ID NO: 336664 - DNA, 25 bp, Artificial
  Probe
aaaccagatccaagtggagagtgta

SEQ ID NO: 336665 - DNA, 25 bp, Artificial
  Probe
gggacaccagatccaatactacttc

SEQ ID NO: 336666 - DNA, 25 bp, Artificial
  Probe
caccctgcaaaaccagatccaagtg

SEQ ID NO: 336667 - DNA, 25 bp, Artificial
  Probe
tggcatctgctgcatgagtccttgt

SEQ ID NO: 336668 - DNA, 25 bp, Artificial
  Probe
cctgatcttagattaagaggtcacc

SEQ ID NO: 336669 - DNA, 25 bp, Artificial
  Probe
ggatgcacacactgcggaggtcaac

SEQ ID NO: 336670 - DNA, 25 bp, Artificial
  Probe
gaccatactgtctgcctctgggata

SEQ ID NO: 336671 - DNA, 25 bp, Artificial
  Probe
tctgttgctgatgatcagaaactta

SEQ ID NO: 336672 - DNA, 25 bp, Artificial
  Probe
aattctaatttgagtggacatctcc

SEQ ID NO: 336673 - DNA, 25 bp, Artificial
  Probe
acttctaagcccagccatttggtgg

SEQ ID NO: 336674 - DNA, 25 bp, Artificial
  Probe
catctgctgcatgagtccttgtttg

SEQ ID NO: 336675 - DNA, 25 bp, Artificial
  Probe
gcaaaaccagatccaagtggagagt

SEQ ID NO: 336676 - DNA, 25 bp, Artificial
  Probe
gatatgggacaccagatccaatact

SEQ ID NO: 336677 - DNA, 25 bp, Artificial
  Probe
aggtcaccaaaaggaaggctatggt

SEQ ID NO: 336678 - DNA, 25 bp, Artificial
  Probe
tcaccaaaaggaaggctatggtctc

SEQ ID NO: 336679 - DNA, 25 bp, Artificial
  Probe
ttgtagaggatgtggcctggcatct

SEQ ID NO: 336680 - DNA, 25 bp, Artificial
  Probe
actgtctgcctctgggatataaatg

SEQ ID NO: 336681 - DNA, 25 bp, Artificial
  Probe
tgggacaccagatccaatactactt

SEQ ID NO: 336682 - DNA, 25 bp, Artificial
  Probe
tgcggaggtcaactgcctctcattc

SEQ ID NO: 336683 - DNA, 25 bp, Artificial
  Probe
tctgcctctgggatataaatgcagg

SEQ ID NO: 336684 - DNA, 25 bp, Artificial
  Probe
atactgtctgcctctgggatataaa

SEQ ID NO: 336685 - DNA, 25 bp, Artificial
  Probe
taaatgcaggaccaaaggaaggcaa

SEQ ID NO: 336686 - DNA, 25 bp, Artificial
  Probe
agccatttggtggatgcacacactg

SEQ ID NO: 336687 - DNA, 25 bp, Artificial
  Probe
ttatgatatgggacaccagatccaa

SEQ ID NO: 336688 - DNA, 25 bp, Artificial
  Probe
ctcagctgttgtagaggatgtggcc

SEQ ID NO: 336689 - DNA, 25 bp, Artificial
  Probe
taatttgagtggacatctcctgagt

SEQ ID NO: 336690 - DNA, 25 bp, Artificial
  Probe
ctaagcccagccatttggtggatgc

SEQ ID NO: 336691 - DNA, 25 bp, Artificial
  Probe
tcagctgttgtagaggatgtggcct

SEQ ID NO: 336692 - DNA, 25 bp, Artificial
  Probe
gtggatgcacacactgcggaggtca

SEQ ID NO: 336693 - DNA, 25 bp, Artificial
  Probe
ggaaggctatggtctctcctggaat

SEQ ID NO: 336694 - DNA, 25 bp, Artificial
  Probe
tttggtggatgcacacactgcggag

SEQ ID NO: 336695 - DNA, 25 bp, Artificial
  Probe
ctgttgctgatgatcagaaacttat

SEQ ID NO: 336696 - DNA, 25 bp, Artificial
  Probe
gtaaatcgcgctcgttatatgccac

SEQ ID NO: 336697 - DNA, 25 bp, Artificial
  Probe
ccatttggtggatgcacacactgcg

SEQ ID NO: 336698 - DNA, 25 bp, Artificial
  Probe
tataaatgcaggaccaaaggaaggc

SEQ ID NO: 336699 - DNA, 25 bp, Artificial
  Probe
aatcctgatcttagattaagaggtc

SEQ ID NO: 336700 - DNA, 25 bp, Artificial
  Probe
aaatctctggaaagactccttcttg

SEQ ID NO: 336701 - DNA, 25 bp, Artificial
  Probe
tcaatgatattgaggctgtgactgc

SEQ ID NO: 336702 - DNA, 25 bp, Artificial
  Probe
gactccttcttggttataatgaaat

SEQ ID NO: 336703 - DNA, 25 bp, Artificial
  Probe
tatcgaatatggagctcccttttat

SEQ ID NO: 336704 - DNA, 25 bp, Artificial
  Probe
caatcttatagaactcaatgttgga

SEQ ID NO: 336705 - DNA, 25 bp, Artificial
  Probe
acacttccaacacatgccatggatg

SEQ ID NO: 336706 - DNA, 25 bp, Artificial
  Probe
actcttgagggtcaagaagaaacag

SEQ ID NO: 336707 - DNA, 25 bp, Artificial
  Probe
atctctctgactccacgttaaaagg

SEQ ID NO: 336708 - DNA, 25 bp, Artificial
  Probe
gttgccgttatcacttatgtatcta

SEQ ID NO: 336709 - DNA, 25 bp, Artificial
  Probe
gactgcagattcattcatcaatgca

SEQ ID NO: 336710 - DNA, 25 bp, Artificial
  Probe
tgactccacgttaaaaggaaagatt

SEQ ID NO: 336711 - DNA, 25 bp, Artificial
  Probe
gaagacgacagtcaggaccacactc

SEQ ID NO: 336712 - DNA, 25 bp, Artificial
  Probe
tataaagacccgaattgcatttgag

SEQ ID NO: 336713 - DNA, 25 bp, Artificial
  Probe
ctagaaacgatgcaaaccttaagaa

SEQ ID NO: 336714 - DNA, 25 bp, Artificial
  Probe
tgaagcaagcattctacattccaag

SEQ ID NO: 336715 - DNA, 25 bp, Artificial
  Probe
cccgaattgcatttgagatgttagt

SEQ ID NO: 336716 - DNA, 25 bp, Artificial
  Probe
ctcattactatgaaatgcaagcatg

SEQ ID NO: 336717 - DNA, 25 bp, Artificial
  Probe
agtttcaccaaaatatcgaatatgg

SEQ ID NO: 336718 - DNA, 25 bp, Artificial
  Probe
gagccagaattccagtttcaccaaa

SEQ ID NO: 336719 - DNA, 25 bp, Artificial
  Probe
acctgtgcaataacaggttagagtc

SEQ ID NO: 336720 - DNA, 25 bp, Artificial
  Probe
gtcactatgcttgacctctgctata

SEQ ID NO: 336721 - DNA, 25 bp, Artificial
  Probe
tctttccaaactggaaaagctcatg

SEQ ID NO: 336722 - DNA, 25 bp, Artificial
  Probe
atgaaatacaaagcatcaatgtgac

SEQ ID NO: 336723 - DNA, 25 bp, Artificial
  Probe
caccatttaacataccttcgtgtgg

SEQ ID NO: 336724 - DNA, 25 bp, Artificial
  Probe
ggtacatatttatgactccataaag

SEQ ID NO: 336725 - DNA, 25 bp, Artificial
  Probe
caccaaaatatcgaatatggagctc

SEQ ID NO: 336726 - DNA, 25 bp, Artificial
  Probe
gcttccctcggatacacagtattta

SEQ ID NO: 336727 - DNA, 25 bp, Artificial
  Probe
cttcgtgtggaccaaaataagctga

SEQ ID NO: 336728 - DNA, 25 bp, Artificial
  Probe
ggaatgcttctgtccaactaacttt

SEQ ID NO: 336729 - DNA, 25 bp, Artificial
  Probe
acattccaaggaatttggaacatct

SEQ ID NO: 336730 - DNA, 25 bp, Artificial
  Probe
cttctgcttccctcggatacacagt

SEQ ID NO: 336731 - DNA, 25 bp, Artificial
  Probe
gtcaatgccccctgggttgccgtta

SEQ ID NO: 336732 - DNA, 25 bp, Artificial
  Probe
tggttttacttcataggcgtagtgc

SEQ ID NO: 336733 - DNA, 25 bp, Artificial
  Probe
tacaaagcatcaatgtgacaatgat

SEQ ID NO: 336734 - DNA, 25 bp, Artificial
  Probe
actcaatgttggacataacaaactg

SEQ ID NO: 336735 - DNA, 25 bp, Artificial
  Probe
ggttagagtcaatgccccctgggtt

SEQ ID NO: 336736 - DNA, 25 bp, Artificial
  Probe
caaccttcagttcaatgatattgag

SEQ ID NO: 336737 - DNA, 25 bp, Artificial
  Probe
ggtaaatgtcactatgcttgacctc

SEQ ID NO: 336738 - DNA, 25 bp, Artificial
  Probe
gacataacaaactgaagcaagcatt

SEQ ID NO: 336739 - DNA, 25 bp, Artificial
  Probe
acacatgccatggatgggctggtaa

SEQ ID NO: 336740 - DNA, 25 bp, Artificial
  Probe
aactgaagacccaagttttcaggcg

SEQ ID NO: 336741 - DNA, 25 bp, Artificial
  Probe
tactatgaaatgcaagcatggcaaa

SEQ ID NO: 336742 - DNA, 25 bp, Artificial
  Probe
ctaaggaatgcttctgtccaactaa

SEQ ID NO: 336743 - DNA, 25 bp, Artificial
  Probe
ggagctcccttttatcagaatattt

SEQ ID NO: 336744 - DNA, 25 bp, Artificial
  Probe
cttcagttcaatgatattgaggctg

SEQ ID NO: 336745 - DNA, 25 bp, Artificial
  Probe
caggcgctatcaagatgaggaagag

SEQ ID NO: 336746 - DNA, 25 bp, Artificial
  Probe
tcttgaaaacgctgcagaagctgga

SEQ ID NO: 336747 - DNA, 25 bp, Artificial
  Probe
atgagttcaccaacacctgtcccag

SEQ ID NO: 336748 - DNA, 25 bp, Artificial
  Probe
attagcagactgcaacctgctgccc

SEQ ID NO: 336749 - DNA, 25 bp, Artificial
  Probe
agtgacgtcgccaagagacttacca

SEQ ID NO: 336750 - DNA, 25 bp, Artificial
  Probe
tgaaaacgctgcagaagctggatga

SEQ ID NO: 336751 - DNA, 25 bp, Artificial
  Probe
gggctcttgaaaacgctgcagaagc

SEQ ID NO: 336752 - DNA, 25 bp, Artificial
  Probe
gggcatctggagatacctgacaaac

SEQ ID NO: 336753 - DNA, 25 bp, Artificial
  Probe
ttctggacggcgacgagatgacatt

SEQ ID NO: 336754 - DNA, 25 bp, Artificial
  Probe
gtcaaacactgctgggatggacatc

SEQ ID NO: 336755 - DNA, 25 bp, Artificial
  Probe
ggatgagttcaccaacacctgtccc

SEQ ID NO: 336756 - DNA, 25 bp, Artificial
  Probe
cccaaaggcatgacgggcatctgga

SEQ ID NO: 336757 - DNA, 25 bp, Artificial
  Probe
tgacgggcatctggagatacctgac

SEQ ID NO: 336758 - DNA, 25 bp, Artificial
  Probe
ctgacaaacgcctacagtagggatg

SEQ ID NO: 336759 - DNA, 25 bp, Artificial
  Probe
gaggacatcaaatcgtccacacgca

SEQ ID NO: 336760 - DNA, 25 bp, Artificial
  Probe
aacactgctgggatggacatctttg

SEQ ID NO: 336761 - DNA, 25 bp, Artificial
  Probe
caaatcgtccacacgcaggtttctg

SEQ ID NO: 336762 - DNA, 25 bp, Artificial
  Probe
actgctgggatggacatctttgcca

SEQ ID NO: 336763 - DNA, 25 bp, Artificial
  Probe
tcgtccacacgcaggtttctggacg

SEQ ID NO: 336764 - DNA, 25 bp, Artificial
  Probe
gtggaaatcgcgtacagtgacgtcg

SEQ ID NO: 336765 - DNA, 25 bp, Artificial
  Probe
ggacggcgacgagatgacattagca

SEQ ID NO: 336766 - DNA, 25 bp, Artificial
  Probe
aacgcctacagtagggatgagttca

SEQ ID NO: 336767 - DNA, 25 bp, Artificial
  Probe
tgacattcccaaaggcatgacgggc

SEQ ID NO: 336768 - DNA, 25 bp, Artificial
  Probe
agaactcaagaccagaggctaatga

SEQ ID NO: 336769 - DNA, 25 bp, Artificial
  Probe
attcccaaaggcatgacgggcatct

SEQ ID NO: 336770 - DNA, 25 bp, Artificial
  Probe
cctccctggcgaaatcgatgagaac

SEQ ID NO: 336771 - DNA, 25 bp, Artificial
  Probe
agaccagaggctaatgaagcactgg

SEQ ID NO: 336772 - DNA, 25 bp, Artificial
  Probe
cacccagagtcaaacactgctggga

SEQ ID NO: 336773 - DNA, 25 bp, Artificial
  Probe
ccctggcgaaatcgatgagaacagc

SEQ ID NO: 336774 - DNA, 25 bp, Artificial
  Probe
atgacgggcatctggagatacctga

SEQ ID NO: 336775 - DNA, 25 bp, Artificial
  Probe
caaacgcctacagtagggatgagtt

SEQ ID NO: 336776 - DNA, 25 bp, Artificial
  Probe
cacgcaggtttctggacggcgacga

SEQ ID NO: 336777 - DNA, 25 bp, Artificial
  Probe
aagaccagaggctaatgaagcactg

SEQ ID NO: 336778 - DNA, 25 bp, Artificial
  Probe
gatacctgacaaacgcctacagtag

SEQ ID NO: 336779 - DNA, 25 bp, Artificial
  Probe
gagatacctgacaaacgcctacagt

SEQ ID NO: 336780 - DNA, 25 bp, Artificial
  Probe
aaacgctgcagaagctggatgagta

SEQ ID NO: 336781 - DNA, 25 bp, Artificial
  Probe
cgcaactttgacattcccaaaggca

SEQ ID NO: 336782 - DNA, 25 bp, Artificial
  Probe
catcaagaactcaagaccagaggct

SEQ ID NO: 336783 - DNA, 25 bp, Artificial
  Probe
gatgacattagcagactgcaacctg

SEQ ID NO: 336784 - DNA, 25 bp, Artificial
  Probe
caactttgacattcccaaaggcatg

SEQ ID NO: 336785 - DNA, 25 bp, Artificial
  Probe
ggcatgacgggcatctggagatacc

SEQ ID NO: 336786 - DNA, 25 bp, Artificial
  Probe
atctggagatacctgacaaacgcct

SEQ ID NO: 336787 - DNA, 25 bp, Artificial
  Probe
cgtacagtgacgtcgccaagagact

SEQ ID NO: 336788 - DNA, 25 bp, Artificial
  Probe
tttgacattcccaaaggcatgacgg

SEQ ID NO: 336789 - DNA, 25 bp, Artificial
  Probe
actcaagaccagaggctaatgaagc

SEQ ID NO: 336790 - DNA, 25 bp, Artificial
  Probe
cgatgagaacagcatggaggacatc

SEQ ID NO: 336791 - DNA, 25 bp, Artificial
  Probe
gacattagcagactgcaacctgctg

SEQ ID NO: 336792 - DNA, 25 bp, Artificial
  Probe
agacagagccctcaaacctctctgg

SEQ ID NO: 336793 - DNA, 25 bp, Artificial
  Probe
ccaagggcggcagctggtcacccag

SEQ ID NO: 336794 - DNA, 25 bp, Artificial
  Probe
gttcacatagagctgcttctgtgta

SEQ ID NO: 336795 - DNA, 25 bp, Artificial
  Probe
ctgttctcctggtggctgcccatca

SEQ ID NO: 336796 - DNA, 25 bp, Artificial
  Probe
tgtgtcaagaagtctgagcgactgg

SEQ ID NO: 336797 - DNA, 25 bp, Artificial
  Probe
agatgtggggtcctgtcctgtcact

SEQ ID NO: 336798 - DNA, 25 bp, Artificial
  Probe
agcgactgggtagttcacatagagc

SEQ ID NO: 336799 - DNA, 25 bp, Artificial
  Probe
atctactgtcttagtctcaatggcg

SEQ ID NO: 336800 - DNA, 25 bp, Artificial
  Probe
tcctgtcactgttctcctggtggct

SEQ ID NO: 336801 - DNA, 25 bp, Artificial
  Probe
tgctagcttgcctgctccaagggcg

SEQ ID NO: 336802 - DNA, 25 bp, Artificial
  Probe
gacactgtgtcaagaagtctgagcg

SEQ ID NO: 336803 - DNA, 25 bp, Artificial
  Probe
gatgtggggtcctgtcctgtcactg

SEQ ID NO: 336804 - DNA, 25 bp, Artificial
  Probe
tgtcaagaagtctgagcgactgggt

SEQ ID NO: 336805 - DNA, 25 bp, Artificial
  Probe
tactgtcttagtctcaatggcgggt

SEQ ID NO: 336806 - DNA, 25 bp, Artificial
  Probe
catagagctgcttctgtgtaaatgc

SEQ ID NO: 336807 - DNA, 25 bp, Artificial
  Probe
gaagtctgagcgactgggtagttca

SEQ ID NO: 336808 - DNA, 25 bp, Artificial
  Probe
actgttctcctggtggctgcccatc

SEQ ID NO: 336809 - DNA, 25 bp, Artificial
  Probe
ttgcctgctccaagggcggcagctg

SEQ ID NO: 336810 - DNA, 25 bp, Artificial
  Probe
tgtggggtcctgtcctgtcactgtt

SEQ ID NO: 336811 - DNA, 25 bp, Artificial
  Probe
caagggcggcagctggtcacccagt

SEQ ID NO: 336812 - DNA, 25 bp, Artificial
  Probe
cgactgggtagttcacatagagctg

SEQ ID NO: 336813 - DNA, 25 bp, Artificial
  Probe
tctcctggtggctgcccatcagcat

SEQ ID NO: 336814 - DNA, 25 bp, Artificial
  Probe
ggtagttcacatagagctgcttctg

SEQ ID NO: 336815 - DNA, 25 bp, Artificial
  Probe
tagcttgcctgctccaagggcggca

SEQ ID NO: 336816 - DNA, 25 bp, Artificial
  Probe
cccagaactgcacaggggcacaggc

SEQ ID NO: 336817 - DNA, 25 bp, Artificial
  Probe
gtcactgttctcctggtggctgccc

SEQ ID NO: 336818 - DNA, 25 bp, Artificial
  Probe
agctggtcacccagtggggcagttt

SEQ ID NO: 336819 - DNA, 25 bp, Artificial
  Probe
gcaactcggcacatgacagcacagt

SEQ ID NO: 336820 - DNA, 25 bp, Artificial
  Probe
tgagcgactgggtagttcacataga

SEQ ID NO: 336821 - DNA, 25 bp, Artificial
  Probe
acccagtggggcagtttgcacgctc

SEQ ID NO: 336822 - DNA, 25 bp, Artificial
  Probe
tacacgagacactgtgtcaagaagt

SEQ ID NO: 336823 - DNA, 25 bp, Artificial
  Probe
actgggtagttcacatagagctgct

SEQ ID NO: 336824 - DNA, 25 bp, Artificial
  Probe
tgcacaggggcacaggctgactgtc

SEQ ID NO: 336825 - DNA, 25 bp, Artificial
  Probe
ctggtcacccagtggggcagtttgc

SEQ ID NO: 336826 - DNA, 25 bp, Artificial
  Probe
tcacatagagctgcttctgtgtaaa

SEQ ID NO: 336827 - DNA, 25 bp, Artificial
  Probe
actgtgtcaagaagtctgagcgact

SEQ ID NO: 336828 - DNA, 25 bp, Artificial
  Probe
ttattgctagcttgcctgctccaag

SEQ ID NO: 336829 - DNA, 25 bp, Artificial
  Probe
tccaagggcggcagctggtcaccca

SEQ ID NO: 336830 - DNA, 25 bp, Artificial
  Probe
tagacagagccctcaaacctctctg

SEQ ID NO: 336831 - DNA, 25 bp, Artificial
  Probe
tatttattgctagcttgcctgctcc

SEQ ID NO: 336832 - DNA, 25 bp, Artificial
  Probe
catgacagcacagtttgtgttgaag

SEQ ID NO: 336833 - DNA, 25 bp, Artificial
  Probe
tcaagaagtctgagcgactgggtag

SEQ ID NO: 336834 - DNA, 25 bp, Artificial
  Probe
aagatgtggggtcctgtcctgtcac

SEQ ID NO: 336835 - DNA, 25 bp, Artificial
  Probe
agtctgagcgactgggtagttcaca

SEQ ID NO: 336836 - DNA, 25 bp, Artificial
  Probe
ctgcacaggggcacaggctgactgt

SEQ ID NO: 336837 - DNA, 25 bp, Artificial
  Probe
tggggtcctgtcctgtcactgttct

SEQ ID NO: 336838 - DNA, 25 bp, Artificial
  Probe
tacctcagcggtgaactgggcgata

SEQ ID NO: 336839 - DNA, 25 bp, Artificial
  Probe
agccagctagctttgctttcaatat

SEQ ID NO: 336840 - DNA, 25 bp, Artificial
  Probe
ctacctcagcggtgaactgggcgat

SEQ ID NO: 336841 - DNA, 25 bp, Artificial
  Probe
caacaaatacttgatcgagtctgga

SEQ ID NO: 336842 - DNA, 25 bp, Artificial
  Probe
ggaagccaacgtgagcctcgcgagc

SEQ ID NO: 336843 - DNA, 25 bp, Artificial
  Probe
acctcagcggtgaactgggcgataa

SEQ ID NO: 336844 - DNA, 25 bp, Artificial
  Probe
acttaaccagttagaagacagatat

SEQ ID NO: 336845 - DNA, 25 bp, Artificial
  Probe
atcaaccagaaagaaggggtcagct

SEQ ID NO: 336846 - DNA, 25 bp, Artificial
  Probe
gtgaactgggcgataacctgaagat

SEQ ID NO: 336847 - DNA, 25 bp, Artificial
  Probe
cttaaccagttagaagacagatatg

SEQ ID NO: 336848 - DNA, 25 bp, Artificial
  Probe
caaatacttgatcgagtctggaaat

SEQ ID NO: 336849 - DNA, 25 bp, Artificial
  Probe
cctcagcggtgaactgggcgataac

SEQ ID NO: 336850 - DNA, 25 bp, Artificial
  Probe
aagccagtggctggaacctactcct

SEQ ID NO: 336851 - DNA, 25 bp, Artificial
  Probe
actgggcgataacctgaagatgaaa

SEQ ID NO: 336852 - DNA, 25 bp, Artificial
  Probe
gaagccaacgtgagcctcgcgagct

SEQ ID NO: 336853 - DNA, 25 bp, Artificial
  Probe
ccaacgtgagcctcgcgagctggga

SEQ ID NO: 336854 - DNA, 25 bp, Artificial
  Probe
agaacttaaccagttagaagacaga

SEQ ID NO: 336855 - DNA, 25 bp, Artificial
  Probe
tggaagccaacgtgagcctcgcgag

SEQ ID NO: 336856 - DNA, 25 bp, Artificial
  Probe
ggctggaacctactccttacaaatc

SEQ ID NO: 336857 - DNA, 25 bp, Artificial
  Probe
cacaacaaatacttgatcgagtctg

SEQ ID NO: 336858 - DNA, 25 bp, Artificial
  Probe
gaagccagctagctttgctttcaat

SEQ ID NO: 336859 - DNA, 25 bp, Artificial
  Probe
gccagtggctggaacctactcctta

SEQ ID NO: 336860 - DNA, 25 bp, Artificial
  Probe
ctcagcggtgaactgggcgataacc

SEQ ID NO: 336861 - DNA, 25 bp, Artificial
  Probe
gaacttaaccagttagaagacagat

SEQ ID NO: 336862 - DNA, 25 bp, Artificial
  Probe
gtggctggaacctactccttacaaa

SEQ ID NO: 336863 - DNA, 25 bp, Artificial
  Probe
tgaaaattcagatcttgctgcatta

SEQ ID NO: 336864 - DNA, 25 bp, Artificial
  Probe
tcagcggtgaactgggcgataacct

SEQ ID NO: 336865 - DNA, 25 bp, Artificial
  Probe
agaagccagctagctttgctttcaa

SEQ ID NO: 336866 - DNA, 25 bp, Artificial
  Probe
ggtcagctacctccacttcacgaag

SEQ ID NO: 336867 - DNA, 25 bp, Artificial
  Probe
tgctgcattaacttaccatccagag

SEQ ID NO: 336868 - DNA, 25 bp, Artificial
  Probe
aatcaaccagaaagaaggggtcagc

SEQ ID NO: 336869 - DNA, 25 bp, Artificial
  Probe
tggctggaacctactccttacaaat

SEQ ID NO: 336870 - DNA, 25 bp, Artificial
  Probe
tggagaagccagctagctttgcttt

SEQ ID NO: 336871 - DNA, 25 bp, Artificial
  Probe
aactgggcgataacctgaagatgaa

SEQ ID NO: 336872 - DNA, 25 bp, Artificial
  Probe
aaatcaaccagaaagaaggggtcag

SEQ ID NO: 336873 - DNA, 25 bp, Artificial
  Probe
cagtggctggaacctactccttaca

SEQ ID NO: 336874 - DNA, 25 bp, Artificial
  Probe
gctgcattaacttaccatccagaga

SEQ ID NO: 336875 - DNA, 25 bp, Artificial
  Probe
gccagctagctttgctttcaatatt

SEQ ID NO: 336876 - DNA, 25 bp, Artificial
  Probe
acaacaaatacttgatcgagtctgg

SEQ ID NO: 336877 - DNA, 25 bp, Artificial
  Probe
aggggtcagctacctccacttcacg

SEQ ID NO: 336878 - DNA, 25 bp, Artificial
  Probe
aaggggtcagctacctccacttcac

SEQ ID NO: 336879 - DNA, 25 bp, Artificial
  Probe
ggcttctttaaaatcaaccagaaag

SEQ ID NO: 336880 - DNA, 25 bp, Artificial
  Probe
agtggctggaacctactccttacaa

SEQ ID NO: 336881 - DNA, 25 bp, Artificial
  Probe
tgaactgggcgataacctgaagatg

SEQ ID NO: 336882 - DNA, 25 bp, Artificial
  Probe
gggtcagctacctccacttcacgaa

SEQ ID NO: 336883 - DNA, 25 bp, Artificial
  Probe
tctttaaaatcaaccagaaagaagg

SEQ ID NO: 336884 - DNA, 25 bp, Artificial
  Probe
tgtatgttttgatctgcattgacac

SEQ ID NO: 336885 - DNA, 25 bp, Artificial
  Probe
ccttattcagagcttttagcctgaa

SEQ ID NO: 336886 - DNA, 25 bp, Artificial
  Probe
gcacccaggagcaggctctgttgtt

SEQ ID NO: 336887 - DNA, 25 bp, Artificial
  Probe
atgaaggtcatgagccagaggcacc

SEQ ID NO: 336888 - DNA, 25 bp, Artificial
  Probe
gatctggaatgttctttcccttatt

SEQ ID NO: 336889 - DNA, 25 bp, Artificial
  Probe
gtttaagcacccagctcaggatatg

SEQ ID NO: 336890 - DNA, 25 bp, Artificial
  Probe
ttcactgtcaaggaaatgacttttc

SEQ ID NO: 336891 - DNA, 25 bp, Artificial
  Probe
aggtcatgagccagaggcacccagg

SEQ ID NO: 336892 - DNA, 25 bp, Artificial
  Probe
gaaagagcttcttgcaatgtttctg

SEQ ID NO: 336893 - DNA, 25 bp, Artificial
  Probe
atatgaaggtcatgagccagaggca

SEQ ID NO: 336894 - DNA, 25 bp, Artificial
  Probe
tcatttgctggctttccctccgttg

SEQ ID NO: 336895 - DNA, 25 bp, Artificial
  Probe
tcaggtttaagcacccagctcagga

SEQ ID NO: 336896 - DNA, 25 bp, Artificial
  Probe
atgctccttgtttcatacttctgag

SEQ ID NO: 336897 - DNA, 25 bp, Artificial
  Probe
tcccttattcagagcttttagcctg

SEQ ID NO: 336898 - DNA, 25 bp, Artificial
  Probe
cccagctcaggatatgggaggaagt

SEQ ID NO: 336899 - DNA, 25 bp, Artificial
  Probe
atgcatgcttatcacaaatttttgg

SEQ ID NO: 336900 - DNA, 25 bp, Artificial
  Probe
tctgcagttgccagatcaggtttaa

SEQ ID NO: 336901 - DNA, 25 bp, Artificial
  Probe
tggtgaacatcaacgcatagtttta

SEQ ID NO: 336902 - DNA, 25 bp, Artificial
  Probe
gctccttgtttcatacttctgagtc

SEQ ID NO: 336903 - DNA, 25 bp, Artificial
  Probe
cagttgaaagtcatctctttgtagt

SEQ ID NO: 336904 - DNA, 25 bp, Artificial
  Probe
agaggcacccaggagcaggctctgt

SEQ ID NO: 336905 - DNA, 25 bp, Artificial
  Probe
gcttttagcctgaaagttggtgaac

SEQ ID NO: 336906 - DNA, 25 bp, Artificial
  Probe
gcatagttttacctaacaataggat

SEQ ID NO: 336907 - DNA, 25 bp, Artificial
  Probe
gttttacctaacaataggatctaag

SEQ ID NO: 336908 - DNA, 25 bp, Artificial
  Probe
ggtcatgagccagaggcacccagga

SEQ ID NO: 336909 - DNA, 25 bp, Artificial
  Probe
gtgtttatcggcacacctagaatat

SEQ ID NO: 336910 - DNA, 25 bp, Artificial
  Probe
cctaacaataggatctaagaagtat

SEQ ID NO: 336911 - DNA, 25 bp, Artificial
  Probe
tgtttctgcagttgccagatcaggt

SEQ ID NO: 336912 - DNA, 25 bp, Artificial
  Probe
gttgttctcatggtgaggcctcctc

SEQ ID NO: 336913 - DNA, 25 bp, Artificial
  Probe
ttagcctgaaagttggtgaacatca

SEQ ID NO: 336914 - DNA, 25 bp, Artificial
  Probe
gtttcatacttctgagtcacccaag

SEQ ID NO: 336915 - DNA, 25 bp, Artificial
  Probe
aagtcatctctttgtagtttcagtt

SEQ ID NO: 336916 - DNA, 25 bp, Artificial
  Probe
acgcatagttttacctaacaatagg

SEQ ID NO: 336917 - DNA, 25 bp, Artificial
  Probe
tcccagacaggtgtatgttttgatc

SEQ ID NO: 336918 - DNA, 25 bp, Artificial
  Probe
ttcagagcttttagcctgaaagttg

SEQ ID NO: 336919 - DNA, 25 bp, Artificial
  Probe
tacttctgagtcacccaagcaagtt

SEQ ID NO: 336920 - DNA, 25 bp, Artificial
  Probe
acccaagcaagttatgtggactgtg

SEQ ID NO: 336921 - DNA, 25 bp, Artificial
  Probe
agatcaggtttaagcacccagctca

SEQ ID NO: 336922 - DNA, 25 bp, Artificial
  Probe
catacttctgagtcacccaagcaag

SEQ ID NO: 336923 - DNA, 25 bp, Artificial
  Probe
gcatgcttatcacaaatttttggtt

SEQ ID NO: 336924 - DNA, 25 bp, Artificial
  Probe
ctttgtagtttcagttttcctccag

SEQ ID NO: 336925 - DNA, 25 bp, Artificial
  Probe
gtagtttcagttttcctccagtgtt

SEQ ID NO: 336926 - DNA, 25 bp, Artificial
  Probe
cacacctagaatatgaaggtcatga

SEQ ID NO: 336927 - DNA, 25 bp, Artificial
  Probe
ttggtgaacatcaacgcatagtttt

SEQ ID NO: 336928 - DNA, 25 bp, Artificial
  Probe
gatctgcattgacaccagctcttac

SEQ ID NO: 336929 - DNA, 25 bp, Artificial
  Probe
aagtcagacaatgttcactgtcaag

SEQ ID NO: 336930 - DNA, 25 bp, Artificial
  Probe
actgtagaccattccaggcacgcac

SEQ ID NO: 336931 - DNA, 25 bp, Artificial
  Probe
cccacaaacaggacaaacagcaagg

SEQ ID NO: 336932 - DNA, 25 bp, Artificial
  Probe
gcactagacagctctacacacggga

SEQ ID NO: 336933 - DNA, 25 bp, Artificial
  Probe
actggactggcgtccatgtctgcat

SEQ ID NO: 336934 - DNA, 25 bp, Artificial
  Probe
ttccaggcacgcacctatagaacga

SEQ ID NO: 336935 - DNA, 25 bp, Artificial
  Probe
aggcacgcacctatagaacgagggg

SEQ ID NO: 336936 - DNA, 25 bp, Artificial
  Probe
caaacagcaaggaaagcccgagggg

SEQ ID NO: 336937 - DNA, 25 bp, Artificial
  Probe
cgtgtacaggtctgactggaaacct

SEQ ID NO: 336938 - DNA, 25 bp, Artificial
  Probe
ccaagactggactggcgtccatgtc

SEQ ID NO: 336939 - DNA, 25 bp, Artificial
  Probe
tggaaacctgggataccacatatga

SEQ ID NO: 336940 - DNA, 25 bp, Artificial
  Probe
cggaaaccaagactggactggcgtc

SEQ ID NO: 336941 - DNA, 25 bp, Artificial
  Probe
tccatgtctgcatgcggccgtctct

SEQ ID NO: 336942 - DNA, 25 bp, Artificial
  Probe
aatcccttggcacagcgtaaacaaa

SEQ ID NO: 336943 - DNA, 25 bp, Artificial
  Probe
catggcggcgtgtacaggtctgact

SEQ ID NO: 336944 - DNA, 25 bp, Artificial
  Probe
tatgacttaggaaatcccttggcac

SEQ ID NO: 336945 - DNA, 25 bp, Artificial
  Probe
tgactggaaacctgggataccacat

SEQ ID NO: 336946 - DNA, 25 bp, Artificial
  Probe
acagctctacacacgggagcgagcg

SEQ ID NO: 336947 - DNA, 25 bp, Artificial
  Probe
ccgtcatggaatggtactgtagacc

SEQ ID NO: 336948 - DNA, 25 bp, Artificial
  Probe
tgcatgcggccgtctctcgcactag

SEQ ID NO: 336949 - DNA, 25 bp, Artificial
  Probe
ttaggaaatcccttggcacagcgta

SEQ ID NO: 336950 - DNA, 25 bp, Artificial
  Probe
tgtagaccattccaggcacgcacct

SEQ ID NO: 336951 - DNA, 25 bp, Artificial
  Probe
gggataccacatatgacttaggaaa

SEQ ID NO: 336952 - DNA, 25 bp, Artificial
  Probe
tcgcactagacagctctacacacgg

SEQ ID NO: 336953 - DNA, 25 bp, Artificial
  Probe
aaatcccttggcacagcgtaaacaa

SEQ ID NO: 336954 - DNA, 25 bp, Artificial
  Probe
gataccacatatgacttaggaaatc

SEQ ID NO: 336955 - DNA, 25 bp, Artificial
  Probe
gtacccacaaacaggacaaacagca

SEQ ID NO: 336956 - DNA, 25 bp, Artificial
  Probe
tccatggcggcgtgtacaggtctga

SEQ ID NO: 336957 - DNA, 25 bp, Artificial
  Probe
agtggaggcattaccgtcatggaat

SEQ ID NO: 336958 - DNA, 25 bp, Artificial
  Probe
accgtcatggaatggtactgtagac

SEQ ID NO: 336959 - DNA, 25 bp, Artificial
  Probe
accattccaggcacgcacctataga

SEQ ID NO: 336960 - DNA, 25 bp, Artificial
  Probe
ccgagtggaggcattaccgtcatgg

SEQ ID NO: 336961 - DNA, 25 bp, Artificial
  Probe
gtctctcgcactagacagctctaca

SEQ ID NO: 336962 - DNA, 25 bp, Artificial
  Probe
ggactggcgtccatgtctgcatgcg

SEQ ID NO: 336963 - DNA, 25 bp, Artificial
  Probe
cgtccatgtctgcatgcggccgtct

SEQ ID NO: 336964 - DNA, 25 bp, Artificial
  Probe
tgacttaggaaatcccttggcacag

SEQ ID NO: 336965 - DNA, 25 bp, Artificial
  Probe
cggcgtgtacaggtctgactggaaa

SEQ ID NO: 336966 - DNA, 25 bp, Artificial
  Probe
gcgtccatgtctgcatgcggccgtc

SEQ ID NO: 336967 - DNA, 25 bp, Artificial
  Probe
tgcggccgtctctcgcactagacag

SEQ ID NO: 336968 - DNA, 25 bp, Artificial
  Probe
gtagaccattccaggcacgcaccta

SEQ ID NO: 336969 - DNA, 25 bp, Artificial
  Probe
gcatgcggccgtctctcgcactaga

SEQ ID NO: 336970 - DNA, 25 bp, Artificial
  Probe
tctacacacgggagcgagcggcgcc

SEQ ID NO: 336971 - DNA, 25 bp, Artificial
  Probe
ggtctgactggaaacctgggatacc

SEQ ID NO: 336972 - DNA, 25 bp, Artificial
  Probe
atggtactgtagaccattccaggca

SEQ ID NO: 336973 - DNA, 25 bp, Artificial
  Probe
tggactggcgtccatgtctgcatgc

SEQ ID NO: 336974 - DNA, 25 bp, Artificial
  Probe
taggaaatcccttggcacagcgtaa

SEQ ID NO: 336975 - DNA, 25 bp, Artificial
  Probe
gaggcattaccgtcatggaatggta

SEQ ID NO: 336976 - DNA, 25 bp, Artificial
  Probe
atccctatcactgagcacccggagg

SEQ ID NO: 336977 - DNA, 25 bp, Artificial
  Probe
ctgctggatcagaaggtcaaggtga

SEQ ID NO: 336978 - DNA, 25 bp, Artificial
  Probe
tcctggatatgatctatcagggtgg

SEQ ID NO: 336979 - DNA, 25 bp, Artificial
  Probe
tcttgaaactttggaagagacacca

SEQ ID NO: 336980 - DNA, 25 bp, Artificial
  Probe
cttgctgatcagcacatacccaaag

SEQ ID NO: 336981 - DNA, 25 bp, Artificial
  Probe
cctatcactgagcacccggaggcaa

SEQ ID NO: 336982 - DNA, 25 bp, Artificial
  Probe
tgcccgaaatgcaaaggatgtggtt

SEQ ID NO: 336983 - DNA, 25 bp, Artificial
  Probe
acttctacaacatggccaagctgca

SEQ ID NO: 336984 - DNA, 25 bp, Artificial
  Probe
aaggtgatctacattgcccgaaatg

SEQ ID NO: 336985 - DNA, 25 bp, Artificial
  Probe
ctagtgcatgtgaagggtatcccac

SEQ ID NO: 336986 - DNA, 25 bp, Artificial
  Probe
gtcttgaaactttggaagagacacc

SEQ ID NO: 336987 - DNA, 25 bp, Artificial
  Probe
tacaacatggccaagctgcaccctg

SEQ ID NO: 336988 - DNA, 25 bp, Artificial
  Probe
cctgatgacttgctgatcagcacat

SEQ ID NO: 336989 - DNA, 25 bp, Artificial
  Probe
gtggttgtctcctattataacttct

SEQ ID NO: 336990 - DNA, 25 bp, Artificial
  Probe
gcacccggaggcaaggctcagaacc

SEQ ID NO: 336991 - DNA, 25 bp, Artificial
  Probe
gatctatcagggtggcaagctagag

SEQ ID NO: 336992 - DNA, 25 bp, Artificial
  Probe
aggcaaggctcagaaccccaggatc

SEQ ID NO: 336993 - DNA, 25 bp, Artificial
  Probe
ctacctggatgagtgagatcctgga

SEQ ID NO: 336994 - DNA, 25 bp, Artificial
  Probe
gagttcaaatgtccaggggttccct

SEQ ID NO: 336995 - DNA, 25 bp, Artificial
  Probe
ctatcactgagcacccggaggcaag

SEQ ID NO: 336996 - DNA, 25 bp, Artificial
  Probe
atatgatctatcagggtggcaagct

SEQ ID NO: 336997 - DNA, 25 bp, Artificial
  Probe
cttgagttcaaatgtccaggggttc

SEQ ID NO: 336998 - DNA, 25 bp, Artificial
  Probe
tgatcagcacatacccaaagtctgg

SEQ ID NO: 336999 - DNA, 25 bp, Artificial
  Probe
tccttgctccctcagagtctgctgg

SEQ ID NO: 337000 - DNA, 25 bp, Artificial
  Probe
cagcacatacccaaagtctggtact

SEQ ID NO: 337001 - DNA, 25 bp, Artificial
  Probe
aacatggccaagctgcaccctgatc

SEQ ID NO: 337002 - DNA, 25 bp, Artificial
  Probe
gttcaaatgtccaggggttccctca

SEQ ID NO: 337003 - DNA, 25 bp, Artificial
  Probe
agatcctggatatgatctatcaggg

SEQ ID NO: 337004 - DNA, 25 bp, Artificial
  Probe
atgacttgctgatcagcacataccc

SEQ ID NO: 337005 - DNA, 25 bp, Artificial
  Probe
ctggcctgatgacttgctgatcagc

SEQ ID NO: 337006 - DNA, 25 bp, Artificial
  Probe
gcacatacccaaagtctggtactac

SEQ ID NO: 337007 - DNA, 25 bp, Artificial
  Probe
gacttgctgatcagcacatacccaa

SEQ ID NO: 337008 - DNA, 25 bp, Artificial
  Probe
tgagatcctggatatgatctatcag

SEQ ID NO: 337009 - DNA, 25 bp, Artificial
  Probe
gcctgatgacttgctgatcagcaca

SEQ ID NO: 337010 - DNA, 25 bp, Artificial
  Probe
taacttctacaacatggccaagctg

SEQ ID NO: 337011 - DNA, 25 bp, Artificial
  Probe
gatatgatctatcagggtggcaagc

SEQ ID NO: 337012 - DNA, 25 bp, Artificial
  Probe
cccgtccaccgctagtgcatgtgaa

SEQ ID NO: 337013 - DNA, 25 bp, Artificial
  Probe
ctacattgcccgaaatgcaaaggat

SEQ ID NO: 337014 - DNA, 25 bp, Artificial
  Probe
cctggatatgatctatcagggtggc

SEQ ID NO: 337015 - DNA, 25 bp, Artificial
  Probe
ggtgatctacattgcccgaaatgca

SEQ ID NO: 337016 - DNA, 25 bp, Artificial
  Probe
aaatgcaaaggatgtggttgtctcc

SEQ ID NO: 337017 - DNA, 25 bp, Artificial
  Probe
acagcctggcctgatgacttgctga

SEQ ID NO: 337018 - DNA, 25 bp, Artificial
  Probe
gaagggtatcccactcatcaaatac

SEQ ID NO: 337019 - DNA, 25 bp, Artificial
  Probe
atggccaagctgcaccctgatccag

SEQ ID NO: 337020 - DNA, 25 bp, Artificial
  Probe
catacccaaagtctggtactacctg

SEQ ID NO: 337021 - DNA, 25 bp, Artificial
  Probe
ggatgtggttgtctcctattataac

SEQ ID NO: 337022 - DNA, 25 bp, Artificial
  Probe
cctgtgcttaactccccgaaggact

SEQ ID NO: 337023 - DNA, 25 bp, Artificial
  Probe
ggagcctcatcctggcttattccca

SEQ ID NO: 337024 - DNA, 25 bp, Artificial
  Probe
gtcattgttcacatcaccgtgccca

SEQ ID NO: 337025 - DNA, 25 bp, Artificial
  Probe
acatccactcggagcccctgggtgt

SEQ ID NO: 337026 - DNA, 25 bp, Artificial
  Probe
ctggtggatgtggacccccagtccc

SEQ ID NO: 337027 - DNA, 25 bp, Artificial
  Probe
tgaagaagctcacaaggccaggtat

SEQ ID NO: 337028 - DNA, 25 bp, Artificial
  Probe
gtcccgtgattatgggaggatcatc

SEQ ID NO: 337029 - DNA, 25 bp, Artificial
  Probe
tggccccagactacatcctctgtga

SEQ ID NO: 337030 - DNA, 25 bp, Artificial
  Probe
cccactttgccctttggtggtgtgg

SEQ ID NO: 337031 - DNA, 25 bp, Artificial
  Probe
accgtgcccactttgccctttggtg

SEQ ID NO: 337032 - DNA, 25 bp, Artificial
  Probe
cactcaaagatttctatggggaaga

SEQ ID NO: 337033 - DNA, 25 bp, Artificial
  Probe
aggatcatcaatgaccgtcacttcc

SEQ ID NO: 337034 - DNA, 25 bp, Artificial
  Probe
ggggtgtccctgaaaccacggagct

SEQ ID NO: 337035 - DNA, 25 bp, Artificial
  Probe
ccgttgctgcaggaaacgcagtgat

SEQ ID NO: 337036 - DNA, 25 bp, Artificial
  Probe
gagcacagccgtagggaagattgtt

SEQ ID NO: 337037 - DNA, 25 bp, Artificial
  Probe
caagactcgccagacccagcaggat

SEQ ID NO: 337038 - DNA, 25 bp, Artificial
  Probe
gaagatgctaagcagtcccgtgatt

SEQ ID NO: 337039 - DNA, 25 bp, Artificial
  Probe
ccctgattgggctgaggatgagcct

SEQ ID NO: 337040 - DNA, 25 bp, Artificial
  Probe
tcctccaaattccactgtttgctgg

SEQ ID NO: 337041 - DNA, 25 bp, Artificial
  Probe
gaaatcaataaaagcctctgaggaa

SEQ ID NO: 337042 - DNA, 25 bp, Artificial
  Probe
ctccaacaatgagaaggtgatcaag

SEQ ID NO: 337043 - DNA, 25 bp, Artificial
  Probe
ccccagtccccagtgatgcaggagg

SEQ ID NO: 337044 - DNA, 25 bp, Artificial
  Probe
gaagaagctcacaaggccaggtatc

SEQ ID NO: 337045 - DNA, 25 bp, Artificial
  Probe
tctttgggccggtgatgcccattgt

SEQ ID NO: 337046 - DNA, 25 bp, Artificial
  Probe
gtcctgtgcttaactccccgaagga

SEQ ID NO: 337047 - DNA, 25 bp, Artificial
  Probe
tgtggccaagactcgccagacccag

SEQ ID NO: 337048 - DNA, 25 bp, Artificial
  Probe
tcctgtcaccctggagcttggaggg

SEQ ID NO: 337049 - DNA, 25 bp, Artificial
  Probe
gcccttgttacgtggacaaggactg

SEQ ID NO: 337050 - DNA, 25 bp, Artificial
  Probe
caccgccgctcttgcctggtgaagt

SEQ ID NO: 337051 - DNA, 25 bp, Artificial
  Probe
tgtggtccttgtcataggtgcttgg

SEQ ID NO: 337052 - DNA, 25 bp, Artificial
  Probe
gtgcttggaactaccccttcaacct

SEQ ID NO: 337053 - DNA, 25 bp, Artificial
  Probe
aagcatctgactcctgtcaccctgg

SEQ ID NO: 337054 - DNA, 25 bp, Artificial
  Probe
cggagctgctcaaagagaggtttga

SEQ ID NO: 337055 - DNA, 25 bp, Artificial
  Probe
ccattgtgtgtgttcgaagcttgga

SEQ ID NO: 337056 - DNA, 25 bp, Artificial
  Probe
tctgtacctagtggtcaaagggggt

SEQ ID NO: 337057 - DNA, 25 bp, Artificial
  Probe
ggaggccattcaatttatcaaccag

SEQ ID NO: 337058 - DNA, 25 bp, Artificial
  Probe
agaggtttgaccacatcatgtacac

SEQ ID NO: 337059 - DNA, 25 bp, Artificial
  Probe
atcgcctgggggaaatttatgaaca

SEQ ID NO: 337060 - DNA, 25 bp, Artificial
  Probe
agatgccccggcactgagagagtgc

SEQ ID NO: 337061 - DNA, 25 bp, Artificial
  Probe
tctgtgacccctcgattcagaacca

SEQ ID NO: 337062 - DNA, 25 bp, Artificial
  Probe
aagtctctgttgaatgaagaagctc

SEQ ID NO: 337063 - DNA, 25 bp, Artificial
  Probe
tgttatggccgctgccgccaagcat

SEQ ID NO: 337064 - DNA, 25 bp, Artificial
  Probe
gatgtggcttgcaggcgtatcgcct

SEQ ID NO: 337065 - DNA, 25 bp, Artificial
  Probe
gacatccagcggtggagtgacagcc

SEQ ID NO: 337066 - DNA, 25 bp, Artificial
  Probe
ggaccagtcctcacgatacatagct

SEQ ID NO: 337067 - DNA, 25 bp, Artificial
  Probe
cccagtgatgcaggaggagatcttt

SEQ ID NO: 337068 - DNA, 25 bp, Artificial
  Probe
ctgagcatcggtattatgggaaatc

SEQ ID NO: 337069 - DNA, 25 bp, Artificial
  Probe
cacacagcggggatacacacagctg

SEQ ID NO: 337070 - DNA, 25 bp, Artificial
  Probe
ttatgggggaatgctgagcgcctac

SEQ ID NO: 337071 - DNA, 25 bp, Artificial
  Probe
aatgccagggcctgggactaccagg

SEQ ID NO: 337072 - DNA, 25 bp, Artificial
  Probe
tgccaatcactttccagcccaaagg

SEQ ID NO: 337073 - DNA, 25 bp, Artificial
  Probe
cccgaccaattcttccgagatgtca

SEQ ID NO: 337074 - DNA, 25 bp, Artificial
  Probe
tatagctgtcgcaggccttggcaac

SEQ ID NO: 337075 - DNA, 25 bp, Artificial
  Probe
cgctggctgacttcgccgtgctgct

SEQ ID NO: 337076 - DNA, 25 bp, Artificial
  Probe
cagagtcccaagtgtgcccaggctg

SEQ ID NO: 337077 - DNA, 25 bp, Artificial
  Probe
actggctgtggcactggctccaatg

SEQ ID NO: 337078 - DNA, 25 bp, Artificial
  Probe
gctctttgggtttgcccggaatgca

SEQ ID NO: 337079 - DNA, 25 bp, Artificial
  Probe
agcatcggtattatgggaaatcgct

SEQ ID NO: 337080 - DNA, 25 bp, Artificial
  Probe
accctgtcaaggtgggctgtgaacg

SEQ ID NO: 337081 - DNA, 25 bp, Artificial
  Probe
gttcctccagggagcctatgacacc

SEQ ID NO: 337082 - DNA, 25 bp, Artificial
  Probe
gccaatcactttccagcccaaagga

SEQ ID NO: 337083 - DNA, 25 bp, Artificial
  Probe
tgggacctgccaatcactttccagc

SEQ ID NO: 337084 - DNA, 25 bp, Artificial
  Probe
tgtggcactggctccaatgccaggg

SEQ ID NO: 337085 - DNA, 25 bp, Artificial
  Probe
gctttccagcaaatcaaagacttgt

SEQ ID NO: 337086 - DNA, 25 bp, Artificial
  Probe
gagtcccaagtgtgcccaggctgtg

SEQ ID NO: 337087 - DNA, 25 bp, Artificial
  Probe
agggcctgggactaccaggcctgta

SEQ ID NO: 337088 - DNA, 25 bp, Artificial
  Probe
caggcgctggctgacttcgccgtgc

SEQ ID NO: 337089 - DNA, 25 bp, Artificial
  Probe
ttcatagtggaactggcagcccagc

SEQ ID NO: 337090 - DNA, 25 bp, Artificial
  Probe
atgctgagcgcctacatgaggatga

SEQ ID NO: 337091 - DNA, 25 bp, Artificial
  Probe
ggctccaatgccagggcctgggact

SEQ ID NO: 337092 - DNA, 25 bp, Artificial
  Probe
tgtgctgaccccactggctgtggca

SEQ ID NO: 337093 - DNA, 25 bp, Artificial
  Probe
cacagctgctgactgtggagcaggc

SEQ ID NO: 337094 - DNA, 25 bp, Artificial
  Probe
aggccctgcggcacaatcttggggt

SEQ ID NO: 337095 - DNA, 25 bp, Artificial
  Probe
cagggctggtctacaactcctctgg

SEQ ID NO: 337096 - DNA, 25 bp, Artificial
  Probe
aggctgtgcgggatgctttccagca

SEQ ID NO: 337097 - DNA, 25 bp, Artificial
  Probe
tcctgccaaccctgtcaaggtgggc

SEQ ID NO: 337098 - DNA, 25 bp, Artificial
  Probe
caaatcaaagacttgttcctccagg

SEQ ID NO: 337099 - DNA, 25 bp, Artificial
  Probe
gatcatgggtctacgggcactggca

SEQ ID NO: 337100 - DNA, 25 bp, Artificial
  Probe
ccatgatggattacccgtaccctac

SEQ ID NO: 337101 - DNA, 25 bp, Artificial
  Probe
tatgacaccatcagccagaattttg

SEQ ID NO: 337102 - DNA, 25 bp, Artificial
  Probe
tgctgaccccactggctgtggcact

SEQ ID NO: 337103 - DNA, 25 bp, Artificial
  Probe
cgcctacatgaggatgaagtacccc

SEQ ID NO: 337104 - DNA, 25 bp, Artificial
  Probe
gaggccctgctggtctttgctgagc

SEQ ID NO: 337105 - DNA, 25 bp, Artificial
  Probe
actttccagcccaaaggacctgact

SEQ ID NO: 337106 - DNA, 25 bp, Artificial
  Probe
ctatggccagagtcccaagtgtgcc

SEQ ID NO: 337107 - DNA, 25 bp, Artificial
  Probe
tgcagtccacacagcggggatacac

SEQ ID NO: 337108 - DNA, 25 bp, Artificial
  Probe
acttctatggccagagtcccaagtg

SEQ ID NO: 337109 - DNA, 25 bp, Artificial
  Probe
gggtttgcccggaatgcatttactg

SEQ ID NO: 337110 - DNA, 25 bp, Artificial
  Probe
atgggaaatcgcttccattcggtgt

SEQ ID NO: 337111 - DNA, 25 bp, Artificial
  Probe
agggagcctatgacaccatcagcca

SEQ ID NO: 337112 - DNA, 25 bp, Artificial
  Probe
ggcggccagcgctcctgttatagct

SEQ ID NO: 337113 - DNA, 25 bp, Artificial
  Probe
aatcttggggtccaggatgccccca

SEQ ID NO: 337114 - DNA, 25 bp, Artificial
  Probe
ttgcttatccctggtctcacgcagc

SEQ ID NO: 337115 - DNA, 25 bp, Artificial
  Probe
ggtctcacgcagcagttgtggttgc

SEQ ID NO: 337116 - DNA, 25 bp, Artificial
  Probe
ctattgtggtagtcgctaattgtac

SEQ ID NO: 337117 - DNA, 25 bp, Artificial
  Probe
atccctggtctcacgcagcagttgt

SEQ ID NO: 337118 - DNA, 25 bp, Artificial
  Probe
cacgcagcagttgtggttgctattg

SEQ ID NO: 337119 - DNA, 25 bp, Artificial
  Probe
gtagtcgctaattgtactagtttac

SEQ ID NO: 337120 - DNA, 25 bp, Artificial
  Probe
cggcccttcactgatcttgcttatc

SEQ ID NO: 337121 - DNA, 25 bp, Artificial
  Probe
ccggcccttcactgatcttgcttat

SEQ ID NO: 337122 - DNA, 25 bp, Artificial
  Probe
actgatcttgcttatccctggtctc

SEQ ID NO: 337123 - DNA, 25 bp, Artificial
  Probe
gccgcacaagatcctaccatggaga

SEQ ID NO: 337124 - DNA, 25 bp, Artificial
  Probe
ggcccttcactgatcttgcttatcc

SEQ ID NO: 337125 - DNA, 25 bp, Artificial
  Probe
ctaattgtactagtttacgtgtgca

SEQ ID NO: 337126 - DNA, 25 bp, Artificial
  Probe
cttcactgatcttgcttatccctgg

SEQ ID NO: 337127 - DNA, 25 bp, Artificial
  Probe
tttacgtgtgcattagttgtgtctc

SEQ ID NO: 337128 - DNA, 25 bp, Artificial
  Probe
tcgctaattgtactagtttacgtgt

SEQ ID NO: 337129 - DNA, 25 bp, Artificial
  Probe
acaagatcctaccatggagagctaa

SEQ ID NO: 337130 - DNA, 25 bp, Artificial
  Probe
tctcacgcagcagttgtggttgcta

SEQ ID NO: 337131 - DNA, 25 bp, Artificial
  Probe
gcttatccctggtctcacgcagcag

SEQ ID NO: 337132 - DNA, 25 bp, Artificial
  Probe
cagccgcacaagatcctaccatgga

SEQ ID NO: 337133 - DNA, 25 bp, Artificial
  Probe
cccaaaaatgtgtcacttgattcgg

SEQ ID NO: 337134 - DNA, 25 bp, Artificial
  Probe
ctcacgcagcagttgtggttgctat

SEQ ID NO: 337135 - DNA, 25 bp, Artificial
  Probe
ttatccctggtctcacgcagcagtt

SEQ ID NO: 337136 - DNA, 25 bp, Artificial
  Probe
tagtcgctaattgtactagtttacg

SEQ ID NO: 337137 - DNA, 25 bp, Artificial
  Probe
agtcgctaattgtactagtttacgt

SEQ ID NO: 337138 - DNA, 25 bp, Artificial
  Probe
cttgcttatccctggtctcacgcag

SEQ ID NO: 337139 - DNA, 25 bp, Artificial
  Probe
acgtgtgcattagttgtgtctcccc

SEQ ID NO: 337140 - DNA, 25 bp, Artificial
  Probe
tggtctcacgcagcagttgtggttg

SEQ ID NO: 337141 - DNA, 25 bp, Artificial
  Probe
tcacgcagcagttgtggttgctatt

SEQ ID NO: 337142 - DNA, 25 bp, Artificial
  Probe
tgatcttgcttatccctggtctcac

SEQ ID NO: 337143 - DNA, 25 bp, Artificial
  Probe
gcacaagatcctaccatggagagct

SEQ ID NO: 337144 - DNA, 25 bp, Artificial
  Probe
ccgcacaagatcctaccatggagag

SEQ ID NO: 337145 - DNA, 25 bp, Artificial
  Probe
cactgatcttgcttatccctggtct

SEQ ID NO: 337146 - DNA, 25 bp, Artificial
  Probe
cgtgtgcattagttgtgtctccccg

SEQ ID NO: 337147 - DNA, 25 bp, Artificial
  Probe
cgcagcagttgtggttgctattgtg

SEQ ID NO: 337148 - DNA, 25 bp, Artificial
  Probe
cacaagatcctaccatggagagcta

SEQ ID NO: 337149 - DNA, 25 bp, Artificial
  Probe
gtcgctaattgtactagtttacgtg

SEQ ID NO: 337150 - DNA, 25 bp, Artificial
  Probe
gctaattgtactagtttacgtgtgc

SEQ ID NO: 337151 - DNA, 25 bp, Artificial
  Probe
ctggtctcacgcagcagttgtggtt

SEQ ID NO: 337152 - DNA, 25 bp, Artificial
  Probe
ccccaaaaatgtgtcacttgattcg

SEQ ID NO: 337153 - DNA, 25 bp, Artificial
  Probe
tagattgtaagctcctggagacagg

SEQ ID NO: 337154 - DNA, 25 bp, Artificial
  Probe
tacgtgtgcattagttgtgtctccc

SEQ ID NO: 337155 - DNA, 25 bp, Artificial
  Probe
tcactgatcttgcttatccctggtc

SEQ ID NO: 337156 - DNA, 25 bp, Artificial
  Probe
gtctcacgcagcagttgtggttgct

SEQ ID NO: 337157 - DNA, 25 bp, Artificial
  Probe
ttacgtgtgcattagttgtgtctcc

SEQ ID NO: 337158 - DNA, 25 bp, Artificial
  Probe
agccgcacaagatcctaccatggag

SEQ ID NO: 337159 - DNA, 25 bp, Artificial
  Probe
ctgatcttgcttatccctggtctca

SEQ ID NO: 337160 - DNA, 25 bp, Artificial
  Probe
tcgtaaggattctcatgctgatggc

SEQ ID NO: 337161 - DNA, 25 bp, Artificial
  Probe
caaattagcatgcaagctttgtcaa

SEQ ID NO: 337162 - DNA, 25 bp, Artificial
  Probe
agagaaatgctgcttctcgtcttgg

SEQ ID NO: 337163 - DNA, 25 bp, Artificial
  Probe
tcacataagggttatcctaataggc

SEQ ID NO: 337164 - DNA, 25 bp, Artificial
  Probe
taccctagcaacatctcagcgttcg

SEQ ID NO: 337165 - DNA, 25 bp, Artificial
  Probe
ttctcgtcttggagctggccctggg

SEQ ID NO: 337166 - DNA, 25 bp, Artificial
  Probe
acttatcgattgatgttttacgtgc

SEQ ID NO: 337167 - DNA, 25 bp, Artificial
  Probe
tggagcgcccctttaagcctctgtt

SEQ ID NO: 337168 - DNA, 25 bp, Artificial
  Probe
ctgatgatgtcacataagggttatc

SEQ ID NO: 337169 - DNA, 25 bp, Artificial
  Probe
ccctggggatgctggagaagtccaa

SEQ ID NO: 337170 - DNA, 25 bp, Artificial
  Probe
agacacattaactgggaagagcttt

SEQ ID NO: 337171 - DNA, 25 bp, Artificial
  Probe
aagtccaagcgcatccattttttag

SEQ ID NO: 337172 - DNA, 25 bp, Artificial
  Probe
gacacatcaactgactggttcctac

SEQ ID NO: 337173 - DNA, 25 bp, Artificial
  Probe
ccctttaagcctctgttgcaatctg

SEQ ID NO: 337174 - DNA, 25 bp, Artificial
  Probe
agcgcccctttaagcctctgttgca

SEQ ID NO: 337175 - DNA, 25 bp, Artificial
  Probe
tacaagattgcctgtaatacttgca

SEQ ID NO: 337176 - DNA, 25 bp, Artificial
  Probe
cattttttagacacattaactggga

SEQ ID NO: 337177 - DNA, 25 bp, Artificial
  Probe
aacatctcagcgttcgtaaggattc

SEQ ID NO: 337178 - DNA, 25 bp, Artificial
  Probe
gcaagctttgtcaaactttttccag

SEQ ID NO: 337179 - DNA, 25 bp, Artificial
  Probe
ctctgttgcaatctgaagaggatgt

SEQ ID NO: 337180 - DNA, 25 bp, Artificial
  Probe
ctcgagatctgcttaaaaagctgct

SEQ ID NO: 337181 - DNA, 25 bp, Artificial
  Probe
atagtattgtggaacccacagacac

SEQ ID NO: 337182 - DNA, 25 bp, Artificial
  Probe
gcatgcaagctttgtcaaacttttt

SEQ ID NO: 337183 - DNA, 25 bp, Artificial
  Probe
tcactggtaaagtctgatgatgtca

SEQ ID NO: 337184 - DNA, 25 bp, Artificial
  Probe
gttttacgtgcaaacaacctgaatc

SEQ ID NO: 337185 - DNA, 25 bp, Artificial
  Probe
gtccaagcgcatccattttttagac

SEQ ID NO: 337186 - DNA, 25 bp, Artificial
  Probe
tggagaagtccaagcgcatccattt

SEQ ID NO: 337187 - DNA, 25 bp, Artificial
  Probe
agatctgcttaaaaagctgctgaag

SEQ ID NO: 337188 - DNA, 25 bp, Artificial
  Probe
attgtggaacccacagacacatcaa

SEQ ID NO: 337189 - DNA, 25 bp, Artificial
  Probe
atcaactgactggttcctaccctag

SEQ ID NO: 337190 - DNA, 25 bp, Artificial
  Probe
ggttcctaccctagcaacatctcag

SEQ ID NO: 337191 - DNA, 25 bp, Artificial
  Probe
gggttatcctaataggcaaagtaca

SEQ ID NO: 337192 - DNA, 25 bp, Artificial
  Probe
cttgcaactaaggacaaattagcat

SEQ ID NO: 337193 - DNA, 25 bp, Artificial
  Probe
taactgggaagagcttttggctcgg

SEQ ID NO: 337194 - DNA, 25 bp, Artificial
  Probe
gaaagccagcttctgttcttctctt

SEQ ID NO: 337195 - DNA, 25 bp, Artificial
  Probe
atctgcttaaaaagctgctgaagag

SEQ ID NO: 337196 - DNA, 25 bp, Artificial
  Probe
tgatgtcacataagggttatcctaa

SEQ ID NO: 337197 - DNA, 25 bp, Artificial
  Probe
gtgaagaaagccagcttctgttctt

SEQ ID NO: 337198 - DNA, 25 bp, Artificial
  Probe
caaagtacaagattgcctgtaatac

SEQ ID NO: 337199 - DNA, 25 bp, Artificial
  Probe
tgactggttcctaccctagcaacat

SEQ ID NO: 337200 - DNA, 25 bp, Artificial
  Probe
atcctaataggcaaagtacaagatt

SEQ ID NO: 337201 - DNA, 25 bp, Artificial
  Probe
ccattttttagacacattaactggg

SEQ ID NO: 337202 - DNA, 25 bp, Artificial
  Probe
ctgaatcactggtaaagtctgatga

SEQ ID NO: 337203 - DNA, 25 bp, Artificial
  Probe
gctcggaaggtggagcgccccttta

SEQ ID NO: 337204 - DNA, 25 bp, Artificial
  Probe
atgctggagaagtccaagcgcatcc

SEQ ID NO: 337205 - DNA, 25 bp, Artificial
  Probe
taggatgttgcttctgaatcactgg

SEQ ID NO: 337206 - DNA, 25 bp, Artificial
  Probe
ccctctcaggactgtggccaggatc

SEQ ID NO: 337207 - DNA, 25 bp, Artificial
  Probe
gcccttcagacctggagatcgcagg

SEQ ID NO: 337208 - DNA, 25 bp, Artificial
  Probe
gcgtgaggcctccagacactgagcc

SEQ ID NO: 337209 - DNA, 25 bp, Artificial
  Probe
agcaggcccttcagacctggagatc

SEQ ID NO: 337210 - DNA, 25 bp, Artificial
  Probe
tgtggccaggatctgacccacaggg

SEQ ID NO: 337211 - DNA, 25 bp, Artificial
  Probe
cgagcaggcccttcagacctggaga

SEQ ID NO: 337212 - DNA, 25 bp, Artificial
  Probe
aagttctggtgctcaagcaggggca

SEQ ID NO: 337213 - DNA, 25 bp, Artificial
  Probe
actgagccctctcaggactgtggcc

SEQ ID NO: 337214 - DNA, 25 bp, Artificial
  Probe
caggcccttcagacctggagatcgc

SEQ ID NO: 337215 - DNA, 25 bp, Artificial
  Probe
ggacaggacgatgctggtcattgct

SEQ ID NO: 337216 - DNA, 25 bp, Artificial
  Probe
acgctcacttggtacagcagcggct

SEQ ID NO: 337217 - DNA, 25 bp, Artificial
  Probe
cgctcacttggtacagcagcggctg

SEQ ID NO: 337218 - DNA, 25 bp, Artificial
  Probe
ctctcaggactgtggccaggatctg

SEQ ID NO: 337219 - DNA, 25 bp, Artificial
  Probe
ctcacttggtacagcagcggctgga

SEQ ID NO: 337220 - DNA, 25 bp, Artificial
  Probe
ttcagacctggagatcgcaggagga

SEQ ID NO: 337221 - DNA, 25 bp, Artificial
  Probe
cgcgggtcctcatcctggatgaggc

SEQ ID NO: 337222 - DNA, 25 bp, Artificial
  Probe
accagctcagggatgagcaggatgt

SEQ ID NO: 337223 - DNA, 25 bp, Artificial
  Probe
ttctggtgctcaagcaggggcagct

SEQ ID NO: 337224 - DNA, 25 bp, Artificial
  Probe
cgggtcctcatcctggatgaggcta

SEQ ID NO: 337225 - DNA, 25 bp, Artificial
  Probe
gcgagcaggcccttcagacctggag

SEQ ID NO: 337226 - DNA, 25 bp, Artificial
  Probe
acactgagccctctcaggactgtgg

SEQ ID NO: 337227 - DNA, 25 bp, Artificial
  Probe
acgccgagtgcgagcaggcccttca

SEQ ID NO: 337228 - DNA, 25 bp, Artificial
  Probe
gacactgagccctctcaggactgtg

SEQ ID NO: 337229 - DNA, 25 bp, Artificial
  Probe
agccctctcaggactgtggccagga

SEQ ID NO: 337230 - DNA, 25 bp, Artificial
  Probe
aggacaggacgatgctggtcattgc

SEQ ID NO: 337231 - DNA, 25 bp, Artificial
  Probe
ccaagttctggtgctcaagcagggg

SEQ ID NO: 337232 - DNA, 25 bp, Artificial
  Probe
tgctcaccggctgcacacggttcag

SEQ ID NO: 337233 - DNA, 25 bp, Artificial
  Probe
cgccgagtgcgagcaggcccttcag

SEQ ID NO: 337234 - DNA, 25 bp, Artificial
  Probe
tggccaggatctgacccacagggac

SEQ ID NO: 337235 - DNA, 25 bp, Artificial
  Probe
caccggctgcacacggttcagaatg

SEQ ID NO: 337236 - DNA, 25 bp, Artificial
  Probe
ttgctcaccggctgcacacggttca

SEQ ID NO: 337237 - DNA, 25 bp, Artificial
  Probe
ccttcagacctggagatcgcaggag

SEQ ID NO: 337238 - DNA, 25 bp, Artificial
  Probe
aggacgatgctggtcattgctcacc

SEQ ID NO: 337239 - DNA, 25 bp, Artificial
  Probe
tacgctcacttggtacagcagcggc

SEQ ID NO: 337240 - DNA, 25 bp, Artificial
  Probe
aggcccttcagacctggagatcgca

SEQ ID NO: 337241 - DNA, 25 bp, Artificial
  Probe
ggactgtggccaggatctgacccac

SEQ ID NO: 337242 - DNA, 25 bp, Artificial
  Probe
gccctctcaggactgtggccaggat

SEQ ID NO: 337243 - DNA, 25 bp, Artificial
  Probe
gtgaggcctccagacactgagccct

SEQ ID NO: 337244 - DNA, 25 bp, Artificial
  Probe
gactgtggccaggatctgacccaca

SEQ ID NO: 337245 - DNA, 25 bp, Artificial
  Probe
gacgatgctggtcattgctcaccgg

SEQ ID NO: 337246 - DNA, 25 bp, Artificial
  Probe
cagacctggagatcgcaggaggaca

SEQ ID NO: 337247 - DNA, 25 bp, Artificial
  Probe
acaggacgatgctggtcattgctca

SEQ ID NO: 337248 - DNA, 25 bp, Artificial
  Probe
ccgagtgcgagcaggcccttcagac

SEQ ID NO: 337249 - DNA, 25 bp, Artificial
  Probe
cccgcgggtcctcatcctggatgag

SEQ ID NO: 337250 - DNA, 25 bp, Artificial
  Probe
aggactgtggccaggatctgaccca

SEQ ID NO: 337251 - DNA, 25 bp, Artificial
  Probe
aacccgcgggtcctcatcctggatg

SEQ ID NO: 337252 - DNA, 25 bp, Artificial
  Probe
ggtctcttattgacatcagcatcat

SEQ ID NO: 337253 - DNA, 25 bp, Artificial
  Probe
accaatgtcttaacaggcccccttg

SEQ ID NO: 337254 - DNA, 25 bp, Artificial
  Probe
ctgctattgtccagagtgaaagata

SEQ ID NO: 337255 - DNA, 25 bp, Artificial
  Probe
cctgtgagcgggacaccttagacag

SEQ ID NO: 337256 - DNA, 25 bp, Artificial
  Probe
cgggacaccttagacagcctggcca

SEQ ID NO: 337257 - DNA, 25 bp, Artificial
  Probe
cagatgtttgactccgaatctctgg

SEQ ID NO: 337258 - DNA, 25 bp, Artificial
  Probe
gaaaggtctcttattgacatcagca

SEQ ID NO: 337259 - DNA, 25 bp, Artificial
  Probe
caccctcagagaaaggtctcttatt

SEQ ID NO: 337260 - DNA, 25 bp, Artificial
  Probe
caatgtcttaacaggcccccttgtt

SEQ ID NO: 337261 - DNA, 25 bp, Artificial
  Probe
tttgactccgaatctctggcccgtg

SEQ ID NO: 337262 - DNA, 25 bp, Artificial
  Probe
ccagatgtttgactccgaatctctg

SEQ ID NO: 337263 - DNA, 25 bp, Artificial
  Probe
gctgcactggggacctaagcagatg

SEQ ID NO: 337264 - DNA, 25 bp, Artificial
  Probe
agcatcatttgaaaacactaaaggc

SEQ ID NO: 337265 - DNA, 25 bp, Artificial
  Probe
ctgtgagcgggacaccttagacagc

SEQ ID NO: 337266 - DNA, 25 bp, Artificial
  Probe
gaggctgctattgtccagagtgaaa

SEQ ID NO: 337267 - DNA, 25 bp, Artificial
  Probe
tgactccgaatctctggcccgtggg

SEQ ID NO: 337268 - DNA, 25 bp, Artificial
  Probe
tggcccgtggggaccaatgtcttaa

SEQ ID NO: 337269 - DNA, 25 bp, Artificial
  Probe
aagatgctgcactggggacctaagc

SEQ ID NO: 337270 - DNA, 25 bp, Artificial
  Probe
tgaagatgctgcactggggacctaa

SEQ ID NO: 337271 - DNA, 25 bp, Artificial
  Probe
ctgcactggggacctaagcagatgt

SEQ ID NO: 337272 - DNA, 25 bp, Artificial
  Probe
gcgggacaccttagacagcctggcc

SEQ ID NO: 337273 - DNA, 25 bp, Artificial
  Probe
gagcgggacaccttagacagcctgg

SEQ ID NO: 337274 - DNA, 25 bp, Artificial
  Probe
gggacaccttagacagcctggccac

SEQ ID NO: 337275 - DNA, 25 bp, Artificial
  Probe
cccgtggggaccaatgtcttaacag

SEQ ID NO: 337276 - DNA, 25 bp, Artificial
  Probe
cctcagagaaaggtctcttattgac

SEQ ID NO: 337277 - DNA, 25 bp, Artificial
  Probe
gcccgtggggaccaatgtcttaaca

SEQ ID NO: 337278 - DNA, 25 bp, Artificial
  Probe
catcccagatgtttgactccgaatc

SEQ ID NO: 337279 - DNA, 25 bp, Artificial
  Probe
atctctggcccgtggggaccaatgt

SEQ ID NO: 337280 - DNA, 25 bp, Artificial
  Probe
ccctcagagaaaggtctcttattga

SEQ ID NO: 337281 - DNA, 25 bp, Artificial
  Probe
ggaccaatgtcttaacaggccccct

SEQ ID NO: 337282 - DNA, 25 bp, Artificial
  Probe
aaggtctcttattgacatcagcatc

SEQ ID NO: 337283 - DNA, 25 bp, Artificial
  Probe
actggggacctaagcagatgttctg

SEQ ID NO: 337284 - DNA, 25 bp, Artificial
  Probe
tgtgagcgggacaccttagacagcc

SEQ ID NO: 337285 - DNA, 25 bp, Artificial
  Probe
actccgaatctctggcccgtgggga

SEQ ID NO: 337286 - DNA, 25 bp, Artificial
  Probe
ccgtggggaccaatgtcttaacagg

SEQ ID NO: 337287 - DNA, 25 bp, Artificial
  Probe
gggacctaagcagatgttctgaggt

SEQ ID NO: 337288 - DNA, 25 bp, Artificial
  Probe
tcccagatgtttgactccgaatctc

SEQ ID NO: 337289 - DNA, 25 bp, Artificial
  Probe
ggctgctattgtccagagtgaaaga

SEQ ID NO: 337290 - DNA, 25 bp, Artificial
  Probe
ccatcccagatgtttgactccgaat

SEQ ID NO: 337291 - DNA, 25 bp, Artificial
  Probe
tgtgaagatgctgcactggggacct

SEQ ID NO: 337292 - DNA, 25 bp, Artificial
  Probe
tgtttgactccgaatctctggcccg

SEQ ID NO: 337293 - DNA, 25 bp, Artificial
  Probe
ggaggctgctattgtccagagtgaa

SEQ ID NO: 337294 - DNA, 25 bp, Artificial
  Probe
gcatcatttgaaaacactaaaggca

SEQ ID NO: 337295 - DNA, 25 bp, Artificial
  Probe
gacctaagcagatgttctgaggtga

SEQ ID NO: 337296 - DNA, 25 bp, Artificial
  Probe
ctggggacctaagcagatgttctga

SEQ ID NO: 337297 - DNA, 25 bp, Artificial
  Probe
cctaagcagatgttctgaggtgaat

SEQ ID NO: 337298 - DNA, 25 bp, Artificial
  Probe
ctacgggagaaagctcatggagctg

SEQ ID NO: 337299 - DNA, 25 bp, Artificial
  Probe
aggcctcagcttagtcactttagta

SEQ ID NO: 337300 - DNA, 25 bp, Artificial
  Probe
agtcacaagggcttcagggaccaag

SEQ ID NO: 337301 - DNA, 25 bp, Artificial
  Probe
cgatacaagggctcctatcacacca

SEQ ID NO: 337302 - DNA, 25 bp, Artificial
  Probe
ggagtggccgagtctcactgcctaa

SEQ ID NO: 337303 - DNA, 25 bp, Artificial
  Probe
cttgtgggaatgctggtgctgttct

SEQ ID NO: 337304 - DNA, 25 bp, Artificial
  Probe
gggaccaaggccaactcctctaagt

SEQ ID NO: 337305 - DNA, 25 bp, Artificial
  Probe
gccgagtctcactgcctaaaccaat

SEQ ID NO: 337306 - DNA, 25 bp, Artificial
  Probe
ctgccctacgggagaaagctcatgg

SEQ ID NO: 337307 - DNA, 25 bp, Artificial
  Probe
tgcctcccttcctgtgggtattatc

SEQ ID NO: 337308 - DNA, 25 bp, Artificial
  Probe
tttgcctgccctacgggagaaagct

SEQ ID NO: 337309 - DNA, 25 bp, Artificial
  Probe
cccctgtcagggacatttggctctt

SEQ ID NO: 337310 - DNA, 25 bp, Artificial
  Probe
cagagctacagatgggaccaaaggg

SEQ ID NO: 337311 - DNA, 25 bp, Artificial
  Probe
taggttttttggtggccttcctgct

SEQ ID NO: 337312 - DNA, 25 bp, Artificial
  Probe
tcccccagatcttggaggagtccag

SEQ ID NO: 337313 - DNA, 25 bp, Artificial
  Probe
aagggctcctatcacaccaacgagc

SEQ ID NO: 337314 - DNA, 25 bp, Artificial
  Probe
catctctgtcccagctgctggcaag

SEQ ID NO: 337315 - DNA, 25 bp, Artificial
  Probe
ttttggtggccttcctgctgctggg

SEQ ID NO: 337316 - DNA, 25 bp, Artificial
  Probe
tgggaatgctggtgctgttctatct

SEQ ID NO: 337317 - DNA, 25 bp, Artificial
  Probe
agctgctggcaaggattaacaacca

SEQ ID NO: 337318 - DNA, 25 bp, Artificial
  Probe
gcttcagggaccaaggccaactcct

SEQ ID NO: 337319 - DNA, 25 bp, Artificial
  Probe
acgacggatggattgccatactctt

SEQ ID NO: 337320 - DNA, 25 bp, Artificial
  Probe
cttcctctcagctggggttgaggga

SEQ ID NO: 337321 - DNA, 25 bp, Artificial
  Probe
gttcaccaggaggatcccctcttgc

SEQ ID NO: 337322 - DNA, 25 bp, Artificial
  Probe
ttcttagcaggctctgttcaccagg

SEQ ID NO: 337323 - DNA, 25 bp, Artificial
  Probe
gtgtgcagagctacagatgggacca

SEQ ID NO: 337324 - DNA, 25 bp, Artificial
  Probe
tcccctcttgccaagtttggtgtgc

SEQ ID NO: 337325 - DNA, 25 bp, Artificial
  Probe
ttttgttcttacagagaccaagagg

SEQ ID NO: 337326 - DNA, 25 bp, Artificial
  Probe
agctcctggctgtttgcctgcccta

SEQ ID NO: 337327 - DNA, 25 bp, Artificial
  Probe
aggaggatcccctcttgccaagttt

SEQ ID NO: 337328 - DNA, 25 bp, Artificial
  Probe
tatctgcaaaatcatcgatacaagg

SEQ ID NO: 337329 - DNA, 25 bp, Artificial
  Probe
atcatcgatacaagggctcctatca

SEQ ID NO: 337330 - DNA, 25 bp, Artificial
  Probe
ttacagagaccaagaggcctcagct

SEQ ID NO: 337331 - DNA, 25 bp, Artificial
  Probe
aggcgggcctttcctgccatctctg

SEQ ID NO: 337332 - DNA, 25 bp, Artificial
  Probe
ctgtgggtattatcagcagggacag

SEQ ID NO: 337333 - DNA, 25 bp, Artificial
  Probe
gctgttctatctgcaaaatcatcga

SEQ ID NO: 337334 - DNA, 25 bp, Artificial
  Probe
gaatgagtcacaagggcttcaggga

SEQ ID NO: 337335 - DNA, 25 bp, Artificial
  Probe
ggatggattgccatactcttaggtt

SEQ ID NO: 337336 - DNA, 25 bp, Artificial
  Probe
gggcttcagggaccaaggccaactc

SEQ ID NO: 337337 - DNA, 25 bp, Artificial
  Probe
tggctgtttgcctgccctacgggag

SEQ ID NO: 337338 - DNA, 25 bp, Artificial
  Probe
ccagctgctggcaaggattaacaac

SEQ ID NO: 337339 - DNA, 25 bp, Artificial
  Probe
tggccttcctgctgctggggcttgt

SEQ ID NO: 337340 - DNA, 25 bp, Artificial
  Probe
cacaagggcttcagggaccaaggcc

SEQ ID NO: 337341 - DNA, 25 bp, Artificial
  Probe
tttttggtggccttcctgctgctgg

SEQ ID NO: 337342 - DNA, 25 bp, Artificial
  Probe
ccaagtttggtgtgcagagctacag

SEQ ID NO: 337343 - DNA, 25 bp, Artificial
  Probe
gccatactcttaggttttttggtgg

SEQ ID NO: 337344 - DNA, 25 bp, Artificial
  Probe
agccccgaggaatgctgctgagaga

SEQ ID NO: 337345 - DNA, 25 bp, Artificial
  Probe
atgaagccacggtcagggatgcaca

SEQ ID NO: 337346 - DNA, 25 bp, Artificial
  Probe
cggagggttcatctcggagttagca

SEQ ID NO: 337347 - DNA, 25 bp, Artificial
  Probe
aatggacgagtgacttgagttcaca

SEQ ID NO: 337348 - DNA, 25 bp, Artificial
  Probe
aaatggacgagtgacttgagttcac

SEQ ID NO: 337349 - DNA, 25 bp, Artificial
  Probe
cacacaggaagcacgcactgccgga

SEQ ID NO: 337350 - DNA, 25 bp, Artificial
  Probe
gtctgtctactctacttcaaaggac

SEQ ID NO: 337351 - DNA, 25 bp, Artificial
  Probe
ggttcatctcggagttagcagagaa

SEQ ID NO: 337352 - DNA, 25 bp, Artificial
  Probe
tcccgacagaaaaaggcccgagtct

SEQ ID NO: 337353 - DNA, 25 bp, Artificial
  Probe
aagagcacctcaacgctcaggggtg

SEQ ID NO: 337354 - DNA, 25 bp, Artificial
  Probe
aaattccaaggatatagccccgagg

SEQ ID NO: 337355 - DNA, 25 bp, Artificial
  Probe
acgcactgccggacatgtctatctt

SEQ ID NO: 337356 - DNA, 25 bp, Artificial
  Probe
gcccaggattgatgccgctgtactg

SEQ ID NO: 337357 - DNA, 25 bp, Artificial
  Probe
agttagcagagaaccggacacaccc

SEQ ID NO: 337358 - DNA, 25 bp, Artificial
  Probe
ccagcccaggattgatgccgctgta

SEQ ID NO: 337359 - DNA, 25 bp, Artificial
  Probe
atctcggagttagcagagaaccgga

SEQ ID NO: 337360 - DNA, 25 bp, Artificial
  Probe
attgatgccgctgtactgcctgctg

SEQ ID NO: 337361 - DNA, 25 bp, Artificial
  Probe
tgctgagaaacagactcaggcggag

SEQ ID NO: 337362 - DNA, 25 bp, Artificial
  Probe
gattgatgccgctgtactgcctgct

SEQ ID NO: 337363 - DNA, 25 bp, Artificial
  Probe
cctgctggatgttcccgttgcacta

SEQ ID NO: 337364 - DNA, 25 bp, Artificial
  Probe
aaaggcccgagtctgtctactctac

SEQ ID NO: 337365 - DNA, 25 bp, Artificial
  Probe
agacctcaagggagatgaagccacg

SEQ ID NO: 337366 - DNA, 25 bp, Artificial
  Probe
cagtcacagggctctgtaggagaag

SEQ ID NO: 337367 - DNA, 25 bp, Artificial
  Probe
cggtgtatgttctatctgcagaaaa

SEQ ID NO: 337368 - DNA, 25 bp, Artificial
  Probe
tggattactatgagccagtctaaac

SEQ ID NO: 337369 - DNA, 25 bp, Artificial
  Probe
tgatgtggcaaagttcccatttctc

SEQ ID NO: 337370 - DNA, 25 bp, Artificial
  Probe
ttcgagacctcaagggagatgaagc

SEQ ID NO: 337371 - DNA, 25 bp, Artificial
  Probe
aagagaagagcacctcaacgctcag

SEQ ID NO: 337372 - DNA, 25 bp, Artificial
  Probe
gcactatggacagttgctttgaaga

SEQ ID NO: 337373 - DNA, 25 bp, Artificial
  Probe
gaaaccccagggactgctgctgaga

SEQ ID NO: 337374 - DNA, 25 bp, Artificial
  Probe
accaagtaccagtcggtgtatgttc

SEQ ID NO: 337375 - DNA, 25 bp, Artificial
  Probe
agaggaaaccccagggactgctgct

SEQ ID NO: 337376 - DNA, 25 bp, Artificial
  Probe
agtgacttgagttcacacaggaagc

SEQ ID NO: 337377 - DNA, 25 bp, Artificial
  Probe
cgtgacaccaagtgccagtcacagg

SEQ ID NO: 337378 - DNA, 25 bp, Artificial
  Probe
agtgccagtcacagggctctgtagg

SEQ ID NO: 337379 - DNA, 25 bp, Artificial
  Probe
actgctgctgagaaacagactcagg

SEQ ID NO: 337380 - DNA, 25 bp, Artificial
  Probe
tacttcaaaggacaccaagtaccag

SEQ ID NO: 337381 - DNA, 25 bp, Artificial
  Probe
ggaagcacgcactgccggacatgtc

SEQ ID NO: 337382 - DNA, 25 bp, Artificial
  Probe
tggatgttcccgttgcactatggac

SEQ ID NO: 337383 - DNA, 25 bp, Artificial
  Probe
ttccaaggatatagccccgaggaat

SEQ ID NO: 337384 - DNA, 25 bp, Artificial
  Probe
cccgacagaaaaaggcccgagtctg

SEQ ID NO: 337385 - DNA, 25 bp, Artificial
  Probe
cacagggctctgtaggagaagagaa

SEQ ID NO: 337386 - DNA, 25 bp, Artificial
  Probe
atgtggcaaagttcccatttctctt

SEQ ID NO: 337387 - DNA, 25 bp, Artificial
  Probe
gacctcaagggagatgaagccacgg

SEQ ID NO: 337388 - DNA, 25 bp, Artificial
  Probe
gatatagccccgaggaatgctgctg

SEQ ID NO: 337389 - DNA, 25 bp, Artificial
  Probe
cgctgtactgcctgctggatgttcc

SEQ ID NO: 337390 - DNA, 25 bp, Artificial
  Probe
agcatttgtcccaacgggagctgga

SEQ ID NO: 337391 - DNA, 25 bp, Artificial
  Probe
atgtgagaagcttctagctctttgt

SEQ ID NO: 337392 - DNA, 25 bp, Artificial
  Probe
tcacattgatcatagctgtggattg

SEQ ID NO: 337393 - DNA, 25 bp, Artificial
  Probe
gatcatagctgtggattggttcctt

SEQ ID NO: 337394 - DNA, 25 bp, Artificial
  Probe
cttctagctctttgtccagggcgga

SEQ ID NO: 337395 - DNA, 25 bp, Artificial
  Probe
agctgtggattggttccttgatcga

SEQ ID NO: 337396 - DNA, 25 bp, Artificial
  Probe
gagctgaaccttggtcagatcacca

SEQ ID NO: 337397 - DNA, 25 bp, Artificial
  Probe
ctgactctacccagcctggggaaac

SEQ ID NO: 337398 - DNA, 25 bp, Artificial
  Probe
attgagcatttgtcccaacgggagc

SEQ ID NO: 337399 - DNA, 25 bp, Artificial
  Probe
caagtcaacaactatgagctgaacc

SEQ ID NO: 337400 - DNA, 25 bp, Artificial
  Probe
aatctgttgcacaactgactgtggg

SEQ ID NO: 337401 - DNA, 25 bp, Artificial
  Probe
ggagtcctggggacaatctgttgca

SEQ ID NO: 337402 - DNA, 25 bp, Artificial
  Probe
tgtcccaacgggagctggagctgca

SEQ ID NO: 337403 - DNA, 25 bp, Artificial
  Probe
tgaggccttggcagccatctttatt

SEQ ID NO: 337404 - DNA, 25 bp, Artificial
  Probe
tggattggttccttgatcgacttcg

SEQ ID NO: 337405 - DNA, 25 bp, Artificial
  Probe
gaccaatgtacttggggactcaatt

SEQ ID NO: 337406 - DNA, 25 bp, Artificial
  Probe
gctgcaagaggctgagctgactcta

SEQ ID NO: 337407 - DNA, 25 bp, Artificial
  Probe
tgcaagaggctgagctgactctacc

SEQ ID NO: 337408 - DNA, 25 bp, Artificial
  Probe
tgagctgactctacccagcctgggg

SEQ ID NO: 337409 - DNA, 25 bp, Artificial
  Probe
ctatgagctgaaccttggtcagatc

SEQ ID NO: 337410 - DNA, 25 bp, Artificial
  Probe
atgtacttggggactcaattggagc

SEQ ID NO: 337411 - DNA, 25 bp, Artificial
  Probe
tgcacaactgactgtgggctgcaca

SEQ ID NO: 337412 - DNA, 25 bp, Artificial
  Probe
gccacagctgccagcgtaggagcag

SEQ ID NO: 337413 - DNA, 25 bp, Artificial
  Probe
tggggacaatctgttgcacaactga

SEQ ID NO: 337414 - DNA, 25 bp, Artificial
  Probe
tgaaccttggtcagatcaccacaat

SEQ ID NO: 337415 - DNA, 25 bp, Artificial
  Probe
gcagccatctttattgctcaagtca

SEQ ID NO: 337416 - DNA, 25 bp, Artificial
  Probe
catggtgattgtgctcacgtctgtc

SEQ ID NO: 337417 - DNA, 25 bp, Artificial
  Probe
gcatttgtcccaacgggagctggag

SEQ ID NO: 337418 - DNA, 25 bp, Artificial
  Probe
cttggcagccatctttattgctcaa

SEQ ID NO: 337419 - DNA, 25 bp, Artificial
  Probe
gccagcgtaggagcagctggcatcc

SEQ ID NO: 337420 - DNA, 25 bp, Artificial
  Probe
gtcatgtgagaagcttctagctctt

SEQ ID NO: 337421 - DNA, 25 bp, Artificial
  Probe
ggttctctggggactgctgagataa

SEQ ID NO: 337422 - DNA, 25 bp, Artificial
  Probe
cacagaggacatcacattgatcata

SEQ ID NO: 337423 - DNA, 25 bp, Artificial
  Probe
cccaacgggagctggagctgcaaga

SEQ ID NO: 337424 - DNA, 25 bp, Artificial
  Probe
cacattgatcatagctgtggattgg

SEQ ID NO: 337425 - DNA, 25 bp, Artificial
  Probe
cagcgtaggagcagctggcatcccc

SEQ ID NO: 337426 - DNA, 25 bp, Artificial
  Probe
ggacaatctgttgcacaactgactg

SEQ ID NO: 337427 - DNA, 25 bp, Artificial
  Probe
ggactcaattggagcagctgtcatt

SEQ ID NO: 337428 - DNA, 25 bp, Artificial
  Probe
ggacatcacattgatcatagctgtg

SEQ ID NO: 337429 - DNA, 25 bp, Artificial
  Probe
ttgatcatagctgtggattggttcc

SEQ ID NO: 337430 - DNA, 25 bp, Artificial
  Probe
cagcctggggaaaccctataagtca

SEQ ID NO: 337431 - DNA, 25 bp, Artificial
  Probe
gattgtgctcacgtctgtcggcctg

SEQ ID NO: 337432 - DNA, 25 bp, Artificial
  Probe
gactcaattggagcagctgtcattg

SEQ ID NO: 337433 - DNA, 25 bp, Artificial
  Probe
tggggactcaattggagcagctgtc

SEQ ID NO: 337434 - DNA, 25 bp, Artificial
  Probe
aattggagcagctgtcattgagcat

SEQ ID NO: 337435 - DNA, 25 bp, Artificial
  Probe
tattgctcaagtcaacaactatgag

SEQ ID NO: 337436 - DNA, 25 bp, Artificial
  Probe
gtttcttactataacgtcattagtg

SEQ ID NO: 337437 - DNA, 25 bp, Artificial
  Probe
aatgagattcactttctgggtaggc

SEQ ID NO: 337438 - DNA, 25 bp, Artificial
  Probe
ataacgtcattagtgtaagaacacg

SEQ ID NO: 337439 - DNA, 25 bp, Artificial
  Probe
taagatgtatgctattccctatgca

SEQ ID NO: 337440 - DNA, 25 bp, Artificial
  Probe
agctcagaagtctgcagactgctac

SEQ ID NO: 337441 - DNA, 25 bp, Artificial
  Probe
atcaaacaggatatgtcttgtgacc

SEQ ID NO: 337442 - DNA, 25 bp, Artificial
  Probe
caaacaggatatgtcttgtgacctg

SEQ ID NO: 337443 - DNA, 25 bp, Artificial
  Probe
ccctatgcaacagatgatcaaacag

SEQ ID NO: 337444 - DNA, 25 bp, Artificial
  Probe
tcagcaacagtgcacgttggagacc

SEQ ID NO: 337445 - DNA, 25 bp, Artificial
  Probe
caaacagaactcatgcagctcagaa

SEQ ID NO: 337446 - DNA, 25 bp, Artificial
  Probe
agcaacagtgcacgttggagaccat

SEQ ID NO: 337447 - DNA, 25 bp, Artificial
  Probe
acactgagcattagtgatatgaccc

SEQ ID NO: 337448 - DNA, 25 bp, Artificial
  Probe
ctctatggtaatttcctgaatggag

SEQ ID NO: 337449 - DNA, 25 bp, Artificial
  Probe
gtaggcaaacagaactcatgcagct

SEQ ID NO: 337450 - DNA, 25 bp, Artificial
  Probe
tcgcccaaatataggaatgatttta

SEQ ID NO: 337451 - DNA, 25 bp, Artificial
  Probe
catagctggccctgctaggggagct

SEQ ID NO: 337452 - DNA, 25 bp, Artificial
  Probe
atgacttaaggacgacgacgatttg

SEQ ID NO: 337453 - DNA, 25 bp, Artificial
  Probe
aatgtttcgcccaaatataggaatg

SEQ ID NO: 337454 - DNA, 25 bp, Artificial
  Probe
tcactttctgggtaggcaaacagaa

SEQ ID NO: 337455 - DNA, 25 bp, Artificial
  Probe
aacagaactcatgcagctcagaagt

SEQ ID NO: 337456 - DNA, 25 bp, Artificial
  Probe
gtggtaaatgtttcgcccaaatata

SEQ ID NO: 337457 - DNA, 25 bp, Artificial
  Probe
actcatgcagctcagaagtctgcag

SEQ ID NO: 337458 - DNA, 25 bp, Artificial
  Probe
tgcacgttggagaccataataggtg

SEQ ID NO: 337459 - DNA, 25 bp, Artificial
  Probe
cactttctgggtaggcaaacagaac

SEQ ID NO: 337460 - DNA, 25 bp, Artificial
  Probe
actataacgtcattagtgtaagaac

SEQ ID NO: 337461 - DNA, 25 bp, Artificial
  Probe
agattcactttctgggtaggcaaac

SEQ ID NO: 337462 - DNA, 25 bp, Artificial
  Probe
agcacaatgacttaaggacgacgac

SEQ ID NO: 337463 - DNA, 25 bp, Artificial
  Probe
gctattccctatgcaacagatgatc

SEQ ID NO: 337464 - DNA, 25 bp, Artificial
  Probe
tatggatttacacatagctggccct

SEQ ID NO: 337465 - DNA, 25 bp, Artificial
  Probe
aatatttcagcaacagtgcacgttg

SEQ ID NO: 337466 - DNA, 25 bp, Artificial
  Probe
cagaagtctgcagactgctacaccg

SEQ ID NO: 337467 - DNA, 25 bp, Artificial
  Probe
tctgcagactgctacaccgaggggt

SEQ ID NO: 337468 - DNA, 25 bp, Artificial
  Probe
ttcctgaatggagtaagtttcttac

SEQ ID NO: 337469 - DNA, 25 bp, Artificial
  Probe
aactcatgcagctcagaagtctgca

SEQ ID NO: 337470 - DNA, 25 bp, Artificial
  Probe
tatgctattccctatgcaacagatg

SEQ ID NO: 337471 - DNA, 25 bp, Artificial
  Probe
catgcagctcagaagtctgcagact

SEQ ID NO: 337472 - DNA, 25 bp, Artificial
  Probe
acaatgacttaaggacgacgacgat

SEQ ID NO: 337473 - DNA, 25 bp, Artificial
  Probe
caatgacttaaggacgacgacgatt

SEQ ID NO: 337474 - DNA, 25 bp, Artificial
  Probe
acagaactcatgcagctcagaagtc

SEQ ID NO: 337475 - DNA, 25 bp, Artificial
  Probe
cctatgcaacagatgatcaaacagg

SEQ ID NO: 337476 - DNA, 25 bp, Artificial
  Probe
taacactgagcattagtgatatgac

SEQ ID NO: 337477 - DNA, 25 bp, Artificial
  Probe
ggggtgcacagcacaatgacttaag

SEQ ID NO: 337478 - DNA, 25 bp, Artificial
  Probe
agaacacgatcaatatggatttaca

SEQ ID NO: 337479 - DNA, 25 bp, Artificial
  Probe
gatgtatgctattccctatgcaaca

SEQ ID NO: 337480 - DNA, 25 bp, Artificial
  Probe
tttacacatagctggccctgctagg

SEQ ID NO: 337481 - DNA, 25 bp, Artificial
  Probe
aggggtgcacagcacaatgacttaa

SEQ ID NO: 337482 - DNA, 25 bp, Artificial
  Probe
ttatctgtcactctgtgtagtgaat

SEQ ID NO: 337483 - DNA, 25 bp, Artificial
  Probe
gatggccgccagtaacaaagacaag

SEQ ID NO: 337484 - DNA, 25 bp, Artificial
  Probe
tccaccagaccatgggggtaaagac

SEQ ID NO: 337485 - DNA, 25 bp, Artificial
  Probe
caacattaggcgtttgacccacagg

SEQ ID NO: 337486 - DNA, 25 bp, Artificial
  Probe
tggcctgttggctctgtagatgctc

SEQ ID NO: 337487 - DNA, 25 bp, Artificial
  Probe
gaacatggcctgttggctctgtaga

SEQ ID NO: 337488 - DNA, 25 bp, Artificial
  Probe
ggcattgcttgacctggtcaaaagg

SEQ ID NO: 337489 - DNA, 25 bp, Artificial
  Probe
tctcatctgcggaattttaagtggt

SEQ ID NO: 337490 - DNA, 25 bp, Artificial
  Probe
taaaggcacactgaaaccctttgtt

SEQ ID NO: 337491 - DNA, 25 bp, Artificial
  Probe
acttcagtcactggatggccgccag

SEQ ID NO: 337492 - DNA, 25 bp, Artificial
  Probe
ctgtcactctgtgtagtgaatgaaa

SEQ ID NO: 337493 - DNA, 25 bp, Artificial
  Probe
gatgacatcaaaagcagtcgggacc

SEQ ID NO: 337494 - DNA, 25 bp, Artificial
  Probe
gtaaaggcacactgaaaccctttgt

SEQ ID NO: 337495 - DNA, 25 bp, Artificial
  Probe
ccctttgtttatctgtcactctgtg

SEQ ID NO: 337496 - DNA, 25 bp, Artificial
  Probe
ctcatctgcggaattttaagtggtt

SEQ ID NO: 337497 - DNA, 25 bp, Artificial
  Probe
catcaaaagcagtcgggaccttaag

SEQ ID NO: 337498 - DNA, 25 bp, Artificial
  Probe
cttgacctggtcaaaagggatgttg

SEQ ID NO: 337499 - DNA, 25 bp, Artificial
  Probe
aaagcagtcgggaccttaagagctg

SEQ ID NO: 337500 - DNA, 25 bp, Artificial
  Probe
agccacccaaacgttccattcaagg

SEQ ID NO: 337501 - DNA, 25 bp, Artificial
  Probe
ttccaccagaccatgggggtaaaga

SEQ ID NO: 337502 - DNA, 25 bp, Artificial
  Probe
gctctcaggacactgggaaatgtgc

SEQ ID NO: 337503 - DNA, 25 bp, Artificial
  Probe
gtacagttatccagccacccaaacg

SEQ ID NO: 337504 - DNA, 25 bp, Artificial
  Probe
aggcacactgaaaccctttgtttat

SEQ ID NO: 337505 - DNA, 25 bp, Artificial
  Probe
gctctgtagatgctctcatttcaaa

SEQ ID NO: 337506 - DNA, 25 bp, Artificial
  Probe
tgacccacaggcaagaacatggcct

SEQ ID NO: 337507 - DNA, 25 bp, Artificial
  Probe
atgtgggcattgcttgacctggtca

SEQ ID NO: 337508 - DNA, 25 bp, Artificial
  Probe
taaagacttcagtcactggatggcc

SEQ ID NO: 337509 - DNA, 25 bp, Artificial
  Probe
cccaagacgctctcatctgcggaat

SEQ ID NO: 337510 - DNA, 25 bp, Artificial
  Probe
acactgggaaatgtgctgttgcatt

SEQ ID NO: 337511 - DNA, 25 bp, Artificial
  Probe
acccacaggcaagaacatggcctgt

SEQ ID NO: 337512 - DNA, 25 bp, Artificial
  Probe
gccacccaaacgttccattcaaggt

SEQ ID NO: 337513 - DNA, 25 bp, Artificial
  Probe
cactctgtgtagtgaatgaaaactg

SEQ ID NO: 337514 - DNA, 25 bp, Artificial
  Probe
cactgggaaatgtgctgttgcattc

SEQ ID NO: 337515 - DNA, 25 bp, Artificial
  Probe
attaggcgtttgacccacaggcaag

SEQ ID NO: 337516 - DNA, 25 bp, Artificial
  Probe
gacgctctcatctgcggaattttaa

SEQ ID NO: 337517 - DNA, 25 bp, Artificial
  Probe
ctgttggctctgtagatgctctcat

SEQ ID NO: 337518 - DNA, 25 bp, Artificial
  Probe
tgtttatctgtcactctgtgtagtg

SEQ ID NO: 337519 - DNA, 25 bp, Artificial
  Probe
ggtaaagacttcagtcactggatgg

SEQ ID NO: 337520 - DNA, 25 bp, Artificial
  Probe
gaagaaatctagattcccaagacgc

SEQ ID NO: 337521 - DNA, 25 bp, Artificial
  Probe
attgcttgacctggtcaaaagggat

SEQ ID NO: 337522 - DNA, 25 bp, Artificial
  Probe
gaatgaaaactgtctcccattcagt

SEQ ID NO: 337523 - DNA, 25 bp, Artificial
  Probe
ccgccagtaacaaagacaagaggac

SEQ ID NO: 337524 - DNA, 25 bp, Artificial
  Probe
gtagatgctctcatttcaaacgctc

SEQ ID NO: 337525 - DNA, 25 bp, Artificial
  Probe
acccaaacgttccattcaaggtctg

SEQ ID NO: 337526 - DNA, 25 bp, Artificial
  Probe
cgtttgacccacaggcaagaacatg

SEQ ID NO: 337527 - DNA, 25 bp, Artificial
  Probe
tagattcccaagacgctctcatctg

SEQ ID NO: 337528 - DNA, 25 bp, Artificial
  Probe
aatccagagcccagcagggagcagg

SEQ ID NO: 337529 - DNA, 25 bp, Artificial
  Probe
tgttcagactccagtctcttcacgc

SEQ ID NO: 337530 - DNA, 25 bp, Artificial
  Probe
accacttccgaataccagagggatt

SEQ ID NO: 337531 - DNA, 25 bp, Artificial
  Probe
gtgatgttgaccacttccgaatacc

SEQ ID NO: 337532 - DNA, 25 bp, Artificial
  Probe
gtctgactccttcactctctagtga

SEQ ID NO: 337533 - DNA, 25 bp, Artificial
  Probe
actctctagtgatgttgaccacttc

SEQ ID NO: 337534 - DNA, 25 bp, Artificial
  Probe
taccagagggatttccagcttcccc

SEQ ID NO: 337535 - DNA, 25 bp, Artificial
  Probe
ctggtgattcagactctgtgtttta

SEQ ID NO: 337536 - DNA, 25 bp, Artificial
  Probe
tccgaataccagagggatttccagc

SEQ ID NO: 337537 - DNA, 25 bp, Artificial
  Probe
aataccagagggatttccagcttcc

SEQ ID NO: 337538 - DNA, 25 bp, Artificial
  Probe
agagatgttcagactccagtctctt

SEQ ID NO: 337539 - DNA, 25 bp, Artificial
  Probe
gcccacactaactacaagctgtagc

SEQ ID NO: 337540 - DNA, 25 bp, Artificial
  Probe
tccagagcccagcagggagcaggca

SEQ ID NO: 337541 - DNA, 25 bp, Artificial
  Probe
ctcaacaggccaaagtctgactcct

SEQ ID NO: 337542 - DNA, 25 bp, Artificial
  Probe
aaccaggtatggactgacaacttct

SEQ ID NO: 337543 - DNA, 25 bp, Artificial
  Probe
ggggaccattcactgtccaccctaa

SEQ ID NO: 337544 - DNA, 25 bp, Artificial
  Probe
cacttccgaataccagagggatttc

SEQ ID NO: 337545 - DNA, 25 bp, Artificial
  Probe
ttcactctctagtgatgttgaccac

SEQ ID NO: 337546 - DNA, 25 bp, Artificial
  Probe
aactacaagctgtagcccagtgggg

SEQ ID NO: 337547 - DNA, 25 bp, Artificial
  Probe
accctaaccaggtatggactgacaa

SEQ ID NO: 337548 - DNA, 25 bp, Artificial
  Probe
acactaactacaagctgtagcccag

SEQ ID NO: 337549 - DNA, 25 bp, Artificial
  Probe
taaagctgggacatgccaggttaaa

SEQ ID NO: 337550 - DNA, 25 bp, Artificial
  Probe
ggccaaagtctgactccttcactct

SEQ ID NO: 337551 - DNA, 25 bp, Artificial
  Probe
aggtgccggagagatgttcagactc

SEQ ID NO: 337552 - DNA, 25 bp, Artificial
  Probe
ttcccccaaaggatatcccaggcag

SEQ ID NO: 337553 - DNA, 25 bp, Artificial
  Probe
gctcaacaggccaaagtctgactcc

SEQ ID NO: 337554 - DNA, 25 bp, Artificial
  Probe
cagactctgtgttttaatgaatttc

SEQ ID NO: 337555 - DNA, 25 bp, Artificial
  Probe
cccccaaaggatatcccaggcaggg

SEQ ID NO: 337556 - DNA, 25 bp, Artificial
  Probe
gcttttgcaaataaagctgggacat

SEQ ID NO: 337557 - DNA, 25 bp, Artificial
  Probe
tgagccacagcaaggttaagggcat

SEQ ID NO: 337558 - DNA, 25 bp, Artificial
  Probe
ctctgaatccagagcccagcaggga

SEQ ID NO: 337559 - DNA, 25 bp, Artificial
  Probe
tgaccacttccgaataccagaggga

SEQ ID NO: 337560 - DNA, 25 bp, Artificial
  Probe
taaccaggtatggactgacaacttc

SEQ ID NO: 337561 - DNA, 25 bp, Artificial
  Probe
cttccgaataccagagggatttcca

SEQ ID NO: 337562 - DNA, 25 bp, Artificial
  Probe
cttttgcaaataaagctgggacatg

SEQ ID NO: 337563 - DNA, 25 bp, Artificial
  Probe
ccacagcaaggttaagggcatcgcg

SEQ ID NO: 337564 - DNA, 25 bp, Artificial
  Probe
gccacagcaaggttaagggcatcgc

SEQ ID NO: 337565 - DNA, 25 bp, Artificial
  Probe
aggccaaagtctgactccttcactc

SEQ ID NO: 337566 - DNA, 25 bp, Artificial
  Probe
tctggtgattcagactctgtgtttt

SEQ ID NO: 337567 - DNA, 25 bp, Artificial
  Probe
atgttgaccacttccgaataccaga

SEQ ID NO: 337568 - DNA, 25 bp, Artificial
  Probe
gtgccggagagatgttcagactcca

SEQ ID NO: 337569 - DNA, 25 bp, Artificial
  Probe
tgggggctcaacaggccaaagtctg

SEQ ID NO: 337570 - DNA, 25 bp, Artificial
  Probe
agtctgactccttcactctctagtg

SEQ ID NO: 337571 - DNA, 25 bp, Artificial
  Probe
ctctagtgatgttgaccacttccga

SEQ ID NO: 337572 - DNA, 25 bp, Artificial
  Probe
tgactccttcactctctagtgatgt

SEQ ID NO: 337573 - DNA, 25 bp, Artificial
  Probe
agcccacactaactacaagctgtag

SEQ ID NO: 337574 - DNA, 25 bp, Artificial
  Probe
atgggcattctagtgcccagtgtag

SEQ ID NO: 337575 - DNA, 25 bp, Artificial
  Probe
tctgcacataggagccagggactct

SEQ ID NO: 337576 - DNA, 25 bp, Artificial
  Probe
tcttccagctgtaccgcctcagaaa

SEQ ID NO: 337577 - DNA, 25 bp, Artificial
  Probe
gtcagagctctctggggactacatg

SEQ ID NO: 337578 - DNA, 25 bp, Artificial
  Probe
gggaatagtccacatagctatgcca

SEQ ID NO: 337579 - DNA, 25 bp, Artificial
  Probe
tgaacatgggcattctagtgcccag

SEQ ID NO: 337580 - DNA, 25 bp, Artificial
  Probe
gaaagtactagaacatctctctgca

SEQ ID NO: 337581 - DNA, 25 bp, Artificial
  Probe
gcttctgcacataggagccagggac

SEQ ID NO: 337582 - DNA, 25 bp, Artificial
  Probe
aaaccttagcactgttcagctcagc

SEQ ID NO: 337583 - DNA, 25 bp, Artificial
  Probe
tgtaccgcctcagaaacacctcagg

SEQ ID NO: 337584 - DNA, 25 bp, Artificial
  Probe
aactatgtggacctggacctagtcc

SEQ ID NO: 337585 - DNA, 25 bp, Artificial
  Probe
gcctgctctgtctcttccagctgta

SEQ ID NO: 337586 - DNA, 25 bp, Artificial
  Probe
atgtggacctggacctagtccctcc

SEQ ID NO: 337587 - DNA, 25 bp, Artificial
  Probe
agctcagcttctgcacataggagcc

SEQ ID NO: 337588 - DNA, 25 bp, Artificial
  Probe
ctcccctggaggttcctggagcggc

SEQ ID NO: 337589 - DNA, 25 bp, Artificial
  Probe
gactctgaggccttgtgaggtgcta

SEQ ID NO: 337590 - DNA, 25 bp, Artificial
  Probe
ggagacccatggtggctcagccccg

SEQ ID NO: 337591 - DNA, 25 bp, Artificial
  Probe
tgggcattctagtgcccagtgtagc

SEQ ID NO: 337592 - DNA, 25 bp, Artificial
  Probe
agcattagggacagatggagaccca

SEQ ID NO: 337593 - DNA, 25 bp, Artificial
  Probe
agaagtgctccaaagaaattagact

SEQ ID NO: 337594 - DNA, 25 bp, Artificial
  Probe
gcggccccagggaatagtccacata

SEQ ID NO: 337595 - DNA, 25 bp, Artificial
  Probe
tcccctggaggttcctggagcggcc

SEQ ID NO: 337596 - DNA, 25 bp, Artificial
  Probe
tcttcccaagggtcagagctctctg

SEQ ID NO: 337597 - DNA, 25 bp, Artificial
  Probe
aagagaaaaccttagcactgttcag

SEQ ID NO: 337598 - DNA, 25 bp, Artificial
  Probe
caagttctagaactttcagaagata

SEQ ID NO: 337599 - DNA, 25 bp, Artificial
  Probe
catagctatgccagcatcaagttct

SEQ ID NO: 337600 - DNA, 25 bp, Artificial
  Probe
ggggactacatgtacatccctgact

SEQ ID NO: 337601 - DNA, 25 bp, Artificial
  Probe
cctgactatcccagtgctaggctgg

SEQ ID NO: 337602 - DNA, 25 bp, Artificial
  Probe
attctagtgcccagtgtagcattag

SEQ ID NO: 337603 - DNA, 25 bp, Artificial
  Probe
agatggagacccatggtggctcagc

SEQ ID NO: 337604 - DNA, 25 bp, Artificial
  Probe
cccagggaatagtccacatagctat

SEQ ID NO: 337605 - DNA, 25 bp, Artificial
  Probe
agagaaaaccttagcactgttcagc

SEQ ID NO: 337606 - DNA, 25 bp, Artificial
  Probe
gccttgtgaggtgctatgctgcccc

SEQ ID NO: 337607 - DNA, 25 bp, Artificial
  Probe
gtagcattagggacagatggagacc

SEQ ID NO: 337608 - DNA, 25 bp, Artificial
  Probe
tgctctgtctcttccagctgtaccg

SEQ ID NO: 337609 - DNA, 25 bp, Artificial
  Probe
atgccagcatcaagttctagaactt

SEQ ID NO: 337610 - DNA, 25 bp, Artificial
  Probe
ctgactatcccagtgctaggctggg

SEQ ID NO: 337611 - DNA, 25 bp, Artificial
  Probe
ggactacatgtacatccctgactat

SEQ ID NO: 337612 - DNA, 25 bp, Artificial
  Probe
cccagtgtagcattagggacagatg

SEQ ID NO: 337613 - DNA, 25 bp, Artificial
  Probe
agtgctccaaagaaattagactctt

SEQ ID NO: 337614 - DNA, 25 bp, Artificial
  Probe
atgtacatccctgactatcccagtg

SEQ ID NO: 337615 - DNA, 25 bp, Artificial
  Probe
agctctctggggactacatgtacat

SEQ ID NO: 337616 - DNA, 25 bp, Artificial
  Probe
acctcaggaagaagtgctccaaaga

SEQ ID NO: 337617 - DNA, 25 bp, Artificial
  Probe
cacataggagccagggactctgagg

SEQ ID NO: 337618 - DNA, 25 bp, Artificial
  Probe
tggagcggccccagggaatagtcca

SEQ ID NO: 337619 - DNA, 25 bp, Artificial
  Probe
taggagccagggactctgaggcctt

SEQ ID NO: 337620 - DNA, 25 bp, Artificial
  Probe
gtacgcatggcatgggcctgaccca

SEQ ID NO: 337621 - DNA, 25 bp, Artificial
  Probe
atatcagccaagtgtggtgaaagac

SEQ ID NO: 337622 - DNA, 25 bp, Artificial
  Probe
tgcaagtcacgttccccagtgaaac

SEQ ID NO: 337623 - DNA, 25 bp, Artificial
  Probe
gcctcggaggcaagaatttgcttcc

SEQ ID NO: 337624 - DNA, 25 bp, Artificial
  Probe
gaatttcagagacctcagactcctc

SEQ ID NO: 337625 - DNA, 25 bp, Artificial
  Probe
gttctggcagagacggttcagcaca

SEQ ID NO: 337626 - DNA, 25 bp, Artificial
  Probe
atggcatgggcctgacccaagcaga

SEQ ID NO: 337627 - DNA, 25 bp, Artificial
  Probe
gagaactttgcgaatttcagagacc

SEQ ID NO: 337628 - DNA, 25 bp, Artificial
  Probe
aagtgcctcttctgccgcattggtg

SEQ ID NO: 337629 - DNA, 25 bp, Artificial
  Probe
atcaaccagttatatcagccaagtg

SEQ ID NO: 337630 - DNA, 25 bp, Artificial
  Probe
ctgaaagcagcctcggaggcaagaa

SEQ ID NO: 337631 - DNA, 25 bp, Artificial
  Probe
tctacatccttcttcggaagactgt

SEQ ID NO: 337632 - DNA, 25 bp, Artificial
  Probe
tgtgctcagtaaagccatagaaaag

SEQ ID NO: 337633 - DNA, 25 bp, Artificial
  Probe
tggcagagacggttcagcacagcac

SEQ ID NO: 337634 - DNA, 25 bp, Artificial
  Probe
gcagaaacccggatttgcaggccat

SEQ ID NO: 337635 - DNA, 25 bp, Artificial
  Probe
ggggaactctctgcaagtcacgttc

SEQ ID NO: 337636 - DNA, 25 bp, Artificial
  Probe
acatcagcagaaacccggatttgca

SEQ ID NO: 337637 - DNA, 25 bp, Artificial
  Probe
acccggatttgcaggccatcagaat

SEQ ID NO: 337638 - DNA, 25 bp, Artificial
  Probe
ccttggatctacatccttcttcgga

SEQ ID NO: 337639 - DNA, 25 bp, Artificial
  Probe
tctctgcaagtcacgttccccagtg

SEQ ID NO: 337640 - DNA, 25 bp, Artificial
  Probe
aagacatcagcagaaacccggattt

SEQ ID NO: 337641 - DNA, 25 bp, Artificial
  Probe
agatcaagtgcctcttctgccgcat

SEQ ID NO: 337642 - DNA, 25 bp, Artificial
  Probe
gtgttcatcaaccagttatatcagc

SEQ ID NO: 337643 - DNA, 25 bp, Artificial
  Probe
tggcatgggcctgacccaagcagac

SEQ ID NO: 337644 - DNA, 25 bp, Artificial
  Probe
gatttgcaggccatcagaattgctt

SEQ ID NO: 337645 - DNA, 25 bp, Artificial
  Probe
atccttcttcggaagactgtgctca

SEQ ID NO: 337646 - DNA, 25 bp, Artificial
  Probe
gagtcggaggacatcttctgccatg

SEQ ID NO: 337647 - DNA, 25 bp, Artificial
  Probe
tggttctggcagagacggttcagca

SEQ ID NO: 337648 - DNA, 25 bp, Artificial
  Probe
accagttatatcagccaagtgtggt

SEQ ID NO: 337649 - DNA, 25 bp, Artificial
  Probe
ctcttctgccgcattggtggttctg

SEQ ID NO: 337650 - DNA, 25 bp, Artificial
  Probe
cagaattgcttctgtgaaccccatc

SEQ ID NO: 337651 - DNA, 25 bp, Artificial
  Probe
ttgcttccaggtacgcatggcatgg

SEQ ID NO: 337652 - DNA, 25 bp, Artificial
  Probe
ccgcattggtggttctggcagagac

SEQ ID NO: 337653 - DNA, 25 bp, Artificial
  Probe
acaccacctcgctgagaactttgcg

SEQ ID NO: 337654 - DNA, 25 bp, Artificial
  Probe
cacgttccccagtgaaacgctgaaa

SEQ ID NO: 337655 - DNA, 25 bp, Artificial
  Probe
caggactctgagagtgtcttgttgg

SEQ ID NO: 337656 - DNA, 25 bp, Artificial
  Probe
aagcagcctcggaggcaagaatttg

SEQ ID NO: 337657 - DNA, 25 bp, Artificial
  Probe
ggtacgcatggcatgggcctgaccc

SEQ ID NO: 337658 - DNA, 25 bp, Artificial
  Probe
gcctctaaggggaactctctgcaag

SEQ ID NO: 337659 - DNA, 25 bp, Artificial
  Probe
aggcaagaatttgcttccaggtacg

SEQ ID NO: 337660 - DNA, 25 bp, Artificial
  Probe
tatacctgccagacctaactgaaag

SEQ ID NO: 337661 - DNA, 25 bp, Artificial
  Probe
aagcagacaccacctcgctgagaac

SEQ ID NO: 337662 - DNA, 25 bp, Artificial
  Probe
acatcttctgccatgtctggccact

SEQ ID NO: 337663 - DNA, 25 bp, Artificial
  Probe
cagccaagtgtggtgaaagacatca

SEQ ID NO: 337664 - DNA, 25 bp, Artificial
  Probe
ctcccagggccaggactctgagagt

SEQ ID NO: 337665 - DNA, 25 bp, Artificial
  Probe
ctgctcagagagtcggaggacatct

SEQ ID NO: 337666 - DNA, 25 bp, Artificial
  Probe
taacaccactggaagcttgtgcaca

SEQ ID NO: 337667 - DNA, 25 bp, Artificial
  Probe
acgctcggattcaggcagctgcttc

SEQ ID NO: 337668 - DNA, 25 bp, Artificial
  Probe
atgggcgagacacacctgccctctt

SEQ ID NO: 337669 - DNA, 25 bp, Artificial
  Probe
ggctaacaccactggaagcttgtgc

SEQ ID NO: 337670 - DNA, 25 bp, Artificial
  Probe
cctcacgctcggattcaggcagctg

SEQ ID NO: 337671 - DNA, 25 bp, Artificial
  Probe
aggcaatcgcactgtgtagccgtct

SEQ ID NO: 337672 - DNA, 25 bp, Artificial
  Probe
caccagaggcaatcgcactgtgtag

SEQ ID NO: 337673 - DNA, 25 bp, Artificial
  Probe
gccacagcagcctcagatactaatg

SEQ ID NO: 337674 - DNA, 25 bp, Artificial
  Probe
tcattttttgatgaattacgggacc

SEQ ID NO: 337675 - DNA, 25 bp, Artificial
  Probe
agatactaatgctggagaccgtgga

SEQ ID NO: 337676 - DNA, 25 bp, Artificial
  Probe
tccaccagaggcaatcgcactgtgt

SEQ ID NO: 337677 - DNA, 25 bp, Artificial
  Probe
taaaggtcctaggaacaccaacaag

SEQ ID NO: 337678 - DNA, 25 bp, Artificial
  Probe
cttgtgcacattcattttttgatga

SEQ ID NO: 337679 - DNA, 25 bp, Artificial
  Probe
aaacgccacagcagcctcagatact

SEQ ID NO: 337680 - DNA, 25 bp, Artificial
  Probe
ggaacaccaacaagggagcaaatta

SEQ ID NO: 337681 - DNA, 25 bp, Artificial
  Probe
gaagcttgtgcacattcattttttg

SEQ ID NO: 337682 - DNA, 25 bp, Artificial
  Probe
actgtgtagccgtctcctggagtac

SEQ ID NO: 337683 - DNA, 25 bp, Artificial
  Probe
atcgcactgtgtagccgtctcctgg

SEQ ID NO: 337684 - DNA, 25 bp, Artificial
  Probe
caaatgggcgagacacacctgccct

SEQ ID NO: 337685 - DNA, 25 bp, Artificial
  Probe
atactaatgctggagaccgtggaca

SEQ ID NO: 337686 - DNA, 25 bp, Artificial
  Probe
accgtggacagaccaataacgccgc

SEQ ID NO: 337687 - DNA, 25 bp, Artificial
  Probe
caaactaccaaatgggcgagacaca

SEQ ID NO: 337688 - DNA, 25 bp, Artificial
  Probe
tgtagccgtctcctggagtacacgc

SEQ ID NO: 337689 - DNA, 25 bp, Artificial
  Probe
gtagccgtctcctggagtacacgcc

SEQ ID NO: 337690 - DNA, 25 bp, Artificial
  Probe
gcaaacgccacagcagcctcagata

SEQ ID NO: 337691 - DNA, 25 bp, Artificial
  Probe
ctaatgctggagaccgtggacagac

SEQ ID NO: 337692 - DNA, 25 bp, Artificial
  Probe
actaatgctggagaccgtggacaga

SEQ ID NO: 337693 - DNA, 25 bp, Artificial
  Probe
agcttgtgcacattcattttttgat

SEQ ID NO: 337694 - DNA, 25 bp, Artificial
  Probe
agcagcctcagatactaatgctgga

SEQ ID NO: 337695 - DNA, 25 bp, Artificial
  Probe
agaggcaatcgcactgtgtagccgt

SEQ ID NO: 337696 - DNA, 25 bp, Artificial
  Probe
agccgtctcctggagtacacgccga

SEQ ID NO: 337697 - DNA, 25 bp, Artificial
  Probe
tggacagaccaataacgccgcttct

SEQ ID NO: 337698 - DNA, 25 bp, Artificial
  Probe
gagaccgtggacagaccaataacgc

SEQ ID NO: 337699 - DNA, 25 bp, Artificial
  Probe
caccactggaagcttgtgcacattc

SEQ ID NO: 337700 - DNA, 25 bp, Artificial
  Probe
atgaattacgggacccaaatgtcaa

SEQ ID NO: 337701 - DNA, 25 bp, Artificial
  Probe
ctaacaccactggaagcttgtgcac

SEQ ID NO: 337702 - DNA, 25 bp, Artificial
  Probe
ccacagcagcctcagatactaatgc

SEQ ID NO: 337703 - DNA, 25 bp, Artificial
  Probe
ctgtgtagccgtctcctggagtaca

SEQ ID NO: 337704 - DNA, 25 bp, Artificial
  Probe
cccaaatgtcaaactaccaaatggg

SEQ ID NO: 337705 - DNA, 25 bp, Artificial
  Probe
tggagaccgtggacagaccaataac

SEQ ID NO: 337706 - DNA, 25 bp, Artificial
  Probe
acagcagcctcagatactaatgctg

SEQ ID NO: 337707 - DNA, 25 bp, Artificial
  Probe
tcacgctcggattcaggcagctgct

SEQ ID NO: 337708 - DNA, 25 bp, Artificial
  Probe
aaatgtcaaactaccaaatgggcga

SEQ ID NO: 337709 - DNA, 25 bp, Artificial
  Probe
tgcaaacgccacagcagcctcagat

SEQ ID NO: 337710 - DNA, 25 bp, Artificial
  Probe
gcaatcgcactgtgtagccgtctcc

SEQ ID NO: 337711 - DNA, 25 bp, Artificial
  Probe
gcccggctaacaccactggaagctt

SEQ ID NO: 337712 - DNA, 25 bp, Artificial
  Probe
accctccatgacatgcggtaccaaa

SEQ ID NO: 337713 - DNA, 25 bp, Artificial
  Probe
cgataaatatctcttcactggtccg

SEQ ID NO: 337714 - DNA, 25 bp, Artificial
  Probe
gaagacacacaacttcaaggtgcac

SEQ ID NO: 337715 - DNA, 25 bp, Artificial
  Probe
aggtcctgatgctgctgcctcctgc

SEQ ID NO: 337716 - DNA, 25 bp, Artificial
  Probe
agaatcctgcagtgtggcagcctgc

SEQ ID NO: 337717 - DNA, 25 bp, Artificial
  Probe
cataaacatcatcaccggagccctg

SEQ ID NO: 337718 - DNA, 25 bp, Artificial
  Probe
ggtgcacacatttcggggcccacac

SEQ ID NO: 337719 - DNA, 25 bp, Artificial
  Probe
atctcaaaaaggttaccatgaatga

SEQ ID NO: 337720 - DNA, 25 bp, Artificial
  Probe
gacaaccacttcaactatgagaaga

SEQ ID NO: 337721 - DNA, 25 bp, Artificial
  Probe
aatcagaagggctttacagagtctc

SEQ ID NO: 337722 - DNA, 25 bp, Artificial
  Probe
gcattcaacagagagaagagacctg

SEQ ID NO: 337723 - DNA, 25 bp, Artificial
  Probe
tgaacgcagaaaatctggggatcgt

SEQ ID NO: 337724 - DNA, 25 bp, Artificial
  Probe
tcaccttctcacctcggagttggct

SEQ ID NO: 337725 - DNA, 25 bp, Artificial
  Probe
gcctccacatgagagcaagggtgag

SEQ ID NO: 337726 - DNA, 25 bp, Artificial
  Probe
ttgtaaaagctcacaacactcagag

SEQ ID NO: 337727 - DNA, 25 bp, Artificial
  Probe
agctgtccatgaggtcctgatgctg

SEQ ID NO: 337728 - DNA, 25 bp, Artificial
  Probe
gtacacaaacaatgttccaagcacg

SEQ ID NO: 337729 - DNA, 25 bp, Artificial
  Probe
tcttttcaaacaagtggcagaattt

SEQ ID NO: 337730 - DNA, 25 bp, Artificial
  Probe
actatgagaccctgcgctacctgat

SEQ ID NO: 337731 - DNA, 25 bp, Artificial
  Probe
tgacaaccacttcaactatgagaag

SEQ ID NO: 337732 - DNA, 25 bp, Artificial
  Probe
aaagtatactgttgtgatctcacca

SEQ ID NO: 337733 - DNA, 25 bp, Artificial
  Probe
gaggcagcaaaaatctccaatgcag

SEQ ID NO: 337734 - DNA, 25 bp, Artificial
  Probe
cacagaacacattgaagatgtcaag

SEQ ID NO: 337735 - DNA, 25 bp, Artificial
  Probe
catcgcccagggagtccggtgttca

SEQ ID NO: 337736 - DNA, 25 bp, Artificial
  Probe
tcgcccagggagtccggtgttcaga

SEQ ID NO: 337737 - DNA, 25 bp, Artificial
  Probe
gcggatatctctgctaacatctacc

SEQ ID NO: 337738 - DNA, 25 bp, Artificial
  Probe
tggaccacagtggattgcagagttg

SEQ ID NO: 337739 - DNA, 25 bp, Artificial
  Probe
cgatctcaagaggatcaagaaagta

SEQ ID NO: 337740 - DNA, 25 bp, Artificial
  Probe
agacataaacatcatcaccggagcc

SEQ ID NO: 337741 - DNA, 25 bp, Artificial
  Probe
ccctgaaactgtacttcagagactt

SEQ ID NO: 337742 - DNA, 25 bp, Artificial
  Probe
aatgaacgcagaaaatctggggatc

SEQ ID NO: 337743 - DNA, 25 bp, Artificial
  Probe
catcagggaagtgcagctgatagag

SEQ ID NO: 337744 - DNA, 25 bp, Artificial
  Probe
gtgatctcaccacacttgtaaaagc

SEQ ID NO: 337745 - DNA, 25 bp, Artificial
  Probe
gtgtggcagcctgcttctcaccttc

SEQ ID NO: 337746 - DNA, 25 bp, Artificial
  Probe
cgcctccacatgagagcaagggtga

SEQ ID NO: 337747 - DNA, 25 bp, Artificial
  Probe
gaaactgtacttcagagacttaccc

SEQ ID NO: 337748 - DNA, 25 bp, Artificial
  Probe
ccaaaagctgatcgtgcagatttta

SEQ ID NO: 337749 - DNA, 25 bp, Artificial
  Probe
caacactcagagacccatggtggtg

SEQ ID NO: 337750 - DNA, 25 bp, Artificial
  Probe
gatgagaccccctgaagacagcacc

SEQ ID NO: 337751 - DNA, 25 bp, Artificial
  Probe
ttaccttgggtcttttgccgtgcct

SEQ ID NO: 337752 - DNA, 25 bp, Artificial
  Probe
gagacctgggactaaaactgggatt

SEQ ID NO: 337753 - DNA, 25 bp, Artificial
  Probe
cgaagatgttctgttttagtccatc

SEQ ID NO: 337754 - DNA, 25 bp, Artificial
  Probe
actgccagcccgatctcaagaggat

SEQ ID NO: 337755 - DNA, 25 bp, Artificial
  Probe
caatgcagatgagaggcttgaagct

SEQ ID NO: 337756 - DNA, 25 bp, Artificial
  Probe
ggcggatatctctgctaacatctac

SEQ ID NO: 337757 - DNA, 25 bp, Artificial
  Probe
tggtccgaagagctgccctcacaca

SEQ ID NO: 337758 - DNA, 25 bp, Artificial
  Probe
agtggccgagcagacaccgctcact

SEQ ID NO: 337759 - DNA, 25 bp, Artificial
  Probe
tatcatcatgtcagacgctgacatg

SEQ ID NO: 337760 - DNA, 25 bp, Artificial
  Probe
tcagacgctgacatggactgggctg

SEQ ID NO: 337761 - DNA, 25 bp, Artificial
  Probe
gttgccgccgggagcagcaatctca

SEQ ID NO: 337762 - DNA, 25 bp, Artificial
  Probe
tgttgtgcgggctcccggaccttcg

SEQ ID NO: 337763 - DNA, 25 bp, Artificial
  Probe
tctcaagagagtaaccctggaactg

SEQ ID NO: 337764 - DNA, 25 bp, Artificial
  Probe
cctaatccaggttgccgccgggagc

SEQ ID NO: 337765 - DNA, 25 bp, Artificial
  Probe
aacaggcccactttgccctgttctt

SEQ ID NO: 337766 - DNA, 25 bp, Artificial
  Probe
ccttggcaactggaaacgtggtggt

SEQ ID NO: 337767 - DNA, 25 bp, Artificial
  Probe
catgtcagacgctgacatggactgg

SEQ ID NO: 337768 - DNA, 25 bp, Artificial
  Probe
gaaccctttcgacagccggacggag

SEQ ID NO: 337769 - DNA, 25 bp, Artificial
  Probe
tgggccctgccttggcaactggaaa

SEQ ID NO: 337770 - DNA, 25 bp, Artificial
  Probe
tttaagaagatcctgggctatatca

SEQ ID NO: 337771 - DNA, 25 bp, Artificial
  Probe
ccccctggtgtggtcaatattgttc

SEQ ID NO: 337772 - DNA, 25 bp, Artificial
  Probe
gcagcaatctcaagagagtaaccct

SEQ ID NO: 337773 - DNA, 25 bp, Artificial
  Probe
ccttcgtgcaggaggatgtgtatga

SEQ ID NO: 337774 - DNA, 25 bp, Artificial
  Probe
atgaattcgtggaacgcagtgtggc

SEQ ID NO: 337775 - DNA, 25 bp, Artificial
  Probe
ccaagtacgggctggctgccgctgt

SEQ ID NO: 337776 - DNA, 25 bp, Artificial
  Probe
caaagtggccttcacaggttccact

SEQ ID NO: 337777 - DNA, 25 bp, Artificial
  Probe
ccgctcctgatgcaagcctggaagc

SEQ ID NO: 337778 - DNA, 25 bp, Artificial
  Probe
ttgttcctggattcggccctaccgc

SEQ ID NO: 337779 - DNA, 25 bp, Artificial
  Probe
ctggctgccgctgtcttcacaaagg

SEQ ID NO: 337780 - DNA, 25 bp, Artificial
  Probe
ggcgccgccgcagaccgtggttact

SEQ ID NO: 337781 - DNA, 25 bp, Artificial
  Probe
atgagactcagtttaagaagatcct

SEQ ID NO: 337782 - DNA, 25 bp, Artificial
  Probe
acttgatcaaggaggcaggcttccc

SEQ ID NO: 337783 - DNA, 25 bp, Artificial
  Probe
gtacgggctggctgccgctgtcttc

SEQ ID NO: 337784 - DNA, 25 bp, Artificial
  Probe
gggcgagccaataattccaagtacg

SEQ ID NO: 337785 - DNA, 25 bp, Artificial
  Probe
ctcaagagagtaaccctggaactgg

SEQ ID NO: 337786 - DNA, 25 bp, Artificial
  Probe
agtcaggacaacaagaaggggcgaa

SEQ ID NO: 337787 - DNA, 25 bp, Artificial
  Probe
tcactgcactctacgtggccaactt

SEQ ID NO: 337788 - DNA, 25 bp, Artificial
  Probe
gtcccacgaggatgtggacaaagtg

SEQ ID NO: 337789 - DNA, 25 bp, Artificial
  Probe
cgggctcccggaccttcgtgcagga

SEQ ID NO: 337790 - DNA, 25 bp, Artificial
  Probe
tggaacaggcccactttgccctgtt

SEQ ID NO: 337791 - DNA, 25 bp, Artificial
  Probe
gctgccatcgcgtcccacgaggatg

SEQ ID NO: 337792 - DNA, 25 bp, Artificial
  Probe
tttgccctgttcttcaaccagggcc

SEQ ID NO: 337793 - DNA, 25 bp, Artificial
  Probe
ggaaagagccccaatatcatcatgt

SEQ ID NO: 337794 - DNA, 25 bp, Artificial
  Probe
aagcctggaagctgggccctgcctt

SEQ ID NO: 337795 - DNA, 25 bp, Artificial
  Probe
tgaattcgtggaacgcagtgtggcc

SEQ ID NO: 337796 - DNA, 25 bp, Artificial
  Probe
cactttgccctgttcttcaaccagg

SEQ ID NO: 337797 - DNA, 25 bp, Artificial
  Probe
ataattccaagtacgggctggctgc

SEQ ID NO: 337798 - DNA, 25 bp, Artificial
  Probe
tgtggtcaatattgttcctggattc

SEQ ID NO: 337799 - DNA, 25 bp, Artificial
  Probe
aaagtggccgagcagacaccgctca

SEQ ID NO: 337800 - DNA, 25 bp, Artificial
  Probe
gatcattccgtggaacttcccgctc

SEQ ID NO: 337801 - DNA, 25 bp, Artificial
  Probe
tggattcggccctaccgccggggct

SEQ ID NO: 337802 - DNA, 25 bp, Artificial
  Probe
gaagctgggccctgccttggcaact

SEQ ID NO: 337803 - DNA, 25 bp, Artificial
  Probe
gaccgtggttacttcatccagccca

SEQ ID NO: 337804 - DNA, 25 bp, Artificial
  Probe
agatgccaccacctatgcacacttc

SEQ ID NO: 337805 - DNA, 25 bp, Artificial
  Probe
atgaagataccttcaaactcattta

SEQ ID NO: 337806 - DNA, 25 bp, Artificial
  Probe
tattcccagttcttcccccagggag

SEQ ID NO: 337807 - DNA, 25 bp, Artificial
  Probe
gaagataccttcaaactcatttatt

SEQ ID NO: 337808 - DNA, 25 bp, Artificial
  Probe
ataccttcaaactcatttattccca

SEQ ID NO: 337809 - DNA, 25 bp, Artificial
  Probe
catttattcccagttcttcccccag

SEQ ID NO: 337810 - DNA, 25 bp, Artificial
  Probe
agataccttcaaactcatttattcc

SEQ ID NO: 337811 - DNA, 25 bp, Artificial
  Probe
cccccagggagatgccaccacctat

SEQ ID NO: 337812 - DNA, 25 bp, Artificial
  Probe
ccacctatgcacacttcctcttcaa

SEQ ID NO: 337813 - DNA, 25 bp, Artificial
  Probe
cttcccccagggagatgccaccacc

SEQ ID NO: 337814 - DNA, 25 bp, Artificial
  Probe
tcaaactcatttattcccagttctt

SEQ ID NO: 337815 - DNA, 25 bp, Artificial
  Probe
accttcaaactcatttattcccagt

SEQ ID NO: 337816 - DNA, 25 bp, Artificial
  Probe
aagataccttcaaactcatttattc

SEQ ID NO: 337817 - DNA, 25 bp, Artificial
  Probe
cccagggagatgccaccacctatgc

SEQ ID NO: 337818 - DNA, 25 bp, Artificial
  Probe
ccagggagatgccaccacctatgca

SEQ ID NO: 337819 - DNA, 25 bp, Artificial
  Probe
taccttcaaactcatttattcccag

SEQ ID NO: 337820 - DNA, 25 bp, Artificial
  Probe
tcccagttcttcccccagggagatg

SEQ ID NO: 337821 - DNA, 25 bp, Artificial
  Probe
ccaccacctatgcacacttcctctt

SEQ ID NO: 337822 - DNA, 25 bp, Artificial
  Probe
gatgaagataccttcaaactcattt

SEQ ID NO: 337823 - DNA, 25 bp, Artificial
  Probe
cttcctcttcaatgccttcgatgct

SEQ ID NO: 337824 - DNA, 25 bp, Artificial
  Probe
cttcaaactcatttattcccagttc

SEQ ID NO: 337825 - DNA, 25 bp, Artificial
  Probe
ccccagggagatgccaccacctatg

SEQ ID NO: 337826 - DNA, 25 bp, Artificial
  Probe
ttcaaactcatttattcccagttct

SEQ ID NO: 337827 - DNA, 25 bp, Artificial
  Probe
gataccttcaaactcatttattccc

SEQ ID NO: 337828 - DNA, 25 bp, Artificial
  Probe
tgaagataccttcaaactcatttat

SEQ ID NO: 337829 - DNA, 25 bp, Artificial
  Probe
caaactcatttattcccagttcttc

SEQ ID NO: 337830 - DNA, 25 bp, Artificial
  Probe
tgccaccacctatgcacacttcctc

SEQ ID NO: 337831 - DNA, 25 bp, Artificial
  Probe
gccaccacctatgcacacttcctct

SEQ ID NO: 337832 - DNA, 25 bp, Artificial
  Probe
caccacctatgcacacttcctcttc

SEQ ID NO: 337833 - DNA, 25 bp, Artificial
  Probe
gggagatgccaccacctatgcacac

SEQ ID NO: 337834 - DNA, 25 bp, Artificial
  Probe
tcatttattcccagttcttccccca

SEQ ID NO: 337835 - DNA, 25 bp, Artificial
  Probe
ttcccagttcttcccccagggagat

SEQ ID NO: 337836 - DNA, 25 bp, Artificial
  Probe
ccttcaaactcatttattcccagtt

SEQ ID NO: 337837 - DNA, 25 bp, Artificial
  Probe
accacctatgcacacttcctcttca

SEQ ID NO: 337838 - DNA, 25 bp, Artificial
  Probe
ttgtgttcgtcttttcagcctaagg

SEQ ID NO: 337839 - DNA, 25 bp, Artificial
  Probe
gccttgtgttcgtcttttcagccta

SEQ ID NO: 337840 - DNA, 25 bp, Artificial
  Probe
tcagcctaagggtgtgaacactttt

SEQ ID NO: 337841 - DNA, 25 bp, Artificial
  Probe
cgtcttttcagcctaagggtgtgaa

SEQ ID NO: 337842 - DNA, 25 bp, Artificial
  Probe
cagccttgtgttcgtcttttcagcc

SEQ ID NO: 337843 - DNA, 25 bp, Artificial
  Probe
cttgtgttcgtcttttcagcctaag

SEQ ID NO: 337844 - DNA, 25 bp, Artificial
  Probe
gtcttttcagcctaagggtgtgaac

SEQ ID NO: 337845 - DNA, 25 bp, Artificial
  Probe
tcaccagccttgtgttcgtcttttc

SEQ ID NO: 337846 - DNA, 25 bp, Artificial
  Probe
tgttcgtcttttcagcctaagggtg

SEQ ID NO: 337847 - DNA, 25 bp, Artificial
  Probe
gttcgtcttttcagcctaagggtgt

SEQ ID NO: 337848 - DNA, 25 bp, Artificial
  Probe
tcttttcagcctaagggtgtgaaca

SEQ ID NO: 337849 - DNA, 25 bp, Artificial
  Probe
ccagccttgtgttcgtcttttcagc

SEQ ID NO: 337850 - DNA, 25 bp, Artificial
  Probe
ttcagcctaagggtgtgaacacttt

SEQ ID NO: 337851 - DNA, 25 bp, Artificial
  Probe
cttttcagcctaagggtgtgaacac

SEQ ID NO: 337852 - DNA, 25 bp, Artificial
  Probe
accagccttgtgttcgtcttttcag

SEQ ID NO: 337853 - DNA, 25 bp, Artificial
  Probe
gtgttcgtcttttcagcctaagggt

SEQ ID NO: 337854 - DNA, 25 bp, Artificial
  Probe
tcgtcttttcagcctaagggtgtga

SEQ ID NO: 337855 - DNA, 25 bp, Artificial
  Probe
ttttcagcctaagggtgtgaacact

SEQ ID NO: 337856 - DNA, 25 bp, Artificial
  Probe
ttcgtcttttcagcctaagggtgtg

SEQ ID NO: 337857 - DNA, 25 bp, Artificial
  Probe
caccagccttgtgttcgtcttttca

SEQ ID NO: 337858 - DNA, 25 bp, Artificial
  Probe
tgtgttcgtcttttcagcctaaggg

SEQ ID NO: 337859 - DNA, 25 bp, Artificial
  Probe
agccttgtgttcgtcttttcagcct

SEQ ID NO: 337860 - DNA, 25 bp, Artificial
  Probe
ctcaccagccttgtgttcgtctttt

SEQ ID NO: 337861 - DNA, 25 bp, Artificial
  Probe
ccttgtgttcgtcttttcagcctaa

SEQ ID NO: 337862 - DNA, 25 bp, Artificial
  Probe
tttcagcctaagggtgtgaacactt

SEQ ID NO: 337863 - DNA, 25 bp, Artificial
  Probe
aagcccccttgcttatgtacctgct

SEQ ID NO: 337864 - DNA, 25 bp, Artificial
  Probe
gagaagctagaagcccccttgctta

SEQ ID NO: 337865 - DNA, 25 bp, Artificial
  Probe
tgctcttggatattgtgggcatctt

SEQ ID NO: 337866 - DNA, 25 bp, Artificial
  Probe
cccttgcttatgtacctgctcttgg

SEQ ID NO: 337867 - DNA, 25 bp, Artificial
  Probe
agaagcccccttgcttatgtacctg

SEQ ID NO: 337868 - DNA, 25 bp, Artificial
  Probe
tccgcctgccagcccgatggcccag

SEQ ID NO: 337869 - DNA, 25 bp, Artificial
  Probe
agagaagctagaagcccccttgctt

SEQ ID NO: 337870 - DNA, 25 bp, Artificial
  Probe
ggcccaggaagagcaggagtccagt

SEQ ID NO: 337871 - DNA, 25 bp, Artificial
  Probe
gaagcccccttgcttatgtacctgc

SEQ ID NO: 337872 - DNA, 25 bp, Artificial
  Probe
gctcttggatattgtgggcatcttg

SEQ ID NO: 337873 - DNA, 25 bp, Artificial
  Probe
atgtacctgctcttggatattgtgg

SEQ ID NO: 337874 - DNA, 25 bp, Artificial
  Probe
gcctgcttgagagaagctagaagcc

SEQ ID NO: 337875 - DNA, 25 bp, Artificial
  Probe
ctgcctgcttgagagaagctagaag

SEQ ID NO: 337876 - DNA, 25 bp, Artificial
  Probe
ctcttggatattgtgggcatcttga

SEQ ID NO: 337877 - DNA, 25 bp, Artificial
  Probe
cccccttgcttatgtacctgctctt

SEQ ID NO: 337878 - DNA, 25 bp, Artificial
  Probe
acctgctcttggatattgtgggcat

SEQ ID NO: 337879 - DNA, 25 bp, Artificial
  Probe
aagagcaggagtccagtggcctctc

SEQ ID NO: 337880 - DNA, 25 bp, Artificial
  Probe
ccttgcttatgtacctgctcttgga

SEQ ID NO: 337881 - DNA, 25 bp, Artificial
  Probe
tggatattgtgggcatcttgacagg

SEQ ID NO: 337882 - DNA, 25 bp, Artificial
  Probe
tcttggatattgtgggcatcttgac

SEQ ID NO: 337883 - DNA, 25 bp, Artificial
  Probe
ggagtccagtggcctctcctgtcct

SEQ ID NO: 337884 - DNA, 25 bp, Artificial
  Probe
tacctgctcttggatattgtgggca

SEQ ID NO: 337885 - DNA, 25 bp, Artificial
  Probe
tgcctgcttgagagaagctagaagc

SEQ ID NO: 337886 - DNA, 25 bp, Artificial
  Probe
ttgcttatgtacctgctcttggata

SEQ ID NO: 337887 - DNA, 25 bp, Artificial
  Probe
ctgccagcccgatggcccaggaaga

SEQ ID NO: 337888 - DNA, 25 bp, Artificial
  Probe
tctcctgtcctgcctgcttgagaga

SEQ ID NO: 337889 - DNA, 25 bp, Artificial
  Probe
tgtcctgcctgcttgagagaagcta

SEQ ID NO: 337890 - DNA, 25 bp, Artificial
  Probe
tccacccagcgtgcgtgcacgtcct

SEQ ID NO: 337891 - DNA, 25 bp, Artificial
  Probe
gtcctgcctgcttgagagaagctag

SEQ ID NO: 337892 - DNA, 25 bp, Artificial
  Probe
gtacctgctcttggatattgtgggc

SEQ ID NO: 337893 - DNA, 25 bp, Artificial
  Probe
atggcccaggaagagcaggagtcca

SEQ ID NO: 337894 - DNA, 25 bp, Artificial
  Probe
cctgcctgcttgagagaagctagaa

SEQ ID NO: 337895 - DNA, 25 bp, Artificial
  Probe
tgacagggtagggaggttggtagga

SEQ ID NO: 337896 - DNA, 25 bp, Artificial
  Probe
tatgtacctgctcttggatattgtg

SEQ ID NO: 337897 - DNA, 25 bp, Artificial
  Probe
cctgctcttggatattgtgggcatc

SEQ ID NO: 337898 - DNA, 25 bp, Artificial
  Probe
ttatgtacctgctcttggatattgt

SEQ ID NO: 337899 - DNA, 25 bp, Artificial
  Probe
ccccttgcttatgtacctgctcttg

SEQ ID NO: 337900 - DNA, 25 bp, Artificial
  Probe
gaagagcaggagtccagtggcctct

SEQ ID NO: 337901 - DNA, 25 bp, Artificial
  Probe
ctgctcttggatattgtgggcatct

SEQ ID NO: 337902 - DNA, 25 bp, Artificial
  Probe
tagaagcccccttgcttatgtacct

SEQ ID NO: 337903 - DNA, 25 bp, Artificial
  Probe
aggttggtaggatggacaggaccag

SEQ ID NO: 337904 - DNA, 25 bp, Artificial
  Probe
ctagaagcccccttgcttatgtacc

SEQ ID NO: 337905 - DNA, 25 bp, Artificial
  Probe
gcttatgtacctgctcttggatatt

SEQ ID NO: 337906 - DNA, 25 bp, Artificial
  Probe
cttatgtacctgctcttggatattg

SEQ ID NO: 337907 - DNA, 25 bp, Artificial
  Probe
tgcttatgtacctgctcttggatat

SEQ ID NO: 337908 - DNA, 25 bp, Artificial
  Probe
tgtacctgctcttggatattgtggg

SEQ ID NO: 337909 - DNA, 25 bp, Artificial
  Probe
agaggccaggtgtccccagcgctgt

SEQ ID NO: 337910 - DNA, 25 bp, Artificial
  Probe
cccatctgcagatggggtgctctgc

SEQ ID NO: 337911 - DNA, 25 bp, Artificial
  Probe
ggaccaacgggctccctggagcttg

SEQ ID NO: 337912 - DNA, 25 bp, Artificial
  Probe
tgccgcagggttctgggaactcccc

SEQ ID NO: 337913 - DNA, 25 bp, Artificial
  Probe
cagcaatatgccagccaccgtgtgg

SEQ ID NO: 337914 - DNA, 25 bp, Artificial
  Probe
aatactgtgggaagttactggtgcc

SEQ ID NO: 337915 - DNA, 25 bp, Artificial
  Probe
ggttctgggaactcccctgaatggg

SEQ ID NO: 337916 - DNA, 25 bp, Artificial
  Probe
agatggggtgctctgcctgcctaag

SEQ ID NO: 337917 - DNA, 25 bp, Artificial
  Probe
tgtacaagctgcaggcccgggttga

SEQ ID NO: 337918 - DNA, 25 bp, Artificial
  Probe
agcttgtggagcagggcaacccttc

SEQ ID NO: 337919 - DNA, 25 bp, Artificial
  Probe
gccgcagggttctgggaactcccct

SEQ ID NO: 337920 - DNA, 25 bp, Artificial
  Probe
gcccgggttgatgtattagaacaga

SEQ ID NO: 337921 - DNA, 25 bp, Artificial
  Probe
cgctatgcctgctgccctggttgga

SEQ ID NO: 337922 - DNA, 25 bp, Artificial
  Probe
ccaggtgtccccagcgctgtgtcaa

SEQ ID NO: 337923 - DNA, 25 bp, Artificial
  Probe
gggttctgggaactcccctgaatgg

SEQ ID NO: 337924 - DNA, 25 bp, Artificial
  Probe
tgggtgacagacaggcctctcctac

SEQ ID NO: 337925 - DNA, 25 bp, Artificial
  Probe
gcccatctgcagatggggtgctctg

SEQ ID NO: 337926 - DNA, 25 bp, Artificial
  Probe
gctgccctggttggaagaggaccaa

SEQ ID NO: 337927 - DNA, 25 bp, Artificial
  Probe
cagggttctgggaactcccctgaat

SEQ ID NO: 337928 - DNA, 25 bp, Artificial
  Probe
gcaggcccgggttgatgtattagaa

SEQ ID NO: 337929 - DNA, 25 bp, Artificial
  Probe
atactgtgggaagttactggtgcca

SEQ ID NO: 337930 - DNA, 25 bp, Artificial
  Probe
acaggagaggccaggtgtccccagc

SEQ ID NO: 337931 - DNA, 25 bp, Artificial
  Probe
aatatgccagccaccgtgtgggaat

SEQ ID NO: 337932 - DNA, 25 bp, Artificial
  Probe
tgtccccagcgctgtgtcaatactg

SEQ ID NO: 337933 - DNA, 25 bp, Artificial
  Probe
actgtgggaagttactggtgccagt

SEQ ID NO: 337934 - DNA, 25 bp, Artificial
  Probe
agcgctgtgtcaatactgtgggaag

SEQ ID NO: 337935 - DNA, 25 bp, Artificial
  Probe
ccccagcgctgtgtcaatactgtgg

SEQ ID NO: 337936 - DNA, 25 bp, Artificial
  Probe
tgggaactcccctgaatgggtgaca

SEQ ID NO: 337937 - DNA, 25 bp, Artificial
  Probe
cgctgtgtcaatactgtgggaagtt

SEQ ID NO: 337938 - DNA, 25 bp, Artificial
  Probe
aactcccctgaatgggtgacagaca

SEQ ID NO: 337939 - DNA, 25 bp, Artificial
  Probe
ggcccgggttgatgtattagaacag

SEQ ID NO: 337940 - DNA, 25 bp, Artificial
  Probe
gatgccgcagggttctgggaactcc

SEQ ID NO: 337941 - DNA, 25 bp, Artificial
  Probe
ctgcagatggggtgctctgcctgcc

SEQ ID NO: 337942 - DNA, 25 bp, Artificial
  Probe
cagcgctgtgtcaatactgtgggaa

SEQ ID NO: 337943 - DNA, 25 bp, Artificial
  Probe
cagatggggtgctctgcctgcctaa

SEQ ID NO: 337944 - DNA, 25 bp, Artificial
  Probe
tgccagccaccgtgtgggaatgaag

SEQ ID NO: 337945 - DNA, 25 bp, Artificial
  Probe
caacgggctccctggagcttgtgga

SEQ ID NO: 337946 - DNA, 25 bp, Artificial
  Probe
gaactcccctgaatgggtgacagac

SEQ ID NO: 337947 - DNA, 25 bp, Artificial
  Probe
cccagcgctgtgtcaatactgtggg

SEQ ID NO: 337948 - DNA, 25 bp, Artificial
  Probe
gagcttgtggagcagggcaaccctt

SEQ ID NO: 337949 - DNA, 25 bp, Artificial
  Probe
caggcccgggttgatgtattagaac

SEQ ID NO: 337950 - DNA, 25 bp, Artificial
  Probe
gtccccagcgctgtgtcaatactgt

SEQ ID NO: 337951 - DNA, 25 bp, Artificial
  Probe
cccctgaatgggtgacagacaggcc

SEQ ID NO: 337952 - DNA, 25 bp, Artificial
  Probe
ggaactcccctgaatgggtgacaga

SEQ ID NO: 337953 - DNA, 25 bp, Artificial
  Probe
tgcaggcccgggttgatgtattaga

SEQ ID NO: 337954 - DNA, 25 bp, Artificial
  Probe
ctgtgtcaatactgtgggaagttac

SEQ ID NO: 337955 - DNA, 25 bp, Artificial
  Probe
tcacagaatctgacccaatagtgag

SEQ ID NO: 337956 - DNA, 25 bp, Artificial
  Probe
gaatctgacccaatagtgagtcata

SEQ ID NO: 337957 - DNA, 25 bp, Artificial
  Probe
ggaaaatatttcctattaggagcat

SEQ ID NO: 337958 - DNA, 25 bp, Artificial
  Probe
ccataatgcaagcatttgggaaaat

SEQ ID NO: 337959 - DNA, 25 bp, Artificial
  Probe
atcacagaatctgacccaatagtga

SEQ ID NO: 337960 - DNA, 25 bp, Artificial
  Probe
tagtgagtcatacctaacccataat

SEQ ID NO: 337961 - DNA, 25 bp, Artificial
  Probe
aatctgacccaatagtgagtcatac

SEQ ID NO: 337962 - DNA, 25 bp, Artificial
  Probe
tatttcctattaggagcatacccag

SEQ ID NO: 337963 - DNA, 25 bp, Artificial
  Probe
tttcctattaggagcatacccagat

SEQ ID NO: 337964 - DNA, 25 bp, Artificial
  Probe
ctaacccataatgcaagcatttggg

SEQ ID NO: 337965 - DNA, 25 bp, Artificial
  Probe
agaatctgacccaatagtgagtcat

SEQ ID NO: 337966 - DNA, 25 bp, Artificial
  Probe
ggatgagaccaacatcacagaatct

SEQ ID NO: 337967 - DNA, 25 bp, Artificial
  Probe
attaggagcatacccagataatact

SEQ ID NO: 337968 - DNA, 25 bp, Artificial
  Probe
agtgagtcatacctaacccataatg

SEQ ID NO: 337969 - DNA, 25 bp, Artificial
  Probe
tctgacccaatagtgagtcatacct

SEQ ID NO: 337970 - DNA, 25 bp, Artificial
  Probe
aataagctgggtggatgagaccaac

SEQ ID NO: 337971 - DNA, 25 bp, Artificial
  Probe
cctattaggagcatacccagataat

SEQ ID NO: 337972 - DNA, 25 bp, Artificial
  Probe
tggatgagaccaacatcacagaatc

SEQ ID NO: 337973 - DNA, 25 bp, Artificial
  Probe
taatgcaagcatttgggaaaatatt

SEQ ID NO: 337974 - DNA, 25 bp, Artificial
  Probe
agaccaacatcacagaatctgaccc

SEQ ID NO: 337975 - DNA, 25 bp, Artificial
  Probe
acatcacagaatctgacccaatagt

SEQ ID NO: 337976 - DNA, 25 bp, Artificial
  Probe
atctgacccaatagtgagtcatacc

SEQ ID NO: 337977 - DNA, 25 bp, Artificial
  Probe
atagtgagtcatacctaacccataa

SEQ ID NO: 337978 - DNA, 25 bp, Artificial
  Probe
tgacccaatagtgagtcatacctaa

SEQ ID NO: 337979 - DNA, 25 bp, Artificial
  Probe
tcctattaggagcatacccagataa

SEQ ID NO: 337980 - DNA, 25 bp, Artificial
  Probe
ctgacccaatagtgagtcataccta

SEQ ID NO: 337981 - DNA, 25 bp, Artificial
  Probe
tgagaccaacatcacagaatctgac

SEQ ID NO: 337982 - DNA, 25 bp, Artificial
  Probe
gtgagtcatacctaacccataatgc

SEQ ID NO: 337983 - DNA, 25 bp, Artificial
  Probe
gatgagaccaacatcacagaatctg

SEQ ID NO: 337984 - DNA, 25 bp, Artificial
  Probe
ataagctgggtggatgagaccaaca

SEQ ID NO: 337985 - DNA, 25 bp, Artificial
  Probe
ttcctattaggagcatacccagata

SEQ ID NO: 337986 - DNA, 25 bp, Artificial
  Probe
atatttcctattaggagcataccca

SEQ ID NO: 337987 - DNA, 25 bp, Artificial
  Probe
atttcctattaggagcatacccaga

SEQ ID NO: 337988 - DNA, 25 bp, Artificial
  Probe
atgagaccaacatcacagaatctga

SEQ ID NO: 337989 - DNA, 25 bp, Artificial
  Probe
ctattaggagcatacccagataata

SEQ ID NO: 337990 - DNA, 25 bp, Artificial
  Probe
ttgtatgacatatgtgtggaataag

SEQ ID NO: 337991 - DNA, 25 bp, Artificial
  Probe
tattaggagcatacccagataatac

SEQ ID NO: 337992 - DNA, 25 bp, Artificial
  Probe
cagaatctgacccaatagtgagtca

SEQ ID NO: 337993 - DNA, 25 bp, Artificial
  Probe
cacagaatctgacccaatagtgagt

SEQ ID NO: 337994 - DNA, 25 bp, Artificial
  Probe
catcacagaatctgacccaatagtg

SEQ ID NO: 337995 - DNA, 25 bp, Artificial
  Probe
gagaccaacatcacagaatctgacc

SEQ ID NO: 337996 - DNA, 25 bp, Artificial
  Probe
tgagtcatacctaacccataatgca

SEQ ID NO: 337997 - DNA, 25 bp, Artificial
  Probe
cctaacccataatgcaagcatttgg

SEQ ID NO: 337998 - DNA, 25 bp, Artificial
  Probe
cccaatagtgagtcatacctaaccc

SEQ ID NO: 337999 - DNA, 25 bp, Artificial
  Probe
tggaataagctgggtggatgagacc

SEQ ID NO: 338000 - DNA, 25 bp, Artificial
  Probe
cataatgcaagcatttgggaaaata

SEQ ID NO: 338001 - DNA, 25 bp, Artificial
  Probe
agataaaggtcttcactgctaccgt

SEQ ID NO: 338002 - DNA, 25 bp, Artificial
  Probe
agtgcacaggtatggaaagggccca

SEQ ID NO: 338003 - DNA, 25 bp, Artificial
  Probe
agatgtgttttcaacactcaggagg

SEQ ID NO: 338004 - DNA, 25 bp, Artificial
  Probe
acccaggcaaataggcactgaagat

SEQ ID NO: 338005 - DNA, 25 bp, Artificial
  Probe
gccaaatactctgaggaatggggga

SEQ ID NO: 338006 - DNA, 25 bp, Artificial
  Probe
tccacacctcttctttctaggctgg

SEQ ID NO: 338007 - DNA, 25 bp, Artificial
  Probe
gtcaaaaagtcagacactgtcatct

SEQ ID NO: 338008 - DNA, 25 bp, Artificial
  Probe
gtggcccacagcagggacaaacctg

SEQ ID NO: 338009 - DNA, 25 bp, Artificial
  Probe
cattccacaggctcccaggtgctga

SEQ ID NO: 338010 - DNA, 25 bp, Artificial
  Probe
aggaccaagagcaacccttgccttt

SEQ ID NO: 338011 - DNA, 25 bp, Artificial
  Probe
acccggagcgcattggcagccacag

SEQ ID NO: 338012 - DNA, 25 bp, Artificial
  Probe
tcgaggaaaggtctttgctgtcctt

SEQ ID NO: 338013 - DNA, 25 bp, Artificial
  Probe
gatggtgccctttcctcggtttagc

SEQ ID NO: 338014 - DNA, 25 bp, Artificial
  Probe
agcggtacacagaaactaggaccaa

SEQ ID NO: 338015 - DNA, 25 bp, Artificial
  Probe
ggatcagaagccacagaacacgccc

SEQ ID NO: 338016 - DNA, 25 bp, Artificial
  Probe
ttcgccaagaagaaagcataccata

SEQ ID NO: 338017 - DNA, 25 bp, Artificial
  Probe
ttatttcctgggagagctgtgggca

SEQ ID NO: 338018 - DNA, 25 bp, Artificial
  Probe
caccaactttgctttatttcctggg

SEQ ID NO: 338019 - DNA, 25 bp, Artificial
  Probe
atttcaggtgtttgaaggagtccct

SEQ ID NO: 338020 - DNA, 25 bp, Artificial
  Probe
ccacacctcttctttctaggctggg

SEQ ID NO: 338021 - DNA, 25 bp, Artificial
  Probe
acaacgtgcagaatcgaggaaaggt

SEQ ID NO: 338022 - DNA, 25 bp, Artificial
  Probe
gtgcactctccgaatccagcagtcg

SEQ ID NO: 338023 - DNA, 25 bp, Artificial
  Probe
cccggagcgcattggcagccacagt

SEQ ID NO: 338024 - DNA, 25 bp, Artificial
  Probe
gacacttgccctacctgaggggatg

SEQ ID NO: 338025 - DNA, 25 bp, Artificial
  Probe
ctcggtttagccaaatactctgagg

SEQ ID NO: 338026 - DNA, 25 bp, Artificial
  Probe
gatcagaagccacagaacacgccca

SEQ ID NO: 338027 - DNA, 25 bp, Artificial
  Probe
aggagggatcgctacaatggaccct

SEQ ID NO: 338028 - DNA, 25 bp, Artificial
  Probe
acaatgaggcgtcgttcagtgcaca

SEQ ID NO: 338029 - DNA, 25 bp, Artificial
  Probe
ttcaacactcaggaggcctgggggt

SEQ ID NO: 338030 - DNA, 25 bp, Artificial
  Probe
tcagcaagggagtccctgagcgaga

SEQ ID NO: 338031 - DNA, 25 bp, Artificial
  Probe
agtgctactgaaaatcttaacagat

SEQ ID NO: 338032 - DNA, 25 bp, Artificial
  Probe
gcacatttaggaccaccaactttgc

SEQ ID NO: 338033 - DNA, 25 bp, Artificial
  Probe
aatggcagcagaggatcagaagcca

SEQ ID NO: 338034 - DNA, 25 bp, Artificial
  Probe
aacctttctcccagaggacacttgc

SEQ ID NO: 338035 - DNA, 25 bp, Artificial
  Probe
tggtgccctttcctcggtttagcca

SEQ ID NO: 338036 - DNA, 25 bp, Artificial
  Probe
ccaggtgctgatctgtgctaaaaaa

SEQ ID NO: 338037 - DNA, 25 bp, Artificial
  Probe
aaggtctgaactgaaggtggcccac

SEQ ID NO: 338038 - DNA, 25 bp, Artificial
  Probe
ccattccgacccaggcaaataggca

SEQ ID NO: 338039 - DNA, 25 bp, Artificial
  Probe
tttcaggtgtttgaaggagtcccta

SEQ ID NO: 338040 - DNA, 25 bp, Artificial
  Probe
ccgtgtcgggcgatccccagtctgt

SEQ ID NO: 338041 - DNA, 25 bp, Artificial
  Probe
tctttgctgtccttccctggaagaa

SEQ ID NO: 338042 - DNA, 25 bp, Artificial
  Probe
tcttaacagattcgtttcaatagtg

SEQ ID NO: 338043 - DNA, 25 bp, Artificial
  Probe
cacacaggtagcaggtgagatgaga

SEQ ID NO: 338044 - DNA, 25 bp, Artificial
  Probe
ggaggcatagttcttcttcgccaag

SEQ ID NO: 338045 - DNA, 25 bp, Artificial
  Probe
gcaaacctgaaggagatgtgttttc

SEQ ID NO: 338046 - DNA, 25 bp, Artificial
  Probe
acacactatcccacagaagagtgtc

SEQ ID NO: 338047 - DNA, 25 bp, Artificial
  Probe
cttacacgaagaatgtggccctctc

SEQ ID NO: 338048 - DNA, 25 bp, Artificial
  Probe
cccttgtggaaagcatggattggga

SEQ ID NO: 338049 - DNA, 25 bp, Artificial
  Probe
aaatgagtagggtgcctccgggaca

SEQ ID NO: 338050 - DNA, 25 bp, Artificial
  Probe
attattggcagaaacacgcaggaat

SEQ ID NO: 338051 - DNA, 25 bp, Artificial
  Probe
agaacttctgaaaacttacacgaag

SEQ ID NO: 338052 - DNA, 25 bp, Artificial
  Probe
agcctgcaatatctcacagggacat

SEQ ID NO: 338053 - DNA, 25 bp, Artificial
  Probe
aaatggtaagctatgcttagtgcca

SEQ ID NO: 338054 - DNA, 25 bp, Artificial
  Probe
cagtccatgttttataacaaggtat

SEQ ID NO: 338055 - DNA, 25 bp, Artificial
  Probe
gaggcttccaagcattactttaacc

SEQ ID NO: 338056 - DNA, 25 bp, Artificial
  Probe
gagctgctaagctaaggaaactgct

SEQ ID NO: 338057 - DNA, 25 bp, Artificial
  Probe
ccatggctagaggattggcatattt

SEQ ID NO: 338058 - DNA, 25 bp, Artificial
  Probe
cacagcttgtgaatgtgtagtgtgc

SEQ ID NO: 338059 - DNA, 25 bp, Artificial
  Probe
agaattactcagatgcaaagactaa

SEQ ID NO: 338060 - DNA, 25 bp, Artificial
  Probe
ctcccaaagaatctagtctatgatg

SEQ ID NO: 338061 - DNA, 25 bp, Artificial
  Probe
cagtggtcacaatggtgacaaatgt

SEQ ID NO: 338062 - DNA, 25 bp, Artificial
  Probe
aatgactattgtaatgccaacatga

SEQ ID NO: 338063 - DNA, 25 bp, Artificial
  Probe
tacctggcttaaaagatggccacaa

SEQ ID NO: 338064 - DNA, 25 bp, Artificial
  Probe
cacccatggccaggttggtacccgg

SEQ ID NO: 338065 - DNA, 25 bp, Artificial
  Probe
catagtcatcaaagtggggtacagt

SEQ ID NO: 338066 - DNA, 25 bp, Artificial
  Probe
aaactgcgaactgtaaagaacttct

SEQ ID NO: 338067 - DNA, 25 bp, Artificial
  Probe
ggtgctataaacttccaaagggacg

SEQ ID NO: 338068 - DNA, 25 bp, Artificial
  Probe
ctcgttgtactgctgcagatggacc

SEQ ID NO: 338069 - DNA, 25 bp, Artificial
  Probe
catctcttgaagatatgcaggaagt

SEQ ID NO: 338070 - DNA, 25 bp, Artificial
  Probe
gtaaagaggcttccaagcattactt

SEQ ID NO: 338071 - DNA, 25 bp, Artificial
  Probe
ctccagaggtgttagagggtgctat

SEQ ID NO: 338072 - DNA, 25 bp, Artificial
  Probe
tggccacaagcctgcaatatctcac

SEQ ID NO: 338073 - DNA, 25 bp, Artificial
  Probe
aaggtattacaaactcactgtgtta

SEQ ID NO: 338074 - DNA, 25 bp, Artificial
  Probe
cctggctaatcaagtatttgaaaac

SEQ ID NO: 338075 - DNA, 25 bp, Artificial
  Probe
gatcatgatgcagaagccaggttat

SEQ ID NO: 338076 - DNA, 25 bp, Artificial
  Probe
caatgctctgtgaaacgatagaaga

SEQ ID NO: 338077 - DNA, 25 bp, Artificial
  Probe
gtctgtcagaagacactaattcctt

SEQ ID NO: 338078 - DNA, 25 bp, Artificial
  Probe
caacaaggtatacctcagttccacg

SEQ ID NO: 338079 - DNA, 25 bp, Artificial
  Probe
agaagccaggttatcagctggatgt

SEQ ID NO: 338080 - DNA, 25 bp, Artificial
  Probe
ccttaaagtttgaggctggcaagtc

SEQ ID NO: 338081 - DNA, 25 bp, Artificial
  Probe
gaattactcagatgcaaagactaac

SEQ ID NO: 338082 - DNA, 25 bp, Artificial
  Probe
tttacatgaggatatacctggctta

SEQ ID NO: 338083 - DNA, 25 bp, Artificial
  Probe
taattactacagaggacattgtaac

SEQ ID NO: 338084 - DNA, 25 bp, Artificial
  Probe
ggtattacaaactcactgtgttatt

SEQ ID NO: 338085 - DNA, 25 bp, Artificial
  Probe
aatcagtccatgttttataacaagg

SEQ ID NO: 338086 - DNA, 25 bp, Artificial
  Probe
ggaaactgcgaactgtaaagaactt

SEQ ID NO: 338087 - DNA, 25 bp, Artificial
  Probe
acaatctgacagcttgcattgctga

SEQ ID NO: 338088 - DNA, 25 bp, Artificial
  Probe
aggaaattggccagcatccatctct

SEQ ID NO: 338089 - DNA, 25 bp, Artificial
  Probe
cccatggccaggttggtacccggag

SEQ ID NO: 338090 - DNA, 25 bp, Artificial
  Probe
tgacatcagatttcttaatgtctgt

SEQ ID NO: 338091 - DNA, 25 bp, Artificial
  Probe
cctctccaaatcaaggatcttttgg

SEQ ID NO: 338092 - DNA, 25 bp, Artificial
  Probe
tacctcagttccacggttgctaaat

SEQ ID NO: 338093 - DNA, 25 bp, Artificial
  Probe
ttttcaagacctgcaggtgctggtg

SEQ ID NO: 338094 - DNA, 25 bp, Artificial
  Probe
cccacctgagagatgccatgagtgc

SEQ ID NO: 338095 - DNA, 25 bp, Artificial
  Probe
aaggacgagggctcctactttctgg

SEQ ID NO: 338096 - DNA, 25 bp, Artificial
  Probe
tgcccaaggggctcgggtctatgcc

SEQ ID NO: 338097 - DNA, 25 bp, Artificial
  Probe
gagaatctttgctcagcgacttatg

SEQ ID NO: 338098 - DNA, 25 bp, Artificial
  Probe
tatcttccggttttccttcgtgcct

SEQ ID NO: 338099 - DNA, 25 bp, Artificial
  Probe
aatcgagttcatctttgggctcccc

SEQ ID NO: 338100 - DNA, 25 bp, Artificial
  Probe
cagacctgcgccttctggaatcgtt

SEQ ID NO: 338101 - DNA, 25 bp, Artificial
  Probe
tggatccctcactgaactacaccgt

SEQ ID NO: 338102 - DNA, 25 bp, Artificial
  Probe
tccacattgacttggcccctctgga

SEQ ID NO: 338103 - DNA, 25 bp, Artificial
  Probe
gacggggatttcctcagtgacacgc

SEQ ID NO: 338104 - DNA, 25 bp, Artificial
  Probe
gagggctcctactttctggtttacg

SEQ ID NO: 338105 - DNA, 25 bp, Artificial
  Probe
cggccgaggctgtggtcctgcatta

SEQ ID NO: 338106 - DNA, 25 bp, Artificial
  Probe
tggtttacggggtcccaggcttcag

SEQ ID NO: 338107 - DNA, 25 bp, Artificial
  Probe
tcccactaggggatcctcatcttct

SEQ ID NO: 338108 - DNA, 25 bp, Artificial
  Probe
gttttctccccaaattgctcagcgc

SEQ ID NO: 338109 - DNA, 25 bp, Artificial
  Probe
ctttgaacaccgtgcctccacattg

SEQ ID NO: 338110 - DNA, 25 bp, Artificial
  Probe
ggttttccttcgtgcctgtggtgga

SEQ ID NO: 338111 - DNA, 25 bp, Artificial
  Probe
ctgcctcaagaaagtatcttccggt

SEQ ID NO: 338112 - DNA, 25 bp, Artificial
  Probe
acctggtggaccacgagtggcatgt

SEQ ID NO: 338113 - DNA, 25 bp, Artificial
  Probe
cagcaggagcctcttccacagggct

SEQ ID NO: 338114 - DNA, 25 bp, Artificial
  Probe
gcctgaacctgaagcctttggaggt

SEQ ID NO: 338115 - DNA, 25 bp, Artificial
  Probe
aagtctccacggtggccaccgtaca

SEQ ID NO: 338116 - DNA, 25 bp, Artificial
  Probe
gtgcggatcggtgtaccccaagcga

SEQ ID NO: 338117 - DNA, 25 bp, Artificial
  Probe
cccaatgggccctgggccactgtga

SEQ ID NO: 338118 - DNA, 25 bp, Artificial
  Probe
cccaatgaccctcgagactctaagt

SEQ ID NO: 338119 - DNA, 25 bp, Artificial
  Probe
ccacagacacgctggacgaggcgga

SEQ ID NO: 338120 - DNA, 25 bp, Artificial
  Probe
gagagaatctttgctcagcgactta

SEQ ID NO: 338121 - DNA, 25 bp, Artificial
  Probe
ttggggacccaggtcctgccgtcct

SEQ ID NO: 338122 - DNA, 25 bp, Artificial
  Probe
agtggaaggccgagttccaccgctg

SEQ ID NO: 338123 - DNA, 25 bp, Artificial
  Probe
cccaagcgagtgacctggcggccga

SEQ ID NO: 338124 - DNA, 25 bp, Artificial
  Probe
ttgtgtgccctgtggcccagctggc

SEQ ID NO: 338125 - DNA, 25 bp, Artificial
  Probe
cctgcccacctgagagatgccatga

SEQ ID NO: 338126 - DNA, 25 bp, Artificial
  Probe
tcagccgggcccagttcctggctgg

SEQ ID NO: 338127 - DNA, 25 bp, Artificial
  Probe
ggatataatacaaccgagcccccag

SEQ ID NO: 338128 - DNA, 25 bp, Artificial
  Probe
ggtaggcgaccacaacgttgtgtgc

SEQ ID NO: 338129 - DNA, 25 bp, Artificial
  Probe
ctcagacctgtgaccccttggggac

SEQ ID NO: 338130 - DNA, 25 bp, Artificial
  Probe
acagactggctgcaccctgaggacc

SEQ ID NO: 338131 - DNA, 25 bp, Artificial
  Probe
ttgctcagcgccacagacacgctgg

SEQ ID NO: 338132 - DNA, 25 bp, Artificial
  Probe
cgccttgtgggctgtcccccaggtg

SEQ ID NO: 338133 - DNA, 25 bp, Artificial
  Probe
tggggacccaggtcctgccgtcctg

SEQ ID NO: 338134 - DNA, 25 bp, Artificial
  Probe
tgggcatgcacattctgtccctgcc

SEQ ID NO: 338135 - DNA, 25 bp, Artificial
  Probe
ccactgccgcgcagcaatacgtgag

SEQ ID NO: 338136 - DNA, 25 bp, Artificial
  Probe
ccttgtgggctgtcccccaggtggc

SEQ ID NO: 338137 - DNA, 25 bp, Artificial
  Probe
gcgctggtggcaatgacaccgagct

SEQ ID NO: 338138 - DNA, 25 bp, Artificial
  Probe
gtgccccatggctatgaaatcgagt

SEQ ID NO: 338139 - DNA, 25 bp, Artificial
  Probe
gaacctccttcatcagatgacatga

SEQ ID NO: 338140 - DNA, 25 bp, Artificial
  Probe
agatgatgagtcctcccagaaagac

SEQ ID NO: 338141 - DNA, 25 bp, Artificial
  Probe
gaaagacatcaaagtctcatctaga

SEQ ID NO: 338142 - DNA, 25 bp, Artificial
  Probe
tcctcccagaaagacatcaaagtct

SEQ ID NO: 338143 - DNA, 25 bp, Artificial
  Probe
aacctccttcatcagatgacatgaa

SEQ ID NO: 338144 - DNA, 25 bp, Artificial
  Probe
gatgagtcctcccagaaagacatca

SEQ ID NO: 338145 - DNA, 25 bp, Artificial
  Probe
gtcctcccagaaagacatcaaagtc

SEQ ID NO: 338146 - DNA, 25 bp, Artificial
  Probe
atcaaagtctcatctagaggcagaa

SEQ ID NO: 338147 - DNA, 25 bp, Artificial
  Probe
aagtctcatctagaggcagaacaag

SEQ ID NO: 338148 - DNA, 25 bp, Artificial
  Probe
ctcccagaaagacatcaaagtctca

SEQ ID NO: 338149 - DNA, 25 bp, Artificial
  Probe
aaagtctcatctagaggcagaacaa

SEQ ID NO: 338150 - DNA, 25 bp, Artificial
  Probe
tcatctagaggcagaacaagcagta

SEQ ID NO: 338151 - DNA, 25 bp, Artificial
  Probe
gtctcatctagaggcagaacaagca

SEQ ID NO: 338152 - DNA, 25 bp, Artificial
  Probe
accttcatgaacctccttcatcaga

SEQ ID NO: 338153 - DNA, 25 bp, Artificial
  Probe
tgagtcctcccagaaagacatcaaa

SEQ ID NO: 338154 - DNA, 25 bp, Artificial
  Probe
aaagacatcaaagtctcatctagag

SEQ ID NO: 338155 - DNA, 25 bp, Artificial
  Probe
gatgatgagtcctcccagaaagaca

SEQ ID NO: 338156 - DNA, 25 bp, Artificial
  Probe
gagtcctcccagaaagacatcaaag

SEQ ID NO: 338157 - DNA, 25 bp, Artificial
  Probe
agacatcaaagtctcatctagaggc

SEQ ID NO: 338158 - DNA, 25 bp, Artificial
  Probe
acatcaaagtctcatctagaggcag

SEQ ID NO: 338159 - DNA, 25 bp, Artificial
  Probe
tgaacctccttcatcagatgacatg

SEQ ID NO: 338160 - DNA, 25 bp, Artificial
  Probe
gacatcaaagtctcatctagaggca

SEQ ID NO: 338161 - DNA, 25 bp, Artificial
  Probe
catcaaagtctcatctagaggcaga

SEQ ID NO: 338162 - DNA, 25 bp, Artificial
  Probe
tccttcatcagatgacatgaaatca

SEQ ID NO: 338163 - DNA, 25 bp, Artificial
  Probe
atgagtcctcccagaaagacatcaa

SEQ ID NO: 338164 - DNA, 25 bp, Artificial
  Probe
tcatgaacctccttcatcagatgac

SEQ ID NO: 338165 - DNA, 25 bp, Artificial
  Probe
ccttcatcagatgacatgaaatcag

SEQ ID NO: 338166 - DNA, 25 bp, Artificial
  Probe
cctcccagaaagacatcaaagtctc

SEQ ID NO: 338167 - DNA, 25 bp, Artificial
  Probe
atcagatgatgagtcctcccagaaa

SEQ ID NO: 338168 - DNA, 25 bp, Artificial
  Probe
tctcatctagaggcagaacaagcag

SEQ ID NO: 338169 - DNA, 25 bp, Artificial
  Probe
agtcctcccagaaagacatcaaagt

SEQ ID NO: 338170 - DNA, 25 bp, Artificial
  Probe
tcaaagtctcatctagaggcagaac

SEQ ID NO: 338171 - DNA, 25 bp, Artificial
  Probe
cttcatgaacctccttcatcagatg

SEQ ID NO: 338172 - DNA, 25 bp, Artificial
  Probe
tcccagaaagacatcaaagtctcat

SEQ ID NO: 338173 - DNA, 25 bp, Artificial
  Probe
tcagatgatgagtcctcccagaaag

SEQ ID NO: 338174 - DNA, 25 bp, Artificial
  Probe
cttcatcagatgacatgaaatcaga

SEQ ID NO: 338175 - DNA, 25 bp, Artificial
  Probe
aagacatcaaagtctcatctagagg

SEQ ID NO: 338176 - DNA, 25 bp, Artificial
  Probe
ccttcatgaacctccttcatcagat

SEQ ID NO: 338177 - DNA, 25 bp, Artificial
  Probe
cagatgatgagtcctcccagaaaga

SEQ ID NO: 338178 - DNA, 25 bp, Artificial
  Probe
atgatgagtcctcccagaaagacat

SEQ ID NO: 338179 - DNA, 25 bp, Artificial
  Probe
acctccttcatcagatgacatgaaa

SEQ ID NO: 338180 - DNA, 25 bp, Artificial
  Probe
aaaccttcatgaacctccttcatca

SEQ ID NO: 338181 - DNA, 25 bp, Artificial
  Probe
atgaacctccttcatcagatgacat

SEQ ID NO: 338182 - DNA, 25 bp, Artificial
  Probe
ctccttcatcagatgacatgaaatc

SEQ ID NO: 338183 - DNA, 25 bp, Artificial
  Probe
caaagtctcatctagaggcagaaca

SEQ ID NO: 338184 - DNA, 25 bp, Artificial
  Probe
agtctcatctagaggcagaacaagc

SEQ ID NO: 338185 - DNA, 25 bp, Artificial
  Probe
ttgcacacgggcaggaggacctttt

SEQ ID NO: 338186 - DNA, 25 bp, Artificial
  Probe
gaccccggtttctattttgcacacg

SEQ ID NO: 338187 - DNA, 25 bp, Artificial
  Probe
aatctcctgatctgagccctgcatc

SEQ ID NO: 338188 - DNA, 25 bp, Artificial
  Probe
caggaggaccttttgcattctcttc

SEQ ID NO: 338189 - DNA, 25 bp, Artificial
  Probe
acagccaacaatctcctgatctgag

SEQ ID NO: 338190 - DNA, 25 bp, Artificial
  Probe
acgccagacgcctacagaggagcag

SEQ ID NO: 338191 - DNA, 25 bp, Artificial
  Probe
tcttgaccagtgtccctgtcactct

SEQ ID NO: 338192 - DNA, 25 bp, Artificial
  Probe
agccaacaatctcctgatctgagcc

SEQ ID NO: 338193 - DNA, 25 bp, Artificial
  Probe
ctgcatcccatgaggacacgccaga

SEQ ID NO: 338194 - DNA, 25 bp, Artificial
  Probe
aggacacgccagacgcctacagagg

SEQ ID NO: 338195 - DNA, 25 bp, Artificial
  Probe
cgaagatctgtgaccccggggagct

SEQ ID NO: 338196 - DNA, 25 bp, Artificial
  Probe
aaggagtacatcatccaggtggccg

SEQ ID NO: 338197 - DNA, 25 bp, Artificial
  Probe
tcaatggcagcatgtggagctctcg

SEQ ID NO: 338198 - DNA, 25 bp, Artificial
  Probe
gccgccaaggacaatgagattggga

SEQ ID NO: 338199 - DNA, 25 bp, Artificial
  Probe
cacaccctggactgaggaaccacgg

SEQ ID NO: 338200 - DNA, 25 bp, Artificial
  Probe
tggatcaatggcagcatgtggagct

SEQ ID NO: 338201 - DNA, 25 bp, Artificial
  Probe
tgaggacacgccagacgcctacaga

SEQ ID NO: 338202 - DNA, 25 bp, Artificial
  Probe
tgatctgagccctgcatcccatgag

SEQ ID NO: 338203 - DNA, 25 bp, Artificial
  Probe
acatcatccaggtggccgccaagga

SEQ ID NO: 338204 - DNA, 25 bp, Artificial
  Probe
aggaaccacggcatctcaccactga

SEQ ID NO: 338205 - DNA, 25 bp, Artificial
  Probe
aacttggcctgatcccgaatccttt

SEQ ID NO: 338206 - DNA, 25 bp, Artificial
  Probe
taccggcctctcatcctggatcaat

SEQ ID NO: 338207 - DNA, 25 bp, Artificial
  Probe
atacccttcttgaccagtgtccctg

SEQ ID NO: 338208 - DNA, 25 bp, Artificial
  Probe
gtcactctggtcctggctgccgctg

SEQ ID NO: 338209 - DNA, 25 bp, Artificial
  Probe
caggtggccgccaaggacaatgaga

SEQ ID NO: 338210 - DNA, 25 bp, Artificial
  Probe
ctggagtgtggctgctcacgccaca

SEQ ID NO: 338211 - DNA, 25 bp, Artificial
  Probe
gcatcccatgaggacacgccagacg

SEQ ID NO: 338212 - DNA, 25 bp, Artificial
  Probe
ccagacgcctacagaggagcaggag

SEQ ID NO: 338213 - DNA, 25 bp, Artificial
  Probe
tctattttgcacacgggcaggagga

SEQ ID NO: 338214 - DNA, 25 bp, Artificial
  Probe
ctgagccctgcatcccatgaggaca

SEQ ID NO: 338215 - DNA, 25 bp, Artificial
  Probe
ctgagcctgcagaccccggtttcta

SEQ ID NO: 338216 - DNA, 25 bp, Artificial
  Probe
cggagctgagcctgcagaccccggt

SEQ ID NO: 338217 - DNA, 25 bp, Artificial
  Probe
tgtcactctggtcctggctgccgct

SEQ ID NO: 338218 - DNA, 25 bp, Artificial
  Probe
acgggcaggaggaccttttgcattc

SEQ ID NO: 338219 - DNA, 25 bp, Artificial
  Probe
cggtttctattttgcacacgggcag

SEQ ID NO: 338220 - DNA, 25 bp, Artificial
  Probe
tgcagaccccggtttctattttgca

SEQ ID NO: 338221 - DNA, 25 bp, Artificial
  Probe
aggccggagctgagcctgcagaccc

SEQ ID NO: 338222 - DNA, 25 bp, Artificial
  Probe
acaccatcacggatgcctatgctgg

SEQ ID NO: 338223 - DNA, 25 bp, Artificial
  Probe
caccacgaagatctgtgaccccggg

SEQ ID NO: 338224 - DNA, 25 bp, Artificial
  Probe
gagctgagcctgcagaccccggttt

SEQ ID NO: 338225 - DNA, 25 bp, Artificial
  Probe
gaaccacggcatctcaccactgaag

SEQ ID NO: 338226 - DNA, 25 bp, Artificial
  Probe
gactgaggaaccacggcatctcacc

SEQ ID NO: 338227 - DNA, 25 bp, Artificial
  Probe
acaatctcctgatctgagccctgca

SEQ ID NO: 338228 - DNA, 25 bp, Artificial
  Probe
caacaatctcctgatctgagccctg

SEQ ID NO: 338229 - DNA, 25 bp, Artificial
  Probe
atcctggatcaatggcagcatgtgg

SEQ ID NO: 338230 - DNA, 25 bp, Artificial
  Probe
tacccttcttgaccagtgtccctgt

SEQ ID NO: 338231 - DNA, 25 bp, Artificial
  Probe
atttcataaccgtgatggaaataca

SEQ ID NO: 338232 - DNA, 25 bp, Artificial
  Probe
ctaaagcaatttcataaccgtgatg

SEQ ID NO: 338233 - DNA, 25 bp, Artificial
  Probe
ttttgttgctaaagcaatttcataa

SEQ ID NO: 338234 - DNA, 25 bp, Artificial
  Probe
aatacagactgtctttttaaatgtt

SEQ ID NO: 338235 - DNA, 25 bp, Artificial
  Probe
taaagcaatttcataaccgtgatgg

SEQ ID NO: 338236 - DNA, 25 bp, Artificial
  Probe
aaatacagactgtctttttaaatgt

SEQ ID NO: 338237 - DNA, 25 bp, Artificial
  Probe
atgtaattttgttgctaaagcaatt

SEQ ID NO: 338238 - DNA, 25 bp, Artificial
  Probe
ggaaatacagactgtctttttaaat

SEQ ID NO: 338239 - DNA, 25 bp, Artificial
  Probe
gaaatacagactgtctttttaaatg

SEQ ID NO: 338240 - DNA, 25 bp, Artificial
  Probe
atacagactgtctttttaaatgttt

SEQ ID NO: 338241 - DNA, 25 bp, Artificial
  Probe
gcaatttcataaccgtgatggaaat

SEQ ID NO: 338242 - DNA, 25 bp, Artificial
  Probe
aaagcaatttcataaccgtgatgga

SEQ ID NO: 338243 - DNA, 25 bp, Artificial
  Probe
tacagactgtctttttaaatgtttt

SEQ ID NO: 338244 - DNA, 25 bp, Artificial
  Probe
aattttgttgctaaagcaatttcat

SEQ ID NO: 338245 - DNA, 25 bp, Artificial
  Probe
ttcataaccgtgatggaaatacaga

SEQ ID NO: 338246 - DNA, 25 bp, Artificial
  Probe
tttcataaccgtgatggaaatacag

SEQ ID NO: 338247 - DNA, 25 bp, Artificial
  Probe
aagcaatttcataaccgtgatggaa

SEQ ID NO: 338248 - DNA, 25 bp, Artificial
  Probe
tggaaatacagactgtctttttaaa

SEQ ID NO: 338249 - DNA, 25 bp, Artificial
  Probe
gttgctaaagcaatttcataaccgt

SEQ ID NO: 338250 - DNA, 25 bp, Artificial
  Probe
taattttgttgctaaagcaatttca

SEQ ID NO: 338251 - DNA, 25 bp, Artificial
  Probe
aatttcataaccgtgatggaaatac

SEQ ID NO: 338252 - DNA, 25 bp, Artificial
  Probe
caatttcataaccgtgatggaaata

SEQ ID NO: 338253 - DNA, 25 bp, Artificial
  Probe
tcataaccgtgatggaaatacagac

SEQ ID NO: 338254 - DNA, 25 bp, Artificial
  Probe
attttgttgctaaagcaatttcata

SEQ ID NO: 338255 - DNA, 25 bp, Artificial
  Probe
tgttgctaaagcaatttcataaccg

SEQ ID NO: 338256 - DNA, 25 bp, Artificial
  Probe
agcaatttcataaccgtgatggaaa

SEQ ID NO: 338257 - DNA, 25 bp, Artificial
  Probe
caagaactgtgtaccactaaagtaa

SEQ ID NO: 338258 - DNA, 25 bp, Artificial
  Probe
tacatccattgtgacatgttctcag

SEQ ID NO: 338259 - DNA, 25 bp, Artificial
  Probe
gaactgtgtaccactaaagtaatat

SEQ ID NO: 338260 - DNA, 25 bp, Artificial
  Probe
gacctgagaagtctctaacaatatt

SEQ ID NO: 338261 - DNA, 25 bp, Artificial
  Probe
tctcaagaactgtgtaccactaaag

SEQ ID NO: 338262 - DNA, 25 bp, Artificial
  Probe
ctaaaggctaagaggcccgagctga

SEQ ID NO: 338263 - DNA, 25 bp, Artificial
  Probe
gttaaagccatttacatccattgtg

SEQ ID NO: 338264 - DNA, 25 bp, Artificial
  Probe
aagtggactgcattcttttgaacag

SEQ ID NO: 338265 - DNA, 25 bp, Artificial
  Probe
ctccatgtgaagctcaaggaggccc

SEQ ID NO: 338266 - DNA, 25 bp, Artificial
  Probe
tgacctgagaagtctctaacaatat

SEQ ID NO: 338267 - DNA, 25 bp, Artificial
  Probe
ctaagaggcccgagctgagagagta

SEQ ID NO: 338268 - DNA, 25 bp, Artificial
  Probe
tgaagctcaaggaggcccttctcag

SEQ ID NO: 338269 - DNA, 25 bp, Artificial
  Probe
ttcgcgatgttcacagaattccatt

SEQ ID NO: 338270 - DNA, 25 bp, Artificial
  Probe
agagtgaacgagcacctgatttttt

SEQ ID NO: 338271 - DNA, 25 bp, Artificial
  Probe
ttttttgcaactgagcctttcctga

SEQ ID NO: 338272 - DNA, 25 bp, Artificial
  Probe
gaagaaagccattctggatgacatg

SEQ ID NO: 338273 - DNA, 25 bp, Artificial
  Probe
cagctcagagtgaacgagcacctga

SEQ ID NO: 338274 - DNA, 25 bp, Artificial
  Probe
gcgatgttcacagaattccattaaa

SEQ ID NO: 338275 - DNA, 25 bp, Artificial
  Probe
agaactgtgtaccactaaagtaata

SEQ ID NO: 338276 - DNA, 25 bp, Artificial
  Probe
ccttctcagcccagcaaagtttgca

SEQ ID NO: 338277 - DNA, 25 bp, Artificial
  Probe
gaggcccttctcagcccagcaaagt

SEQ ID NO: 338278 - DNA, 25 bp, Artificial
  Probe
tcagagtgaacgagcacctgatttt

SEQ ID NO: 338279 - DNA, 25 bp, Artificial
  Probe
agccattctggatgacatggtgatg

SEQ ID NO: 338280 - DNA, 25 bp, Artificial
  Probe
actgagcctttcctgacctgagaag

SEQ ID NO: 338281 - DNA, 25 bp, Artificial
  Probe
tatattcgcgatgttcacagaattc

SEQ ID NO: 338282 - DNA, 25 bp, Artificial
  Probe
gtggactgcattcttttgaacaggt

SEQ ID NO: 338283 - DNA, 25 bp, Artificial
  Probe
attgtgacatgttctcagttcaaaa

SEQ ID NO: 338284 - DNA, 25 bp, Artificial
  Probe
caactgagcctttcctgacctgaga

SEQ ID NO: 338285 - DNA, 25 bp, Artificial
  Probe
ccagcaaagtttgcagcaatattct

SEQ ID NO: 338286 - DNA, 25 bp, Artificial
  Probe
aggaggcccttctcagcccagcaaa

SEQ ID NO: 338287 - DNA, 25 bp, Artificial
  Probe
actgcattcttttgaacaggttaaa

SEQ ID NO: 338288 - DNA, 25 bp, Artificial
  Probe
tgcaactgagcctttcctgacctga

SEQ ID NO: 338289 - DNA, 25 bp, Artificial
  Probe
tcttttgaacaggttaaagccattt

SEQ ID NO: 338290 - DNA, 25 bp, Artificial
  Probe
aaagtggactgcattcttttgaaca

SEQ ID NO: 338291 - DNA, 25 bp, Artificial
  Probe
gtactcaatctccatgtgaagctca

SEQ ID NO: 338292 - DNA, 25 bp, Artificial
  Probe
aggttaaagccatttacatccattg

SEQ ID NO: 338293 - DNA, 25 bp, Artificial
  Probe
ggcccgagctgagagagtacttcaa

SEQ ID NO: 338294 - DNA, 25 bp, Artificial
  Probe
gcaactgagcctttcctgacctgag

SEQ ID NO: 338295 - DNA, 25 bp, Artificial
  Probe
tcctgacctgagaagtctctaacaa

SEQ ID NO: 338296 - DNA, 25 bp, Artificial
  Probe
tttttgcaactgagcctttcctgac

SEQ ID NO: 338297 - DNA, 25 bp, Artificial
  Probe
tgtgaagctcaaggaggcccttctc

SEQ ID NO: 338298 - DNA, 25 bp, Artificial
  Probe
actcaatctccatgtgaagctcaag

SEQ ID NO: 338299 - DNA, 25 bp, Artificial
  Probe
ctcaagaactgtgtaccactaaagt

SEQ ID NO: 338300 - DNA, 25 bp, Artificial
  Probe
aatatattcgcgatgttcacagaat

SEQ ID NO: 338301 - DNA, 25 bp, Artificial
  Probe
ccattctggatgacatggtgatgtt

SEQ ID NO: 338302 - DNA, 25 bp, Artificial
  Probe
tgtactcaatctccatgtgaagctc

SEQ ID NO: 338303 - DNA, 25 bp, Artificial
  Probe
acagaaatcatctctcatcctccca

SEQ ID NO: 338304 - DNA, 25 bp, Artificial
  Probe
tctcatcctcccaatggctggctct

SEQ ID NO: 338305 - DNA, 25 bp, Artificial
  Probe
ggtgctaagaccattccatgagcat

SEQ ID NO: 338306 - DNA, 25 bp, Artificial
  Probe
ttaaaaggccacattaaaggtagca

SEQ ID NO: 338307 - DNA, 25 bp, Artificial
  Probe
gaaacccaatcaggtaaaggttgtg

SEQ ID NO: 338308 - DNA, 25 bp, Artificial
  Probe
accattccatgagcattttacagaa

SEQ ID NO: 338309 - DNA, 25 bp, Artificial
  Probe
ttcagtgtagatggtgctaagacca

SEQ ID NO: 338310 - DNA, 25 bp, Artificial
  Probe
gcattttacagaaatcatctctcat

SEQ ID NO: 338311 - DNA, 25 bp, Artificial
  Probe
tggtgctaagaccattccatgagca

SEQ ID NO: 338312 - DNA, 25 bp, Artificial
  Probe
caccttcagtgtagatggtgctaag

SEQ ID NO: 338313 - DNA, 25 bp, Artificial
  Probe
atggtgctaagaccattccatgagc

SEQ ID NO: 338314 - DNA, 25 bp, Artificial
  Probe
caccccaccttcagtgtagatggtg

SEQ ID NO: 338315 - DNA, 25 bp, Artificial
  Probe
aagaccattccatgagcattttaca

SEQ ID NO: 338316 - DNA, 25 bp, Artificial
  Probe
ctaagaccattccatgagcatttta

SEQ ID NO: 338317 - DNA, 25 bp, Artificial
  Probe
gaaatcatctctcatcctcccaatg

SEQ ID NO: 338318 - DNA, 25 bp, Artificial
  Probe
ctcccaatggctggctctcttaggt

SEQ ID NO: 338319 - DNA, 25 bp, Artificial
  Probe
atggctggctctcttaggtaaaacg

SEQ ID NO: 338320 - DNA, 25 bp, Artificial
  Probe
ccttcagtgtagatggtgctaagac

SEQ ID NO: 338321 - DNA, 25 bp, Artificial
  Probe
taccttcagttttaaaaggccacat

SEQ ID NO: 338322 - DNA, 25 bp, Artificial
  Probe
gctggctctcttaggtaaaacgttt

SEQ ID NO: 338323 - DNA, 25 bp, Artificial
  Probe
gctaagaccattccatgagcatttt

SEQ ID NO: 338324 - DNA, 25 bp, Artificial
  Probe
accttcagtgtagatggtgctaaga

SEQ ID NO: 338325 - DNA, 25 bp, Artificial
  Probe
ccaatggctggctctcttaggtaaa

SEQ ID NO: 338326 - DNA, 25 bp, Artificial
  Probe
ccccaccttcagtgtagatggtgct

SEQ ID NO: 338327 - DNA, 25 bp, Artificial
  Probe
agaccattccatgagcattttacag

SEQ ID NO: 338328 - DNA, 25 bp, Artificial
  Probe
tccatgagcattttacagaaatcat

SEQ ID NO: 338329 - DNA, 25 bp, Artificial
  Probe
tgggagacaccccaccttcagtgta

SEQ ID NO: 338330 - DNA, 25 bp, Artificial
  Probe
aatggctggctctcttaggtaaaac

SEQ ID NO: 338331 - DNA, 25 bp, Artificial
  Probe
taaaggttgtgggttggaagtgctg

SEQ ID NO: 338332 - DNA, 25 bp, Artificial
  Probe
cttcagtgtagatggtgctaagacc

SEQ ID NO: 338333 - DNA, 25 bp, Artificial
  Probe
cccaccttcagtgtagatggtgcta

SEQ ID NO: 338334 - DNA, 25 bp, Artificial
  Probe
caatggctggctctcttaggtaaaa

SEQ ID NO: 338335 - DNA, 25 bp, Artificial
  Probe
aagtgctgggagacaccccaccttc

SEQ ID NO: 338336 - DNA, 25 bp, Artificial
  Probe
cctcccaatggctggctctcttagg

SEQ ID NO: 338337 - DNA, 25 bp, Artificial
  Probe
gaccattccatgagcattttacaga

SEQ ID NO: 338338 - DNA, 25 bp, Artificial
  Probe
tgctaagaccattccatgagcattt

SEQ ID NO: 338339 - DNA, 25 bp, Artificial
  Probe
tcagtgtagatggtgctaagaccat

SEQ ID NO: 338340 - DNA, 25 bp, Artificial
  Probe
aaaggccacattaaaggtagcagag

SEQ ID NO: 338341 - DNA, 25 bp, Artificial
  Probe
caatcaggtaaaggttgtgggttgg

SEQ ID NO: 338342 - DNA, 25 bp, Artificial
  Probe
taaaaggccacattaaaggtagcag

SEQ ID NO: 338343 - DNA, 25 bp, Artificial
  Probe
gtgctaagaccattccatgagcatt

SEQ ID NO: 338344 - DNA, 25 bp, Artificial
  Probe
gggttggaagtgctgggagacaccc

SEQ ID NO: 338345 - DNA, 25 bp, Artificial
  Probe
ccaccttcagtgtagatggtgctaa

SEQ ID NO: 338346 - DNA, 25 bp, Artificial
  Probe
tggctggctctcttaggtaaaacgt

SEQ ID NO: 338347 - DNA, 25 bp, Artificial
  Probe
ggctggctctcttaggtaaaacgtt

SEQ ID NO: 338348 - DNA, 25 bp, Artificial
  Probe
cccaatggctggctctcttaggtaa

SEQ ID NO: 338349 - DNA, 25 bp, Artificial
  Probe
aattcttttgacaatgtcagcccag

SEQ ID NO: 338350 - DNA, 25 bp, Artificial
  Probe
gctctaattcttttgacaatgtcag

SEQ ID NO: 338351 - DNA, 25 bp, Artificial
  Probe
tttgacaatgtcagcccagtcgtgt

SEQ ID NO: 338352 - DNA, 25 bp, Artificial
  Probe
accaaacccggcaggtggtgtgtga

SEQ ID NO: 338353 - DNA, 25 bp, Artificial
  Probe
accagcaatcagagatggatacttc

SEQ ID NO: 338354 - DNA, 25 bp, Artificial
  Probe
aaactgggagcacaaggaaagccct

SEQ ID NO: 338355 - DNA, 25 bp, Artificial
  Probe
tggtgtgtgaccttgggaacccgaa

SEQ ID NO: 338356 - DNA, 25 bp, Artificial
  Probe
ggagatcaaccctttgagaattaag

SEQ ID NO: 338357 - DNA, 25 bp, Artificial
  Probe
ttcgtttcagcgtgcaccagcaatc

SEQ ID NO: 338358 - DNA, 25 bp, Artificial
  Probe
tcaactgcttgctggccttcgtttc

SEQ ID NO: 338359 - DNA, 25 bp, Artificial
  Probe
ctgaacctccagtggccttacaaat

SEQ ID NO: 338360 - DNA, 25 bp, Artificial
  Probe
cacttcagatatggagatcaaccct

SEQ ID NO: 338361 - DNA, 25 bp, Artificial
  Probe
agaccgaagaagacgttgggcctgt

SEQ ID NO: 338362 - DNA, 25 bp, Artificial
  Probe
gagcacaaggaaagccctgagaccg

SEQ ID NO: 338363 - DNA, 25 bp, Artificial
  Probe
caaggaaagccctgagaccgaagaa

SEQ ID NO: 338364 - DNA, 25 bp, Artificial
  Probe
gccctgagaccgaagaagacgttgg

SEQ ID NO: 338365 - DNA, 25 bp, Artificial
  Probe
attgatggaccaatgaactgcactt

SEQ ID NO: 338366 - DNA, 25 bp, Artificial
  Probe
tgtgaccttgggaacccgaagaagg

SEQ ID NO: 338367 - DNA, 25 bp, Artificial
  Probe
agacgttgggcctgttgttcagcac

SEQ ID NO: 338368 - DNA, 25 bp, Artificial
  Probe
gttcattcagcaaggcaatcctgaa

SEQ ID NO: 338369 - DNA, 25 bp, Artificial
  Probe
tcctgtgcatttaagacagaaaacc

SEQ ID NO: 338370 - DNA, 25 bp, Artificial
  Probe
tgggaacccgaagaaggctggaact

SEQ ID NO: 338371 - DNA, 25 bp, Artificial
  Probe
ccctgagaccgaagaagacgttggg

SEQ ID NO: 338372 - DNA, 25 bp, Artificial
  Probe
ggaacccgaagaaggctggaactca

SEQ ID NO: 338373 - DNA, 25 bp, Artificial
  Probe
catctatgagctgagaaacaatggt

SEQ ID NO: 338374 - DNA, 25 bp, Artificial
  Probe
gatatggagatcaaccctttgagaa

SEQ ID NO: 338375 - DNA, 25 bp, Artificial
  Probe
aagaggagtttcaagccctgatcac

SEQ ID NO: 338376 - DNA, 25 bp, Artificial
  Probe
agaggagtttcaagccctgatcaca

SEQ ID NO: 338377 - DNA, 25 bp, Artificial
  Probe
ccaattccaaactgggagcacaagg

SEQ ID NO: 338378 - DNA, 25 bp, Artificial
  Probe
tgcttgctggccttcgtttcagcgt

SEQ ID NO: 338379 - DNA, 25 bp, Artificial
  Probe
cgaagaagacgttgggcctgttgtt

SEQ ID NO: 338380 - DNA, 25 bp, Artificial
  Probe
gaaacaatggtccaagttcattcag

SEQ ID NO: 338381 - DNA, 25 bp, Artificial
  Probe
agaaggctggaactcaactgcttgc

SEQ ID NO: 338382 - DNA, 25 bp, Artificial
  Probe
caaggtcgaccttgccgttttggct

SEQ ID NO: 338383 - DNA, 25 bp, Artificial
  Probe
attcagcaaggcaatcctgaacctc

SEQ ID NO: 338384 - DNA, 25 bp, Artificial
  Probe
gaaagccctgagaccgaagaagacg

SEQ ID NO: 338385 - DNA, 25 bp, Artificial
  Probe
cgacattgatggaccaatgaactgc

SEQ ID NO: 338386 - DNA, 25 bp, Artificial
  Probe
aacccggcaggtggtgtgtgacctt

SEQ ID NO: 338387 - DNA, 25 bp, Artificial
  Probe
acattctccattacgacattgatgg

SEQ ID NO: 338388 - DNA, 25 bp, Artificial
  Probe
caatgtcagcccagtcgtgtcttac

SEQ ID NO: 338389 - DNA, 25 bp, Artificial
  Probe
ctttcttccaattccaaactgggag

SEQ ID NO: 338390 - DNA, 25 bp, Artificial
  Probe
ttccaaactgggagcacaaggaaag

SEQ ID NO: 338391 - DNA, 25 bp, Artificial
  Probe
ccggaacaacgaagccttagcaaga

SEQ ID NO: 338392 - DNA, 25 bp, Artificial
  Probe
atatggagatcaaccctttgagaat

SEQ ID NO: 338393 - DNA, 25 bp, Artificial
  Probe
acaacgaagccttagcaagactgtc

SEQ ID NO: 338394 - DNA, 25 bp, Artificial
  Probe
ggccttcgtttcagcgtgcaccagc

SEQ ID NO: 338395 - DNA, 25 bp, Artificial
  Probe
gatgcttacgggaaaatccgttcta

SEQ ID NO: 338396 - DNA, 25 bp, Artificial
  Probe
acattggccgggacaaccactactc

SEQ ID NO: 338397 - DNA, 25 bp, Artificial
  Probe
gtgatctccccgaagagctgtcgct

SEQ ID NO: 338398 - DNA, 25 bp, Artificial
  Probe
cccatattgccgtggacggaaggct

SEQ ID NO: 338399 - DNA, 25 bp, Artificial
  Probe
atgtcgtcagcctttaccagaatta

SEQ ID NO: 338400 - DNA, 25 bp, Artificial
  Probe
ggcgctgccacattggccgggacaa

SEQ ID NO: 338401 - DNA, 25 bp, Artificial
  Probe
cttgcctaatgatgggcgctgccac

SEQ ID NO: 338402 - DNA, 25 bp, Artificial
  Probe
agaattacagtgagctcatcccggg

SEQ ID NO: 338403 - DNA, 25 bp, Artificial
  Probe
atctttgcagtgaccgaaaatgtcg

SEQ ID NO: 338404 - DNA, 25 bp, Artificial
  Probe
aggctggcaggcattgtcttgccta

SEQ ID NO: 338405 - DNA, 25 bp, Artificial
  Probe
tcgttgatgcttacgggaaaatccg

SEQ ID NO: 338406 - DNA, 25 bp, Artificial
  Probe
aattggctggaggaatgatgcatcc

SEQ ID NO: 338407 - DNA, 25 bp, Artificial
  Probe
tctggggctgatgactgagaaacta

SEQ ID NO: 338408 - DNA, 25 bp, Artificial
  Probe
ggaaaatccgttctaaagtggagct

SEQ ID NO: 338409 - DNA, 25 bp, Artificial
  Probe
ggccgggacaaccactactctgctt

SEQ ID NO: 338410 - DNA, 25 bp, Artificial
  Probe
cattgtcttgcctaatgatgggcgc

SEQ ID NO: 338411 - DNA, 25 bp, Artificial
  Probe
tggaagtgcgtgatctccccgaaga

SEQ ID NO: 338412 - DNA, 25 bp, Artificial
  Probe
aggaatgatgcatcccatttgctgg

SEQ ID NO: 338413 - DNA, 25 bp, Artificial
  Probe
attacccatctctggggctgatgac

SEQ ID NO: 338414 - DNA, 25 bp, Artificial
  Probe
gcgctgccacattggccgggacaac

SEQ ID NO: 338415 - DNA, 25 bp, Artificial
  Probe
tgtcgctgtccttcaatgccacctg

SEQ ID NO: 338416 - DNA, 25 bp, Artificial
  Probe
aagtgcgtgatctccccgaagagct

SEQ ID NO: 338417 - DNA, 25 bp, Artificial
  Probe
accactgatgccaagacccatattg

SEQ ID NO: 338418 - DNA, 25 bp, Artificial
  Probe
cccgaagagctgtcgctgtccttca

SEQ ID NO: 338419 - DNA, 25 bp, Artificial
  Probe
agaacattaacttgatctttgcagt

SEQ ID NO: 338420 - DNA, 25 bp, Artificial
  Probe
tatggattacccatctctggggctg

SEQ ID NO: 338421 - DNA, 25 bp, Artificial
  Probe
actgatgccaagacccatattgccg

SEQ ID NO: 338422 - DNA, 25 bp, Artificial
  Probe
aatgatgggcgctgccacattggcc

SEQ ID NO: 338423 - DNA, 25 bp, Artificial
  Probe
actactatggattacccatctctgg

SEQ ID NO: 338424 - DNA, 25 bp, Artificial
  Probe
tcccggggaccacagtgggagtcct

SEQ ID NO: 338425 - DNA, 25 bp, Artificial
  Probe
acagtgagctcatcccggggaccac

SEQ ID NO: 338426 - DNA, 25 bp, Artificial
  Probe
cgaaaatgtcgtcagcctttaccag

SEQ ID NO: 338427 - DNA, 25 bp, Artificial
  Probe
tccccgaagagctgtcgctgtcctt

SEQ ID NO: 338428 - DNA, 25 bp, Artificial
  Probe
aagagctgtcgctgtccttcaatgc

SEQ ID NO: 338429 - DNA, 25 bp, Artificial
  Probe
gaccacagtgggagtcctgtctgat

SEQ ID NO: 338430 - DNA, 25 bp, Artificial
  Probe
tgcagtgaccgaaaatgtcgtcagc

SEQ ID NO: 338431 - DNA, 25 bp, Artificial
  Probe
gtgaccgaaaatgtcgtcagccttt

SEQ ID NO: 338432 - DNA, 25 bp, Artificial
  Probe
ctcatcccggggaccacagtgggag

SEQ ID NO: 338433 - DNA, 25 bp, Artificial
  Probe
atgactgagaaactatcccagaaga

SEQ ID NO: 338434 - DNA, 25 bp, Artificial
  Probe
gtttaccactgatgccaagacccat

SEQ ID NO: 338435 - DNA, 25 bp, Artificial
  Probe
ttaccagaattacagtgagctcatc

SEQ ID NO: 338436 - DNA, 25 bp, Artificial
  Probe
actgagaaactatcccagaagaaca

SEQ ID NO: 338437 - DNA, 25 bp, Artificial
  Probe
catctctggggctgatgactgagaa

SEQ ID NO: 338438 - DNA, 25 bp, Artificial
  Probe
cgttctaaagtggagctggaagtgc

SEQ ID NO: 338439 - DNA, 25 bp, Artificial
  Probe
ccatattgccgtggacggaaggctg

SEQ ID NO: 338440 - DNA, 25 bp, Artificial
  Probe
caagacccatattgccgtggacgga

SEQ ID NO: 338441 - DNA, 25 bp, Artificial
  Probe
ttgtctttcttgtccgtcctctggg

SEQ ID NO: 338442 - DNA, 25 bp, Artificial
  Probe
cttgctgctccttgtgtgtctgtgt

SEQ ID NO: 338443 - DNA, 25 bp, Artificial
  Probe
ttctcctggggtttcctgtcttcct

SEQ ID NO: 338444 - DNA, 25 bp, Artificial
  Probe
tctgctcttctgtcttctgctcgtg

SEQ ID NO: 338445 - DNA, 25 bp, Artificial
  Probe
tgtgtgtggttgtgccccctttgcc

SEQ ID NO: 338446 - DNA, 25 bp, Artificial
  Probe
ggtgtttgcttgtgcctcgtcggtt

SEQ ID NO: 338447 - DNA, 25 bp, Artificial
  Probe
tgtgttgtgcccttcctgccctgtt

SEQ ID NO: 338448 - DNA, 25 bp, Artificial
  Probe
tgcttgtgcctcgtcggtttctttg

SEQ ID NO: 338449 - DNA, 25 bp, Artificial
  Probe
tggtttcttctcgtctccttcctcg

SEQ ID NO: 338450 - DNA, 25 bp, Artificial
  Probe
gttgttctgcttctctgttctgccc

SEQ ID NO: 338451 - DNA, 25 bp, Artificial
  Probe
gctccttgtgtgtctgtgtggtttg

SEQ ID NO: 338452 - DNA, 25 bp, Artificial
  Probe
ctttgccttgtccttcctgctggct

SEQ ID NO: 338453 - DNA, 25 bp, Artificial
  Probe
tgttgtgcccttcctgccctgttgc

SEQ ID NO: 338454 - DNA, 25 bp, Artificial
  Probe
ccttggcgtgtgtctctgcggtgtt

SEQ ID NO: 338455 - DNA, 25 bp, Artificial
  Probe
ggtgtcgtgtgtgttgtgcccttcc

SEQ ID NO: 338456 - DNA, 25 bp, Artificial
  Probe
ttctgctcgtgctgggccttggttg

SEQ ID NO: 338457 - DNA, 25 bp, Artificial
  Probe
cctgtgctttgttgtggtgttctcg

SEQ ID NO: 338458 - DNA, 25 bp, Artificial
  Probe
ttgtccttcctgctggctgtggttg

SEQ ID NO: 338459 - DNA, 25 bp, Artificial
  Probe
ttgtccgtcctctgggtgcctgtgt

SEQ ID NO: 338460 - DNA, 25 bp, Artificial
  Probe
cgtcctttgctctggccttggcgtg

SEQ ID NO: 338461 - DNA, 25 bp, Artificial
  Probe
ccttgtgtgtctgtgtggtttgctc

SEQ ID NO: 338462 - DNA, 25 bp, Artificial
  Probe
ctgctgcgtccgtggccgttgcgtc

SEQ ID NO: 338463 - DNA, 25 bp, Artificial
  Probe
tggtttgctcgctgcttctcctggg

SEQ ID NO: 338464 - DNA, 25 bp, Artificial
  Probe
tgttctcgtgggttgtctgcttcgt

SEQ ID NO: 338465 - DNA, 25 bp, Artificial
  Probe
tgttgcttgctgctccttgtgtgtc

SEQ ID NO: 338466 - DNA, 25 bp, Artificial
  Probe
tgttctgctgcgtccgtggccgttg

SEQ ID NO: 338467 - DNA, 25 bp, Artificial
  Probe
tttgctctggccttggcgtgtgtct

SEQ ID NO: 338468 - DNA, 25 bp, Artificial
  Probe
gtgcctgtgtgtggttgtgccccct

SEQ ID NO: 338469 - DNA, 25 bp, Artificial
  Probe
ggctttctggtttcttctcgtctcc

SEQ ID NO: 338470 - DNA, 25 bp, Artificial
  Probe
tcctggttggtttggctctcctggc

SEQ ID NO: 338471 - DNA, 25 bp, Artificial
  Probe
tgggctgtgcctgtgctctgtgcct

SEQ ID NO: 338472 - DNA, 25 bp, Artificial
  Probe
ggtttcctgtcttcctgtcctgcct

SEQ ID NO: 338473 - DNA, 25 bp, Artificial
  Probe
ggttcttgggcgtcctttgctctgg

SEQ ID NO: 338474 - DNA, 25 bp, Artificial
  Probe
cttggcgtgtgtctctgcggtgttt

SEQ ID NO: 338475 - DNA, 25 bp, Artificial
  Probe
gcctgtgctctgtgcctggtgcctt

SEQ ID NO: 338476 - DNA, 25 bp, Artificial
  Probe
ttggttgggctgttctgctgcgtcc

SEQ ID NO: 338477 - DNA, 25 bp, Artificial
  Probe
ctgctggctgtggttggctgcttcc

SEQ ID NO: 338478 - DNA, 25 bp, Artificial
  Probe
ttgctctggccttggcgtgtgtctc

SEQ ID NO: 338479 - DNA, 25 bp, Artificial
  Probe
cctggttgctgtgctttgcttcttc

SEQ ID NO: 338480 - DNA, 25 bp, Artificial
  Probe
cgtctgtgggctgtgcctgtgctct

SEQ ID NO: 338481 - DNA, 25 bp, Artificial
  Probe
ctcctcctgtgctttgttgtggtgt

SEQ ID NO: 338482 - DNA, 25 bp, Artificial
  Probe
tgtgcctggttcttgggcgtccttt

SEQ ID NO: 338483 - DNA, 25 bp, Artificial
  Probe
gcttgtgcctcgtcggtttctttgg

SEQ ID NO: 338484 - DNA, 25 bp, Artificial
  Probe
tgcctcgtcggtttctttggggtct

SEQ ID NO: 338485 - DNA, 25 bp, Artificial
  Probe
cgctgcttctcctggggtttcctgt

SEQ ID NO: 338486 - DNA, 25 bp, Artificial
  Probe
gtgtctctgcggtgtttgcttgtgc

SEQ ID NO: 338487 - DNA, 25 bp, Artificial
  Probe
aagaggtctggcaagctggatgcat

SEQ ID NO: 338488 - DNA, 25 bp, Artificial
  Probe
cagggcttccccaacaggattgtct

SEQ ID NO: 338489 - DNA, 25 bp, Artificial
  Probe
aacaccacgcctaactttgtgcgct

SEQ ID NO: 338490 - DNA, 25 bp, Artificial
  Probe
tgcaatggtgtgttggaaggcatcc

SEQ ID NO: 338491 - DNA, 25 bp, Artificial
  Probe
ccaatctgtacaggattgggcagag

SEQ ID NO: 338492 - DNA, 25 bp, Artificial
  Probe
agttctggagcagctgcggtgcaat

SEQ ID NO: 338493 - DNA, 25 bp, Artificial
  Probe
tgccgtcagggcttccccaacagga

SEQ ID NO: 338494 - DNA, 25 bp, Artificial
  Probe
tcttccaagagttccggcaacgcta

SEQ ID NO: 338495 - DNA, 25 bp, Artificial
  Probe
atccccaaaggcttcatggatggaa

SEQ ID NO: 338496 - DNA, 25 bp, Artificial
  Probe
ggcatgttccgcaccgtgggccagc

SEQ ID NO: 338497 - DNA, 25 bp, Artificial
  Probe
cagagcaaaatcttctttcgtacgg

SEQ ID NO: 338498 - DNA, 25 bp, Artificial
  Probe
cgagatcctggcagcgaacgccatc

SEQ ID NO: 338499 - DNA, 25 bp, Artificial
  Probe
accaaaaagggcatgttccgcaccg

SEQ ID NO: 338500 - DNA, 25 bp, Artificial
  Probe
ttgaccccaatctgtacaggattgg

SEQ ID NO: 338501 - DNA, 25 bp, Artificial
  Probe
aagagttccggcaacgctacgagat

SEQ ID NO: 338502 - DNA, 25 bp, Artificial
  Probe
agcccttgaacttgaccccaatctg

SEQ ID NO: 338503 - DNA, 25 bp, Artificial
  Probe
aaactccgcaactggcaatggtgga

SEQ ID NO: 338504 - DNA, 25 bp, Artificial
  Probe
agaacgagacctgaagattactgat

SEQ ID NO: 338505 - DNA, 25 bp, Artificial
  Probe
ggcatccgcatctgccgtcagggct

SEQ ID NO: 338506 - DNA, 25 bp, Artificial
  Probe
gaggaactgcgctgcctaccttaaa

SEQ ID NO: 338507 - DNA, 25 bp, Artificial
  Probe
ccagtaaggtgatccagaggaactg

SEQ ID NO: 338508 - DNA, 25 bp, Artificial
  Probe
tacaaagagcagctggggaagctga

SEQ ID NO: 338509 - DNA, 25 bp, Artificial
  Probe
agcagctggggaagctgatgaccac

SEQ ID NO: 338510 - DNA, 25 bp, Artificial
  Probe
aaccatgaaaagaggtctggcaagc

SEQ ID NO: 338511 - DNA, 25 bp, Artificial
  Probe
aggcttcatggatggaaagcaagcc

SEQ ID NO: 338512 - DNA, 25 bp, Artificial
  Probe
agattactgatgtcatcatggcttt

SEQ ID NO: 338513 - DNA, 25 bp, Artificial
  Probe
gaacttgaccccaatctgtacagga

SEQ ID NO: 338514 - DNA, 25 bp, Artificial
  Probe
gtacgggagtcctggcccacctaga

SEQ ID NO: 338515 - DNA, 25 bp, Artificial
  Probe
atcttctttcgtacgggagtcctgg

SEQ ID NO: 338516 - DNA, 25 bp, Artificial
  Probe
acaccacgcctaactttgtgcgctg

SEQ ID NO: 338517 - DNA, 25 bp, Artificial
  Probe
gcagctggggaagctgatgaccaca

SEQ ID NO: 338518 - DNA, 25 bp, Artificial
  Probe
cccaaccatgaaaagaggtctggca

SEQ ID NO: 338519 - DNA, 25 bp, Artificial
  Probe
agacctgaagattactgatgtcatc

SEQ ID NO: 338520 - DNA, 25 bp, Artificial
  Probe
cttaaactccgcaactggcaatggt

SEQ ID NO: 338521 - DNA, 25 bp, Artificial
  Probe
gcccttgaacttgaccccaatctgt

SEQ ID NO: 338522 - DNA, 25 bp, Artificial
  Probe
gtgttggaaggcatccgcatctgcc

SEQ ID NO: 338523 - DNA, 25 bp, Artificial
  Probe
tgttccgcaccgtgggccagctcta

SEQ ID NO: 338524 - DNA, 25 bp, Artificial
  Probe
ggaaagcaagcctgcattctcatga

SEQ ID NO: 338525 - DNA, 25 bp, Artificial
  Probe
gcattctcatgatcaaagcccttga

SEQ ID NO: 338526 - DNA, 25 bp, Artificial
  Probe
ccacctagaggaagaacgagacctg

SEQ ID NO: 338527 - DNA, 25 bp, Artificial
  Probe
ttcgtacgggagtcctggcccacct

SEQ ID NO: 338528 - DNA, 25 bp, Artificial
  Probe
tgatcaaagcccttgaacttgaccc

SEQ ID NO: 338529 - DNA, 25 bp, Artificial
  Probe
tctgtacaggattgggcagagcaaa

SEQ ID NO: 338530 - DNA, 25 bp, Artificial
  Probe
tgcctaccttaaactccgcaactgg

SEQ ID NO: 338531 - DNA, 25 bp, Artificial
  Probe
gtggaggctcttcactaaagtaaag

SEQ ID NO: 338532 - DNA, 25 bp, Artificial
  Probe
caatggtgtgttggaaggcatccgc

SEQ ID NO: 338533 - DNA, 25 bp, Artificial
  Probe
gtgagcgtggtggtgctcttcatct

SEQ ID NO: 338534 - DNA, 25 bp, Artificial
  Probe
cttcccctcggtcaactgggacaag

SEQ ID NO: 338535 - DNA, 25 bp, Artificial
  Probe
cgctacgacttcacctcgtgcatgg

SEQ ID NO: 338536 - DNA, 25 bp, Artificial
  Probe
ttcctggtgctgaccctgcagctgt

SEQ ID NO: 338537 - DNA, 25 bp, Artificial
  Probe
tggtgggctcagacccatgcccctg

SEQ ID NO: 338538 - DNA, 25 bp, Artificial
  Probe
tccggaaaaagcatccctggaacct

SEQ ID NO: 338539 - DNA, 25 bp, Artificial
  Probe
agaatatgtgtttgcggccctgaat

SEQ ID NO: 338540 - DNA, 25 bp, Artificial
  Probe
aggaccctggctcacctcagcatgg

SEQ ID NO: 338541 - DNA, 25 bp, Artificial
  Probe
ccaaggggtgacagggctgcatttc

SEQ ID NO: 338542 - DNA, 25 bp, Artificial
  Probe
catgacattgccatctgtgcttccc

SEQ ID NO: 338543 - DNA, 25 bp, Artificial
  Probe
ggtcccaggggagaaggatcatacc

SEQ ID NO: 338544 - DNA, 25 bp, Artificial
  Probe
ggccattttcacttttgtcggggag

SEQ ID NO: 338545 - DNA, 25 bp, Artificial
  Probe
tatgacaaccaggacttcccctcgg

SEQ ID NO: 338546 - DNA, 25 bp, Artificial
  Probe
accctgccttctgaggggcttgcag

SEQ ID NO: 338547 - DNA, 25 bp, Artificial
  Probe
gcatggtgggctcagacccatgccc

SEQ ID NO: 338548 - DNA, 25 bp, Artificial
  Probe
ggagaggctctcttgtgtgctgcca

SEQ ID NO: 338549 - DNA, 25 bp, Artificial
  Probe
tggtgctcttcatcttcgccatact

SEQ ID NO: 338550 - DNA, 25 bp, Artificial
  Probe
aggaataggacaagccccagctcag

SEQ ID NO: 338551 - DNA, 25 bp, Artificial
  Probe
tacatggtgggcatgatagccagtt

SEQ ID NO: 338552 - DNA, 25 bp, Artificial
  Probe
tgtacgcctcgctgggcgctctgct

SEQ ID NO: 338553 - DNA, 25 bp, Artificial
  Probe
agccagtttttacaacacggaggcg

SEQ ID NO: 338554 - DNA, 25 bp, Artificial
  Probe
ctgaatctgtacacggacatcatca

SEQ ID NO: 338555 - DNA, 25 bp, Artificial
  Probe
gtcctcagctgttgcggggacttcc

SEQ ID NO: 338556 - DNA, 25 bp, Artificial
  Probe
ccatcccggggtctgggatcaacac

SEQ ID NO: 338557 - DNA, 25 bp, Artificial
  Probe
gctgcatttctgtgccaccttctgt

SEQ ID NO: 338558 - DNA, 25 bp, Artificial
  Probe
tcattgttgcatgagccctgtctgc

SEQ ID NO: 338559 - DNA, 25 bp, Artificial
  Probe
acattctcaccatcattggccgtag

SEQ ID NO: 338560 - DNA, 25 bp, Artificial
  Probe
atgacaaccaggacttcccctcggt

SEQ ID NO: 338561 - DNA, 25 bp, Artificial
  Probe
ccctgccttctgaggggcttgcagg

SEQ ID NO: 338562 - DNA, 25 bp, Artificial
  Probe
tactctgcatcttcatccggaaccg

SEQ ID NO: 338563 - DNA, 25 bp, Artificial
  Probe
tgcaaatacttaacgttcggaccct

SEQ ID NO: 338564 - DNA, 25 bp, Artificial
  Probe
ctctcgccctcgtgtatgtacactg

SEQ ID NO: 338565 - DNA, 25 bp, Artificial
  Probe
tcatcatggccgtgggcatcaccac

SEQ ID NO: 338566 - DNA, 25 bp, Artificial
  Probe
tcattgtcctcagctgttgcgggga

SEQ ID NO: 338567 - DNA, 25 bp, Artificial
  Probe
tggtcatcttctccatgcagacccg

SEQ ID NO: 338568 - DNA, 25 bp, Artificial
  Probe
agggcctccatcctactatgacaac

SEQ ID NO: 338569 - DNA, 25 bp, Artificial
  Probe
ggacctactatgtctcctacgccat

SEQ ID NO: 338570 - DNA, 25 bp, Artificial
  Probe
aagccccagctcaggtggcatggtg

SEQ ID NO: 338571 - DNA, 25 bp, Artificial
  Probe
ctcgttcttgttctgggccccgaga

SEQ ID NO: 338572 - DNA, 25 bp, Artificial
  Probe
gggacttccggaaaaagcatccctg

SEQ ID NO: 338573 - DNA, 25 bp, Artificial
  Probe
tgggcgctctgctcttcacctgctt

SEQ ID NO: 338574 - DNA, 25 bp, Artificial
  Probe
tgagggtgcacgtcttccctcctgt

SEQ ID NO: 338575 - DNA, 25 bp, Artificial
  Probe
tcacctcgtgcatgggcgtgctcct

SEQ ID NO: 338576 - DNA, 25 bp, Artificial
  Probe
aggaggctacccaccagggccatta

SEQ ID NO: 338577 - DNA, 25 bp, Artificial
  Probe
tgaagggctttgtccgggccaatgt

SEQ ID NO: 338578 - DNA, 25 bp, Artificial
  Probe
atgacattgccatctgtgcttcccc

SEQ ID NO: 338579 - DNA, 25 bp, Artificial
  Probe
ctggaaagccaggttttcttggtga

SEQ ID NO: 338580 - DNA, 25 bp, Artificial
  Probe
cattggaccccctgggattccaggc

SEQ ID NO: 338581 - DNA, 25 bp, Artificial
  Probe
cccaggtatcccaggaattgtagga

SEQ ID NO: 338582 - DNA, 25 bp, Artificial
  Probe
tggagttgtaggaccacagggtcca

SEQ ID NO: 338583 - DNA, 25 bp, Artificial
  Probe
agcctggtgcccttggtccccaagg

SEQ ID NO: 338584 - DNA, 25 bp, Artificial
  Probe
tcctggtgttccaggcttgcttgga

SEQ ID NO: 338585 - DNA, 25 bp, Artificial
  Probe
ttggtgaagtaggtccccctggcat

SEQ ID NO: 338586 - DNA, 25 bp, Artificial
  Probe
gagctattggtttccctggacccaa

SEQ ID NO: 338587 - DNA, 25 bp, Artificial
  Probe
atcccaggaattgtaggacccagtg

SEQ ID NO: 338588 - DNA, 25 bp, Artificial
  Probe
cctataggacccaagggagaaggtg

SEQ ID NO: 338589 - DNA, 25 bp, Artificial
  Probe
ggaaacccggagtagcaggacttca

SEQ ID NO: 338590 - DNA, 25 bp, Artificial
  Probe
ctggacttcctggtgttccaggctt

SEQ ID NO: 338591 - DNA, 25 bp, Artificial
  Probe
ggtgttccaggcttgcttggaccca

SEQ ID NO: 338592 - DNA, 25 bp, Artificial
  Probe
aggcttgcttggacccaaaggagaa

SEQ ID NO: 338593 - DNA, 25 bp, Artificial
  Probe
taccaggggatcaaggtctacaggg

SEQ ID NO: 338594 - DNA, 25 bp, Artificial
  Probe
attgtaggacccagtggccccattg

SEQ ID NO: 338595 - DNA, 25 bp, Artificial
  Probe
gcatgaggggtttccccggtcctat

SEQ ID NO: 338596 - DNA, 25 bp, Artificial
  Probe
tggcatgaggggtttccccggtcct

SEQ ID NO: 338597 - DNA, 25 bp, Artificial
  Probe
gcataccaggggatcaaggtctaca

SEQ ID NO: 338598 - DNA, 25 bp, Artificial
  Probe
tccaggagctattggtttccctgga

SEQ ID NO: 338599 - DNA, 25 bp, Artificial
  Probe
ggcctccagggcttccctggaaagc

SEQ ID NO: 338600 - DNA, 25 bp, Artificial
  Probe
ccaggcttgcttggacccaaaggag

SEQ ID NO: 338601 - DNA, 25 bp, Artificial
  Probe
ttgcttggacccaaaggagaacctg

SEQ ID NO: 338602 - DNA, 25 bp, Artificial
  Probe
acccaaaggagaacctggcatacca

SEQ ID NO: 338603 - DNA, 25 bp, Artificial
  Probe
cagggcttccctggaaagccaggtt

SEQ ID NO: 338604 - DNA, 25 bp, Artificial
  Probe
caaaggattgcctggacttcctggt

SEQ ID NO: 338605 - DNA, 25 bp, Artificial
  Probe
ggagaacctggcataccaggggatc

SEQ ID NO: 338606 - DNA, 25 bp, Artificial
  Probe
ttccctggacccaaaggagaaggtg

SEQ ID NO: 338607 - DNA, 25 bp, Artificial
  Probe
cagggtccaccaggtcccaagggag

SEQ ID NO: 338608 - DNA, 25 bp, Artificial
  Probe
gccctccaggagctattggtttccc

SEQ ID NO: 338609 - DNA, 25 bp, Artificial
  Probe
ttgtaggaccacagggtccaccagg

SEQ ID NO: 338610 - DNA, 25 bp, Artificial
  Probe
ggagtagcaggacttcatggccccc

SEQ ID NO: 338611 - DNA, 25 bp, Artificial
  Probe
cctggaaagccaggttttcttggtg

SEQ ID NO: 338612 - DNA, 25 bp, Artificial
  Probe
tgtaggacccagtggccccattgga

SEQ ID NO: 338613 - DNA, 25 bp, Artificial
  Probe
tggtgaagtaggtccccctggcatg

SEQ ID NO: 338614 - DNA, 25 bp, Artificial
  Probe
aacctggcataccaggggatcaagg

SEQ ID NO: 338615 - DNA, 25 bp, Artificial
  Probe
aggattgcctggacttcctggtgtt

SEQ ID NO: 338616 - DNA, 25 bp, Artificial
  Probe
gcttccctggaaagccaggttttct

SEQ ID NO: 338617 - DNA, 25 bp, Artificial
  Probe
ttgcctggacttcctggtgttccag

SEQ ID NO: 338618 - DNA, 25 bp, Artificial
  Probe
cacagggtccaccaggtcccaaggg

SEQ ID NO: 338619 - DNA, 25 bp, Artificial
  Probe
gtcacaaaggattgcctggacttcc

SEQ ID NO: 338620 - DNA, 25 bp, Artificial
  Probe
tccctggacccaaaggagaaggtgg

SEQ ID NO: 338621 - DNA, 25 bp, Artificial
  Probe
cccagggaagcctggtgcccttggt

SEQ ID NO: 338622 - DNA, 25 bp, Artificial
  Probe
tggtcacaaaggattgcctggactt

SEQ ID NO: 338623 - DNA, 25 bp, Artificial
  Probe
cagggaagcctggtgcccttggtcc

SEQ ID NO: 338624 - DNA, 25 bp, Artificial
  Probe
tttcttggtgaagtaggtccccctg

SEQ ID NO: 338625 - DNA, 25 bp, Artificial
  Probe
tttgttcaagtcagctgtccccaca

SEQ ID NO: 338626 - DNA, 25 bp, Artificial
  Probe
tttatagaactgtgaccaaagtttc

SEQ ID NO: 338627 - DNA, 25 bp, Artificial
  Probe
taatcagaaataaccctttaggaag

SEQ ID NO: 338628 - DNA, 25 bp, Artificial
  Probe
tagggcctctgtcctggtctgaccc

SEQ ID NO: 338629 - DNA, 25 bp, Artificial
  Probe
agctgggaatgttcccgctatggtg

SEQ ID NO: 338630 - DNA, 25 bp, Artificial
  Probe
cacctgtatgcaagatagtagtttg

SEQ ID NO: 338631 - DNA, 25 bp, Artificial
  Probe
ccaggatgtcctgaaatgtgtgtct

SEQ ID NO: 338632 - DNA, 25 bp, Artificial
  Probe
agattcccaacttggaccttccaag

SEQ ID NO: 338633 - DNA, 25 bp, Artificial
  Probe
tgtttttcatatacactcgaggtgt

SEQ ID NO: 338634 - DNA, 25 bp, Artificial
  Probe
caaatcacacctgtatgcaagatag

SEQ ID NO: 338635 - DNA, 25 bp, Artificial
  Probe
ggatcttcttcgagactttctactt

SEQ ID NO: 338636 - DNA, 25 bp, Artificial
  Probe
gtgacctcaaatcacacctgtatgc

SEQ ID NO: 338637 - DNA, 25 bp, Artificial
  Probe
tccataagtttgtcccccagtagta

SEQ ID NO: 338638 - DNA, 25 bp, Artificial
  Probe
gaccttccaagaagaacactactgc

SEQ ID NO: 338639 - DNA, 25 bp, Artificial
  Probe
gaatgttcccgctatggtgaccgga

SEQ ID NO: 338640 - DNA, 25 bp, Artificial
  Probe
cctttacagatttatggactgggaa

SEQ ID NO: 338641 - DNA, 25 bp, Artificial
  Probe
gagatgttcactttctagttcttgt

SEQ ID NO: 338642 - DNA, 25 bp, Artificial
  Probe
atgaattgtccataagtttgtcccc

SEQ ID NO: 338643 - DNA, 25 bp, Artificial
  Probe
tggtctgaccccacaactttggtgc

SEQ ID NO: 338644 - DNA, 25 bp, Artificial
  Probe
gtcactgatggcttgtggattcaag

SEQ ID NO: 338645 - DNA, 25 bp, Artificial
  Probe
aatgctgtaggtacagcttctcatc

SEQ ID NO: 338646 - DNA, 25 bp, Artificial
  Probe
atagaggtgacctcaaatcacacct

SEQ ID NO: 338647 - DNA, 25 bp, Artificial
  Probe
tgccttattttgataactaggtaac

SEQ ID NO: 338648 - DNA, 25 bp, Artificial
  Probe
ggctcctgtattaacacagtaatac

SEQ ID NO: 338649 - DNA, 25 bp, Artificial
  Probe
ggattttgttcaagtcagctgtccc

SEQ ID NO: 338650 - DNA, 25 bp, Artificial
  Probe
tgaagagctcatgctcttatgttag

SEQ ID NO: 338651 - DNA, 25 bp, Artificial
  Probe
ctgcccacattttgcacagtgcctt

SEQ ID NO: 338652 - DNA, 25 bp, Artificial
  Probe
aactgcgtgttgtcgcacttcccat

SEQ ID NO: 338653 - DNA, 25 bp, Artificial
  Probe
gtgaccaaagtttctattttgccaa

SEQ ID NO: 338654 - DNA, 25 bp, Artificial
  Probe
tgtcctgaaatgtgtgtctgtgtgc

SEQ ID NO: 338655 - DNA, 25 bp, Artificial
  Probe
tgtcctggtctgaccccacaacttt

SEQ ID NO: 338656 - DNA, 25 bp, Artificial
  Probe
gtaatacctcgcttctctgtgcatt

SEQ ID NO: 338657 - DNA, 25 bp, Artificial
  Probe
cttcgagactttctacttagaactg

SEQ ID NO: 338658 - DNA, 25 bp, Artificial
  Probe
gccttattttgataactaggtaact

SEQ ID NO: 338659 - DNA, 25 bp, Artificial
  Probe
agtgttgaagacatgccttgccaca

SEQ ID NO: 338660 - DNA, 25 bp, Artificial
  Probe
ttagccaaaatgtcataggatctgg

SEQ ID NO: 338661 - DNA, 25 bp, Artificial
  Probe
ggtacagcttctcatcctgatgtgg

SEQ ID NO: 338662 - DNA, 25 bp, Artificial
  Probe
cactgatggcttgtggattcaagga

SEQ ID NO: 338663 - DNA, 25 bp, Artificial
  Probe
atacggagatgttcactttctagtt

SEQ ID NO: 338664 - DNA, 25 bp, Artificial
  Probe
atcttgacagtccttcctgtggaat

SEQ ID NO: 338665 - DNA, 25 bp, Artificial
  Probe
cctgtggaatgctgtaggtacagct

SEQ ID NO: 338666 - DNA, 25 bp, Artificial
  Probe
aatgtgtgtctgtgtgcaaagcagc

SEQ ID NO: 338667 - DNA, 25 bp, Artificial
  Probe
acactcgaggtgtgacctgccctgc

SEQ ID NO: 338668 - DNA, 25 bp, Artificial
  Probe
tgtgcatttagctgggaatgttccc

SEQ ID NO: 338669 - DNA, 25 bp, Artificial
  Probe
catgctcttatgttagatacggaga

SEQ ID NO: 338670 - DNA, 25 bp, Artificial
  Probe
tggtgctgtctcctcgtactctgtc

SEQ ID NO: 338671 - DNA, 25 bp, Artificial
  Probe
gcagccaagacagaaacgcaaatga

SEQ ID NO: 338672 - DNA, 25 bp, Artificial
  Probe
tcaaaggcagccaagacagaaacgc

SEQ ID NO: 338673 - DNA, 25 bp, Artificial
  Probe
aaatgatctgtctgagcccaaggga

SEQ ID NO: 338674 - DNA, 25 bp, Artificial
  Probe
cttctcagaggtcaaaggcagccaa

SEQ ID NO: 338675 - DNA, 25 bp, Artificial
  Probe
tgacgctgaaattttgctaatcttc

SEQ ID NO: 338676 - DNA, 25 bp, Artificial
  Probe
attttgctaatcttctcagaggtca

SEQ ID NO: 338677 - DNA, 25 bp, Artificial
  Probe
tgtctgagcccaagggaaggaaaat

SEQ ID NO: 338678 - DNA, 25 bp, Artificial
  Probe
ttgcttacggaaaacacagtcttga

SEQ ID NO: 338679 - DNA, 25 bp, Artificial
  Probe
tctcagaggtcaaaggcagccaaga

SEQ ID NO: 338680 - DNA, 25 bp, Artificial
  Probe
gcaaatgatctgtctgagcccaagg

SEQ ID NO: 338681 - DNA, 25 bp, Artificial
  Probe
caaatgatctgtctgagcccaaggg

SEQ ID NO: 338682 - DNA, 25 bp, Artificial
  Probe
aaattttgctaatcttctcagaggt

SEQ ID NO: 338683 - DNA, 25 bp, Artificial
  Probe
ttgacgctgaaattttgctaatctt

SEQ ID NO: 338684 - DNA, 25 bp, Artificial
  Probe
cagtcttgacgctgaaattttgcta

SEQ ID NO: 338685 - DNA, 25 bp, Artificial
  Probe
aacacagtcttgacgctgaaatttt

SEQ ID NO: 338686 - DNA, 25 bp, Artificial
  Probe
acggaaaacacagtcttgacgctga

SEQ ID NO: 338687 - DNA, 25 bp, Artificial
  Probe
tcttctcagaggtcaaaggcagcca

SEQ ID NO: 338688 - DNA, 25 bp, Artificial
  Probe
atgatctgtctgagcccaagggaag

SEQ ID NO: 338689 - DNA, 25 bp, Artificial
  Probe
atcttctcagaggtcaaaggcagcc

SEQ ID NO: 338690 - DNA, 25 bp, Artificial
  Probe
tttgctaatcttctcagaggtcaaa

SEQ ID NO: 338691 - DNA, 25 bp, Artificial
  Probe
agtcttgacgctgaaattttgctaa

SEQ ID NO: 338692 - DNA, 25 bp, Artificial
  Probe
atttatttgcttacggaaaacacag

SEQ ID NO: 338693 - DNA, 25 bp, Artificial
  Probe
aatgatctgtctgagcccaagggaa

SEQ ID NO: 338694 - DNA, 25 bp, Artificial
  Probe
tttgcttacggaaaacacagtcttg

SEQ ID NO: 338695 - DNA, 25 bp, Artificial
  Probe
cttgacgctgaaattttgctaatct

SEQ ID NO: 338696 - DNA, 25 bp, Artificial
  Probe
cttacggaaaacacagtcttgacgc

SEQ ID NO: 338697 - DNA, 25 bp, Artificial
  Probe
cagccaagacagaaacgcaaatgat

SEQ ID NO: 338698 - DNA, 25 bp, Artificial
  Probe
aggcagccaagacagaaacgcaaat

SEQ ID NO: 338699 - DNA, 25 bp, Artificial
  Probe
atttgcttacggaaaacacagtctt

SEQ ID NO: 338700 - DNA, 25 bp, Artificial
  Probe
ctgtctgagcccaagggaaggaaaa

SEQ ID NO: 338701 - DNA, 25 bp, Artificial
  Probe
ttgctaatcttctcagaggtcaaag

SEQ ID NO: 338702 - DNA, 25 bp, Artificial
  Probe
gaaacgcaaatgatctgtctgagcc

SEQ ID NO: 338703 - DNA, 25 bp, Artificial
  Probe
tacggaaaacacagtcttgacgctg

SEQ ID NO: 338704 - DNA, 25 bp, Artificial
  Probe
ttacggaaaacacagtcttgacgct

SEQ ID NO: 338705 - DNA, 25 bp, Artificial
  Probe
agccaagacagaaacgcaaatgatc

SEQ ID NO: 338706 - DNA, 25 bp, Artificial
  Probe
aaacgcaaatgatctgtctgagccc

SEQ ID NO: 338707 - DNA, 25 bp, Artificial
  Probe
gtcttgacgctgaaattttgctaat

SEQ ID NO: 338708 - DNA, 25 bp, Artificial
  Probe
aattttgctaatcttctcagaggtc

SEQ ID NO: 338709 - DNA, 25 bp, Artificial
  Probe
gaggtcaaaggcagccaagacagaa

SEQ ID NO: 338710 - DNA, 25 bp, Artificial
  Probe
ttctcagaggtcaaaggcagccaag

SEQ ID NO: 338711 - DNA, 25 bp, Artificial
  Probe
caaaggcagccaagacagaaacgca

SEQ ID NO: 338712 - DNA, 25 bp, Artificial
  Probe
gaaattttgctaatcttctcagagg

SEQ ID NO: 338713 - DNA, 25 bp, Artificial
  Probe
ggaaaacacagtcttgacgctgaaa

SEQ ID NO: 338714 - DNA, 25 bp, Artificial
  Probe
tcttgacgctgaaattttgctaatc

SEQ ID NO: 338715 - DNA, 25 bp, Artificial
  Probe
acgcaaatgatctgtctgagcccaa

SEQ ID NO: 338716 - DNA, 25 bp, Artificial
  Probe
aacgcaaatgatctgtctgagccca

SEQ ID NO: 338717 - DNA, 25 bp, Artificial
  Probe
ccctggggacagctgagactccagg

SEQ ID NO: 338718 - DNA, 25 bp, Artificial
  Probe
ggaggatctttgtcagctagtgtct

SEQ ID NO: 338719 - DNA, 25 bp, Artificial
  Probe
taacccctggggacagctgagactc

SEQ ID NO: 338720 - DNA, 25 bp, Artificial
  Probe
agcccctctgctatctatatcctgg

SEQ ID NO: 338721 - DNA, 25 bp, Artificial
  Probe
agctaagcatcttgggaatgcatga

SEQ ID NO: 338722 - DNA, 25 bp, Artificial
  Probe
atagagcctgtcaaggggtcctgcc

SEQ ID NO: 338723 - DNA, 25 bp, Artificial
  Probe
ggaaggacagccatggctaagtgcc

SEQ ID NO: 338724 - DNA, 25 bp, Artificial
  Probe
cccagaggccagacagacttgggag

SEQ ID NO: 338725 - DNA, 25 bp, Artificial
  Probe
ctatatcctggcttctaatcaggcc

SEQ ID NO: 338726 - DNA, 25 bp, Artificial
  Probe
cccagtaacccctggggacagctga

SEQ ID NO: 338727 - DNA, 25 bp, Artificial
  Probe
tcgcattcccagaggccagacagac

SEQ ID NO: 338728 - DNA, 25 bp, Artificial
  Probe
tcatgcttgatgtgggacccctggg

SEQ ID NO: 338729 - DNA, 25 bp, Artificial
  Probe
cctgcttctcttccatagagcctgt

SEQ ID NO: 338730 - DNA, 25 bp, Artificial
  Probe
tgcatgaatggttcccacatctctt

SEQ ID NO: 338731 - DNA, 25 bp, Artificial
  Probe
cttcggaaaggcagagctcttgagt

SEQ ID NO: 338732 - DNA, 25 bp, Artificial
  Probe
tggcaggagcccaggctgcccagca

SEQ ID NO: 338733 - DNA, 25 bp, Artificial
  Probe
gtgtcagagcacaggtcagggcctc

SEQ ID NO: 338734 - DNA, 25 bp, Artificial
  Probe
ctctcagggatagaggaaggacagc

SEQ ID NO: 338735 - DNA, 25 bp, Artificial
  Probe
aatgcatgaatggttcccacatctc

SEQ ID NO: 338736 - DNA, 25 bp, Artificial
  Probe
ctggcatttgtcagtgaggcagtta

SEQ ID NO: 338737 - DNA, 25 bp, Artificial
  Probe
caggtcagggcctcatgcttgatgt

SEQ ID NO: 338738 - DNA, 25 bp, Artificial
  Probe
gctagtgtctccttttggacttccc

SEQ ID NO: 338739 - DNA, 25 bp, Artificial
  Probe
gcctggcatttgtcagtgaggcagt

SEQ ID NO: 338740 - DNA, 25 bp, Artificial
  Probe
taagtgcccaccagggcgaagcata

SEQ ID NO: 338741 - DNA, 25 bp, Artificial
  Probe
agacctatcggctaagactcgcatt

SEQ ID NO: 338742 - DNA, 25 bp, Artificial
  Probe
actgcctggagcttggcaggagccc

SEQ ID NO: 338743 - DNA, 25 bp, Artificial
  Probe
tcagtgaggcagttagggactgcct

SEQ ID NO: 338744 - DNA, 25 bp, Artificial
  Probe
agagcacaggtcagggcctcatgct

SEQ ID NO: 338745 - DNA, 25 bp, Artificial
  Probe
gacagccatggctaagtgcccacca

SEQ ID NO: 338746 - DNA, 25 bp, Artificial
  Probe
gacagatgcaagacctatcggctaa

SEQ ID NO: 338747 - DNA, 25 bp, Artificial
  Probe
acctaatttcagctaagcatcttgg

SEQ ID NO: 338748 - DNA, 25 bp, Artificial
  Probe
tggcttctaatcaggcccctgcttc

SEQ ID NO: 338749 - DNA, 25 bp, Artificial
  Probe
tcttgggaatgcatgaatggttccc

SEQ ID NO: 338750 - DNA, 25 bp, Artificial
  Probe
cccaccagggcgaagcataatctag

SEQ ID NO: 338751 - DNA, 25 bp, Artificial
  Probe
atgtgggacccctgggcctggcatt

SEQ ID NO: 338752 - DNA, 25 bp, Artificial
  Probe
atgcaagacctatcggctaagactc

SEQ ID NO: 338753 - DNA, 25 bp, Artificial
  Probe
cccccagtgtcttcggaaaggcaga

SEQ ID NO: 338754 - DNA, 25 bp, Artificial
  Probe
gacccctgggcctggcatttgtcag

SEQ ID NO: 338755 - DNA, 25 bp, Artificial
  Probe
ctgcctggagcttggcaggagccca

SEQ ID NO: 338756 - DNA, 25 bp, Artificial
  Probe
tcttgagtctgtgtattaaacctaa

SEQ ID NO: 338757 - DNA, 25 bp, Artificial
  Probe
ccccattctctgcatgaacagaggc

SEQ ID NO: 338758 - DNA, 25 bp, Artificial
  Probe
caccagggcgaagcataatctaggg

SEQ ID NO: 338759 - DNA, 25 bp, Artificial
  Probe
ggctaagtgcccaccagggcgaagc

SEQ ID NO: 338760 - DNA, 25 bp, Artificial
  Probe
catcttgggaatgcatgaatggttc

SEQ ID NO: 338761 - DNA, 25 bp, Artificial
  Probe
acagctgagactccagggtcacctc

SEQ ID NO: 338762 - DNA, 25 bp, Artificial
  Probe
gctctctcagggatagaggaaggac

SEQ ID NO: 338763 - DNA, 25 bp, Artificial
  Probe
gtggcttctgccagagaggtcaacg

SEQ ID NO: 338764 - DNA, 25 bp, Artificial
  Probe
gcctctgtggcttctgccagagagg

SEQ ID NO: 338765 - DNA, 25 bp, Artificial
  Probe
ggggctttggcctcagccaaactgc

SEQ ID NO: 338766 - DNA, 25 bp, Artificial
  Probe
ggacactcgaagtccactggggaga

SEQ ID NO: 338767 - DNA, 25 bp, Artificial
  Probe
actcgaagtccactggggagaagga

SEQ ID NO: 338768 - DNA, 25 bp, Artificial
  Probe
cgcagcaaccgcagaggtcccaggg

SEQ ID NO: 338769 - DNA, 25 bp, Artificial
  Probe
caggcagtaccagtgtctccggcct

SEQ ID NO: 338770 - DNA, 25 bp, Artificial
  Probe
aggcagtaccagtgtctccggcctc

SEQ ID NO: 338771 - DNA, 25 bp, Artificial
  Probe
tgcagcagccacagggctcccgggt

SEQ ID NO: 338772 - DNA, 25 bp, Artificial
  Probe
ctctgtggcttctgccagagaggtc

SEQ ID NO: 338773 - DNA, 25 bp, Artificial
  Probe
agaggtcaacggacactcgaagtcc

SEQ ID NO: 338774 - DNA, 25 bp, Artificial
  Probe
ggcctctgtggcttctgccagagag

SEQ ID NO: 338775 - DNA, 25 bp, Artificial
  Probe
ttgccagccagttgggctgcccttc

SEQ ID NO: 338776 - DNA, 25 bp, Artificial
  Probe
ccgggccttgccagccagttgggct

SEQ ID NO: 338777 - DNA, 25 bp, Artificial
  Probe
tctgccagagaggtcaacggacact

SEQ ID NO: 338778 - DNA, 25 bp, Artificial
  Probe
cctctgtggcttctgccagagaggt

SEQ ID NO: 338779 - DNA, 25 bp, Artificial
  Probe
gacactcgaagtccactggggagaa

SEQ ID NO: 338780 - DNA, 25 bp, Artificial
  Probe
acggacactcgaagtccactgggga

SEQ ID NO: 338781 - DNA, 25 bp, Artificial
  Probe
agcaaccgcagaggtcccagggcca

SEQ ID NO: 338782 - DNA, 25 bp, Artificial
  Probe
gcagcaaccgcagaggtcccagggc

SEQ ID NO: 338783 - DNA, 25 bp, Artificial
  Probe
cactcgaagtccactggggagaagg

SEQ ID NO: 338784 - DNA, 25 bp, Artificial
  Probe
tggcttctgccagagaggtcaacgg

SEQ ID NO: 338785 - DNA, 25 bp, Artificial
  Probe
acactcgaagtccactggggagaag

SEQ ID NO: 338786 - DNA, 25 bp, Artificial
  Probe
aacggacactcgaagtccactgggg

SEQ ID NO: 338787 - DNA, 25 bp, Artificial
  Probe
agtaccagtgtctccggcctcagct

SEQ ID NO: 338788 - DNA, 25 bp, Artificial
  Probe
cggacactcgaagtccactggggag

SEQ ID NO: 338789 - DNA, 25 bp, Artificial
  Probe
gcaaccgcagaggtcccagggccaa

SEQ ID NO: 338790 - DNA, 25 bp, Artificial
  Probe
gaggtcaacggacactcgaagtcca

SEQ ID NO: 338791 - DNA, 25 bp, Artificial
  Probe
ctgccagagaggtcaacggacactc

SEQ ID NO: 338792 - DNA, 25 bp, Artificial
  Probe
caacggacactcgaagtccactggg

SEQ ID NO: 338793 - DNA, 25 bp, Artificial
  Probe
tcaacggacactcgaagtccactgg

SEQ ID NO: 338794 - DNA, 25 bp, Artificial
  Probe
tgccagagaggtcaacggacactcg

SEQ ID NO: 338795 - DNA, 25 bp, Artificial
  Probe
gcttctgccagagaggtcaacggac

SEQ ID NO: 338796 - DNA, 25 bp, Artificial
  Probe
gcagtaccagtgtctccggcctcag

SEQ ID NO: 338797 - DNA, 25 bp, Artificial
  Probe
cttgccagccagttgggctgccctt

SEQ ID NO: 338798 - DNA, 25 bp, Artificial
  Probe
ggcttctgccagagaggtcaacgga

SEQ ID NO: 338799 - DNA, 25 bp, Artificial
  Probe
aggtcaacggacactcgaagtccac

SEQ ID NO: 338800 - DNA, 25 bp, Artificial
  Probe
ttctgccagagaggtcaacggacac

SEQ ID NO: 338801 - DNA, 25 bp, Artificial
  Probe
caaccgcagaggtcccagggccaag

SEQ ID NO: 338802 - DNA, 25 bp, Artificial
  Probe
gaagatactgggacccgggccttgc

SEQ ID NO: 338803 - DNA, 25 bp, Artificial
  Probe
tgaaccccaggcagtaccagtgtct

SEQ ID NO: 338804 - DNA, 25 bp, Artificial
  Probe
ggtcaacggacactcgaagtccact

SEQ ID NO: 338805 - DNA, 25 bp, Artificial
  Probe
cttctgccagagaggtcaacggaca

SEQ ID NO: 338806 - DNA, 25 bp, Artificial
  Probe
agtgtgaaccccaggcagtaccagt

SEQ ID NO: 338807 - DNA, 25 bp, Artificial
  Probe
ggcagtaccagtgtctccggcctca

SEQ ID NO: 338808 - DNA, 25 bp, Artificial
  Probe
gaaccccaggcagtaccagtgtctc

SEQ ID NO: 338809 - DNA, 25 bp, Artificial
  Probe
cgagtaggccctgctggcgaccctg

SEQ ID NO: 338810 - DNA, 25 bp, Artificial
  Probe
tcctggagaacttggccgagtaggc

SEQ ID NO: 338811 - DNA, 25 bp, Artificial
  Probe
ccctcctggagttccgggcatagat

SEQ ID NO: 338812 - DNA, 25 bp, Artificial
  Probe
tgattgagacccattgtgccccaat

SEQ ID NO: 338813 - DNA, 25 bp, Artificial
  Probe
acttggccgagtaggccctgctggc

SEQ ID NO: 338814 - DNA, 25 bp, Artificial
  Probe
atggtattgatggtgaccgaggtcc

SEQ ID NO: 338815 - DNA, 25 bp, Artificial
  Probe
acaattggatttcatgattgagacc

SEQ ID NO: 338816 - DNA, 25 bp, Artificial
  Probe
gccagaccaccgatgagagaggtcc

SEQ ID NO: 338817 - DNA, 25 bp, Artificial
  Probe
ctccaggagctgatggattaacagg

SEQ ID NO: 338818 - DNA, 25 bp, Artificial
  Probe
agaacttggccgagtaggccctgct

SEQ ID NO: 338819 - DNA, 25 bp, Artificial
  Probe
ctgagaccccggagagagacgtgcc

SEQ ID NO: 338820 - DNA, 25 bp, Artificial
  Probe
tcgtggatttccaggccgtggcatt

SEQ ID NO: 338821 - DNA, 25 bp, Artificial
  Probe
tgattcattgtgaccccctgagacc

SEQ ID NO: 338822 - DNA, 25 bp, Artificial
  Probe
accagccagaccaccgatgagagag

SEQ ID NO: 338823 - DNA, 25 bp, Artificial
  Probe
tgaccccctgagaccccggagagag

SEQ ID NO: 338824 - DNA, 25 bp, Artificial
  Probe
attggatttcatgattgagacccat

SEQ ID NO: 338825 - DNA, 25 bp, Artificial
  Probe
ccccggagagagacgtgccatgaac

SEQ ID NO: 338826 - DNA, 25 bp, Artificial
  Probe
ggacctagtggaacaattggatttc

SEQ ID NO: 338827 - DNA, 25 bp, Artificial
  Probe
ggagcaccaggcaagccaggcactc

SEQ ID NO: 338828 - DNA, 25 bp, Artificial
  Probe
gccaggagcaccaggcaagccaggc

SEQ ID NO: 338829 - DNA, 25 bp, Artificial
  Probe
caccaggtcgctctggctatccagg

SEQ ID NO: 338830 - DNA, 25 bp, Artificial
  Probe
taacaggacctgatgggtccccggg

SEQ ID NO: 338831 - DNA, 25 bp, Artificial
  Probe
ttcatgattgagacccattgtgccc

SEQ ID NO: 338832 - DNA, 25 bp, Artificial
  Probe
ccaggacctagtggaacaattggat

SEQ ID NO: 338833 - DNA, 25 bp, Artificial
  Probe
gtcagaatcacaaccagccagacca

SEQ ID NO: 338834 - DNA, 25 bp, Artificial
  Probe
ccggcaagccaggagcaccaggcaa

SEQ ID NO: 338835 - DNA, 25 bp, Artificial
  Probe
accaggcaagccaggcactccagga

SEQ ID NO: 338836 - DNA, 25 bp, Artificial
  Probe
cgtgccatgaactgccagtcagaat

SEQ ID NO: 338837 - DNA, 25 bp, Artificial
  Probe
tgggaccacaggacttcctggagaa

SEQ ID NO: 338838 - DNA, 25 bp, Artificial
  Probe
cccccaggacctagtggaacaattg

SEQ ID NO: 338839 - DNA, 25 bp, Artificial
  Probe
ggagaccccggcaagccaggagcac

SEQ ID NO: 338840 - DNA, 25 bp, Artificial
  Probe
tgagacccattgtgccccaattcct

SEQ ID NO: 338841 - DNA, 25 bp, Artificial
  Probe
tggattaacaggacctgatgggtcc

SEQ ID NO: 338842 - DNA, 25 bp, Artificial
  Probe
ccatgaactgccagtcagaatcaca

SEQ ID NO: 338843 - DNA, 25 bp, Artificial
  Probe
tgggtctcgtggatttccaggccgt

SEQ ID NO: 338844 - DNA, 25 bp, Artificial
  Probe
gagcctgggtctcgtggatttccag

SEQ ID NO: 338845 - DNA, 25 bp, Artificial
  Probe
attgtgaccccctgagaccccggag

SEQ ID NO: 338846 - DNA, 25 bp, Artificial
  Probe
gatttcatgattgagacccattgtg

SEQ ID NO: 338847 - DNA, 25 bp, Artificial
  Probe
gggtcctcctggagaccccggcaag

SEQ ID NO: 338848 - DNA, 25 bp, Artificial
  Probe
gagagacgtgccatgaactgccagt

SEQ ID NO: 338849 - DNA, 25 bp, Artificial
  Probe
cggccctcctggagttccgggcata

SEQ ID NO: 338850 - DNA, 25 bp, Artificial
  Probe
atttccaggccgtggcattccagga

SEQ ID NO: 338851 - DNA, 25 bp, Artificial
  Probe
ggcaagccaggcactccaggagctg

SEQ ID NO: 338852 - DNA, 25 bp, Artificial
  Probe
acaaccagccagaccaccgatgaga

SEQ ID NO: 338853 - DNA, 25 bp, Artificial
  Probe
ccaccgatgagagaggtcctccggg

SEQ ID NO: 338854 - DNA, 25 bp, Artificial
  Probe
gtattgatggtgaccgaggtccaaa

SEQ ID NO: 338855 - DNA, 25 bp, Artificial
  Probe
actcttaatttgtttgcctccttgg

SEQ ID NO: 338856 - DNA, 25 bp, Artificial
  Probe
taagcaagtggcaggactccagtca

SEQ ID NO: 338857 - DNA, 25 bp, Artificial
  Probe
ccaaatctcagaagcgaactttctg

SEQ ID NO: 338858 - DNA, 25 bp, Artificial
  Probe
cccagccattccttagctaggactg

SEQ ID NO: 338859 - DNA, 25 bp, Artificial
  Probe
gcccggagccttgaggcttgaccac

SEQ ID NO: 338860 - DNA, 25 bp, Artificial
  Probe
tggcaagcccggagccttgaggctt

SEQ ID NO: 338861 - DNA, 25 bp, Artificial
  Probe
ggacctccagtcagggtccctagac

SEQ ID NO: 338862 - DNA, 25 bp, Artificial
  Probe
ggcatccaagcctgggtcagagcca

SEQ ID NO: 338863 - DNA, 25 bp, Artificial
  Probe
cagaagcgaactttctggaaagttt

SEQ ID NO: 338864 - DNA, 25 bp, Artificial
  Probe
atcttcgatgataaggaccaacagc

SEQ ID NO: 338865 - DNA, 25 bp, Artificial
  Probe
cagggacccggagacccgcgtcatt

SEQ ID NO: 338866 - DNA, 25 bp, Artificial
  Probe
tggaagacctcatccccaaataagc

SEQ ID NO: 338867 - DNA, 25 bp, Artificial
  Probe
agatcccagacagtcaggcatccca

SEQ ID NO: 338868 - DNA, 25 bp, Artificial
  Probe
gtccgggacctttgcatccccaaat

SEQ ID NO: 338869 - DNA, 25 bp, Artificial
  Probe
gggacctttgcatccccaaatctca

SEQ ID NO: 338870 - DNA, 25 bp, Artificial
  Probe
agagggctgcctctgacctccttct

SEQ ID NO: 338871 - DNA, 25 bp, Artificial
  Probe
agagccaagcccaggtccgggacct

SEQ ID NO: 338872 - DNA, 25 bp, Artificial
  Probe
ccttgagggacaggaccctgaaaag

SEQ ID NO: 338873 - DNA, 25 bp, Artificial
  Probe
tgggtcagagccaagcccaggtccg

SEQ ID NO: 338874 - DNA, 25 bp, Artificial
  Probe
tttgcatccccaaatctcagaagcg

SEQ ID NO: 338875 - DNA, 25 bp, Artificial
  Probe
gctcctaaaagctctgtcatcttcg

SEQ ID NO: 338876 - DNA, 25 bp, Artificial
  Probe
caggaccctgaaaagttagaaatga

SEQ ID NO: 338877 - DNA, 25 bp, Artificial
  Probe
ccttatcccaagaggggacgaagct

SEQ ID NO: 338878 - DNA, 25 bp, Artificial
  Probe
aggcaccttctggaagacctcatcc

SEQ ID NO: 338879 - DNA, 25 bp, Artificial
  Probe
gacaggaccctgaaaagttagaaat

SEQ ID NO: 338880 - DNA, 25 bp, Artificial
  Probe
gcatccccaaatctcagaagcgaac

SEQ ID NO: 338881 - DNA, 25 bp, Artificial
  Probe
actgcagagggctgcctctgacctc

SEQ ID NO: 338882 - DNA, 25 bp, Artificial
  Probe
gccaagcccaggtccgggacctttg

SEQ ID NO: 338883 - DNA, 25 bp, Artificial
  Probe
tgagtttcccttatcccaagagggg

SEQ ID NO: 338884 - DNA, 25 bp, Artificial
  Probe
atgagctcagggacccggagacccg

SEQ ID NO: 338885 - DNA, 25 bp, Artificial
  Probe
tcagggacccggagacccgcgtcat

SEQ ID NO: 338886 - DNA, 25 bp, Artificial
  Probe
cagagtcttgcctggcaagcccgga

SEQ ID NO: 338887 - DNA, 25 bp, Artificial
  Probe
gctgaaaccttgagggacaggaccc

SEQ ID NO: 338888 - DNA, 25 bp, Artificial
  Probe
gaacgcgggtgcaggtttgctccta

SEQ ID NO: 338889 - DNA, 25 bp, Artificial
  Probe
tttgtttgcctccttgggccccagc

SEQ ID NO: 338890 - DNA, 25 bp, Artificial
  Probe
gtagctcagggcagagtcttgcctg

SEQ ID NO: 338891 - DNA, 25 bp, Artificial
  Probe
tcttgcctggcaagcccggagcctt

SEQ ID NO: 338892 - DNA, 25 bp, Artificial
  Probe
cctcatccccaaataagcaagtggc

SEQ ID NO: 338893 - DNA, 25 bp, Artificial
  Probe
ctggaagacctcatccccaaataag

SEQ ID NO: 338894 - DNA, 25 bp, Artificial
  Probe
gtgctgaaaccttgagggacaggac

SEQ ID NO: 338895 - DNA, 25 bp, Artificial
  Probe
ttgagggacaggaccctgaaaagtt

SEQ ID NO: 338896 - DNA, 25 bp, Artificial
  Probe
taagatcccagacagtcaggcatcc

SEQ ID NO: 338897 - DNA, 25 bp, Artificial
  Probe
ggcgtgcgcacagcttcgagtatgc

SEQ ID NO: 338898 - DNA, 25 bp, Artificial
  Probe
aaagttttaagatcccagacagtca

SEQ ID NO: 338899 - DNA, 25 bp, Artificial
  Probe
aaggaagacccaaggcaccttctgg

SEQ ID NO: 338900 - DNA, 25 bp, Artificial
  Probe
tcccttatcccaagaggggacgaag

SEQ ID NO: 338901 - DNA, 25 bp, Artificial
  Probe
tgctgaaaggaccacagggatggct

SEQ ID NO: 338902 - DNA, 25 bp, Artificial
  Probe
ttctgactgtgaactgaaataacca

SEQ ID NO: 338903 - DNA, 25 bp, Artificial
  Probe
cacagggatggctcgactgctctac

SEQ ID NO: 338904 - DNA, 25 bp, Artificial
  Probe
ccaggcttgggaaccgctcaggttg

SEQ ID NO: 338905 - DNA, 25 bp, Artificial
  Probe
tgcagtgccagttcttggcggccgc

SEQ ID NO: 338906 - DNA, 25 bp, Artificial
  Probe
aggaccacagggatggctcgactgc

SEQ ID NO: 338907 - DNA, 25 bp, Artificial
  Probe
tgacgtccaggcttgggaaccgctc

SEQ ID NO: 338908 - DNA, 25 bp, Artificial
  Probe
ctctctcattttgagagctcagtct

SEQ ID NO: 338909 - DNA, 25 bp, Artificial
  Probe
ctcccgaaggaacttgacattaata

SEQ ID NO: 338910 - DNA, 25 bp, Artificial
  Probe
ccgtgcctgacgtccaggcttggga

SEQ ID NO: 338911 - DNA, 25 bp, Artificial
  Probe
atgctgaaaggaccacagggatggc

SEQ ID NO: 338912 - DNA, 25 bp, Artificial
  Probe
aaccaaatggggtttcaactgatga

SEQ ID NO: 338913 - DNA, 25 bp, Artificial
  Probe
gaaccgctcaggttgaggaggaaaa

SEQ ID NO: 338914 - DNA, 25 bp, Artificial
  Probe
tggctcgactgctctaccgtgcctt

SEQ ID NO: 338915 - DNA, 25 bp, Artificial
  Probe
ctgaaaggaccacagggatggctcg

SEQ ID NO: 338916 - DNA, 25 bp, Artificial
  Probe
gaataggagttctcccgaaggaact

SEQ ID NO: 338917 - DNA, 25 bp, Artificial
  Probe
ctctcattttgagagctcagtctgt

SEQ ID NO: 338918 - DNA, 25 bp, Artificial
  Probe
cgtgcctgacgtccaggcttgggaa

SEQ ID NO: 338919 - DNA, 25 bp, Artificial
  Probe
accgtgccttctgactgtgaactga

SEQ ID NO: 338920 - DNA, 25 bp, Artificial
  Probe
agggatggctcgactgctctaccgt

SEQ ID NO: 338921 - DNA, 25 bp, Artificial
  Probe
ccaaatggggtttcaactgatgaat

SEQ ID NO: 338922 - DNA, 25 bp, Artificial
  Probe
ggagttctcccgaaggaacttgaca

SEQ ID NO: 338923 - DNA, 25 bp, Artificial
  Probe
tttcaactgatgaataggagttctc

SEQ ID NO: 338924 - DNA, 25 bp, Artificial
  Probe
ctctaccgtgccttctgactgtgaa

SEQ ID NO: 338925 - DNA, 25 bp, Artificial
  Probe
aatctctctcattttgagagctcag

SEQ ID NO: 338926 - DNA, 25 bp, Artificial
  Probe
gggatggctcgactgctctaccgtg

SEQ ID NO: 338927 - DNA, 25 bp, Artificial
  Probe
ggaccacagggatggctcgactgct

SEQ ID NO: 338928 - DNA, 25 bp, Artificial
  Probe
gagttctcccgaaggaacttgacat

SEQ ID NO: 338929 - DNA, 25 bp, Artificial
  Probe
caggccgtgcctgacgtccaggctt

SEQ ID NO: 338930 - DNA, 25 bp, Artificial
  Probe
taccgtgccttctgactgtgaactg

SEQ ID NO: 338931 - DNA, 25 bp, Artificial
  Probe
actgctctaccgtgccttctgactg

SEQ ID NO: 338932 - DNA, 25 bp, Artificial
  Probe
acagggatggctcgactgctctacc

SEQ ID NO: 338933 - DNA, 25 bp, Artificial
  Probe
ccttctgactgtgaactgaaataac

SEQ ID NO: 338934 - DNA, 25 bp, Artificial
  Probe
tccaggcttgggaaccgctcaggtt

SEQ ID NO: 338935 - DNA, 25 bp, Artificial
  Probe
tgaataggagttctcccgaaggaac

SEQ ID NO: 338936 - DNA, 25 bp, Artificial
  Probe
aggccgtgcctgacgtccaggcttg

SEQ ID NO: 338937 - DNA, 25 bp, Artificial
  Probe
tcccgaaggaacttgacattaataa

SEQ ID NO: 338938 - DNA, 25 bp, Artificial
  Probe
accctggatgctgaaaggaccacag

SEQ ID NO: 338939 - DNA, 25 bp, Artificial
  Probe
tgcctgacgtccaggcttgggaacc

SEQ ID NO: 338940 - DNA, 25 bp, Artificial
  Probe
gacgtccaggcttgggaaccgctca

SEQ ID NO: 338941 - DNA, 25 bp, Artificial
  Probe
atgaataggagttctcccgaaggaa

SEQ ID NO: 338942 - DNA, 25 bp, Artificial
  Probe
cattttgagagctcagtctgtgtgg

SEQ ID NO: 338943 - DNA, 25 bp, Artificial
  Probe
ccgtgccttctgactgtgaactgaa

SEQ ID NO: 338944 - DNA, 25 bp, Artificial
  Probe
cagtgccagttcttggcggccgcga

SEQ ID NO: 338945 - DNA, 25 bp, Artificial
  Probe
aaaccctggatgctgaaaggaccac

SEQ ID NO: 338946 - DNA, 25 bp, Artificial
  Probe
tgaaaggaccacagggatggctcga

SEQ ID NO: 338947 - DNA, 25 bp, Artificial
  Probe
ccaatcttaggaagagccttctgat

SEQ ID NO: 338948 - DNA, 25 bp, Artificial
  Probe
cctcactgtgccatgtgcctctata

SEQ ID NO: 338949 - DNA, 25 bp, Artificial
  Probe
agctggtggtctttttagatggcac

SEQ ID NO: 338950 - DNA, 25 bp, Artificial
  Probe
ctggtggtctttttagatggcacag

SEQ ID NO: 338951 - DNA, 25 bp, Artificial
  Probe
ctcccaaggacctaagggttgactg

SEQ ID NO: 338952 - DNA, 25 bp, Artificial
  Probe
tggcatgacttcagcctttctgttt

SEQ ID NO: 338953 - DNA, 25 bp, Artificial
  Probe
aacagccctttcttccacatggcag

SEQ ID NO: 338954 - DNA, 25 bp, Artificial
  Probe
ttcagcctttctgttttctctagag

SEQ ID NO: 338955 - DNA, 25 bp, Artificial
  Probe
agaacatgcgaaatctgctagcaca

SEQ ID NO: 338956 - DNA, 25 bp, Artificial
  Probe
aatccaccagtgcaacctgccaggt

SEQ ID NO: 338957 - DNA, 25 bp, Artificial
  Probe
gatgaaacggacgacacccagatgt

SEQ ID NO: 338958 - DNA, 25 bp, Artificial
  Probe
gaccatcattttggatcagaccaac

SEQ ID NO: 338959 - DNA, 25 bp, Artificial
  Probe
gttcagcaagaatgcggtgatcagc

SEQ ID NO: 338960 - DNA, 25 bp, Artificial
  Probe
agagccttctgattggcagccacat

SEQ ID NO: 338961 - DNA, 25 bp, Artificial
  Probe
atctgctagcacagtcacccctgaa

SEQ ID NO: 338962 - DNA, 25 bp, Artificial
  Probe
ttgattttcataacttcggtaagac

SEQ ID NO: 338963 - DNA, 25 bp, Artificial
  Probe
tggcgggaagctctgcctcctcatc

SEQ ID NO: 338964 - DNA, 25 bp, Artificial
  Probe
tcgacgctggcaatgaaaatttgtt

SEQ ID NO: 338965 - DNA, 25 bp, Artificial
  Probe
accctaactttgtcttgtcagaagt

SEQ ID NO: 338966 - DNA, 25 bp, Artificial
  Probe
aggtccgcacgtcatacgtcccaga

SEQ ID NO: 338967 - DNA, 25 bp, Artificial
  Probe
gtgcctctataatgagaaagatgcc

SEQ ID NO: 338968 - DNA, 25 bp, Artificial
  Probe
ggaagctctgcctcctcatccgagt

SEQ ID NO: 338969 - DNA, 25 bp, Artificial
  Probe
atacgtcccagaggaggtgctttgg

SEQ ID NO: 338970 - DNA, 25 bp, Artificial
  Probe
tgtccaagaccaaggaagggaaata

SEQ ID NO: 338971 - DNA, 25 bp, Artificial
  Probe
ctgtgttcagaagcatctgacgggg

SEQ ID NO: 338972 - DNA, 25 bp, Artificial
  Probe
gccattttagccaagatctctagac

SEQ ID NO: 338973 - DNA, 25 bp, Artificial
  Probe
agaggctatgacaaccctaactttg

SEQ ID NO: 338974 - DNA, 25 bp, Artificial
  Probe
ctcctcatccgagtggccaatctta

SEQ ID NO: 338975 - DNA, 25 bp, Artificial
  Probe
ttggatcagaccaacatcaactttg

SEQ ID NO: 338976 - DNA, 25 bp, Artificial
  Probe
tacggattcaggtttgtgacagaac

SEQ ID NO: 338977 - DNA, 25 bp, Artificial
  Probe
tgaccataggttacggattcaggtt

SEQ ID NO: 338978 - DNA, 25 bp, Artificial
  Probe
cagtggcttttccacctacaaaaag

SEQ ID NO: 338979 - DNA, 25 bp, Artificial
  Probe
tggcaagcttctaaagacaaccatc

SEQ ID NO: 338980 - DNA, 25 bp, Artificial
  Probe
gacaaccctaactttgtcttgtcag

SEQ ID NO: 338981 - DNA, 25 bp, Artificial
  Probe
tccttgtgtggagaacattaatggc

SEQ ID NO: 338982 - DNA, 25 bp, Artificial
  Probe
tggggctaccgtttcgttcctattg

SEQ ID NO: 338983 - DNA, 25 bp, Artificial
  Probe
gaggctatgacaaccctaactttgt

SEQ ID NO: 338984 - DNA, 25 bp, Artificial
  Probe
cataacttcggtaagacagtggaag

SEQ ID NO: 338985 - DNA, 25 bp, Artificial
  Probe
gcgccactgccattttcctgcttat

SEQ ID NO: 338986 - DNA, 25 bp, Artificial
  Probe
aacattaatggcatgacttcagcct

SEQ ID NO: 338987 - DNA, 25 bp, Artificial
  Probe
taaagacaaccatcactcctgaagg

SEQ ID NO: 338988 - DNA, 25 bp, Artificial
  Probe
tgcttatcttccagtctattcttgg

SEQ ID NO: 338989 - DNA, 25 bp, Artificial
  Probe
aacgtgctaaaaccattacgttcag

SEQ ID NO: 338990 - DNA, 25 bp, Artificial
  Probe
caggactttgagctggtggtctttt

SEQ ID NO: 338991 - DNA, 25 bp, Artificial
  Probe
gaaccccagggctatggttctacaa

SEQ ID NO: 338992 - DNA, 25 bp, Artificial
  Probe
tttttagatggcacagtggaatcca

SEQ ID NO: 338993 - DNA, 25 bp, Artificial
  Probe
ttctccttttatggagattaccaga

SEQ ID NO: 338994 - DNA, 25 bp, Artificial
  Probe
ctcgtggttgtacagagacgagctt

SEQ ID NO: 338995 - DNA, 25 bp, Artificial
  Probe
gcaggcccagacaccagtggaccta

SEQ ID NO: 338996 - DNA, 25 bp, Artificial
  Probe
ccagcgaggcgcagcgattcactga

SEQ ID NO: 338997 - DNA, 25 bp, Artificial
  Probe
gacgccccttggaggtctggaccac

SEQ ID NO: 338998 - DNA, 25 bp, Artificial
  Probe
tggagccgggcgaactcatccctaa

SEQ ID NO: 338999 - DNA, 25 bp, Artificial
  Probe
atcatctgggccttcggggacgccc

SEQ ID NO: 339000 - DNA, 25 bp, Artificial
  Probe
caactacgacttcttcccgcaagga

SEQ ID NO: 339001 - DNA, 25 bp, Artificial
  Probe
ccttttatggagattaccagagtga

SEQ ID NO: 339002 - DNA, 25 bp, Artificial
  Probe
gtggagccagctacgggaatcactt

SEQ ID NO: 339003 - DNA, 25 bp, Artificial
  Probe
acctaccctttgtgccatcatctgg

SEQ ID NO: 339004 - DNA, 25 bp, Artificial
  Probe
tttccgcagtcctcgccggatgcgg

SEQ ID NO: 339005 - DNA, 25 bp, Artificial
  Probe
tacgggaatcacttgtctcaccctc

SEQ ID NO: 339006 - DNA, 25 bp, Artificial
  Probe
gtccacctttctcatctctgtcggt

SEQ ID NO: 339007 - DNA, 25 bp, Artificial
  Probe
cctttctcatctctgtcggtcaatg

SEQ ID NO: 339008 - DNA, 25 bp, Artificial
  Probe
atccttccagcgaggcgcagcgatt

SEQ ID NO: 339009 - DNA, 25 bp, Artificial
  Probe
accagagtgagtactacggtcctgg

SEQ ID NO: 339010 - DNA, 25 bp, Artificial
  Probe
agccgggcgaactcatccctaacgg

SEQ ID NO: 339011 - DNA, 25 bp, Artificial
  Probe
tgagtactacggtcctggaggcaac

SEQ ID NO: 339012 - DNA, 25 bp, Artificial
  Probe
agtccacctttctcatctctgtcgg

SEQ ID NO: 339013 - DNA, 25 bp, Artificial
  Probe
ccactccatgtctgcggaggtcttt

SEQ ID NO: 339014 - DNA, 25 bp, Artificial
  Probe
ggcgcagcgattcactgacatcctg

SEQ ID NO: 339015 - DNA, 25 bp, Artificial
  Probe
ttctcatctctgtcggtcaatggtg

SEQ ID NO: 339016 - DNA, 25 bp, Artificial
  Probe
ggacgccccttggaggtctggacca

SEQ ID NO: 339017 - DNA, 25 bp, Artificial
  Probe
agtcctcgccggatgcggcctctgg

SEQ ID NO: 339018 - DNA, 25 bp, Artificial
  Probe
ccacgggagctcgtggttgtacaga

SEQ ID NO: 339019 - DNA, 25 bp, Artificial
  Probe
accctcctgaaatgaatgaggcagc

SEQ ID NO: 339020 - DNA, 25 bp, Artificial
  Probe
ggtcctggaggcaactacgacttct

SEQ ID NO: 339021 - DNA, 25 bp, Artificial
  Probe
gccagctacgggaatcacttgtctc

SEQ ID NO: 339022 - DNA, 25 bp, Artificial
  Probe
gattcactgacatcctggcacatcc

SEQ ID NO: 339023 - DNA, 25 bp, Artificial
  Probe
tttgggcccagtccacctttctcat

SEQ ID NO: 339024 - DNA, 25 bp, Artificial
  Probe
aggggactcgcctagtcctgagccc

SEQ ID NO: 339025 - DNA, 25 bp, Artificial
  Probe
tgcggaggtctttgggcccagtcca

SEQ ID NO: 339026 - DNA, 25 bp, Artificial
  Probe
gtggacctaccctttgtgccatcat

SEQ ID NO: 339027 - DNA, 25 bp, Artificial
  Probe
aatggtggagccagctacgggaatc

SEQ ID NO: 339028 - DNA, 25 bp, Artificial
  Probe
gtctttgggcccagtccacctttct

SEQ ID NO: 339029 - DNA, 25 bp, Artificial
  Probe
cagacaccagtggacctaccctttg

SEQ ID NO: 339030 - DNA, 25 bp, Artificial
  Probe
gggactcgcctagtcctgagcccag

SEQ ID NO: 339031 - DNA, 25 bp, Artificial
  Probe
tgtgccatcatctgggccttcgggg

SEQ ID NO: 339032 - DNA, 25 bp, Artificial
  Probe
ctctccactccatgtctgcggaggt

SEQ ID NO: 339033 - DNA, 25 bp, Artificial
  Probe
ccatgtctgcggaggtctttgggcc

SEQ ID NO: 339034 - DNA, 25 bp, Artificial
  Probe
tcggtcaatggtggagccagctacg

SEQ ID NO: 339035 - DNA, 25 bp, Artificial
  Probe
cctcctgaaatgaatgaggcagccg

SEQ ID NO: 339036 - DNA, 25 bp, Artificial
  Probe
accagtggacctaccctttgtgcca

SEQ ID NO: 339037 - DNA, 25 bp, Artificial
  Probe
gtcctcgccggatgcggcctctggt

SEQ ID NO: 339038 - DNA, 25 bp, Artificial
  Probe
agattaccagagtgagtactacggt

SEQ ID NO: 339039 - DNA, 25 bp, Artificial
  Probe
tgtctctgctgtactgaggtgtttt

SEQ ID NO: 339040 - DNA, 25 bp, Artificial
  Probe
tacattacaaagcgcagcagccaat

SEQ ID NO: 339041 - DNA, 25 bp, Artificial
  Probe
gtctctgctgtactgaggtgttttt

SEQ ID NO: 339042 - DNA, 25 bp, Artificial
  Probe
ccttcgtgtctgtctctgctgtact

SEQ ID NO: 339043 - DNA, 25 bp, Artificial
  Probe
gcagcagccaatgacgcccctgcat

SEQ ID NO: 339044 - DNA, 25 bp, Artificial
  Probe
tgtctgtctctgctgtactgaggtg

SEQ ID NO: 339045 - DNA, 25 bp, Artificial
  Probe
tctgctgtactgaggtgttttttac

SEQ ID NO: 339046 - DNA, 25 bp, Artificial
  Probe
ttacattacaaagcgcagcagccaa

SEQ ID NO: 339047 - DNA, 25 bp, Artificial
  Probe
aacaattacattacaaagcgcagca

SEQ ID NO: 339048 - DNA, 25 bp, Artificial
  Probe
cgcccttcgtgtctgtctctgctgt

SEQ ID NO: 339049 - DNA, 25 bp, Artificial
  Probe
taaacaattacattacaaagcgcag

SEQ ID NO: 339050 - DNA, 25 bp, Artificial
  Probe
aatgacgcccctgcatgcagccctc

SEQ ID NO: 339051 - DNA, 25 bp, Artificial
  Probe
cccttcgtgtctgtctctgctgtac

SEQ ID NO: 339052 - DNA, 25 bp, Artificial
  Probe
tacaaagcgcagcagccaatgacgc

SEQ ID NO: 339053 - DNA, 25 bp, Artificial
  Probe
tgtccatttgaggtttaaacaatta

SEQ ID NO: 339054 - DNA, 25 bp, Artificial
  Probe
gtgtctgtctctgctgtactgaggt

SEQ ID NO: 339055 - DNA, 25 bp, Artificial
  Probe
acaattacattacaaagcgcagcag

SEQ ID NO: 339056 - DNA, 25 bp, Artificial
  Probe
tgacgcccctgcatgcagccctccc

SEQ ID NO: 339057 - DNA, 25 bp, Artificial
  Probe
cgtgtctgtctctgctgtactgagg

SEQ ID NO: 339058 - DNA, 25 bp, Artificial
  Probe
ccgcccttcgtgtctgtctctgctg

SEQ ID NO: 339059 - DNA, 25 bp, Artificial
  Probe
ttaaacaattacattacaaagcgca

SEQ ID NO: 339060 - DNA, 25 bp, Artificial
  Probe
tctctgctgtactgaggtgtttttt

SEQ ID NO: 339061 - DNA, 25 bp, Artificial
  Probe
gtcctgtccatttgaggtttaaaca

SEQ ID NO: 339062 - DNA, 25 bp, Artificial
  Probe
tcgtgtctgtctctgctgtactgag

SEQ ID NO: 339063 - DNA, 25 bp, Artificial
  Probe
ttacaaagcgcagcagccaatgacg

SEQ ID NO: 339064 - DNA, 25 bp, Artificial
  Probe
acaaagcgcagcagccaatgacgcc

SEQ ID NO: 339065 - DNA, 25 bp, Artificial
  Probe
ctgtctctgctgtactgaggtgttt

SEQ ID NO: 339066 - DNA, 25 bp, Artificial
  Probe
cattacaaagcgcagcagccaatga

SEQ ID NO: 339067 - DNA, 25 bp, Artificial
  Probe
agccaatgacgcccctgcatgcagc

SEQ ID NO: 339068 - DNA, 25 bp, Artificial
  Probe
cgcccgcccttcgtgtctgtctctg

SEQ ID NO: 339069 - DNA, 25 bp, Artificial
  Probe
tcctgtccatttgaggtttaaacaa

SEQ ID NO: 339070 - DNA, 25 bp, Artificial
  Probe
cctgtccatttgaggtttaaacaat

SEQ ID NO: 339071 - DNA, 25 bp, Artificial
  Probe
ctgtccatttgaggtttaaacaatt

SEQ ID NO: 339072 - DNA, 25 bp, Artificial
  Probe
cttcgtgtctgtctctgctgtactg

SEQ ID NO: 339073 - DNA, 25 bp, Artificial
  Probe
cgcccctgcatgcagccctcccgcc

SEQ ID NO: 339074 - DNA, 25 bp, Artificial
  Probe
aattacattacaaagcgcagcagcc

SEQ ID NO: 339075 - DNA, 25 bp, Artificial
  Probe
ttcgtgtctgtctctgctgtactga

SEQ ID NO: 339076 - DNA, 25 bp, Artificial
  Probe
cctgcatgcagccctcccgcccgcc

SEQ ID NO: 339077 - DNA, 25 bp, Artificial
  Probe
gtctgtctctgctgtactgaggtgt

SEQ ID NO: 339078 - DNA, 25 bp, Artificial
  Probe
tctgtctctgctgtactgaggtgtt

SEQ ID NO: 339079 - DNA, 25 bp, Artificial
  Probe
aaagcgcagcagccaatgacgcccc

SEQ ID NO: 339080 - DNA, 25 bp, Artificial
  Probe
cagcagccaatgacgcccctgcatg

SEQ ID NO: 339081 - DNA, 25 bp, Artificial
  Probe
attacaaagcgcagcagccaatgac

SEQ ID NO: 339082 - DNA, 25 bp, Artificial
  Probe
gcccttcgtgtctgtctctgctgta

SEQ ID NO: 339083 - DNA, 25 bp, Artificial
  Probe
gtttaaacaattacattacaaagcg

SEQ ID NO: 339084 - DNA, 25 bp, Artificial
  Probe
cagccaatgacgcccctgcatgcag

SEQ ID NO: 339085 - DNA, 25 bp, Artificial
  Probe
tggatgggcccaaagccagtatggt

SEQ ID NO: 339086 - DNA, 25 bp, Artificial
  Probe
tcgttgtccatgtcaagaccgctgt

SEQ ID NO: 339087 - DNA, 25 bp, Artificial
  Probe
tctcctcctgggtacactatcctag

SEQ ID NO: 339088 - DNA, 25 bp, Artificial
  Probe
tagagtatccggacttgaccatcga

SEQ ID NO: 339089 - DNA, 25 bp, Artificial
  Probe
gctgttgctgacaacctccttttct

SEQ ID NO: 339090 - DNA, 25 bp, Artificial
  Probe
tcaagaaccgggagaaatggactta

SEQ ID NO: 339091 - DNA, 25 bp, Artificial
  Probe
tgcaaatgcaatgctgtttgttggc

SEQ ID NO: 339092 - DNA, 25 bp, Artificial
  Probe
tggccgagtagagtatccggacttg

SEQ ID NO: 339093 - DNA, 25 bp, Artificial
  Probe
caataatatcgttgtccatgtcaag

SEQ ID NO: 339094 - DNA, 25 bp, Artificial
  Probe
tattgaagcatcaagaaccgggaga

SEQ ID NO: 339095 - DNA, 25 bp, Artificial
  Probe
tgacaacctccttttctaccttggg

SEQ ID NO: 339096 - DNA, 25 bp, Artificial
  Probe
gtaccgtattgaagcatcaagaacc

SEQ ID NO: 339097 - DNA, 25 bp, Artificial
  Probe
cctctgggatgttggctctggagtt

SEQ ID NO: 339098 - DNA, 25 bp, Artificial
  Probe
gactgtattcgaacatacaagccag

SEQ ID NO: 339099 - DNA, 25 bp, Artificial
  Probe
caccattcagattctcctcctgggt

SEQ ID NO: 339100 - DNA, 25 bp, Artificial
  Probe
ggcccaaagccagtatggtgcccag

SEQ ID NO: 339101 - DNA, 25 bp, Artificial
  Probe
aatgctgtttgttggcggcctgact

SEQ ID NO: 339102 - DNA, 25 bp, Artificial
  Probe
tgactttctggctatagaaatgcgt

SEQ ID NO: 339103 - DNA, 25 bp, Artificial
  Probe
tttctgtgagagctttggatgggcc

SEQ ID NO: 339104 - DNA, 25 bp, Artificial
  Probe
agtcagcttcctctgggatgttggc

SEQ ID NO: 339105 - DNA, 25 bp, Artificial
  Probe
gcttcctctgggatgttggctctgg

SEQ ID NO: 339106 - DNA, 25 bp, Artificial
  Probe
tcagaggtgactgtattcgaacata

SEQ ID NO: 339107 - DNA, 25 bp, Artificial
  Probe
taccgtattgaagcatcaagaaccg

SEQ ID NO: 339108 - DNA, 25 bp, Artificial
  Probe
ctttctggctatagaaatgcgtaaa

SEQ ID NO: 339109 - DNA, 25 bp, Artificial
  Probe
atattggtaccgtattgaagcatca

SEQ ID NO: 339110 - DNA, 25 bp, Artificial
  Probe
agattctcctcctgggtacactatc

SEQ ID NO: 339111 - DNA, 25 bp, Artificial
  Probe
gaagcatcaagaaccgggagaaatg

SEQ ID NO: 339112 - DNA, 25 bp, Artificial
  Probe
tgtgagagctttggatgggcccaaa

SEQ ID NO: 339113 - DNA, 25 bp, Artificial
  Probe
cctccttttctaccttgggagtgca

SEQ ID NO: 339114 - DNA, 25 bp, Artificial
  Probe
tgagagctttggatgggcccaaagc

SEQ ID NO: 339115 - DNA, 25 bp, Artificial
  Probe
ttgttggcggcctgactggaaaatt

SEQ ID NO: 339116 - DNA, 25 bp, Artificial
  Probe
agttggccgagtagagtatccggac

SEQ ID NO: 339117 - DNA, 25 bp, Artificial
  Probe
agctacaataatatcgttgtccatg

SEQ ID NO: 339118 - DNA, 25 bp, Artificial
  Probe
aagccagtatggtgcccagcaccca

SEQ ID NO: 339119 - DNA, 25 bp, Artificial
  Probe
atcctagatgtggatgcaaatgcaa

SEQ ID NO: 339120 - DNA, 25 bp, Artificial
  Probe
gtattcgaacatacaagccagaaat

SEQ ID NO: 339121 - DNA, 25 bp, Artificial
  Probe
tccttttctaccttgggagtgcaaa

SEQ ID NO: 339122 - DNA, 25 bp, Artificial
  Probe
actcatattggtaccgtattgaagc

SEQ ID NO: 339123 - DNA, 25 bp, Artificial
  Probe
gtcagcttcctctgggatgttggct

SEQ ID NO: 339124 - DNA, 25 bp, Artificial
  Probe
ttctaccttgggagtgcaaaattta

SEQ ID NO: 339125 - DNA, 25 bp, Artificial
  Probe
ttggatgggcccaaagccagtatgg

SEQ ID NO: 339126 - DNA, 25 bp, Artificial
  Probe
gtccatgtcaagaccgctgttgctg

SEQ ID NO: 339127 - DNA, 25 bp, Artificial
  Probe
caatgctgtttgttggcggcctgac

SEQ ID NO: 339128 - DNA, 25 bp, Artificial
  Probe
atatcgttgtccatgtcaagaccgc

SEQ ID NO: 339129 - DNA, 25 bp, Artificial
  Probe
tgtcaagaccgctgttgctgacaac

SEQ ID NO: 339130 - DNA, 25 bp, Artificial
  Probe
atgcaatgctgtttgttggcggcct

SEQ ID NO: 339131 - DNA, 25 bp, Artificial
  Probe
gacgcaggcccgatgtcctgcagca

SEQ ID NO: 339132 - DNA, 25 bp, Artificial
  Probe
cagtgtcaatcatggaccggaacac

SEQ ID NO: 339133 - DNA, 25 bp, Artificial
  Probe
gccctacatggcttcagtgcaagtg

SEQ ID NO: 339134 - DNA, 25 bp, Artificial
  Probe
ttcagtgcaagtgaatggcacgcac

SEQ ID NO: 339135 - DNA, 25 bp, Artificial
  Probe
caccggagaccgtgactcacaataa

SEQ ID NO: 339136 - DNA, 25 bp, Artificial
  Probe
gagtctgtggcaaccggagaaagcc

SEQ ID NO: 339137 - DNA, 25 bp, Artificial
  Probe
caccaagaacatgatgtgtgcagag

SEQ ID NO: 339138 - DNA, 25 bp, Artificial
  Probe
taacgtgagtgttaacgtgacggcc

SEQ ID NO: 339139 - DNA, 25 bp, Artificial
  Probe
tggcaaccggagaaagccaggtgtc

SEQ ID NO: 339140 - DNA, 25 bp, Artificial
  Probe
tggggcaatcaccaagaacatgatg

SEQ ID NO: 339141 - DNA, 25 bp, Artificial
  Probe
ccaggtgtctttacccgcgtggcaa

SEQ ID NO: 339142 - DNA, 25 bp, Artificial
  Probe
acctcgtggctctggtggtcctgga

SEQ ID NO: 339143 - DNA, 25 bp, Artificial
  Probe
ccgcgcactgcatggatggagtgac

SEQ ID NO: 339144 - DNA, 25 bp, Artificial
  Probe
tcctgcagcaactgacagtgtcaat

SEQ ID NO: 339145 - DNA, 25 bp, Artificial
  Probe
caatcaccaagaacatgatgtgtgc

SEQ ID NO: 339146 - DNA, 25 bp, Artificial
  Probe
gcaaccggagaaagccaggtgtctt

SEQ ID NO: 339147 - DNA, 25 bp, Artificial
  Probe
tcaccaagaacatgatgtgtgcaga

SEQ ID NO: 339148 - DNA, 25 bp, Artificial
  Probe
caaagtgtagtgcttcacccgggca

SEQ ID NO: 339149 - DNA, 25 bp, Artificial
  Probe
aggggacaccggagaccgtgactca

SEQ ID NO: 339150 - DNA, 25 bp, Artificial
  Probe
gtacctcgtggctctggtggtcctg

SEQ ID NO: 339151 - DNA, 25 bp, Artificial
  Probe
tatgtgttgcgcagccccgaggtcg

SEQ ID NO: 339152 - DNA, 25 bp, Artificial
  Probe
agcgttgaggacgacctcatgctct

SEQ ID NO: 339153 - DNA, 25 bp, Artificial
  Probe
tgacagtgtcaatcatggaccggaa

SEQ ID NO: 339154 - DNA, 25 bp, Artificial
  Probe
ccgtgtacctcgtggctctggtggt

SEQ ID NO: 339155 - DNA, 25 bp, Artificial
  Probe
aatcaccaagaacatgatgtgtgca

SEQ ID NO: 339156 - DNA, 25 bp, Artificial
  Probe
cactgcatggatggagtgaccaagg

SEQ ID NO: 339157 - DNA, 25 bp, Artificial
  Probe
gccaggaggccatggcccatgctcg

SEQ ID NO: 339158 - DNA, 25 bp, Artificial
  Probe
gacgacctcatgctctttaagctct

SEQ ID NO: 339159 - DNA, 25 bp, Artificial
  Probe
ctcggccctacatggcttcagtgca

SEQ ID NO: 339160 - DNA, 25 bp, Artificial
  Probe
gggacaccggagaccgtgactcaca

SEQ ID NO: 339161 - DNA, 25 bp, Artificial
  Probe
cactcatgcgggacgcaggcccgat

SEQ ID NO: 339162 - DNA, 25 bp, Artificial
  Probe
catgcgggacgcaggcccgatgtcc

SEQ ID NO: 339163 - DNA, 25 bp, Artificial
  Probe
gagaaagccaggtgtctttacccgc

SEQ ID NO: 339164 - DNA, 25 bp, Artificial
  Probe
tgcgcagccccgaggtcggattctg

SEQ ID NO: 339165 - DNA, 25 bp, Artificial
  Probe
caagtgaatggcacgcacgtgtgcg

SEQ ID NO: 339166 - DNA, 25 bp, Artificial
  Probe
ggcaatcaccaagaacatgatgtgt

SEQ ID NO: 339167 - DNA, 25 bp, Artificial
  Probe
cgcactgcatggatggagtgaccaa

SEQ ID NO: 339168 - DNA, 25 bp, Artificial
  Probe
gtgtagtgcttcacccgggcagccg

SEQ ID NO: 339169 - DNA, 25 bp, Artificial
  Probe
atgtcctgcagcaactgacagtgtc

SEQ ID NO: 339170 - DNA, 25 bp, Artificial
  Probe
gtaacgtgagtgttaacgtgacggc

SEQ ID NO: 339171 - DNA, 25 bp, Artificial
  Probe
ggctgtatgtgttgcgcagccccga

SEQ ID NO: 339172 - DNA, 25 bp, Artificial
  Probe
gaaagccaggtgtctttacccgcgt

SEQ ID NO: 339173 - DNA, 25 bp, Artificial
  Probe
acgcaggcccgatgtcctgcagcaa

SEQ ID NO: 339174 - DNA, 25 bp, Artificial
  Probe
gcaggcccgatgtcctgcagcaact

SEQ ID NO: 339175 - DNA, 25 bp, Artificial
  Probe
catgctcggccctacatggcttcag

SEQ ID NO: 339176 - DNA, 25 bp, Artificial
  Probe
gcggctgtatgtgttgcgcagcccc

SEQ ID NO: 339177 - DNA, 25 bp, Artificial
  Probe
ggatcgttcaacctccttacaaatg

SEQ ID NO: 339178 - DNA, 25 bp, Artificial
  Probe
gtaaggtgcctgctccagtcccaca

SEQ ID NO: 339179 - DNA, 25 bp, Artificial
  Probe
atccccgctgtgtgggaatgggccc

SEQ ID NO: 339180 - DNA, 25 bp, Artificial
  Probe
cattctatgccattttcctgggggt

SEQ ID NO: 339181 - DNA, 25 bp, Artificial
  Probe
agcaggacaatgacactaggggaga

SEQ ID NO: 339182 - DNA, 25 bp, Artificial
  Probe
acgggctgcatcttcagccccagag

SEQ ID NO: 339183 - DNA, 25 bp, Artificial
  Probe
atctagccagacctcctgcatgctg

SEQ ID NO: 339184 - DNA, 25 bp, Artificial
  Probe
agagagactctactagctttccaaa

SEQ ID NO: 339185 - DNA, 25 bp, Artificial
  Probe
cggcccattctatgccattttcctg

SEQ ID NO: 339186 - DNA, 25 bp, Artificial
  Probe
cttctggctcacagccattacctgg

SEQ ID NO: 339187 - DNA, 25 bp, Artificial
  Probe
ggaactggttttctgatccccgctg

SEQ ID NO: 339188 - DNA, 25 bp, Artificial
  Probe
tgctgagtctgtgaataaagccacg

SEQ ID NO: 339189 - DNA, 25 bp, Artificial
  Probe
cctttcctaggcagagctcatccag

SEQ ID NO: 339190 - DNA, 25 bp, Artificial
  Probe
gggtaaggtgcctgctccagtccca

SEQ ID NO: 339191 - DNA, 25 bp, Artificial
  Probe
tcaggtgtcctaaccggcccattct

SEQ ID NO: 339192 - DNA, 25 bp, Artificial
  Probe
tagaacccactgcatctacatttgg

SEQ ID NO: 339193 - DNA, 25 bp, Artificial
  Probe
gctcatccaggtaggccctaggcac

SEQ ID NO: 339194 - DNA, 25 bp, Artificial
  Probe
tctccaagacaaatatccaagcgtg

SEQ ID NO: 339195 - DNA, 25 bp, Artificial
  Probe
ggcctggattgcagtggtcatagaa

SEQ ID NO: 339196 - DNA, 25 bp, Artificial
  Probe
tctacatttgggagatgacaccaag

SEQ ID NO: 339197 - DNA, 25 bp, Artificial
  Probe
accaagcacagagagaaaggtttgg

SEQ ID NO: 339198 - DNA, 25 bp, Artificial
  Probe
ggagatgacaccaagcacagagaga

SEQ ID NO: 339199 - DNA, 25 bp, Artificial
  Probe
ggctaaacacaccaagtcccaaagc

SEQ ID NO: 339200 - DNA, 25 bp, Artificial
  Probe
tgggtcaccttcctggacagcccag

SEQ ID NO: 339201 - DNA, 25 bp, Artificial
  Probe
aggatccgggctttggactgtttgc

SEQ ID NO: 339202 - DNA, 25 bp, Artificial
  Probe
taggccctaggcacactctccagga

SEQ ID NO: 339203 - DNA, 25 bp, Artificial
  Probe
tctggcccagccagcagattctctt

SEQ ID NO: 339204 - DNA, 25 bp, Artificial
  Probe
ctgctctgggcagatctagccagac

SEQ ID NO: 339205 - DNA, 25 bp, Artificial
  Probe
ccggccagtagtttaaaggtgcagt

SEQ ID NO: 339206 - DNA, 25 bp, Artificial
  Probe
ggcacactctccaggatcgttcaac

SEQ ID NO: 339207 - DNA, 25 bp, Artificial
  Probe
tacctgggtggatctgctctgggca

SEQ ID NO: 339208 - DNA, 25 bp, Artificial
  Probe
tccaaactttgctattcccagacgg

SEQ ID NO: 339209 - DNA, 25 bp, Artificial
  Probe
tgaataaagccacgtaactagtggg

SEQ ID NO: 339210 - DNA, 25 bp, Artificial
  Probe
ctttccatcctcagcatatgctgag

SEQ ID NO: 339211 - DNA, 25 bp, Artificial
  Probe
aaatgaccccaggtcatccctatgt

SEQ ID NO: 339212 - DNA, 25 bp, Artificial
  Probe
tctgatccccgctgtgtgggaatgg

SEQ ID NO: 339213 - DNA, 25 bp, Artificial
  Probe
ggccggccagtagtttaaaggtgca

SEQ ID NO: 339214 - DNA, 25 bp, Artificial
  Probe
gcagattctcttctgtaaactcctg

SEQ ID NO: 339215 - DNA, 25 bp, Artificial
  Probe
caggtctggcccagccagcagattc

SEQ ID NO: 339216 - DNA, 25 bp, Artificial
  Probe
tttaggcaggaagtcaggagccagc

SEQ ID NO: 339217 - DNA, 25 bp, Artificial
  Probe
gagcagcttggctaaacacaccaag

SEQ ID NO: 339218 - DNA, 25 bp, Artificial
  Probe
tgctattcccagacggggaatgaaa

SEQ ID NO: 339219 - DNA, 25 bp, Artificial
  Probe
actcctgaatccaatccatgcatgg

SEQ ID NO: 339220 - DNA, 25 bp, Artificial
  Probe
tgaatccaatccatgcatggcctcc

SEQ ID NO: 339221 - DNA, 25 bp, Artificial
  Probe
tgcagtctttcttggcccagcaggg

SEQ ID NO: 339222 - DNA, 25 bp, Artificial
  Probe
tttaaaggtgcagtctttcttggcc

SEQ ID NO: 339223 - DNA, 25 bp, Artificial
  Probe
acaaggagacttttgccccaattct

SEQ ID NO: 339224 - DNA, 25 bp, Artificial
  Probe
acaggcggtgagcatgtttgtgcaa

SEQ ID NO: 339225 - DNA, 25 bp, Artificial
  Probe
aaatgactactcacagatccgtgtc

SEQ ID NO: 339226 - DNA, 25 bp, Artificial
  Probe
cgctccacaccaaacaggcggtgag

SEQ ID NO: 339227 - DNA, 25 bp, Artificial
  Probe
ccaaacaggcggtgagcatgtttgt

SEQ ID NO: 339228 - DNA, 25 bp, Artificial
  Probe
aagcatccatgatgaagttgtagac

SEQ ID NO: 339229 - DNA, 25 bp, Artificial
  Probe
ggaccccaatatcctctatggaccg

SEQ ID NO: 339230 - DNA, 25 bp, Artificial
  Probe
tcacagatccgtgtcgggaacccct

SEQ ID NO: 339231 - DNA, 25 bp, Artificial
  Probe
tctatgggggcaaggtcatggacca

SEQ ID NO: 339232 - DNA, 25 bp, Artificial
  Probe
tatgggggcaaggtcatggaccacc

SEQ ID NO: 339233 - DNA, 25 bp, Artificial
  Probe
cacagatccgtgtcgggaacccctg

SEQ ID NO: 339234 - DNA, 25 bp, Artificial
  Probe
gagcatgtttgtgcaagccgtggaa

SEQ ID NO: 339235 - DNA, 25 bp, Artificial
  Probe
aggtcatggaccaccctggcaatta

SEQ ID NO: 339236 - DNA, 25 bp, Artificial
  Probe
actactcacagatccgtgtcgggaa

SEQ ID NO: 339237 - DNA, 25 bp, Artificial
  Probe
ccctggcaattatgtggaacccacc

SEQ ID NO: 339238 - DNA, 25 bp, Artificial
  Probe
tccacaccaaacaggcggtgagcat

SEQ ID NO: 339239 - DNA, 25 bp, Artificial
  Probe
caccctggcaattatgtggaaccca

SEQ ID NO: 339240 - DNA, 25 bp, Artificial
  Probe
tttttgcacgaaagcatccatgatg

SEQ ID NO: 339241 - DNA, 25 bp, Artificial
  Probe
ttgtgcaagccgtggaagaagcaaa

SEQ ID NO: 339242 - DNA, 25 bp, Artificial
  Probe
gcatgtttgtgcaagccgtggaaga

SEQ ID NO: 339243 - DNA, 25 bp, Artificial
  Probe
cacgaaagcatccatgatgaagttg

SEQ ID NO: 339244 - DNA, 25 bp, Artificial
  Probe
atccatgatgaagttgtagacagac

SEQ ID NO: 339245 - DNA, 25 bp, Artificial
  Probe
tgtgaggcgactgtttttgcacgaa

SEQ ID NO: 339246 - DNA, 25 bp, Artificial
  Probe
cagccggccagaggtgtaccactgt

SEQ ID NO: 339247 - DNA, 25 bp, Artificial
  Probe
agaggtgtaccactgtgaggcgact

SEQ ID NO: 339248 - DNA, 25 bp, Artificial
  Probe
gcgactgtttttgcacgaaagcatc

SEQ ID NO: 339249 - DNA, 25 bp, Artificial
  Probe
cagaggtgtaccactgtgaggcgac

SEQ ID NO: 339250 - DNA, 25 bp, Artificial
  Probe
tgttcacaaggagacttttgcccca

SEQ ID NO: 339251 - DNA, 25 bp, Artificial
  Probe
aggtgtaccactgtgaggcgactgt

SEQ ID NO: 339252 - DNA, 25 bp, Artificial
  Probe
gcacgaaagcatccatgatgaagtt

SEQ ID NO: 339253 - DNA, 25 bp, Artificial
  Probe
gggaccccaatatcctctatggacc

SEQ ID NO: 339254 - DNA, 25 bp, Artificial
  Probe
catggaccaccctggcaattatgtg

SEQ ID NO: 339255 - DNA, 25 bp, Artificial
  Probe
gaccaccctggcaattatgtggaac

SEQ ID NO: 339256 - DNA, 25 bp, Artificial
  Probe
actgtgaggcgactgtttttgcacg

SEQ ID NO: 339257 - DNA, 25 bp, Artificial
  Probe
catgtttgtgcaagccgtggaagaa

SEQ ID NO: 339258 - DNA, 25 bp, Artificial
  Probe
cgaaagcatccatgatgaagttgta

SEQ ID NO: 339259 - DNA, 25 bp, Artificial
  Probe
gaacagccggccagaggtgtaccac

SEQ ID NO: 339260 - DNA, 25 bp, Artificial
  Probe
tgtgcaagccgtggaagaagcaaag

SEQ ID NO: 339261 - DNA, 25 bp, Artificial
  Probe
ggtgtaccactgtgaggcgactgtt

SEQ ID NO: 339262 - DNA, 25 bp, Artificial
  Probe
tgcaagccgtggaagaagcaaagaa

SEQ ID NO: 339263 - DNA, 25 bp, Artificial
  Probe
cctgggaccccaatatcctctatgg

SEQ ID NO: 339264 - DNA, 25 bp, Artificial
  Probe
gcaaggtcatggaccaccctggcaa

SEQ ID NO: 339265 - DNA, 25 bp, Artificial
  Probe
aacaggcggtgagcatgtttgtgca

SEQ ID NO: 339266 - DNA, 25 bp, Artificial
  Probe
ctccgctctgtttgccgccgtggga

SEQ ID NO: 339267 - DNA, 25 bp, Artificial
  Probe
acagccggccagaggtgtaccactg

SEQ ID NO: 339268 - DNA, 25 bp, Artificial
  Probe
caaacaggcggtgagcatgtttgtg

SEQ ID NO: 339269 - DNA, 25 bp, Artificial
  Probe
gaagcccaaagtatcaaagctctgg

SEQ ID NO: 339270 - DNA, 25 bp, Artificial
  Probe
tgacttctgtaaagtcacatgcaca

SEQ ID NO: 339271 - DNA, 25 bp, Artificial
  Probe
gatgtgctgcagctccagttcacgg

SEQ ID NO: 339272 - DNA, 25 bp, Artificial
  Probe
tccagctgccttctcttgctggctt

SEQ ID NO: 339273 - DNA, 25 bp, Artificial
  Probe
cagaagcccaaagtatcaaagctct

SEQ ID NO: 339274 - DNA, 25 bp, Artificial
  Probe
ttggccatcatcagcttctttctgc

SEQ ID NO: 339275 - DNA, 25 bp, Artificial
  Probe
atccttactgtcataaaggtgactt

SEQ ID NO: 339276 - DNA, 25 bp, Artificial
  Probe
ccagaagcccaaagtatcaaagctc

SEQ ID NO: 339277 - DNA, 25 bp, Artificial
  Probe
ttgacttctgtaaagtcacatgcac

SEQ ID NO: 339278 - DNA, 25 bp, Artificial
  Probe
gctggctttgacttctgtaaagtca

SEQ ID NO: 339279 - DNA, 25 bp, Artificial
  Probe
tgccttctcttgctggctttgactt

SEQ ID NO: 339280 - DNA, 25 bp, Artificial
  Probe
cagcttctttctgcttagaagaaca

SEQ ID NO: 339281 - DNA, 25 bp, Artificial
  Probe
tgctgcagctccagttcacgggcac

SEQ ID NO: 339282 - DNA, 25 bp, Artificial
  Probe
tcagcttctttctgcttagaagaac

SEQ ID NO: 339283 - DNA, 25 bp, Artificial
  Probe
gaaataaacggtggaccagcaagtc

SEQ ID NO: 339284 - DNA, 25 bp, Artificial
  Probe
gcccaaagtatcaaagctctggtac

SEQ ID NO: 339285 - DNA, 25 bp, Artificial
  Probe
tcataaaggtgacttatgggggtcc

SEQ ID NO: 339286 - DNA, 25 bp, Artificial
  Probe
atcagcttctttctgcttagaagaa

SEQ ID NO: 339287 - DNA, 25 bp, Artificial
  Probe
tccttactgtcataaaggtgactta

SEQ ID NO: 339288 - DNA, 25 bp, Artificial
  Probe
tgtgctgcagctccagttcacgggc

SEQ ID NO: 339289 - DNA, 25 bp, Artificial
  Probe
gacttatgggggtccagctgccttc

SEQ ID NO: 339290 - DNA, 25 bp, Artificial
  Probe
tcatcagcttctttctgcttagaag

SEQ ID NO: 339291 - DNA, 25 bp, Artificial
  Probe
cttactgtcataaaggtgacttatg

SEQ ID NO: 339292 - DNA, 25 bp, Artificial
  Probe
ctcttgctggctttgacttctgtaa

SEQ ID NO: 339293 - DNA, 25 bp, Artificial
  Probe
gctgccttctcttgctggctttgac

SEQ ID NO: 339294 - DNA, 25 bp, Artificial
  Probe
taaaggtgacttatgggggtccagc

SEQ ID NO: 339295 - DNA, 25 bp, Artificial
  Probe
tcttgctggctttgacttctgtaaa

SEQ ID NO: 339296 - DNA, 25 bp, Artificial
  Probe
ctgccttctcttgctggctttgact

SEQ ID NO: 339297 - DNA, 25 bp, Artificial
  Probe
ttgctggctttgacttctgtaaagt

SEQ ID NO: 339298 - DNA, 25 bp, Artificial
  Probe
ttatgggggtccagctgccttctct

SEQ ID NO: 339299 - DNA, 25 bp, Artificial
  Probe
cttatgggggtccagctgccttctc

SEQ ID NO: 339300 - DNA, 25 bp, Artificial
  Probe
ggctttgacttctgtaaagtcacat

SEQ ID NO: 339301 - DNA, 25 bp, Artificial
  Probe
ccttactgtcataaaggtgacttat

SEQ ID NO: 339302 - DNA, 25 bp, Artificial
  Probe
atgggggtccagctgccttctcttg

SEQ ID NO: 339303 - DNA, 25 bp, Artificial
  Probe
ctggctttgacttctgtaaagtcac

SEQ ID NO: 339304 - DNA, 25 bp, Artificial
  Probe
aagcccaaagtatcaaagctctggt

SEQ ID NO: 339305 - DNA, 25 bp, Artificial
  Probe
cttggccatcatcagcttctttctg

SEQ ID NO: 339306 - DNA, 25 bp, Artificial
  Probe
tgctggctttgacttctgtaaagtc

SEQ ID NO: 339307 - DNA, 25 bp, Artificial
  Probe
tgggggtccagctgccttctcttgc

SEQ ID NO: 339308 - DNA, 25 bp, Artificial
  Probe
ccccagaagcccaaagtatcaaagc

SEQ ID NO: 339309 - DNA, 25 bp, Artificial
  Probe
ggccatcatcagcttctttctgctt

SEQ ID NO: 339310 - DNA, 25 bp, Artificial
  Probe
tggccatcatcagcttctttctgct

SEQ ID NO: 339311 - DNA, 25 bp, Artificial
  Probe
cataaaggtgacttatgggggtcca

SEQ ID NO: 339312 - DNA, 25 bp, Artificial
  Probe
cttctttctgcttagaagaacagct

SEQ ID NO: 339313 - DNA, 25 bp, Artificial
  Probe
gccttctcttgctggctttgacttc

SEQ ID NO: 339314 - DNA, 25 bp, Artificial
  Probe
cagctgccttctcttgctggctttg

SEQ ID NO: 339315 - DNA, 25 bp, Artificial
  Probe
gtaaatatgccttgtgatggccaac

SEQ ID NO: 339316 - DNA, 25 bp, Artificial
  Probe
tcttcaagagtgtggtccacttggc

SEQ ID NO: 339317 - DNA, 25 bp, Artificial
  Probe
ctttgatgtccacaaggacacatat

SEQ ID NO: 339318 - DNA, 25 bp, Artificial
  Probe
ggccaacgttccagtggatgatgaa

SEQ ID NO: 339319 - DNA, 25 bp, Artificial
  Probe
cttgtgatggccaacgttccagtgg

SEQ ID NO: 339320 - DNA, 25 bp, Artificial
  Probe
ctgttcttcaagagtgtggtccact

SEQ ID NO: 339321 - DNA, 25 bp, Artificial
  Probe
agtgtggtccacttggccttcgttg

SEQ ID NO: 339322 - DNA, 25 bp, Artificial
  Probe
ataattctcagagcagagaaatcaa

SEQ ID NO: 339323 - DNA, 25 bp, Artificial
  Probe
tgttcttcaagagtgtggtccactt

SEQ ID NO: 339324 - DNA, 25 bp, Artificial
  Probe
aattctcagagcagagaaatcaact

SEQ ID NO: 339325 - DNA, 25 bp, Artificial
  Probe
acttcatgccctagaaccagatagt

SEQ ID NO: 339326 - DNA, 25 bp, Artificial
  Probe
ttcatgccctagaaccagatagtgc

SEQ ID NO: 339327 - DNA, 25 bp, Artificial
  Probe
agagtgtggtccacttggccttcgt

SEQ ID NO: 339328 - DNA, 25 bp, Artificial
  Probe
tgatgtccacaaggacacatatgtg

SEQ ID NO: 339329 - DNA, 25 bp, Artificial
  Probe
aatatgccttgtgatggccaacgtt

SEQ ID NO: 339330 - DNA, 25 bp, Artificial
  Probe
ttgtgatggccaacgttccagtgga

SEQ ID NO: 339331 - DNA, 25 bp, Artificial
  Probe
gtgatggccaacgttccagtggatg

SEQ ID NO: 339332 - DNA, 25 bp, Artificial
  Probe
tcatgccctagaaccagatagtgcc

SEQ ID NO: 339333 - DNA, 25 bp, Artificial
  Probe
cacttcatgccctagaaccagatag

SEQ ID NO: 339334 - DNA, 25 bp, Artificial
  Probe
ctagaaccagatagtgcccccaaag

SEQ ID NO: 339335 - DNA, 25 bp, Artificial
  Probe
cttcaagagtgtggtccacttggcc

SEQ ID NO: 339336 - DNA, 25 bp, Artificial
  Probe
aggatatgctgcagcttcaggtcac

SEQ ID NO: 339337 - DNA, 25 bp, Artificial
  Probe
agtaaatatgccttgtgatggccaa

SEQ ID NO: 339338 - DNA, 25 bp, Artificial
  Probe
cttcatgccctagaaccagatagtg

SEQ ID NO: 339339 - DNA, 25 bp, Artificial
  Probe
accctgttcttcaagagtgtggtcc

SEQ ID NO: 339340 - DNA, 25 bp, Artificial
  Probe
tcaccctgttcttcaagagtgtggt

SEQ ID NO: 339341 - DNA, 25 bp, Artificial
  Probe
cctagaaccagatagtgcccccaaa

SEQ ID NO: 339342 - DNA, 25 bp, Artificial
  Probe
gagtgtggtccacttggccttcgtt

SEQ ID NO: 339343 - DNA, 25 bp, Artificial
  Probe
caagagtgtggtccacttggccttc

SEQ ID NO: 339344 - DNA, 25 bp, Artificial
  Probe
ttctcagagcagagaaatcaacttc

SEQ ID NO: 339345 - DNA, 25 bp, Artificial
  Probe
aaggatatgctgcagcttcaggtca

SEQ ID NO: 339346 - DNA, 25 bp, Artificial
  Probe
tatgccttgtgatggccaacgttcc

SEQ ID NO: 339347 - DNA, 25 bp, Artificial
  Probe
atggccaacgttccagtggatgatg

SEQ ID NO: 339348 - DNA, 25 bp, Artificial
  Probe
atgctgcagcttcaggtcaccacca

SEQ ID NO: 339349 - DNA, 25 bp, Artificial
  Probe
ctcaccctgttcttcaagagtgtgg

SEQ ID NO: 339350 - DNA, 25 bp, Artificial
  Probe
tagtagccctagcaacacaggccca

SEQ ID NO: 339351 - DNA, 25 bp, Artificial
  Probe
atatgccttgtgatggccaacgttc

SEQ ID NO: 339352 - DNA, 25 bp, Artificial
  Probe
atgccctagaaccagatagtgcccc

SEQ ID NO: 339353 - DNA, 25 bp, Artificial
  Probe
agaaccagatagtgcccccaaagcc

SEQ ID NO: 339354 - DNA, 25 bp, Artificial
  Probe
ttcaagagtgtggtccacttggcct

SEQ ID NO: 339355 - DNA, 25 bp, Artificial
  Probe
ccctgttcttcaagagtgtggtcca

SEQ ID NO: 339356 - DNA, 25 bp, Artificial
  Probe
ttgatgtccacaaggacacatatgt

SEQ ID NO: 339357 - DNA, 25 bp, Artificial
  Probe
gatggccaacgttccagtggatgat

SEQ ID NO: 339358 - DNA, 25 bp, Artificial
  Probe
gtgtggtccacttggccttcgttgt

SEQ ID NO: 339359 - DNA, 25 bp, Artificial
  Probe
ttcttcaagagtgtggtccacttgg

SEQ ID NO: 339360 - DNA, 25 bp, Artificial
  Probe
taaatatgccttgtgatggccaacg

SEQ ID NO: 339361 - DNA, 25 bp, Artificial
  Probe
accagactggggttctgttctgttc

SEQ ID NO: 339362 - DNA, 25 bp, Artificial
  Probe
ttacagccggtatcagaccttggaa

SEQ ID NO: 339363 - DNA, 25 bp, Artificial
  Probe
gttctgttctgttcagctcctgggc

SEQ ID NO: 339364 - DNA, 25 bp, Artificial
  Probe
tcagaccttggaactagagaaggag

SEQ ID NO: 339365 - DNA, 25 bp, Artificial
  Probe
agactggggttctgttctgttcagc

SEQ ID NO: 339366 - DNA, 25 bp, Artificial
  Probe
tccttatttgaccagaaagcgccgg

SEQ ID NO: 339367 - DNA, 25 bp, Artificial
  Probe
gggttctgttctgttcagctcctgg

SEQ ID NO: 339368 - DNA, 25 bp, Artificial
  Probe
ctggggttctgttctgttcagctcc

SEQ ID NO: 339369 - DNA, 25 bp, Artificial
  Probe
tctgttctgttcagctcctgggcgg

SEQ ID NO: 339370 - DNA, 25 bp, Artificial
  Probe
cggtatcagaccttggaactagaga

SEQ ID NO: 339371 - DNA, 25 bp, Artificial
  Probe
ttaatccttatttgaccagaaagcg

SEQ ID NO: 339372 - DNA, 25 bp, Artificial
  Probe
agccggtatcagaccttggaactag

SEQ ID NO: 339373 - DNA, 25 bp, Artificial
  Probe
cggacgacaaacttacagccggtat

SEQ ID NO: 339374 - DNA, 25 bp, Artificial
  Probe
gactggggttctgttctgttcagct

SEQ ID NO: 339375 - DNA, 25 bp, Artificial
  Probe
ggcgcagcggacgacaaacttacag

SEQ ID NO: 339376 - DNA, 25 bp, Artificial
  Probe
tatcagaccttggaactagagaagg

SEQ ID NO: 339377 - DNA, 25 bp, Artificial
  Probe
cagaccttggaactagagaaggagt

SEQ ID NO: 339378 - DNA, 25 bp, Artificial
  Probe
gacgacaaacttacagccggtatca

SEQ ID NO: 339379 - DNA, 25 bp, Artificial
  Probe
acgacaaacttacagccggtatcag

SEQ ID NO: 339380 - DNA, 25 bp, Artificial
  Probe
cggcgcagcggacgacaaacttaca

SEQ ID NO: 339381 - DNA, 25 bp, Artificial
  Probe
taatccttatttgaccagaaagcgc

SEQ ID NO: 339382 - DNA, 25 bp, Artificial
  Probe
gccggtatcagaccttggaactaga

SEQ ID NO: 339383 - DNA, 25 bp, Artificial
  Probe
cttatttgaccagaaagcgccggat

SEQ ID NO: 339384 - DNA, 25 bp, Artificial
  Probe
cttacagccggtatcagaccttgga

SEQ ID NO: 339385 - DNA, 25 bp, Artificial
  Probe
gcggcgcagcggacgacaaacttac

SEQ ID NO: 339386 - DNA, 25 bp, Artificial
  Probe
agcggacgacaaacttacagccggt

SEQ ID NO: 339387 - DNA, 25 bp, Artificial
  Probe
ggttctgttctgttcagctcctggg

SEQ ID NO: 339388 - DNA, 25 bp, Artificial
  Probe
cgacaaacttacagccggtatcaga

SEQ ID NO: 339389 - DNA, 25 bp, Artificial
  Probe
ccttatttgaccagaaagcgccgga

SEQ ID NO: 339390 - DNA, 25 bp, Artificial
  Probe
gtatcagaccttggaactagagaag

SEQ ID NO: 339391 - DNA, 25 bp, Artificial
  Probe
actggggttctgttctgttcagctc

SEQ ID NO: 339392 - DNA, 25 bp, Artificial
  Probe
acataaccagactggggttctgttc

SEQ ID NO: 339393 - DNA, 25 bp, Artificial
  Probe
ggtatcagaccttggaactagagaa

SEQ ID NO: 339394 - DNA, 25 bp, Artificial
  Probe
aatccttatttgaccagaaagcgcc

SEQ ID NO: 339395 - DNA, 25 bp, Artificial
  Probe
cagccggtatcagaccttggaacta

SEQ ID NO: 339396 - DNA, 25 bp, Artificial
  Probe
ccagactggggttctgttctgttca

SEQ ID NO: 339397 - DNA, 25 bp, Artificial
  Probe
tacagccggtatcagaccttggaac

SEQ ID NO: 339398 - DNA, 25 bp, Artificial
  Probe
cagcggacgacaaacttacagccgg

SEQ ID NO: 339399 - DNA, 25 bp, Artificial
  Probe
ggataaacttcctggggcccgagat

SEQ ID NO: 339400 - DNA, 25 bp, Artificial
  Probe
acttacagccggtatcagaccttgg

SEQ ID NO: 339401 - DNA, 25 bp, Artificial
  Probe
ccggtatcagaccttggaactagag

SEQ ID NO: 339402 - DNA, 25 bp, Artificial
  Probe
gcagcggacgacaaacttacagccg

SEQ ID NO: 339403 - DNA, 25 bp, Artificial
  Probe
gcgcagcggacgacaaacttacagc

SEQ ID NO: 339404 - DNA, 25 bp, Artificial
  Probe
ggggttctgttctgttcagctcctg

SEQ ID NO: 339405 - DNA, 25 bp, Artificial
  Probe
cagactggggttctgttctgttcag

SEQ ID NO: 339406 - DNA, 25 bp, Artificial
  Probe
ctgttctgttcagctcctgggcggc

SEQ ID NO: 339407 - DNA, 25 bp, Artificial
  Probe
atggagactctgagagcaaatcatg

SEQ ID NO: 339408 - DNA, 25 bp, Artificial
  Probe
ttcctccagggaccagtcaactggc

SEQ ID NO: 339409 - DNA, 25 bp, Artificial
  Probe
gtgcatctggcatgttgccaggagt

SEQ ID NO: 339410 - DNA, 25 bp, Artificial
  Probe
agtgcatctggcatgttgccaggag

SEQ ID NO: 339411 - DNA, 25 bp, Artificial
  Probe
cctcctgatggcatggagactctga

SEQ ID NO: 339412 - DNA, 25 bp, Artificial
  Probe
ggaccagtcaactggcagatactga

SEQ ID NO: 339413 - DNA, 25 bp, Artificial
  Probe
tccagggaccagtcaactggcagat

SEQ ID NO: 339414 - DNA, 25 bp, Artificial
  Probe
agacacaacctgctgcctgtctgtc

SEQ ID NO: 339415 - DNA, 25 bp, Artificial
  Probe
gcccagtgcatctggcatgttgcca

SEQ ID NO: 339416 - DNA, 25 bp, Artificial
  Probe
cctagagacacaacctgctgcctgt

SEQ ID NO: 339417 - DNA, 25 bp, Artificial
  Probe
tcgatgccacaactcgcactgcgtg

SEQ ID NO: 339418 - DNA, 25 bp, Artificial
  Probe
tgtctcacattgtgcctggtccgtg

SEQ ID NO: 339419 - DNA, 25 bp, Artificial
  Probe
gcctgtctgtccagccaagtgcgca

SEQ ID NO: 339420 - DNA, 25 bp, Artificial
  Probe
gactctgagagcaaatcatgtagat

SEQ ID NO: 339421 - DNA, 25 bp, Artificial
  Probe
actggcagatactgagaggaaccgg

SEQ ID NO: 339422 - DNA, 25 bp, Artificial
  Probe
tgtcctcccttttacctgtgggcag

SEQ ID NO: 339423 - DNA, 25 bp, Artificial
  Probe
tcacattgtgcctggtccgtgcctc

SEQ ID NO: 339424 - DNA, 25 bp, Artificial
  Probe
tcatgtagatgactcgatgccacaa

SEQ ID NO: 339425 - DNA, 25 bp, Artificial
  Probe
tgtccagccaagtgcgcatgtgccg

SEQ ID NO: 339426 - DNA, 25 bp, Artificial
  Probe
tttacctcctgatggcatggagact

SEQ ID NO: 339427 - DNA, 25 bp, Artificial
  Probe
atgtagatgactcgatgccacaact

SEQ ID NO: 339428 - DNA, 25 bp, Artificial
  Probe
gtctgtccagccaagtgcgcatgtg

SEQ ID NO: 339429 - DNA, 25 bp, Artificial
  Probe
caggtttcctccagggaccagtcaa

SEQ ID NO: 339430 - DNA, 25 bp, Artificial
  Probe
tagatgactcgatgccacaactcgc

SEQ ID NO: 339431 - DNA, 25 bp, Artificial
  Probe
cccataccgtgttgtccactggact

SEQ ID NO: 339432 - DNA, 25 bp, Artificial
  Probe
ttacctgtgggcagtcctgagccac

SEQ ID NO: 339433 - DNA, 25 bp, Artificial
  Probe
tcctccagggaccagtcaactggca

SEQ ID NO: 339434 - DNA, 25 bp, Artificial
  Probe
tatatttacctcctgatggcatgga

SEQ ID NO: 339435 - DNA, 25 bp, Artificial
  Probe
tcctcccttttacctgtgggcagtc

SEQ ID NO: 339436 - DNA, 25 bp, Artificial
  Probe
cacaactcgcactgcgtgcagtggg

SEQ ID NO: 339437 - DNA, 25 bp, Artificial
  Probe
aagcccagtgcatctggcatgttgc

SEQ ID NO: 339438 - DNA, 25 bp, Artificial
  Probe
cccttttacctgtgggcagtcctga

SEQ ID NO: 339439 - DNA, 25 bp, Artificial
  Probe
atactgagaggaaccggaagtgtcc

SEQ ID NO: 339440 - DNA, 25 bp, Artificial
  Probe
caaatcatgtagatgactcgatgcc

SEQ ID NO: 339441 - DNA, 25 bp, Artificial
  Probe
cagaaagcccagtgcatctggcatg

SEQ ID NO: 339442 - DNA, 25 bp, Artificial
  Probe
gtgggcagtcctgagccacgccatc

SEQ ID NO: 339443 - DNA, 25 bp, Artificial
  Probe
gacagaaagcccagtgcatctggca

SEQ ID NO: 339444 - DNA, 25 bp, Artificial
  Probe
ctgctgcctgtctgtccagccaagt

SEQ ID NO: 339445 - DNA, 25 bp, Artificial
  Probe
cagatactgagaggaaccggaagtg

SEQ ID NO: 339446 - DNA, 25 bp, Artificial
  Probe
ctcccttttacctgtgggcagtcct

SEQ ID NO: 339447 - DNA, 25 bp, Artificial
  Probe
gccacaactcgcactgcgtgcagtg

SEQ ID NO: 339448 - DNA, 25 bp, Artificial
  Probe
acctgtgggcagtcctgagccacgc

SEQ ID NO: 339449 - DNA, 25 bp, Artificial
  Probe
cagtcaactggcagatactgagagg

SEQ ID NO: 339450 - DNA, 25 bp, Artificial
  Probe
gcgcatgtgccgaggtgtgtctcac

SEQ ID NO: 339451 - DNA, 25 bp, Artificial
  Probe
tgactcgatgccacaactcgcactg

SEQ ID NO: 339452 - DNA, 25 bp, Artificial
  Probe
ctactgggtttgagacagacacttt

SEQ ID NO: 339453 - DNA, 25 bp, Artificial
  Probe
ttgtcatcaaaggttaaggccagta

SEQ ID NO: 339454 - DNA, 25 bp, Artificial
  Probe
tgtaactctaaggagccaaacaagc

SEQ ID NO: 339455 - DNA, 25 bp, Artificial
  Probe
catcctctgccgtctgaaggtcata

SEQ ID NO: 339456 - DNA, 25 bp, Artificial
  Probe
tgtggcctcctgagtctgtatagaa

SEQ ID NO: 339457 - DNA, 25 bp, Artificial
  Probe
tcatcaaaggttaaggccagtattg

SEQ ID NO: 339458 - DNA, 25 bp, Artificial
  Probe
aggagccaaacaagcaattacattt

SEQ ID NO: 339459 - DNA, 25 bp, Artificial
  Probe
tcctctgccgtctgaaggtcatacc

SEQ ID NO: 339460 - DNA, 25 bp, Artificial
  Probe
tgaaggtcataccttatagcctctt

SEQ ID NO: 339461 - DNA, 25 bp, Artificial
  Probe
aaacttgactgtaactctaaggagc

SEQ ID NO: 339462 - DNA, 25 bp, Artificial
  Probe
atagcctctttgtcatcaaaggtta

SEQ ID NO: 339463 - DNA, 25 bp, Artificial
  Probe
cctgctggtgggatcttcttggctg

SEQ ID NO: 339464 - DNA, 25 bp, Artificial
  Probe
gggtatttgcttttcaaccagtgtc

SEQ ID NO: 339465 - DNA, 25 bp, Artificial
  Probe
ggtcataccttatagcctctttgtc

SEQ ID NO: 339466 - DNA, 25 bp, Artificial
  Probe
gaaacttgactgtaactctaaggag

SEQ ID NO: 339467 - DNA, 25 bp, Artificial
  Probe
tctgaaggtcataccttatagcctc

SEQ ID NO: 339468 - DNA, 25 bp, Artificial
  Probe
cctcctgagtctgtatagaagatga

SEQ ID NO: 339469 - DNA, 25 bp, Artificial
  Probe
tgactgtaactctaaggagccaaac

SEQ ID NO: 339470 - DNA, 25 bp, Artificial
  Probe
tttgtcatcaaaggttaaggccagt

SEQ ID NO: 339471 - DNA, 25 bp, Artificial
  Probe
ctaaggagccaaacaagcaattaca

SEQ ID NO: 339472 - DNA, 25 bp, Artificial
  Probe
acttgactgtaactctaaggagcca

SEQ ID NO: 339473 - DNA, 25 bp, Artificial
  Probe
atcctctgccgtctgaaggtcatac

SEQ ID NO: 339474 - DNA, 25 bp, Artificial
  Probe
accacctgctggtgggatcttcttg

SEQ ID NO: 339475 - DNA, 25 bp, Artificial
  Probe
cctctgccgtctgaaggtcatacct

SEQ ID NO: 339476 - DNA, 25 bp, Artificial
  Probe
tctgtggcctcctgagtctgtatag

SEQ ID NO: 339477 - DNA, 25 bp, Artificial
  Probe
cctctttgtcatcaaaggttaaggc

SEQ ID NO: 339478 - DNA, 25 bp, Artificial
  Probe
actgtaactctaaggagccaaacaa

SEQ ID NO: 339479 - DNA, 25 bp, Artificial
  Probe
ggtctgtggcctcctgagtctgtat

SEQ ID NO: 339480 - DNA, 25 bp, Artificial
  Probe
aactgtcattagaaacttgactgta

SEQ ID NO: 339481 - DNA, 25 bp, Artificial
  Probe
tctttgtcatcaaaggttaaggcca

SEQ ID NO: 339482 - DNA, 25 bp, Artificial
  Probe
ttgactgtaactctaaggagccaaa

SEQ ID NO: 339483 - DNA, 25 bp, Artificial
  Probe
ggtatttgcttttcaaccagtgtca

SEQ ID NO: 339484 - DNA, 25 bp, Artificial
  Probe
tgtcattagaaacttgactgtaact

SEQ ID NO: 339485 - DNA, 25 bp, Artificial
  Probe
gccgtctgaaggtcataccttatag

SEQ ID NO: 339486 - DNA, 25 bp, Artificial
  Probe
gaaggtcataccttatagcctcttt

SEQ ID NO: 339487 - DNA, 25 bp, Artificial
  Probe
ggcctcctgagtctgtatagaagat

SEQ ID NO: 339488 - DNA, 25 bp, Artificial
  Probe
tggtctgtggcctcctgagtctgta

SEQ ID NO: 339489 - DNA, 25 bp, Artificial
  Probe
agcaaaagaagactgccttggggag

SEQ ID NO: 339490 - DNA, 25 bp, Artificial
  Probe
ctcctgagtctgtatagaagatgag

SEQ ID NO: 339491 - DNA, 25 bp, Artificial
  Probe
ctctaaggagccaaacaagcaatta

SEQ ID NO: 339492 - DNA, 25 bp, Artificial
  Probe
cttatagcctctttgtcatcaaagg

SEQ ID NO: 339493 - DNA, 25 bp, Artificial
  Probe
gtaactctaaggagccaaacaagca

SEQ ID NO: 339494 - DNA, 25 bp, Artificial
  Probe
agttaccacctgctggtgggatctt

SEQ ID NO: 339495 - DNA, 25 bp, Artificial
  Probe
ctgtggcctcctgagtctgtataga

SEQ ID NO: 339496 - DNA, 25 bp, Artificial
  Probe
tagcctctttgtcatcaaaggttaa

SEQ ID NO: 339497 - DNA, 25 bp, Artificial
  Probe
taaactgtcattagaaacttgactg

SEQ ID NO: 339498 - DNA, 25 bp, Artificial
  Probe
ttaccacctgctggtgggatcttct

SEQ ID NO: 339499 - DNA, 25 bp, Artificial
  Probe
acagctgcccggccacgaatgaatg

SEQ ID NO: 339500 - DNA, 25 bp, Artificial
  Probe
catagagtacagctgcccggccacg

SEQ ID NO: 339501 - DNA, 25 bp, Artificial
  Probe
gcaaatcctgccaggcctgccgctt

SEQ ID NO: 339502 - DNA, 25 bp, Artificial
  Probe
tgcccggccacgaatgaatgtgaga

SEQ ID NO: 339503 - DNA, 25 bp, Artificial
  Probe
acgcaaatcctgccaggcctgccgc

SEQ ID NO: 339504 - DNA, 25 bp, Artificial
  Probe
aagcgcagacgcaaatcctgccagg

SEQ ID NO: 339505 - DNA, 25 bp, Artificial
  Probe
tcaccaagcgcagacgcaaatcctg

SEQ ID NO: 339506 - DNA, 25 bp, Artificial
  Probe
tagagtacagctgcccggccacgaa

SEQ ID NO: 339507 - DNA, 25 bp, Artificial
  Probe
agctgcccggccacgaatgaatgtg

SEQ ID NO: 339508 - DNA, 25 bp, Artificial
  Probe
gtgagatcaccaagcgcagacgcaa

SEQ ID NO: 339509 - DNA, 25 bp, Artificial
  Probe
aatcctgccaggcctgccgcttcat

SEQ ID NO: 339510 - DNA, 25 bp, Artificial
  Probe
gcgcagacgcaaatcctgccaggcc

SEQ ID NO: 339511 - DNA, 25 bp, Artificial
  Probe
cgcagacgcaaatcctgccaggcct

SEQ ID NO: 339512 - DNA, 25 bp, Artificial
  Probe
atcctgccaggcctgccgcttcatg

SEQ ID NO: 339513 - DNA, 25 bp, Artificial
  Probe
agatcaccaagcgcagacgcaaatc

SEQ ID NO: 339514 - DNA, 25 bp, Artificial
  Probe
ctgcccggccacgaatgaatgtgag

SEQ ID NO: 339515 - DNA, 25 bp, Artificial
  Probe
agcgcagacgcaaatcctgccaggc

SEQ ID NO: 339516 - DNA, 25 bp, Artificial
  Probe
cgcaaatcctgccaggcctgccgct

SEQ ID NO: 339517 - DNA, 25 bp, Artificial
  Probe
gacgcaaatcctgccaggcctgccg

SEQ ID NO: 339518 - DNA, 25 bp, Artificial
  Probe
gagtacagctgcccggccacgaatg

SEQ ID NO: 339519 - DNA, 25 bp, Artificial
  Probe
aacatagagtacagctgcccggcca

SEQ ID NO: 339520 - DNA, 25 bp, Artificial
  Probe
caagcgcagacgcaaatcctgccag

SEQ ID NO: 339521 - DNA, 25 bp, Artificial
  Probe
tgtgagatcaccaagcgcagacgca

SEQ ID NO: 339522 - DNA, 25 bp, Artificial
  Probe
acatagagtacagctgcccggccac

SEQ ID NO: 339523 - DNA, 25 bp, Artificial
  Probe
ccaagcgcagacgcaaatcctgcca

SEQ ID NO: 339524 - DNA, 25 bp, Artificial
  Probe
gatcaccaagcgcagacgcaaatcc

SEQ ID NO: 339525 - DNA, 25 bp, Artificial
  Probe
atcaccaagcgcagacgcaaatcct

SEQ ID NO: 339526 - DNA, 25 bp, Artificial
  Probe
atgtgagatcaccaagcgcagacgc

SEQ ID NO: 339527 - DNA, 25 bp, Artificial
  Probe
atagagtacagctgcccggccacga

SEQ ID NO: 339528 - DNA, 25 bp, Artificial
  Probe
gcccggccacgaatgaatgtgagat

SEQ ID NO: 339529 - DNA, 25 bp, Artificial
  Probe
cggccacgaatgaatgtgagatcac

SEQ ID NO: 339530 - DNA, 25 bp, Artificial
  Probe
agagtacagctgcccggccacgaat

SEQ ID NO: 339531 - DNA, 25 bp, Artificial
  Probe
agacgcaaatcctgccaggcctgcc

SEQ ID NO: 339532 - DNA, 25 bp, Artificial
  Probe
cagctgcccggccacgaatgaatgt

SEQ ID NO: 339533 - DNA, 25 bp, Artificial
  Probe
tgagatcaccaagcgcagacgcaaa

SEQ ID NO: 339534 - DNA, 25 bp, Artificial
  Probe
aaatcctgccaggcctgccgcttca

SEQ ID NO: 339535 - DNA, 25 bp, Artificial
  Probe
gtacagctgcccggccacgaatgaa

SEQ ID NO: 339536 - DNA, 25 bp, Artificial
  Probe
gagatcaccaagcgcagacgcaaat

SEQ ID NO: 339537 - DNA, 25 bp, Artificial
  Probe
aatgtgagatcaccaagcgcagacg

SEQ ID NO: 339538 - DNA, 25 bp, Artificial
  Probe
agtacagctgcccggccacgaatga

SEQ ID NO: 339539 - DNA, 25 bp, Artificial
  Probe
caaatcctgccaggcctgccgcttc

SEQ ID NO: 339540 - DNA, 25 bp, Artificial
  Probe
gacaattcaaggtaacatagagtac

SEQ ID NO: 339541 - DNA, 25 bp, Artificial
  Probe
gctgcccggccacgaatgaatgtga

SEQ ID NO: 339542 - DNA, 25 bp, Artificial
  Probe
accaagcgcagacgcaaatcctgcc

SEQ ID NO: 339543 - DNA, 25 bp, Artificial
  Probe
gcagacgcaaatcctgccaggcctg

SEQ ID NO: 339544 - DNA, 25 bp, Artificial
  Probe
cagacgcaaatcctgccaggcctgc

SEQ ID NO: 339545 - DNA, 25 bp, Artificial
  Probe
cagatttatcaggtctacccctgaa

SEQ ID NO: 339546 - DNA, 25 bp, Artificial
  Probe
cactctgccaggtctgagctgggga

SEQ ID NO: 339547 - DNA, 25 bp, Artificial
  Probe
atgcttctgtcttggccccgcaaga

SEQ ID NO: 339548 - DNA, 25 bp, Artificial
  Probe
tgcctcatggccagaatatgaccgt

SEQ ID NO: 339549 - DNA, 25 bp, Artificial
  Probe
gtgcagctcctctgccactggcttg

SEQ ID NO: 339550 - DNA, 25 bp, Artificial
  Probe
tgacactctgccaggtctgagctgg

SEQ ID NO: 339551 - DNA, 25 bp, Artificial
  Probe
gaagtcatcatgagatcttattccc

SEQ ID NO: 339552 - DNA, 25 bp, Artificial
  Probe
tggctgcctctgcacattttcaacc

SEQ ID NO: 339553 - DNA, 25 bp, Artificial
  Probe
ggccccgcaagatcgtgcctcatgg

SEQ ID NO: 339554 - DNA, 25 bp, Artificial
  Probe
ttggccccgcaagatcgtgcctcat

SEQ ID NO: 339555 - DNA, 25 bp, Artificial
  Probe
agaatatgaccgtcagtgtggtcat

SEQ ID NO: 339556 - DNA, 25 bp, Artificial
  Probe
cttctgcgggacctggacccgcgtg

SEQ ID NO: 339557 - DNA, 25 bp, Artificial
  Probe
actggcttgccatgagctccgcctg

SEQ ID NO: 339558 - DNA, 25 bp, Artificial
  Probe
ccccggaagtcatcatgagatctta

SEQ ID NO: 339559 - DNA, 25 bp, Artificial
  Probe
aggagctacgcaagatgcttctgtc

SEQ ID NO: 339560 - DNA, 25 bp, Artificial
  Probe
tgcacgacagcttccgagaggagct

SEQ ID NO: 339561 - DNA, 25 bp, Artificial
  Probe
ggcttgccatgagctccgcctgcta

SEQ ID NO: 339562 - DNA, 25 bp, Artificial
  Probe
ccagccctctagactagctatatgt

SEQ ID NO: 339563 - DNA, 25 bp, Artificial
  Probe
tctatgcgtggctgcacgacagctt

SEQ ID NO: 339564 - DNA, 25 bp, Artificial
  Probe
ttcagagtcattagccccggaagtc

SEQ ID NO: 339565 - DNA, 25 bp, Artificial
  Probe
tctgccactggcttgccatgagctc

SEQ ID NO: 339566 - DNA, 25 bp, Artificial
  Probe
ctgctggctgcctctgcacattttc

SEQ ID NO: 339567 - DNA, 25 bp, Artificial
  Probe
acaaccccttcatctatgcgtggct

SEQ ID NO: 339568 - DNA, 25 bp, Artificial
  Probe
gggagcttcagagtcattagccccg

SEQ ID NO: 339569 - DNA, 25 bp, Artificial
  Probe
ttctgcgggacctggacccgcgtgc

SEQ ID NO: 339570 - DNA, 25 bp, Artificial
  Probe
gatcgtgcctcatggccagaatatg

SEQ ID NO: 339571 - DNA, 25 bp, Artificial
  Probe
cattagccccggaagtcatcatgag

SEQ ID NO: 339572 - DNA, 25 bp, Artificial
  Probe
ggctgcctctgcacattttcaacct

SEQ ID NO: 339573 - DNA, 25 bp, Artificial
  Probe
ctgatgacactctgccaggtctgag

SEQ ID NO: 339574 - DNA, 25 bp, Artificial
  Probe
atttatcaggtctacccctgaaagc

SEQ ID NO: 339575 - DNA, 25 bp, Artificial
  Probe
agctggggagcttcagagtcattag

SEQ ID NO: 339576 - DNA, 25 bp, Artificial
  Probe
accccttcatctatgcgtggctgca

SEQ ID NO: 339577 - DNA, 25 bp, Artificial
  Probe
ttttcaaccttctgcgggacctgga

SEQ ID NO: 339578 - DNA, 25 bp, Artificial
  Probe
actagctatatgtctgtttgtgtgc

SEQ ID NO: 339579 - DNA, 25 bp, Artificial
  Probe
ggccagaatatgaccgtcagtgtgg

SEQ ID NO: 339580 - DNA, 25 bp, Artificial
  Probe
tctgagctggggagcttcagagtca

SEQ ID NO: 339581 - DNA, 25 bp, Artificial
  Probe
tctgcacattttcaaccttctgcgg

SEQ ID NO: 339582 - DNA, 25 bp, Artificial
  Probe
caagatcgtgcctcatggccagaat

SEQ ID NO: 339583 - DNA, 25 bp, Artificial
  Probe
ttcatctatgcgtggctgcacgaca

SEQ ID NO: 339584 - DNA, 25 bp, Artificial
  Probe
tgcgggacctggacccgcgtgccat

SEQ ID NO: 339585 - DNA, 25 bp, Artificial
  Probe
ttccgagaggagctacgcaagatgc

SEQ ID NO: 339586 - DNA, 25 bp, Artificial
  Probe
ctagctatatgtctgtttgtgtgct

SEQ ID NO: 339587 - DNA, 25 bp, Artificial
  Probe
acgccttcgggctggtgcagctcct

SEQ ID NO: 339588 - DNA, 25 bp, Artificial
  Probe
cgacagcttccgagaggagctacgc

SEQ ID NO: 339589 - DNA, 25 bp, Artificial
  Probe
ctagactagctatatgtctgtttgt

SEQ ID NO: 339590 - DNA, 25 bp, Artificial
  Probe
caggtctacccctgaaagcaaaaga

SEQ ID NO: 339591 - DNA, 25 bp, Artificial
  Probe
ccttcagcaggcatcattgaaactc

SEQ ID NO: 339592 - DNA, 25 bp, Artificial
  Probe
aaggttctggaagttctagcactgg

SEQ ID NO: 339593 - DNA, 25 bp, Artificial
  Probe
tgcctgctgacgagtgcaacaagct

SEQ ID NO: 339594 - DNA, 25 bp, Artificial
  Probe
taggcaggcggcatcttcccttcag

SEQ ID NO: 339595 - DNA, 25 bp, Artificial
  Probe
acgctgaagaagaccggaggaagaa

SEQ ID NO: 339596 - DNA, 25 bp, Artificial
  Probe
agcaacagattgtaatccagtcttc

SEQ ID NO: 339597 - DNA, 25 bp, Artificial
  Probe
cattgaaactctttgaaatggcata

SEQ ID NO: 339598 - DNA, 25 bp, Artificial
  Probe
tgctgacgagtgcaacaagctaaag

SEQ ID NO: 339599 - DNA, 25 bp, Artificial
  Probe
cctgctgacgagtgcaacaagctaa

SEQ ID NO: 339600 - DNA, 25 bp, Artificial
  Probe
ggcaggcggcatcttcccttcagca

SEQ ID NO: 339601 - DNA, 25 bp, Artificial
  Probe
caggcatcattgaaactctttgaaa

SEQ ID NO: 339602 - DNA, 25 bp, Artificial
  Probe
ttcatgacacagaaaccaagatgga

SEQ ID NO: 339603 - DNA, 25 bp, Artificial
  Probe
catgacacagaaaccaagatggaag

SEQ ID NO: 339604 - DNA, 25 bp, Artificial
  Probe
tcaaggaccagttgcctgctgacga

SEQ ID NO: 339605 - DNA, 25 bp, Artificial
  Probe
ttgctcgaaaggacagtgaaacagg

SEQ ID NO: 339606 - DNA, 25 bp, Artificial
  Probe
gtaatccagtcttctggtggattaa

SEQ ID NO: 339607 - DNA, 25 bp, Artificial
  Probe
gaactccttgctcgaaaggacagtg

SEQ ID NO: 339608 - DNA, 25 bp, Artificial
  Probe
ctccttgctcgaaaggacagtgaaa

SEQ ID NO: 339609 - DNA, 25 bp, Artificial
  Probe
ggaccagttgcctgctgacgagtgc

SEQ ID NO: 339610 - DNA, 25 bp, Artificial
  Probe
gaattcaaggaccagttgcctgctg

SEQ ID NO: 339611 - DNA, 25 bp, Artificial
  Probe
agagaactccttgctcgaaaggaca

SEQ ID NO: 339612 - DNA, 25 bp, Artificial
  Probe
gatggcatctgaacgggaaggttct

SEQ ID NO: 339613 - DNA, 25 bp, Artificial
  Probe
agatggcatctgaacgggaaggttc

SEQ ID NO: 339614 - DNA, 25 bp, Artificial
  Probe
cttcccttcagcaggcatcattgaa

SEQ ID NO: 339615 - DNA, 25 bp, Artificial
  Probe
tacgctgaagaagaccggaggaaga

SEQ ID NO: 339616 - DNA, 25 bp, Artificial
  Probe
ggcatcttcccttcagcaggcatca

SEQ ID NO: 339617 - DNA, 25 bp, Artificial
  Probe
gttgcctgctgacgagtgcaacaag

SEQ ID NO: 339618 - DNA, 25 bp, Artificial
  Probe
agattgtaatccagtcttctggtgg

SEQ ID NO: 339619 - DNA, 25 bp, Artificial
  Probe
aagtacgctgaagaagaccggagga

SEQ ID NO: 339620 - DNA, 25 bp, Artificial
  Probe
ctgacgagtgcaacaagctaaagga

SEQ ID NO: 339621 - DNA, 25 bp, Artificial
  Probe
cagtcttctggtggattaagcaaag

SEQ ID NO: 339622 - DNA, 25 bp, Artificial
  Probe
accagttgcctgctgacgagtgcaa

SEQ ID NO: 339623 - DNA, 25 bp, Artificial
  Probe
agaattcaaggaccagttgcctgct

SEQ ID NO: 339624 - DNA, 25 bp, Artificial
  Probe
tcagcaggcatcattgaaactcttt

SEQ ID NO: 339625 - DNA, 25 bp, Artificial
  Probe
acgagtgcaacaagctaaaggaaga

SEQ ID NO: 339626 - DNA, 25 bp, Artificial
  Probe
caggcggcatcttcccttcagcagg

SEQ ID NO: 339627 - DNA, 25 bp, Artificial
  Probe
acagattgtaatccagtcttctggt

SEQ ID NO: 339628 - DNA, 25 bp, Artificial
  Probe
agtacgctgaagaagaccggaggaa

SEQ ID NO: 339629 - DNA, 25 bp, Artificial
  Probe
atcttcccttcagcaggcatcattg

SEQ ID NO: 339630 - DNA, 25 bp, Artificial
  Probe
attcaaggaccagttgcctgctgac

SEQ ID NO: 339631 - DNA, 25 bp, Artificial
  Probe
aaatgagagaactccttgctcgaaa

SEQ ID NO: 339632 - DNA, 25 bp, Artificial
  Probe
catcattgaaactctttgaaatggc

SEQ ID NO: 339633 - DNA, 25 bp, Artificial
  Probe
cgagtgcaacaagctaaaggaagag

SEQ ID NO: 339634 - DNA, 25 bp, Artificial
  Probe
catctgaacgggaaggttctggaag

SEQ ID NO: 339635 - DNA, 25 bp, Artificial
  Probe
ttcagcaggcatcattgaaactctt

SEQ ID NO: 339636 - DNA, 25 bp, Artificial
  Probe
cagttgcctgctgacgagtgcaaca

SEQ ID NO: 339637 - DNA, 25 bp, Artificial
  Probe
gttcattttaatggccacggccatt

SEQ ID NO: 339638 - DNA, 25 bp, Artificial
  Probe
aattcctgttgattttgctttgcgc

SEQ ID NO: 339639 - DNA, 25 bp, Artificial
  Probe
ctaaagcctattcataaagtgggat

SEQ ID NO: 339640 - DNA, 25 bp, Artificial
  Probe
tttgtcacttctagatggtggtacc

SEQ ID NO: 339641 - DNA, 25 bp, Artificial
  Probe
ttttgtcacttctagatggtggtac

SEQ ID NO: 339642 - DNA, 25 bp, Artificial
  Probe
gtagtccaaaactgctttacttttg

SEQ ID NO: 339643 - DNA, 25 bp, Artificial
  Probe
tcacttctagatggtggtacctctt

SEQ ID NO: 339644 - DNA, 25 bp, Artificial
  Probe
ctgctttacttttgtaagaacactg

SEQ ID NO: 339645 - DNA, 25 bp, Artificial
  Probe
ttagtagtccaaaactgctttactt

SEQ ID NO: 339646 - DNA, 25 bp, Artificial
  Probe
atctaaagcctattcataaagtggg

SEQ ID NO: 339647 - DNA, 25 bp, Artificial
  Probe
taccaaaatacacaccagttatata

SEQ ID NO: 339648 - DNA, 25 bp, Artificial
  Probe
tgttcattttaatggccacggccat

SEQ ID NO: 339649 - DNA, 25 bp, Artificial
  Probe
tttttttaagcatttatctttagct

SEQ ID NO: 339650 - DNA, 25 bp, Artificial
  Probe
tctaaagcctattcataaagtggga

SEQ ID NO: 339651 - DNA, 25 bp, Artificial
  Probe
gctttacttttgtaagaacactggt

SEQ ID NO: 339652 - DNA, 25 bp, Artificial
  Probe
atattcttgtgcctcatatttcacc

SEQ ID NO: 339653 - DNA, 25 bp, Artificial
  Probe
ctttgcgcttgaaaggaataaaatc

SEQ ID NO: 339654 - DNA, 25 bp, Artificial
  Probe
tgttagtagtccaaaactgctttac

SEQ ID NO: 339655 - DNA, 25 bp, Artificial
  Probe
gtcacttctagatggtggtacctct

SEQ ID NO: 339656 - DNA, 25 bp, Artificial
  Probe
aattaagaccatagagactgagtag

SEQ ID NO: 339657 - DNA, 25 bp, Artificial
  Probe
tggtacctcttataaaatgtttggg

SEQ ID NO: 339658 - DNA, 25 bp, Artificial
  Probe
ttgtcacttctagatggtggtacct

SEQ ID NO: 339659 - DNA, 25 bp, Artificial
  Probe
aagaacactggttaatttgtataag

SEQ ID NO: 339660 - DNA, 25 bp, Artificial
  Probe
ctgttgattttgctttgcgcttgaa

SEQ ID NO: 339661 - DNA, 25 bp, Artificial
  Probe
cctattcataaagtgggatatgtag

SEQ ID NO: 339662 - DNA, 25 bp, Artificial
  Probe
cttctagatggtggtacctcttata

SEQ ID NO: 339663 - DNA, 25 bp, Artificial
  Probe
tatttcaccacaaatacagtgtaat

SEQ ID NO: 339664 - DNA, 25 bp, Artificial
  Probe
ttcttcttttaatctaaagcctatt

SEQ ID NO: 339665 - DNA, 25 bp, Artificial
  Probe
caccacaaatacagtgtaatgttag

SEQ ID NO: 339666 - DNA, 25 bp, Artificial
  Probe
tgtcacttctagatggtggtacctc

SEQ ID NO: 339667 - DNA, 25 bp, Artificial
  Probe
atgttagtagtccaaaactgcttta

SEQ ID NO: 339668 - DNA, 25 bp, Artificial
  Probe
aactatttatttttgtcacttctag

SEQ ID NO: 339669 - DNA, 25 bp, Artificial
  Probe
cacttctagatggtggtacctctta

SEQ ID NO: 339670 - DNA, 25 bp, Artificial
  Probe
tctagatggtggtacctcttataaa

SEQ ID NO: 339671 - DNA, 25 bp, Artificial
  Probe
aaattcctgttgattttgctttgcg

SEQ ID NO: 339672 - DNA, 25 bp, Artificial
  Probe
cctgttgattttgctttgcgcttga

SEQ ID NO: 339673 - DNA, 25 bp, Artificial
  Probe
tcaccacaaatacagtgtaatgtta

SEQ ID NO: 339674 - DNA, 25 bp, Artificial
  Probe
gttagtagtccaaaactgctttact

SEQ ID NO: 339675 - DNA, 25 bp, Artificial
  Probe
accacaaatacagtgtaatgttagt

SEQ ID NO: 339676 - DNA, 25 bp, Artificial
  Probe
acttctagatggtggtacctcttat

SEQ ID NO: 339677 - DNA, 25 bp, Artificial
  Probe
tgctttacttttgtaagaacactgg

SEQ ID NO: 339678 - DNA, 25 bp, Artificial
  Probe
tttttatgctttagagattaaataa

SEQ ID NO: 339679 - DNA, 25 bp, Artificial
  Probe
atgttatatagctttttatgcttta

SEQ ID NO: 339680 - DNA, 25 bp, Artificial
  Probe
aatctaaagcctattcataaagtgg

SEQ ID NO: 339681 - DNA, 25 bp, Artificial
  Probe
ctagatggtggtacctcttataaaa

SEQ ID NO: 339682 - DNA, 25 bp, Artificial
  Probe
agaccatagagactgagtagatgga

SEQ ID NO: 339683 - DNA, 25 bp, Artificial
  Probe
caggtgccagccattcagtttttca

SEQ ID NO: 339684 - DNA, 25 bp, Artificial
  Probe
aggcctccttgttcttcagcaggtt

SEQ ID NO: 339685 - DNA, 25 bp, Artificial
  Probe
agccccgcagtgagcccaggagagc

SEQ ID NO: 339686 - DNA, 25 bp, Artificial
  Probe
tccgggcctgtgtctcgagactgag

SEQ ID NO: 339687 - DNA, 25 bp, Artificial
  Probe
attacgtggagctgcctccaagcat

SEQ ID NO: 339688 - DNA, 25 bp, Artificial
  Probe
tctggtgctcactctgcccacagag

SEQ ID NO: 339689 - DNA, 25 bp, Artificial
  Probe
ggtccctctctagaggtctcctcag

SEQ ID NO: 339690 - DNA, 25 bp, Artificial
  Probe
tgaagattacgtggagctgcctcca

SEQ ID NO: 339691 - DNA, 25 bp, Artificial
  Probe
agcatcaggactacctgtcactgcc

SEQ ID NO: 339692 - DNA, 25 bp, Artificial
  Probe
caccagcagtgtttgaagattacgt

SEQ ID NO: 339693 - DNA, 25 bp, Artificial
  Probe
ctgaggacctagacaaggacttgtc

SEQ ID NO: 339694 - DNA, 25 bp, Artificial
  Probe
tctagaggtctcctcagcccaaagc

SEQ ID NO: 339695 - DNA, 25 bp, Artificial
  Probe
ttgaagattacgtggagctgcctcc

SEQ ID NO: 339696 - DNA, 25 bp, Artificial
  Probe
tctctagaggtctcctcagcccaaa

SEQ ID NO: 339697 - DNA, 25 bp, Artificial
  Probe
gagcccttgtctacctctctgggtc

SEQ ID NO: 339698 - DNA, 25 bp, Artificial
  Probe
caatagccagcctgggaaggtgtgc

SEQ ID NO: 339699 - DNA, 25 bp, Artificial
  Probe
gacttgtctgtcaaaaagcttccct

SEQ ID NO: 339700 - DNA, 25 bp, Artificial
  Probe
gagctgcctccaagcatgagccagc

SEQ ID NO: 339701 - DNA, 25 bp, Artificial
  Probe
caagcatgagccagcctgccaagtc

SEQ ID NO: 339702 - DNA, 25 bp, Artificial
  Probe
accctgaaggcctccttgttcttca

SEQ ID NO: 339703 - DNA, 25 bp, Artificial
  Probe
gcccagggtcccttctgaaagtcca

SEQ ID NO: 339704 - DNA, 25 bp, Artificial
  Probe
cctccttgttcttcagcaggttggg

SEQ ID NO: 339705 - DNA, 25 bp, Artificial
  Probe
aagcagccccgcagtgagcccagga

SEQ ID NO: 339706 - DNA, 25 bp, Artificial
  Probe
gtgtctcgagactgaggacctagac

SEQ ID NO: 339707 - DNA, 25 bp, Artificial
  Probe
tctctgtctcaagctgcccagggtc

SEQ ID NO: 339708 - DNA, 25 bp, Artificial
  Probe
tacctctctgggtccctctctagag

SEQ ID NO: 339709 - DNA, 25 bp, Artificial
  Probe
gcctgtgtctcgagactgaggacct

SEQ ID NO: 339710 - DNA, 25 bp, Artificial
  Probe
ccttgggacaatagccagcctggga

SEQ ID NO: 339711 - DNA, 25 bp, Artificial
  Probe
agctgcccagggtcccttctgaaag

SEQ ID NO: 339712 - DNA, 25 bp, Artificial
  Probe
accccaggtgccagccattcagttt

SEQ ID NO: 339713 - DNA, 25 bp, Artificial
  Probe
ccccttgggacaatagccagcctgg

SEQ ID NO: 339714 - DNA, 25 bp, Artificial
  Probe
aagattacgtggagctgcctccaag

SEQ ID NO: 339715 - DNA, 25 bp, Artificial
  Probe
agactgaggacctagacaaggactt

SEQ ID NO: 339716 - DNA, 25 bp, Artificial
  Probe
cctagacaaggacttgtctgtcaaa

SEQ ID NO: 339717 - DNA, 25 bp, Artificial
  Probe
cgtggagctgcctccaagcatgagc

SEQ ID NO: 339718 - DNA, 25 bp, Artificial
  Probe
aagccccagtctctgtctcaagctg

SEQ ID NO: 339719 - DNA, 25 bp, Artificial
  Probe
gccagccattcagtttttcaagtcc

SEQ ID NO: 339720 - DNA, 25 bp, Artificial
  Probe
acagagcccttgtctacctctctgg

SEQ ID NO: 339721 - DNA, 25 bp, Artificial
  Probe
cctgtgtctcgagactgaggaccta

SEQ ID NO: 339722 - DNA, 25 bp, Artificial
  Probe
ttttcaagtccctaaagcatcagga

SEQ ID NO: 339723 - DNA, 25 bp, Artificial
  Probe
tctctgggtccctctctagaggtct

SEQ ID NO: 339724 - DNA, 25 bp, Artificial
  Probe
aaagccccagtctctgtctcaagct

SEQ ID NO: 339725 - DNA, 25 bp, Artificial
  Probe
ctcgagactgaggacctagacaagg

SEQ ID NO: 339726 - DNA, 25 bp, Artificial
  Probe
cagtctctgtctcaagctgcccagg

SEQ ID NO: 339727 - DNA, 25 bp, Artificial
  Probe
cgagactgaggacctagacaaggac

SEQ ID NO: 339728 - DNA, 25 bp, Artificial
  Probe
ctctccgggcctgtgtctcgagact

SEQ ID NO: 339729 - DNA, 25 bp, Artificial
  Probe
ccgtcacaaagagcttcaacagggg

SEQ ID NO: 339730 - DNA, 25 bp, Artificial
  Probe
tccaatcgggtaactcccaggagag

SEQ ID NO: 339731 - DNA, 25 bp, Artificial
  Probe
gcctctgttgtgtgcctgctgaata

SEQ ID NO: 339732 - DNA, 25 bp, Artificial
  Probe
acgcctgcgaagtcacccatcaggg

SEQ ID NO: 339733 - DNA, 25 bp, Artificial
  Probe
gtactgtggctgcaccatctgtctt

SEQ ID NO: 339734 - DNA, 25 bp, Artificial
  Probe
ccctgacgctgagcaaagcagacta

SEQ ID NO: 339735 - DNA, 25 bp, Artificial
  Probe
tgagcaaagcagactacgagaaaca

SEQ ID NO: 339736 - DNA, 25 bp, Artificial
  Probe
ggccaagggaccaaggtggaaatca

SEQ ID NO: 339737 - DNA, 25 bp, Artificial
  Probe
tctatcccagagaggccaaagtaca

SEQ ID NO: 339738 - DNA, 25 bp, Artificial
  Probe
tcccaggagagtgtcacagagcagg

SEQ ID NO: 339739 - DNA, 25 bp, Artificial
  Probe
acgtactgtggctgcaccatctgtc

SEQ ID NO: 339740 - DNA, 25 bp, Artificial
  Probe
tacgcctgcgaagtcacccatcagg

SEQ ID NO: 339741 - DNA, 25 bp, Artificial
  Probe
tgaaatctggaactgcctctgttgt

SEQ ID NO: 339742 - DNA, 25 bp, Artificial
  Probe
cccaggagagtgtcacagagcagga

SEQ ID NO: 339743 - DNA, 25 bp, Artificial
  Probe
ctgagcaaagcagactacgagaaac

SEQ ID NO: 339744 - DNA, 25 bp, Artificial
  Probe
gcgaagtcacccatcagggcctgag

SEQ ID NO: 339745 - DNA, 25 bp, Artificial
  Probe
agtaggccgcgcacgttcggccaag

SEQ ID NO: 339746 - DNA, 25 bp, Artificial
  Probe
ctgttgtgtgcctgctgaataactt

SEQ ID NO: 339747 - DNA, 25 bp, Artificial
  Probe
tcttcccgccatctgatgagcagtt

SEQ ID NO: 339748 - DNA, 25 bp, Artificial
  Probe
tcaaacgtactgtggctgcaccatc

SEQ ID NO: 339749 - DNA, 25 bp, Artificial
  Probe
gaaatctggaactgcctctgttgtg

SEQ ID NO: 339750 - DNA, 25 bp, Artificial
  Probe
tgcctctgttgtgtgcctgctgaat

SEQ ID NO: 339751 - DNA, 25 bp, Artificial
  Probe
ttcccgccatctgatgagcagttga

SEQ ID NO: 339752 - DNA, 25 bp, Artificial
  Probe
tgagctcgcccgtcacaaagagctt

SEQ ID NO: 339753 - DNA, 25 bp, Artificial
  Probe
gctcgcccgtcacaaagagcttcaa

SEQ ID NO: 339754 - DNA, 25 bp, Artificial
  Probe
gccaagggaccaaggtggaaatcaa

SEQ ID NO: 339755 - DNA, 25 bp, Artificial
  Probe
gagtgtcacagagcaggacagcaag

SEQ ID NO: 339756 - DNA, 25 bp, Artificial
  Probe
ttgaaatctggaactgcctctgttg

SEQ ID NO: 339757 - DNA, 25 bp, Artificial
  Probe
tggaaatcaaacgtactgtggctgc

SEQ ID NO: 339758 - DNA, 25 bp, Artificial
  Probe
gcacgttcggccaagggaccaaggt

SEQ ID NO: 339759 - DNA, 25 bp, Artificial
  Probe
cgggtaactcccaggagagtgtcac

SEQ ID NO: 339760 - DNA, 25 bp, Artificial
  Probe
cgtcacaaagagcttcaacagggga

SEQ ID NO: 339761 - DNA, 25 bp, Artificial
  Probe
tgacgctgagcaaagcagactacga

SEQ ID NO: 339762 - DNA, 25 bp, Artificial
  Probe
cagcagcaccctgacgctgagcaaa

SEQ ID NO: 339763 - DNA, 25 bp, Artificial
  Probe
ctgacgctgagcaaagcagactacg

SEQ ID NO: 339764 - DNA, 25 bp, Artificial
  Probe
tctggaactgcctctgttgtgtgcc

SEQ ID NO: 339765 - DNA, 25 bp, Artificial
  Probe
aacttctatcccagagaggccaaag

SEQ ID NO: 339766 - DNA, 25 bp, Artificial
  Probe
caatcgggtaactcccaggagagtg

SEQ ID NO: 339767 - DNA, 25 bp, Artificial
  Probe
gcaccctgacgctgagcaaagcaga

SEQ ID NO: 339768 - DNA, 25 bp, Artificial
  Probe
aagtcacccatcagggcctgagctc

SEQ ID NO: 339769 - DNA, 25 bp, Artificial
  Probe
acgctgagcaaagcagactacgaga

SEQ ID NO: 339770 - DNA, 25 bp, Artificial
  Probe
tgttgtgtgcctgctgaataacttc

SEQ ID NO: 339771 - DNA, 25 bp, Artificial
  Probe
cttctatcccagagaggccaaagta

SEQ ID NO: 339772 - DNA, 25 bp, Artificial
  Probe
tggaactgcctctgttgtgtgcctg

SEQ ID NO: 339773 - DNA, 25 bp, Artificial
  Probe
ctgcctctgttgtgtgcctgctgaa

SEQ ID NO: 339774 - DNA, 25 bp, Artificial
  Probe
cagcatataagtaggccgcgcacgt

SEQ ID NO: 339775 - DNA, 25 bp, Artificial
  Probe
tcaaggaccgggaatatgaacagta

SEQ ID NO: 339776 - DNA, 25 bp, Artificial
  Probe
actcagcaggaattcgagaatttcc

SEQ ID NO: 339777 - DNA, 25 bp, Artificial
  Probe
atttcctttgtgatgaaggactgtc

SEQ ID NO: 339778 - DNA, 25 bp, Artificial
  Probe
agaagaagtcgcagctcctgcaagt

SEQ ID NO: 339779 - DNA, 25 bp, Artificial
  Probe
ccctcgaggcatgtatcagtgccga

SEQ ID NO: 339780 - DNA, 25 bp, Artificial
  Probe
ggcacagaataagtcctccaaatgc

SEQ ID NO: 339781 - DNA, 25 bp, Artificial
  Probe
atcaaccttggctatgatctacctg

SEQ ID NO: 339782 - DNA, 25 bp, Artificial
  Probe
atgggcactgtgtccggctttatct

SEQ ID NO: 339783 - DNA, 25 bp, Artificial
  Probe
agcccctcaaggaccgggaatatga

SEQ ID NO: 339784 - DNA, 25 bp, Artificial
  Probe
ctccaaggaaaccaagtgagaaaga

SEQ ID NO: 339785 - DNA, 25 bp, Artificial
  Probe
ctaaatatgggcactgtgtccggct

SEQ ID NO: 339786 - DNA, 25 bp, Artificial
  Probe
tgatctacctgatggcactggtacc

SEQ ID NO: 339787 - DNA, 25 bp, Artificial
  Probe
tgtgatgaaggactgtcttgcctat

SEQ ID NO: 339788 - DNA, 25 bp, Artificial
  Probe
ttgctggacaggatggagttcgcca

SEQ ID NO: 339789 - DNA, 25 bp, Artificial
  Probe
atcacatggcttaaagatgggcaca

SEQ ID NO: 339790 - DNA, 25 bp, Artificial
  Probe
gtttggctggcctcttcctggtgat

SEQ ID NO: 339791 - DNA, 25 bp, Artificial
  Probe
actgtgtccggctttatcttcgctg

SEQ ID NO: 339792 - DNA, 25 bp, Artificial
  Probe
tggaatctgggcaacggtgccaaag

SEQ ID NO: 339793 - DNA, 25 bp, Artificial
  Probe
agaagtgaactcagcaggaattcga

SEQ ID NO: 339794 - DNA, 25 bp, Artificial
  Probe
ctccaaatgcaactaaaagcacgtg

SEQ ID NO: 339795 - DNA, 25 bp, Artificial
  Probe
tctgggcaacggtgccaaagaccct

SEQ ID NO: 339796 - DNA, 25 bp, Artificial
  Probe
gacacttctactggagaagcaaaga

SEQ ID NO: 339797 - DNA, 25 bp, Artificial
  Probe
ctctgttgcaaaatgaacaggtcta

SEQ ID NO: 339798 - DNA, 25 bp, Artificial
  Probe
cagcccctcaaggaccgggaatatg

SEQ ID NO: 339799 - DNA, 25 bp, Artificial
  Probe
gctctgtacttctgacttgtgactt

SEQ ID NO: 339800 - DNA, 25 bp, Artificial
  Probe
aagcacgtggaatctgggcaacggt

SEQ ID NO: 339801 - DNA, 25 bp, Artificial
  Probe
aatatgaacagtacagccgtctcca

SEQ ID NO: 339802 - DNA, 25 bp, Artificial
  Probe
tcacatggcttaaagatgggcacag

SEQ ID NO: 339803 - DNA, 25 bp, Artificial
  Probe
gaactgcattgagctaaatatgggc

SEQ ID NO: 339804 - DNA, 25 bp, Artificial
  Probe
ttggtgtatacttcattgctggaca

SEQ ID NO: 339805 - DNA, 25 bp, Artificial
  Probe
agtgccgaggagcaaagaagaagtc

SEQ ID NO: 339806 - DNA, 25 bp, Artificial
  Probe
ccggctttatcttcgctgaaatcat

SEQ ID NO: 339807 - DNA, 25 bp, Artificial
  Probe
cttccttgctgttggtgtatacttc

SEQ ID NO: 339808 - DNA, 25 bp, Artificial
  Probe
atcagcattttcttccttgctgttg

SEQ ID NO: 339809 - DNA, 25 bp, Artificial
  Probe
tctctcttcttcaaggcaccatggc

SEQ ID NO: 339810 - DNA, 25 bp, Artificial
  Probe
gacaggatggagttcgccagtcaag

SEQ ID NO: 339811 - DNA, 25 bp, Artificial
  Probe
ttgctgttggtgtatacttcattgc

SEQ ID NO: 339812 - DNA, 25 bp, Artificial
  Probe
actgtgtgagaactgcattgagcta

SEQ ID NO: 339813 - DNA, 25 bp, Artificial
  Probe
ctgcattgagctaaatatgggcact

SEQ ID NO: 339814 - DNA, 25 bp, Artificial
  Probe
gaaggactgtcttgcctattacatc

SEQ ID NO: 339815 - DNA, 25 bp, Artificial
  Probe
gcacagaataagtcctccaaatgca

SEQ ID NO: 339816 - DNA, 25 bp, Artificial
  Probe
caccctcactcagtgtgataagtaa

SEQ ID NO: 339817 - DNA, 25 bp, Artificial
  Probe
tggatgacagccaaggagatggctc

SEQ ID NO: 339818 - DNA, 25 bp, Artificial
  Probe
aggcatgtatcagtgccgaggagca

SEQ ID NO: 339819 - DNA, 25 bp, Artificial
  Probe
ttcaaggcaccatggcccagcaaaa

SEQ ID NO: 339820 - DNA, 25 bp, Artificial
  Probe
cagcattttcttccttgctgttggt

SEQ ID NO: 339821 - DNA, 25 bp, Artificial
  Probe
gagctgttgctcctccacggagcag

SEQ ID NO: 339822 - DNA, 25 bp, Artificial
  Probe
tagctgaagagcagggccaccgtga

SEQ ID NO: 339823 - DNA, 25 bp, Artificial
  Probe
gcagctcctggaagccggcgcagat

SEQ ID NO: 339824 - DNA, 25 bp, Artificial
  Probe
gacttagctgaagagcagggccacc

SEQ ID NO: 339825 - DNA, 25 bp, Artificial
  Probe
agctgttgctcctccacggagcaga

SEQ ID NO: 339826 - DNA, 25 bp, Artificial
  Probe
agagctgttgctcctccacggagca

SEQ ID NO: 339827 - DNA, 25 bp, Artificial
  Probe
ccgcctgccggtagacttagctgaa

SEQ ID NO: 339828 - DNA, 25 bp, Artificial
  Probe
aggcgcccgatccaggtcatgatga

SEQ ID NO: 339829 - DNA, 25 bp, Artificial
  Probe
agacttagctgaagagcagggccac

SEQ ID NO: 339830 - DNA, 25 bp, Artificial
  Probe
caggtggcagagctgttgctcctcc

SEQ ID NO: 339831 - DNA, 25 bp, Artificial
  Probe
accagacctgtgcatgatgcagctc

SEQ ID NO: 339832 - DNA, 25 bp, Artificial
  Probe
ggcagagctgttgctcctccacgga

SEQ ID NO: 339833 - DNA, 25 bp, Artificial
  Probe
cttagctgaagagcagggccaccgt

SEQ ID NO: 339834 - DNA, 25 bp, Artificial
  Probe
gccgcctgccggtagacttagctga

SEQ ID NO: 339835 - DNA, 25 bp, Artificial
  Probe
tgccggtagacttagctgaagagca

SEQ ID NO: 339836 - DNA, 25 bp, Artificial
  Probe
agccctatctaggaagactgtaaac

SEQ ID NO: 339837 - DNA, 25 bp, Artificial
  Probe
gcctgccggtagacttagctgaaga

SEQ ID NO: 339838 - DNA, 25 bp, Artificial
  Probe
cagccctatctaggaagactgtaaa

SEQ ID NO: 339839 - DNA, 25 bp, Artificial
  Probe
aagagcagggccaccgtgatattgc

SEQ ID NO: 339840 - DNA, 25 bp, Artificial
  Probe
ccagacctgtgcatgatgcagctcg

SEQ ID NO: 339841 - DNA, 25 bp, Artificial
  Probe
cctgccggtagacttagctgaagag

SEQ ID NO: 339842 - DNA, 25 bp, Artificial
  Probe
ggcgcccgatccaggtcatgatgat

SEQ ID NO: 339843 - DNA, 25 bp, Artificial
  Probe
cggaggaccatttctgccacggacc

SEQ ID NO: 339844 - DNA, 25 bp, Artificial
  Probe
ctcaccagacctgtgcatgatgcag

SEQ ID NO: 339845 - DNA, 25 bp, Artificial
  Probe
gccctatctaggaagactgtaaacg

SEQ ID NO: 339846 - DNA, 25 bp, Artificial
  Probe
ggaggaccatttctgccacggaccg

SEQ ID NO: 339847 - DNA, 25 bp, Artificial
  Probe
gtagacttagctgaagagcagggcc

SEQ ID NO: 339848 - DNA, 25 bp, Artificial
  Probe
ctgccggtagacttagctgaagagc

SEQ ID NO: 339849 - DNA, 25 bp, Artificial
  Probe
cgcccaggtggcagagctgttgctc

SEQ ID NO: 339850 - DNA, 25 bp, Artificial
  Probe
gaggcgcccgatccaggtcatgatg

SEQ ID NO: 339851 - DNA, 25 bp, Artificial
  Probe
cccaggtggcagagctgttgctcct

SEQ ID NO: 339852 - DNA, 25 bp, Artificial
  Probe
gactgtaaacgtggagaggatcagc

SEQ ID NO: 339853 - DNA, 25 bp, Artificial
  Probe
gagaggatcagcagcgcacagcctg

SEQ ID NO: 339854 - DNA, 25 bp, Artificial
  Probe
caccagacctgtgcatgatgcagct

SEQ ID NO: 339855 - DNA, 25 bp, Artificial
  Probe
aggtggcagagctgttgctcctcca

SEQ ID NO: 339856 - DNA, 25 bp, Artificial
  Probe
cagagctgttgctcctccacggagc

SEQ ID NO: 339857 - DNA, 25 bp, Artificial
  Probe
ccctatctaggaagactgtaaacgt

SEQ ID NO: 339858 - DNA, 25 bp, Artificial
  Probe
ccggtagacttagctgaagagcagg

SEQ ID NO: 339859 - DNA, 25 bp, Artificial
  Probe
ggagcagaacccaactgcgccgatc

SEQ ID NO: 339860 - DNA, 25 bp, Artificial
  Probe
acttagctgaagagcagggccaccg

SEQ ID NO: 339861 - DNA, 25 bp, Artificial
  Probe
tggcagagctgttgctcctccacgg

SEQ ID NO: 339862 - DNA, 25 bp, Artificial
  Probe
ccagccctatctaggaagactgtaa

SEQ ID NO: 339863 - DNA, 25 bp, Artificial
  Probe
tttctgccacggaccggggacaagg

SEQ ID NO: 339864 - DNA, 25 bp, Artificial
  Probe
cctcaccagacctgtgcatgatgca

SEQ ID NO: 339865 - DNA, 25 bp, Artificial
  Probe
ccaggtggcagagctgttgctcctc

SEQ ID NO: 339866 - DNA, 25 bp, Artificial
  Probe
cacctaccaggaaggcaagcaatca

SEQ ID NO: 339867 - DNA, 25 bp, Artificial
  Probe
tggctgccctaccacgtgactatgc

SEQ ID NO: 339868 - DNA, 25 bp, Artificial
  Probe
cttccggggccgactgctgagcctt

SEQ ID NO: 339869 - DNA, 25 bp, Artificial
  Probe
ccttcccaaggagcaggccagggca

SEQ ID NO: 339870 - DNA, 25 bp, Artificial
  Probe
tctccatgctacactgtgtcgccaa

SEQ ID NO: 339871 - DNA, 25 bp, Artificial
  Probe
agcgccaccagcaccgaatacggag

SEQ ID NO: 339872 - DNA, 25 bp, Artificial
  Probe
tctaccttgccaacatgtacagcag

SEQ ID NO: 339873 - DNA, 25 bp, Artificial
  Probe
ggcagtggccctgtcggctaccatc

SEQ ID NO: 339874 - DNA, 25 bp, Artificial
  Probe
ttatacatcctcaacatggccgtcg

SEQ ID NO: 339875 - DNA, 25 bp, Artificial
  Probe
gctggaggtcatgctggagtacacc

SEQ ID NO: 339876 - DNA, 25 bp, Artificial
  Probe
catcccactgcctgaggtggtacat

SEQ ID NO: 339877 - DNA, 25 bp, Artificial
  Probe
tgcctcagcattgaccgctacgtca

SEQ ID NO: 339878 - DNA, 25 bp, Artificial
  Probe
tctcatcgcagtgtttaatatcctg

SEQ ID NO: 339879 - DNA, 25 bp, Artificial
  Probe
atgtgcctcttcctagcaccttttg

SEQ ID NO: 339880 - DNA, 25 bp, Artificial
  Probe
tggatggctccgagcccatgtgcct

SEQ ID NO: 339881 - DNA, 25 bp, Artificial
  Probe
atacatcctcaacatggccgtcgcg

SEQ ID NO: 339882 - DNA, 25 bp, Artificial
  Probe
cacgccatcagaaacgtgcaggcct

SEQ ID NO: 339883 - DNA, 25 bp, Artificial
  Probe
atgctgctgctcactctgcacacaa

SEQ ID NO: 339884 - DNA, 25 bp, Artificial
  Probe
gtgcctcttcctagcaccttttgaa

SEQ ID NO: 339885 - DNA, 25 bp, Artificial
  Probe
tgccaacatgtacagcagcatcttc

SEQ ID NO: 339886 - DNA, 25 bp, Artificial
  Probe
gactgcttctccatgctacactgtg

SEQ ID NO: 339887 - DNA, 25 bp, Artificial
  Probe
ccagcaccgaatacggagggccgtg

SEQ ID NO: 339888 - DNA, 25 bp, Artificial
  Probe
tttgaaacgtacagcgcctgggccc

SEQ ID NO: 339889 - DNA, 25 bp, Artificial
  Probe
tcaacatggccgtcgcggacctggg

SEQ ID NO: 339890 - DNA, 25 bp, Artificial
  Probe
gtcggctaccatcctgggcttccta

SEQ ID NO: 339891 - DNA, 25 bp, Artificial
  Probe
tgcgcaggcgtctgggtcctctccg

SEQ ID NO: 339892 - DNA, 25 bp, Artificial
  Probe
actgccttttcctctcatcgcagtg

SEQ ID NO: 339893 - DNA, 25 bp, Artificial
  Probe
ctgccttttcctctcatcgcagtgt

SEQ ID NO: 339894 - DNA, 25 bp, Artificial
  Probe
ggagaacgtcctggtgatatgtgtc

SEQ ID NO: 339895 - DNA, 25 bp, Artificial
  Probe
atatgtgtcaactgccgccgctcag

SEQ ID NO: 339896 - DNA, 25 bp, Artificial
  Probe
tggcagtggccctgtcggctaccat

SEQ ID NO: 339897 - DNA, 25 bp, Artificial
  Probe
tcctagcaccttttgaaacgtacag

SEQ ID NO: 339898 - DNA, 25 bp, Artificial
  Probe
ctggccatctttgtggtagggttag

SEQ ID NO: 339899 - DNA, 25 bp, Artificial
  Probe
tccagctgctggatggctccgagcc

SEQ ID NO: 339900 - DNA, 25 bp, Artificial
  Probe
cagacagagagcaggcgccactgtc

SEQ ID NO: 339901 - DNA, 25 bp, Artificial
  Probe
tgggcatcatcctgtctctgcctgt

SEQ ID NO: 339902 - DNA, 25 bp, Artificial
  Probe
tgtggtccgttaccttcccaaggag

SEQ ID NO: 339903 - DNA, 25 bp, Artificial
  Probe
ctgtctgttgatgtgggcttacata

SEQ ID NO: 339904 - DNA, 25 bp, Artificial
  Probe
tggggcagcttctcctgtcgcttca

SEQ ID NO: 339905 - DNA, 25 bp, Artificial
  Probe
tgtgcgcaggcgtctgggtcctctc

SEQ ID NO: 339906 - DNA, 25 bp, Artificial
  Probe
atcctgtcagcctgccggcttcgga

SEQ ID NO: 339907 - DNA, 25 bp, Artificial
  Probe
ggccgactgctgagccttgtggtcc

SEQ ID NO: 339908 - DNA, 25 bp, Artificial
  Probe
ggcagcaggcggtcgagcctcctct

SEQ ID NO: 339909 - DNA, 25 bp, Artificial
  Probe
tgggcttcctactgccttttcctct

SEQ ID NO: 339910 - DNA, 25 bp, Artificial
  Probe
tgtcggctaccatcctgggcttcct

SEQ ID NO: 339911 - DNA, 25 bp, Artificial
  Probe
ggcggtcgagcctcctcttcatctt

SEQ ID NO: 339912 - DNA, 25 bp, Artificial
  Probe
atcattaccaaagagggcagcctgc

SEQ ID NO: 339913 - DNA, 25 bp, Artificial
  Probe
tcctttacgggcattatacctgata

SEQ ID NO: 339914 - DNA, 25 bp, Artificial
  Probe
acgggcattatacctgatagcaacg

SEQ ID NO: 339915 - DNA, 25 bp, Artificial
  Probe
cagcatcctttcctgaaactggcca

SEQ ID NO: 339916 - DNA, 25 bp, Artificial
  Probe
agagtaaccgctaacgtcgtcagcg

SEQ ID NO: 339917 - DNA, 25 bp, Artificial
  Probe
agatcacccctgaacagagcaaacg

SEQ ID NO: 339918 - DNA, 25 bp, Artificial
  Probe
acgtcgtcagcgaggcctcatgttc

SEQ ID NO: 339919 - DNA, 25 bp, Artificial
  Probe
tgaaaatcctttacgggcattatac

SEQ ID NO: 339920 - DNA, 25 bp, Artificial
  Probe
gcgaggcctcatgttcctttatcca

SEQ ID NO: 339921 - DNA, 25 bp, Artificial
  Probe
ttacagcatcctttcctgaaactgg

SEQ ID NO: 339922 - DNA, 25 bp, Artificial
  Probe
cgctaacgtcgtcagcgaggcctca

SEQ ID NO: 339923 - DNA, 25 bp, Artificial
  Probe
agacagtttgcatcacatggagaaa

SEQ ID NO: 339924 - DNA, 25 bp, Artificial
  Probe
atactggatggcaccggaggtagtc

SEQ ID NO: 339925 - DNA, 25 bp, Artificial
  Probe
tcacccctgaacagagcaaacgcag

SEQ ID NO: 339926 - DNA, 25 bp, Artificial
  Probe
acctgagctccagaatccagaaaaa

SEQ ID NO: 339927 - DNA, 25 bp, Artificial
  Probe
catatttcgggatttcttaaatcgg

SEQ ID NO: 339928 - DNA, 25 bp, Artificial
  Probe
gctaacgtcgtcagcgaggcctcat

SEQ ID NO: 339929 - DNA, 25 bp, Artificial
  Probe
ggggttcagccaaagaactattaca

SEQ ID NO: 339930 - DNA, 25 bp, Artificial
  Probe
tctgatcctggcagctaaagaagca

SEQ ID NO: 339931 - DNA, 25 bp, Artificial
  Probe
tcctggcagctaaagaagcaatgaa

SEQ ID NO: 339932 - DNA, 25 bp, Artificial
  Probe
ctcaatgaaaatcctttacgggcat

SEQ ID NO: 339933 - DNA, 25 bp, Artificial
  Probe
gatcacccctgaacagagcaaacgc

SEQ ID NO: 339934 - DNA, 25 bp, Artificial
  Probe
ctggccaaaccattatccagcttga

SEQ ID NO: 339935 - DNA, 25 bp, Artificial
  Probe
ttgcatcacatggagaaaagcaagc

SEQ ID NO: 339936 - DNA, 25 bp, Artificial
  Probe
tgatcctggcagctaaagaagcaat

SEQ ID NO: 339937 - DNA, 25 bp, Artificial
  Probe
agtaaccgctaacgtcgtcagcgag

SEQ ID NO: 339938 - DNA, 25 bp, Artificial
  Probe
accgctaacgtcgtcagcgaggcct

SEQ ID NO: 339939 - DNA, 25 bp, Artificial
  Probe
cccctgaacagagcaaacgcagtac

SEQ ID NO: 339940 - DNA, 25 bp, Artificial
  Probe
agagacagtttgcatcacatggaga

SEQ ID NO: 339941 - DNA, 25 bp, Artificial
  Probe
ctttacgggcattatacctgatagc

SEQ ID NO: 339942 - DNA, 25 bp, Artificial
  Probe
tgaaactggccaaaccattatccag

SEQ ID NO: 339943 - DNA, 25 bp, Artificial
  Probe
aagagtaaccgctaacgtcgtcagc

SEQ ID NO: 339944 - DNA, 25 bp, Artificial
  Probe
gaaactggccaaaccattatccagc

SEQ ID NO: 339945 - DNA, 25 bp, Artificial
  Probe
gcatcctttcctgaaactggccaaa

SEQ ID NO: 339946 - DNA, 25 bp, Artificial
  Probe
gtcagcgaggcctcatgttccttta

SEQ ID NO: 339947 - DNA, 25 bp, Artificial
  Probe
actggccaaaccattatccagcttg

SEQ ID NO: 339948 - DNA, 25 bp, Artificial
  Probe
gaggcctcatgttcctttatccatt

SEQ ID NO: 339949 - DNA, 25 bp, Artificial
  Probe
tggccaaaccattatccagcttgac

SEQ ID NO: 339950 - DNA, 25 bp, Artificial
  Probe
gtaaccgctaacgtcgtcagcgagg

SEQ ID NO: 339951 - DNA, 25 bp, Artificial
  Probe
tgagctccagaatccagaaaaactt

SEQ ID NO: 339952 - DNA, 25 bp, Artificial
  Probe
aatgaaaatcctttacgggcattat

SEQ ID NO: 339953 - DNA, 25 bp, Artificial
  Probe
cagcgaggcctcatgttcctttatc

SEQ ID NO: 339954 - DNA, 25 bp, Artificial
  Probe
cctcaatgaaaatcctttacgggca

SEQ ID NO: 339955 - DNA, 25 bp, Artificial
  Probe
ccatatttcgggatttcttaaatcg

SEQ ID NO: 339956 - DNA, 25 bp, Artificial
  Probe
gggttcagccaaagaactattacag

SEQ ID NO: 339957 - DNA, 25 bp, Artificial
  Probe
cacctgagctccagaatccagaaaa

SEQ ID NO: 339958 - DNA, 25 bp, Artificial
  Probe
tacgggcattatacctgatagcaac

SEQ ID NO: 339959 - DNA, 25 bp, Artificial
  Probe
actatttcccggagtatgccaacta

SEQ ID NO: 339960 - DNA, 25 bp, Artificial
  Probe
tctttatccgggatctgttcttgag

SEQ ID NO: 339961 - DNA, 25 bp, Artificial
  Probe
tttcccggagtatgccaactatact

SEQ ID NO: 339962 - DNA, 25 bp, Artificial
  Probe
caaagttacaagagccaagttcttt

SEQ ID NO: 339963 - DNA, 25 bp, Artificial
  Probe
aattgaagactatttcccggagtat

SEQ ID NO: 339964 - DNA, 25 bp, Artificial
  Probe
agccaagttctttatccgggatctg

SEQ ID NO: 339965 - DNA, 25 bp, Artificial
  Probe
catctatgtggcagcctgcagcagc

SEQ ID NO: 339966 - DNA, 25 bp, Artificial
  Probe
ttcttgaacaaacaagatatgctgg

SEQ ID NO: 339967 - DNA, 25 bp, Artificial
  Probe
cctgttcttgaacaaacaagatatg

SEQ ID NO: 339968 - DNA, 25 bp, Artificial
  Probe
gttacaagagccaagttctttatcc

SEQ ID NO: 339969 - DNA, 25 bp, Artificial
  Probe
ggaagataacaacaccaacagactc

SEQ ID NO: 339970 - DNA, 25 bp, Artificial
  Probe
gtcttggccgggaagtcaaaaattg

SEQ ID NO: 339971 - DNA, 25 bp, Artificial
  Probe
gatctttgagacacgattccaagtg

SEQ ID NO: 339972 - DNA, 25 bp, Artificial
  Probe
tgccatcatctatgtggcagcctgc

SEQ ID NO: 339973 - DNA, 25 bp, Artificial
  Probe
ccaactatactgtccctgaagatgc

SEQ ID NO: 339974 - DNA, 25 bp, Artificial
  Probe
agccacgggtgatggcaaacattac

SEQ ID NO: 339975 - DNA, 25 bp, Artificial
  Probe
tgtcactgccatcatctatgtggca

SEQ ID NO: 339976 - DNA, 25 bp, Artificial
  Probe
ccatcatctatgtggcagcctgcag

SEQ ID NO: 339977 - DNA, 25 bp, Artificial
  Probe
gcagaaaaagtcttggccgggaagt

SEQ ID NO: 339978 - DNA, 25 bp, Artificial
  Probe
gagaagatcccaaagttacaagagc

SEQ ID NO: 339979 - DNA, 25 bp, Artificial
  Probe
acacgattccaagtggacaaagtga

SEQ ID NO: 339980 - DNA, 25 bp, Artificial
  Probe
atgtggcagcctgcagcagctacaa

SEQ ID NO: 339981 - DNA, 25 bp, Artificial
  Probe
gacatcatccagagaatgcacctca

SEQ ID NO: 339982 - DNA, 25 bp, Artificial
  Probe
atcagcacagccacgggtgatggca

SEQ ID NO: 339983 - DNA, 25 bp, Artificial
  Probe
catccgcagagtgttcaacgattgt

SEQ ID NO: 339984 - DNA, 25 bp, Artificial
  Probe
atgcaacaccagatgcaggagaaga

SEQ ID NO: 339985 - DNA, 25 bp, Artificial
  Probe
acagactccgggagtcgctggacct

SEQ ID NO: 339986 - DNA, 25 bp, Artificial
  Probe
agtgctgacatcagggatctttgag

SEQ ID NO: 339987 - DNA, 25 bp, Artificial
  Probe
aacaccagatgcaggagaagatccc

SEQ ID NO: 339988 - DNA, 25 bp, Artificial
  Probe
gacacgattccaagtggacaaagtg

SEQ ID NO: 339989 - DNA, 25 bp, Artificial
  Probe
cacagccacgggtgatggcaaacat

SEQ ID NO: 339990 - DNA, 25 bp, Artificial
  Probe
agtgaactttcacatgtttgacgtt

SEQ ID NO: 339991 - DNA, 25 bp, Artificial
  Probe
aactttcacatgtttgacgttggag

SEQ ID NO: 339992 - DNA, 25 bp, Artificial
  Probe
agagtgttcaacgattgtcgtgaca

SEQ ID NO: 339993 - DNA, 25 bp, Artificial
  Probe
tgaacaaacaagatatgctggcaga

SEQ ID NO: 339994 - DNA, 25 bp, Artificial
  Probe
acaccaacagactccgggagtcgct

SEQ ID NO: 339995 - DNA, 25 bp, Artificial
  Probe
ctggacctgtttgaaagcatctgga

SEQ ID NO: 339996 - DNA, 25 bp, Artificial
  Probe
gtggttacgaaccatttccatcatc

SEQ ID NO: 339997 - DNA, 25 bp, Artificial
  Probe
tccgcagagtgttcaacgattgtcg

SEQ ID NO: 339998 - DNA, 25 bp, Artificial
  Probe
actgtccctgaagatgcaacaccag

SEQ ID NO: 339999 - DNA, 25 bp, Artificial
  Probe
ttgaagactatttcccggagtatgc

SEQ ID NO: 340000 - DNA, 25 bp, Artificial
  Probe
tcttggccgggaagtcaaaaattga

SEQ ID NO: 340001 - DNA, 25 bp, Artificial
  Probe
atggatccagtgttttaacgatgtc

SEQ ID NO: 340002 - DNA, 25 bp, Artificial
  Probe
tgacatcagggatctttgagacacg

SEQ ID NO: 340003 - DNA, 25 bp, Artificial
  Probe
ctgaagatgcaacaccagatgcagg

SEQ ID NO: 340004 - DNA, 25 bp, Artificial
  Probe
cggagtatgccaactatactgtccc

SEQ ID NO: 340005 - DNA, 25 bp, Artificial
  Probe
ctcactataaaagtctgtgcatgcg

SEQ ID NO: 340006 - DNA, 25 bp, Artificial
  Probe
gattagcgatggtggcatcccacct

SEQ ID NO: 340007 - DNA, 25 bp, Artificial
  Probe
gacaatgctcctaagtttgctgccc

SEQ ID NO: 340008 - DNA, 25 bp, Artificial
  Probe
cagccaatagttacagttagtgcag

SEQ ID NO: 340009 - DNA, 25 bp, Artificial
  Probe
gtcccagtggccatcagggtcctgg

SEQ ID NO: 340010 - DNA, 25 bp, Artificial
  Probe
aggaagccaaagtcccagtggccat

SEQ ID NO: 340011 - DNA, 25 bp, Artificial
  Probe
ggttcagtcggcagaagcaggacct

SEQ ID NO: 340012 - DNA, 25 bp, Artificial
  Probe
agcgatggtggcatcccacctatga

SEQ ID NO: 340013 - DNA, 25 bp, Artificial
  Probe
tgcagataacctggatgacacagtc

SEQ ID NO: 340014 - DNA, 25 bp, Artificial
  Probe
ctcctaagtttgctgccccttatga

SEQ ID NO: 340015 - DNA, 25 bp, Artificial
  Probe
cccattgtgattagcgatggtggca

SEQ ID NO: 340016 - DNA, 25 bp, Artificial
  Probe
cagagataacactgcaggagtatat

SEQ ID NO: 340017 - DNA, 25 bp, Artificial
  Probe
tgtgagagtgatcaccccaaaccac

SEQ ID NO: 340018 - DNA, 25 bp, Artificial
  Probe
ccagtggccatcagggtcctggatg

SEQ ID NO: 340019 - DNA, 25 bp, Artificial
  Probe
acaacagagataacactgcaggagt

SEQ ID NO: 340020 - DNA, 25 bp, Artificial
  Probe
ccaaccagccaatagttacagttag

SEQ ID NO: 340021 - DNA, 25 bp, Artificial
  Probe
tgccccttatgaaggctttatctgt

SEQ ID NO: 340022 - DNA, 25 bp, Artificial
  Probe
ttatctgtgagagtgatcaccccaa

SEQ ID NO: 340023 - DNA, 25 bp, Artificial
  Probe
aatttcacagtaagagacaacagag

SEQ ID NO: 340024 - DNA, 25 bp, Artificial
  Probe
agtcggcagaagcaggacctctacc

SEQ ID NO: 340025 - DNA, 25 bp, Artificial
  Probe
gccatcagggtcctggatgtcaatg

SEQ ID NO: 340026 - DNA, 25 bp, Artificial
  Probe
ccaaagtcccagtggccatcagggt

SEQ ID NO: 340027 - DNA, 25 bp, Artificial
  Probe
actgcaggagtatatgcccgacgtg

SEQ ID NO: 340028 - DNA, 25 bp, Artificial
  Probe
ttgtgattagcgatggtggcatccc

SEQ ID NO: 340029 - DNA, 25 bp, Artificial
  Probe
gagataacactgcaggagtatatgc

SEQ ID NO: 340030 - DNA, 25 bp, Artificial
  Probe
gtttgctgccccttatgaaggcttt

SEQ ID NO: 340031 - DNA, 25 bp, Artificial
  Probe
agccaaagtcccagtggccatcagg

SEQ ID NO: 340032 - DNA, 25 bp, Artificial
  Probe
atagttacagttagtgcagataacc

SEQ ID NO: 340033 - DNA, 25 bp, Artificial
  Probe
ccttatgaaggctttatctgtgaga

SEQ ID NO: 340034 - DNA, 25 bp, Artificial
  Probe
acagagataacactgcaggagtata

SEQ ID NO: 340035 - DNA, 25 bp, Artificial
  Probe
tcggcagaagcaggacctctacctc

SEQ ID NO: 340036 - DNA, 25 bp, Artificial
  Probe
ggcagaagcaggacctctacctcct

SEQ ID NO: 340037 - DNA, 25 bp, Artificial
  Probe
tggtggcatcccacctatgagtagc

SEQ ID NO: 340038 - DNA, 25 bp, Artificial
  Probe
caaatttcacagtaagagacaacag

SEQ ID NO: 340039 - DNA, 25 bp, Artificial
  Probe
gcatcccacctatgagtagcaccaa

SEQ ID NO: 340040 - DNA, 25 bp, Artificial
  Probe
tacctcctgcccattgtgattagcg

SEQ ID NO: 340041 - DNA, 25 bp, Artificial
  Probe
ggccatcagggtcctggatgtcaat

SEQ ID NO: 340042 - DNA, 25 bp, Artificial
  Probe
acaatgctcctaagtttgctgcccc

SEQ ID NO: 340043 - DNA, 25 bp, Artificial
  Probe
gtgagagtgatcaccccaaaccact

SEQ ID NO: 340044 - DNA, 25 bp, Artificial
  Probe
cagtcaatggaccaagatttatctt

SEQ ID NO: 340045 - DNA, 25 bp, Artificial
  Probe
agttacagttagtgcagataacctg

SEQ ID NO: 340046 - DNA, 25 bp, Artificial
  Probe
tgctcctaagtttgctgccccttat

SEQ ID NO: 340047 - DNA, 25 bp, Artificial
  Probe
cagttagtgcagataacctggatga

SEQ ID NO: 340048 - DNA, 25 bp, Artificial
  Probe
ccctcactataaaagtctgtgcatg

SEQ ID NO: 340049 - DNA, 25 bp, Artificial
  Probe
aggctttatctgtgagagtgatcac

SEQ ID NO: 340050 - DNA, 25 bp, Artificial
  Probe
agtgcagataacctggatgacacag

SEQ ID NO: 340051 - DNA, 25 bp, Artificial
  Probe
cccgacaaggaagaccttgagcctg

SEQ ID NO: 340052 - DNA, 25 bp, Artificial
  Probe
acggacagcagctactacaccaacc

SEQ ID NO: 340053 - DNA, 25 bp, Artificial
  Probe
acgagcccgacaaggaagaccttga

SEQ ID NO: 340054 - DNA, 25 bp, Artificial
  Probe
tcaacaacgtctcctactccgccaa

SEQ ID NO: 340055 - DNA, 25 bp, Artificial
  Probe
tgggctcctaccagtaccacgccag

SEQ ID NO: 340056 - DNA, 25 bp, Artificial
  Probe
ccaaaagcagctacgacctgggcta

SEQ ID NO: 340057 - DNA, 25 bp, Artificial
  Probe
aacgagcccgacaaggaagaccttg

SEQ ID NO: 340058 - DNA, 25 bp, Artificial
  Probe
ccgacaaggaagaccttgagcctga

SEQ ID NO: 340059 - DNA, 25 bp, Artificial
  Probe
gctacggacagcagctactacacca

SEQ ID NO: 340060 - DNA, 25 bp, Artificial
  Probe
ggctacggacagcagctactacacc

SEQ ID NO: 340061 - DNA, 25 bp, Artificial
  Probe
gaaccagttcgtccccagtcaacaa

SEQ ID NO: 340062 - DNA, 25 bp, Artificial
  Probe
acaacgagcccgacaaggaagacct

SEQ ID NO: 340063 - DNA, 25 bp, Artificial
  Probe
cggctacggacagcagctactacac

SEQ ID NO: 340064 - DNA, 25 bp, Artificial
  Probe
tcctactccgccaaaagcagctacg

SEQ ID NO: 340065 - DNA, 25 bp, Artificial
  Probe
tacggacagcagctactacaccaac

SEQ ID NO: 340066 - DNA, 25 bp, Artificial
  Probe
aagcagctacgacctgggctacacc

SEQ ID NO: 340067 - DNA, 25 bp, Artificial
  Probe
agcagctacgacctgggctacaccg

SEQ ID NO: 340068 - DNA, 25 bp, Artificial
  Probe
ctacgacctgggctacaccgccgcg

SEQ ID NO: 340069 - DNA, 25 bp, Artificial
  Probe
tccgccaaaagcagctacgacctgg

SEQ ID NO: 340070 - DNA, 25 bp, Artificial
  Probe
ccacggctacggacagcagctacta

SEQ ID NO: 340071 - DNA, 25 bp, Artificial
  Probe
ctcgccctacgcgcacatgggctcc

SEQ ID NO: 340072 - DNA, 25 bp, Artificial
  Probe
agcagcacccggcgggtggcggcgg

SEQ ID NO: 340073 - DNA, 25 bp, Artificial
  Probe
tacgcgccctacggaaccagttcgt

SEQ ID NO: 340074 - DNA, 25 bp, Artificial
  Probe
acggctacggacagcagctactaca

SEQ ID NO: 340075 - DNA, 25 bp, Artificial
  Probe
ctccgccaaaagcagctacgacctg

SEQ ID NO: 340076 - DNA, 25 bp, Artificial
  Probe
ccagcggcctcaacaacgtctccta

SEQ ID NO: 340077 - DNA, 25 bp, Artificial
  Probe
acaccgccgcgtacacttcctacgc

SEQ ID NO: 340078 - DNA, 25 bp, Artificial
  Probe
agcccgacaaggaagaccttgagcc

SEQ ID NO: 340079 - DNA, 25 bp, Artificial
  Probe
ggacagcagctactacaccaaccag

SEQ ID NO: 340080 - DNA, 25 bp, Artificial
  Probe
taccacgccagcggcctcaacaacg

SEQ ID NO: 340081 - DNA, 25 bp, Artificial
  Probe
tacggaaccagttcgtccccagtca

SEQ ID NO: 340082 - DNA, 25 bp, Artificial
  Probe
acaaggaagaccttgagcctgaaat

SEQ ID NO: 340083 - DNA, 25 bp, Artificial
  Probe
ctacgcgccctacggaaccagttcg

SEQ ID NO: 340084 - DNA, 25 bp, Artificial
  Probe
caacgagcccgacaaggaagacctt

SEQ ID NO: 340085 - DNA, 25 bp, Artificial
  Probe
gcgtacacttcctacgcgccctacg

SEQ ID NO: 340086 - DNA, 25 bp, Artificial
  Probe
aaagcagctacgacctgggctacac

SEQ ID NO: 340087 - DNA, 25 bp, Artificial
  Probe
gcacccggcgggtggcggcggcggg

SEQ ID NO: 340088 - DNA, 25 bp, Artificial
  Probe
ggaaccagttcgtccccagtcaaca

SEQ ID NO: 340089 - DNA, 25 bp, Artificial
  Probe
agttcgtccccagtcaacaacgagc

SEQ ID NO: 340090 - DNA, 25 bp, Artificial
  Probe
ctacggacagcagctactacaccaa

SEQ ID NO: 340091 - DNA, 25 bp, Artificial
  Probe
tccacggctacggacagcagctact

SEQ ID NO: 340092 - DNA, 25 bp, Artificial
  Probe
cacggctacggacagcagctactac

SEQ ID NO: 340093 - DNA, 25 bp, Artificial
  Probe
ctacgcgcacatgggctcctaccag

SEQ ID NO: 340094 - DNA, 25 bp, Artificial
  Probe
gcccgacaaggaagaccttgagcct

SEQ ID NO: 340095 - DNA, 25 bp, Artificial
  Probe
cgagcccgacaaggaagaccttgag

SEQ ID NO: 340096 - DNA, 25 bp, Artificial
  Probe
cagttcgtccccagtcaacaacgag

SEQ ID NO: 340097 - DNA, 25 bp, Artificial
  Probe
ccccggaactggagattcgagtgcc

SEQ ID NO: 340098 - DNA, 25 bp, Artificial
  Probe
tgccattcggctgctacctgcttag

SEQ ID NO: 340099 - DNA, 25 bp, Artificial
  Probe
gattcgagtgccattcggctgctac

SEQ ID NO: 340100 - DNA, 25 bp, Artificial
  Probe
gctgctgctctcatctggtgccaaa

SEQ ID NO: 340101 - DNA, 25 bp, Artificial
  Probe
ccacattggtttctgtgagcatctg

SEQ ID NO: 340102 - DNA, 25 bp, Artificial
  Probe
gatccatggatgttccatttgtagg

SEQ ID NO: 340103 - DNA, 25 bp, Artificial
  Probe
tgctctcatctggtgccaaaagttc

SEQ ID NO: 340104 - DNA, 25 bp, Artificial
  Probe
aagttcatttgcagcttctacaccg

SEQ ID NO: 340105 - DNA, 25 bp, Artificial
  Probe
tcatctggtgccaaaagttcatttg

SEQ ID NO: 340106 - DNA, 25 bp, Artificial
  Probe
gtgccattcggctgctacctgctta

SEQ ID NO: 340107 - DNA, 25 bp, Artificial
  Probe
cccggaactggagattcgagtgcca

SEQ ID NO: 340108 - DNA, 25 bp, Artificial
  Probe
gctctcatctggtgccaaaagttca

SEQ ID NO: 340109 - DNA, 25 bp, Artificial
  Probe
aaagctgctgctctcatctggtgcc

SEQ ID NO: 340110 - DNA, 25 bp, Artificial
  Probe
tgctgctctcatctggtgccaaaag

SEQ ID NO: 340111 - DNA, 25 bp, Artificial
  Probe
agccacattggtttctgtgagcatc

SEQ ID NO: 340112 - DNA, 25 bp, Artificial
  Probe
aactggagattcgagtgccattcgg

SEQ ID NO: 340113 - DNA, 25 bp, Artificial
  Probe
gttcatttgcagcttctacaccgtt

SEQ ID NO: 340114 - DNA, 25 bp, Artificial
  Probe
actggagattcgagtgccattcggc

SEQ ID NO: 340115 - DNA, 25 bp, Artificial
  Probe
aagctgctgctctcatctggtgcca

SEQ ID NO: 340116 - DNA, 25 bp, Artificial
  Probe
gccaaaagttcatttgcagcttcta

SEQ ID NO: 340117 - DNA, 25 bp, Artificial
  Probe
gccattcggctgctacctgcttagt

SEQ ID NO: 340118 - DNA, 25 bp, Artificial
  Probe
tattttccccggaactggagattcg

SEQ ID NO: 340119 - DNA, 25 bp, Artificial
  Probe
cacattggtttctgtgagcatctga

SEQ ID NO: 340120 - DNA, 25 bp, Artificial
  Probe
tctggtgccaaaagttcatttgcag

SEQ ID NO: 340121 - DNA, 25 bp, Artificial
  Probe
acattggtttctgtgagcatctgac

SEQ ID NO: 340122 - DNA, 25 bp, Artificial
  Probe
agttcatttgcagcttctacaccgt

SEQ ID NO: 340123 - DNA, 25 bp, Artificial
  Probe
ttttccccggaactggagattcgag

SEQ ID NO: 340124 - DNA, 25 bp, Artificial
  Probe
tccccggaactggagattcgagtgc

SEQ ID NO: 340125 - DNA, 25 bp, Artificial
  Probe
aagccacattggtttctgtgagcat

SEQ ID NO: 340126 - DNA, 25 bp, Artificial
  Probe
agcttgcttgtaagccacattggtt

SEQ ID NO: 340127 - DNA, 25 bp, Artificial
  Probe
atctggtgccaaaagttcatttgca

SEQ ID NO: 340128 - DNA, 25 bp, Artificial
  Probe
gctgctctcatctggtgccaaaagt

SEQ ID NO: 340129 - DNA, 25 bp, Artificial
  Probe
tgcttgtaagccacattggtttctg

SEQ ID NO: 340130 - DNA, 25 bp, Artificial
  Probe
cattggtttctgtgagcatctgact

SEQ ID NO: 340131 - DNA, 25 bp, Artificial
  Probe
tgccaaaagttcatttgcagcttct

SEQ ID NO: 340132 - DNA, 25 bp, Artificial
  Probe
ctggagattcgagtgccattcggct

SEQ ID NO: 340133 - DNA, 25 bp, Artificial
  Probe
tggtgccaaaagttcatttgcagct

SEQ ID NO: 340134 - DNA, 25 bp, Artificial
  Probe
tttccccggaactggagattcgagt

SEQ ID NO: 340135 - DNA, 25 bp, Artificial
  Probe
ttcgagtgccattcggctgctacct

SEQ ID NO: 340136 - DNA, 25 bp, Artificial
  Probe
gtgccaaaagttcatttgcagcttc

SEQ ID NO: 340137 - DNA, 25 bp, Artificial
  Probe
cttgtaagccacattggtttctgtg

SEQ ID NO: 340138 - DNA, 25 bp, Artificial
  Probe
gagcttgcttgtaagccacattggt

SEQ ID NO: 340139 - DNA, 25 bp, Artificial
  Probe
cattcggctgctacctgcttagtga

SEQ ID NO: 340140 - DNA, 25 bp, Artificial
  Probe
gtaagccacattggtttctgtgagc

SEQ ID NO: 340141 - DNA, 25 bp, Artificial
  Probe
tgtaagccacattggtttctgtgag

SEQ ID NO: 340142 - DNA, 25 bp, Artificial
  Probe
gcttgtaagccacattggtttctgt

SEQ ID NO: 340143 - DNA, 25 bp, Artificial
  Probe
tggaacaacccattgtacctcgtcc

SEQ ID NO: 340144 - DNA, 25 bp, Artificial
  Probe
cttcaggcttcttctattaggctca

SEQ ID NO: 340145 - DNA, 25 bp, Artificial
  Probe
catcaccatttgttgtgtgtgtatt

SEQ ID NO: 340146 - DNA, 25 bp, Artificial
  Probe
cctactcaggagacgtgactgccgt

SEQ ID NO: 340147 - DNA, 25 bp, Artificial
  Probe
tgactgccgtggaacaacccattgt

SEQ ID NO: 340148 - DNA, 25 bp, Artificial
  Probe
ctcctcaagtcctactcaggagacg

SEQ ID NO: 340149 - DNA, 25 bp, Artificial
  Probe
atacttcaggcttcttctattaggc

SEQ ID NO: 340150 - DNA, 25 bp, Artificial
  Probe
aggagacgtgactgccgtggaacaa

SEQ ID NO: 340151 - DNA, 25 bp, Artificial
  Probe
tgctttgctaagtatacttcaggct

SEQ ID NO: 340152 - DNA, 25 bp, Artificial
  Probe
agacccaccgattatctctcctggg

SEQ ID NO: 340153 - DNA, 25 bp, Artificial
  Probe
cctcaagtcctactcaggagacgtg

SEQ ID NO: 340154 - DNA, 25 bp, Artificial
  Probe
agggtatcaacatggccaacagcat

SEQ ID NO: 340155 - DNA, 25 bp, Artificial
  Probe
tcttggataccatcaccatttgttg

SEQ ID NO: 340156 - DNA, 25 bp, Artificial
  Probe
atagtttacagaggaaccaggtgcc

SEQ ID NO: 340157 - DNA, 25 bp, Artificial
  Probe
ccatcaccatttgttgtgtgtgtat

SEQ ID NO: 340158 - DNA, 25 bp, Artificial
  Probe
ggccaacagcattgccaacctgaga

SEQ ID NO: 340159 - DNA, 25 bp, Artificial
  Probe
tggataccatcaccatttgttgtgt

SEQ ID NO: 340160 - DNA, 25 bp, Artificial
  Probe
ttacagaggaaccaggtgccaacag

SEQ ID NO: 340161 - DNA, 25 bp, Artificial
  Probe
ctgccgtggaacaacccattgtacc

SEQ ID NO: 340162 - DNA, 25 bp, Artificial
  Probe
tctcctgggggacagcctctccgta

SEQ ID NO: 340163 - DNA, 25 bp, Artificial
  Probe
ataccatcaccatttgttgtgtgtg

SEQ ID NO: 340164 - DNA, 25 bp, Artificial
  Probe
gctaagtatacttcaggcttcttct

SEQ ID NO: 340165 - DNA, 25 bp, Artificial
  Probe
caggagacgtgactgccgtggaaca

SEQ ID NO: 340166 - DNA, 25 bp, Artificial
  Probe
tgccgtggaacaacccattgtacct

SEQ ID NO: 340167 - DNA, 25 bp, Artificial
  Probe
tctctcctcaagtcctactcaggag

SEQ ID NO: 340168 - DNA, 25 bp, Artificial
  Probe
tgcgcagggtatcaacatggccaac

SEQ ID NO: 340169 - DNA, 25 bp, Artificial
  Probe
accgattatctctcctgggggacag

SEQ ID NO: 340170 - DNA, 25 bp, Artificial
  Probe
cagaggaaccaggtgccaacagtca

SEQ ID NO: 340171 - DNA, 25 bp, Artificial
  Probe
catggccaacagcattgccaacctg

SEQ ID NO: 340172 - DNA, 25 bp, Artificial
  Probe
agtttacagaggaaccaggtgccaa

SEQ ID NO: 340173 - DNA, 25 bp, Artificial
  Probe
tgagcgagccatgctggccaataaa

SEQ ID NO: 340174 - DNA, 25 bp, Artificial
  Probe
tcaagtcctactcaggagacgtgac

SEQ ID NO: 340175 - DNA, 25 bp, Artificial
  Probe
cagggtatcaacatggccaacagca

SEQ ID NO: 340176 - DNA, 25 bp, Artificial
  Probe
ccatgctttgctaagtatacttcag

SEQ ID NO: 340177 - DNA, 25 bp, Artificial
  Probe
agaggaaccaggtgccaacagtcaa

SEQ ID NO: 340178 - DNA, 25 bp, Artificial
  Probe
acgtgactgccgtggaacaacccat

SEQ ID NO: 340179 - DNA, 25 bp, Artificial
  Probe
tatacttcaggcttcttctattagg

SEQ ID NO: 340180 - DNA, 25 bp, Artificial
  Probe
gtggaacaacccattgtacctcgtc

SEQ ID NO: 340181 - DNA, 25 bp, Artificial
  Probe
gattatctctcctgggggacagcct

SEQ ID NO: 340182 - DNA, 25 bp, Artificial
  Probe
gaacaacccattgtacctcgtcctg

SEQ ID NO: 340183 - DNA, 25 bp, Artificial
  Probe
tgggggacagcctctccgtacagcg

SEQ ID NO: 340184 - DNA, 25 bp, Artificial
  Probe
actcaggagacgtgactgccgtgga

SEQ ID NO: 340185 - DNA, 25 bp, Artificial
  Probe
gagcgagccatgctggccaataaaa

SEQ ID NO: 340186 - DNA, 25 bp, Artificial
  Probe
tttacagaggaaccaggtgccaaca

SEQ ID NO: 340187 - DNA, 25 bp, Artificial
  Probe
gataccatcaccatttgttgtgtgt

SEQ ID NO: 340188 - DNA, 25 bp, Artificial
  Probe
ccgattatctctcctgggggacagc

SEQ ID NO: 340189 - DNA, 25 bp, Artificial
  Probe
gaaacccaaaggtgctaggggtgca

SEQ ID NO: 340190 - DNA, 25 bp, Artificial
  Probe
aattgccttttgcaatccagtgcac

SEQ ID NO: 340191 - DNA, 25 bp, Artificial
  Probe
ctcaggtccctcgatgggctgtgca

SEQ ID NO: 340192 - DNA, 25 bp, Artificial
  Probe
cctcgatgggctgtgcagatagcaa

SEQ ID NO: 340193 - DNA, 25 bp, Artificial
  Probe
tgctaggggtgcacggtgctccaca

SEQ ID NO: 340194 - DNA, 25 bp, Artificial
  Probe
actccacaagaaacccaaaggtgct

SEQ ID NO: 340195 - DNA, 25 bp, Artificial
  Probe
aacccaaaggtgctaggggtgcacg

SEQ ID NO: 340196 - DNA, 25 bp, Artificial
  Probe
actgtccagggtttgccacctcagg

SEQ ID NO: 340197 - DNA, 25 bp, Artificial
  Probe
ccttttgcaatccagtgcactgatg

SEQ ID NO: 340198 - DNA, 25 bp, Artificial
  Probe
ttttgcaatccagtgcactgatgtc

SEQ ID NO: 340199 - DNA, 25 bp, Artificial
  Probe
attgccttttgcaatccagtgcact

SEQ ID NO: 340200 - DNA, 25 bp, Artificial
  Probe
gcctgacccactgtccagggtttgc

SEQ ID NO: 340201 - DNA, 25 bp, Artificial
  Probe
ttgccttttgcaatccagtgcactg

SEQ ID NO: 340202 - DNA, 25 bp, Artificial
  Probe
tgacccactgtccagggtttgccac

SEQ ID NO: 340203 - DNA, 25 bp, Artificial
  Probe
tttgccacctcaggtccctcgatgg

SEQ ID NO: 340204 - DNA, 25 bp, Artificial
  Probe
atccagtgcactgatgtctggggcg

SEQ ID NO: 340205 - DNA, 25 bp, Artificial
  Probe
tcaggtccctcgatgggctgtgcag

SEQ ID NO: 340206 - DNA, 25 bp, Artificial
  Probe
cctcaggtccctcgatgggctgtgc

SEQ ID NO: 340207 - DNA, 25 bp, Artificial
  Probe
agggtttgccacctcaggtccctcg

SEQ ID NO: 340208 - DNA, 25 bp, Artificial
  Probe
cacaagaaacccaaaggtgctaggg

SEQ ID NO: 340209 - DNA, 25 bp, Artificial
  Probe
tttgcaatccagtgcactgatgtct

SEQ ID NO: 340210 - DNA, 25 bp, Artificial
  Probe
ttgcaatccagtgcactgatgtctg

SEQ ID NO: 340211 - DNA, 25 bp, Artificial
  Probe
gcttccgtggaagtcatggctttct

SEQ ID NO: 340212 - DNA, 25 bp, Artificial
  Probe
caggtccctcgatgggctgtgcaga

SEQ ID NO: 340213 - DNA, 25 bp, Artificial
  Probe
gagaactccacaagaaacccaaagg

SEQ ID NO: 340214 - DNA, 25 bp, Artificial
  Probe
ttccgtggaagtcatggctttctgt

SEQ ID NO: 340215 - DNA, 25 bp, Artificial
  Probe
gggcgagaactccacaagaaaccca

SEQ ID NO: 340216 - DNA, 25 bp, Artificial
  Probe
gtttgccacctcaggtccctcgatg

SEQ ID NO: 340217 - DNA, 25 bp, Artificial
  Probe
ccctcgatgggctgtgcagatagca

SEQ ID NO: 340218 - DNA, 25 bp, Artificial
  Probe
ctgacccactgtccagggtttgcca

SEQ ID NO: 340219 - DNA, 25 bp, Artificial
  Probe
ggcgagaactccacaagaaacccaa

SEQ ID NO: 340220 - DNA, 25 bp, Artificial
  Probe
caatccagtgcactgatgtctgggg

SEQ ID NO: 340221 - DNA, 25 bp, Artificial
  Probe
tcggcacgagggacagacagctacg

SEQ ID NO: 340222 - DNA, 25 bp, Artificial
  Probe
gaactccacaagaaacccaaaggtg

SEQ ID NO: 340223 - DNA, 25 bp, Artificial
  Probe
tccagtgcactgatgtctggggcga

SEQ ID NO: 340224 - DNA, 25 bp, Artificial
  Probe
gatgaattgccttttgcaatccagt

SEQ ID NO: 340225 - DNA, 25 bp, Artificial
  Probe
cttccgtggaagtcatggctttctg

SEQ ID NO: 340226 - DNA, 25 bp, Artificial
  Probe
cgagaactccacaagaaacccaaag

SEQ ID NO: 340227 - DNA, 25 bp, Artificial
  Probe
cactgtccagggtttgccacctcag

SEQ ID NO: 340228 - DNA, 25 bp, Artificial
  Probe
ctgtccagggtttgccacctcaggt

SEQ ID NO: 340229 - DNA, 25 bp, Artificial
  Probe
tgcaatccagtgcactgatgtctgg

SEQ ID NO: 340230 - DNA, 25 bp, Artificial
  Probe
acctcaggtccctcgatgggctgtg

SEQ ID NO: 340231 - DNA, 25 bp, Artificial
  Probe
cgcctgacccactgtccagggtttg

SEQ ID NO: 340232 - DNA, 25 bp, Artificial
  Probe
tgcttccgtggaagtcatggctttc

SEQ ID NO: 340233 - DNA, 25 bp, Artificial
  Probe
ttgccacctcaggtccctcgatggg

SEQ ID NO: 340234 - DNA, 25 bp, Artificial
  Probe
gccttttgcaatccagtgcactgat

SEQ ID NO: 340235 - DNA, 25 bp, Artificial
  Probe
agcaatgtgcagggatttttaccca

SEQ ID NO: 340236 - DNA, 25 bp, Artificial
  Probe
gaccattcgctcatttgaagaagaa

SEQ ID NO: 340237 - DNA, 25 bp, Artificial
  Probe
ttacccagccagctaactttactac

SEQ ID NO: 340238 - DNA, 25 bp, Artificial
  Probe
tgcagggatttttacccagccagct

SEQ ID NO: 340239 - DNA, 25 bp, Artificial
  Probe
agatagcaatgtgcagggattttta

SEQ ID NO: 340240 - DNA, 25 bp, Artificial
  Probe
cagggtaccaccagttccccacagt

SEQ ID NO: 340241 - DNA, 25 bp, Artificial
  Probe
gatttttacccagccagctaacttt

SEQ ID NO: 340242 - DNA, 25 bp, Artificial
  Probe
cccacacaaattaaagaggaataat

SEQ ID NO: 340243 - DNA, 25 bp, Artificial
  Probe
tcttttttgccaaaatgttgatcca

SEQ ID NO: 340244 - DNA, 25 bp, Artificial
  Probe
cattcgctcatttgaagaagaaaaa

SEQ ID NO: 340245 - DNA, 25 bp, Artificial
  Probe
ttgccaaaatgttgatccaatcaga

SEQ ID NO: 340246 - DNA, 25 bp, Artificial
  Probe
tgcattgaatgttctttcatagctg

SEQ ID NO: 340247 - DNA, 25 bp, Artificial
  Probe
ggatttttacccagccagctaactt

SEQ ID NO: 340248 - DNA, 25 bp, Artificial
  Probe
gggatttttacccagccagctaact

SEQ ID NO: 340249 - DNA, 25 bp, Artificial
  Probe
catagatagcaatgtgcagggattt

SEQ ID NO: 340250 - DNA, 25 bp, Artificial
  Probe
ttttttgccaaaatgttgatccaat

SEQ ID NO: 340251 - DNA, 25 bp, Artificial
  Probe
ttcgctcatttgaagaagaaaaaca

SEQ ID NO: 340252 - DNA, 25 bp, Artificial
  Probe
accattcgctcatttgaagaagaaa

SEQ ID NO: 340253 - DNA, 25 bp, Artificial
  Probe
ccattcgctcatttgaagaagaaaa

SEQ ID NO: 340254 - DNA, 25 bp, Artificial
  Probe
aagggggtacctgatgacattaaca

SEQ ID NO: 340255 - DNA, 25 bp, Artificial
  Probe
cagggatttttacccagccagctaa

SEQ ID NO: 340256 - DNA, 25 bp, Artificial
  Probe
gtacctgatgacattaacaatttaa

SEQ ID NO: 340257 - DNA, 25 bp, Artificial
  Probe
tggtctctttgctgaaaatgggttt

SEQ ID NO: 340258 - DNA, 25 bp, Artificial
  Probe
ttttgccaaaatgttgatccaatca

SEQ ID NO: 340259 - DNA, 25 bp, Artificial
  Probe
agactgttttttgaaggatgggcta

SEQ ID NO: 340260 - DNA, 25 bp, Artificial
  Probe
ttttcttttttgccaaaatgttgat

SEQ ID NO: 340261 - DNA, 25 bp, Artificial
  Probe
ccagggtaccaccagttccccacag

SEQ ID NO: 340262 - DNA, 25 bp, Artificial
  Probe
ccaaaatgttgatccaatcagattg

SEQ ID NO: 340263 - DNA, 25 bp, Artificial
  Probe
tttgccaaaatgttgatccaatcag

SEQ ID NO: 340264 - DNA, 25 bp, Artificial
  Probe
ttttacccagccagctaactttact

SEQ ID NO: 340265 - DNA, 25 bp, Artificial
  Probe
atagcaatgtgcagggatttttacc

SEQ ID NO: 340266 - DNA, 25 bp, Artificial
  Probe
gctaactttactaccttccttgaag

SEQ ID NO: 340267 - DNA, 25 bp, Artificial
  Probe
gactgttttttgaaggatgggctat

SEQ ID NO: 340268 - DNA, 25 bp, Artificial
  Probe
cccagccagctaactttactacctt

SEQ ID NO: 340269 - DNA, 25 bp, Artificial
  Probe
caaaatgttgatccaatcagattgg

SEQ ID NO: 340270 - DNA, 25 bp, Artificial
  Probe
ttcgtagactgttttttgaaggatg

SEQ ID NO: 340271 - DNA, 25 bp, Artificial
  Probe
ggtggtctctttgctgaaaatgggt

SEQ ID NO: 340272 - DNA, 25 bp, Artificial
  Probe
gccagctaactttactaccttcctt

SEQ ID NO: 340273 - DNA, 25 bp, Artificial
  Probe
atgcattgaatgttctttcatagct

SEQ ID NO: 340274 - DNA, 25 bp, Artificial
  Probe
gaggtggtctctttgctgaaaatgg

SEQ ID NO: 340275 - DNA, 25 bp, Artificial
  Probe
tactaccttccttgaaggtgggtct

SEQ ID NO: 340276 - DNA, 25 bp, Artificial
  Probe
ggtacctgatgacattaacaattta

SEQ ID NO: 340277 - DNA, 25 bp, Artificial
  Probe
tacctgatgacattaacaatttaat

SEQ ID NO: 340278 - DNA, 25 bp, Artificial
  Probe
gtagactgttttttgaaggatgggc

SEQ ID NO: 340279 - DNA, 25 bp, Artificial
  Probe
gggtaccaccagttccccacagtca

SEQ ID NO: 340280 - DNA, 25 bp, Artificial
  Probe
cagccagctaactttactaccttcc

SEQ ID NO: 340281 - DNA, 25 bp, Artificial
  Probe
ctgtggcttggaatttcatttgagc

SEQ ID NO: 340282 - DNA, 25 bp, Artificial
  Probe
cctttcgttagttctgtggcttgga

SEQ ID NO: 340283 - DNA, 25 bp, Artificial
  Probe
catgggttcagtaacctttcatttt

SEQ ID NO: 340284 - DNA, 25 bp, Artificial
  Probe
ctttcgttagttctgtggcttggaa

SEQ ID NO: 340285 - DNA, 25 bp, Artificial
  Probe
tcagtttactaagttggaagccttt

SEQ ID NO: 340286 - DNA, 25 bp, Artificial
  Probe
ataatttgctttgtcatcttactgg

SEQ ID NO: 340287 - DNA, 25 bp, Artificial
  Probe
gtattaccaaattgggttctccaat

SEQ ID NO: 340288 - DNA, 25 bp, Artificial
  Probe
tcatgggttcagtaacctttcattt

SEQ ID NO: 340289 - DNA, 25 bp, Artificial
  Probe
taatttgctttgtcatcttactggc

SEQ ID NO: 340290 - DNA, 25 bp, Artificial
  Probe
tgggttcagtaacctttcattttat

SEQ ID NO: 340291 - DNA, 25 bp, Artificial
  Probe
ccttgcttcaagatccattgtttgg

SEQ ID NO: 340292 - DNA, 25 bp, Artificial
  Probe
atttccgcatgtgtctgctacatcg

SEQ ID NO: 340293 - DNA, 25 bp, Artificial
  Probe
gtacagagtggctgtcacatcggta

SEQ ID NO: 340294 - DNA, 25 bp, Artificial
  Probe
gtaacattgccttgcttcaagatcc

SEQ ID NO: 340295 - DNA, 25 bp, Artificial
  Probe
cgcatgtgtctgctacatcgttcag

SEQ ID NO: 340296 - DNA, 25 bp, Artificial
  Probe
ttgtcatcttactggcttcgcatta

SEQ ID NO: 340297 - DNA, 25 bp, Artificial
  Probe
tgtgtctgctacatcgttcagatct

SEQ ID NO: 340298 - DNA, 25 bp, Artificial
  Probe
ttgcttcaagatccattgtttggca

SEQ ID NO: 340299 - DNA, 25 bp, Artificial
  Probe
aagatttccgcatgtgtctgctaca

SEQ ID NO: 340300 - DNA, 25 bp, Artificial
  Probe
ggcacggtacagagtggctgtcaca

SEQ ID NO: 340301 - DNA, 25 bp, Artificial
  Probe
agttggaagcctttcgttagttctg

SEQ ID NO: 340302 - DNA, 25 bp, Artificial
  Probe
cccttaaagatttccgcatgtgtct

SEQ ID NO: 340303 - DNA, 25 bp, Artificial
  Probe
tacttgtattaccaaattgggttct

SEQ ID NO: 340304 - DNA, 25 bp, Artificial
  Probe
gctttgtcatcttactggcttcgca

SEQ ID NO: 340305 - DNA, 25 bp, Artificial
  Probe
ccaaattgggttctccaataatgta

SEQ ID NO: 340306 - DNA, 25 bp, Artificial
  Probe
ggttctccaataatgtaacattgcc

SEQ ID NO: 340307 - DNA, 25 bp, Artificial
  Probe
ttcatgggttcagtaacctttcatt

SEQ ID NO: 340308 - DNA, 25 bp, Artificial
  Probe
gatttccgcatgtgtctgctacatc

SEQ ID NO: 340309 - DNA, 25 bp, Artificial
  Probe
tcaagatccattgtttggcaataat

SEQ ID NO: 340310 - DNA, 25 bp, Artificial
  Probe
ataacattgggcacggtacagagtg

SEQ ID NO: 340311 - DNA, 25 bp, Artificial
  Probe
tggaagcctttcgttagttctgtgg

SEQ ID NO: 340312 - DNA, 25 bp, Artificial
  Probe
caagatccattgtttggcaataata

SEQ ID NO: 340313 - DNA, 25 bp, Artificial
  Probe
tgtaacattgccttgcttcaagatc

SEQ ID NO: 340314 - DNA, 25 bp, Artificial
  Probe
gggttctccaataatgtaacattgc

SEQ ID NO: 340315 - DNA, 25 bp, Artificial
  Probe
aagcctttcgttagttctgtggctt

SEQ ID NO: 340316 - DNA, 25 bp, Artificial
  Probe
tattttcatgggttcagtaaccttt

SEQ ID NO: 340317 - DNA, 25 bp, Artificial
  Probe
ttttcatgggttcagtaacctttca

SEQ ID NO: 340318 - DNA, 25 bp, Artificial
  Probe
taccaaattgggttctccaataatg

SEQ ID NO: 340319 - DNA, 25 bp, Artificial
  Probe
caaattgggttctccaataatgtaa

SEQ ID NO: 340320 - DNA, 25 bp, Artificial
  Probe
tttgtcatcttactggcttcgcatt

SEQ ID NO: 340321 - DNA, 25 bp, Artificial
  Probe
cttgcttcaagatccattgtttggc

SEQ ID NO: 340322 - DNA, 25 bp, Artificial
  Probe
ttgtattaccaaattgggttctcca

SEQ ID NO: 340323 - DNA, 25 bp, Artificial
  Probe
ttcagtttactaagttggaagcctt

SEQ ID NO: 340324 - DNA, 25 bp, Artificial
  Probe
cacggtacagagtggctgtcacatc

SEQ ID NO: 340325 - DNA, 25 bp, Artificial
  Probe
aaacccttaaagatttccgcatgtg

SEQ ID NO: 340326 - DNA, 25 bp, Artificial
  Probe
cattgccttgcttcaagatccattg

SEQ ID NO: 340327 - DNA, 25 bp, Artificial
  Probe
tatgggagagctttcggtccctacc

SEQ ID NO: 340328 - DNA, 25 bp, Artificial
  Probe
tcttgtgctcacagctggcccactt

SEQ ID NO: 340329 - DNA, 25 bp, Artificial
  Probe
cacagctggcccacttcgttctatt

SEQ ID NO: 340330 - DNA, 25 bp, Artificial
  Probe
ttgtgctcacagctggcccacttcg

SEQ ID NO: 340331 - DNA, 25 bp, Artificial
  Probe
ttagcgaatgcaaggcgtgagtcct

SEQ ID NO: 340332 - DNA, 25 bp, Artificial
  Probe
tctattccaggctgtccctggagcc

SEQ ID NO: 340333 - DNA, 25 bp, Artificial
  Probe
tcccttagcgaatgcaaggcgtgag

SEQ ID NO: 340334 - DNA, 25 bp, Artificial
  Probe
gagagaactcctgacaacctccctt

SEQ ID NO: 340335 - DNA, 25 bp, Artificial
  Probe
caaggcgtgagtccttcccatacac

SEQ ID NO: 340336 - DNA, 25 bp, Artificial
  Probe
ccttagcgaatgcaaggcgtgagtc

SEQ ID NO: 340337 - DNA, 25 bp, Artificial
  Probe
acaacctcccttagcgaatgcaagg

SEQ ID NO: 340338 - DNA, 25 bp, Artificial
  Probe
tacacccggtactcccctatgggag

SEQ ID NO: 340339 - DNA, 25 bp, Artificial
  Probe
tggcccacttcgttctattccaggc

SEQ ID NO: 340340 - DNA, 25 bp, Artificial
  Probe
ccacttcgttctattccaggctgtc

SEQ ID NO: 340341 - DNA, 25 bp, Artificial
  Probe
agagggtccaccacagcctcttgtg

SEQ ID NO: 340342 - DNA, 25 bp, Artificial
  Probe
cacagcctcttgtgctcacagctgg

SEQ ID NO: 340343 - DNA, 25 bp, Artificial
  Probe
cggtactcccctatgggagagcttt

SEQ ID NO: 340344 - DNA, 25 bp, Artificial
  Probe
gctggcccacttcgttctattccag

SEQ ID NO: 340345 - DNA, 25 bp, Artificial
  Probe
aatgcaaggcgtgagtccttcccat

SEQ ID NO: 340346 - DNA, 25 bp, Artificial
  Probe
ggagagaactcctgacaacctccct

SEQ ID NO: 340347 - DNA, 25 bp, Artificial
  Probe
agctggcccacttcgttctattcca

SEQ ID NO: 340348 - DNA, 25 bp, Artificial
  Probe
tcccctatgggagagctttcggtcc

SEQ ID NO: 340349 - DNA, 25 bp, Artificial
  Probe
tcgttctattccaggctgtccctgg

SEQ ID NO: 340350 - DNA, 25 bp, Artificial
  Probe
ccggtactcccctatgggagagctt

SEQ ID NO: 340351 - DNA, 25 bp, Artificial
  Probe
gagaactcctgacaacctcccttag

SEQ ID NO: 340352 - DNA, 25 bp, Artificial
  Probe
gtccctaccgcttttctgtgtagcc

SEQ ID NO: 340353 - DNA, 25 bp, Artificial
  Probe
gctttcggtccctaccgcttttctg

SEQ ID NO: 340354 - DNA, 25 bp, Artificial
  Probe
ttcgttctattccaggctgtccctg

SEQ ID NO: 340355 - DNA, 25 bp, Artificial
  Probe
acagctggcccacttcgttctattc

SEQ ID NO: 340356 - DNA, 25 bp, Artificial
  Probe
gagagctttcggtccctaccgcttt

SEQ ID NO: 340357 - DNA, 25 bp, Artificial
  Probe
tgcaaggcgtgagtccttcccatac

SEQ ID NO: 340358 - DNA, 25 bp, Artificial
  Probe
ctcccctatgggagagctttcggtc

SEQ ID NO: 340359 - DNA, 25 bp, Artificial
  Probe
aaggcgtgagtccttcccatacacc

SEQ ID NO: 340360 - DNA, 25 bp, Artificial
  Probe
tattccaggctgtccctggagcctg

SEQ ID NO: 340361 - DNA, 25 bp, Artificial
  Probe
ggtccctaccgcttttctgtgtagc

SEQ ID NO: 340362 - DNA, 25 bp, Artificial
  Probe
ctatgggagagctttcggtccctac

SEQ ID NO: 340363 - DNA, 25 bp, Artificial
  Probe
cttcgttctattccaggctgtccct

SEQ ID NO: 340364 - DNA, 25 bp, Artificial
  Probe
tgtgctcacagctggcccacttcgt

SEQ ID NO: 340365 - DNA, 25 bp, Artificial
  Probe
ccctatgggagagctttcggtccct

SEQ ID NO: 340366 - DNA, 25 bp, Artificial
  Probe
gaatgcaaggcgtgagtccttccca

SEQ ID NO: 340367 - DNA, 25 bp, Artificial
  Probe
cctaccgcttttctgtgtagccctg

SEQ ID NO: 340368 - DNA, 25 bp, Artificial
  Probe
ggtactcccctatgggagagctttc

SEQ ID NO: 340369 - DNA, 25 bp, Artificial
  Probe
agggtccaccacagcctcttgtgct

SEQ ID NO: 340370 - DNA, 25 bp, Artificial
  Probe
gcccacttcgttctattccaggctg

SEQ ID NO: 340371 - DNA, 25 bp, Artificial
  Probe
cctcccttagcgaatgcaaggcgtg

SEQ ID NO: 340372 - DNA, 25 bp, Artificial
  Probe
acagcctcttgtgctcacagctggc

SEQ ID NO: 340373 - DNA, 25 bp, Artificial
  Probe
ggaggcagctgagactcctgctgtc

SEQ ID NO: 340374 - DNA, 25 bp, Artificial
  Probe
ttcctcgagcagagctagggcccta

SEQ ID NO: 340375 - DNA, 25 bp, Artificial
  Probe
ccttgtacaacttctgcggaaggac

SEQ ID NO: 340376 - DNA, 25 bp, Artificial
  Probe
tggatccttgtacaacttctgcgga

SEQ ID NO: 340377 - DNA, 25 bp, Artificial
  Probe
ctcgagcagagctagggccctacct

SEQ ID NO: 340378 - DNA, 25 bp, Artificial
  Probe
ataggaaacacatccccagtgtgca

SEQ ID NO: 340379 - DNA, 25 bp, Artificial
  Probe
ttttaggccccacagacagtggtgg

SEQ ID NO: 340380 - DNA, 25 bp, Artificial
  Probe
acttctgcggaaggacacagtacac

SEQ ID NO: 340381 - DNA, 25 bp, Artificial
  Probe
agctgagactcctgctgtcctccag

SEQ ID NO: 340382 - DNA, 25 bp, Artificial
  Probe
agtacacgctttccttcctcgagca

SEQ ID NO: 340383 - DNA, 25 bp, Artificial
  Probe
gataggaaacacatccccagtgtgc

SEQ ID NO: 340384 - DNA, 25 bp, Artificial
  Probe
tttttaggccccacagacagtggtg

SEQ ID NO: 340385 - DNA, 25 bp, Artificial
  Probe
tacacgctttccttcctcgagcaga

SEQ ID NO: 340386 - DNA, 25 bp, Artificial
  Probe
ttcacgttggatccttgtacaactt

SEQ ID NO: 340387 - DNA, 25 bp, Artificial
  Probe
gagccctgcttcaagctctctgttc

SEQ ID NO: 340388 - DNA, 25 bp, Artificial
  Probe
agctagggccctacctgagcaagtc

SEQ ID NO: 340389 - DNA, 25 bp, Artificial
  Probe
cgctttccttcctcgagcagagcta

SEQ ID NO: 340390 - DNA, 25 bp, Artificial
  Probe
ttggatccttgtacaacttctgcgg

SEQ ID NO: 340391 - DNA, 25 bp, Artificial
  Probe
cgataggaaacacatccccagtgtg

SEQ ID NO: 340392 - DNA, 25 bp, Artificial
  Probe
acacgctttccttcctcgagcagag

SEQ ID NO: 340393 - DNA, 25 bp, Artificial
  Probe
acagtacacgctttccttcctcgag

SEQ ID NO: 340394 - DNA, 25 bp, Artificial
  Probe
tttttgagttcacgttggatccttg

SEQ ID NO: 340395 - DNA, 25 bp, Artificial
  Probe
tcctcgagcagagctagggccctac

SEQ ID NO: 340396 - DNA, 25 bp, Artificial
  Probe
atccttgtacaacttctgcggaagg

SEQ ID NO: 340397 - DNA, 25 bp, Artificial
  Probe
ttgtacaacttctgcggaaggacac

SEQ ID NO: 340398 - DNA, 25 bp, Artificial
  Probe
gagttcacgttggatccttgtacaa

SEQ ID NO: 340399 - DNA, 25 bp, Artificial
  Probe
agccctgcttcaagctctctgttca

SEQ ID NO: 340400 - DNA, 25 bp, Artificial
  Probe
ttctgcggaaggacacagtacacgc

SEQ ID NO: 340401 - DNA, 25 bp, Artificial
  Probe
acgttggatccttgtacaacttctg

SEQ ID NO: 340402 - DNA, 25 bp, Artificial
  Probe
tcgagcagagctagggccctacctg

SEQ ID NO: 340403 - DNA, 25 bp, Artificial
  Probe
gagctagggccctacctgagcaagt

SEQ ID NO: 340404 - DNA, 25 bp, Artificial
  Probe
gtcctccagcctttcagaggagatc

SEQ ID NO: 340405 - DNA, 25 bp, Artificial
  Probe
caacttctgcggaaggacacagtac

SEQ ID NO: 340406 - DNA, 25 bp, Artificial
  Probe
ggcagctgagactcctgctgtcctc

SEQ ID NO: 340407 - DNA, 25 bp, Artificial
  Probe
tttccttcctcgagcagagctaggg

SEQ ID NO: 340408 - DNA, 25 bp, Artificial
  Probe
gaggcagctgagactcctgctgtcc

SEQ ID NO: 340409 - DNA, 25 bp, Artificial
  Probe
tggagccctgcttcaagctctctgt

SEQ ID NO: 340410 - DNA, 25 bp, Artificial
  Probe
accatcgtgtttgcaaaggttcaaa

SEQ ID NO: 340411 - DNA, 25 bp, Artificial
  Probe
ccagccaaatgcagggaaacacttt

SEQ ID NO: 340412 - DNA, 25 bp, Artificial
  Probe
aggacacagtacacgctttccttcc

SEQ ID NO: 340413 - DNA, 25 bp, Artificial
  Probe
gtcaccatcgtgtttgcaaaggttc

SEQ ID NO: 340414 - DNA, 25 bp, Artificial
  Probe
cttcctcgagcagagctagggccct

SEQ ID NO: 340415 - DNA, 25 bp, Artificial
  Probe
tgtcctccagcctttcagaggagat

SEQ ID NO: 340416 - DNA, 25 bp, Artificial
  Probe
tccttcctcgagcagagctagggcc

SEQ ID NO: 340417 - DNA, 25 bp, Artificial
  Probe
tattccagccaaatgcagggaaaca

SEQ ID NO: 340418 - DNA, 25 bp, Artificial
  Probe
ctagggccctacctgagcaagtcgg

SEQ ID NO: 340419 - DNA, 25 bp, Artificial
  Probe
accatgatagccagccactaccaga

SEQ ID NO: 340420 - DNA, 25 bp, Artificial
  Probe
cgtgctctggagaacgaaaagaacg

SEQ ID NO: 340421 - DNA, 25 bp, Artificial
  Probe
aaatgacatgcgtgctctggagaac

SEQ ID NO: 340422 - DNA, 25 bp, Artificial
  Probe
tcaccaaactcaatggcgccttgac

SEQ ID NO: 340423 - DNA, 25 bp, Artificial
  Probe
gtagatgccatcaaagaagctctga

SEQ ID NO: 340424 - DNA, 25 bp, Artificial
  Probe
gatttcataaagaaccttaaaggct

SEQ ID NO: 340425 - DNA, 25 bp, Artificial
  Probe
caaccccggaaactgactgtgaaat

SEQ ID NO: 340426 - DNA, 25 bp, Artificial
  Probe
tctaatgagttctccatccagaggc

SEQ ID NO: 340427 - DNA, 25 bp, Artificial
  Probe
acccgcctgaagctatacaagcagg

SEQ ID NO: 340428 - DNA, 25 bp, Artificial
  Probe
ttctccatccagaggccgacatgtg

SEQ ID NO: 340429 - DNA, 25 bp, Artificial
  Probe
ctcaatggcgccttgaccatgatag

SEQ ID NO: 340430 - DNA, 25 bp, Artificial
  Probe
gtcaccacctttgaggatttcataa

SEQ ID NO: 340431 - DNA, 25 bp, Artificial
  Probe
gtctacggggcaacctcaccaaact

SEQ ID NO: 340432 - DNA, 25 bp, Artificial
  Probe
ttgactgctggaagccggtccagaa

SEQ ID NO: 340433 - DNA, 25 bp, Artificial
  Probe
aaggctttctgtttgatatcccttt

SEQ ID NO: 340434 - DNA, 25 bp, Artificial
  Probe
acatgtgtgcagacccgcctgaagc

SEQ ID NO: 340435 - DNA, 25 bp, Artificial
  Probe
cttgaccatgatagccagccactac

SEQ ID NO: 340436 - DNA, 25 bp, Artificial
  Probe
ccacctttgaggatttcataaagaa

SEQ ID NO: 340437 - DNA, 25 bp, Artificial
  Probe
atccagaggccgacatgtgtgcaga

SEQ ID NO: 340438 - DNA, 25 bp, Artificial
  Probe
tgatagccagccactaccagacgaa

SEQ ID NO: 340439 - DNA, 25 bp, Artificial
  Probe
aagctctgagcctcctaaatgacat

SEQ ID NO: 340440 - DNA, 25 bp, Artificial
  Probe
tgaaatagaagtcaccacctttgag

SEQ ID NO: 340441 - DNA, 25 bp, Artificial
  Probe
ctcaccaaactcaatggcgccttga

SEQ ID NO: 340442 - DNA, 25 bp, Artificial
  Probe
aagacgtagacatcatctctaatga

SEQ ID NO: 340443 - DNA, 25 bp, Artificial
  Probe
caaagaagctctgagcctcctaaat

SEQ ID NO: 340444 - DNA, 25 bp, Artificial
  Probe
caagcagggtctacggggcaacctc

SEQ ID NO: 340445 - DNA, 25 bp, Artificial
  Probe
catgtagatgccatcaaagaagctc

SEQ ID NO: 340446 - DNA, 25 bp, Artificial
  Probe
acgtagacatcatctctaatgagtt

SEQ ID NO: 340447 - DNA, 25 bp, Artificial
  Probe
tacggggcaacctcaccaaactcaa

SEQ ID NO: 340448 - DNA, 25 bp, Artificial
  Probe
tagccagccactaccagacgaactg

SEQ ID NO: 340449 - DNA, 25 bp, Artificial
  Probe
agctatacaagcagggtctacgggg

SEQ ID NO: 340450 - DNA, 25 bp, Artificial
  Probe
gtttgatatcccttttgactgctgg

SEQ ID NO: 340451 - DNA, 25 bp, Artificial
  Probe
gaaatagaagtcaccacctttgagg

SEQ ID NO: 340452 - DNA, 25 bp, Artificial
  Probe
aagctatacaagcagggtctacggg

SEQ ID NO: 340453 - DNA, 25 bp, Artificial
  Probe
gcgccttgaccatgatagccagcca

SEQ ID NO: 340454 - DNA, 25 bp, Artificial
  Probe
ctggaagccggtccagaaatgagga

SEQ ID NO: 340455 - DNA, 25 bp, Artificial
  Probe
atgtagatgccatcaaagaagctct

SEQ ID NO: 340456 - DNA, 25 bp, Artificial
  Probe
ggggcaacctcaccaaactcaatgg

SEQ ID NO: 340457 - DNA, 25 bp, Artificial
  Probe
accttaaaggctttctgtttgatat

SEQ ID NO: 340458 - DNA, 25 bp, Artificial
  Probe
ccctggaagcatgtagatgccatca

SEQ ID NO: 340459 - DNA, 25 bp, Artificial
  Probe
cccggaaactgactgtgaaatagaa

SEQ ID NO: 340460 - DNA, 25 bp, Artificial
  Probe
tgcagacccgcctgaagctatacaa

SEQ ID NO: 340461 - DNA, 25 bp, Artificial
  Probe
atacaagcagggtctacggggcaac

SEQ ID NO: 340462 - DNA, 25 bp, Artificial
  Probe
aatagaagtcaccacctttgaggat

SEQ ID NO: 340463 - DNA, 25 bp, Artificial
  Probe
tcctaaatgacatgcgtgctctgga

SEQ ID NO: 340464 - DNA, 25 bp, Artificial
  Probe
caccacctttgaggatttcataaag

SEQ ID NO: 340465 - DNA, 25 bp, Artificial
  Probe
gtggcttcttcttcagctcacttgt

SEQ ID NO: 340466 - DNA, 25 bp, Artificial
  Probe
attctcttgcctaggtgcctgagac

SEQ ID NO: 340467 - DNA, 25 bp, Artificial
  Probe
gtacttctgtgattatggcccttgg

SEQ ID NO: 340468 - DNA, 25 bp, Artificial
  Probe
ctcacttgtgggtacttccctagcg

SEQ ID NO: 340469 - DNA, 25 bp, Artificial
  Probe
aattctcttgcctaggtgcctgaga

SEQ ID NO: 340470 - DNA, 25 bp, Artificial
  Probe
cctgttttatccaggccccagtggc

SEQ ID NO: 340471 - DNA, 25 bp, Artificial
  Probe
tgtgcctgttttatccaggccccag

SEQ ID NO: 340472 - DNA, 25 bp, Artificial
  Probe
gtctgtgcctgttttatccaggccc

SEQ ID NO: 340473 - DNA, 25 bp, Artificial
  Probe
tcagctcacttgtgggtacttccct

SEQ ID NO: 340474 - DNA, 25 bp, Artificial
  Probe
cttcagctcacttgtgggtacttcc

SEQ ID NO: 340475 - DNA, 25 bp, Artificial
  Probe
acttgtgggtacttccctagcgctc

SEQ ID NO: 340476 - DNA, 25 bp, Artificial
  Probe
gtgcctgagacgtctgtgcctgttt

SEQ ID NO: 340477 - DNA, 25 bp, Artificial
  Probe
gctcagcctcatcaaccaacggggg

SEQ ID NO: 340478 - DNA, 25 bp, Artificial
  Probe
ttcttcttcagctcacttgtgggta

SEQ ID NO: 340479 - DNA, 25 bp, Artificial
  Probe
gacgtctgtgcctgttttatccagg

SEQ ID NO: 340480 - DNA, 25 bp, Artificial
  Probe
ttttcctttttgatcagaggaaagc

SEQ ID NO: 340481 - DNA, 25 bp, Artificial
  Probe
cctttttgatcagaggaaagcaaat

SEQ ID NO: 340482 - DNA, 25 bp, Artificial
  Probe
atccaggccccagtggcttcttctt

SEQ ID NO: 340483 - DNA, 25 bp, Artificial
  Probe
tgggtacttccctagcgctcagcct

SEQ ID NO: 340484 - DNA, 25 bp, Artificial
  Probe
ggccccagtggcttcttcttcagct

SEQ ID NO: 340485 - DNA, 25 bp, Artificial
  Probe
tgcctaggtgcctgagacgtctgtg

SEQ ID NO: 340486 - DNA, 25 bp, Artificial
  Probe
acgtctgtgcctgttttatccaggc

SEQ ID NO: 340487 - DNA, 25 bp, Artificial
  Probe
aaagcaaattctcttgcctaggtgc

SEQ ID NO: 340488 - DNA, 25 bp, Artificial
  Probe
agcaaattctcttgcctaggtgcct

SEQ ID NO: 340489 - DNA, 25 bp, Artificial
  Probe
tcctttttgatcagaggaaagcaaa

SEQ ID NO: 340490 - DNA, 25 bp, Artificial
  Probe
tatccaggccccagtggcttcttct

SEQ ID NO: 340491 - DNA, 25 bp, Artificial
  Probe
gattatggcccttgggatggctcat

SEQ ID NO: 340492 - DNA, 25 bp, Artificial
  Probe
cttctgtgattatggcccttgggat

SEQ ID NO: 340493 - DNA, 25 bp, Artificial
  Probe
ccagtacttctgtgattatggccct

SEQ ID NO: 340494 - DNA, 25 bp, Artificial
  Probe
cttcttcagctcacttgtgggtact

SEQ ID NO: 340495 - DNA, 25 bp, Artificial
  Probe
ccagtggcttcttcttcagctcact

SEQ ID NO: 340496 - DNA, 25 bp, Artificial
  Probe
ctgagacgtctgtgcctgttttatc

SEQ ID NO: 340497 - DNA, 25 bp, Artificial
  Probe
tttcctttttgatcagaggaaagca

SEQ ID NO: 340498 - DNA, 25 bp, Artificial
  Probe
cagtggcttcttcttcagctcactt

SEQ ID NO: 340499 - DNA, 25 bp, Artificial
  Probe
ctaggtgcctgagacgtctgtgcct

SEQ ID NO: 340500 - DNA, 25 bp, Artificial
  Probe
gaaagcaaattctcttgcctaggtg

SEQ ID NO: 340501 - DNA, 25 bp, Artificial
  Probe
ctcttgcctaggtgcctgagacgtc

SEQ ID NO: 340502 - DNA, 25 bp, Artificial
  Probe
gtcccctaaacttagcactgaagac

SEQ ID NO: 340503 - DNA, 25 bp, Artificial
  Probe
gcctgagacgtctgtgcctgtttta

SEQ ID NO: 340504 - DNA, 25 bp, Artificial
  Probe
ttagcactgaagacccggtcagacc

SEQ ID NO: 340505 - DNA, 25 bp, Artificial
  Probe
ccctaaacttagcactgaagacccg

SEQ ID NO: 340506 - DNA, 25 bp, Artificial
  Probe
cttgtgggtacttccctagcgctca

SEQ ID NO: 340507 - DNA, 25 bp, Artificial
  Probe
ttctcttgcctaggtgcctgagacg

SEQ ID NO: 340508 - DNA, 25 bp, Artificial
  Probe
taaacttagcactgaagacccggtc

SEQ ID NO: 340509 - DNA, 25 bp, Artificial
  Probe
tgattatggcccttgggatggctca

SEQ ID NO: 340510 - DNA, 25 bp, Artificial
  Probe
ttgtcccctaaacttagcactgaag

SEQ ID NO: 340511 - DNA, 25 bp, Artificial
  Probe
aaacctgatcatggatgtaacgaca

SEQ ID NO: 340512 - DNA, 25 bp, Artificial
  Probe
cagttgtcctgtcatttcaccaata

SEQ ID NO: 340513 - DNA, 25 bp, Artificial
  Probe
catatccataacagaaatcgcacag

SEQ ID NO: 340514 - DNA, 25 bp, Artificial
  Probe
taaacctgatcatggatgtaacgac

SEQ ID NO: 340515 - DNA, 25 bp, Artificial
  Probe
acagctcaatattgatcaactaatg

SEQ ID NO: 340516 - DNA, 25 bp, Artificial
  Probe
aacctgatcatggatgtaacgacaa

SEQ ID NO: 340517 - DNA, 25 bp, Artificial
  Probe
agaaatcgcacagctcaatattgat

SEQ ID NO: 340518 - DNA, 25 bp, Artificial
  Probe
caataaaaataccgccagttataat

SEQ ID NO: 340519 - DNA, 25 bp, Artificial
  Probe
gaaatcgcacagctcaatattgatc

SEQ ID NO: 340520 - DNA, 25 bp, Artificial
  Probe
tccataacagaaatcgcacagctca

SEQ ID NO: 340521 - DNA, 25 bp, Artificial
  Probe
actaatgacctgtatcttctatttc

SEQ ID NO: 340522 - DNA, 25 bp, Artificial
  Probe
atgaaataaacctgatcatggatgt

SEQ ID NO: 340523 - DNA, 25 bp, Artificial
  Probe
ttctatttcctacattttatacaaa

SEQ ID NO: 340524 - DNA, 25 bp, Artificial
  Probe
atcttctatttcctacattttatac

SEQ ID NO: 340525 - DNA, 25 bp, Artificial
  Probe
gaaacccagttgtcctgtcatttca

SEQ ID NO: 340526 - DNA, 25 bp, Artificial
  Probe
aaacccagttgtcctgtcatttcac

SEQ ID NO: 340527 - DNA, 25 bp, Artificial
  Probe
acgaaacccagttgtcctgtcattt

SEQ ID NO: 340528 - DNA, 25 bp, Artificial
  Probe
ccataacagaaatcgcacagctcaa

SEQ ID NO: 340529 - DNA, 25 bp, Artificial
  Probe
cagaaatcgcacagctcaatattga

SEQ ID NO: 340530 - DNA, 25 bp, Artificial
  Probe
aacagaaatcgcacagctcaatatt

SEQ ID NO: 340531 - DNA, 25 bp, Artificial
  Probe
tgtcatttcaccaataaaaataccg

SEQ ID NO: 340532 - DNA, 25 bp, Artificial
  Probe
taatgacctgtatcttctatttcct

SEQ ID NO: 340533 - DNA, 25 bp, Artificial
  Probe
acctgatcatggatgtaacgacaaa

SEQ ID NO: 340534 - DNA, 25 bp, Artificial
  Probe
gatcaactaatgacctgtatcttct

SEQ ID NO: 340535 - DNA, 25 bp, Artificial
  Probe
acagaaatcgcacagctcaatattg

SEQ ID NO: 340536 - DNA, 25 bp, Artificial
  Probe
aaacgaaacccagttgtcctgtcat

SEQ ID NO: 340537 - DNA, 25 bp, Artificial
  Probe
aacgaaacccagttgtcctgtcatt

SEQ ID NO: 340538 - DNA, 25 bp, Artificial
  Probe
caccaataaaaataccgccagttat

SEQ ID NO: 340539 - DNA, 25 bp, Artificial
  Probe
tcgcacagctcaatattgatcaact

SEQ ID NO: 340540 - DNA, 25 bp, Artificial
  Probe
aaaataccgccagttataatgaaat

SEQ ID NO: 340541 - DNA, 25 bp, Artificial
  Probe
atattgatcaactaatgacctgtat

SEQ ID NO: 340542 - DNA, 25 bp, Artificial
  Probe
aataaacctgatcatggatgtaacg

SEQ ID NO: 340543 - DNA, 25 bp, Artificial
  Probe
tcaactaatgacctgtatcttctat

SEQ ID NO: 340544 - DNA, 25 bp, Artificial
  Probe
cgaaacccagttgtcctgtcatttc

SEQ ID NO: 340545 - DNA, 25 bp, Artificial
  Probe
gttgtcctgtcatttcaccaataaa

SEQ ID NO: 340546 - DNA, 25 bp, Artificial
  Probe
ttcaccaataaaaataccgccagtt

SEQ ID NO: 340547 - DNA, 25 bp, Artificial
  Probe
gtcctgtcatttcaccaataaaaat

SEQ ID NO: 340548 - DNA, 25 bp, Artificial
  Probe
gacctgtatcttctatttcctacat

SEQ ID NO: 340549 - DNA, 25 bp, Artificial
  Probe
taccgccagttataatgaaataaac

SEQ ID NO: 340550 - DNA, 25 bp, Artificial
  Probe
cctgtatcttctatttcctacattt

SEQ ID NO: 340551 - DNA, 25 bp, Artificial
  Probe
ttgatcaactaatgacctgtatctt

SEQ ID NO: 340552 - DNA, 25 bp, Artificial
  Probe
tacaaaacgaaacccagttgtcctg

SEQ ID NO: 340553 - DNA, 25 bp, Artificial
  Probe
aaatcgcacagctcaatattgatca

SEQ ID NO: 340554 - DNA, 25 bp, Artificial
  Probe
tatttcctacattttatacaaaacg

SEQ ID NO: 340555 - DNA, 25 bp, Artificial
  Probe
aacccagttgtcctgtcatttcacc

SEQ ID NO: 340556 - DNA, 25 bp, Artificial
  Probe
tcatttcaccaataaaaataccgcc

SEQ ID NO: 340557 - DNA, 25 bp, Artificial
  Probe
aggtggcgatcttgggagccatatt

SEQ ID NO: 340558 - DNA, 25 bp, Artificial
  Probe
ctctgggattaggtgccaagacaat

SEQ ID NO: 340559 - DNA, 25 bp, Artificial
  Probe
ttaggtgccaagacaatgacacggc

SEQ ID NO: 340560 - DNA, 25 bp, Artificial
  Probe
gccaagacaatgacacggcttagaa

SEQ ID NO: 340561 - DNA, 25 bp, Artificial
  Probe
gtccaggtaacttcccagtcctcaa

SEQ ID NO: 340562 - DNA, 25 bp, Artificial
  Probe
catcattttatggttgaactcagat

SEQ ID NO: 340563 - DNA, 25 bp, Artificial
  Probe
agaactcacgccagtggacctgggc

SEQ ID NO: 340564 - DNA, 25 bp, Artificial
  Probe
tcttccagagataattttgcagaca

SEQ ID NO: 340565 - DNA, 25 bp, Artificial
  Probe
aacatcattttatggttgaactcag

SEQ ID NO: 340566 - DNA, 25 bp, Artificial
  Probe
agataattttgcagacacagttctt

SEQ ID NO: 340567 - DNA, 25 bp, Artificial
  Probe
ttcttccagagataattttgcagac

SEQ ID NO: 340568 - DNA, 25 bp, Artificial
  Probe
tcacgccagtggacctgggctctgg

SEQ ID NO: 340569 - DNA, 25 bp, Artificial
  Probe
attaggtgccaagacaatgacacgg

SEQ ID NO: 340570 - DNA, 25 bp, Artificial
  Probe
atgacacggcttagaaggcttagaa

SEQ ID NO: 340571 - DNA, 25 bp, Artificial
  Probe
ttgggagccatattcatttacaaac

SEQ ID NO: 340572 - DNA, 25 bp, Artificial
  Probe
ggtgccaagacaatgacacggctta

SEQ ID NO: 340573 - DNA, 25 bp, Artificial
  Probe
caagacaatgacacggcttagaagg

SEQ ID NO: 340574 - DNA, 25 bp, Artificial
  Probe
caatgacacggcttagaaggcttag

SEQ ID NO: 340575 - DNA, 25 bp, Artificial
  Probe
cttatcgaagaggtggcgatcttgg

SEQ ID NO: 340576 - DNA, 25 bp, Artificial
  Probe
cctcaaaacagaactcacgccagtg

SEQ ID NO: 340577 - DNA, 25 bp, Artificial
  Probe
gataattttgcagacacagttcttt

SEQ ID NO: 340578 - DNA, 25 bp, Artificial
  Probe
aatgacacggcttagaaggcttaga

SEQ ID NO: 340579 - DNA, 25 bp, Artificial
  Probe
gcttagaatttcttccagagataat

SEQ ID NO: 340580 - DNA, 25 bp, Artificial
  Probe
gattaggtgccaagacaatgacacg

SEQ ID NO: 340581 - DNA, 25 bp, Artificial
  Probe
caggtccaggtaacttcccagtcct

SEQ ID NO: 340582 - DNA, 25 bp, Artificial
  Probe
tgccaagacaatgacacggcttaga

SEQ ID NO: 340583 - DNA, 25 bp, Artificial
  Probe
tctgggattaggtgccaagacaatg

SEQ ID NO: 340584 - DNA, 25 bp, Artificial
  Probe
ggcttagaatttcttccagagataa

SEQ ID NO: 340585 - DNA, 25 bp, Artificial
  Probe
gctctgggattaggtgccaagacaa

SEQ ID NO: 340586 - DNA, 25 bp, Artificial
  Probe
ttacttatcgaagaggtggcgatct

SEQ ID NO: 340587 - DNA, 25 bp, Artificial
  Probe
tttcttccagagataattttgcaga

SEQ ID NO: 340588 - DNA, 25 bp, Artificial
  Probe
ggcgatcttgggagccatattcatt

SEQ ID NO: 340589 - DNA, 25 bp, Artificial
  Probe
tacttatcgaagaggtggcgatctt

SEQ ID NO: 340590 - DNA, 25 bp, Artificial
  Probe
atttcttccagagataattttgcag

SEQ ID NO: 340591 - DNA, 25 bp, Artificial
  Probe
aggcttagaatttcttccagagata

SEQ ID NO: 340592 - DNA, 25 bp, Artificial
  Probe
acacggcttagaaggcttagaattt

SEQ ID NO: 340593 - DNA, 25 bp, Artificial
  Probe
acttatcgaagaggtggcgatcttg

SEQ ID NO: 340594 - DNA, 25 bp, Artificial
  Probe
tcaaaacagaactcacgccagtgga

SEQ ID NO: 340595 - DNA, 25 bp, Artificial
  Probe
gtcctcaaaacagaactcacgccag

SEQ ID NO: 340596 - DNA, 25 bp, Artificial
  Probe
cttgggagccatattcatttacaaa

SEQ ID NO: 340597 - DNA, 25 bp, Artificial
  Probe
tgacacggcttagaaggcttagaat

SEQ ID NO: 340598 - DNA, 25 bp, Artificial
  Probe
ctcaaaacagaactcacgccagtgg

SEQ ID NO: 340599 - DNA, 25 bp, Artificial
  Probe
atcttgggagccatattcatttaca

SEQ ID NO: 340600 - DNA, 25 bp, Artificial
  Probe
actcacgccagtggacctgggctct

SEQ ID NO: 340601 - DNA, 25 bp, Artificial
  Probe
ccaagacaatgacacggcttagaag

SEQ ID NO: 340602 - DNA, 25 bp, Artificial
  Probe
ggctctgggattaggtgccaagaca

SEQ ID NO: 340603 - DNA, 25 bp, Artificial
  Probe
aaggacatacttctgaccatgttga

SEQ ID NO: 340604 - DNA, 25 bp, Artificial
  Probe
acttctgaccatgttgatgtatgcg

SEQ ID NO: 340605 - DNA, 25 bp, Artificial
  Probe
acatacttctgaccatgttgatgta

SEQ ID NO: 340606 - DNA, 25 bp, Artificial
  Probe
gacaaggacatacttctgaccatgt

SEQ ID NO: 340607 - DNA, 25 bp, Artificial
  Probe
gaccatgttgatgtatgcgaacaaa

SEQ ID NO: 340608 - DNA, 25 bp, Artificial
  Probe
tttggtgtccttccatgtacttgga

SEQ ID NO: 340609 - DNA, 25 bp, Artificial
  Probe
ttcaaactggtgacaaggacatact

SEQ ID NO: 340610 - DNA, 25 bp, Artificial
  Probe
tacttctgaccatgttgatgtatgc

SEQ ID NO: 340611 - DNA, 25 bp, Artificial
  Probe
gtgacaaggacatacttctgaccat

SEQ ID NO: 340612 - DNA, 25 bp, Artificial
  Probe
atacttctgaccatgttgatgtatg

SEQ ID NO: 340613 - DNA, 25 bp, Artificial
  Probe
atgcagttttggtgtccttccatgt

SEQ ID NO: 340614 - DNA, 25 bp, Artificial
  Probe
aaatgttcaaactggtgacaaggac

SEQ ID NO: 340615 - DNA, 25 bp, Artificial
  Probe
aatgttcaaactggtgacaaggaca

SEQ ID NO: 340616 - DNA, 25 bp, Artificial
  Probe
ctgaccatgttgatgtatgcgaaca

SEQ ID NO: 340617 - DNA, 25 bp, Artificial
  Probe
tgcagttttggtgtccttccatgta

SEQ ID NO: 340618 - DNA, 25 bp, Artificial
  Probe
aaactggtgacaaggacatacttct

SEQ ID NO: 340619 - DNA, 25 bp, Artificial
  Probe
tgttcaaactggtgacaaggacata

SEQ ID NO: 340620 - DNA, 25 bp, Artificial
  Probe
tgacaaggacatacttctgaccatg

SEQ ID NO: 340621 - DNA, 25 bp, Artificial
  Probe
agttttggtgtccttccatgtactt

SEQ ID NO: 340622 - DNA, 25 bp, Artificial
  Probe
cttccatgtacttggactttatgtt

SEQ ID NO: 340623 - DNA, 25 bp, Artificial
  Probe
ttccatgtacttggactttatgtta

SEQ ID NO: 340624 - DNA, 25 bp, Artificial
  Probe
ttttggtgtccttccatgtacttgg

SEQ ID NO: 340625 - DNA, 25 bp, Artificial
  Probe
gtccttccatgtacttggactttat

SEQ ID NO: 340626 - DNA, 25 bp, Artificial
  Probe
gttttggtgtccttccatgtacttg

SEQ ID NO: 340627 - DNA, 25 bp, Artificial
  Probe
tggtgtccttccatgtacttggact

SEQ ID NO: 340628 - DNA, 25 bp, Artificial
  Probe
tgtccttccatgtacttggacttta

SEQ ID NO: 340629 - DNA, 25 bp, Artificial
  Probe
cagttttggtgtccttccatgtact

SEQ ID NO: 340630 - DNA, 25 bp, Artificial
  Probe
acaaggacatacttctgaccatgtt

SEQ ID NO: 340631 - DNA, 25 bp, Artificial
  Probe
ttctgaccatgttgatgtatgcgaa

SEQ ID NO: 340632 - DNA, 25 bp, Artificial
  Probe
ccttccatgtacttggactttatgt

SEQ ID NO: 340633 - DNA, 25 bp, Artificial
  Probe
tgaccatgttgatgtatgcgaacaa

SEQ ID NO: 340634 - DNA, 25 bp, Artificial
  Probe
tctgaccatgttgatgtatgcgaac

SEQ ID NO: 340635 - DNA, 25 bp, Artificial
  Probe
tcaaactggtgacaaggacatactt

SEQ ID NO: 340636 - DNA, 25 bp, Artificial
  Probe
aggacatacttctgaccatgttgat

SEQ ID NO: 340637 - DNA, 25 bp, Artificial
  Probe
cttctgaccatgttgatgtatgcga

SEQ ID NO: 340638 - DNA, 25 bp, Artificial
  Probe
ggtgtccttccatgtacttggactt

SEQ ID NO: 340639 - DNA, 25 bp, Artificial
  Probe
atgttcaaactggtgacaaggacat

SEQ ID NO: 340640 - DNA, 25 bp, Artificial
  Probe
ggacatacttctgaccatgttgatg

SEQ ID NO: 340641 - DNA, 25 bp, Artificial
  Probe
gttcaaactggtgacaaggacatac

SEQ ID NO: 340642 - DNA, 25 bp, Artificial
  Probe
ttggtgtccttccatgtacttggac

SEQ ID NO: 340643 - DNA, 25 bp, Artificial
  Probe
catacttctgaccatgttgatgtat

SEQ ID NO: 340644 - DNA, 25 bp, Artificial
  Probe
ccatgtacttggactttatgttaaa

SEQ ID NO: 340645 - DNA, 25 bp, Artificial
  Probe
tccttccatgtacttggactttatg

SEQ ID NO: 340646 - DNA, 25 bp, Artificial
  Probe
tccatgtacttggactttatgttaa

SEQ ID NO: 340647 - DNA, 25 bp, Artificial
  Probe
gtgtccttccatgtacttggacttt

SEQ ID NO: 340648 - DNA, 25 bp, Artificial
  Probe
gacatacttctgaccatgttgatgt

SEQ ID NO: 340649 - DNA, 25 bp, Artificial
  Probe
tgcctctgcctgtcgcatgagaaca

SEQ ID NO: 340650 - DNA, 25 bp, Artificial
  Probe
tctgcctgtcgcatgagaacattaa

SEQ ID NO: 340651 - DNA, 25 bp, Artificial
  Probe
aaggccgctgtgttacttctctgtt

SEQ ID NO: 340652 - DNA, 25 bp, Artificial
  Probe
tgagtaggagcatgctcagtcgatg

SEQ ID NO: 340653 - DNA, 25 bp, Artificial
  Probe
tgctgctttcttgttgctacatctc

SEQ ID NO: 340654 - DNA, 25 bp, Artificial
  Probe
ggtttctgaaaatggtcccgcagaa

SEQ ID NO: 340655 - DNA, 25 bp, Artificial
  Probe
tttcaaactcgcacttgtattggta

SEQ ID NO: 340656 - DNA, 25 bp, Artificial
  Probe
agtcaacatgccaagagtgaaataa

SEQ ID NO: 340657 - DNA, 25 bp, Artificial
  Probe
taaaggcgtttcaaactcgcacttg

SEQ ID NO: 340658 - DNA, 25 bp, Artificial
  Probe
ggccagcttctacagtacgtccact

SEQ ID NO: 340659 - DNA, 25 bp, Artificial
  Probe
cccgcagaaggtgatgcaaatcgat

SEQ ID NO: 340660 - DNA, 25 bp, Artificial
  Probe
tcggctcagagttactaaataggtg

SEQ ID NO: 340661 - DNA, 25 bp, Artificial
  Probe
cttctaccaggtctaatattgactg

SEQ ID NO: 340662 - DNA, 25 bp, Artificial
  Probe
taacaaggccgctgtgttacttctc

SEQ ID NO: 340663 - DNA, 25 bp, Artificial
  Probe
agaacattaacaaggccgctgtgtt

SEQ ID NO: 340664 - DNA, 25 bp, Artificial
  Probe
atattgactgcctctgcctgtcgca

SEQ ID NO: 340665 - DNA, 25 bp, Artificial
  Probe
actgcctctgcctgtcgcatgagaa

SEQ ID NO: 340666 - DNA, 25 bp, Artificial
  Probe
tctgtctctgcctgagtaggagcat

SEQ ID NO: 340667 - DNA, 25 bp, Artificial
  Probe
tgactagtcggctcagagttactaa

SEQ ID NO: 340668 - DNA, 25 bp, Artificial
  Probe
attgactgcctctgcctgtcgcatg

SEQ ID NO: 340669 - DNA, 25 bp, Artificial
  Probe
tctaatattgactgcctctgcctgt

SEQ ID NO: 340670 - DNA, 25 bp, Artificial
  Probe
gccccagaggtttctgaaaatggtc

SEQ ID NO: 340671 - DNA, 25 bp, Artificial
  Probe
actccctttctgtctctgcctgagt

SEQ ID NO: 340672 - DNA, 25 bp, Artificial
  Probe
cgatagtcaacatgccaagagtgaa

SEQ ID NO: 340673 - DNA, 25 bp, Artificial
  Probe
agagtcacctagagcctagaacctt

SEQ ID NO: 340674 - DNA, 25 bp, Artificial
  Probe
gtaggagcatgctcagtcgatgctg

SEQ ID NO: 340675 - DNA, 25 bp, Artificial
  Probe
ttctgaaaatggtcccgcagaaggt

SEQ ID NO: 340676 - DNA, 25 bp, Artificial
  Probe
ccctcagagtcacctagagcctaga

SEQ ID NO: 340677 - DNA, 25 bp, Artificial
  Probe
tagagcctagaaccttctaccaggt

SEQ ID NO: 340678 - DNA, 25 bp, Artificial
  Probe
gaaccttctaccaggtctaatattg

SEQ ID NO: 340679 - DNA, 25 bp, Artificial
  Probe
gcctagaaccttctaccaggtctaa

SEQ ID NO: 340680 - DNA, 25 bp, Artificial
  Probe
gcaaatcgatagtcaacatgccaag

SEQ ID NO: 340681 - DNA, 25 bp, Artificial
  Probe
tgcctgagtaggagcatgctcagtc

SEQ ID NO: 340682 - DNA, 25 bp, Artificial
  Probe
gtgttacttctctgtttgtgactag

SEQ ID NO: 340683 - DNA, 25 bp, Artificial
  Probe
agagcctagaaccttctaccaggtc

SEQ ID NO: 340684 - DNA, 25 bp, Artificial
  Probe
aaatggtcccgcagaaggtgatgca

SEQ ID NO: 340685 - DNA, 25 bp, Artificial
  Probe
ggcgtttcaaactcgcacttgtatt

SEQ ID NO: 340686 - DNA, 25 bp, Artificial
  Probe
tcaacatgccaagagtgaaataata

SEQ ID NO: 340687 - DNA, 25 bp, Artificial
  Probe
gtgtgaggccccagaggtttctgaa

SEQ ID NO: 340688 - DNA, 25 bp, Artificial
  Probe
cctttctgtctctgcctgagtagga

SEQ ID NO: 340689 - DNA, 25 bp, Artificial
  Probe
gtttgtgactagtcggctcagagtt

SEQ ID NO: 340690 - DNA, 25 bp, Artificial
  Probe
gctgtgttacttctctgtttgtgac

SEQ ID NO: 340691 - DNA, 25 bp, Artificial
  Probe
aggtctaatattgactgcctctgcc

SEQ ID NO: 340692 - DNA, 25 bp, Artificial
  Probe
ttactaaataggtgtgtgaggcccc

SEQ ID NO: 340693 - DNA, 25 bp, Artificial
  Probe
ctgtcgcatgagaacattaacaagg

SEQ ID NO: 340694 - DNA, 25 bp, Artificial
  Probe
tactaaataggtgtgtgaggcccca

SEQ ID NO: 340695 - DNA, 25 bp, Artificial
  Probe
aatcccatgagcacctgcggtctct

SEQ ID NO: 340696 - DNA, 25 bp, Artificial
  Probe
ctcctaaagagcaggagtaatgtaa

SEQ ID NO: 340697 - DNA, 25 bp, Artificial
  Probe
aggggcgtcatcaattccctgacgc

SEQ ID NO: 340698 - DNA, 25 bp, Artificial
  Probe
cgtcccagtggctgacaggcaacca

SEQ ID NO: 340699 - DNA, 25 bp, Artificial
  Probe
ataaggggcgtcatcaattccctga

SEQ ID NO: 340700 - DNA, 25 bp, Artificial
  Probe
gttgatgaagtcaacctcttatttg

SEQ ID NO: 340701 - DNA, 25 bp, Artificial
  Probe
ctcctagttgatgaagtcaacctct

SEQ ID NO: 340702 - DNA, 25 bp, Artificial
  Probe
acacggctgatggtcatggcggaat

SEQ ID NO: 340703 - DNA, 25 bp, Artificial
  Probe
ggtcagactcactggggtcttcctt

SEQ ID NO: 340704 - DNA, 25 bp, Artificial
  Probe
atcaattccctgacgctcctagttg

SEQ ID NO: 340705 - DNA, 25 bp, Artificial
  Probe
ggtctctcctaaggaaactcatcct

SEQ ID NO: 340706 - DNA, 25 bp, Artificial
  Probe
tcccgatcagccagttgtccattct

SEQ ID NO: 340707 - DNA, 25 bp, Artificial
  Probe
gatcagccagttgtccattctctac

SEQ ID NO: 340708 - DNA, 25 bp, Artificial
  Probe
gggttccaccacactgtatccattt

SEQ ID NO: 340709 - DNA, 25 bp, Artificial
  Probe
ctaatcccgatcagccagttgtcca

SEQ ID NO: 340710 - DNA, 25 bp, Artificial
  Probe
ttctcagacctgaccctaaggtcag

SEQ ID NO: 340711 - DNA, 25 bp, Artificial
  Probe
tggctgacaggcaaccaactcctaa

SEQ ID NO: 340712 - DNA, 25 bp, Artificial
  Probe
gaagtcaacctcttatttgtctgaa

SEQ ID NO: 340713 - DNA, 25 bp, Artificial
  Probe
atgtaatgtggaaggcccagccgac

SEQ ID NO: 340714 - DNA, 25 bp, Artificial
  Probe
ttacgacatccctagaagtcatggg

SEQ ID NO: 340715 - DNA, 25 bp, Artificial
  Probe
ttcagtgagagaatcccatgagcac

SEQ ID NO: 340716 - DNA, 25 bp, Artificial
  Probe
agcctctagcctcagttaaatcaag

SEQ ID NO: 340717 - DNA, 25 bp, Artificial
  Probe
gtctgaactcctttctcctgagctt

SEQ ID NO: 340718 - DNA, 25 bp, Artificial
  Probe
gggcgtcatcaattccctgacgctc

SEQ ID NO: 340719 - DNA, 25 bp, Artificial
  Probe
catcctttcataaggggcgtcatca

SEQ ID NO: 340720 - DNA, 25 bp, Artificial
  Probe
aaggcccagccgacttggagttctc

SEQ ID NO: 340721 - DNA, 25 bp, Artificial
  Probe
catgctctaagtacccagcctctag

SEQ ID NO: 340722 - DNA, 25 bp, Artificial
  Probe
catctaatcccgatcagccagttgt

SEQ ID NO: 340723 - DNA, 25 bp, Artificial
  Probe
tcataaggggcgtcatcaattccct

SEQ ID NO: 340724 - DNA, 25 bp, Artificial
  Probe
aagtacccagcctctagcctcagtt

SEQ ID NO: 340725 - DNA, 25 bp, Artificial
  Probe
tttgtctgaactcctttctcctgag

SEQ ID NO: 340726 - DNA, 25 bp, Artificial
  Probe
attccctgacgctcctagttgatga

SEQ ID NO: 340727 - DNA, 25 bp, Artificial
  Probe
cctcattcagtgagagaatcccatg

SEQ ID NO: 340728 - DNA, 25 bp, Artificial
  Probe
ccagtggctgacaggcaaccaactc

SEQ ID NO: 340729 - DNA, 25 bp, Artificial
  Probe
acctcgatggttgttctgccctcct

SEQ ID NO: 340730 - DNA, 25 bp, Artificial
  Probe
cagacctgaccctaaggtcagactc

SEQ ID NO: 340731 - DNA, 25 bp, Artificial
  Probe
tggaggagaacctcattcagtgaga

SEQ ID NO: 340732 - DNA, 25 bp, Artificial
  Probe
agccagttgtccattctctacctcg

SEQ ID NO: 340733 - DNA, 25 bp, Artificial
  Probe
agctatcgtggaggagaacctcatt

SEQ ID NO: 340734 - DNA, 25 bp, Artificial
  Probe
taaggaaactcatcctttcataagg

SEQ ID NO: 340735 - DNA, 25 bp, Artificial
  Probe
aggaccctcatctaatcccgatcag

SEQ ID NO: 340736 - DNA, 25 bp, Artificial
  Probe
tgagagaatcccatgagcacctgcg

SEQ ID NO: 340737 - DNA, 25 bp, Artificial
  Probe
tcagttaaatcaagtcgagggctgg

SEQ ID NO: 340738 - DNA, 25 bp, Artificial
  Probe
gagcacctgcggtctctcctaagga

SEQ ID NO: 340739 - DNA, 25 bp, Artificial
  Probe
gactcactggggtcttcctttcgtc

SEQ ID NO: 340740 - DNA, 25 bp, Artificial
  Probe
gtgcaccattttaaggaccctcatc

SEQ ID NO: 340741 - DNA, 25 bp, Artificial
  Probe
gataactccaacctcggaggaaaga

SEQ ID NO: 340742 - DNA, 25 bp, Artificial
  Probe
ccagctccgccagagaagagtcacg

SEQ ID NO: 340743 - DNA, 25 bp, Artificial
  Probe
catcgagtggctgaagaagcacaac

SEQ ID NO: 340744 - DNA, 25 bp, Artificial
  Probe
gcaaaagcaagcttttcccagctcc

SEQ ID NO: 340745 - DNA, 25 bp, Artificial
  Probe
acctgagcacatcgttggatgtttg

SEQ ID NO: 340746 - DNA, 25 bp, Artificial
  Probe
aacagaagcctacttggaagccatt

SEQ ID NO: 340747 - DNA, 25 bp, Artificial
  Probe
ttgtaaagagcctcggtttttctat

SEQ ID NO: 340748 - DNA, 25 bp, Artificial
  Probe
tgaatctcggcctaatcactgaaag

SEQ ID NO: 340749 - DNA, 25 bp, Artificial
  Probe
gccgccaagatggagaaggaatacg

SEQ ID NO: 340750 - DNA, 25 bp, Artificial
  Probe
ctgcagaccaagaacaagctagaaa

SEQ ID NO: 340751 - DNA, 25 bp, Artificial
  Probe
aataccactgacagcaaaagcaagc

SEQ ID NO: 340752 - DNA, 25 bp, Artificial
  Probe
ttggatgaaaccattgctctgcaga

SEQ ID NO: 340753 - DNA, 25 bp, Artificial
  Probe
acgcatctacagcagcctgtgaaaa

SEQ ID NO: 340754 - DNA, 25 bp, Artificial
  Probe
ggcacatactctagaagatgaagta

SEQ ID NO: 340755 - DNA, 25 bp, Artificial
  Probe
gagaaagtgactccagtggcagcaa

SEQ ID NO: 340756 - DNA, 25 bp, Artificial
  Probe
caggaccgagaatcaggatgggaaa

SEQ ID NO: 340757 - DNA, 25 bp, Artificial
  Probe
ccgccagagaagagtcacgaagaaa

SEQ ID NO: 340758 - DNA, 25 bp, Artificial
  Probe
agcctacttggaagccattagaaaa

SEQ ID NO: 340759 - DNA, 25 bp, Artificial
  Probe
aatacggaagcctcaaagactccac

SEQ ID NO: 340760 - DNA, 25 bp, Artificial
  Probe
actaaccgtgaaaatgatgacacag

SEQ ID NO: 340761 - DNA, 25 bp, Artificial
  Probe
aatacggtacaatatctccagagga

SEQ ID NO: 340762 - DNA, 25 bp, Artificial
  Probe
gcctcaaagactccacaaaagacga

SEQ ID NO: 340763 - DNA, 25 bp, Artificial
  Probe
tcggtttttctatgtagaatcctta

SEQ ID NO: 340764 - DNA, 25 bp, Artificial
  Probe
aagagcctcggtttttctatgtaga

SEQ ID NO: 340765 - DNA, 25 bp, Artificial
  Probe
tcactgaaagccaggcacatactct

SEQ ID NO: 340766 - DNA, 25 bp, Artificial
  Probe
ccctgtttcggcatgctagacacct

SEQ ID NO: 340767 - DNA, 25 bp, Artificial
  Probe
gcagcctgtgaaaacggcaggcaac

SEQ ID NO: 340768 - DNA, 25 bp, Artificial
  Probe
aactgctgaatctcggcctaatcac

SEQ ID NO: 340769 - DNA, 25 bp, Artificial
  Probe
tgaccttgtccaacggcttggaaag

SEQ ID NO: 340770 - DNA, 25 bp, Artificial
  Probe
gtttcttaccttgaaaacttggatg

SEQ ID NO: 340771 - DNA, 25 bp, Artificial
  Probe
gaaacagacagtaccaaggaggaag

SEQ ID NO: 340772 - DNA, 25 bp, Artificial
  Probe
gaagccgccaagatggagaaggaat

SEQ ID NO: 340773 - DNA, 25 bp, Artificial
  Probe
gaaaccctgatcaccatcatgaaga

SEQ ID NO: 340774 - DNA, 25 bp, Artificial
  Probe
catcatgaagacgttgattgacttt

SEQ ID NO: 340775 - DNA, 25 bp, Artificial
  Probe
tccaacggcttggaaaggagaacga

SEQ ID NO: 340776 - DNA, 25 bp, Artificial
  Probe
taccaaggaggaagccgccaagatg

SEQ ID NO: 340777 - DNA, 25 bp, Artificial
  Probe
atttgatgctgtttccagtagttct

SEQ ID NO: 340778 - DNA, 25 bp, Artificial
  Probe
atgaaaccattgctctgcagaccaa

SEQ ID NO: 340779 - DNA, 25 bp, Artificial
  Probe
aacctcggaggaaagacagatgaag

SEQ ID NO: 340780 - DNA, 25 bp, Artificial
  Probe
aagacgataactccaacctcggagg

SEQ ID NO: 340781 - DNA, 25 bp, Artificial
  Probe
accttgaaaacttggatgaaaccat

SEQ ID NO: 340782 - DNA, 25 bp, Artificial
  Probe
acagcaaaagcaagcttttcccagc

SEQ ID NO: 340783 - DNA, 25 bp, Artificial
  Probe
aatgatgacacagtatcgaacacct

SEQ ID NO: 340784 - DNA, 25 bp, Artificial
  Probe
atctccagaggaaggcgtttcttac

SEQ ID NO: 340785 - DNA, 25 bp, Artificial
  Probe
ttgtccaacggcttggaaaggagaa

SEQ ID NO: 340786 - DNA, 25 bp, Artificial
  Probe
gaaagaaaccctgatcaccatcatg

SEQ ID NO: 340787 - DNA, 25 bp, Artificial
  Probe
gtgctcttcgaggtcactcccactt

SEQ ID NO: 340788 - DNA, 25 bp, Artificial
  Probe
tgggttacacagatcgccaccactc

SEQ ID NO: 340789 - DNA, 25 bp, Artificial
  Probe
gctaactgcaagctaaagaccaacc

SEQ ID NO: 340790 - DNA, 25 bp, Artificial
  Probe
tcccactttgttagcgatgttgtca

SEQ ID NO: 340791 - DNA, 25 bp, Artificial
  Probe
ctgacaaccggcagattgtctctgg

SEQ ID NO: 340792 - DNA, 25 bp, Artificial
  Probe
acaacgtgctcttcgaggtcactcc

SEQ ID NO: 340793 - DNA, 25 bp, Artificial
  Probe
accatcatcatgtggaagctgacca

SEQ ID NO: 340794 - DNA, 25 bp, Artificial
  Probe
gacatgatcctgtcggcgtctcgag

SEQ ID NO: 340795 - DNA, 25 bp, Artificial
  Probe
actttgttagcgatgttgtcatctc

SEQ ID NO: 340796 - DNA, 25 bp, Artificial
  Probe
aagggccataatggatgggttacac

SEQ ID NO: 340797 - DNA, 25 bp, Artificial
  Probe
tcactcccactttgttagcgatgtt

SEQ ID NO: 340798 - DNA, 25 bp, Artificial
  Probe
tctcctctgacaaccggcagattgt

SEQ ID NO: 340799 - DNA, 25 bp, Artificial
  Probe
aacgtgctcttcgaggtcactccca

SEQ ID NO: 340800 - DNA, 25 bp, Artificial
  Probe
gcataccacaacgtgctcttcgagg

SEQ ID NO: 340801 - DNA, 25 bp, Artificial
  Probe
cgcagttcccggacatgatcctgtc

SEQ ID NO: 340802 - DNA, 25 bp, Artificial
  Probe
gctgagcgtggctttctcctctgac

SEQ ID NO: 340803 - DNA, 25 bp, Artificial
  Probe
cttcgaggtcactcccactttgtta

SEQ ID NO: 340804 - DNA, 25 bp, Artificial
  Probe
gaggtcactcccactttgttagcga

SEQ ID NO: 340805 - DNA, 25 bp, Artificial
  Probe
ataatggatgggttacacagatcgc

SEQ ID NO: 340806 - DNA, 25 bp, Artificial
  Probe
accacaacgtgctcttcgaggtcac

SEQ ID NO: 340807 - DNA, 25 bp, Artificial
  Probe
gttatggaatactctgggtgtctgc

SEQ ID NO: 340808 - DNA, 25 bp, Artificial
  Probe
gttagcgatgttgtcatctcctctg

SEQ ID NO: 340809 - DNA, 25 bp, Artificial
  Probe
tcccggacatgatcctgtcggcgtc

SEQ ID NO: 340810 - DNA, 25 bp, Artificial
  Probe
cggcagattgtctctgggtcccgag

SEQ ID NO: 340811 - DNA, 25 bp, Artificial
  Probe
caaggatgtgctgagcgtggctttc

SEQ ID NO: 340812 - DNA, 25 bp, Artificial
  Probe
atcctgtcggcgtctcgagacaaga

SEQ ID NO: 340813 - DNA, 25 bp, Artificial
  Probe
tgcaagctaaagaccaaccacattg

SEQ ID NO: 340814 - DNA, 25 bp, Artificial
  Probe
gctcttcgaggtcactcccactttg

SEQ ID NO: 340815 - DNA, 25 bp, Artificial
  Probe
gcgatgttgtcatctcctctgatgg

SEQ ID NO: 340816 - DNA, 25 bp, Artificial
  Probe
atgtgctgagcgtggctttctcctc

SEQ ID NO: 340817 - DNA, 25 bp, Artificial
  Probe
acaaccggcagattgtctctgggtc

SEQ ID NO: 340818 - DNA, 25 bp, Artificial
  Probe
tacgcctctgggatctcacaacggg

SEQ ID NO: 340819 - DNA, 25 bp, Artificial
  Probe
ccggcagattgtctctgggtcccga

SEQ ID NO: 340820 - DNA, 25 bp, Artificial
  Probe
tcggcgtctcgagacaagaccatca

SEQ ID NO: 340821 - DNA, 25 bp, Artificial
  Probe
ggtcaaggtgtggaatctggctaac

SEQ ID NO: 340822 - DNA, 25 bp, Artificial
  Probe
atgggttacacagatcgccaccact

SEQ ID NO: 340823 - DNA, 25 bp, Artificial
  Probe
tgtcggcgtctcgagacaagaccat

SEQ ID NO: 340824 - DNA, 25 bp, Artificial
  Probe
gttcccggacatgatcctgtcggcg

SEQ ID NO: 340825 - DNA, 25 bp, Artificial
  Probe
ggacatgatcctgtcggcgtctcga

SEQ ID NO: 340826 - DNA, 25 bp, Artificial
  Probe
ttatggaatactctgggtgtctgca

SEQ ID NO: 340827 - DNA, 25 bp, Artificial
  Probe
gtggaatctggctaactgcaagcta

SEQ ID NO: 340828 - DNA, 25 bp, Artificial
  Probe
ggctttctcctctgacaaccggcag

SEQ ID NO: 340829 - DNA, 25 bp, Artificial
  Probe
gcgtggctttctcctctgacaaccg

SEQ ID NO: 340830 - DNA, 25 bp, Artificial
  Probe
aaggatgtgctgagcgtggctttct

SEQ ID NO: 340831 - DNA, 25 bp, Artificial
  Probe
ctcaagggccataatggatgggtta

SEQ ID NO: 340832 - DNA, 25 bp, Artificial
  Probe
cggcgtctcgagacaagaccatcat

SEQ ID NO: 340833 - DNA, 25 bp, Artificial
  Probe
gacctacgagtacattgacatcccc

SEQ ID NO: 340834 - DNA, 25 bp, Artificial
  Probe
gctgccaaatgattccaagaatact

SEQ ID NO: 340835 - DNA, 25 bp, Artificial
  Probe
cgagatgacgtgatggccattctcc

SEQ ID NO: 340836 - DNA, 25 bp, Artificial
  Probe
gggcagccatgtgtgaaaagatcat

SEQ ID NO: 340837 - DNA, 25 bp, Artificial
  Probe
aacagctgccaaatgattccaagaa

SEQ ID NO: 340838 - DNA, 25 bp, Artificial
  Probe
gtactttcccgaagcgatggtgggt

SEQ ID NO: 340839 - DNA, 25 bp, Artificial
  Probe
tctacgtcaccaacggttactcggg

SEQ ID NO: 340840 - DNA, 25 bp, Artificial
  Probe
gggcaccaaggtccactatgcctac

SEQ ID NO: 340841 - DNA, 25 bp, Artificial
  Probe
aactgcagcccaaggctccttggct

SEQ ID NO: 340842 - DNA, 25 bp, Artificial
  Probe
gcagcgccggcgaggccttcatcat

SEQ ID NO: 340843 - DNA, 25 bp, Artificial
  Probe
aaggaactccccaagggcagccatg

SEQ ID NO: 340844 - DNA, 25 bp, Artificial
  Probe
caaggcgatgactgttggcccctct

SEQ ID NO: 340845 - DNA, 25 bp, Artificial
  Probe
tccatgctggactacaaccctaaag

SEQ ID NO: 340846 - DNA, 25 bp, Artificial
  Probe
ctctacgtcaccaacggttactcgg

SEQ ID NO: 340847 - DNA, 25 bp, Artificial
  Probe
acagtcctgattttgagaaatcagc

SEQ ID NO: 340848 - DNA, 25 bp, Artificial
  Probe
ggaacaacggccatcagaccctcta

SEQ ID NO: 340849 - DNA, 25 bp, Artificial
  Probe
caatgaatgttgtcatgcgatgctg

SEQ ID NO: 340850 - DNA, 25 bp, Artificial
  Probe
caagaacaacccactgctaagattg

SEQ ID NO: 340851 - DNA, 25 bp, Artificial
  Probe
gggggcaccaaggtccactatgcct

SEQ ID NO: 340852 - DNA, 25 bp, Artificial
  Probe
gcgaggccttcatcatctgcggcac

SEQ ID NO: 340853 - DNA, 25 bp, Artificial
  Probe
caagttatctgaattgtgtaaccat

SEQ ID NO: 340854 - DNA, 25 bp, Artificial
  Probe
tgcgtaccctgtagctagatcgtga

SEQ ID NO: 340855 - DNA, 25 bp, Artificial
  Probe
ggacattttccataaaacagctgcc

SEQ ID NO: 340856 - DNA, 25 bp, Artificial
  Probe
tgggaaggacgcatcttgggaaact

SEQ ID NO: 340857 - DNA, 25 bp, Artificial
  Probe
agggcaactttgtactattcagtta

SEQ ID NO: 340858 - DNA, 25 bp, Artificial
  Probe
tctctggtccaataactcaaagaag

SEQ ID NO: 340859 - DNA, 25 bp, Artificial
  Probe
ccagtgaaattcttctcttgtcaag

SEQ ID NO: 340860 - DNA, 25 bp, Artificial
  Probe
gtctacgccacaaaccagaacgcag

SEQ ID NO: 340861 - DNA, 25 bp, Artificial
  Probe
cgcccttataggagacatagtcaag

SEQ ID NO: 340862 - DNA, 25 bp, Artificial
  Probe
gaatactataacagtcctgattttg

SEQ ID NO: 340863 - DNA, 25 bp, Artificial
  Probe
gaaatcagcgcaattttgacgccga

SEQ ID NO: 340864 - DNA, 25 bp, Artificial
  Probe
catcttgggaaacttcagtttccta

SEQ ID NO: 340865 - DNA, 25 bp, Artificial
  Probe
gaagccaagggtccaagtcctcacc

SEQ ID NO: 340866 - DNA, 25 bp, Artificial
  Probe
cccgaggacattttccataaaacag

SEQ ID NO: 340867 - DNA, 25 bp, Artificial
  Probe
agtcaagttcatgttgataataacc

SEQ ID NO: 340868 - DNA, 25 bp, Artificial
  Probe
gtgaggtgtccgtctgttatccccc

SEQ ID NO: 340869 - DNA, 25 bp, Artificial
  Probe
aaatcctccagacctggaacaccag

SEQ ID NO: 340870 - DNA, 25 bp, Artificial
  Probe
acgagaacgggctctgggccgtcta

SEQ ID NO: 340871 - DNA, 25 bp, Artificial
  Probe
tgttgtctcttagattaactgtgct

SEQ ID NO: 340872 - DNA, 25 bp, Artificial
  Probe
cacacgtatcgcagctgcctttttc

SEQ ID NO: 340873 - DNA, 25 bp, Artificial
  Probe
caacgcctcgacctacgagtacatt

SEQ ID NO: 340874 - DNA, 25 bp, Artificial
  Probe
tcatccgctccgatgagttgtagct

SEQ ID NO: 340875 - DNA, 25 bp, Artificial
  Probe
acacgtatcgcagctgcctttttct

SEQ ID NO: 340876 - DNA, 25 bp, Artificial
  Probe
tgtaaccatagatgggaaggacgca

SEQ ID NO: 340877 - DNA, 25 bp, Artificial
  Probe
agtgttcgcccttataggagacata

SEQ ID NO: 340878 - DNA, 25 bp, Artificial
  Probe
ctcatggtggacgagaacgggctct

SEQ ID NO: 340879 - DNA, 25 bp, Artificial
  Probe
cgtcatgctggatcaaaaggagttt

SEQ ID NO: 340880 - DNA, 25 bp, Artificial
  Probe
gagaacttggctgtctgtgggtcta

SEQ ID NO: 340881 - DNA, 25 bp, Artificial
  Probe
tgagttccatctggagaacttggct

SEQ ID NO: 340882 - DNA, 25 bp, Artificial
  Probe
tcatgctggatcaaaaggagtttgc

SEQ ID NO: 340883 - DNA, 25 bp, Artificial
  Probe
tttacggcaggcaccgagacaacca

SEQ ID NO: 340884 - DNA, 25 bp, Artificial
  Probe
tccaggacactttctggataaaaat

SEQ ID NO: 340885 - DNA, 25 bp, Artificial
  Probe
catccccaagggtactactgtactc

SEQ ID NO: 340886 - DNA, 25 bp, Artificial
  Probe
cgggactacattgactgttttctca

SEQ ID NO: 340887 - DNA, 25 bp, Artificial
  Probe
gaagacagactactttgttcccttc

SEQ ID NO: 340888 - DNA, 25 bp, Artificial
  Probe
agtttggcccggatggagctcttcc

SEQ ID NO: 340889 - DNA, 25 bp, Artificial
  Probe
atctggagaacttggctgtctgtgg

SEQ ID NO: 340890 - DNA, 25 bp, Artificial
  Probe
ctgaagtctgagttccatctggaga

SEQ ID NO: 340891 - DNA, 25 bp, Artificial
  Probe
aaagttcatgaggaacttgaccgtg

SEQ ID NO: 340892 - DNA, 25 bp, Artificial
  Probe
actgtactcccgatgctgtcttccg

SEQ ID NO: 340893 - DNA, 25 bp, Artificial
  Probe
tgcttcaagaagacagactactttg

SEQ ID NO: 340894 - DNA, 25 bp, Artificial
  Probe
ccttctcccttggaaagcgggcctg

SEQ ID NO: 340895 - DNA, 25 bp, Artificial
  Probe
accgtgtgattggacgccaccaacc

SEQ ID NO: 340896 - DNA, 25 bp, Artificial
  Probe
tctaacttgtttacggcaggcaccg

SEQ ID NO: 340897 - DNA, 25 bp, Artificial
  Probe
gatccaggacactttctggataaaa

SEQ ID NO: 340898 - DNA, 25 bp, Artificial
  Probe
gaacaccagaagtccctggatcctg

SEQ ID NO: 340899 - DNA, 25 bp, Artificial
  Probe
ctacattgactgttttctcagcaag

SEQ ID NO: 340900 - DNA, 25 bp, Artificial
  Probe
tctgccccatgctgtggtccaggac

SEQ ID NO: 340901 - DNA, 25 bp, Artificial
  Probe
caaagttcatgaggaacttgaccgt

SEQ ID NO: 340902 - DNA, 25 bp, Artificial
  Probe
ggaacttgaccgtgtgattggacgc

SEQ ID NO: 340903 - DNA, 25 bp, Artificial
  Probe
caagaagacagactactttgttccc

SEQ ID NO: 340904 - DNA, 25 bp, Artificial
  Probe
accagaagtccctggatcctgccaa

SEQ ID NO: 340905 - DNA, 25 bp, Artificial
  Probe
cgggctcctgctccttatgaagtat

SEQ ID NO: 340906 - DNA, 25 bp, Artificial
  Probe
attcgggctcctgctccttatgaag

SEQ ID NO: 340907 - DNA, 25 bp, Artificial
  Probe
gctgtctgtgggtctaacttgttta

SEQ ID NO: 340908 - DNA, 25 bp, Artificial
  Probe
tgctgtcttccgtcatgctggatca

SEQ ID NO: 340909 - DNA, 25 bp, Artificial
  Probe
acaagatgaagctgccttataccga

SEQ ID NO: 340910 - DNA, 25 bp, Artificial
  Probe
ggtccaggacacaaaattcagagac

SEQ ID NO: 340911 - DNA, 25 bp, Artificial
  Probe
cttgtttacggcaggcaccgagaca

SEQ ID NO: 340912 - DNA, 25 bp, Artificial
  Probe
cttggctgtctgtgggtctaacttg

SEQ ID NO: 340913 - DNA, 25 bp, Artificial
  Probe
aggacaacctgaagtctgagttcca

SEQ ID NO: 340914 - DNA, 25 bp, Artificial
  Probe
aagctgccttataccgatgctgtat

SEQ ID NO: 340915 - DNA, 25 bp, Artificial
  Probe
tctcccttggaaagcgggcctgtgt

SEQ ID NO: 340916 - DNA, 25 bp, Artificial
  Probe
gtactactgtactcccgatgctgtc

SEQ ID NO: 340917 - DNA, 25 bp, Artificial
  Probe
ctgttttctcagcaagattgaggag

SEQ ID NO: 340918 - DNA, 25 bp, Artificial
  Probe
gatgaagctgccttataccgatgct

SEQ ID NO: 340919 - DNA, 25 bp, Artificial
  Probe
ctgtgggtctaacttgtttacggca

SEQ ID NO: 340920 - DNA, 25 bp, Artificial
  Probe
agaaggacaacctgaagtctgagtt

SEQ ID NO: 340921 - DNA, 25 bp, Artificial
  Probe
tcccgatgctgtcttccgtcatgct

SEQ ID NO: 340922 - DNA, 25 bp, Artificial
  Probe
ccaagggtactactgtactcccgat

SEQ ID NO: 340923 - DNA, 25 bp, Artificial
  Probe
ccgatgctgtcttccgtcatgctgg

SEQ ID NO: 340924 - DNA, 25 bp, Artificial
  Probe
aacatcatgcatgaaaaccacatgg

SEQ ID NO: 340925 - DNA, 25 bp, Artificial
  Probe
gtctgcactgtcttggcggtatttg

SEQ ID NO: 340926 - DNA, 25 bp, Artificial
  Probe
tcatctgctttgtgccccatcacgt

SEQ ID NO: 340927 - DNA, 25 bp, Artificial
  Probe
ccatcaggctattaatgatgcccac

SEQ ID NO: 340928 - DNA, 25 bp, Artificial
  Probe
cagagttgggctaccagaccaactt

SEQ ID NO: 340929 - DNA, 25 bp, Artificial
  Probe
aaagttttacagcatgcgaagtagc

SEQ ID NO: 340930 - DNA, 25 bp, Artificial
  Probe
tgtcttggcggtatttgtcatctgc

SEQ ID NO: 340931 - DNA, 25 bp, Artificial
  Probe
cttccatcaggctattaatgatgcc

SEQ ID NO: 340932 - DNA, 25 bp, Artificial
  Probe
gactcttaagtgaggagttacttac

SEQ ID NO: 340933 - DNA, 25 bp, Artificial
  Probe
agcatgcgaagtagccggaagtgct

SEQ ID NO: 340934 - DNA, 25 bp, Artificial
  Probe
aggagttacttactacagagagcca

SEQ ID NO: 340935 - DNA, 25 bp, Artificial
  Probe
ggctaccagaccaacttccatcagg

SEQ ID NO: 340936 - DNA, 25 bp, Artificial
  Probe
cttattaaagccaggtccagagcct

SEQ ID NO: 340937 - DNA, 25 bp, Artificial
  Probe
caccgatggcgcagaaagctaagag

SEQ ID NO: 340938 - DNA, 25 bp, Artificial
  Probe
ggcctgtgcggcagcagcgcaaacc

SEQ ID NO: 340939 - DNA, 25 bp, Artificial
  Probe
agactcctgtcctgccattgaaaaa

SEQ ID NO: 340940 - DNA, 25 bp, Artificial
  Probe
cagctaccctggaccctagcagagt

SEQ ID NO: 340941 - DNA, 25 bp, Artificial
  Probe
aaccagactcctgtcctgccattga

SEQ ID NO: 340942 - DNA, 25 bp, Artificial
  Probe
tcaccaagaagttccggaagcacct

SEQ ID NO: 340943 - DNA, 25 bp, Artificial
  Probe
ctcaccaagaagttccggaagcacc

SEQ ID NO: 340944 - DNA, 25 bp, Artificial
  Probe
aaagctaagaggttcctgcctgtgg

SEQ ID NO: 340945 - DNA, 25 bp, Artificial
  Probe
ggctattaatgatgcccaccaaatc

SEQ ID NO: 340946 - DNA, 25 bp, Artificial
  Probe
gtcttagatcctgttatctactgct

SEQ ID NO: 340947 - DNA, 25 bp, Artificial
  Probe
ctcctgagcaccaactgcgtcttag

SEQ ID NO: 340948 - DNA, 25 bp, Artificial
  Probe
cctggtggactcttaagtgaggagt

SEQ ID NO: 340949 - DNA, 25 bp, Artificial
  Probe
agagccttctcttttatggccccca

SEQ ID NO: 340950 - DNA, 25 bp, Artificial
  Probe
agcgcaaaccggaagtgaagcgccg

SEQ ID NO: 340951 - DNA, 25 bp, Artificial
  Probe
gctttctcaccaagaagttccggaa

SEQ ID NO: 340952 - DNA, 25 bp, Artificial
  Probe
acatggtcatcatccacacgctgct

SEQ ID NO: 340953 - DNA, 25 bp, Artificial
  Probe
caacttggaccctggtggactctta

SEQ ID NO: 340954 - DNA, 25 bp, Artificial
  Probe
agaagttccggaagcacctcagcga

SEQ ID NO: 340955 - DNA, 25 bp, Artificial
  Probe
gagccactagcgacacgtgcaccga

SEQ ID NO: 340956 - DNA, 25 bp, Artificial
  Probe
ctaagaggttcctgcctgtggccaa

SEQ ID NO: 340957 - DNA, 25 bp, Artificial
  Probe
ccctagcagagttgggctaccagac

SEQ ID NO: 340958 - DNA, 25 bp, Artificial
  Probe
ccgatggcgcagaaagctaagaggt

SEQ ID NO: 340959 - DNA, 25 bp, Artificial
  Probe
actgctttctcaccaagaagttccg

SEQ ID NO: 340960 - DNA, 25 bp, Artificial
  Probe
tgatgccagccaaccagactcctgt

SEQ ID NO: 340961 - DNA, 25 bp, Artificial
  Probe
gaagtgctcccgagccactagcgac

SEQ ID NO: 340962 - DNA, 25 bp, Artificial
  Probe
gctttgtgccccatcacgtggtcca

SEQ ID NO: 340963 - DNA, 25 bp, Artificial
  Probe
gcgctgtggatggtctgcactgtct

SEQ ID NO: 340964 - DNA, 25 bp, Artificial
  Probe
ggtgatgatgccagccaaccagact

SEQ ID NO: 340965 - DNA, 25 bp, Artificial
  Probe
ttaatcaatgcttattaaagccagg

SEQ ID NO: 340966 - DNA, 25 bp, Artificial
  Probe
caccgaggtgatgatgccagccaac

SEQ ID NO: 340967 - DNA, 25 bp, Artificial
  Probe
acctcagcgaaaagttttacagcat

SEQ ID NO: 340968 - DNA, 25 bp, Artificial
  Probe
cgaagtagccggaagtgctcccgag

SEQ ID NO: 340969 - DNA, 25 bp, Artificial
  Probe
aatcaatgcttattaaagccaggtc

SEQ ID NO: 340970 - DNA, 25 bp, Artificial
  Probe
tgtgccccatcacgtggtccagcta

SEQ ID NO: 340971 - DNA, 25 bp, Artificial
  Probe
agtacccaaccatggccaaggtggc

SEQ ID NO: 340972 - DNA, 25 bp, Artificial
  Probe
tcctggagaaagtggctgggttccc

SEQ ID NO: 340973 - DNA, 25 bp, Artificial
  Probe
ggttcccctgcagacattcactcaa

SEQ ID NO: 340974 - DNA, 25 bp, Artificial
  Probe
cccactataaggagctcatctcagg

SEQ ID NO: 340975 - DNA, 25 bp, Artificial
  Probe
gtctgagtgctgtggatgtgcattc

SEQ ID NO: 340976 - DNA, 25 bp, Artificial
  Probe
aggccatggctttgcccagaaccag

SEQ ID NO: 340977 - DNA, 25 bp, Artificial
  Probe
tgcagacattcactcaacatcaagg

SEQ ID NO: 340978 - DNA, 25 bp, Artificial
  Probe
tataaggagctcatctcaggccatg

SEQ ID NO: 340979 - DNA, 25 bp, Artificial
  Probe
cccagaaccagctggttatttggaa

SEQ ID NO: 340980 - DNA, 25 bp, Artificial
  Probe
gctgtggatgtgcattcccaggtgt

SEQ ID NO: 340981 - DNA, 25 bp, Artificial
  Probe
attgtcaacgtgtggcctagtggtc

SEQ ID NO: 340982 - DNA, 25 bp, Artificial
  Probe
aaccatggccaaggtggcagagctc

SEQ ID NO: 340983 - DNA, 25 bp, Artificial
  Probe
ccagctggttatttggaagtaccca

SEQ ID NO: 340984 - DNA, 25 bp, Artificial
  Probe
ttcactcaacatcaaggtgctgtca

SEQ ID NO: 340985 - DNA, 25 bp, Artificial
  Probe
cagaaccagctggttatttggaagt

SEQ ID NO: 340986 - DNA, 25 bp, Artificial
  Probe
caacgtgtggcctagtggtcctgga

SEQ ID NO: 340987 - DNA, 25 bp, Artificial
  Probe
tgcccagaaccagctggttatttgg

SEQ ID NO: 340988 - DNA, 25 bp, Artificial
  Probe
ccatggccaaggtggcagagctcaa

SEQ ID NO: 340989 - DNA, 25 bp, Artificial
  Probe
ttggaagtacccaaccatggccaag

SEQ ID NO: 340990 - DNA, 25 bp, Artificial
  Probe
ccaaccatggccaaggtggcagagc

SEQ ID NO: 340991 - DNA, 25 bp, Artificial
  Probe
gagtctcaccatgagtccagacggg

SEQ ID NO: 340992 - DNA, 25 bp, Artificial
  Probe
atggctttgcccagaaccagctggt

SEQ ID NO: 340993 - DNA, 25 bp, Artificial
  Probe
ttatttggaagtacccaaccatggc

SEQ ID NO: 340994 - DNA, 25 bp, Artificial
  Probe
gggttcccctgcagacattcactca

SEQ ID NO: 340995 - DNA, 25 bp, Artificial
  Probe
ggctttgcccagaaccagctggtta

SEQ ID NO: 340996 - DNA, 25 bp, Artificial
  Probe
cactcaacatcaaggtgctgtcaag

SEQ ID NO: 340997 - DNA, 25 bp, Artificial
  Probe
aagtggctgggttcccctgcagaca

SEQ ID NO: 340998 - DNA, 25 bp, Artificial
  Probe
tcaggccatggctttgcccagaacc

SEQ ID NO: 340999 - DNA, 25 bp, Artificial
  Probe
gtggatgtgcattcccaggtgtgct

SEQ ID NO: 341000 - DNA, 25 bp, Artificial
  Probe
gaaccagctggttatttggaagtac

SEQ ID NO: 341001 - DNA, 25 bp, Artificial
  Probe
ctataaggagctcatctcaggccat

SEQ ID NO: 341002 - DNA, 25 bp, Artificial
  Probe
gacattcactcaacatcaaggtgct

SEQ ID NO: 341003 - DNA, 25 bp, Artificial
  Probe
gaggaggtaccagtgaccgacacat

SEQ ID NO: 341004 - DNA, 25 bp, Artificial
  Probe
ggagctcatctcaggccatggcttt

SEQ ID NO: 341005 - DNA, 25 bp, Artificial
  Probe
cctagtggtcctggagaaagtggct

SEQ ID NO: 341006 - DNA, 25 bp, Artificial
  Probe
gtctcaccatgagtccagacggggc

SEQ ID NO: 341007 - DNA, 25 bp, Artificial
  Probe
taaggagctcatctcaggccatggc

SEQ ID NO: 341008 - DNA, 25 bp, Artificial
  Probe
tcatctcaggccatggctttgccca

SEQ ID NO: 341009 - DNA, 25 bp, Artificial
  Probe
gaagtacccaaccatggccaaggtg

SEQ ID NO: 341010 - DNA, 25 bp, Artificial
  Probe
ctgggttcccctgcagacattcact

SEQ ID NO: 341011 - DNA, 25 bp, Artificial
  Probe
aaagtggctgggttcccctgcagac

SEQ ID NO: 341012 - DNA, 25 bp, Artificial
  Probe
agtgctgtggatgtgcattcccagg

SEQ ID NO: 341013 - DNA, 25 bp, Artificial
  Probe
ccccactataaggagctcatctcag

SEQ ID NO: 341014 - DNA, 25 bp, Artificial
  Probe
caccatgagtccagacggggccaca

SEQ ID NO: 341015 - DNA, 25 bp, Artificial
  Probe
tgctgtggatgtgcattcccaggtg

SEQ ID NO: 341016 - DNA, 25 bp, Artificial
  Probe
gaggtaccagtgaccgacacattcg

SEQ ID NO: 341017 - DNA, 25 bp, Artificial
  Probe
gcttcacggtgcagaccgaggccaa

SEQ ID NO: 341018 - DNA, 25 bp, Artificial
  Probe
cggtgcagaccgaggccaacaagta

SEQ ID NO: 341019 - DNA, 25 bp, Artificial
  Probe
ggtggcctttacagctgggacatgt

SEQ ID NO: 341020 - DNA, 25 bp, Artificial
  Probe
aaagcagtgctcaaaagaagatggc

SEQ ID NO: 341021 - DNA, 25 bp, Artificial
  Probe
gaaccatgaccatccacaacggcat

SEQ ID NO: 341022 - DNA, 25 bp, Artificial
  Probe
gtggcctttacagctgggacatgtc

SEQ ID NO: 341023 - DNA, 25 bp, Artificial
  Probe
atccaagaaagcagtgctcaaaaga

SEQ ID NO: 341024 - DNA, 25 bp, Artificial
  Probe
agtaccaagtgtcagtgaacaagta

SEQ ID NO: 341025 - DNA, 25 bp, Artificial
  Probe
acagggacaacgatggctgggtaac

SEQ ID NO: 341026 - DNA, 25 bp, Artificial
  Probe
accatgaccatccacaacggcatgt

SEQ ID NO: 341027 - DNA, 25 bp, Artificial
  Probe
aggcttcacggtgcagaccgaggcc

SEQ ID NO: 341028 - DNA, 25 bp, Artificial
  Probe
gacaacgatggctgggtaactacag

SEQ ID NO: 341029 - DNA, 25 bp, Artificial
  Probe
ttcacggtgcagaccgaggccaaca

SEQ ID NO: 341030 - DNA, 25 bp, Artificial
  Probe
acagatccaagaaagcagtgctcaa

SEQ ID NO: 341031 - DNA, 25 bp, Artificial
  Probe
accaagtgtcagtgaacaagtacaa

SEQ ID NO: 341032 - DNA, 25 bp, Artificial
  Probe
acaagtaccaagtgtcagtgaacaa

SEQ ID NO: 341033 - DNA, 25 bp, Artificial
  Probe
taactacagatccaagaaagcagtg

SEQ ID NO: 341034 - DNA, 25 bp, Artificial
  Probe
tatggaggcttcacggtgcagaccg

SEQ ID NO: 341035 - DNA, 25 bp, Artificial
  Probe
aactacagatccaagaaagcagtgc

SEQ ID NO: 341036 - DNA, 25 bp, Artificial
  Probe
gtacaaagggactgctggcaacgcc

SEQ ID NO: 341037 - DNA, 25 bp, Artificial
  Probe
ggcacactatggaggcttcacggtg

SEQ ID NO: 341038 - DNA, 25 bp, Artificial
  Probe
ggactgctggcaacgccctcatgga

SEQ ID NO: 341039 - DNA, 25 bp, Artificial
  Probe
tacaaagggactgctggcaacgccc

SEQ ID NO: 341040 - DNA, 25 bp, Artificial
  Probe
agaaccatgaccatccacaacggca

SEQ ID NO: 341041 - DNA, 25 bp, Artificial
  Probe
tttacagctgggacatgtccaagca

SEQ ID NO: 341042 - DNA, 25 bp, Artificial
  Probe
gagaacagaaccatgaccatccaca

SEQ ID NO: 341043 - DNA, 25 bp, Artificial
  Probe
taccaagtgtcagtgaacaagtaca

SEQ ID NO: 341044 - DNA, 25 bp, Artificial
  Probe
ctgggtaactacagatccaagaaag

SEQ ID NO: 341045 - DNA, 25 bp, Artificial
  Probe
caacggcatgttcttcagcacctac

SEQ ID NO: 341046 - DNA, 25 bp, Artificial
  Probe
gaggccaacaagtaccaagtgtcag

SEQ ID NO: 341047 - DNA, 25 bp, Artificial
  Probe
aggccaacaagtaccaagtgtcagt

SEQ ID NO: 341048 - DNA, 25 bp, Artificial
  Probe
ttacagctgggacatgtccaagcac

SEQ ID NO: 341049 - DNA, 25 bp, Artificial
  Probe
agatccaagaaagcagtgctcaaaa

SEQ ID NO: 341050 - DNA, 25 bp, Artificial
  Probe
aagtacaaagggactgctggcaacg

SEQ ID NO: 341051 - DNA, 25 bp, Artificial
  Probe
ggcctttacagctgggacatgtcca

SEQ ID NO: 341052 - DNA, 25 bp, Artificial
  Probe
acagaaccatgaccatccacaacgg

SEQ ID NO: 341053 - DNA, 25 bp, Artificial
  Probe
cagaccgaggccaacaagtaccaag

SEQ ID NO: 341054 - DNA, 25 bp, Artificial
  Probe
caacaagtaccaagtgtcagtgaac

SEQ ID NO: 341055 - DNA, 25 bp, Artificial
  Probe
cactatggaggcttcacggtgcaga

SEQ ID NO: 341056 - DNA, 25 bp, Artificial
  Probe
cagggacaacgatggctgggtaact

SEQ ID NO: 341057 - DNA, 25 bp, Artificial
  Probe
tgaccatccacaacggcatgttctt

SEQ ID NO: 341058 - DNA, 25 bp, Artificial
  Probe
caaagggactgctggcaacgccctc

SEQ ID NO: 341059 - DNA, 25 bp, Artificial
  Probe
acggcatgttcttcagcacctacga

SEQ ID NO: 341060 - DNA, 25 bp, Artificial
  Probe
cttcacggtgcagaccgaggccaac

SEQ ID NO: 341061 - DNA, 25 bp, Artificial
  Probe
tagtcccccaagcatagactttcag

SEQ ID NO: 341062 - DNA, 25 bp, Artificial
  Probe
ggcatgttcttcagcacctacgaca

SEQ ID NO: 341063 - DNA, 25 bp, Artificial
  Probe
ttccctggtggaccagacaagtggc

SEQ ID NO: 341064 - DNA, 25 bp, Artificial
  Probe
agctcgccggggttgactgactgcc

SEQ ID NO: 341065 - DNA, 25 bp, Artificial
  Probe
taaggagaaactgctctgcgttgtc

SEQ ID NO: 341066 - DNA, 25 bp, Artificial
  Probe
gaggacagcgctcgagtctatgaga

SEQ ID NO: 341067 - DNA, 25 bp, Artificial
  Probe
acctcctttcctcagctaaggagaa

SEQ ID NO: 341068 - DNA, 25 bp, Artificial
  Probe
ctgccttttgagaagcgaagtttgg

SEQ ID NO: 341069 - DNA, 25 bp, Artificial
  Probe
aactgctctgcgttgtcgacagtgc

SEQ ID NO: 341070 - DNA, 25 bp, Artificial
  Probe
agacaagtggcgatcagagtcccct

SEQ ID NO: 341071 - DNA, 25 bp, Artificial
  Probe
tttggaaccatttgaaagagcacgt

SEQ ID NO: 341072 - DNA, 25 bp, Artificial
  Probe
gcacgtgcctaattggcacctcctt

SEQ ID NO: 341073 - DNA, 25 bp, Artificial
  Probe
cgctcgagtctatgagaacgtgggc

SEQ ID NO: 341074 - DNA, 25 bp, Artificial
  Probe
ttccctaaaatgtcaagaatagacg

SEQ ID NO: 341075 - DNA, 25 bp, Artificial
  Probe
ggaccagacaagtggcgatcagagt

SEQ ID NO: 341076 - DNA, 25 bp, Artificial
  Probe
tctatgagaacgtgggcctcatgca

SEQ ID NO: 341077 - DNA, 25 bp, Artificial
  Probe
caaattctagtcacgggcaggattt

SEQ ID NO: 341078 - DNA, 25 bp, Artificial
  Probe
agtttcagatgagcttcgggtggca

SEQ ID NO: 341079 - DNA, 25 bp, Artificial
  Probe
ttatgaccttaacagacctgttaag

SEQ ID NO: 341080 - DNA, 25 bp, Artificial
  Probe
agtttggaaccatttgaaagagcac

SEQ ID NO: 341081 - DNA, 25 bp, Artificial
  Probe
cgagtctatgagaacgtgggcctca

SEQ ID NO: 341082 - DNA, 25 bp, Artificial
  Probe
tgcagcagcagaggagtttcagatg

SEQ ID NO: 341083 - DNA, 25 bp, Artificial
  Probe
accatttgaaagagcacgtgcctaa

SEQ ID NO: 341084 - DNA, 25 bp, Artificial
  Probe
tccctaaaatgtcaagaatagacga

SEQ ID NO: 341085 - DNA, 25 bp, Artificial
  Probe
gggttgactgactgccttttgagaa

SEQ ID NO: 341086 - DNA, 25 bp, Artificial
  Probe
cctcagctaaggagaaactgctctg

SEQ ID NO: 341087 - DNA, 25 bp, Artificial
  Probe
tttcagatgagcttcgggtggcagc

SEQ ID NO: 341088 - DNA, 25 bp, Artificial
  Probe
tggtggaccagacaagtggcgatca

SEQ ID NO: 341089 - DNA, 25 bp, Artificial
  Probe
cgacagtgctattgtcatggaattg

SEQ ID NO: 341090 - DNA, 25 bp, Artificial
  Probe
ccatttgaaagagcacgtgcctaat

SEQ ID NO: 341091 - DNA, 25 bp, Artificial
  Probe
cggggttgactgactgccttttgag

SEQ ID NO: 341092 - DNA, 25 bp, Artificial
  Probe
ccgtgttcagaagctcgccggggtt

SEQ ID NO: 341093 - DNA, 25 bp, Artificial
  Probe
agcagcagaggagtttcagatgagc

SEQ ID NO: 341094 - DNA, 25 bp, Artificial
  Probe
agaacgtgggcctcatgcagcagca

SEQ ID NO: 341095 - DNA, 25 bp, Artificial
  Probe
acgtgggcctcatgcagcagcagag

SEQ ID NO: 341096 - DNA, 25 bp, Artificial
  Probe
cgccggggttgactgactgcctttt

SEQ ID NO: 341097 - DNA, 25 bp, Artificial
  Probe
gggactcaaattctagtcacgggca

SEQ ID NO: 341098 - DNA, 25 bp, Artificial
  Probe
gaaagtttccaggacccgtgttcag

SEQ ID NO: 341099 - DNA, 25 bp, Artificial
  Probe
gagaaactgctctgcgttgtcgaca

SEQ ID NO: 341100 - DNA, 25 bp, Artificial
  Probe
aagcagctaaattgtgctctgtatt

SEQ ID NO: 341101 - DNA, 25 bp, Artificial
  Probe
gctaaattgtgctctgtattttcta

SEQ ID NO: 341102 - DNA, 25 bp, Artificial
  Probe
ttgaaagagcacgtgcctaattggc

SEQ ID NO: 341103 - DNA, 25 bp, Artificial
  Probe
cgtccagcactacatagagacgctg

SEQ ID NO: 341104 - DNA, 25 bp, Artificial
  Probe
ttccaggacccgtgttcagaagctc

SEQ ID NO: 341105 - DNA, 25 bp, Artificial
  Probe
ggcctcatgcagcagcagaggagtt

SEQ ID NO: 341106 - DNA, 25 bp, Artificial
  Probe
ctcgagtctatgagaacgtgggcct

SEQ ID NO: 341107 - DNA, 25 bp, Artificial
  Probe
cacgtgcctaattggcacctccttt

SEQ ID NO: 341108 - DNA, 25 bp, Artificial
  Probe
tgactgactgccttttgagaagcga

SEQ ID NO: 341109 - DNA, 25 bp, Artificial
  Probe
acatttattctccaccgccagtccc

SEQ ID NO: 341110 - DNA, 25 bp, Artificial
  Probe
gatccggactcctagagacacgcta

SEQ ID NO: 341111 - DNA, 25 bp, Artificial
  Probe
tccggactcctagagacacgctaga

SEQ ID NO: 341112 - DNA, 25 bp, Artificial
  Probe
ccctgccgccatcactgctgatccg

SEQ ID NO: 341113 - DNA, 25 bp, Artificial
  Probe
gctgatccggactcctagagacacg

SEQ ID NO: 341114 - DNA, 25 bp, Artificial
  Probe
gccatcactgctgatccggactcct

SEQ ID NO: 341115 - DNA, 25 bp, Artificial
  Probe
tgccgccatcactgctgatccggac

SEQ ID NO: 341116 - DNA, 25 bp, Artificial
  Probe
gacatttattctccaccgccagtcc

SEQ ID NO: 341117 - DNA, 25 bp, Artificial
  Probe
gccgccatcactgctgatccggact

SEQ ID NO: 341118 - DNA, 25 bp, Artificial
  Probe
ctgatccggactcctagagacacgc

SEQ ID NO: 341119 - DNA, 25 bp, Artificial
  Probe
atcactgctgatccggactcctaga

SEQ ID NO: 341120 - DNA, 25 bp, Artificial
  Probe
ctcgcatggacatttattctccacc

SEQ ID NO: 341121 - DNA, 25 bp, Artificial
  Probe
catggacatttattctccaccgcca

SEQ ID NO: 341122 - DNA, 25 bp, Artificial
  Probe
atggacatttattctccaccgccag

SEQ ID NO: 341123 - DNA, 25 bp, Artificial
  Probe
actgctgatccggactcctagagac

SEQ ID NO: 341124 - DNA, 25 bp, Artificial
  Probe
tgctgatccggactcctagagacac

SEQ ID NO: 341125 - DNA, 25 bp, Artificial
  Probe
cactgctgatccggactcctagaga

SEQ ID NO: 341126 - DNA, 25 bp, Artificial
  Probe
tgatccggactcctagagacacgct

SEQ ID NO: 341127 - DNA, 25 bp, Artificial
  Probe
gcatggacatttattctccaccgcc

SEQ ID NO: 341128 - DNA, 25 bp, Artificial
  Probe
ccgccatcactgctgatccggactc

SEQ ID NO: 341129 - DNA, 25 bp, Artificial
  Probe
cgccatcactgctgatccggactcc

SEQ ID NO: 341130 - DNA, 25 bp, Artificial
  Probe
catcactgctgatccggactcctag

SEQ ID NO: 341131 - DNA, 25 bp, Artificial
  Probe
ctgctgatccggactcctagagaca

SEQ ID NO: 341132 - DNA, 25 bp, Artificial
  Probe
acccctcgcatggacatttattctc

SEQ ID NO: 341133 - DNA, 25 bp, Artificial
  Probe
cctcgcatggacatttattctccac

SEQ ID NO: 341134 - DNA, 25 bp, Artificial
  Probe
ctgccgccatcactgctgatccgga

SEQ ID NO: 341135 - DNA, 25 bp, Artificial
  Probe
ggacatttattctccaccgccagtc

SEQ ID NO: 341136 - DNA, 25 bp, Artificial
  Probe
cctgccgccatcactgctgatccgg

SEQ ID NO: 341137 - DNA, 25 bp, Artificial
  Probe
cgcatggacatttattctccaccgc

SEQ ID NO: 341138 - DNA, 25 bp, Artificial
  Probe
cccctcgcatggacatttattctcc

SEQ ID NO: 341139 - DNA, 25 bp, Artificial
  Probe
ccctcgcatggacatttattctcca

SEQ ID NO: 341140 - DNA, 25 bp, Artificial
  Probe
tggacatttattctccaccgccagt

SEQ ID NO: 341141 - DNA, 25 bp, Artificial
  Probe
ccacccctcgcatggacatttattc

SEQ ID NO: 341142 - DNA, 25 bp, Artificial
  Probe
ccatcactgctgatccggactccta

SEQ ID NO: 341143 - DNA, 25 bp, Artificial
  Probe
cacccctcgcatggacatttattct

SEQ ID NO: 341144 - DNA, 25 bp, Artificial
  Probe
atccggactcctagagacacgctag

SEQ ID NO: 341145 - DNA, 25 bp, Artificial
  Probe
tcactgctgatccggactcctagag

SEQ ID NO: 341146 - DNA, 25 bp, Artificial
  Probe
aacttggggcattcttcgggatcct

SEQ ID NO: 341147 - DNA, 25 bp, Artificial
  Probe
gcctcgtcccagatgggcagctgca

SEQ ID NO: 341148 - DNA, 25 bp, Artificial
  Probe
gcattcttcgggatcctctttggag

SEQ ID NO: 341149 - DNA, 25 bp, Artificial
  Probe
ggtctttcacttctgcggctgctcc

SEQ ID NO: 341150 - DNA, 25 bp, Artificial
  Probe
gaacgctgtgagcatctaagcgtga

SEQ ID NO: 341151 - DNA, 25 bp, Artificial
  Probe
ttggggcattcttcgggatcctctt

SEQ ID NO: 341152 - DNA, 25 bp, Artificial
  Probe
tgcccctgctctagggagactggaa

SEQ ID NO: 341153 - DNA, 25 bp, Artificial
  Probe
gactggctttatattcaccaaaatg

SEQ ID NO: 341154 - DNA, 25 bp, Artificial
  Probe
aactgtgaggcctcgtcccagatgg

SEQ ID NO: 341155 - DNA, 25 bp, Artificial
  Probe
tggggcgaacgctgtgagcatctaa

SEQ ID NO: 341156 - DNA, 25 bp, Artificial
  Probe
gggcgaacgctgtgagcatctaagc

SEQ ID NO: 341157 - DNA, 25 bp, Artificial
  Probe
tactggccatcttagcatgtgtggt

SEQ ID NO: 341158 - DNA, 25 bp, Artificial
  Probe
cacttctgcggctgctccatgaaca

SEQ ID NO: 341159 - DNA, 25 bp, Artificial
  Probe
atctacacatcctggggcgaacgct

SEQ ID NO: 341160 - DNA, 25 bp, Artificial
  Probe
tggatgactggctttatattcacca

SEQ ID NO: 341161 - DNA, 25 bp, Artificial
  Probe
ctatacagcacatgggaaaggatat

SEQ ID NO: 341162 - DNA, 25 bp, Artificial
  Probe
tctgcggctgctccatgaacaagtt

SEQ ID NO: 341163 - DNA, 25 bp, Artificial
  Probe
gcgaacgctgtgagcatctaagcgt

SEQ ID NO: 341164 - DNA, 25 bp, Artificial
  Probe
tcgggatcctctttggagccctggg

SEQ ID NO: 341165 - DNA, 25 bp, Artificial
  Probe
cgctgtgagcatctaagcgtgaaac

SEQ ID NO: 341166 - DNA, 25 bp, Artificial
  Probe
gtgaaaccagactctaccattttag

SEQ ID NO: 341167 - DNA, 25 bp, Artificial
  Probe
cacaccagagttaatggatgactgg

SEQ ID NO: 341168 - DNA, 25 bp, Artificial
  Probe
ctaagcgtgaaacttggggcattct

SEQ ID NO: 341169 - DNA, 25 bp, Artificial
  Probe
aaggatattgcctatgtacacacac

SEQ ID NO: 341170 - DNA, 25 bp, Artificial
  Probe
cgggatcctctttggagccctgggt

SEQ ID NO: 341171 - DNA, 25 bp, Artificial
  Probe
catcctggggcgaacgctgtgagca

SEQ ID NO: 341172 - DNA, 25 bp, Artificial
  Probe
tgtgaggcctcgtcccagatgggca

SEQ ID NO: 341173 - DNA, 25 bp, Artificial
  Probe
tctgcccctgctctagggagactgg

SEQ ID NO: 341174 - DNA, 25 bp, Artificial
  Probe
atggatggattcctatacagcacat

SEQ ID NO: 341175 - DNA, 25 bp, Artificial
  Probe
gaaacttggggcattcttcgggatc

SEQ ID NO: 341176 - DNA, 25 bp, Artificial
  Probe
taccctctggactcagaactgtgag

SEQ ID NO: 341177 - DNA, 25 bp, Artificial
  Probe
gagtgaaaccagactctaccatttt

SEQ ID NO: 341178 - DNA, 25 bp, Artificial
  Probe
ggatattgcctatgtacacacacac

SEQ ID NO: 341179 - DNA, 25 bp, Artificial
  Probe
aggcctcgtcccagatgggcagctg

SEQ ID NO: 341180 - DNA, 25 bp, Artificial
  Probe
ctcagaactgtgaggcctcgtccca

SEQ ID NO: 341181 - DNA, 25 bp, Artificial
  Probe
acacacacaccagagttaatggatg

SEQ ID NO: 341182 - DNA, 25 bp, Artificial
  Probe
acacacacacaccagagttaatgga

SEQ ID NO: 341183 - DNA, 25 bp, Artificial
  Probe
gtctttcacttctgcggctgctcca

SEQ ID NO: 341184 - DNA, 25 bp, Artificial
  Probe
ctgcccctgctctagggagactgga

SEQ ID NO: 341185 - DNA, 25 bp, Artificial
  Probe
aagcgtgaaacttggggcattcttc

SEQ ID NO: 341186 - DNA, 25 bp, Artificial
  Probe
gcggctgctccatgaacaagttctc

SEQ ID NO: 341187 - DNA, 25 bp, Artificial
  Probe
atcctggggcgaacgctgtgagcat

SEQ ID NO: 341188 - DNA, 25 bp, Artificial
  Probe
agcatctaagcgtgaaacttggggc

SEQ ID NO: 341189 - DNA, 25 bp, Artificial
  Probe
gtgtggtctttcacttctgcggctg

SEQ ID NO: 341190 - DNA, 25 bp, Artificial
  Probe
cttcagcatctacacatcctggggc

SEQ ID NO: 341191 - DNA, 25 bp, Artificial
  Probe
atctaagcgtgaaacttggggcatt

SEQ ID NO: 341192 - DNA, 25 bp, Artificial
  Probe
ccagtatggaactgggcagtttgaa

SEQ ID NO: 341193 - DNA, 25 bp, Artificial
  Probe
gcagggcagccacagatcccaaact

SEQ ID NO: 341194 - DNA, 25 bp, Artificial
  Probe
aatggaatactgtctttcaaccgtc

SEQ ID NO: 341195 - DNA, 25 bp, Artificial
  Probe
ggaccagtatggaactgggcagttt

SEQ ID NO: 341196 - DNA, 25 bp, Artificial
  Probe
ctttgctatgactatgagatacgag

SEQ ID NO: 341197 - DNA, 25 bp, Artificial
  Probe
cacagatcccaaactcgactggaca

SEQ ID NO: 341198 - DNA, 25 bp, Artificial
  Probe
ggggctcatttgcaataatgaggac

SEQ ID NO: 341199 - DNA, 25 bp, Artificial
  Probe
gtaatgtctcagaggggctcatttg

SEQ ID NO: 341200 - DNA, 25 bp, Artificial
  Probe
agggcagccacagatcccaaactcg

SEQ ID NO: 341201 - DNA, 25 bp, Artificial
  Probe
tgcagggcagccacagatcccaaac

SEQ ID NO: 341202 - DNA, 25 bp, Artificial
  Probe
gcagtttgaactttgctatgactat

SEQ ID NO: 341203 - DNA, 25 bp, Artificial
  Probe
gtgctcctgagaacattgagtgcag

SEQ ID NO: 341204 - DNA, 25 bp, Artificial
  Probe
gccacagatcccaaactcgactgga

SEQ ID NO: 341205 - DNA, 25 bp, Artificial
  Probe
tcgactggacagagctgggtcagaa

SEQ ID NO: 341206 - DNA, 25 bp, Artificial
  Probe
tgagaacattgagtgcagggcagcc

SEQ ID NO: 341207 - DNA, 25 bp, Artificial
  Probe
caatggaatactgtctttcaaccgt

SEQ ID NO: 341208 - DNA, 25 bp, Artificial
  Probe
tacagtgtaatgtctcagaggggct

SEQ ID NO: 341209 - DNA, 25 bp, Artificial
  Probe
agaactttgagcatgtctgtagtgc

SEQ ID NO: 341210 - DNA, 25 bp, Artificial
  Probe
gaactgggcagtttgaactttgcta

SEQ ID NO: 341211 - DNA, 25 bp, Artificial
  Probe
cagaggggctcatttgcaataatga

SEQ ID NO: 341212 - DNA, 25 bp, Artificial
  Probe
acagagctgggtcagaaggtacagt

SEQ ID NO: 341213 - DNA, 25 bp, Artificial
  Probe
ctgtagtgctcctgagaacattgag

SEQ ID NO: 341214 - DNA, 25 bp, Artificial
  Probe
gctttccaatggaatactgtctttc

SEQ ID NO: 341215 - DNA, 25 bp, Artificial
  Probe
gctcatttgcaataatgaggaccag

SEQ ID NO: 341216 - DNA, 25 bp, Artificial
  Probe
cagtttgaactttgctatgactatg

SEQ ID NO: 341217 - DNA, 25 bp, Artificial
  Probe
aacattgagtgcagggcagccacag

SEQ ID NO: 341218 - DNA, 25 bp, Artificial
  Probe
agaacattgagtgcagggcagccac

SEQ ID NO: 341219 - DNA, 25 bp, Artificial
  Probe
tctcagaggggctcatttgcaataa

SEQ ID NO: 341220 - DNA, 25 bp, Artificial
  Probe
gtgtaatgtctcagaggggctcatt

SEQ ID NO: 341221 - DNA, 25 bp, Artificial
  Probe
gtacagtgtaatgtctcagaggggc

SEQ ID NO: 341222 - DNA, 25 bp, Artificial
  Probe
ctgagaacattgagtgcagggcagc

SEQ ID NO: 341223 - DNA, 25 bp, Artificial
  Probe
actgggcagtttgaactttgctatg

SEQ ID NO: 341224 - DNA, 25 bp, Artificial
  Probe
tggaactgggcagtttgaactttgc

SEQ ID NO: 341225 - DNA, 25 bp, Artificial
  Probe
aggaccagtatggaactgggcagtt

SEQ ID NO: 341226 - DNA, 25 bp, Artificial
  Probe
gaactttgctatgactatgagatac

SEQ ID NO: 341227 - DNA, 25 bp, Artificial
  Probe
gagatacgagtcaactgttgctttc

SEQ ID NO: 341228 - DNA, 25 bp, Artificial
  Probe
gggcagccacagatcccaaactcga

SEQ ID NO: 341229 - DNA, 25 bp, Artificial
  Probe
ctatgactatgagatacgagtcaac

SEQ ID NO: 341230 - DNA, 25 bp, Artificial
  Probe
gtctgtagtgctcctgagaacattg

SEQ ID NO: 341231 - DNA, 25 bp, Artificial
  Probe
tgtctgtagtgctcctgagaacatt

SEQ ID NO: 341232 - DNA, 25 bp, Artificial
  Probe
ctcctgagaacattgagtgcagggc

SEQ ID NO: 341233 - DNA, 25 bp, Artificial
  Probe
tgagtgcagggcagccacagatccc

SEQ ID NO: 341234 - DNA, 25 bp, Artificial
  Probe
catgtctgtagtgctcctgagaaca

SEQ ID NO: 341235 - DNA, 25 bp, Artificial
  Probe
atgagatacgagtcaactgttgctt

SEQ ID NO: 341236 - DNA, 25 bp, Artificial
  Probe
ctcatttgcaataatgaggaccagt

SEQ ID NO: 341237 - DNA, 25 bp, Artificial
  Probe
gtcaactgttgctttccaatggaat

SEQ ID NO: 341238 - DNA, 25 bp, Artificial
  Probe
aggcagagatccttgacatgagagc

SEQ ID NO: 341239 - DNA, 25 bp, Artificial
  Probe
ctaaacttggcaagtcatttctctg

SEQ ID NO: 341240 - DNA, 25 bp, Artificial
  Probe
attgatggttttttcagccaggacc

SEQ ID NO: 341241 - DNA, 25 bp, Artificial
  Probe
cttattggatttcctggggtcatat

SEQ ID NO: 341242 - DNA, 25 bp, Artificial
  Probe
catgccctgcctttgcctagacatt

SEQ ID NO: 341243 - DNA, 25 bp, Artificial
  Probe
atgtgttaaccctaccatgccctgc

SEQ ID NO: 341244 - DNA, 25 bp, Artificial
  Probe
gatggttttttcagccaggaccttg

SEQ ID NO: 341245 - DNA, 25 bp, Artificial
  Probe
atgattgactccagccctcttcagg

SEQ ID NO: 341246 - DNA, 25 bp, Artificial
  Probe
cccagttttctctaaacttggcaag

SEQ ID NO: 341247 - DNA, 25 bp, Artificial
  Probe
ttttagctcaccagctcaggggccc

SEQ ID NO: 341248 - DNA, 25 bp, Artificial
  Probe
ctgtctaagggcagatgtgttaacc

SEQ ID NO: 341249 - DNA, 25 bp, Artificial
  Probe
tcttcaggacccagccaagggtagt

SEQ ID NO: 341250 - DNA, 25 bp, Artificial
  Probe
actaagtacatacctggcaatctag

SEQ ID NO: 341251 - DNA, 25 bp, Artificial
  Probe
ctttagcttgaacgaggaacagtta

SEQ ID NO: 341252 - DNA, 25 bp, Artificial
  Probe
tcttagatgattgactccagccctc

SEQ ID NO: 341253 - DNA, 25 bp, Artificial
  Probe
gttttttcagccaggaccttgcagt

SEQ ID NO: 341254 - DNA, 25 bp, Artificial
  Probe
gtctggacccaaacgatgtccacac

SEQ ID NO: 341255 - DNA, 25 bp, Artificial
  Probe
gttttctctaaacttggcaagtcat

SEQ ID NO: 341256 - DNA, 25 bp, Artificial
  Probe
ccttgcagtgtaggtcttagatgat

SEQ ID NO: 341257 - DNA, 25 bp, Artificial
  Probe
gtcagatcttgctcctgaaactctt

SEQ ID NO: 341258 - DNA, 25 bp, Artificial
  Probe
atgtaagtcttcttattggatttcc

SEQ ID NO: 341259 - DNA, 25 bp, Artificial
  Probe
tggtctggacccaaacgatgtccac

SEQ ID NO: 341260 - DNA, 25 bp, Artificial
  Probe
ggcaagtcatttctctgtacctttc

SEQ ID NO: 341261 - DNA, 25 bp, Artificial
  Probe
gggtgcatctaggattgtcagatct

SEQ ID NO: 341262 - DNA, 25 bp, Artificial
  Probe
gcttcctgtctaagggcagatgtgt

SEQ ID NO: 341263 - DNA, 25 bp, Artificial
  Probe
cctttctggtctggacccaaacgat

SEQ ID NO: 341264 - DNA, 25 bp, Artificial
  Probe
aggacccagccaagggtagtgagtt

SEQ ID NO: 341265 - DNA, 25 bp, Artificial
  Probe
ttccacagggccttctgtgaatcca

SEQ ID NO: 341266 - DNA, 25 bp, Artificial
  Probe
ttgttttagctcaccagctcagggg

SEQ ID NO: 341267 - DNA, 25 bp, Artificial
  Probe
tagatgttccacagggccttctgtg

SEQ ID NO: 341268 - DNA, 25 bp, Artificial
  Probe
tcaggggcccctttctggtctggac

SEQ ID NO: 341269 - DNA, 25 bp, Artificial
  Probe
ccttgacatgagagcaaaggagtca

SEQ ID NO: 341270 - DNA, 25 bp, Artificial
  Probe
tggtggcttcctgtctaagggcaga

SEQ ID NO: 341271 - DNA, 25 bp, Artificial
  Probe
tttctggtctggacccaaacgatgt

SEQ ID NO: 341272 - DNA, 25 bp, Artificial
  Probe
tagtacagaccagtaagtaaagcaa

SEQ ID NO: 341273 - DNA, 25 bp, Artificial
  Probe
taagtacatacctggcaatctagta

SEQ ID NO: 341274 - DNA, 25 bp, Artificial
  Probe
tacatacctggcaatctagtacaga

SEQ ID NO: 341275 - DNA, 25 bp, Artificial
  Probe
tctgtacctttctttagcttgaacg

SEQ ID NO: 341276 - DNA, 25 bp, Artificial
  Probe
caggacccagccaagggtagtgagt

SEQ ID NO: 341277 - DNA, 25 bp, Artificial
  Probe
aacagttagatgttccacagggcct

SEQ ID NO: 341278 - DNA, 25 bp, Artificial
  Probe
atgccctgcctttgcctagacattg

SEQ ID NO: 341279 - DNA, 25 bp, Artificial
  Probe
ctcaggggcccctttctggtctgga

SEQ ID NO: 341280 - DNA, 25 bp, Artificial
  Probe
tgaatccacattcgttggtatttat

SEQ ID NO: 341281 - DNA, 25 bp, Artificial
  Probe
tgtctaagggcagatgtgttaaccc

SEQ ID NO: 341282 - DNA, 25 bp, Artificial
  Probe
ctcgaggcagagatccttgacatga

SEQ ID NO: 341283 - DNA, 25 bp, Artificial
  Probe
cctgcctttgcctagacattgcatc

SEQ ID NO: 341284 - DNA, 25 bp, Artificial
  Probe
ctgccctttggaaatggacccagga

SEQ ID NO: 341285 - DNA, 25 bp, Artificial
  Probe
ggaaatggacccaggaactgcattg

SEQ ID NO: 341286 - DNA, 25 bp, Artificial
  Probe
tttgatccgttgttcttgtcagtag

SEQ ID NO: 341287 - DNA, 25 bp, Artificial
  Probe
gttcttgtcagtagtactctttcca

SEQ ID NO: 341288 - DNA, 25 bp, Artificial
  Probe
tgccctttggaaatggacccaggaa

SEQ ID NO: 341289 - DNA, 25 bp, Artificial
  Probe
ccgttgttcttgtcagtagtactct

SEQ ID NO: 341290 - DNA, 25 bp, Artificial
  Probe
ccttatgtatatctgccctttggaa

SEQ ID NO: 341291 - DNA, 25 bp, Artificial
  Probe
aaggaaacacagatacctctgaaat

SEQ ID NO: 341292 - DNA, 25 bp, Artificial
  Probe
tgttcttgtcagtagtactctttcc

SEQ ID NO: 341293 - DNA, 25 bp, Artificial
  Probe
cgttgttcttgtcagtagtactctt

SEQ ID NO: 341294 - DNA, 25 bp, Artificial
  Probe
atccttatgtatatctgccctttgg

SEQ ID NO: 341295 - DNA, 25 bp, Artificial
  Probe
cctttggaaatggacccaggaactg

SEQ ID NO: 341296 - DNA, 25 bp, Artificial
  Probe
gaaactcgctctcactaaagttctg

SEQ ID NO: 341297 - DNA, 25 bp, Artificial
  Probe
gtatatctgccctttggaaatggac

SEQ ID NO: 341298 - DNA, 25 bp, Artificial
  Probe
cttatgtatatctgccctttggaaa

SEQ ID NO: 341299 - DNA, 25 bp, Artificial
  Probe
tttgctctcatgaatatgaaactcg

SEQ ID NO: 341300 - DNA, 25 bp, Artificial
  Probe
ctttggaaatggacccaggaactgc

SEQ ID NO: 341301 - DNA, 25 bp, Artificial
  Probe
catgaggtttgctctcatgaatatg

SEQ ID NO: 341302 - DNA, 25 bp, Artificial
  Probe
ggtttgctctcatgaatatgaaact

SEQ ID NO: 341303 - DNA, 25 bp, Artificial
  Probe
ttgctctcatgaatatgaaactcgc

SEQ ID NO: 341304 - DNA, 25 bp, Artificial
  Probe
tatctgccctttggaaatggaccca

SEQ ID NO: 341305 - DNA, 25 bp, Artificial
  Probe
tccgttgttcttgtcagtagtactc

SEQ ID NO: 341306 - DNA, 25 bp, Artificial
  Probe
tgctctcatgaatatgaaactcgct

SEQ ID NO: 341307 - DNA, 25 bp, Artificial
  Probe
ctcagattgtatccaattggtaata

SEQ ID NO: 341308 - DNA, 25 bp, Artificial
  Probe
tatatctgccctttggaaatggacc

SEQ ID NO: 341309 - DNA, 25 bp, Artificial
  Probe
aggtttgctctcatgaatatgaaac

SEQ ID NO: 341310 - DNA, 25 bp, Artificial
  Probe
atatctgccctttggaaatggaccc

SEQ ID NO: 341311 - DNA, 25 bp, Artificial
  Probe
tctgccctttggaaatggacccagg

SEQ ID NO: 341312 - DNA, 25 bp, Artificial
  Probe
ttgatccgttgttcttgtcagtagt

SEQ ID NO: 341313 - DNA, 25 bp, Artificial
  Probe
atctgccctttggaaatggacccag

SEQ ID NO: 341314 - DNA, 25 bp, Artificial
  Probe
atccgttgttcttgtcagtagtact

SEQ ID NO: 341315 - DNA, 25 bp, Artificial
  Probe
tgatccgttgttcttgtcagtagta

SEQ ID NO: 341316 - DNA, 25 bp, Artificial
  Probe
aggaaacacagatacctctgaaatt

SEQ ID NO: 341317 - DNA, 25 bp, Artificial
  Probe
tccttatgtatatctgccctttgga

SEQ ID NO: 341318 - DNA, 25 bp, Artificial
  Probe
gtttgctctcatgaatatgaaactc

SEQ ID NO: 341319 - DNA, 25 bp, Artificial
  Probe
gatccgttgttcttgtcagtagtac

SEQ ID NO: 341320 - DNA, 25 bp, Artificial
  Probe
taatgatgcagacaggcagagccgg

SEQ ID NO: 341321 - DNA, 25 bp, Artificial
  Probe
atggctcagttggtaaggcttttgc

SEQ ID NO: 341322 - DNA, 25 bp, Artificial
  Probe
ggctcagttggtaaggcttttgctg

SEQ ID NO: 341323 - DNA, 25 bp, Artificial
  Probe
aggcaggctttatcgagcaggtcgt

SEQ ID NO: 341324 - DNA, 25 bp, Artificial
  Probe
agctgcacaccactctattaggtag

SEQ ID NO: 341325 - DNA, 25 bp, Artificial
  Probe
ttggtaaggcttttgctgtacaagc

SEQ ID NO: 341326 - DNA, 25 bp, Artificial
  Probe
ctctcccaagtagcatgacaaagta

SEQ ID NO: 341327 - DNA, 25 bp, Artificial
  Probe
ctctattaggtagtttattggcgca

SEQ ID NO: 341328 - DNA, 25 bp, Artificial
  Probe
aatttgaggtgcttgctgtctggac

SEQ ID NO: 341329 - DNA, 25 bp, Artificial
  Probe
gccaaaaggctatgtacgtgctctg

SEQ ID NO: 341330 - DNA, 25 bp, Artificial
  Probe
tttgtccagagaggaaatttaacct

SEQ ID NO: 341331 - DNA, 25 bp, Artificial
  Probe
gtttattggcgcatcaaatctggag

SEQ ID NO: 341332 - DNA, 25 bp, Artificial
  Probe
ctggccaccggttatgactacctca

SEQ ID NO: 341333 - DNA, 25 bp, Artificial
  Probe
atgccagggatgtgactggtgacct

SEQ ID NO: 341334 - DNA, 25 bp, Artificial
  Probe
ccctgaatggcatgatgccagggat

SEQ ID NO: 341335 - DNA, 25 bp, Artificial
  Probe
cccccaagaacagactctctggagg

SEQ ID NO: 341336 - DNA, 25 bp, Artificial
  Probe
aaatcccaggaacacgctctgaacc

SEQ ID NO: 341337 - DNA, 25 bp, Artificial
  Probe
agggcaaacggatgtcattgtccaa

SEQ ID NO: 341338 - DNA, 25 bp, Artificial
  Probe
agtaatggtgtcacctgctcctctt

SEQ ID NO: 341339 - DNA, 25 bp, Artificial
  Probe
cacataaaagccaggctcaggagtg

SEQ ID NO: 341340 - DNA, 25 bp, Artificial
  Probe
cacggaacatcgagccaaatcccag

SEQ ID NO: 341341 - DNA, 25 bp, Artificial
  Probe
aatcagttcagagagaggatcaaac

SEQ ID NO: 341342 - DNA, 25 bp, Artificial
  Probe
gcatcaaatctggagtctacctccc

SEQ ID NO: 341343 - DNA, 25 bp, Artificial
  Probe
ataatgatgcagacaggcagagccg

SEQ ID NO: 341344 - DNA, 25 bp, Artificial
  Probe
ctctctggaggcaggctttatcgag

SEQ ID NO: 341345 - DNA, 25 bp, Artificial
  Probe
ctgtacaagcatgagaggagctcag

SEQ ID NO: 341346 - DNA, 25 bp, Artificial
  Probe
caggaacacgctctgaaccccagga

SEQ ID NO: 341347 - DNA, 25 bp, Artificial
  Probe
caactggggagcacaaaggctactt

SEQ ID NO: 341348 - DNA, 25 bp, Artificial
  Probe
tgtacgtgctctggaacatgcaggc

SEQ ID NO: 341349 - DNA, 25 bp, Artificial
  Probe
tcaaacttgcccaagattaaagagt

SEQ ID NO: 341350 - DNA, 25 bp, Artificial
  Probe
ggcactcagggcaaacggatgtcat

SEQ ID NO: 341351 - DNA, 25 bp, Artificial
  Probe
cgtgactttgtccagagaggaaatt

SEQ ID NO: 341352 - DNA, 25 bp, Artificial
  Probe
agaggagctcagaccctagcaccca

SEQ ID NO: 341353 - DNA, 25 bp, Artificial
  Probe
gctcctcttccctgaatggcatgat

SEQ ID NO: 341354 - DNA, 25 bp, Artificial
  Probe
tcccaagtagcatgacaaagtataa

SEQ ID NO: 341355 - DNA, 25 bp, Artificial
  Probe
ctagcacccacataaaagccaggct

SEQ ID NO: 341356 - DNA, 25 bp, Artificial
  Probe
caagaccaaggtgtagggaatgctt

SEQ ID NO: 341357 - DNA, 25 bp, Artificial
  Probe
tgagaggagctcagaccctagcacc

SEQ ID NO: 341358 - DNA, 25 bp, Artificial
  Probe
actacctcaaggattgcagaggtgg

SEQ ID NO: 341359 - DNA, 25 bp, Artificial
  Probe
aagagtaatggtgtcacctgctcct

SEQ ID NO: 341360 - DNA, 25 bp, Artificial
  Probe
aacacgctctgaaccccaggagctg

SEQ ID NO: 341361 - DNA, 25 bp, Artificial
  Probe
tccctcggttcacaaatcagttcag

SEQ ID NO: 341362 - DNA, 25 bp, Artificial
  Probe
tgtgatggagacctcaaggctgttg

SEQ ID NO: 341363 - DNA, 25 bp, Artificial
  Probe
cttgcccaagattaaagagtaatgg

SEQ ID NO: 341364 - DNA, 25 bp, Artificial
  Probe
gacctcaaggctgttgtgagccccc

SEQ ID NO: 341365 - DNA, 25 bp, Artificial
  Probe
ctgaatggcatgatgccagggatgt

SEQ ID NO: 341366 - DNA, 25 bp, Artificial
  Probe
gcccttggcccactgtatgaactgt

SEQ ID NO: 341367 - DNA, 25 bp, Artificial
  Probe
atttctattgaatttgggactgccc

SEQ ID NO: 341368 - DNA, 25 bp, Artificial
  Probe
attgaatttgggactgccctttcct

SEQ ID NO: 341369 - DNA, 25 bp, Artificial
  Probe
acataccgcctgagccttctggagg

SEQ ID NO: 341370 - DNA, 25 bp, Artificial
  Probe
tgggactgccctttccttagcttta

SEQ ID NO: 341371 - DNA, 25 bp, Artificial
  Probe
accatggtagacaagctgctgagct

SEQ ID NO: 341372 - DNA, 25 bp, Artificial
  Probe
aagctgctgagctcgcgttccgcct

SEQ ID NO: 341373 - DNA, 25 bp, Artificial
  Probe
ttgaatttgggactgccctttcctt

SEQ ID NO: 341374 - DNA, 25 bp, Artificial
  Probe
agggacttccggacataccgcctga

SEQ ID NO: 341375 - DNA, 25 bp, Artificial
  Probe
ccgcaccatggtagacaagctgctg

SEQ ID NO: 341376 - DNA, 25 bp, Artificial
  Probe
gtccttcggactggtgccccttcat

SEQ ID NO: 341377 - DNA, 25 bp, Artificial
  Probe
gacataccgcctgagccttctggag

SEQ ID NO: 341378 - DNA, 25 bp, Artificial
  Probe
gacaagctgctgagctcgcgttccg

SEQ ID NO: 341379 - DNA, 25 bp, Artificial
  Probe
ttgggactgccctttccttagcttt

SEQ ID NO: 341380 - DNA, 25 bp, Artificial
  Probe
caccatggtagacaagctgctgagc

SEQ ID NO: 341381 - DNA, 25 bp, Artificial
  Probe
acaagctgctgagctcgcgttccgc

SEQ ID NO: 341382 - DNA, 25 bp, Artificial
  Probe
gccttctggaggaatatggctgctg

SEQ ID NO: 341383 - DNA, 25 bp, Artificial
  Probe
gaatatggctgctgcaaggaactgg

SEQ ID NO: 341384 - DNA, 25 bp, Artificial
  Probe
ggacttccggacataccgcctgagc

SEQ ID NO: 341385 - DNA, 25 bp, Artificial
  Probe
ccatggtagacaagctgctgagctc

SEQ ID NO: 341386 - DNA, 25 bp, Artificial
  Probe
tgctgcaaggaactggctagccgcc

SEQ ID NO: 341387 - DNA, 25 bp, Artificial
  Probe
agccttctggaggaatatggctgct

SEQ ID NO: 341388 - DNA, 25 bp, Artificial
  Probe
tgcccttggcccactgtatgaactg

SEQ ID NO: 341389 - DNA, 25 bp, Artificial
  Probe
cgcaccatggtagacaagctgctga

SEQ ID NO: 341390 - DNA, 25 bp, Artificial
  Probe
tatggctgctgcaaggaactggcta

SEQ ID NO: 341391 - DNA, 25 bp, Artificial
  Probe
gggactgccctttccttagctttat

SEQ ID NO: 341392 - DNA, 25 bp, Artificial
  Probe
tatttctattgaatttgggactgcc

SEQ ID NO: 341393 - DNA, 25 bp, Artificial
  Probe
gcccactgtatgaactgtataaata

SEQ ID NO: 341394 - DNA, 25 bp, Artificial
  Probe
ccttggcccactgtatgaactgtat

SEQ ID NO: 341395 - DNA, 25 bp, Artificial
  Probe
ttggcccactgtatgaactgtataa

SEQ ID NO: 341396 - DNA, 25 bp, Artificial
  Probe
ccgcctgagccttctggaggaatat

SEQ ID NO: 341397 - DNA, 25 bp, Artificial
  Probe
ggacataccgcctgagccttctgga

SEQ ID NO: 341398 - DNA, 25 bp, Artificial
  Probe
ttctattgaatttgggactgccctt

SEQ ID NO: 341399 - DNA, 25 bp, Artificial
  Probe
tccttcggactggtgccccttcatt

SEQ ID NO: 341400 - DNA, 25 bp, Artificial
  Probe
gtagacaagctgctgagctcgcgtt

SEQ ID NO: 341401 - DNA, 25 bp, Artificial
  Probe
tggtagacaagctgctgagctcgcg

SEQ ID NO: 341402 - DNA, 25 bp, Artificial
  Probe
actggtgccccttcattctgctagc

SEQ ID NO: 341403 - DNA, 25 bp, Artificial
  Probe
gactggtgccccttcattctgctag

SEQ ID NO: 341404 - DNA, 25 bp, Artificial
  Probe
tggctgctgcaaggaactggctagc

SEQ ID NO: 341405 - DNA, 25 bp, Artificial
  Probe
atggtagacaagctgctgagctcgc

SEQ ID NO: 341406 - DNA, 25 bp, Artificial
  Probe
cgcctgagccttctggaggaatatg

SEQ ID NO: 341407 - DNA, 25 bp, Artificial
  Probe
tgaatttgggactgccctttcctta

SEQ ID NO: 341408 - DNA, 25 bp, Artificial
  Probe
aatatggctgctgcaaggaactggc

SEQ ID NO: 341409 - DNA, 25 bp, Artificial
  Probe
ctgctgcaaggaactggctagccgc

SEQ ID NO: 341410 - DNA, 25 bp, Artificial
  Probe
agacaagctgctgagctcgcgttcc

SEQ ID NO: 341411 - DNA, 25 bp, Artificial
  Probe
tggcccactgtatgaactgtataaa

SEQ ID NO: 341412 - DNA, 25 bp, Artificial
  Probe
cccagattgtactccgggcactgat

SEQ ID NO: 341413 - DNA, 25 bp, Artificial
  Probe
caaccacacagtctgcacatagctg

SEQ ID NO: 341414 - DNA, 25 bp, Artificial
  Probe
taaacgcctgtgtggcagggatcct

SEQ ID NO: 341415 - DNA, 25 bp, Artificial
  Probe
tctgcacatagctgggacggagcat

SEQ ID NO: 341416 - DNA, 25 bp, Artificial
  Probe
gtgcaacggtcatcgctgctcccat

SEQ ID NO: 341417 - DNA, 25 bp, Artificial
  Probe
agggtgcaacggtcatcgctgctcc

SEQ ID NO: 341418 - DNA, 25 bp, Artificial
  Probe
cacatagctgggacggagcatcttc

SEQ ID NO: 341419 - DNA, 25 bp, Artificial
  Probe
tggtctgctctcctgccctttggga

SEQ ID NO: 341420 - DNA, 25 bp, Artificial
  Probe
gacaactgctgtcgattttacaacc

SEQ ID NO: 341421 - DNA, 25 bp, Artificial
  Probe
gtcctctttccttgggaacctcatg

SEQ ID NO: 341422 - DNA, 25 bp, Artificial
  Probe
ctcatccagcccagagaggccgtgg

SEQ ID NO: 341423 - DNA, 25 bp, Artificial
  Probe
cccaagcacccagcttgttgggtat

SEQ ID NO: 341424 - DNA, 25 bp, Artificial
  Probe
ccatgtctgcctctccaagtacgag

SEQ ID NO: 341425 - DNA, 25 bp, Artificial
  Probe
atgtctgcctctccaagtacgagtt

SEQ ID NO: 341426 - DNA, 25 bp, Artificial
  Probe
ctgccctttgggagccaacattctg

SEQ ID NO: 341427 - DNA, 25 bp, Artificial
  Probe
tgctgtcgattttacaaccacacag

SEQ ID NO: 341428 - DNA, 25 bp, Artificial
  Probe
agagtctggtctgctctcctgccct

SEQ ID NO: 341429 - DNA, 25 bp, Artificial
  Probe
actccgggcactgatcacaggggct

SEQ ID NO: 341430 - DNA, 25 bp, Artificial
  Probe
agttcagccaagtggcactggacaa

SEQ ID NO: 341431 - DNA, 25 bp, Artificial
  Probe
gcgacttctcccagattgtactccg

SEQ ID NO: 341432 - DNA, 25 bp, Artificial
  Probe
cccccaaaagctgtctctagagaca

SEQ ID NO: 341433 - DNA, 25 bp, Artificial
  Probe
aacctcatgtgcaccagccaaaagc

SEQ ID NO: 341434 - DNA, 25 bp, Artificial
  Probe
ccagagaggccgtgggactcgtcac

SEQ ID NO: 341435 - DNA, 25 bp, Artificial
  Probe
cagagcactagctcggagttcagcc

SEQ ID NO: 341436 - DNA, 25 bp, Artificial
  Probe
gtttacctgtgctgccgccaagtct

SEQ ID NO: 341437 - DNA, 25 bp, Artificial
  Probe
tagctgggacggagcatcttcctag

SEQ ID NO: 341438 - DNA, 25 bp, Artificial
  Probe
acggtcatcgctgctcccatgtctg

SEQ ID NO: 341439 - DNA, 25 bp, Artificial
  Probe
gtcagcagcagcagctttgaggttt

SEQ ID NO: 341440 - DNA, 25 bp, Artificial
  Probe
gtcgattttacaaccacacagtctg

SEQ ID NO: 341441 - DNA, 25 bp, Artificial
  Probe
gtggactgcgtgtcccttctgaacc

SEQ ID NO: 341442 - DNA, 25 bp, Artificial
  Probe
tccagcccagagaggccgtgggact

SEQ ID NO: 341443 - DNA, 25 bp, Artificial
  Probe
cctttgggagccaacattctggtcc

SEQ ID NO: 341444 - DNA, 25 bp, Artificial
  Probe
tgtgctgccgccaagtcttccagag

SEQ ID NO: 341445 - DNA, 25 bp, Artificial
  Probe
aggccgtgggactcgtcactacctc

SEQ ID NO: 341446 - DNA, 25 bp, Artificial
  Probe
aggagcgacttctcccagattgtac

SEQ ID NO: 341447 - DNA, 25 bp, Artificial
  Probe
tctcctgccctttgggagccaacat

SEQ ID NO: 341448 - DNA, 25 bp, Artificial
  Probe
ctgctaaacgcctgtgtggcaggga

SEQ ID NO: 341449 - DNA, 25 bp, Artificial
  Probe
tgtactccgggcactgatcacaggg

SEQ ID NO: 341450 - DNA, 25 bp, Artificial
  Probe
gcactagctcggagttcagccaagt

SEQ ID NO: 341451 - DNA, 25 bp, Artificial
  Probe
gagcatcttcctagcctcagggctc

SEQ ID NO: 341452 - DNA, 25 bp, Artificial
  Probe
gtcgaggtggactgcgtgtcccttc

SEQ ID NO: 341453 - DNA, 25 bp, Artificial
  Probe
ctcagggctcatccagcccagagag

SEQ ID NO: 341454 - DNA, 25 bp, Artificial
  Probe
agcacccagcttgttgggtatcccc

SEQ ID NO: 341455 - DNA, 25 bp, Artificial
  Probe
cggaggagcgacttctcccagattg

SEQ ID NO: 341456 - DNA, 25 bp, Artificial
  Probe
cggagttcagccaagtggcactgga

SEQ ID NO: 341457 - DNA, 25 bp, Artificial
  Probe
cagggctcatccagcccagagaggc

SEQ ID NO: 341458 - DNA, 25 bp, Artificial
  Probe
atctgctgacataaagaggattacc

SEQ ID NO: 341459 - DNA, 25 bp, Artificial
  Probe
ctgatgcagtcaaagccatcatcat

SEQ ID NO: 341460 - DNA, 25 bp, Artificial
  Probe
ctgtacaccattagtagccaactag

SEQ ID NO: 341461 - DNA, 25 bp, Artificial
  Probe
cgtacgaccacttcatcgattgttt

SEQ ID NO: 341462 - DNA, 25 bp, Artificial
  Probe
agatgctcacgtgtcacagaacttc

SEQ ID NO: 341463 - DNA, 25 bp, Artificial
  Probe
atcctgaatctgagctgtacaccat

SEQ ID NO: 341464 - DNA, 25 bp, Artificial
  Probe
cgacgtacgaccacttcatcgattg

SEQ ID NO: 341465 - DNA, 25 bp, Artificial
  Probe
cacgtgtcacagaacttcacctggg

SEQ ID NO: 341466 - DNA, 25 bp, Artificial
  Probe
agtatggagatgctcacgtgtcaca

SEQ ID NO: 341467 - DNA, 25 bp, Artificial
  Probe
gctgtacaccattagtagccaacta

SEQ ID NO: 341468 - DNA, 25 bp, Artificial
  Probe
cttcatcgattgtttcattgagtat

SEQ ID NO: 341469 - DNA, 25 bp, Artificial
  Probe
cctgaatctgagctgtacaccatta

SEQ ID NO: 341470 - DNA, 25 bp, Artificial
  Probe
gaagaccctcctgatgaaaagcaaa

SEQ ID NO: 341471 - DNA, 25 bp, Artificial
  Probe
tctgagctgtacaccattagtagcc

SEQ ID NO: 341472 - DNA, 25 bp, Artificial
  Probe
tgagctgtacaccattagtagccaa

SEQ ID NO: 341473 - DNA, 25 bp, Artificial
  Probe
tcacgtgtcacagaacttcacctgg

SEQ ID NO: 341474 - DNA, 25 bp, Artificial
  Probe
aagaggattacctgctttgcttccg

SEQ ID NO: 341475 - DNA, 25 bp, Artificial
  Probe
acttcatcgattgtttcattgagta

SEQ ID NO: 341476 - DNA, 25 bp, Artificial
  Probe
aagaccctcctgatgaaaagcaaac

SEQ ID NO: 341477 - DNA, 25 bp, Artificial
  Probe
tgaatctgagctgtacaccattagt

SEQ ID NO: 341478 - DNA, 25 bp, Artificial
  Probe
agaccctcctgatgaaaagcaaaca

SEQ ID NO: 341479 - DNA, 25 bp, Artificial
  Probe
aatttcccaggatcctgaatctgag

SEQ ID NO: 341480 - DNA, 25 bp, Artificial
  Probe
gaccacttcatcgattgtttcattg

SEQ ID NO: 341481 - DNA, 25 bp, Artificial
  Probe
ccacttcatcgattgtttcattgag

SEQ ID NO: 341482 - DNA, 25 bp, Artificial
  Probe
tcccaggatcctgaatctgagctgt

SEQ ID NO: 341483 - DNA, 25 bp, Artificial
  Probe
agaggattacctgctttgcttccgg

SEQ ID NO: 341484 - DNA, 25 bp, Artificial
  Probe
tatggagatgctcacgtgtcacaga

SEQ ID NO: 341485 - DNA, 25 bp, Artificial
  Probe
ggaaatccatctgctgacataaaga

SEQ ID NO: 341486 - DNA, 25 bp, Artificial
  Probe
gaaatccatctgctgacataaagag

SEQ ID NO: 341487 - DNA, 25 bp, Artificial
  Probe
gaggattacctgctttgcttccggg

SEQ ID NO: 341488 - DNA, 25 bp, Artificial
  Probe
aaatccatctgctgacataaagagg

SEQ ID NO: 341489 - DNA, 25 bp, Artificial
  Probe
gtacaccattagtagccaactagac

SEQ ID NO: 341490 - DNA, 25 bp, Artificial
  Probe
caggatcctgaatctgagctgtaca

SEQ ID NO: 341491 - DNA, 25 bp, Artificial
  Probe
gtctgtcagagctgacttccctacc

SEQ ID NO: 341492 - DNA, 25 bp, Artificial
  Probe
ctcacgtgtcacagaacttcacctg

SEQ ID NO: 341493 - DNA, 25 bp, Artificial
  Probe
gattacctgctttgcttccgggggt

SEQ ID NO: 341494 - DNA, 25 bp, Artificial
  Probe
gagatgctcacgtgtcacagaactt

SEQ ID NO: 341495 - DNA, 25 bp, Artificial
  Probe
gtacgaccacttcatcgattgtttc

SEQ ID NO: 341496 - DNA, 25 bp, Artificial
  Probe
cccaggatcctgaatctgagctgta

SEQ ID NO: 341497 - DNA, 25 bp, Artificial
  Probe
tttcccaggatcctgaatctgagct

SEQ ID NO: 341498 - DNA, 25 bp, Artificial
  Probe
cccagaagaccctcctgatgaaaag

SEQ ID NO: 341499 - DNA, 25 bp, Artificial
  Probe
aatccatctgctgacataaagagga

SEQ ID NO: 341500 - DNA, 25 bp, Artificial
  Probe
tccatctgctgacataaagaggatt

SEQ ID NO: 341501 - DNA, 25 bp, Artificial
  Probe
tggaaatccatctgctgacataaag

SEQ ID NO: 341502 - DNA, 25 bp, Artificial
  Probe
ccgtggagctgtctgtcagagctga

SEQ ID NO: 341503 - DNA, 25 bp, Artificial
  Probe
ggagctgtctgtcagagctgacttc

SEQ ID NO: 341504 - DNA, 25 bp, Artificial
  Probe
gatttccatttgactgctttctatg

SEQ ID NO: 341505 - DNA, 25 bp, Artificial
  Probe
agtgctgcgttgttgtacatacttg

SEQ ID NO: 341506 - DNA, 25 bp, Artificial
  Probe
gaatgacctggctcgagatcctcca

SEQ ID NO: 341507 - DNA, 25 bp, Artificial
  Probe
gtacatacttggaacaacaaactag

SEQ ID NO: 341508 - DNA, 25 bp, Artificial
  Probe
gataacctctacaaataaagctagg

SEQ ID NO: 341509 - DNA, 25 bp, Artificial
  Probe
aatgacctggctcgagatcctccag

SEQ ID NO: 341510 - DNA, 25 bp, Artificial
  Probe
ttgcctcctagcagagaagtgtgtg

SEQ ID NO: 341511 - DNA, 25 bp, Artificial
  Probe
acatgtttacctgacacagcagtgc

SEQ ID NO: 341512 - DNA, 25 bp, Artificial
  Probe
tttgactgctttctatgagcccacc

SEQ ID NO: 341513 - DNA, 25 bp, Artificial
  Probe
ccatttgactgctttctatgagccc

SEQ ID NO: 341514 - DNA, 25 bp, Artificial
  Probe
caacattgcctcctagcagagaagt

SEQ ID NO: 341515 - DNA, 25 bp, Artificial
  Probe
cagtgctgcgttgttgtacatactt

SEQ ID NO: 341516 - DNA, 25 bp, Artificial
  Probe
tgttgtacatacttggaacaacaaa

SEQ ID NO: 341517 - DNA, 25 bp, Artificial
  Probe
ttgactgctttctatgagcccaccg

SEQ ID NO: 341518 - DNA, 25 bp, Artificial
  Probe
tgacctggctcgagatcctccagca

SEQ ID NO: 341519 - DNA, 25 bp, Artificial
  Probe
tttccatttgactgctttctatgag

SEQ ID NO: 341520 - DNA, 25 bp, Artificial
  Probe
tccatttgactgctttctatgagcc

SEQ ID NO: 341521 - DNA, 25 bp, Artificial
  Probe
cattgcctcctagcagagaagtgtg

SEQ ID NO: 341522 - DNA, 25 bp, Artificial
  Probe
gtttacctgacacagcagtgctgcg

SEQ ID NO: 341523 - DNA, 25 bp, Artificial
  Probe
gtgcacatgtttacctgacacagca

SEQ ID NO: 341524 - DNA, 25 bp, Artificial
  Probe
tacctgacacagcagtgctgcgttg

SEQ ID NO: 341525 - DNA, 25 bp, Artificial
  Probe
tcccctgtgcacatgtttacctgac

SEQ ID NO: 341526 - DNA, 25 bp, Artificial
  Probe
cctcctagcagagaagtgtgtgtgt

SEQ ID NO: 341527 - DNA, 25 bp, Artificial
  Probe
aattgaatgacctggctcgagatcc

SEQ ID NO: 341528 - DNA, 25 bp, Artificial
  Probe
tgtttacctgacacagcagtgctgc

SEQ ID NO: 341529 - DNA, 25 bp, Artificial
  Probe
catttgactgctttctatgagccca

SEQ ID NO: 341530 - DNA, 25 bp, Artificial
  Probe
aacattgcctcctagcagagaagtg

SEQ ID NO: 341531 - DNA, 25 bp, Artificial
  Probe
ccctgtgcacatgtttacctgacac

SEQ ID NO: 341532 - DNA, 25 bp, Artificial
  Probe
ggataacctctacaaataaagctag

SEQ ID NO: 341533 - DNA, 25 bp, Artificial
  Probe
cccctgtgcacatgtttacctgaca

SEQ ID NO: 341534 - DNA, 25 bp, Artificial
  Probe
atgacctggctcgagatcctccagc

SEQ ID NO: 341535 - DNA, 25 bp, Artificial
  Probe
cttcccctgtgcacatgtttacctg

SEQ ID NO: 341536 - DNA, 25 bp, Artificial
  Probe
gcgttgttgtacatacttggaacaa

SEQ ID NO: 341537 - DNA, 25 bp, Artificial
  Probe
gcagtgctgcgttgttgtacatact

SEQ ID NO: 341538 - DNA, 25 bp, Artificial
  Probe
ctcctagcagagaagtgtgtgtgtg

SEQ ID NO: 341539 - DNA, 25 bp, Artificial
  Probe
tgctgcgttgttgtacatacttgga

SEQ ID NO: 341540 - DNA, 25 bp, Artificial
  Probe
agcagtgctgcgttgttgtacatac

SEQ ID NO: 341541 - DNA, 25 bp, Artificial
  Probe
gcacatgtttacctgacacagcagt

SEQ ID NO: 341542 - DNA, 25 bp, Artificial
  Probe
atgtttacctgacacagcagtgctg

SEQ ID NO: 341543 - DNA, 25 bp, Artificial
  Probe
gttgtacatacttggaacaacaaac

SEQ ID NO: 341544 - DNA, 25 bp, Artificial
  Probe
atttgactgctttctatgagcccac

SEQ ID NO: 341545 - DNA, 25 bp, Artificial
  Probe
gaattgaatgacctggctcgagatc

SEQ ID NO: 341546 - DNA, 25 bp, Artificial
  Probe
ttcccctgtgcacatgtttacctga

SEQ ID NO: 341547 - DNA, 25 bp, Artificial
  Probe
tgcacatgtttacctgacacagcag

SEQ ID NO: 341548 - DNA, 25 bp, Artificial
  Probe
catgtttacctgacacagcagtgct

SEQ ID NO: 341549 - DNA, 25 bp, Artificial
  Probe
ctgcgttgttgtacatacttggaac

SEQ ID NO: 341550 - DNA, 25 bp, Artificial
  Probe
ctggacgcagagctggggctttcct

SEQ ID NO: 341551 - DNA, 25 bp, Artificial
  Probe
accattcaagctcttgcttctagtg

SEQ ID NO: 341552 - DNA, 25 bp, Artificial
  Probe
acagctgcctccaaggcacagtgag

SEQ ID NO: 341553 - DNA, 25 bp, Artificial
  Probe
gcaacagtacactggcaaccattca

SEQ ID NO: 341554 - DNA, 25 bp, Artificial
  Probe
tggacgcagagctggggctttcctc

SEQ ID NO: 341555 - DNA, 25 bp, Artificial
  Probe
gcttctagtggctctcttccaataa

SEQ ID NO: 341556 - DNA, 25 bp, Artificial
  Probe
cacagtggcctctgccagcggggct

SEQ ID NO: 341557 - DNA, 25 bp, Artificial
  Probe
cagcaacccagtaagcttggtttct

SEQ ID NO: 341558 - DNA, 25 bp, Artificial
  Probe
tctggatgcaactgggaacctggta

SEQ ID NO: 341559 - DNA, 25 bp, Artificial
  Probe
acaatgtcttttcaggattgcttca

SEQ ID NO: 341560 - DNA, 25 bp, Artificial
  Probe
tgcctccaaggcacagtgagctgga

SEQ ID NO: 341561 - DNA, 25 bp, Artificial
  Probe
aactgagtccatccagaactctctg

SEQ ID NO: 341562 - DNA, 25 bp, Artificial
  Probe
cttttcaggattgcttcatggattg

SEQ ID NO: 341563 - DNA, 25 bp, Artificial
  Probe
ggctctcttccaataacatctctgg

SEQ ID NO: 341564 - DNA, 25 bp, Artificial
  Probe
ccaataacatctctggatgcaactg

SEQ ID NO: 341565 - DNA, 25 bp, Artificial
  Probe
tgataggctggctatcagctggcta

SEQ ID NO: 341566 - DNA, 25 bp, Artificial
  Probe
atcagctggctaaaacatgacgcct

SEQ ID NO: 341567 - DNA, 25 bp, Artificial
  Probe
catccagaactctctgttcacagtg

SEQ ID NO: 341568 - DNA, 25 bp, Artificial
  Probe
ggaacctggtattcgccaatgcagg

SEQ ID NO: 341569 - DNA, 25 bp, Artificial
  Probe
tcccaccatgttgtgaggatgagga

SEQ ID NO: 341570 - DNA, 25 bp, Artificial
  Probe
ctgcagggtgataggctggctatca

SEQ ID NO: 341571 - DNA, 25 bp, Artificial
  Probe
ctggctaaaacatgacgcctgtcat

SEQ ID NO: 341572 - DNA, 25 bp, Artificial
  Probe
ctggtattcgccaatgcaggaggag

SEQ ID NO: 341573 - DNA, 25 bp, Artificial
  Probe
gacaggacaacgtttgcctaatttt

SEQ ID NO: 341574 - DNA, 25 bp, Artificial
  Probe
ttcacagtggcctctgccagcgggg

SEQ ID NO: 341575 - DNA, 25 bp, Artificial
  Probe
tcttgcttctagtggctctcttcca

SEQ ID NO: 341576 - DNA, 25 bp, Artificial
  Probe
tttcctcactgcagggtgataggct

SEQ ID NO: 341577 - DNA, 25 bp, Artificial
  Probe
caaggcacagtgagctggacgcaga

SEQ ID NO: 341578 - DNA, 25 bp, Artificial
  Probe
agacaggacaacgtttgcctaattt

SEQ ID NO: 341579 - DNA, 25 bp, Artificial
  Probe
ccaccatgttgtgaggatgaggaag

SEQ ID NO: 341580 - DNA, 25 bp, Artificial
  Probe
ggctaaaacatgacgcctgtcattg

SEQ ID NO: 341581 - DNA, 25 bp, Artificial
  Probe
ccagcaacccagtaagcttggtttc

SEQ ID NO: 341582 - DNA, 25 bp, Artificial
  Probe
tcgccaatgcaggaggagcccccaa

SEQ ID NO: 341583 - DNA, 25 bp, Artificial
  Probe
aacatgacgcctgtcattggcttcc

SEQ ID NO: 341584 - DNA, 25 bp, Artificial
  Probe
gagtccatccagaactctctgttca

SEQ ID NO: 341585 - DNA, 25 bp, Artificial
  Probe
ctcactgcagggtgataggctggct

SEQ ID NO: 341586 - DNA, 25 bp, Artificial
  Probe
atgacgcctgtcattggcttcctcc

SEQ ID NO: 341587 - DNA, 25 bp, Artificial
  Probe
gatgcaactgggaacctggtattcg

SEQ ID NO: 341588 - DNA, 25 bp, Artificial
  Probe
ttgcttcatggattggagaactttc

SEQ ID NO: 341589 - DNA, 25 bp, Artificial
  Probe
ctggctatcagctggctaaaacatg

SEQ ID NO: 341590 - DNA, 25 bp, Artificial
  Probe
ctctgttcacagtggcctctgccag

SEQ ID NO: 341591 - DNA, 25 bp, Artificial
  Probe
cagtacactggcaaccattcaagct

SEQ ID NO: 341592 - DNA, 25 bp, Artificial
  Probe
cagctgcctccaaggcacagtgagc

SEQ ID NO: 341593 - DNA, 25 bp, Artificial
  Probe
cagagctggggctttcctcactgca

SEQ ID NO: 341594 - DNA, 25 bp, Artificial
  Probe
ctatcagctggctaaaacatgacgc

SEQ ID NO: 341595 - DNA, 25 bp, Artificial
  Probe
ggcaaccattcaagctcttgcttct

SEQ ID NO: 341596 - DNA, 25 bp, Artificial
  Probe
tccataaagaccataacattgaagg

SEQ ID NO: 341597 - DNA, 25 bp, Artificial
  Probe
gctacactgaccttgaactattctg

SEQ ID NO: 341598 - DNA, 25 bp, Artificial
  Probe
ctagaagccacatttagactccttg

SEQ ID NO: 341599 - DNA, 25 bp, Artificial
  Probe
aagccacatttagactccttgtggc

SEQ ID NO: 341600 - DNA, 25 bp, Artificial
  Probe
ttgggacacttatcagtgatgattc

SEQ ID NO: 341601 - DNA, 25 bp, Artificial
  Probe
tcatgatgtcccagagggagtcatt

SEQ ID NO: 341602 - DNA, 25 bp, Artificial
  Probe
gacctagaagccacatttagactcc

SEQ ID NO: 341603 - DNA, 25 bp, Artificial
  Probe
tgaaccctaaaggaaagccagcaaa

SEQ ID NO: 341604 - DNA, 25 bp, Artificial
  Probe
gaccagttcagcagccaccttatca

SEQ ID NO: 341605 - DNA, 25 bp, Artificial
  Probe
tattgctctggctacactgaccttg

SEQ ID NO: 341606 - DNA, 25 bp, Artificial
  Probe
gacaaaagctcatgatgtcccagag

SEQ ID NO: 341607 - DNA, 25 bp, Artificial
  Probe
aagttgtacaagacctagaagccac

SEQ ID NO: 341608 - DNA, 25 bp, Artificial
  Probe
caaatctttaggtgttgattctcaa

SEQ ID NO: 341609 - DNA, 25 bp, Artificial
  Probe
aagctcatgatgtcccagagggagt

SEQ ID NO: 341610 - DNA, 25 bp, Artificial
  Probe
ttagtcaggcaggacaaaagctcat

SEQ ID NO: 341611 - DNA, 25 bp, Artificial
  Probe
taagaacatcatattgctctggcta

SEQ ID NO: 341612 - DNA, 25 bp, Artificial
  Probe
aaagctcatgatgtcccagagggag

SEQ ID NO: 341613 - DNA, 25 bp, Artificial
  Probe
aagccagcaaaccagctgcttgctc

SEQ ID NO: 341614 - DNA, 25 bp, Artificial
  Probe
aaagtatgcttctgtatcagagcca

SEQ ID NO: 341615 - DNA, 25 bp, Artificial
  Probe
aagggaaagcccaatgcttgtcagt

SEQ ID NO: 341616 - DNA, 25 bp, Artificial
  Probe
aaaggaaagccagcaaaccagctgc

SEQ ID NO: 341617 - DNA, 25 bp, Artificial
  Probe
tttgcaattgctttgttagtcaggc

SEQ ID NO: 341618 - DNA, 25 bp, Artificial
  Probe
cataaagaccataacattgaaggga

SEQ ID NO: 341619 - DNA, 25 bp, Artificial
  Probe
atcttggaagttgtacaagacctag

SEQ ID NO: 341620 - DNA, 25 bp, Artificial
  Probe
agaccataacattgaagggaaagcc

SEQ ID NO: 341621 - DNA, 25 bp, Artificial
  Probe
agggaaagcccaatgcttgtcagtg

SEQ ID NO: 341622 - DNA, 25 bp, Artificial
  Probe
gcaataagaacatcatattgctctg

SEQ ID NO: 341623 - DNA, 25 bp, Artificial
  Probe
cttatcagtgatgattcaaatgcta

SEQ ID NO: 341624 - DNA, 25 bp, Artificial
  Probe
ttagcacaatcttggaagttgtaca

SEQ ID NO: 341625 - DNA, 25 bp, Artificial
  Probe
gaaatccgggagcaataagaacatc

SEQ ID NO: 341626 - DNA, 25 bp, Artificial
  Probe
ataagaacatcatattgctctggct

SEQ ID NO: 341627 - DNA, 25 bp, Artificial
  Probe
cttaggactttttgcaattgctttg

SEQ ID NO: 341628 - DNA, 25 bp, Artificial
  Probe
tgtcccagagggagtcattgatgtc

SEQ ID NO: 341629 - DNA, 25 bp, Artificial
  Probe
atcatattgctctggctacactgac

SEQ ID NO: 341630 - DNA, 25 bp, Artificial
  Probe
tcccagagggagtcattgatgtcac

SEQ ID NO: 341631 - DNA, 25 bp, Artificial
  Probe
ctcttaggactttttgcaattgctt

SEQ ID NO: 341632 - DNA, 25 bp, Artificial
  Probe
tgttagtcaggcaggacaaaagctc

SEQ ID NO: 341633 - DNA, 25 bp, Artificial
  Probe
gctttgttagtcaggcaggacaaaa

SEQ ID NO: 341634 - DNA, 25 bp, Artificial
  Probe
gaccttgaactattctgtttgtttc

SEQ ID NO: 341635 - DNA, 25 bp, Artificial
  Probe
acaagacctagaagccacatttaga

SEQ ID NO: 341636 - DNA, 25 bp, Artificial
  Probe
aaatccgggagcaataagaacatca

SEQ ID NO: 341637 - DNA, 25 bp, Artificial
  Probe
aagaccataacattgaagggaaagc

SEQ ID NO: 341638 - DNA, 25 bp, Artificial
  Probe
caggacaaaagctcatgatgtccca

SEQ ID NO: 341639 - DNA, 25 bp, Artificial
  Probe
atgatgtcccagagggagtcattga

SEQ ID NO: 341640 - DNA, 25 bp, Artificial
  Probe
cttctgaaccctaaaggaaagccag

SEQ ID NO: 341641 - DNA, 25 bp, Artificial
  Probe
cactgaccttgaactattctgtttg

SEQ ID NO: 341642 - DNA, 25 bp, Artificial
  Probe
tcccatttgggcacattctctattg

SEQ ID NO: 341643 - DNA, 25 bp, Artificial
  Probe
ggacaagctggcacccttagctgag

SEQ ID NO: 341644 - DNA, 25 bp, Artificial
  Probe
gggcacattctctattgatcagaac

SEQ ID NO: 341645 - DNA, 25 bp, Artificial
  Probe
cgaagcaggacagacacaggtggat

SEQ ID NO: 341646 - DNA, 25 bp, Artificial
  Probe
gcttttcttccaatggtacgttgtt

SEQ ID NO: 341647 - DNA, 25 bp, Artificial
  Probe
ccatgtcaagccatgtgaaggtcag

SEQ ID NO: 341648 - DNA, 25 bp, Artificial
  Probe
agcccaaacttgtggggccaccaga

SEQ ID NO: 341649 - DNA, 25 bp, Artificial
  Probe
tcagtgtggacctagaatgttcgac

SEQ ID NO: 341650 - DNA, 25 bp, Artificial
  Probe
agccatgtgaaggtcaggacccttc

SEQ ID NO: 341651 - DNA, 25 bp, Artificial
  Probe
ccttctgaagcttttcttccaatgg

SEQ ID NO: 341652 - DNA, 25 bp, Artificial
  Probe
catgttgtccagtgccctgcatcgt

SEQ ID NO: 341653 - DNA, 25 bp, Artificial
  Probe
gtacttgaatttagcaccgtaatcc

SEQ ID NO: 341654 - DNA, 25 bp, Artificial
  Probe
gactagcttccaatactgtcctgcc

SEQ ID NO: 341655 - DNA, 25 bp, Artificial
  Probe
gacagacacaggtggattgtgcccc

SEQ ID NO: 341656 - DNA, 25 bp, Artificial
  Probe
aggtcaggacccttctgaagctttt

SEQ ID NO: 341657 - DNA, 25 bp, Artificial
  Probe
cattctctattgatcagaacccagg

SEQ ID NO: 341658 - DNA, 25 bp, Artificial
  Probe
acttgtggggccaccagaaattgct

SEQ ID NO: 341659 - DNA, 25 bp, Artificial
  Probe
accacagcccaaacttgtggggcca

SEQ ID NO: 341660 - DNA, 25 bp, Artificial
  Probe
gctgaggtgtgtcatgttgtccagt

SEQ ID NO: 341661 - DNA, 25 bp, Artificial
  Probe
tgtggtgagcgtcaccacatgacag

SEQ ID NO: 341662 - DNA, 25 bp, Artificial
  Probe
tgcatcgtaggctgccgattcagtg

SEQ ID NO: 341663 - DNA, 25 bp, Artificial
  Probe
acacaggtggattgtgccccagggt

SEQ ID NO: 341664 - DNA, 25 bp, Artificial
  Probe
tggggccaccagaaattgctgtggt

SEQ ID NO: 341665 - DNA, 25 bp, Artificial
  Probe
cttgaatttagcaccgtaatcctgt

SEQ ID NO: 341666 - DNA, 25 bp, Artificial
  Probe
catcgaagcaggacagacacaggtg

SEQ ID NO: 341667 - DNA, 25 bp, Artificial
  Probe
tgtccagtgccctgcatcgtaggct

SEQ ID NO: 341668 - DNA, 25 bp, Artificial
  Probe
gtcctgccatcactctgatttgact

SEQ ID NO: 341669 - DNA, 25 bp, Artificial
  Probe
tgggatttgtgtgctctatgctcca

SEQ ID NO: 341670 - DNA, 25 bp, Artificial
  Probe
tcccccagggtcagttctaggtact

SEQ ID NO: 341671 - DNA, 25 bp, Artificial
  Probe
catttggaaatatcccactgacaag

SEQ ID NO: 341672 - DNA, 25 bp, Artificial
  Probe
ctattgatcagaacccaggcttgaa

SEQ ID NO: 341673 - DNA, 25 bp, Artificial
  Probe
gactttgtggtgagcgtcaccacat

SEQ ID NO: 341674 - DNA, 25 bp, Artificial
  Probe
caggacagacacaggtggattgtgc

SEQ ID NO: 341675 - DNA, 25 bp, Artificial
  Probe
gagcgtcaccacatgacaggggtgt

SEQ ID NO: 341676 - DNA, 25 bp, Artificial
  Probe
tgccatcactctgatttgactttgt

SEQ ID NO: 341677 - DNA, 25 bp, Artificial
  Probe
gtgtgccagcccatcgaagcaggac

SEQ ID NO: 341678 - DNA, 25 bp, Artificial
  Probe
cttccaatggtacgttgtttgaaga

SEQ ID NO: 341679 - DNA, 25 bp, Artificial
  Probe
ggactagcttccaatactgtcctgc

SEQ ID NO: 341680 - DNA, 25 bp, Artificial
  Probe
tgctccatgtcaagccatgtgaagg

SEQ ID NO: 341681 - DNA, 25 bp, Artificial
  Probe
gccctgcatcgtaggctgccgattc

SEQ ID NO: 341682 - DNA, 25 bp, Artificial
  Probe
ccagaaattgctgtggtgttcaggg

SEQ ID NO: 341683 - DNA, 25 bp, Artificial
  Probe
ctgccatcactctgatttgactttg

SEQ ID NO: 341684 - DNA, 25 bp, Artificial
  Probe
ggacccttctgaagcttttcttcca

SEQ ID NO: 341685 - DNA, 25 bp, Artificial
  Probe
actgtcctgccatcactctgatttg

SEQ ID NO: 341686 - DNA, 25 bp, Artificial
  Probe
cgtaggctgccgattcagtgtggac

SEQ ID NO: 341687 - DNA, 25 bp, Artificial
  Probe
aagctggcacccttagctgaggtgt

SEQ ID NO: 341688 - DNA, 25 bp, Artificial
  Probe
agctactcagtctagtcgggcaggt

SEQ ID NO: 341689 - DNA, 25 bp, Artificial
  Probe
gtctagtcgggcaggtccctcatgt

SEQ ID NO: 341690 - DNA, 25 bp, Artificial
  Probe
ggcaaggcctgtgctgcatgtgaca

SEQ ID NO: 341691 - DNA, 25 bp, Artificial
  Probe
ctatggcacttgcacttcacacggc

SEQ ID NO: 341692 - DNA, 25 bp, Artificial
  Probe
gtggatgcgccttctggccaccact

SEQ ID NO: 341693 - DNA, 25 bp, Artificial
  Probe
ctcctgtagctactcagtctagtcg

SEQ ID NO: 341694 - DNA, 25 bp, Artificial
  Probe
gtagctactcagtctagtcgggcag

SEQ ID NO: 341695 - DNA, 25 bp, Artificial
  Probe
ggcctgtgctgcatgtgacaaagtt

SEQ ID NO: 341696 - DNA, 25 bp, Artificial
  Probe
gctactcagtctagtcgggcaggtc

SEQ ID NO: 341697 - DNA, 25 bp, Artificial
  Probe
tctcctgtagctactcagtctagtc

SEQ ID NO: 341698 - DNA, 25 bp, Artificial
  Probe
cctgtagctactcagtctagtcggg

SEQ ID NO: 341699 - DNA, 25 bp, Artificial
  Probe
aggcctgtgctgcatgtgacaaagt

SEQ ID NO: 341700 - DNA, 25 bp, Artificial
  Probe
tatggcacttgcacttcacacggct

SEQ ID NO: 341701 - DNA, 25 bp, Artificial
  Probe
caaggcctgtgctgcatgtgacaaa

SEQ ID NO: 341702 - DNA, 25 bp, Artificial
  Probe
taaagtgtgtgacttggcaaggcct

SEQ ID NO: 341703 - DNA, 25 bp, Artificial
  Probe
tgtgacttggcaaggcctgtgctgc

SEQ ID NO: 341704 - DNA, 25 bp, Artificial
  Probe
ctctctcctgtagctactcagtcta

SEQ ID NO: 341705 - DNA, 25 bp, Artificial
  Probe
ctactcagtctagtcgggcaggtcc

SEQ ID NO: 341706 - DNA, 25 bp, Artificial
  Probe
tctagtcgggcaggtccctcatgta

SEQ ID NO: 341707 - DNA, 25 bp, Artificial
  Probe
ctgtagctactcagtctagtcgggc

SEQ ID NO: 341708 - DNA, 25 bp, Artificial
  Probe
cctgtgctgcatgtgacaaagttta

SEQ ID NO: 341709 - DNA, 25 bp, Artificial
  Probe
ctagtcgggcaggtccctcatgtag

SEQ ID NO: 341710 - DNA, 25 bp, Artificial
  Probe
tttatggaagtggatgcgccttctg

SEQ ID NO: 341711 - DNA, 25 bp, Artificial
  Probe
ttggcaaggcctgtgctgcatgtga

SEQ ID NO: 341712 - DNA, 25 bp, Artificial
  Probe
ctctcctgtagctactcagtctagt

SEQ ID NO: 341713 - DNA, 25 bp, Artificial
  Probe
tggcaaggcctgtgctgcatgtgac

SEQ ID NO: 341714 - DNA, 25 bp, Artificial
  Probe
aagtgtgtgacttggcaaggcctgt

SEQ ID NO: 341715 - DNA, 25 bp, Artificial
  Probe
cccaacaccctatggcacttgcact

SEQ ID NO: 341716 - DNA, 25 bp, Artificial
  Probe
gtgctgcatgtgacaaagtttatgg

SEQ ID NO: 341717 - DNA, 25 bp, Artificial
  Probe
atggcacttgcacttcacacggctc

SEQ ID NO: 341718 - DNA, 25 bp, Artificial
  Probe
aaagtgtgtgacttggcaaggcctg

SEQ ID NO: 341719 - DNA, 25 bp, Artificial
  Probe
tctctcctgtagctactcagtctag

SEQ ID NO: 341720 - DNA, 25 bp, Artificial
  Probe
tactcagtctagtcgggcaggtccc

SEQ ID NO: 341721 - DNA, 25 bp, Artificial
  Probe
tgtagctactcagtctagtcgggca

SEQ ID NO: 341722 - DNA, 25 bp, Artificial
  Probe
ggaagtggatgcgccttctggccac

SEQ ID NO: 341723 - DNA, 25 bp, Artificial
  Probe
tcctgtagctactcagtctagtcgg

SEQ ID NO: 341724 - DNA, 25 bp, Artificial
  Probe
gcctgtgctgcatgtgacaaagttt

SEQ ID NO: 341725 - DNA, 25 bp, Artificial
  Probe
gcaaggcctgtgctgcatgtgacaa

SEQ ID NO: 341726 - DNA, 25 bp, Artificial
  Probe
tagtcgggcaggtccctcatgtagc

SEQ ID NO: 341727 - DNA, 25 bp, Artificial
  Probe
aaggcctgtgctgcatgtgacaaag

SEQ ID NO: 341728 - DNA, 25 bp, Artificial
  Probe
gcgccttctggccaccactctctct

SEQ ID NO: 341729 - DNA, 25 bp, Artificial
  Probe
agtggatgcgccttctggccaccac

SEQ ID NO: 341730 - DNA, 25 bp, Artificial
  Probe
cttggcaaggcctgtgctgcatgtg

SEQ ID NO: 341731 - DNA, 25 bp, Artificial
  Probe
cctatggcacttgcacttcacacgg

SEQ ID NO: 341732 - DNA, 25 bp, Artificial
  Probe
tagctactcagtctagtcgggcagg

SEQ ID NO: 341733 - DNA, 25 bp, Artificial
  Probe
ctgtgctgcatgtgacaaagtttat

SEQ ID NO: 341734 - DNA, 25 bp, Artificial
  Probe
gaaagcatacaaaccacactatggc

SEQ ID NO: 341735 - DNA, 25 bp, Artificial
  Probe
agcaggacgtggtgctcatgctgtt

SEQ ID NO: 341736 - DNA, 25 bp, Artificial
  Probe
atggggccttcctggctggtacctt

SEQ ID NO: 341737 - DNA, 25 bp, Artificial
  Probe
ctactcaagaacgagtggtaaagag

SEQ ID NO: 341738 - DNA, 25 bp, Artificial
  Probe
agccatagcaaaggagctgaaacaa

SEQ ID NO: 341739 - DNA, 25 bp, Artificial
  Probe
cttccggaataaagttctggatgtg

SEQ ID NO: 341740 - DNA, 25 bp, Artificial
  Probe
gcctcaggggccatcacagaaagca

SEQ ID NO: 341741 - DNA, 25 bp, Artificial
  Probe
cgtgcctgctcgtgcgcttcaagga

SEQ ID NO: 341742 - DNA, 25 bp, Artificial
  Probe
gtcacccatgcctactaccgggatg

SEQ ID NO: 341743 - DNA, 25 bp, Artificial
  Probe
ccacacacgaccaaaggctacaaga

SEQ ID NO: 341744 - DNA, 25 bp, Artificial
  Probe
gctgaaacaaagatccaccaaggct

SEQ ID NO: 341745 - DNA, 25 bp, Artificial
  Probe
aggaaaccacaggaagattgggctg

SEQ ID NO: 341746 - DNA, 25 bp, Artificial
  Probe
ttgctttcaaggtcatgctggtggg

SEQ ID NO: 341747 - DNA, 25 bp, Artificial
  Probe
agattccttcgacaacatccaggcc

SEQ ID NO: 341748 - DNA, 25 bp, Artificial
  Probe
gtcaggagcggttccgaagtgtcac

SEQ ID NO: 341749 - DNA, 25 bp, Artificial
  Probe
ctggttgacagaaatccaggaatat

SEQ ID NO: 341750 - DNA, 25 bp, Artificial
  Probe
ctactaccgggatgctcacgcactg

SEQ ID NO: 341751 - DNA, 25 bp, Artificial
  Probe
taaagtcaccagactacaaatgttg

SEQ ID NO: 341752 - DNA, 25 bp, Artificial
  Probe
tacttagcaggctggcccagtcctt

SEQ ID NO: 341753 - DNA, 25 bp, Artificial
  Probe
tggtgctcatgctgttggggaacaa

SEQ ID NO: 341754 - DNA, 25 bp, Artificial
  Probe
acaagaatcatgttgtccatttgtt

SEQ ID NO: 341755 - DNA, 25 bp, Artificial
  Probe
gttgctgctctacgacatcaccaac

SEQ ID NO: 341756 - DNA, 25 bp, Artificial
  Probe
caaagatccaccaaggctcccagtg

SEQ ID NO: 341757 - DNA, 25 bp, Artificial
  Probe
aaattagccaaggagtatgggctgc

SEQ ID NO: 341758 - DNA, 25 bp, Artificial
  Probe
ggctgatgctcttcagccccttggc

SEQ ID NO: 341759 - DNA, 25 bp, Artificial
  Probe
tgctcatgctgttggggaacaaggt

SEQ ID NO: 341760 - DNA, 25 bp, Artificial
  Probe
cagctgtttgggataccataggtga

SEQ ID NO: 341761 - DNA, 25 bp, Artificial
  Probe
agactacaaatgttgtgtgaaaacc

SEQ ID NO: 341762 - DNA, 25 bp, Artificial
  Probe
ccataggtgatggatgccagaatgt

SEQ ID NO: 341763 - DNA, 25 bp, Artificial
  Probe
acaaggttgactctactcaagaacg

SEQ ID NO: 341764 - DNA, 25 bp, Artificial
  Probe
aaggctcccagtgagccgcgcttca

SEQ ID NO: 341765 - DNA, 25 bp, Artificial
  Probe
attgggctgatagaaccaggtcact

SEQ ID NO: 341766 - DNA, 25 bp, Artificial
  Probe
ggaagacgtgcctgctcgtgcgctt

SEQ ID NO: 341767 - DNA, 25 bp, Artificial
  Probe
gataccataggtgatggatgccaga

SEQ ID NO: 341768 - DNA, 25 bp, Artificial
  Probe
tgcttactgcacacggcctgggaag

SEQ ID NO: 341769 - DNA, 25 bp, Artificial
  Probe
ctgccattcatggagaccagcgcca

SEQ ID NO: 341770 - DNA, 25 bp, Artificial
  Probe
atatgcccagcaggacgtggtgctc

SEQ ID NO: 341771 - DNA, 25 bp, Artificial
  Probe
gtgtgaaaacctgtccccattaata

SEQ ID NO: 341772 - DNA, 25 bp, Artificial
  Probe
accaaaggctacaagaatcatgttg

SEQ ID NO: 341773 - DNA, 25 bp, Artificial
  Probe
ccaagagcggcctcaatgtggactt

SEQ ID NO: 341774 - DNA, 25 bp, Artificial
  Probe
gtaggctctgatgtaggaaaccaca

SEQ ID NO: 341775 - DNA, 25 bp, Artificial
  Probe
tttctgcccgggaattcgcggtcac

SEQ ID NO: 341776 - DNA, 25 bp, Artificial
  Probe
gccgaggggtctcctgctgtcgact

SEQ ID NO: 341777 - DNA, 25 bp, Artificial
  Probe
caggctgcatgactatgtgaagagg

SEQ ID NO: 341778 - DNA, 25 bp, Artificial
  Probe
ggccatcacagaaagcatacaaacc

SEQ ID NO: 341779 - DNA, 25 bp, Artificial
  Probe
ttgtgtgaaaacctgtccccattaa

SEQ ID NO: 341780 - DNA, 25 bp, Artificial
  Probe
cccgagcgtggctcgaagcgttcat

SEQ ID NO: 341781 - DNA, 25 bp, Artificial
  Probe
ccgagcgtggctcgaagcgttcatg

SEQ ID NO: 341782 - DNA, 25 bp, Artificial
  Probe
ataagggtacagcatccttagtaac

SEQ ID NO: 341783 - DNA, 25 bp, Artificial
  Probe
acagcatccttagtaacccgagcgt

SEQ ID NO: 341784 - DNA, 25 bp, Artificial
  Probe
tcactctggctaacataagggtaca

SEQ ID NO: 341785 - DNA, 25 bp, Artificial
  Probe
gggtacagcatccttagtaacccga

SEQ ID NO: 341786 - DNA, 25 bp, Artificial
  Probe
tcgaagcgttcatgatttcatccaa

SEQ ID NO: 341787 - DNA, 25 bp, Artificial
  Probe
ctctggctaacataagggtacagca

SEQ ID NO: 341788 - DNA, 25 bp, Artificial
  Probe
aagtgcactatttatactggtaccc

SEQ ID NO: 341789 - DNA, 25 bp, Artificial
  Probe
cataagggtacagcatccttagtaa

SEQ ID NO: 341790 - DNA, 25 bp, Artificial
  Probe
gcatccttagtaacccgagcgtggc

SEQ ID NO: 341791 - DNA, 25 bp, Artificial
  Probe
gctcgaagcgttcatgatttcatcc

SEQ ID NO: 341792 - DNA, 25 bp, Artificial
  Probe
gaagcgttcatgatttcatccaaaa

SEQ ID NO: 341793 - DNA, 25 bp, Artificial
  Probe
gaagtgcactatttatactggtacc

SEQ ID NO: 341794 - DNA, 25 bp, Artificial
  Probe
cccattttcttgctgagatgacatg

SEQ ID NO: 341795 - DNA, 25 bp, Artificial
  Probe
gagcgtggctcgaagcgttcatgat

SEQ ID NO: 341796 - DNA, 25 bp, Artificial
  Probe
ggtcactctggctaacataagggta

SEQ ID NO: 341797 - DNA, 25 bp, Artificial
  Probe
tgcactatttatactggtaccctcg

SEQ ID NO: 341798 - DNA, 25 bp, Artificial
  Probe
atacaaatctgcagccttttgagta

SEQ ID NO: 341799 - DNA, 25 bp, Artificial
  Probe
aactagggtcactctggctaacata

SEQ ID NO: 341800 - DNA, 25 bp, Artificial
  Probe
aaactagggtcactctggctaacat

SEQ ID NO: 341801 - DNA, 25 bp, Artificial
  Probe
tcatacaaatctgcagccttttgag

SEQ ID NO: 341802 - DNA, 25 bp, Artificial
  Probe
ttttcccattttcttgctgagatga

SEQ ID NO: 341803 - DNA, 25 bp, Artificial
  Probe
aatctgcagccttttgagtatcaaa

SEQ ID NO: 341804 - DNA, 25 bp, Artificial
  Probe
tctgcagccttttgagtatcaaagg

SEQ ID NO: 341805 - DNA, 25 bp, Artificial
  Probe
tggctcgaagcgttcatgatttcat

SEQ ID NO: 341806 - DNA, 25 bp, Artificial
  Probe
cagccttttgagtatcaaaggggta

SEQ ID NO: 341807 - DNA, 25 bp, Artificial
  Probe
tttcccattttcttgctgagatgac

SEQ ID NO: 341808 - DNA, 25 bp, Artificial
  Probe
agcgtggctcgaagcgttcatgatt

SEQ ID NO: 341809 - DNA, 25 bp, Artificial
  Probe
agtgcactatttatactggtaccct

SEQ ID NO: 341810 - DNA, 25 bp, Artificial
  Probe
cgaagcgttcatgatttcatccaaa

SEQ ID NO: 341811 - DNA, 25 bp, Artificial
  Probe
gcactatttatactggtaccctcgc

SEQ ID NO: 341812 - DNA, 25 bp, Artificial
  Probe
catacaaatctgcagccttttgagt

SEQ ID NO: 341813 - DNA, 25 bp, Artificial
  Probe
agcatccttagtaacccgagcgtgg

SEQ ID NO: 341814 - DNA, 25 bp, Artificial
  Probe
tacagcatccttagtaacccgagcg

SEQ ID NO: 341815 - DNA, 25 bp, Artificial
  Probe
ccattttcttgctgagatgacatga

SEQ ID NO: 341816 - DNA, 25 bp, Artificial
  Probe
cattttcttgctgagatgacatgaa

SEQ ID NO: 341817 - DNA, 25 bp, Artificial
  Probe
gtaacccgagcgtggctcgaagcgt

SEQ ID NO: 341818 - DNA, 25 bp, Artificial
  Probe
aaatctgcagccttttgagtatcaa

SEQ ID NO: 341819 - DNA, 25 bp, Artificial
  Probe
taagggtacagcatccttagtaacc

SEQ ID NO: 341820 - DNA, 25 bp, Artificial
  Probe
ctagggtcactctggctaacataag

SEQ ID NO: 341821 - DNA, 25 bp, Artificial
  Probe
agggtacagcatccttagtaacccg

SEQ ID NO: 341822 - DNA, 25 bp, Artificial
  Probe
tgcagccttttgagtatcaaagggg

SEQ ID NO: 341823 - DNA, 25 bp, Artificial
  Probe
cactctggctaacataagggtacag

SEQ ID NO: 341824 - DNA, 25 bp, Artificial
  Probe
ggtacagcatccttagtaacccgag

SEQ ID NO: 341825 - DNA, 25 bp, Artificial
  Probe
cttagtaacccgagcgtggctcgaa

SEQ ID NO: 341826 - DNA, 25 bp, Artificial
  Probe
cgataatgtggacctgggtgagctt

SEQ ID NO: 341827 - DNA, 25 bp, Artificial
  Probe
gatatcgagtatgtcaccaacgata

SEQ ID NO: 341828 - DNA, 25 bp, Artificial
  Probe
acgcttaaccctgtttacaatgaag

SEQ ID NO: 341829 - DNA, 25 bp, Artificial
  Probe
agccatagtcttcgatgtccctcct

SEQ ID NO: 341830 - DNA, 25 bp, Artificial
  Probe
ggcaggctgaccatcaccatcatca

SEQ ID NO: 341831 - DNA, 25 bp, Artificial
  Probe
gggagcgtcagatccgtacgtgaaa

SEQ ID NO: 341832 - DNA, 25 bp, Artificial
  Probe
gagcttatgttttcgctctgctatc

SEQ ID NO: 341833 - DNA, 25 bp, Artificial
  Probe
caccaagaggaacacgcttaaccct

SEQ ID NO: 341834 - DNA, 25 bp, Artificial
  Probe
tgtttacaatgaagccatagtcttc

SEQ ID NO: 341835 - DNA, 25 bp, Artificial
  Probe
acctgggtgagcttatgttttcgct

SEQ ID NO: 341836 - DNA, 25 bp, Artificial
  Probe
catcctttggaaggatatcgagtat

SEQ ID NO: 341837 - DNA, 25 bp, Artificial
  Probe
cacactggcactctctgctggagaa

SEQ ID NO: 341838 - DNA, 25 bp, Artificial
  Probe
tgccaagtaggcaacgaggctgagc

SEQ ID NO: 341839 - DNA, 25 bp, Artificial
  Probe
gagcattgatcagatccacttgtcc

SEQ ID NO: 341840 - DNA, 25 bp, Artificial
  Probe
gtcatcggcgtgtgccaagtaggca

SEQ ID NO: 341841 - DNA, 25 bp, Artificial
  Probe
aaccctgtttacaatgaagccatag

SEQ ID NO: 341842 - DNA, 25 bp, Artificial
  Probe
acttcttcgacttggctgacttccc

SEQ ID NO: 341843 - DNA, 25 bp, Artificial
  Probe
ggacctgggtgagcttatgttttcg

SEQ ID NO: 341844 - DNA, 25 bp, Artificial
  Probe
agtgcatcctttggaaggatatcga

SEQ ID NO: 341845 - DNA, 25 bp, Artificial
  Probe
gaggaaaacatccaccaagaggaac

SEQ ID NO: 341846 - DNA, 25 bp, Artificial
  Probe
tcctgagagcattgatcagatccac

SEQ ID NO: 341847 - DNA, 25 bp, Artificial
  Probe
cagggagtgcatcctttggaaggat

SEQ ID NO: 341848 - DNA, 25 bp, Artificial
  Probe
gctgacttccccagggagtgcatcc

SEQ ID NO: 341849 - DNA, 25 bp, Artificial
  Probe
acttggctgacttccccagggagtg

SEQ ID NO: 341850 - DNA, 25 bp, Artificial
  Probe
catcatcaaagcaaggaatttaaag

SEQ ID NO: 341851 - DNA, 25 bp, Artificial
  Probe
attacgggagcgtcagatccgtacg

SEQ ID NO: 341852 - DNA, 25 bp, Artificial
  Probe
ccatgacttgattggtcaagtggtg

SEQ ID NO: 341853 - DNA, 25 bp, Artificial
  Probe
ctatcttccaacagccggcaggctg

SEQ ID NO: 341854 - DNA, 25 bp, Artificial
  Probe
gcgtcagatccgtacgtgaaagtct

SEQ ID NO: 341855 - DNA, 25 bp, Artificial
  Probe
ggctgaccatcaccatcatcaaagc

SEQ ID NO: 341856 - DNA, 25 bp, Artificial
  Probe
gtggtggaccacttcttcgacttgg

SEQ ID NO: 341857 - DNA, 25 bp, Artificial
  Probe
ggaaaacatccaccaagaggaacac

SEQ ID NO: 341858 - DNA, 25 bp, Artificial
  Probe
ccgtgtaggtcacaatgaggtcatc

SEQ ID NO: 341859 - DNA, 25 bp, Artificial
  Probe
tcatggactatgaccgtgtaggtca

SEQ ID NO: 341860 - DNA, 25 bp, Artificial
  Probe
cgtgtgccaagtaggcaacgaggct

SEQ ID NO: 341861 - DNA, 25 bp, Artificial
  Probe
acttccccagggagtgcatcctttg

SEQ ID NO: 341862 - DNA, 25 bp, Artificial
  Probe
gtatgactttgacaggttctctcgc

SEQ ID NO: 341863 - DNA, 25 bp, Artificial
  Probe
cttcgatgtccctcctgagagcatt

SEQ ID NO: 341864 - DNA, 25 bp, Artificial
  Probe
gaccatcaccatcatcaaagcaagg

SEQ ID NO: 341865 - DNA, 25 bp, Artificial
  Probe
ggtgagcttatgttttcgctctgct

SEQ ID NO: 341866 - DNA, 25 bp, Artificial
  Probe
ctcgccatgacttgattggtcaagt

SEQ ID NO: 341867 - DNA, 25 bp, Artificial
  Probe
gcttaaccctgtttacaatgaagcc

SEQ ID NO: 341868 - DNA, 25 bp, Artificial
  Probe
aacatccaccaagaggaacacgctt

SEQ ID NO: 341869 - DNA, 25 bp, Artificial
  Probe
cgtgtaggtcacaatgaggtcatcg

SEQ ID NO: 341870 - DNA, 25 bp, Artificial
  Probe
cgtgaaagtctcactgatgtgtgat

SEQ ID NO: 341871 - DNA, 25 bp, Artificial
  Probe
actatgaccgtgtaggtcacaatga

SEQ ID NO: 341872 - DNA, 25 bp, Artificial
  Probe
aattctctaatacaaggctgagcac

SEQ ID NO: 341873 - DNA, 25 bp, Artificial
  Probe
acacctatggagttgtcccagcaca

SEQ ID NO: 341874 - DNA, 25 bp, Artificial
  Probe
attctctaatacaaggctgagcacc

SEQ ID NO: 341875 - DNA, 25 bp, Artificial
  Probe
gtctgcacttacacctatggagttg

SEQ ID NO: 341876 - DNA, 25 bp, Artificial
  Probe
tctgcacttacacctatggagttgt

SEQ ID NO: 341877 - DNA, 25 bp, Artificial
  Probe
cacttacacctatggagttgtccca

SEQ ID NO: 341878 - DNA, 25 bp, Artificial
  Probe
aaattctctaatacaaggctgagca

SEQ ID NO: 341879 - DNA, 25 bp, Artificial
  Probe
caaattctctaatacaaggctgagc

SEQ ID NO: 341880 - DNA, 25 bp, Artificial
  Probe
ctgcacttacacctatggagttgtc

SEQ ID NO: 341881 - DNA, 25 bp, Artificial
  Probe
tggagttgtcccagcacacccagaa

SEQ ID NO: 341882 - DNA, 25 bp, Artificial
  Probe
acctatggagttgtcccagcacacc

SEQ ID NO: 341883 - DNA, 25 bp, Artificial
  Probe
gcacacccagaatgcatagagggac

SEQ ID NO: 341884 - DNA, 25 bp, Artificial
  Probe
gacaaattctctaatacaaggctga

SEQ ID NO: 341885 - DNA, 25 bp, Artificial
  Probe
tacacctatggagttgtcccagcac

SEQ ID NO: 341886 - DNA, 25 bp, Artificial
  Probe
cccagcacacccagaatgcatagag

SEQ ID NO: 341887 - DNA, 25 bp, Artificial
  Probe
gggacaaattctctaatacaaggct

SEQ ID NO: 341888 - DNA, 25 bp, Artificial
  Probe
cacacccagaatgcatagagggacg

SEQ ID NO: 341889 - DNA, 25 bp, Artificial
  Probe
ttacacctatggagttgtcccagca

SEQ ID NO: 341890 - DNA, 25 bp, Artificial
  Probe
acacccagaatgcatagagggacgc

SEQ ID NO: 341891 - DNA, 25 bp, Artificial
  Probe
ggacaaattctctaatacaaggctg

SEQ ID NO: 341892 - DNA, 25 bp, Artificial
  Probe
cacctatggagttgtcccagcacac

SEQ ID NO: 341893 - DNA, 25 bp, Artificial
  Probe
ttctctaatacaaggctgagcacca

SEQ ID NO: 341894 - DNA, 25 bp, Artificial
  Probe
tgcacttacacctatggagttgtcc

SEQ ID NO: 341895 - DNA, 25 bp, Artificial
  Probe
agttgtcccagcacacccagaatgc

SEQ ID NO: 341896 - DNA, 25 bp, Artificial
  Probe
agtctgcacttacacctatggagtt

SEQ ID NO: 341897 - DNA, 25 bp, Artificial
  Probe
gagttgtcccagcacacccagaatg

SEQ ID NO: 341898 - DNA, 25 bp, Artificial
  Probe
agcacacccagaatgcatagaggga

SEQ ID NO: 341899 - DNA, 25 bp, Artificial
  Probe
acccagaatgcatagagggacgctg

SEQ ID NO: 341900 - DNA, 25 bp, Artificial
  Probe
gcacttacacctatggagttgtccc

SEQ ID NO: 341901 - DNA, 25 bp, Artificial
  Probe
ggagttgtcccagcacacccagaat

SEQ ID NO: 341902 - DNA, 25 bp, Artificial
  Probe
cagcacacccagaatgcatagaggg

SEQ ID NO: 341903 - DNA, 25 bp, Artificial
  Probe
gttgtcccagcacacccagaatgca

SEQ ID NO: 341904 - DNA, 25 bp, Artificial
  Probe
ccagcacacccagaatgcatagagg

SEQ ID NO: 341905 - DNA, 25 bp, Artificial
  Probe
cttacacctatggagttgtcccagc

SEQ ID NO: 341906 - DNA, 25 bp, Artificial
  Probe
cacccagaatgcatagagggacgct

SEQ ID NO: 341907 - DNA, 25 bp, Artificial
  Probe
acttacacctatggagttgtcccag

SEQ ID NO: 341908 - DNA, 25 bp, Artificial
  Probe
ttcagagaagcgagtccagagtccg

SEQ ID NO: 341909 - DNA, 25 bp, Artificial
  Probe
aggtgggacctgttgaactcatggc

SEQ ID NO: 341910 - DNA, 25 bp, Artificial
  Probe
agtagcccagggtcttcttcactgt

SEQ ID NO: 341911 - DNA, 25 bp, Artificial
  Probe
tcagccattaaagtgtagctaacga

SEQ ID NO: 341912 - DNA, 25 bp, Artificial
  Probe
cttctggaatttcagagaagcgagt

SEQ ID NO: 341913 - DNA, 25 bp, Artificial
  Probe
caaccgtctgtaagtccagttctcg

SEQ ID NO: 341914 - DNA, 25 bp, Artificial
  Probe
gctactagccgctgctgctggagca

SEQ ID NO: 341915 - DNA, 25 bp, Artificial
  Probe
ctttttctggagagttcagagcaag

SEQ ID NO: 341916 - DNA, 25 bp, Artificial
  Probe
tttttctgactctgcatgctcctgc

SEQ ID NO: 341917 - DNA, 25 bp, Artificial
  Probe
agaatagtcattgctccttaccagc

SEQ ID NO: 341918 - DNA, 25 bp, Artificial
  Probe
gagtcttctggaatttcagagaagc

SEQ ID NO: 341919 - DNA, 25 bp, Artificial
  Probe
ccttaccagccatcttctgggaggt

SEQ ID NO: 341920 - DNA, 25 bp, Artificial
  Probe
actaaatgtccctgcctagcctgtg

SEQ ID NO: 341921 - DNA, 25 bp, Artificial
  Probe
ccagttctcgggatcggatgttttt

SEQ ID NO: 341922 - DNA, 25 bp, Artificial
  Probe
aacacatggctataaaagggctttc

SEQ ID NO: 341923 - DNA, 25 bp, Artificial
  Probe
tggtgctgtggacaaagtagcccag

SEQ ID NO: 341924 - DNA, 25 bp, Artificial
  Probe
aatatctgctcaggtctagaaacca

SEQ ID NO: 341925 - DNA, 25 bp, Artificial
  Probe
agcccgcagttccttccttcagagg

SEQ ID NO: 341926 - DNA, 25 bp, Artificial
  Probe
ctgcctagcctgtggctctgtccag

SEQ ID NO: 341927 - DNA, 25 bp, Artificial
  Probe
cgcatcctcgggataccgaagtttg

SEQ ID NO: 341928 - DNA, 25 bp, Artificial
  Probe
ctgctggagcaatgctaacatgcac

SEQ ID NO: 341929 - DNA, 25 bp, Artificial
  Probe
tacctgtggtacacagatgtatatg

SEQ ID NO: 341930 - DNA, 25 bp, Artificial
  Probe
tctgcttgggttgacatctgtgtgg

SEQ ID NO: 341931 - DNA, 25 bp, Artificial
  Probe
agtctgtatctgcttgggttgacat

SEQ ID NO: 341932 - DNA, 25 bp, Artificial
  Probe
tacatttcagccattaaagtgtagc

SEQ ID NO: 341933 - DNA, 25 bp, Artificial
  Probe
agcaagagagtttccaccttcacaa

SEQ ID NO: 341934 - DNA, 25 bp, Artificial
  Probe
gcaatgctaacatgcacccagtcag

SEQ ID NO: 341935 - DNA, 25 bp, Artificial
  Probe
gaatagtcattgctccttaccagcc

SEQ ID NO: 341936 - DNA, 25 bp, Artificial
  Probe
tacacagatgtatatgcaggtacat

SEQ ID NO: 341937 - DNA, 25 bp, Artificial
  Probe
tctatgctacaatgccgggcagtga

SEQ ID NO: 341938 - DNA, 25 bp, Artificial
  Probe
agaggccaggtctgttcaccccagc

SEQ ID NO: 341939 - DNA, 25 bp, Artificial
  Probe
tcacaagtgacaaacgatgttggtg

SEQ ID NO: 341940 - DNA, 25 bp, Artificial
  Probe
acccacacaacctgctggaggctgg

SEQ ID NO: 341941 - DNA, 25 bp, Artificial
  Probe
tgtggacaaagtagcccagggtctt

SEQ ID NO: 341942 - DNA, 25 bp, Artificial
  Probe
gctcatgaatgtctgtccctacctc

SEQ ID NO: 341943 - DNA, 25 bp, Artificial
  Probe
tggctttttctggagagttcagagc

SEQ ID NO: 341944 - DNA, 25 bp, Artificial
  Probe
gcctcatacaatctgctcatgaatg

SEQ ID NO: 341945 - DNA, 25 bp, Artificial
  Probe
tgccttgcagcctcatacaatctgc

SEQ ID NO: 341946 - DNA, 25 bp, Artificial
  Probe
accagagctactgaaaatagatgtc

SEQ ID NO: 341947 - DNA, 25 bp, Artificial
  Probe
ttgctccttaccagccatcttctgg

SEQ ID NO: 341948 - DNA, 25 bp, Artificial
  Probe
caatgctaacatgcacccagtcagc

SEQ ID NO: 341949 - DNA, 25 bp, Artificial
  Probe
ctcatggctactagccgctgctgct

SEQ ID NO: 341950 - DNA, 25 bp, Artificial
  Probe
gttgagactaaatgtccctgcctag

SEQ ID NO: 341951 - DNA, 25 bp, Artificial
  Probe
ccgaagtttgcctgctgccatggag

SEQ ID NO: 341952 - DNA, 25 bp, Artificial
  Probe
ctgttctcagtgaggtggttgagac

SEQ ID NO: 341953 - DNA, 25 bp, Artificial
  Probe
tttccagtgtagaccgtttattgag

SEQ ID NO: 341954 - DNA, 25 bp, Artificial
  Probe
ctacagacttgaactcctaagtgcc

SEQ ID NO: 341955 - DNA, 25 bp, Artificial
  Probe
tacagacttgaactcctaagtgcca

SEQ ID NO: 341956 - DNA, 25 bp, Artificial
  Probe
gaatttaggatccaccactggtggc

SEQ ID NO: 341957 - DNA, 25 bp, Artificial
  Probe
gggtccttcctacaataaagagaag

SEQ ID NO: 341958 - DNA, 25 bp, Artificial
  Probe
ccactggtggccaggaacacagcag

SEQ ID NO: 341959 - DNA, 25 bp, Artificial
  Probe
agtttgatatactgggtccttccta

SEQ ID NO: 341960 - DNA, 25 bp, Artificial
  Probe
actggtggccaggaacacagcagag

SEQ ID NO: 341961 - DNA, 25 bp, Artificial
  Probe
ctgggtccttcctacaataaagaga

SEQ ID NO: 341962 - DNA, 25 bp, Artificial
  Probe
cactggtggccaggaacacagcaga

SEQ ID NO: 341963 - DNA, 25 bp, Artificial
  Probe
gccaggaacacagcagagacaataa

SEQ ID NO: 341964 - DNA, 25 bp, Artificial
  Probe
tgatatactgggtccttcctacaat

SEQ ID NO: 341965 - DNA, 25 bp, Artificial
  Probe
acctacagacttgaactcctaagtg

SEQ ID NO: 341966 - DNA, 25 bp, Artificial
  Probe
ttgaactcctaagtgccaccagaat

SEQ ID NO: 341967 - DNA, 25 bp, Artificial
  Probe
gtgccaccagaatatacaaaaaggg

SEQ ID NO: 341968 - DNA, 25 bp, Artificial
  Probe
tgggtccttcctacaataaagagaa

SEQ ID NO: 341969 - DNA, 25 bp, Artificial
  Probe
agacagtttgatatactgggtcctt

SEQ ID NO: 341970 - DNA, 25 bp, Artificial
  Probe
aggatccaccactggtggccaggaa

SEQ ID NO: 341971 - DNA, 25 bp, Artificial
  Probe
ttttagaagcacctacagacttgaa

SEQ ID NO: 341972 - DNA, 25 bp, Artificial
  Probe
gatatactgggtccttcctacaata

SEQ ID NO: 341973 - DNA, 25 bp, Artificial
  Probe
tactgggtccttcctacaataaaga

SEQ ID NO: 341974 - DNA, 25 bp, Artificial
  Probe
cctacagacttgaactcctaagtgc

SEQ ID NO: 341975 - DNA, 25 bp, Artificial
  Probe
agattttagaagcacctacagactt

SEQ ID NO: 341976 - DNA, 25 bp, Artificial
  Probe
ggccaggaacacagcagagacaata

SEQ ID NO: 341977 - DNA, 25 bp, Artificial
  Probe
tggccaggaacacagcagagacaat

SEQ ID NO: 341978 - DNA, 25 bp, Artificial
  Probe
agacttgaactcctaagtgccacca

SEQ ID NO: 341979 - DNA, 25 bp, Artificial
  Probe
gaagcacctacagacttgaactcct

SEQ ID NO: 341980 - DNA, 25 bp, Artificial
  Probe
tgccaccagaatatacaaaaaggga

SEQ ID NO: 341981 - DNA, 25 bp, Artificial
  Probe
tagaagcacctacagacttgaactc

SEQ ID NO: 341982 - DNA, 25 bp, Artificial
  Probe
gcacctacagacttgaactcctaag

SEQ ID NO: 341983 - DNA, 25 bp, Artificial
  Probe
gacttgaactcctaagtgccaccag

SEQ ID NO: 341984 - DNA, 25 bp, Artificial
  Probe
agaagcacctacagacttgaactcc

SEQ ID NO: 341985 - DNA, 25 bp, Artificial
  Probe
aatttaggatccaccactggtggcc

SEQ ID NO: 341986 - DNA, 25 bp, Artificial
  Probe
tgaactcctaagtgccaccagaata

SEQ ID NO: 341987 - DNA, 25 bp, Artificial
  Probe
atactgggtccttcctacaataaag

SEQ ID NO: 341988 - DNA, 25 bp, Artificial
  Probe
tttagaagcacctacagacttgaac

SEQ ID NO: 341989 - DNA, 25 bp, Artificial
  Probe
gattttagaagcacctacagacttg

SEQ ID NO: 341990 - DNA, 25 bp, Artificial
  Probe
gtccttcctacaataaagagaagat

SEQ ID NO: 341991 - DNA, 25 bp, Artificial
  Probe
agtgccaccagaatatacaaaaagg

SEQ ID NO: 341992 - DNA, 25 bp, Artificial
  Probe
cagacttgaactcctaagtgccacc

SEQ ID NO: 341993 - DNA, 25 bp, Artificial
  Probe
atttaggatccaccactggtggcca

SEQ ID NO: 341994 - DNA, 25 bp, Artificial
  Probe
ggtccttcctacaataaagagaaga

SEQ ID NO: 341995 - DNA, 25 bp, Artificial
  Probe
ggaatttaggatccaccactggtgg

SEQ ID NO: 341996 - DNA, 25 bp, Artificial
  Probe
cttgaactcctaagtgccaccagaa

SEQ ID NO: 341997 - DNA, 25 bp, Artificial
  Probe
actgggtccttcctacaataaagag

SEQ ID NO: 341998 - DNA, 25 bp, Artificial
  Probe
attttagaagcacctacagacttga

SEQ ID NO: 341999 - DNA, 25 bp, Artificial
  Probe
ttagaagcacctacagacttgaact

SEQ ID NO: 342000 - DNA, 25 bp, Artificial
  Probe
atccattcctggttcactatgaaga

SEQ ID NO: 342001 - DNA, 25 bp, Artificial
  Probe
agccaagggtcctcacactacacag

SEQ ID NO: 342002 - DNA, 25 bp, Artificial
  Probe
tcagagagagctgttggctgtagct

SEQ ID NO: 342003 - DNA, 25 bp, Artificial
  Probe
tctctattgggtcctcctgtccact

SEQ ID NO: 342004 - DNA, 25 bp, Artificial
  Probe
tccattcctggttcactatgaagag

SEQ ID NO: 342005 - DNA, 25 bp, Artificial
  Probe
agatggctccttagccaagggtcct

SEQ ID NO: 342006 - DNA, 25 bp, Artificial
  Probe
ctggttcactatgaagagttggtgc

SEQ ID NO: 342007 - DNA, 25 bp, Artificial
  Probe
aaggacagggccacatctccaggtg

SEQ ID NO: 342008 - DNA, 25 bp, Artificial
  Probe
ttctctattgggtcctcctgtccac

SEQ ID NO: 342009 - DNA, 25 bp, Artificial
  Probe
catccattcctggttcactatgaag

SEQ ID NO: 342010 - DNA, 25 bp, Artificial
  Probe
tccctgttccttgtcagacaaggac

SEQ ID NO: 342011 - DNA, 25 bp, Artificial
  Probe
ttcctggttcactatgaagagttgg

SEQ ID NO: 342012 - DNA, 25 bp, Artificial
  Probe
gagatggctccttagccaagggtcc

SEQ ID NO: 342013 - DNA, 25 bp, Artificial
  Probe
ggtccctgttccttgtcagacaagg

SEQ ID NO: 342014 - DNA, 25 bp, Artificial
  Probe
ctctattgggtcctcctgtccactt

SEQ ID NO: 342015 - DNA, 25 bp, Artificial
  Probe
cttgtcagacaaggacagggccaca

SEQ ID NO: 342016 - DNA, 25 bp, Artificial
  Probe
ggttcactatgaagagttggtgctc

SEQ ID NO: 342017 - DNA, 25 bp, Artificial
  Probe
tccttgtcagacaaggacagggcca

SEQ ID NO: 342018 - DNA, 25 bp, Artificial
  Probe
gtttgagaaagcagtcctcggtgta

SEQ ID NO: 342019 - DNA, 25 bp, Artificial
  Probe
ggctccttagccaagggtcctcaca

SEQ ID NO: 342020 - DNA, 25 bp, Artificial
  Probe
atcagagagagctgttggctgtagc

SEQ ID NO: 342021 - DNA, 25 bp, Artificial
  Probe
cttagccaagggtcctcacactaca

SEQ ID NO: 342022 - DNA, 25 bp, Artificial
  Probe
agggccacatctccaggtgctaact

SEQ ID NO: 342023 - DNA, 25 bp, Artificial
  Probe
tcagacaaggacagggccacatctc

SEQ ID NO: 342024 - DNA, 25 bp, Artificial
  Probe
catctccaggtgctaactagagatc

SEQ ID NO: 342025 - DNA, 25 bp, Artificial
  Probe
gtgacccatccattcctggttcact

SEQ ID NO: 342026 - DNA, 25 bp, Artificial
  Probe
tgtcagacaaggacagggccacatc

SEQ ID NO: 342027 - DNA, 25 bp, Artificial
  Probe
gtgctaactagagatcagagagagc

SEQ ID NO: 342028 - DNA, 25 bp, Artificial
  Probe
catctaggtccctgttccttgtcag

SEQ ID NO: 342029 - DNA, 25 bp, Artificial
  Probe
tccaggtgctaactagagatcagag

SEQ ID NO: 342030 - DNA, 25 bp, Artificial
  Probe
tctaggtccctgttccttgtcagac

SEQ ID NO: 342031 - DNA, 25 bp, Artificial
  Probe
ctccttctctattgggtcctcctgt

SEQ ID NO: 342032 - DNA, 25 bp, Artificial
  Probe
cctcttttggggtacatggtgtttg

SEQ ID NO: 342033 - DNA, 25 bp, Artificial
  Probe
atggggtgacccatccattcctggt

SEQ ID NO: 342034 - DNA, 25 bp, Artificial
  Probe
gagaaagcagtcctcggtgtaggat

SEQ ID NO: 342035 - DNA, 25 bp, Artificial
  Probe
acagcactcatctaggtccctgttc

SEQ ID NO: 342036 - DNA, 25 bp, Artificial
  Probe
acacagcactcatctaggtccctgt

SEQ ID NO: 342037 - DNA, 25 bp, Artificial
  Probe
ttccttgtcagacaaggacagggcc

SEQ ID NO: 342038 - DNA, 25 bp, Artificial
  Probe
ggacagggccacatctccaggtgct

SEQ ID NO: 342039 - DNA, 25 bp, Artificial
  Probe
cactcatctaggtccctgttccttg

SEQ ID NO: 342040 - DNA, 25 bp, Artificial
  Probe
agcactcatctaggtccctgttcct

SEQ ID NO: 342041 - DNA, 25 bp, Artificial
  Probe
aagggtcctcacactacacagcact

SEQ ID NO: 342042 - DNA, 25 bp, Artificial
  Probe
ggtgacccatccattcctggttcac

SEQ ID NO: 342043 - DNA, 25 bp, Artificial
  Probe
tcactatgaagagttggtgctctag

SEQ ID NO: 342044 - DNA, 25 bp, Artificial
  Probe
tacacagcactcatctaggtccctg

SEQ ID NO: 342045 - DNA, 25 bp, Artificial
  Probe
cagggccacatctccaggtgctaac

SEQ ID NO: 342046 - DNA, 25 bp, Artificial
  Probe
ttctctgctctgctgacaagcgcac

SEQ ID NO: 342047 - DNA, 25 bp, Artificial
  Probe
cctcccagttgctcacactgtgttt

SEQ ID NO: 342048 - DNA, 25 bp, Artificial
  Probe
ggcaaattccacgaaaattcattgc

SEQ ID NO: 342049 - DNA, 25 bp, Artificial
  Probe
ggcttgagccccagaacattcctgc

SEQ ID NO: 342050 - DNA, 25 bp, Artificial
  Probe
cttctcagcgccatatggagctgac

SEQ ID NO: 342051 - DNA, 25 bp, Artificial
  Probe
gcaccatggcgctctggaacgaagt

SEQ ID NO: 342052 - DNA, 25 bp, Artificial
  Probe
cactgtgtttggtgacaattattct

SEQ ID NO: 342053 - DNA, 25 bp, Artificial
  Probe
atgacaaagtcatgaactgacaaat

SEQ ID NO: 342054 - DNA, 25 bp, Artificial
  Probe
cgactgcctgctgcttctcctatgg

SEQ ID NO: 342055 - DNA, 25 bp, Artificial
  Probe
agatctgcgctgaccccaaagagac

SEQ ID NO: 342056 - DNA, 25 bp, Artificial
  Probe
cttctctgctctgctgacaagcgca

SEQ ID NO: 342057 - DNA, 25 bp, Artificial
  Probe
acctgctcagcaccatgaaggtctc

SEQ ID NO: 342058 - DNA, 25 bp, Artificial
  Probe
caagaatacatcactgagctggaac

SEQ ID NO: 342059 - DNA, 25 bp, Artificial
  Probe
agtcatgaactgacaaatgtacaat

SEQ ID NO: 342060 - DNA, 25 bp, Artificial
  Probe
gcagcgagtaccagtcccttctctg

SEQ ID NO: 342061 - DNA, 25 bp, Artificial
  Probe
cgaagtcttctcagcgccatatgga

SEQ ID NO: 342062 - DNA, 25 bp, Artificial
  Probe
aattcattgctgactattttgagac

SEQ ID NO: 342063 - DNA, 25 bp, Artificial
  Probe
cttctcctatggacggcaaattcca

SEQ ID NO: 342064 - DNA, 25 bp, Artificial
  Probe
ccttgctgttcttctctgcaccatg

SEQ ID NO: 342065 - DNA, 25 bp, Artificial
  Probe
ctctgttacctgctcagcaccatga

SEQ ID NO: 342066 - DNA, 25 bp, Artificial
  Probe
gaggcagcaaggaacccccaaacct

SEQ ID NO: 342067 - DNA, 25 bp, Artificial
  Probe
acctgggtccaagaatacatcactg

SEQ ID NO: 342068 - DNA, 25 bp, Artificial
  Probe
agtagccacatccagggactcttca

SEQ ID NO: 342069 - DNA, 25 bp, Artificial
  Probe
ttctctgcaccatggcgctctggaa

SEQ ID NO: 342070 - DNA, 25 bp, Artificial
  Probe
cccaaagagacctgggtccaagaat

SEQ ID NO: 342071 - DNA, 25 bp, Artificial
  Probe
ccacatccagggactcttcacttga

SEQ ID NO: 342072 - DNA, 25 bp, Artificial
  Probe
tgaccaagagaaaccggcagatctg

SEQ ID NO: 342073 - DNA, 25 bp, Artificial
  Probe
gtacaatggatgctttgtctatacc

SEQ ID NO: 342074 - DNA, 25 bp, Artificial
  Probe
gcagatctgcgctgaccccaaagag

SEQ ID NO: 342075 - DNA, 25 bp, Artificial
  Probe
aactgacaaatgtacaatggatgct

SEQ ID NO: 342076 - DNA, 25 bp, Artificial
  Probe
agtcccttctctgctctgctgacaa

SEQ ID NO: 342077 - DNA, 25 bp, Artificial
  Probe
tcccagccgggtgtcattttcctga

SEQ ID NO: 342078 - DNA, 25 bp, Artificial
  Probe
ctgaaagacctcagggcacattcct

SEQ ID NO: 342079 - DNA, 25 bp, Artificial
  Probe
cagggactcttcacttgaattttta

SEQ ID NO: 342080 - DNA, 25 bp, Artificial
  Probe
tgcctgagattagaggcagcaagga

SEQ ID NO: 342081 - DNA, 25 bp, Artificial
  Probe
ctgactattttgagaccagcagcct

SEQ ID NO: 342082 - DNA, 25 bp, Artificial
  Probe
aatgcctgagattagaggcagcaag

SEQ ID NO: 342083 - DNA, 25 bp, Artificial
  Probe
ttgtagctatttattctgaaagacc

SEQ ID NO: 342084 - DNA, 25 bp, Artificial
  Probe
ctctggaacgaagtcttctcagcgc

SEQ ID NO: 342085 - DNA, 25 bp, Artificial
  Probe
tagagcaggggcttgagccccagaa

SEQ ID NO: 342086 - DNA, 25 bp, Artificial
  Probe
cctatggacggcaaattccacgaaa

SEQ ID NO: 342087 - DNA, 25 bp, Artificial
  Probe
gagcaggggcttgagccccagaaca

SEQ ID NO: 342088 - DNA, 25 bp, Artificial
  Probe
gaaaccggcagatctgcgctgaccc

SEQ ID NO: 342089 - DNA, 25 bp, Artificial
  Probe
tatggagctgacaccccgactgcct

SEQ ID NO: 342090 - DNA, 25 bp, Artificial
  Probe
ccctcctataagctgtttgctgcca

SEQ ID NO: 342091 - DNA, 25 bp, Artificial
  Probe
aagtcatgaactgacaaatgtacaa

SEQ ID NO: 342092 - DNA, 25 bp, Artificial
  Probe
attttaatctgttgttagtgttact

SEQ ID NO: 342093 - DNA, 25 bp, Artificial
  Probe
taagtaacactaacaacaaattgag

SEQ ID NO: 342094 - DNA, 25 bp, Artificial
  Probe
taacaacaaattgagcattgctatt

SEQ ID NO: 342095 - DNA, 25 bp, Artificial
  Probe
taattttaatctgttgttagtgtta

SEQ ID NO: 342096 - DNA, 25 bp, Artificial
  Probe
ttttaatctgttgttagtgttactt

SEQ ID NO: 342097 - DNA, 25 bp, Artificial
  Probe
attgagcattgctattaattttaat

SEQ ID NO: 342098 - DNA, 25 bp, Artificial
  Probe
ttaagtaacactaacaacaaattga

SEQ ID NO: 342099 - DNA, 25 bp, Artificial
  Probe
actaacaacaaattgagcattgcta

SEQ ID NO: 342100 - DNA, 25 bp, Artificial
  Probe
taacactaacaacaaattgagcatt

SEQ ID NO: 342101 - DNA, 25 bp, Artificial
  Probe
attaattttaatctgttgttagtgt

SEQ ID NO: 342102 - DNA, 25 bp, Artificial
  Probe
ttaattttaatctgttgttagtgtt

SEQ ID NO: 342103 - DNA, 25 bp, Artificial
  Probe
aacactaacaacaaattgagcattg

SEQ ID NO: 342104 - DNA, 25 bp, Artificial
  Probe
aagtaacactaacaacaaattgagc

SEQ ID NO: 342105 - DNA, 25 bp, Artificial
  Probe
taatctgttgttagtgttacttaaa

SEQ ID NO: 342106 - DNA, 25 bp, Artificial
  Probe
ctaacaacaaattgagcattgctat

SEQ ID NO: 342107 - DNA, 25 bp, Artificial
  Probe
ctattaattttaatctgttgttagt

SEQ ID NO: 342108 - DNA, 25 bp, Artificial
  Probe
agtaacactaacaacaaattgagca

SEQ ID NO: 342109 - DNA, 25 bp, Artificial
  Probe
cactaacaacaaattgagcattgct

SEQ ID NO: 342110 - DNA, 25 bp, Artificial
  Probe
aattgagcattgctattaattttaa

SEQ ID NO: 342111 - DNA, 25 bp, Artificial
  Probe
gtaacactaacaacaaattgagcat

SEQ ID NO: 342112 - DNA, 25 bp, Artificial
  Probe
aaattgagcattgctattaatttta

SEQ ID NO: 342113 - DNA, 25 bp, Artificial
  Probe
tattaattttaatctgttgttagtg

SEQ ID NO: 342114 - DNA, 25 bp, Artificial
  Probe
tttaatctgttgttagtgttactta

SEQ ID NO: 342115 - DNA, 25 bp, Artificial
  Probe
acactaacaacaaattgagcattgc

SEQ ID NO: 342116 - DNA, 25 bp, Artificial
  Probe
ttaatctgttgttagtgttacttaa

SEQ ID NO: 342117 - DNA, 25 bp, Artificial
  Probe
caaattgagcattgctattaatttt

SEQ ID NO: 342118 - DNA, 25 bp, Artificial
  Probe
tgctattaattttaatctgttgtta

SEQ ID NO: 342119 - DNA, 25 bp, Artificial
  Probe
acaacaaattgagcattgctattaa

SEQ ID NO: 342120 - DNA, 25 bp, Artificial
  Probe
aacaaattgagcattgctattaatt

SEQ ID NO: 342121 - DNA, 25 bp, Artificial
  Probe
tgcagttcgagtctcaggtgctcac

SEQ ID NO: 342122 - DNA, 25 bp, Artificial
  Probe
gatcacggctctactgaatgtctcc

SEQ ID NO: 342123 - DNA, 25 bp, Artificial
  Probe
agtgcatcccggtagaagataacca

SEQ ID NO: 342124 - DNA, 25 bp, Artificial
  Probe
ccccaatcactttgagggacattac

SEQ ID NO: 342125 - DNA, 25 bp, Artificial
  Probe
gaatgtctcctcagactgccccaat

SEQ ID NO: 342126 - DNA, 25 bp, Artificial
  Probe
gcagttcgtcttcagcttccccgtg

SEQ ID NO: 342127 - DNA, 25 bp, Artificial
  Probe
ggacatgcttgatgccctggggatc

SEQ ID NO: 342128 - DNA, 25 bp, Artificial
  Probe
agttcgtcaagcagcgccgtagcat

SEQ ID NO: 342129 - DNA, 25 bp, Artificial
  Probe
cagttgctgcagttcgagtctcagg

SEQ ID NO: 342130 - DNA, 25 bp, Artificial
  Probe
agactgccccaatcactttgaggga

SEQ ID NO: 342131 - DNA, 25 bp, Artificial
  Probe
cccgcagggacatgcttgatgccct

SEQ ID NO: 342132 - DNA, 25 bp, Artificial
  Probe
tccgtgggtgtgcacgcggctccca

SEQ ID NO: 342133 - DNA, 25 bp, Artificial
  Probe
cgagtgctggttcactgccaggccg

SEQ ID NO: 342134 - DNA, 25 bp, Artificial
  Probe
caagcagcgccgtagcatcatctcg

SEQ ID NO: 342135 - DNA, 25 bp, Artificial
  Probe
tgtgcacgcggctcccagtaacctg

SEQ ID NO: 342136 - DNA, 25 bp, Artificial
  Probe
tgcatcccggtagaagataaccaca

SEQ ID NO: 342137 - DNA, 25 bp, Artificial
  Probe
tcagactgccccaatcactttgagg

SEQ ID NO: 342138 - DNA, 25 bp, Artificial
  Probe
ccagttgctgcagttcgagtctcag

SEQ ID NO: 342139 - DNA, 25 bp, Artificial
  Probe
ggcctacctgatgatgaagaaacgg

SEQ ID NO: 342140 - DNA, 25 bp, Artificial
  Probe
tccccgtgtccgtgggtgtgcacgc

SEQ ID NO: 342141 - DNA, 25 bp, Artificial
  Probe
gatgccctggggatcacggctctac

SEQ ID NO: 342142 - DNA, 25 bp, Artificial
  Probe
tcgaatacatagacgcagtgaagga

SEQ ID NO: 342143 - DNA, 25 bp, Artificial
  Probe
ctggttcatggaagccatcgaatac

SEQ ID NO: 342144 - DNA, 25 bp, Artificial
  Probe
tgaatgtctcctcagactgccccaa

SEQ ID NO: 342145 - DNA, 25 bp, Artificial
  Probe
tctgcctggcctacctgatgatgaa

SEQ ID NO: 342146 - DNA, 25 bp, Artificial
  Probe
atacatagacgcagtgaaggactgc

SEQ ID NO: 342147 - DNA, 25 bp, Artificial
  Probe
cagctcctggttcatggaagccatc

SEQ ID NO: 342148 - DNA, 25 bp, Artificial
  Probe
cctacctgatgatgaagaaacgggt

SEQ ID NO: 342149 - DNA, 25 bp, Artificial
  Probe
tcgagtctcaggtgctcaccacgtc

SEQ ID NO: 342150 - DNA, 25 bp, Artificial
  Probe
atagacgcagtgaaggactgccgag

SEQ ID NO: 342151 - DNA, 25 bp, Artificial
  Probe
agtctcaggtgctcaccacgtcctg

SEQ ID NO: 342152 - DNA, 25 bp, Artificial
  Probe
cagcttccccgtgtccgtgggtgtg

SEQ ID NO: 342153 - DNA, 25 bp, Artificial
  Probe
tactgaatgtctcctcagactgccc

SEQ ID NO: 342154 - DNA, 25 bp, Artificial
  Probe
gagttcgtcaagcagcgccgtagca

SEQ ID NO: 342155 - DNA, 25 bp, Artificial
  Probe
gcgagtgctggttcactgccaggcc

SEQ ID NO: 342156 - DNA, 25 bp, Artificial
  Probe
agcttccccgtgtccgtgggtgtgc

SEQ ID NO: 342157 - DNA, 25 bp, Artificial
  Probe
ggaagccatcgaatacatagacgca

SEQ ID NO: 342158 - DNA, 25 bp, Artificial
  Probe
gctttcgagttcgtcaagcagcgcc

SEQ ID NO: 342159 - DNA, 25 bp, Artificial
  Probe
agttcgtcttcagcttccccgtgtc

SEQ ID NO: 342160 - DNA, 25 bp, Artificial
  Probe
ttcatggaagccatcgaatacatag

SEQ ID NO: 342161 - DNA, 25 bp, Artificial
  Probe
aagcagcgccgtagcatcatctcgc

SEQ ID NO: 342162 - DNA, 25 bp, Artificial
  Probe
gctgcagttcgagtctcaggtgctc

SEQ ID NO: 342163 - DNA, 25 bp, Artificial
  Probe
gagtctcaggtgctcaccacgtcct

SEQ ID NO: 342164 - DNA, 25 bp, Artificial
  Probe
gccctggggatcacggctctactga

SEQ ID NO: 342165 - DNA, 25 bp, Artificial
  Probe
tttcgagttcgtcaagcagcgccgt

SEQ ID NO: 342166 - DNA, 25 bp, Artificial
  Probe
ggggatcacggctctactgaatgtc

SEQ ID NO: 342167 - DNA, 25 bp, Artificial
  Probe
agctccggaggaccacgtggccttg

SEQ ID NO: 342168 - DNA, 25 bp, Artificial
  Probe
acggtggaactttgacttcgccact

SEQ ID NO: 342169 - DNA, 25 bp, Artificial
  Probe
tttgacttcgccactgagacgccac

SEQ ID NO: 342170 - DNA, 25 bp, Artificial
  Probe
tctatcactccaagcgccgattggt

SEQ ID NO: 342171 - DNA, 25 bp, Artificial
  Probe
ggcagaccagcctaacagatttcta

SEQ ID NO: 342172 - DNA, 25 bp, Artificial
  Probe
aaacggaggcagaccagcctaacag

SEQ ID NO: 342173 - DNA, 25 bp, Artificial
  Probe
cttgtcgctgtcttgcactctggtg

SEQ ID NO: 342174 - DNA, 25 bp, Artificial
  Probe
agacgccactggagggcaactacgt

SEQ ID NO: 342175 - DNA, 25 bp, Artificial
  Probe
cctgagaggcctgaagactccccgg

SEQ ID NO: 342176 - DNA, 25 bp, Artificial
  Probe
tcagggccgaaaacggaggcagacc

SEQ ID NO: 342177 - DNA, 25 bp, Artificial
  Probe
gcccgagaacggtggaactttgact

SEQ ID NO: 342178 - DNA, 25 bp, Artificial
  Probe
ttcgccactgagacgccactggagg

SEQ ID NO: 342179 - DNA, 25 bp, Artificial
  Probe
gcagaccagcctaacagatttctat

SEQ ID NO: 342180 - DNA, 25 bp, Artificial
  Probe
tgcccaagatctacctgagccctgg

SEQ ID NO: 342181 - DNA, 25 bp, Artificial
  Probe
cggaggaccacgtggccttgtcgct

SEQ ID NO: 342182 - DNA, 25 bp, Artificial
  Probe
atctcagggccgaaaacggaggcag

SEQ ID NO: 342183 - DNA, 25 bp, Artificial
  Probe
ggaactttgacttcgccactgagac

SEQ ID NO: 342184 - DNA, 25 bp, Artificial
  Probe
gacaagaggcccagtacctcctcgg

SEQ ID NO: 342185 - DNA, 25 bp, Artificial
  Probe
gtcttgcactctggtgtctcacgcc

SEQ ID NO: 342186 - DNA, 25 bp, Artificial
  Probe
caagcgccgattggtcttctgcaag

SEQ ID NO: 342187 - DNA, 25 bp, Artificial
  Probe
ccgggacatctcagggccgaaaacg

SEQ ID NO: 342188 - DNA, 25 bp, Artificial
  Probe
tcgctgtcttgcactctggtgtctc

SEQ ID NO: 342189 - DNA, 25 bp, Artificial
  Probe
cactggagggcaactacgtctggga

SEQ ID NO: 342190 - DNA, 25 bp, Artificial
  Probe
cagatttctatcactccaagcgccg

SEQ ID NO: 342191 - DNA, 25 bp, Artificial
  Probe
tgacttcgccactgagacgccactg

SEQ ID NO: 342192 - DNA, 25 bp, Artificial
  Probe
ctccaagcgccgattggtcttctgc

SEQ ID NO: 342193 - DNA, 25 bp, Artificial
  Probe
ccagggctgcccaagatctacctga

SEQ ID NO: 342194 - DNA, 25 bp, Artificial
  Probe
ggaccgggacatctcagggccgaaa

SEQ ID NO: 342195 - DNA, 25 bp, Artificial
  Probe
ttctatcactccaagcgccgattgg

SEQ ID NO: 342196 - DNA, 25 bp, Artificial
  Probe
gggctgcccaagatctacctgagcc

SEQ ID NO: 342197 - DNA, 25 bp, Artificial
  Probe
cacgtggccttgtcgctgtcttgca

SEQ ID NO: 342198 - DNA, 25 bp, Artificial
  Probe
cactgagacgccactggagggcaac

SEQ ID NO: 342199 - DNA, 25 bp, Artificial
  Probe
ctgtcttgcactctggtgtctcacg

SEQ ID NO: 342200 - DNA, 25 bp, Artificial
  Probe
gaccgggacatctcagggccgaaaa

SEQ ID NO: 342201 - DNA, 25 bp, Artificial
  Probe
gaccacgtggccttgtcgctgtctt

SEQ ID NO: 342202 - DNA, 25 bp, Artificial
  Probe
cgccgattggtcttctgcaagagaa

SEQ ID NO: 342203 - DNA, 25 bp, Artificial
  Probe
tgttcggagcccagggctgcccaag

SEQ ID NO: 342204 - DNA, 25 bp, Artificial
  Probe
tggccttgtcgctgtcttgcactct

SEQ ID NO: 342205 - DNA, 25 bp, Artificial
  Probe
aagatctacctgagccctgggtccc

SEQ ID NO: 342206 - DNA, 25 bp, Artificial
  Probe
gtggaactttgacttcgccactgag

SEQ ID NO: 342207 - DNA, 25 bp, Artificial
  Probe
ccactggagggcaactacgtctggg

SEQ ID NO: 342208 - DNA, 25 bp, Artificial
  Probe
gatttctatcactccaagcgccgat

SEQ ID NO: 342209 - DNA, 25 bp, Artificial
  Probe
tttctatcactccaagcgccgattg

SEQ ID NO: 342210 - DNA, 25 bp, Artificial
  Probe
cggaggcagaccagcctaacagatt

SEQ ID NO: 342211 - DNA, 25 bp, Artificial
  Probe
cagctccggaggaccacgtggcctt

SEQ ID NO: 342212 - DNA, 25 bp, Artificial
  Probe
ggagcccagggctgcccaagatcta

SEQ ID NO: 342213 - DNA, 25 bp, Artificial
  Probe
tctatgagctaccacagcggcagtg

SEQ ID NO: 342214 - DNA, 25 bp, Artificial
  Probe
cacctagggggctaccatgggaccg

SEQ ID NO: 342215 - DNA, 25 bp, Artificial
  Probe
ggtgactctatgagctaccacagcg

SEQ ID NO: 342216 - DNA, 25 bp, Artificial
  Probe
ccgtgttcgcccagtatgacttctt

SEQ ID NO: 342217 - DNA, 25 bp, Artificial
  Probe
gcgggtgactctatgagctaccaca

SEQ ID NO: 342218 - DNA, 25 bp, Artificial
  Probe
tatgactgccgagcactgaggggtt

SEQ ID NO: 342219 - DNA, 25 bp, Artificial
  Probe
gatcaccagggagtgagctggtacc

SEQ ID NO: 342220 - DNA, 25 bp, Artificial
  Probe
caccagggagtgagctggtaccact

SEQ ID NO: 342221 - DNA, 25 bp, Artificial
  Probe
actgtgcctagctcaccgaggaagc

SEQ ID NO: 342222 - DNA, 25 bp, Artificial
  Probe
ctcggtgcccttcacggaaatgaag

SEQ ID NO: 342223 - DNA, 25 bp, Artificial
  Probe
ctgtgcctagctcaccgaggaagcc

SEQ ID NO: 342224 - DNA, 25 bp, Artificial
  Probe
gttgtgcccagagaagagccagtgt

SEQ ID NO: 342225 - DNA, 25 bp, Artificial
  Probe
gtgcccagagaagagccagtgtgtc

SEQ ID NO: 342226 - DNA, 25 bp, Artificial
  Probe
ttctcggtgcccttcacggaaatga

SEQ ID NO: 342227 - DNA, 25 bp, Artificial
  Probe
gcccgtgatcgagaccccaataact

SEQ ID NO: 342228 - DNA, 25 bp, Artificial
  Probe
tactctatgcgtgtggacctgcggg

SEQ ID NO: 342229 - DNA, 25 bp, Artificial
  Probe
aggaagccgtgttcgcccagtatga

SEQ ID NO: 342230 - DNA, 25 bp, Artificial
  Probe
acagtggatcaccagggagtgagct

SEQ ID NO: 342231 - DNA, 25 bp, Artificial
  Probe
ccgagtagactcagcgaaggagaac

SEQ ID NO: 342232 - DNA, 25 bp, Artificial
  Probe
tccgagtagactcagcgaaggagaa

SEQ ID NO: 342233 - DNA, 25 bp, Artificial
  Probe
ttccgagtagactcagcgaaggaga

SEQ ID NO: 342234 - DNA, 25 bp, Artificial
  Probe
tgacttcttccgagtagactcagcg

SEQ ID NO: 342235 - DNA, 25 bp, Artificial
  Probe
tcaccagggagtgagctggtaccac

SEQ ID NO: 342236 - DNA, 25 bp, Artificial
  Probe
actctatgagctaccacagcggcag

SEQ ID NO: 342237 - DNA, 25 bp, Artificial
  Probe
gtgactctatgagctaccacagcgg

SEQ ID NO: 342238 - DNA, 25 bp, Artificial
  Probe
gaccgcgggtgactctatgagctac

SEQ ID NO: 342239 - DNA, 25 bp, Artificial
  Probe
gtgttcgcccagtatgacttcttcc

SEQ ID NO: 342240 - DNA, 25 bp, Artificial
  Probe
cacagtggatcaccagggagtgagc

SEQ ID NO: 342241 - DNA, 25 bp, Artificial
  Probe
cgcccagtatgacttcttccgagta

SEQ ID NO: 342242 - DNA, 25 bp, Artificial
  Probe
cccgtgatcgagaccccaataactt

SEQ ID NO: 342243 - DNA, 25 bp, Artificial
  Probe
ccagtatgacttcttccgagtagac

SEQ ID NO: 342244 - DNA, 25 bp, Artificial
  Probe
tctcggtgcccttcacggaaatgaa

SEQ ID NO: 342245 - DNA, 25 bp, Artificial
  Probe
acttcttccgagtagactcagcgaa

SEQ ID NO: 342246 - DNA, 25 bp, Artificial
  Probe
ctctatgcgtgtggacctgcgggcc

SEQ ID NO: 342247 - DNA, 25 bp, Artificial
  Probe
agcacagtggatcaccagggagtga

SEQ ID NO: 342248 - DNA, 25 bp, Artificial
  Probe
gagactactctatgcgtgtggacct

SEQ ID NO: 342249 - DNA, 25 bp, Artificial
  Probe
tactgtgcctagctcaccgaggaag

SEQ ID NO: 342250 - DNA, 25 bp, Artificial
  Probe
agtatgacttcttccgagtagactc

SEQ ID NO: 342251 - DNA, 25 bp, Artificial
  Probe
ctactctatgcgtgtggacctgcgg

SEQ ID NO: 342252 - DNA, 25 bp, Artificial
  Probe
gttcgcccagtatgacttcttccga

SEQ ID NO: 342253 - DNA, 25 bp, Artificial
  Probe
tgcccagagaagagccagtgtgtct

SEQ ID NO: 342254 - DNA, 25 bp, Artificial
  Probe
ggaccgcgggtgactctatgagcta

SEQ ID NO: 342255 - DNA, 25 bp, Artificial
  Probe
tcgagttctcggtgcccttcacgga

SEQ ID NO: 342256 - DNA, 25 bp, Artificial
  Probe
gaaaggaagccgtgttcgcccagta

SEQ ID NO: 342257 - DNA, 25 bp, Artificial
  Probe
gtagactcagcgaaggagaactatc

SEQ ID NO: 342258 - DNA, 25 bp, Artificial
  Probe
aaaggaagccgtgttcgcccagtat

SEQ ID NO: 342259 - DNA, 25 bp, Artificial
  Probe
cccgaagcaggtgcagacactgagg

SEQ ID NO: 342260 - DNA, 25 bp, Artificial
  Probe
aggtgcagacactgagggaaaagct

SEQ ID NO: 342261 - DNA, 25 bp, Artificial
  Probe
atcgaaaatacttccggtcaggcgc

SEQ ID NO: 342262 - DNA, 25 bp, Artificial
  Probe
aagcactatgggaagatccggtcat

SEQ ID NO: 342263 - DNA, 25 bp, Artificial
  Probe
caccctcatccagaaggtttaccgg

SEQ ID NO: 342264 - DNA, 25 bp, Artificial
  Probe
tggcgttgtcggacccactaccagc

SEQ ID NO: 342265 - DNA, 25 bp, Artificial
  Probe
gggaagatccggtcatcagtactgc

SEQ ID NO: 342266 - DNA, 25 bp, Artificial
  Probe
gccaatcaggaactgcagcacctct

SEQ ID NO: 342267 - DNA, 25 bp, Artificial
  Probe
tcatccagaaggtttaccggggctg

SEQ ID NO: 342268 - DNA, 25 bp, Artificial
  Probe
gcactatgggaagatccggtcatca

SEQ ID NO: 342269 - DNA, 25 bp, Artificial
  Probe
tactgctgatccaggctttcgtgag

SEQ ID NO: 342270 - DNA, 25 bp, Artificial
  Probe
aaattcctcttgaatctgaagaaga

SEQ ID NO: 342271 - DNA, 25 bp, Artificial
  Probe
aactatcgaaaatacttccggtcag

SEQ ID NO: 342272 - DNA, 25 bp, Artificial
  Probe
gcgcctgaggcttcagcagctggcc

SEQ ID NO: 342273 - DNA, 25 bp, Artificial
  Probe
acacagccaatcaggaactgcagca

SEQ ID NO: 342274 - DNA, 25 bp, Artificial
  Probe
caaaggcgcctgaggcttcagcagc

SEQ ID NO: 342275 - DNA, 25 bp, Artificial
  Probe
actaccagcagatgcggaagagtca

SEQ ID NO: 342276 - DNA, 25 bp, Artificial
  Probe
tcatcagaggagctggcctatggga

SEQ ID NO: 342277 - DNA, 25 bp, Artificial
  Probe
cctgctctcggcttggtttcggggc

SEQ ID NO: 342278 - DNA, 25 bp, Artificial
  Probe
tggtttcggggcaacaagcaaaaga

SEQ ID NO: 342279 - DNA, 25 bp, Artificial
  Probe
ttggacaacacgtggccagctgccc

SEQ ID NO: 342280 - DNA, 25 bp, Artificial
  Probe
tggcctatgggaggacaaagatctt

SEQ ID NO: 342281 - DNA, 25 bp, Artificial
  Probe
gaaattcctcttgaatctgaagaag

SEQ ID NO: 342282 - DNA, 25 bp, Artificial
  Probe
cgagatcagctgtccccgaagcagg

SEQ ID NO: 342283 - DNA, 25 bp, Artificial
  Probe
tccaccaaagtgttggacaacacgt

SEQ ID NO: 342284 - DNA, 25 bp, Artificial
  Probe
agccccaagactcttttctacctgg

SEQ ID NO: 342285 - DNA, 25 bp, Artificial
  Probe
gcccgcaagaactatcgaaaatact

SEQ ID NO: 342286 - DNA, 25 bp, Artificial
  Probe
cagctgccccttacaggtgcttcaa

SEQ ID NO: 342287 - DNA, 25 bp, Artificial
  Probe
gaagagtcagatcctgctctcggct

SEQ ID NO: 342288 - DNA, 25 bp, Artificial
  Probe
aaagtgttggacaacacgtggccag

SEQ ID NO: 342289 - DNA, 25 bp, Artificial
  Probe
tctacctggaagaacaaaggcgcct

SEQ ID NO: 342290 - DNA, 25 bp, Artificial
  Probe
caagaagtaccgagatcagctgtcc

SEQ ID NO: 342291 - DNA, 25 bp, Artificial
  Probe
ctcatccagaaggtttaccggggct

SEQ ID NO: 342292 - DNA, 25 bp, Artificial
  Probe
gagcataacccagaaattcctcttg

SEQ ID NO: 342293 - DNA, 25 bp, Artificial
  Probe
tggaaggcccgcaagaactatcgaa

SEQ ID NO: 342294 - DNA, 25 bp, Artificial
  Probe
ctggcctatgggaggacaaagatct

SEQ ID NO: 342295 - DNA, 25 bp, Artificial
  Probe
tttcggggcaacaagcaaaagaagc

SEQ ID NO: 342296 - DNA, 25 bp, Artificial
  Probe
tcaggcgcccgcatcactttggcaa

SEQ ID NO: 342297 - DNA, 25 bp, Artificial
  Probe
gcccgcatcactttggcaaatttta

SEQ ID NO: 342298 - DNA, 25 bp, Artificial
  Probe
ctaccagtggaagtgcaagaagtac

SEQ ID NO: 342299 - DNA, 25 bp, Artificial
  Probe
ctcggcttggtttcggggcaacaag

SEQ ID NO: 342300 - DNA, 25 bp, Artificial
  Probe
tgaggcttcagcagctggccaccct

SEQ ID NO: 342301 - DNA, 25 bp, Artificial
  Probe
aatacttccggtcaggcgcccgcat

SEQ ID NO: 342302 - DNA, 25 bp, Artificial
  Probe
cagatcctgctctcggcttggtttc

SEQ ID NO: 342303 - DNA, 25 bp, Artificial
  Probe
gaagaatttgccatccaccaaagtg

SEQ ID NO: 342304 - DNA, 25 bp, Artificial
  Probe
cagctgtccccgaagcaggtgcaga

SEQ ID NO: 342305 - DNA, 25 bp, Artificial
  Probe
acttccagtccgaaagcatctgagc

SEQ ID NO: 342306 - DNA, 25 bp, Artificial
  Probe
agttcatatcctataaaatcaggag

SEQ ID NO: 342307 - DNA, 25 bp, Artificial
  Probe
aaagcatctgagcaaagcttctctt

SEQ ID NO: 342308 - DNA, 25 bp, Artificial
  Probe
acatagctgaaactcaattgcactg

SEQ ID NO: 342309 - DNA, 25 bp, Artificial
  Probe
agtagttttgcaagacttgtttctc

SEQ ID NO: 342310 - DNA, 25 bp, Artificial
  Probe
tgtttctccttggttttgaccaggc

SEQ ID NO: 342311 - DNA, 25 bp, Artificial
  Probe
tccgggagtagttttgcaagacttg

SEQ ID NO: 342312 - DNA, 25 bp, Artificial
  Probe
gttcttcaaacaaagacagccagtt

SEQ ID NO: 342313 - DNA, 25 bp, Artificial
  Probe
gctgaaactcaattgcactgtacca

SEQ ID NO: 342314 - DNA, 25 bp, Artificial
  Probe
ggttgctaggtgtggcttcagttca

SEQ ID NO: 342315 - DNA, 25 bp, Artificial
  Probe
gccagttcttcaaacaaagacagcc

SEQ ID NO: 342316 - DNA, 25 bp, Artificial
  Probe
ctcaattgcactgtaccattcctgg

SEQ ID NO: 342317 - DNA, 25 bp, Artificial
  Probe
ttggttttgaccaggcccgagccag

SEQ ID NO: 342318 - DNA, 25 bp, Artificial
  Probe
ccgaaagcatctgagcaaagcttct

SEQ ID NO: 342319 - DNA, 25 bp, Artificial
  Probe
caggcccgagccagttcttcaaaca

SEQ ID NO: 342320 - DNA, 25 bp, Artificial
  Probe
caataaattccttaagatagggcag

SEQ ID NO: 342321 - DNA, 25 bp, Artificial
  Probe
gctaggtgtggcttcagttcatatc

SEQ ID NO: 342322 - DNA, 25 bp, Artificial
  Probe
gaggtccaataaattccttaagata

SEQ ID NO: 342323 - DNA, 25 bp, Artificial
  Probe
tatcctataaaatcaggagtccagc

SEQ ID NO: 342324 - DNA, 25 bp, Artificial
  Probe
tggttgctaggtgtggcttcagttc

SEQ ID NO: 342325 - DNA, 25 bp, Artificial
  Probe
caagacttgtttctccttggttttg

SEQ ID NO: 342326 - DNA, 25 bp, Artificial
  Probe
cagttactaactttggttgctaggt

SEQ ID NO: 342327 - DNA, 25 bp, Artificial
  Probe
ttctccttggttttgaccaggcccg

SEQ ID NO: 342328 - DNA, 25 bp, Artificial
  Probe
ctctaagtcttgaagtagtaagcat

SEQ ID NO: 342329 - DNA, 25 bp, Artificial
  Probe
gttcatatcctataaaatcaggagt

SEQ ID NO: 342330 - DNA, 25 bp, Artificial
  Probe
gtggcttcagttcatatcctataaa

SEQ ID NO: 342331 - DNA, 25 bp, Artificial
  Probe
ctataaaatcaggagtccagccctc

SEQ ID NO: 342332 - DNA, 25 bp, Artificial
  Probe
tctttctgtagctgagttgtttccg

SEQ ID NO: 342333 - DNA, 25 bp, Artificial
  Probe
ctgtaccattcctgggaggaataaa

SEQ ID NO: 342334 - DNA, 25 bp, Artificial
  Probe
cattcctgggaggaataaaacctca

SEQ ID NO: 342335 - DNA, 25 bp, Artificial
  Probe
cttgtttctccttggttttgaccag

SEQ ID NO: 342336 - DNA, 25 bp, Artificial
  Probe
cttggttttgaccaggcccgagcca

SEQ ID NO: 342337 - DNA, 25 bp, Artificial
  Probe
gggaaaatccatgattcctttttct

SEQ ID NO: 342338 - DNA, 25 bp, Artificial
  Probe
gctcaacatagctgaaactcaattg

SEQ ID NO: 342339 - DNA, 25 bp, Artificial
  Probe
tgaccaggcccgagccagttcttca

SEQ ID NO: 342340 - DNA, 25 bp, Artificial
  Probe
tccttggttttgaccaggcccgagc

SEQ ID NO: 342341 - DNA, 25 bp, Artificial
  Probe
atatcctataaaatcaggagtccag

SEQ ID NO: 342342 - DNA, 25 bp, Artificial
  Probe
actaactttggttgctaggtgtggc

SEQ ID NO: 342343 - DNA, 25 bp, Artificial
  Probe
cagggagctcaacatagctgaaact

SEQ ID NO: 342344 - DNA, 25 bp, Artificial
  Probe
tttccgggagtagttttgcaagact

SEQ ID NO: 342345 - DNA, 25 bp, Artificial
  Probe
ctttggttgctaggtgtggcttcag

SEQ ID NO: 342346 - DNA, 25 bp, Artificial
  Probe
ctgtagctgagttgtttccgggagt

SEQ ID NO: 342347 - DNA, 25 bp, Artificial
  Probe
caaagacagccagttactaactttg

SEQ ID NO: 342348 - DNA, 25 bp, Artificial
  Probe
ttaatccctctaagtcttgaagtag

SEQ ID NO: 342349 - DNA, 25 bp, Artificial
  Probe
tgataccgaatccagagtaattaat

SEQ ID NO: 342350 - DNA, 25 bp, Artificial
  Probe
tataaaatcaggagtccagccctcc

SEQ ID NO: 342351 - DNA, 25 bp, Artificial
  Probe
ttttctgaccttgtctgtctcgccc

SEQ ID NO: 342352 - DNA, 25 bp, Artificial
  Probe
agaatgagacactggctatgtccca

SEQ ID NO: 342353 - DNA, 25 bp, Artificial
  Probe
catcctagggccagctagcagcctg

SEQ ID NO: 342354 - DNA, 25 bp, Artificial
  Probe
tctattatactgagcggctccagaa

SEQ ID NO: 342355 - DNA, 25 bp, Artificial
  Probe
tggctatgtcccaggggctgctgct

SEQ ID NO: 342356 - DNA, 25 bp, Artificial
  Probe
tggacagccttgtgacctaggggtt

SEQ ID NO: 342357 - DNA, 25 bp, Artificial
  Probe
cctctggttgtatttaaagcaaatt

SEQ ID NO: 342358 - DNA, 25 bp, Artificial
  Probe
cacctgggctgagtgtgaggccaat

SEQ ID NO: 342359 - DNA, 25 bp, Artificial
  Probe
acctggaatgcaaaagccaggtcag

SEQ ID NO: 342360 - DNA, 25 bp, Artificial
  Probe
atccaggcatcctgattagggggct

SEQ ID NO: 342361 - DNA, 25 bp, Artificial
  Probe
gggtctgactgaagttcattccagc

SEQ ID NO: 342362 - DNA, 25 bp, Artificial
  Probe
agcctctgcttagtggccttgccac

SEQ ID NO: 342363 - DNA, 25 bp, Artificial
  Probe
gcagcctgcagagttctccccttta

SEQ ID NO: 342364 - DNA, 25 bp, Artificial
  Probe
gatgggtcttgatggacagtttctc

SEQ ID NO: 342365 - DNA, 25 bp, Artificial
  Probe
tcccgattctagcagaccccataga

SEQ ID NO: 342366 - DNA, 25 bp, Artificial
  Probe
ccacctctggttgtatttaaagcaa

SEQ ID NO: 342367 - DNA, 25 bp, Artificial
  Probe
gcccccaaagagattagtgtctagg

SEQ ID NO: 342368 - DNA, 25 bp, Artificial
  Probe
ctaactggtggacgtcaagtaagag

SEQ ID NO: 342369 - DNA, 25 bp, Artificial
  Probe
cccccaaagagattagtgtctaggt

SEQ ID NO: 342370 - DNA, 25 bp, Artificial
  Probe
tggacccaatccaggcatcctgatt

SEQ ID NO: 342371 - DNA, 25 bp, Artificial
  Probe
gcaaaagccaggtcagggatagaat

SEQ ID NO: 342372 - DNA, 25 bp, Artificial
  Probe
ggtataaagccaggtgcccaaggta

SEQ ID NO: 342373 - DNA, 25 bp, Artificial
  Probe
cccgcaggtataaagccaggtgccc

SEQ ID NO: 342374 - DNA, 25 bp, Artificial
  Probe
gggtacctcccgattctagcagacc

SEQ ID NO: 342375 - DNA, 25 bp, Artificial
  Probe
gagtgggtctgactgaagttcattc

SEQ ID NO: 342376 - DNA, 25 bp, Artificial
  Probe
taagctcaggcacctgggctgagtg

SEQ ID NO: 342377 - DNA, 25 bp, Artificial
  Probe
ggcccagggtacctcccgattctag

SEQ ID NO: 342378 - DNA, 25 bp, Artificial
  Probe
tagtgtctaggttacccaagcctgt

SEQ ID NO: 342379 - DNA, 25 bp, Artificial
  Probe
ttacctgttccctgtgttcccaatg

SEQ ID NO: 342380 - DNA, 25 bp, Artificial
  Probe
acactggagctggtccctggctttt

SEQ ID NO: 342381 - DNA, 25 bp, Artificial
  Probe
atactgagcggctccagaacctgga

SEQ ID NO: 342382 - DNA, 25 bp, Artificial
  Probe
cgattctagcagaccccatagatgg

SEQ ID NO: 342383 - DNA, 25 bp, Artificial
  Probe
ctccaggtaagatggtagggcccag

SEQ ID NO: 342384 - DNA, 25 bp, Artificial
  Probe
gctccaggtaagatggtagggccca

SEQ ID NO: 342385 - DNA, 25 bp, Artificial
  Probe
tgggctgagtgtgaggccaattcac

SEQ ID NO: 342386 - DNA, 25 bp, Artificial
  Probe
caatccaggcatcctgattaggggg

SEQ ID NO: 342387 - DNA, 25 bp, Artificial
  Probe
tgtgggcaggccaacccagacacac

SEQ ID NO: 342388 - DNA, 25 bp, Artificial
  Probe
aatgcaaaagccaggtcagggatag

SEQ ID NO: 342389 - DNA, 25 bp, Artificial
  Probe
ggggctcctaactggtggacgtcaa

SEQ ID NO: 342390 - DNA, 25 bp, Artificial
  Probe
cacccatttttggacccaatccagg

SEQ ID NO: 342391 - DNA, 25 bp, Artificial
  Probe
ttccagcatcctagggccagctagc

SEQ ID NO: 342392 - DNA, 25 bp, Artificial
  Probe
agacttgtgggcaggccaacccaga

SEQ ID NO: 342393 - DNA, 25 bp, Artificial
  Probe
ccacaacccgcaggtataaagccag

SEQ ID NO: 342394 - DNA, 25 bp, Artificial
  Probe
attagtgtctaggttacccaagcct

SEQ ID NO: 342395 - DNA, 25 bp, Artificial
  Probe
tataaagccaggtgcccaaggtagg

SEQ ID NO: 342396 - DNA, 25 bp, Artificial
  Probe
ggagctggtccctggcttttctgac

SEQ ID NO: 342397 - DNA, 25 bp, Artificial
  Probe
aaagccagggaccagctccagtgtc

SEQ ID NO: 342398 - DNA, 25 bp, Artificial
  Probe
actcagcccaggtgcctgagcttaa

SEQ ID NO: 342399 - DNA, 25 bp, Artificial
  Probe
tgggccctaccatcttacctggagc

SEQ ID NO: 342400 - DNA, 25 bp, Artificial
  Probe
aggtcacaaggctgtccatctatgg

SEQ ID NO: 342401 - DNA, 25 bp, Artificial
  Probe
aacccctaggtcacaaggctgtcca

SEQ ID NO: 342402 - DNA, 25 bp, Artificial
  Probe
ttcttgataccttccctaccttggg

SEQ ID NO: 342403 - DNA, 25 bp, Artificial
  Probe
aggcttgggtaacctagacactaat

SEQ ID NO: 342404 - DNA, 25 bp, Artificial
  Probe
aggctacaggcttgggtaacctaga

SEQ ID NO: 342405 - DNA, 25 bp, Artificial
  Probe
gaggctacaggcttgggtaacctag

SEQ ID NO: 342406 - DNA, 25 bp, Artificial
  Probe
cctaccttgggcacctggctttata

SEQ ID NO: 342407 - DNA, 25 bp, Artificial
  Probe
caggtgcctgagcttaactgacatt

SEQ ID NO: 342408 - DNA, 25 bp, Artificial
  Probe
tgggcacctggctttatacctgcgg

SEQ ID NO: 342409 - DNA, 25 bp, Artificial
  Probe
acccctaggtcacaaggctgtccat

SEQ ID NO: 342410 - DNA, 25 bp, Artificial
  Probe
cctagacactaatctctttgggggc

SEQ ID NO: 342411 - DNA, 25 bp, Artificial
  Probe
tgaattggcctcacactcagcccag

SEQ ID NO: 342412 - DNA, 25 bp, Artificial
  Probe
ccatctatggggtctgctagaatcg

SEQ ID NO: 342413 - DNA, 25 bp, Artificial
  Probe
gtctcagtgaattggcctcacactc

SEQ ID NO: 342414 - DNA, 25 bp, Artificial
  Probe
ctaagcagaggctacaggcttgggt

SEQ ID NO: 342415 - DNA, 25 bp, Artificial
  Probe
ccagggaccagctccagtgtctcag

SEQ ID NO: 342416 - DNA, 25 bp, Artificial
  Probe
tgtctcagtgaattggcctcacact

SEQ ID NO: 342417 - DNA, 25 bp, Artificial
  Probe
gcttgggtaacctagacactaatct

SEQ ID NO: 342418 - DNA, 25 bp, Artificial
  Probe
ttacctggagcctctccattcttga

SEQ ID NO: 342419 - DNA, 25 bp, Artificial
  Probe
ggagcctctccattcttgatacctt

SEQ ID NO: 342420 - DNA, 25 bp, Artificial
  Probe
cacctggctttatacctgcgggttg

SEQ ID NO: 342421 - DNA, 25 bp, Artificial
  Probe
ctgagcttaactgacattgggaaca

SEQ ID NO: 342422 - DNA, 25 bp, Artificial
  Probe
tgtcctagcatggttcgagtactgc

SEQ ID NO: 342423 - DNA, 25 bp, Artificial
  Probe
gtgaattggcctcacactcagccca

SEQ ID NO: 342424 - DNA, 25 bp, Artificial
  Probe
agcagaggctacaggcttgggtaac

SEQ ID NO: 342425 - DNA, 25 bp, Artificial
  Probe
ttgggtaacctagacactaatctct

SEQ ID NO: 342426 - DNA, 25 bp, Artificial
  Probe
attggcctcacactcagcccaggtg

SEQ ID NO: 342427 - DNA, 25 bp, Artificial
  Probe
gctgtccatctatggggtctgctag

SEQ ID NO: 342428 - DNA, 25 bp, Artificial
  Probe
agcccaggtgcctgagcttaactga

SEQ ID NO: 342429 - DNA, 25 bp, Artificial
  Probe
acctagacactaatctctttggggg

SEQ ID NO: 342430 - DNA, 25 bp, Artificial
  Probe
tacaggcttgggtaacctagacact

SEQ ID NO: 342431 - DNA, 25 bp, Artificial
  Probe
acaggcttgggtaacctagacacta

SEQ ID NO: 342432 - DNA, 25 bp, Artificial
  Probe
ccctaggtcacaaggctgtccatct

SEQ ID NO: 342433 - DNA, 25 bp, Artificial
  Probe
cactcagcccaggtgcctgagctta

SEQ ID NO: 342434 - DNA, 25 bp, Artificial
  Probe
ggtctgctagaatcgggaggtaccc

SEQ ID NO: 342435 - DNA, 25 bp, Artificial
  Probe
ctggctttatacctgcgggttgtgg

SEQ ID NO: 342436 - DNA, 25 bp, Artificial
  Probe
ttgacgtccaccagttaggagcccc

SEQ ID NO: 342437 - DNA, 25 bp, Artificial
  Probe
atctatggggtctgctagaatcggg

SEQ ID NO: 342438 - DNA, 25 bp, Artificial
  Probe
tctatggggtctgctagaatcggga

SEQ ID NO: 342439 - DNA, 25 bp, Artificial
  Probe
accttgggcacctggctttatacct

SEQ ID NO: 342440 - DNA, 25 bp, Artificial
  Probe
ccttgacgtccaccagttaggagcc

SEQ ID NO: 342441 - DNA, 25 bp, Artificial
  Probe
gccactaagcagaggctacaggctt

SEQ ID NO: 342442 - DNA, 25 bp, Artificial
  Probe
gtggcaaggccactaagcagaggct

SEQ ID NO: 342443 - DNA, 25 bp, Artificial
  Probe
ggccacccaggcagtggcatcactg

SEQ ID NO: 342444 - DNA, 25 bp, Artificial
  Probe
gccacccaggcagtggcatcactgg

SEQ ID NO: 342445 - DNA, 25 bp, Artificial
  Probe
gacgacgcaagcatcagaggccacc

SEQ ID NO: 342446 - DNA, 25 bp, Artificial
  Probe
tgaccatccagacgacgcaagcatc

SEQ ID NO: 342447 - DNA, 25 bp, Artificial
  Probe
gtgtgcgttcatttggctaagaaca

SEQ ID NO: 342448 - DNA, 25 bp, Artificial
  Probe
tctttctgcctcaggtggaacaaaa

SEQ ID NO: 342449 - DNA, 25 bp, Artificial
  Probe
cagaggccacccaggcagtggcatc

SEQ ID NO: 342450 - DNA, 25 bp, Artificial
  Probe
aacagggagccactgtcaccatggc

SEQ ID NO: 342451 - DNA, 25 bp, Artificial
  Probe
ccttgttctttctgcctcaggtgga

SEQ ID NO: 342452 - DNA, 25 bp, Artificial
  Probe
ccaggcagtggcatcactggcagag

SEQ ID NO: 342453 - DNA, 25 bp, Artificial
  Probe
gttctttctgcctcaggtggaacaa

SEQ ID NO: 342454 - DNA, 25 bp, Artificial
  Probe
cggtgaaatgaccatccagacgacg

SEQ ID NO: 342455 - DNA, 25 bp, Artificial
  Probe
tcaccatggcccttaacaggtggag

SEQ ID NO: 342456 - DNA, 25 bp, Artificial
  Probe
acagggagccactgtcaccatggcc

SEQ ID NO: 342457 - DNA, 25 bp, Artificial
  Probe
tctcaggagatgcaacagggagcca

SEQ ID NO: 342458 - DNA, 25 bp, Artificial
  Probe
gggagccactgtcaccatggccctt

SEQ ID NO: 342459 - DNA, 25 bp, Artificial
  Probe
gagccactgtcaccatggcccttaa

SEQ ID NO: 342460 - DNA, 25 bp, Artificial
  Probe
tgtgtgcgttcatttggctaagaac

SEQ ID NO: 342461 - DNA, 25 bp, Artificial
  Probe
cagtggccgcttctcaggagatgca

SEQ ID NO: 342462 - DNA, 25 bp, Artificial
  Probe
catcactggcagaggccgcagtggc

SEQ ID NO: 342463 - DNA, 25 bp, Artificial
  Probe
aaattgggccacattacagggcggt

SEQ ID NO: 342464 - DNA, 25 bp, Artificial
  Probe
gcatcagaggccacccaggcagtgg

SEQ ID NO: 342465 - DNA, 25 bp, Artificial
  Probe
ccctatacattataggccatgttgt

SEQ ID NO: 342466 - DNA, 25 bp, Artificial
  Probe
actgtccttgttctttctgcctcag

SEQ ID NO: 342467 - DNA, 25 bp, Artificial
  Probe
ggccatgttgtgtgcgttcatttgg

SEQ ID NO: 342468 - DNA, 25 bp, Artificial
  Probe
tgtccttgttctttctgcctcaggt

SEQ ID NO: 342469 - DNA, 25 bp, Artificial
  Probe
taggccatgttgtgtgcgttcattt

SEQ ID NO: 342470 - DNA, 25 bp, Artificial
  Probe
gacgcaagcatcagaggccacccag

SEQ ID NO: 342471 - DNA, 25 bp, Artificial
  Probe
acattataggccatgttgtgtgcgt

SEQ ID NO: 342472 - DNA, 25 bp, Artificial
  Probe
cagtggcatcactggcagaggccgc

SEQ ID NO: 342473 - DNA, 25 bp, Artificial
  Probe
ctgcctcaggtggaacaaaattggg

SEQ ID NO: 342474 - DNA, 25 bp, Artificial
  Probe
tgtgcgttcatttggctaagaacat

SEQ ID NO: 342475 - DNA, 25 bp, Artificial
  Probe
accatccagacgacgcaagcatcag

SEQ ID NO: 342476 - DNA, 25 bp, Artificial
  Probe
agacgacgcaagcatcagaggccac

SEQ ID NO: 342477 - DNA, 25 bp, Artificial
  Probe
acgcaagcatcagaggccacccagg

SEQ ID NO: 342478 - DNA, 25 bp, Artificial
  Probe
gatgcaacagggagccactgtcacc

SEQ ID NO: 342479 - DNA, 25 bp, Artificial
  Probe
cgttcatttggctaagaacatagtg

SEQ ID NO: 342480 - DNA, 25 bp, Artificial
  Probe
ggccgcttctcaggagatgcaacag

SEQ ID NO: 342481 - DNA, 25 bp, Artificial
  Probe
cgcttctcaggagatgcaacaggga

SEQ ID NO: 342482 - DNA, 25 bp, Artificial
  Probe
tccagacgacgcaagcatcagaggc

SEQ ID NO: 342483 - DNA, 25 bp, Artificial
  Probe
tgcctcaggtggaacaaaattgggc

SEQ ID NO: 342484 - DNA, 25 bp, Artificial
  Probe
cgcagtggccgcttctcaggagatg

SEQ ID NO: 342485 - DNA, 25 bp, Artificial
  Probe
aaatgaccatccagacgacgcaagc

SEQ ID NO: 342486 - DNA, 25 bp, Artificial
  Probe
caacagggagccactgtcaccatgg

SEQ ID NO: 342487 - DNA, 25 bp, Artificial
  Probe
cctatacattataggccatgttgtg

SEQ ID NO: 342488 - DNA, 25 bp, Artificial
  Probe
tgactgtccttgttctttctgcctc

SEQ ID NO: 342489 - DNA, 25 bp, Artificial
  Probe
gtcagtcctttgctgccattgtaga

SEQ ID NO: 342490 - DNA, 25 bp, Artificial
  Probe
catcctccagcactcaggagtagaa

SEQ ID NO: 342491 - DNA, 25 bp, Artificial
  Probe
tgaggcactggcttgtctttgtgct

SEQ ID NO: 342492 - DNA, 25 bp, Artificial
  Probe
aatccctggaagagcccaggtgtga

SEQ ID NO: 342493 - DNA, 25 bp, Artificial
  Probe
caggtccagcagttaggaatccctg

SEQ ID NO: 342494 - DNA, 25 bp, Artificial
  Probe
tttccttgtcggtgacacagagtca

SEQ ID NO: 342495 - DNA, 25 bp, Artificial
  Probe
gctgccattgtagaagcagacagaa

SEQ ID NO: 342496 - DNA, 25 bp, Artificial
  Probe
gatcgtaagatcctcttccggtaag

SEQ ID NO: 342497 - DNA, 25 bp, Artificial
  Probe
tcctccagcactcaggagtagaagc

SEQ ID NO: 342498 - DNA, 25 bp, Artificial
  Probe
acccgctcagaagagaataaaggcc

SEQ ID NO: 342499 - DNA, 25 bp, Artificial
  Probe
agcagttaggaatccctggaagagc

SEQ ID NO: 342500 - DNA, 25 bp, Artificial
  Probe
aggccagatgcaagcgcagggaaaa

SEQ ID NO: 342501 - DNA, 25 bp, Artificial
  Probe
gagtcagtcctttgctgccattgta

SEQ ID NO: 342502 - DNA, 25 bp, Artificial
  Probe
tccagcagttaggaatccctggaag

SEQ ID NO: 342503 - DNA, 25 bp, Artificial
  Probe
cctttgctgccattgtagaagcaga

SEQ ID NO: 342504 - DNA, 25 bp, Artificial
  Probe
ggcactggcttgtctttgtgcttcc

SEQ ID NO: 342505 - DNA, 25 bp, Artificial
  Probe
gttaggaatccctggaagagcccag

SEQ ID NO: 342506 - DNA, 25 bp, Artificial
  Probe
tgctgatcgtaagatcctcttccgg

SEQ ID NO: 342507 - DNA, 25 bp, Artificial
  Probe
agcggctgaggcactggcttgtctt

SEQ ID NO: 342508 - DNA, 25 bp, Artificial
  Probe
cacacacaggccagatgcaagcgca

SEQ ID NO: 342509 - DNA, 25 bp, Artificial
  Probe
agatgcaagcgcagggaaaatccca

SEQ ID NO: 342510 - DNA, 25 bp, Artificial
  Probe
cttacagataggagctggtccttga

SEQ ID NO: 342511 - DNA, 25 bp, Artificial
  Probe
cggctgaggcactggcttgtctttg

SEQ ID NO: 342512 - DNA, 25 bp, Artificial
  Probe
aggtccagcagttaggaatccctgg

SEQ ID NO: 342513 - DNA, 25 bp, Artificial
  Probe
tctgaacttacagataggagctggt

SEQ ID NO: 342514 - DNA, 25 bp, Artificial
  Probe
agacagaatgttcctgaaagccatt

SEQ ID NO: 342515 - DNA, 25 bp, Artificial
  Probe
taggaatccctggaagagcccaggt

SEQ ID NO: 342516 - DNA, 25 bp, Artificial
  Probe
ggatgacccgctcagaagagaataa

SEQ ID NO: 342517 - DNA, 25 bp, Artificial
  Probe
tcctttgctgccattgtagaagcag

SEQ ID NO: 342518 - DNA, 25 bp, Artificial
  Probe
tgcagagatgctgatcgtaagatcc

SEQ ID NO: 342519 - DNA, 25 bp, Artificial
  Probe
ccaggtccagcagttaggaatccct

SEQ ID NO: 342520 - DNA, 25 bp, Artificial
  Probe
cagacagaatgttcctgaaagccat

SEQ ID NO: 342521 - DNA, 25 bp, Artificial
  Probe
aatgttcctgaaagccattccaggt

SEQ ID NO: 342522 - DNA, 25 bp, Artificial
  Probe
tgaacttacagataggagctggtcc

SEQ ID NO: 342523 - DNA, 25 bp, Artificial
  Probe
gaatccctggaagagcccaggtgtg

SEQ ID NO: 342524 - DNA, 25 bp, Artificial
  Probe
agcagacagaatgttcctgaaagcc

SEQ ID NO: 342525 - DNA, 25 bp, Artificial
  Probe
aagcagacagaatgttcctgaaagc

SEQ ID NO: 342526 - DNA, 25 bp, Artificial
  Probe
tcagtcctttgctgccattgtagaa

SEQ ID NO: 342527 - DNA, 25 bp, Artificial
  Probe
cagataggagctggtccttgaaatg

SEQ ID NO: 342528 - DNA, 25 bp, Artificial
  Probe
acagataggagctggtccttgaaat

SEQ ID NO: 342529 - DNA, 25 bp, Artificial
  Probe
acttacagataggagctggtccttg

SEQ ID NO: 342530 - DNA, 25 bp, Artificial
  Probe
atgctgatcgtaagatcctcttccg

SEQ ID NO: 342531 - DNA, 25 bp, Artificial
  Probe
ggtgacacagagtcagtcctttgct

SEQ ID NO: 342532 - DNA, 25 bp, Artificial
  Probe
tggatgacccgctcagaagagaata

SEQ ID NO: 342533 - DNA, 25 bp, Artificial
  Probe
ttgcccacacacaggccagatgcaa

SEQ ID NO: 342534 - DNA, 25 bp, Artificial
  Probe
acagaatgttcctgaaagccattcc

SEQ ID NO: 342535 - DNA, 25 bp, Artificial
  Probe
ggcgggtatgtctccatgagtttga

SEQ ID NO: 342536 - DNA, 25 bp, Artificial
  Probe
tcagaggagccaggtggcacacacc

SEQ ID NO: 342537 - DNA, 25 bp, Artificial
  Probe
caggtggcacacaccctcttatttg

SEQ ID NO: 342538 - DNA, 25 bp, Artificial
  Probe
caactgaggtacacaccaaagtcaa

SEQ ID NO: 342539 - DNA, 25 bp, Artificial
  Probe
gccagcggtacatagtaggatcctg

SEQ ID NO: 342540 - DNA, 25 bp, Artificial
  Probe
aggtagcatgcaactgaggtacaca

SEQ ID NO: 342541 - DNA, 25 bp, Artificial
  Probe
ccagccagcggtacatagtaggatc

SEQ ID NO: 342542 - DNA, 25 bp, Artificial
  Probe
ccaggtggcacacaccctcttattt

SEQ ID NO: 342543 - DNA, 25 bp, Artificial
  Probe
gaggtacacaccaaagtcaactttc

SEQ ID NO: 342544 - DNA, 25 bp, Artificial
  Probe
ctgaggtacacaccaaagtcaactt

SEQ ID NO: 342545 - DNA, 25 bp, Artificial
  Probe
actgaggtacacaccaaagtcaact

SEQ ID NO: 342546 - DNA, 25 bp, Artificial
  Probe
cacaccctcttatttgggagacatg

SEQ ID NO: 342547 - DNA, 25 bp, Artificial
  Probe
agaggagccaggtggcacacaccct

SEQ ID NO: 342548 - DNA, 25 bp, Artificial
  Probe
agcatgcaactgaggtacacaccaa

SEQ ID NO: 342549 - DNA, 25 bp, Artificial
  Probe
gcacacaccctcttatttgggagac

SEQ ID NO: 342550 - DNA, 25 bp, Artificial
  Probe
agccaggtggcacacaccctcttat

SEQ ID NO: 342551 - DNA, 25 bp, Artificial
  Probe
ggatcctgtctcaagagggaaagag

SEQ ID NO: 342552 - DNA, 25 bp, Artificial
  Probe
tgtctccatgagtttgatgccgtcc

SEQ ID NO: 342553 - DNA, 25 bp, Artificial
  Probe
ggctctcttcttccagccatgggaa

SEQ ID NO: 342554 - DNA, 25 bp, Artificial
  Probe
tggcacacaccctcttatttgggag

SEQ ID NO: 342555 - DNA, 25 bp, Artificial
  Probe
ccagcggtacatagtaggatcctgt

SEQ ID NO: 342556 - DNA, 25 bp, Artificial
  Probe
tcaggctctcttcttccagccatgg

SEQ ID NO: 342557 - DNA, 25 bp, Artificial
  Probe
tgccgtcctggtctgcgtagtaagt

SEQ ID NO: 342558 - DNA, 25 bp, Artificial
  Probe
ctggtctgcgtagtaagtttcagac

SEQ ID NO: 342559 - DNA, 25 bp, Artificial
  Probe
accagccagcggtacatagtaggat

SEQ ID NO: 342560 - DNA, 25 bp, Artificial
  Probe
gtttgatgccgtcctggtctgcgta

SEQ ID NO: 342561 - DNA, 25 bp, Artificial
  Probe
cagaggagccaggtggcacacaccc

SEQ ID NO: 342562 - DNA, 25 bp, Artificial
  Probe
caggctctcttcttccagccatggg

SEQ ID NO: 342563 - DNA, 25 bp, Artificial
  Probe
atgcaactgaggtacacaccaaagt

SEQ ID NO: 342564 - DNA, 25 bp, Artificial
  Probe
gatgccgtcctggtctgcgtagtaa

SEQ ID NO: 342565 - DNA, 25 bp, Artificial
  Probe
taggatcctgtctcaagagggaaag

SEQ ID NO: 342566 - DNA, 25 bp, Artificial
  Probe
ggtatgtctccatgagtttgatgcc

SEQ ID NO: 342567 - DNA, 25 bp, Artificial
  Probe
gagccaggtggcacacaccctctta

SEQ ID NO: 342568 - DNA, 25 bp, Artificial
  Probe
tcaaccttcgaaacaatgcgcaccg

SEQ ID NO: 342569 - DNA, 25 bp, Artificial
  Probe
tctccatgagtttgatgccgtcctg

SEQ ID NO: 342570 - DNA, 25 bp, Artificial
  Probe
gcaactgaggtacacaccaaagtca

SEQ ID NO: 342571 - DNA, 25 bp, Artificial
  Probe
caccctcttatttgggagacatggg

SEQ ID NO: 342572 - DNA, 25 bp, Artificial
  Probe
ttgatgccgtcctggtctgcgtagt

SEQ ID NO: 342573 - DNA, 25 bp, Artificial
  Probe
gtagcatgcaactgaggtacacacc

SEQ ID NO: 342574 - DNA, 25 bp, Artificial
  Probe
tatgtctccatgagtttgatgccgt

SEQ ID NO: 342575 - DNA, 25 bp, Artificial
  Probe
cacacaccctcttatttgggagaca

SEQ ID NO: 342576 - DNA, 25 bp, Artificial
  Probe
gcgggtatgtctccatgagtttgat

SEQ ID NO: 342577 - DNA, 25 bp, Artificial
  Probe
tgatgccgtcctggtctgcgtagta

SEQ ID NO: 342578 - DNA, 25 bp, Artificial
  Probe
tcctggtctgcgtagtaagtttcag

SEQ ID NO: 342579 - DNA, 25 bp, Artificial
  Probe
aaggtagcatgcaactgaggtacac

SEQ ID NO: 342580 - DNA, 25 bp, Artificial
  Probe
agtttgatgccgtcctggtctgcgt

SEQ ID NO: 342581 - DNA, 25 bp, Artificial
  Probe
tcttcagggtagtaatcgttccgat

SEQ ID NO: 342582 - DNA, 25 bp, Artificial
  Probe
tttctcagcccctggtactctgaag

SEQ ID NO: 342583 - DNA, 25 bp, Artificial
  Probe
ccttgagacactttgtaaagccctt

SEQ ID NO: 342584 - DNA, 25 bp, Artificial
  Probe
ccccaggtcttcagggtagtaatcg

SEQ ID NO: 342585 - DNA, 25 bp, Artificial
  Probe
tgtgctgttctctgcctaaggtgca

SEQ ID NO: 342586 - DNA, 25 bp, Artificial
  Probe
ctgttctctgcctaaggtgcagcag

SEQ ID NO: 342587 - DNA, 25 bp, Artificial
  Probe
tctgatctaacattctgaatgagca

SEQ ID NO: 342588 - DNA, 25 bp, Artificial
  Probe
actctgaagcccttgagacactttg

SEQ ID NO: 342589 - DNA, 25 bp, Artificial
  Probe
tacctgtgtcttactgggttggttt

SEQ ID NO: 342590 - DNA, 25 bp, Artificial
  Probe
gcccccaggtcttcagggtagtaat

SEQ ID NO: 342591 - DNA, 25 bp, Artificial
  Probe
cttgtgaatcctaggctgtgtctcc

SEQ ID NO: 342592 - DNA, 25 bp, Artificial
  Probe
ggtttttagccctttctctgcacct

SEQ ID NO: 342593 - DNA, 25 bp, Artificial
  Probe
tgcacctcaacaagagataaaaagc

SEQ ID NO: 342594 - DNA, 25 bp, Artificial
  Probe
caaatcggacttgtgaatcctaggc

SEQ ID NO: 342595 - DNA, 25 bp, Artificial
  Probe
gtaatcgttccgatagtaggaagct

SEQ ID NO: 342596 - DNA, 25 bp, Artificial
  Probe
ggtcttcagggtagtaatcgttccg

SEQ ID NO: 342597 - DNA, 25 bp, Artificial
  Probe
ttatccaatgttgcagatttgatac

SEQ ID NO: 342598 - DNA, 25 bp, Artificial
  Probe
ccaatgttgcagatttgatacaact

SEQ ID NO: 342599 - DNA, 25 bp, Artificial
  Probe
gacaaatcggacttgtgaatcctag

SEQ ID NO: 342600 - DNA, 25 bp, Artificial
  Probe
gcagcagcagcagttcttcccacaa

SEQ ID NO: 342601 - DNA, 25 bp, Artificial
  Probe
ttctcagcccctggtactctgaagc

SEQ ID NO: 342602 - DNA, 25 bp, Artificial
  Probe
ctaacattctgaatgagcagggtag

SEQ ID NO: 342603 - DNA, 25 bp, Artificial
  Probe
cggcgagctgccagacaactctggc

SEQ ID NO: 342604 - DNA, 25 bp, Artificial
  Probe
tcggacttgtgaatcctaggctgtg

SEQ ID NO: 342605 - DNA, 25 bp, Artificial
  Probe
tagatctgatctaacattctgaatg

SEQ ID NO: 342606 - DNA, 25 bp, Artificial
  Probe
cgttccgatagtaggaagctagggt

SEQ ID NO: 342607 - DNA, 25 bp, Artificial
  Probe
acctcaacaagagataaaaagccgg

SEQ ID NO: 342608 - DNA, 25 bp, Artificial
  Probe
gcgagctgccagacaactctggctc

SEQ ID NO: 342609 - DNA, 25 bp, Artificial
  Probe
agcagcagttcttcccacaaaggcc

SEQ ID NO: 342610 - DNA, 25 bp, Artificial
  Probe
ggatcggcgagctgccagacaactc

SEQ ID NO: 342611 - DNA, 25 bp, Artificial
  Probe
gagacactttgtaaagcccttttat

SEQ ID NO: 342612 - DNA, 25 bp, Artificial
  Probe
ggcgctcatacctgtgtcttactgg

SEQ ID NO: 342613 - DNA, 25 bp, Artificial
  Probe
cctggtactctgaagcccttgagac

SEQ ID NO: 342614 - DNA, 25 bp, Artificial
  Probe
ctgcacctcaacaagagataaaaag

SEQ ID NO: 342615 - DNA, 25 bp, Artificial
  Probe
tctctgcctaaggtgcagcagcagc

SEQ ID NO: 342616 - DNA, 25 bp, Artificial
  Probe
tctggcaatgaagtgtgctgttctc

SEQ ID NO: 342617 - DNA, 25 bp, Artificial
  Probe
tgagacactttgtaaagccctttta

SEQ ID NO: 342618 - DNA, 25 bp, Artificial
  Probe
gagctgccagacaactctggctcct

SEQ ID NO: 342619 - DNA, 25 bp, Artificial
  Probe
aatcgttccgatagtaggaagctag

SEQ ID NO: 342620 - DNA, 25 bp, Artificial
  Probe
cccctggtactctgaagcccttgag

SEQ ID NO: 342621 - DNA, 25 bp, Artificial
  Probe
gggatcggcgagctgccagacaact

SEQ ID NO: 342622 - DNA, 25 bp, Artificial
  Probe
cttgagacactttgtaaagcccttt

SEQ ID NO: 342623 - DNA, 25 bp, Artificial
  Probe
aatgaagtgtgctgttctctgccta

SEQ ID NO: 342624 - DNA, 25 bp, Artificial
  Probe
cattctgaatgagcagggtaggagc

SEQ ID NO: 342625 - DNA, 25 bp, Artificial
  Probe
aaagccggcgctcatacctgtgtct

SEQ ID NO: 342626 - DNA, 25 bp, Artificial
  Probe
tgatctaacattctgaatgagcagg

SEQ ID NO: 342627 - DNA, 25 bp, Artificial
  Probe
ttcaaagtctgttcccataggtgta

SEQ ID NO: 342628 - DNA, 25 bp, Artificial
  Probe
agacgtgatgccttatgcagacttg

SEQ ID NO: 342629 - DNA, 25 bp, Artificial
  Probe
acggctacaaacctgcctgttgtag

SEQ ID NO: 342630 - DNA, 25 bp, Artificial
  Probe
atcaccaccacgtgacttgcaaatg

SEQ ID NO: 342631 - DNA, 25 bp, Artificial
  Probe
ggtgactccactttgaagtaatcct

SEQ ID NO: 342632 - DNA, 25 bp, Artificial
  Probe
aagatgcttgattccgaatgagcaa

SEQ ID NO: 342633 - DNA, 25 bp, Artificial
  Probe
agttaatattcatgccgcatggaga

SEQ ID NO: 342634 - DNA, 25 bp, Artificial
  Probe
agataaacacttagagacgtgatgc

SEQ ID NO: 342635 - DNA, 25 bp, Artificial
  Probe
ccgacaactgtttaatgattgtttt

SEQ ID NO: 342636 - DNA, 25 bp, Artificial
  Probe
tattcatgccgcatggagaaagcag

SEQ ID NO: 342637 - DNA, 25 bp, Artificial
  Probe
tggacaaaacttagccacgtagtta

SEQ ID NO: 342638 - DNA, 25 bp, Artificial
  Probe
ccactttgaagtaatcctgtggact

SEQ ID NO: 342639 - DNA, 25 bp, Artificial
  Probe
cagccaacagtttccacggggttga

SEQ ID NO: 342640 - DNA, 25 bp, Artificial
  Probe
agacttgtaccgacaactgtttaat

SEQ ID NO: 342641 - DNA, 25 bp, Artificial
  Probe
gtctgggaacgtgagactcaccaag

SEQ ID NO: 342642 - DNA, 25 bp, Artificial
  Probe
tccccaaacattattccctggggca

SEQ ID NO: 342643 - DNA, 25 bp, Artificial
  Probe
tctcaggagatcattggtgactcca

SEQ ID NO: 342644 - DNA, 25 bp, Artificial
  Probe
agtctgctgtggacggctacaaacc

SEQ ID NO: 342645 - DNA, 25 bp, Artificial
  Probe
tgtggacggctacaaacctgcctgt

SEQ ID NO: 342646 - DNA, 25 bp, Artificial
  Probe
tagttaatattcatgccgcatggag

SEQ ID NO: 342647 - DNA, 25 bp, Artificial
  Probe
tcattggtgactccactttgaagta

SEQ ID NO: 342648 - DNA, 25 bp, Artificial
  Probe
aactggacaaaacttagccacgtag

SEQ ID NO: 342649 - DNA, 25 bp, Artificial
  Probe
tacaaacctgcctgttgtagcttta

SEQ ID NO: 342650 - DNA, 25 bp, Artificial
  Probe
cccaaacattattccctggggcaat

SEQ ID NO: 342651 - DNA, 25 bp, Artificial
  Probe
ttgaagtaatcctgtggactaagac

SEQ ID NO: 342652 - DNA, 25 bp, Artificial
  Probe
tgcttgattccgaatgagcaaagac

SEQ ID NO: 342653 - DNA, 25 bp, Artificial
  Probe
tcccataggtgtacagagttctgtc

SEQ ID NO: 342654 - DNA, 25 bp, Artificial
  Probe
cctgttgtagctttaaggatgttct

SEQ ID NO: 342655 - DNA, 25 bp, Artificial
  Probe
tagccacgtagttaatattcatgcc

SEQ ID NO: 342656 - DNA, 25 bp, Artificial
  Probe
tggactggcacctcttccgagtcag

SEQ ID NO: 342657 - DNA, 25 bp, Artificial
  Probe
tccaaagaacccaggaaaccagtca

SEQ ID NO: 342658 - DNA, 25 bp, Artificial
  Probe
gctgggcctccaaagaacccaggaa

SEQ ID NO: 342659 - DNA, 25 bp, Artificial
  Probe
attccgaatgagcaaagacaaaggt

SEQ ID NO: 342660 - DNA, 25 bp, Artificial
  Probe
ttagagacgtgatgccttatgcaga

SEQ ID NO: 342661 - DNA, 25 bp, Artificial
  Probe
gaggcttttcaaagtctgttcccat

SEQ ID NO: 342662 - DNA, 25 bp, Artificial
  Probe
gagatcattggtgactccactttga

SEQ ID NO: 342663 - DNA, 25 bp, Artificial
  Probe
acctttgtggactggcacctcttcc

SEQ ID NO: 342664 - DNA, 25 bp, Artificial
  Probe
agacaccagggagtctgctgtggac

SEQ ID NO: 342665 - DNA, 25 bp, Artificial
  Probe
ggaacgtgagactcaccaagttcat

SEQ ID NO: 342666 - DNA, 25 bp, Artificial
  Probe
cagagttctgtctgggaacgtgaga

SEQ ID NO: 342667 - DNA, 25 bp, Artificial
  Probe
ggagtctgctgtggacggctacaaa

SEQ ID NO: 342668 - DNA, 25 bp, Artificial
  Probe
ttcatgccgcatggagaaagcagga

SEQ ID NO: 342669 - DNA, 25 bp, Artificial
  Probe
cttagccacgtagttaatattcatg

SEQ ID NO: 342670 - DNA, 25 bp, Artificial
  Probe
attagctgggcctccaaagaaccca

SEQ ID NO: 342671 - DNA, 25 bp, Artificial
  Probe
gaaagatgcttgattccgaatgagc

SEQ ID NO: 342672 - DNA, 25 bp, Artificial
  Probe
actggcacctcttccgagtcagggg

SEQ ID NO: 342673 - DNA, 25 bp, Artificial
  Probe
ggctttctggttcatgtaatgcact

SEQ ID NO: 342674 - DNA, 25 bp, Artificial
  Probe
tggctttctggttcatgtaatgcac

SEQ ID NO: 342675 - DNA, 25 bp, Artificial
  Probe
tggttcatgtaatgcactgtttaac

SEQ ID NO: 342676 - DNA, 25 bp, Artificial
  Probe
ttctggttcatgtaatgcactgttt

SEQ ID NO: 342677 - DNA, 25 bp, Artificial
  Probe
ctggctttctggttcatgtaatgca

SEQ ID NO: 342678 - DNA, 25 bp, Artificial
  Probe
cctggctttctggttcatgtaatgc

SEQ ID NO: 342679 - DNA, 25 bp, Artificial
  Probe
tctggttcatgtaatgcactgttta

SEQ ID NO: 342680 - DNA, 25 bp, Artificial
  Probe
ctttctggttcatgtaatgcactgt

SEQ ID NO: 342681 - DNA, 25 bp, Artificial
  Probe
tcccaatgcccttcgcatggcgaag

SEQ ID NO: 342682 - DNA, 25 bp, Artificial
  Probe
tagacctcgagagtatgagtcatgt

SEQ ID NO: 342683 - DNA, 25 bp, Artificial
  Probe
caccctctagcgagggttttcaatg

SEQ ID NO: 342684 - DNA, 25 bp, Artificial
  Probe
tcctagacctcgagagtatgagtca

SEQ ID NO: 342685 - DNA, 25 bp, Artificial
  Probe
gacctggctttctggttcatgtaat

SEQ ID NO: 342686 - DNA, 25 bp, Artificial
  Probe
agagacctggctttctggttcatgt

SEQ ID NO: 342687 - DNA, 25 bp, Artificial
  Probe
tttctggttcatgtaatgcactgtt

SEQ ID NO: 342688 - DNA, 25 bp, Artificial
  Probe
ctggttcatgtaatgcactgtttaa

SEQ ID NO: 342689 - DNA, 25 bp, Artificial
  Probe
gagacctggctttctggttcatgta

SEQ ID NO: 342690 - DNA, 25 bp, Artificial
  Probe
tcatgtaatgcactgtttaactgtg

SEQ ID NO: 342691 - DNA, 25 bp, Artificial
  Probe
ctagacctcgagagtatgagtcatg

SEQ ID NO: 342692 - DNA, 25 bp, Artificial
  Probe
gttcatgtaatgcactgtttaactg

SEQ ID NO: 342693 - DNA, 25 bp, Artificial
  Probe
ggttcatgtaatgcactgtttaact

SEQ ID NO: 342694 - DNA, 25 bp, Artificial
  Probe
acctggctttctggttcatgtaatg

SEQ ID NO: 342695 - DNA, 25 bp, Artificial
  Probe
gctttctggttcatgtaatgcactg

SEQ ID NO: 342696 - DNA, 25 bp, Artificial
  Probe
ttcctagacctcgagagtatgagtc

SEQ ID NO: 342697 - DNA, 25 bp, Artificial
  Probe
agacctcgagagtatgagtcatgta

SEQ ID NO: 342698 - DNA, 25 bp, Artificial
  Probe
tctagcgagggttttcaatgaactt

SEQ ID NO: 342699 - DNA, 25 bp, Artificial
  Probe
ttcatgtaatgcactgtttaactgt

SEQ ID NO: 342700 - DNA, 25 bp, Artificial
  Probe
ctctagcgagggttttcaatgaact

SEQ ID NO: 342701 - DNA, 25 bp, Artificial
  Probe
agacctggctttctggttcatgtaa

SEQ ID NO: 342702 - DNA, 25 bp, Artificial
  Probe
cctagacctcgagagtatgagtcat

SEQ ID NO: 342703 - DNA, 25 bp, Artificial
  Probe
atgcccttcgcatggcgaagcaggg

SEQ ID NO: 342704 - DNA, 25 bp, Artificial
  Probe
catgtaatgcactgtttaactgtgt

SEQ ID NO: 342705 - DNA, 25 bp, Artificial
  Probe
aatgcccttcgcatggcgaagcagg

SEQ ID NO: 342706 - DNA, 25 bp, Artificial
  Probe
cagagacctggctttctggttcatg

SEQ ID NO: 342707 - DNA, 25 bp, Artificial
  Probe
tttcctagacctcgagagtatgagt

SEQ ID NO: 342708 - DNA, 25 bp, Artificial
  Probe
gacctcgagagtatgagtcatgtat

SEQ ID NO: 342709 - DNA, 25 bp, Artificial
  Probe
ctagcgagggttttcaatgaacttt

SEQ ID NO: 342710 - DNA, 25 bp, Artificial
  Probe
gaattctgtagcttcttcttagagg

SEQ ID NO: 342711 - DNA, 25 bp, Artificial
  Probe
ttcttcttagaggacagttacagca

SEQ ID NO: 342712 - DNA, 25 bp, Artificial
  Probe
gttacagcaggcttcagttcatcat

SEQ ID NO: 342713 - DNA, 25 bp, Artificial
  Probe
tgccaatgcctgtacattaacaaga

SEQ ID NO: 342714 - DNA, 25 bp, Artificial
  Probe
gaagtgccttctgttttagcacttt

SEQ ID NO: 342715 - DNA, 25 bp, Artificial
  Probe
ggacagttacagcaggcttcagttc

SEQ ID NO: 342716 - DNA, 25 bp, Artificial
  Probe
ctttcctagagtataggaaagatct

SEQ ID NO: 342717 - DNA, 25 bp, Artificial
  Probe
gccttctgttttagcactttaagtc

SEQ ID NO: 342718 - DNA, 25 bp, Artificial
  Probe
acttgggactgttatctacctctaa

SEQ ID NO: 342719 - DNA, 25 bp, Artificial
  Probe
ggactgttatctacctctaactgta

SEQ ID NO: 342720 - DNA, 25 bp, Artificial
  Probe
aggacagttacagcaggcttcagtt

SEQ ID NO: 342721 - DNA, 25 bp, Artificial
  Probe
agtgccttctgttttagcactttaa

SEQ ID NO: 342722 - DNA, 25 bp, Artificial
  Probe
ctgtagcttcttcttagaggacagt

SEQ ID NO: 342723 - DNA, 25 bp, Artificial
  Probe
gtgccttctgttttagcactttaag

SEQ ID NO: 342724 - DNA, 25 bp, Artificial
  Probe
tcattcagtgctgaattctgtagct

SEQ ID NO: 342725 - DNA, 25 bp, Artificial
  Probe
gttttagcactttaagtctatcagt

SEQ ID NO: 342726 - DNA, 25 bp, Artificial
  Probe
tcagtttcattcagtgctgaattct

SEQ ID NO: 342727 - DNA, 25 bp, Artificial
  Probe
tagaggacagttacagcaggcttca

SEQ ID NO: 342728 - DNA, 25 bp, Artificial
  Probe
ttcttagaggacagttacagcaggc

SEQ ID NO: 342729 - DNA, 25 bp, Artificial
  Probe
cactttaagtctatcagtttgttga

SEQ ID NO: 342730 - DNA, 25 bp, Artificial
  Probe
tccactttcctagagtataggaaag

SEQ ID NO: 342731 - DNA, 25 bp, Artificial
  Probe
cagcaggcttcagttcatcataaca

SEQ ID NO: 342732 - DNA, 25 bp, Artificial
  Probe
tcttcttagaggacagttacagcag

SEQ ID NO: 342733 - DNA, 25 bp, Artificial
  Probe
agtttcattcagtgctgaattctgt

SEQ ID NO: 342734 - DNA, 25 bp, Artificial
  Probe
gcctgtacattaacaagatttaaag

SEQ ID NO: 342735 - DNA, 25 bp, Artificial
  Probe
gctgaattctgtagcttcttcttag

SEQ ID NO: 342736 - DNA, 25 bp, Artificial
  Probe
ccactttcctagagtataggaaaga

SEQ ID NO: 342737 - DNA, 25 bp, Artificial
  Probe
cttgggactgttatctacctctaac

SEQ ID NO: 342738 - DNA, 25 bp, Artificial
  Probe
tgtgaagtgccttctgttttagcac

SEQ ID NO: 342739 - DNA, 25 bp, Artificial
  Probe
tcagtgctgaattctgtagcttctt

SEQ ID NO: 342740 - DNA, 25 bp, Artificial
  Probe
tgtagcttcttcttagaggacagtt

SEQ ID NO: 342741 - DNA, 25 bp, Artificial
  Probe
attcagtgctgaattctgtagcttc

SEQ ID NO: 342742 - DNA, 25 bp, Artificial
  Probe
gtttcattcagtgctgaattctgta

SEQ ID NO: 342743 - DNA, 25 bp, Artificial
  Probe
tgttttagcactttaagtctatcag

SEQ ID NO: 342744 - DNA, 25 bp, Artificial
  Probe
gccaatgcctgtacattaacaagat

SEQ ID NO: 342745 - DNA, 25 bp, Artificial
  Probe
tgtgccaatgcctgtacattaacaa

SEQ ID NO: 342746 - DNA, 25 bp, Artificial
  Probe
ttaaaatgtgccaatgcctgtacat

SEQ ID NO: 342747 - DNA, 25 bp, Artificial
  Probe
gtgctgaattctgtagcttcttctt

SEQ ID NO: 342748 - DNA, 25 bp, Artificial
  Probe
tagcttcttcttagaggacagttac

SEQ ID NO: 342749 - DNA, 25 bp, Artificial
  Probe
attctgtagcttcttcttagaggac

SEQ ID NO: 342750 - DNA, 25 bp, Artificial
  Probe
ttagcactttaagtctatcagtttg

SEQ ID NO: 342751 - DNA, 25 bp, Artificial
  Probe
gacagttacagcaggcttcagttca

SEQ ID NO: 342752 - DNA, 25 bp, Artificial
  Probe
tacagcaggcttcagttcatcataa

SEQ ID NO: 342753 - DNA, 25 bp, Artificial
  Probe
ttgtgaagtgccttctgttttagca

SEQ ID NO: 342754 - DNA, 25 bp, Artificial
  Probe
aaacttgggactgttatctacctct

SEQ ID NO: 342755 - DNA, 25 bp, Artificial
  Probe
gcactttaagtctatcagtttgttg

SEQ ID NO: 342756 - DNA, 25 bp, Artificial
  Probe
ttgaagatgcccaggagcacatcta

SEQ ID NO: 342757 - DNA, 25 bp, Artificial
  Probe
agataaccagtcagaatgtcaaaga

SEQ ID NO: 342758 - DNA, 25 bp, Artificial
  Probe
atcaacctggattctcacagctatg

SEQ ID NO: 342759 - DNA, 25 bp, Artificial
  Probe
gtccaagatctcaagaagcaacctc

SEQ ID NO: 342760 - DNA, 25 bp, Artificial
  Probe
caacctggattctcacagctatgag

SEQ ID NO: 342761 - DNA, 25 bp, Artificial
  Probe
ctatgagataaccagtcagaatgtc

SEQ ID NO: 342762 - DNA, 25 bp, Artificial
  Probe
cacatttgaagatgcccaggagcac

SEQ ID NO: 342763 - DNA, 25 bp, Artificial
  Probe
gcaatcaacctggattctcacagct

SEQ ID NO: 342764 - DNA, 25 bp, Artificial
  Probe
aaccagtcagaatgtcaaagatgga

SEQ ID NO: 342765 - DNA, 25 bp, Artificial
  Probe
cggagccccaagtgcaatcaacctg

SEQ ID NO: 342766 - DNA, 25 bp, Artificial
  Probe
agaagcaacctctacaggatgtggc

SEQ ID NO: 342767 - DNA, 25 bp, Artificial
  Probe
aatctggcaagagttcctagctccc

SEQ ID NO: 342768 - DNA, 25 bp, Artificial
  Probe
tctcaagaagcaacctctacaggat

SEQ ID NO: 342769 - DNA, 25 bp, Artificial
  Probe
ttctcacagctatgagataaccagt

SEQ ID NO: 342770 - DNA, 25 bp, Artificial
  Probe
atacacatttgaagatgcccaggag

SEQ ID NO: 342771 - DNA, 25 bp, Artificial
  Probe
ccccaagtgcaatcaacctggattc

SEQ ID NO: 342772 - DNA, 25 bp, Artificial
  Probe
tctcacagctatgagataaccagtc

SEQ ID NO: 342773 - DNA, 25 bp, Artificial
  Probe
tcaagaagcaacctctacaggatgt

SEQ ID NO: 342774 - DNA, 25 bp, Artificial
  Probe
aaatctggcaagagttcctagctcc

SEQ ID NO: 342775 - DNA, 25 bp, Artificial
  Probe
ctggattctcacagctatgagataa

SEQ ID NO: 342776 - DNA, 25 bp, Artificial
  Probe
tggattctcacagctatgagataac

SEQ ID NO: 342777 - DNA, 25 bp, Artificial
  Probe
cacagctatgagataaccagtcaga

SEQ ID NO: 342778 - DNA, 25 bp, Artificial
  Probe
ctggccgtccaagatctcaagaagc

SEQ ID NO: 342779 - DNA, 25 bp, Artificial
  Probe
ggagccccaagtgcaatcaacctgg

SEQ ID NO: 342780 - DNA, 25 bp, Artificial
  Probe
tacacatttgaagatgcccaggagc

SEQ ID NO: 342781 - DNA, 25 bp, Artificial
  Probe
gtgcaatcaacctggattctcacag

SEQ ID NO: 342782 - DNA, 25 bp, Artificial
  Probe
tgaagatgcccaggagcacatctac

SEQ ID NO: 342783 - DNA, 25 bp, Artificial
  Probe
gccgtccaagatctcaagaagcaac

SEQ ID NO: 342784 - DNA, 25 bp, Artificial
  Probe
agatctcaagaagcaacctctacag

SEQ ID NO: 342785 - DNA, 25 bp, Artificial
  Probe
ctggcaagagttcctagctcccgga

SEQ ID NO: 342786 - DNA, 25 bp, Artificial
  Probe
gaagcaacctctacaggatgtggcc

SEQ ID NO: 342787 - DNA, 25 bp, Artificial
  Probe
ccgtccaagatctcaagaagcaacc

SEQ ID NO: 342788 - DNA, 25 bp, Artificial
  Probe
caagaagcaacctctacaggatgtg

SEQ ID NO: 342789 - DNA, 25 bp, Artificial
  Probe
aagatgcccaggagcacatctacaa

SEQ ID NO: 342790 - DNA, 25 bp, Artificial
  Probe
aacctctacaggatgtggccaagag

SEQ ID NO: 342791 - DNA, 25 bp, Artificial
  Probe
caacctctacaggatgtggccaaga

SEQ ID NO: 342792 - DNA, 25 bp, Artificial
  Probe
gcaagagttcctagctcccggagcc

SEQ ID NO: 342793 - DNA, 25 bp, Artificial
  Probe
taaccagtcagaatgtcaaagatgg

SEQ ID NO: 342794 - DNA, 25 bp, Artificial
  Probe
tgcccaggagcacatctacaagctg

SEQ ID NO: 342795 - DNA, 25 bp, Artificial
  Probe
acctggattctcacagctatgagat

SEQ ID NO: 342796 - DNA, 25 bp, Artificial
  Probe
acctctacaggatgtggccaagagg

SEQ ID NO: 342797 - DNA, 25 bp, Artificial
  Probe
ccaagtgcaatcaacctggattctc

SEQ ID NO: 342798 - DNA, 25 bp, Artificial
  Probe
gatgcccaggagcacatctacaagc

SEQ ID NO: 342799 - DNA, 25 bp, Artificial
  Probe
ctctacaggatgtggccaagagggt

SEQ ID NO: 342800 - DNA, 25 bp, Artificial
  Probe
tgagataaccagtcagaatgtcaaa

SEQ ID NO: 342801 - DNA, 25 bp, Artificial
  Probe
agtgcaatcaacctggattctcaca

SEQ ID NO: 342802 - DNA, 25 bp, Artificial
  Probe
tttaccagcagttcctggcccctgg

SEQ ID NO: 342803 - DNA, 25 bp, Artificial
  Probe
ttgacagcagaacaatggagtggac

SEQ ID NO: 342804 - DNA, 25 bp, Artificial
  Probe
acagcagaacaatggagtggaccct

SEQ ID NO: 342805 - DNA, 25 bp, Artificial
  Probe
agccacaccgctatgtcctagatgc

SEQ ID NO: 342806 - DNA, 25 bp, Artificial
  Probe
ttaccagcagttcctggcccctgga

SEQ ID NO: 342807 - DNA, 25 bp, Artificial
  Probe
tgtttaccagcagttcctggcccct

SEQ ID NO: 342808 - DNA, 25 bp, Artificial
  Probe
gccacaccgctatgtcctagatgca

SEQ ID NO: 342809 - DNA, 25 bp, Artificial
  Probe
tctgtttaccagcagttcctggccc

SEQ ID NO: 342810 - DNA, 25 bp, Artificial
  Probe
gctgcccgctggatcaacattgaca

SEQ ID NO: 342811 - DNA, 25 bp, Artificial
  Probe
gctatgtcctagatgcagcacaact

SEQ ID NO: 342812 - DNA, 25 bp, Artificial
  Probe
gcccgctggatcaacattgacagca

SEQ ID NO: 342813 - DNA, 25 bp, Artificial
  Probe
cgctatgtcctagatgcagcacaac

SEQ ID NO: 342814 - DNA, 25 bp, Artificial
  Probe
ctggtggactctgtttaccagcagt

SEQ ID NO: 342815 - DNA, 25 bp, Artificial
  Probe
gcagcacaactgcacatctacatgc

SEQ ID NO: 342816 - DNA, 25 bp, Artificial
  Probe
cgctttggcggacaggcccaggtcc

SEQ ID NO: 342817 - DNA, 25 bp, Artificial
  Probe
ctctgtttaccagcagttcctggcc

SEQ ID NO: 342818 - DNA, 25 bp, Artificial
  Probe
cattgacagcagaacaatggagtgg

SEQ ID NO: 342819 - DNA, 25 bp, Artificial
  Probe
ggtggactctgtttaccagcagttc

SEQ ID NO: 342820 - DNA, 25 bp, Artificial
  Probe
tgcagcacaactgcacatctacatg

SEQ ID NO: 342821 - DNA, 25 bp, Artificial
  Probe
atgtcctagatgcagcacaactgca

SEQ ID NO: 342822 - DNA, 25 bp, Artificial
  Probe
tgcccgctggatcaacattgacagc

SEQ ID NO: 342823 - DNA, 25 bp, Artificial
  Probe
ctgcccgctggatcaacattgacag

SEQ ID NO: 342824 - DNA, 25 bp, Artificial
  Probe
gatgcagcacaactgcacatctaca

SEQ ID NO: 342825 - DNA, 25 bp, Artificial
  Probe
ctggatcaacattgacagcagaaca

SEQ ID NO: 342826 - DNA, 25 bp, Artificial
  Probe
caacattgacagcagaacaatggag

SEQ ID NO: 342827 - DNA, 25 bp, Artificial
  Probe
gactctgtttaccagcagttcctgg

SEQ ID NO: 342828 - DNA, 25 bp, Artificial
  Probe
tggtggactctgtttaccagcagtt

SEQ ID NO: 342829 - DNA, 25 bp, Artificial
  Probe
tatgtcctagatgcagcacaactgc

SEQ ID NO: 342830 - DNA, 25 bp, Artificial
  Probe
gagctgcccgctggatcaacattga

SEQ ID NO: 342831 - DNA, 25 bp, Artificial
  Probe
ctagatgcagcacaactgcacatct

SEQ ID NO: 342832 - DNA, 25 bp, Artificial
  Probe
actctgtttaccagcagttcctggc

SEQ ID NO: 342833 - DNA, 25 bp, Artificial
  Probe
caccgctatgtcctagatgcagcac

SEQ ID NO: 342834 - DNA, 25 bp, Artificial
  Probe
tcctagatgcagcacaactgcacat

SEQ ID NO: 342835 - DNA, 25 bp, Artificial
  Probe
aacattgacagcagaacaatggagt

SEQ ID NO: 342836 - DNA, 25 bp, Artificial
  Probe
ccctggtggactctgtttaccagca

SEQ ID NO: 342837 - DNA, 25 bp, Artificial
  Probe
gtcctagatgcagcacaactgcaca

SEQ ID NO: 342838 - DNA, 25 bp, Artificial
  Probe
tgtcctagatgcagcacaactgcac

SEQ ID NO: 342839 - DNA, 25 bp, Artificial
  Probe
ccacaccgctatgtcctagatgcag

SEQ ID NO: 342840 - DNA, 25 bp, Artificial
  Probe
ccaccctggtggactctgtttacca

SEQ ID NO: 342841 - DNA, 25 bp, Artificial
  Probe
tggcccctggagctgcccgctggat

SEQ ID NO: 342842 - DNA, 25 bp, Artificial
  Probe
taccagcagttcctggcccctggag

SEQ ID NO: 342843 - DNA, 25 bp, Artificial
  Probe
ccgctatgtcctagatgcagcacaa

SEQ ID NO: 342844 - DNA, 25 bp, Artificial
  Probe
caccctggtggactctgtttaccag

SEQ ID NO: 342845 - DNA, 25 bp, Artificial
  Probe
ggagctgcccgctggatcaacattg

SEQ ID NO: 342846 - DNA, 25 bp, Artificial
  Probe
agatgcagcacaactgcacatctac

SEQ ID NO: 342847 - DNA, 25 bp, Artificial
  Probe
gctttggcggacaggcccaggtccc

SEQ ID NO: 342848 - DNA, 25 bp, Artificial
  Probe
tatcctcattaatggggctcagtac

SEQ ID NO: 342849 - DNA, 25 bp, Artificial
  Probe
cattaatggggctcagtacttccgg

SEQ ID NO: 342850 - DNA, 25 bp, Artificial
  Probe
gaacaccaggctgcagagactcaag

SEQ ID NO: 342851 - DNA, 25 bp, Artificial
  Probe
ttttgttcttcagcagaatttgacc

SEQ ID NO: 342852 - DNA, 25 bp, Artificial
  Probe
cttgcatctggaagtgagagttcat

SEQ ID NO: 342853 - DNA, 25 bp, Artificial
  Probe
aggctgccatcaagcaagccaccaa

SEQ ID NO: 342854 - DNA, 25 bp, Artificial
  Probe
tcttcgaaggtctgggacacctcat

SEQ ID NO: 342855 - DNA, 25 bp, Artificial
  Probe
gcctccagcaacacaagttccagta

SEQ ID NO: 342856 - DNA, 25 bp, Artificial
  Probe
agagctagagtacatccatgccctg

SEQ ID NO: 342857 - DNA, 25 bp, Artificial
  Probe
tcacgggaggcagacttggactttg

SEQ ID NO: 342858 - DNA, 25 bp, Artificial
  Probe
tttgaccaacatcaccatgtcacgg

SEQ ID NO: 342859 - DNA, 25 bp, Artificial
  Probe
ggtggaccagggtgtgaaatacaca

SEQ ID NO: 342860 - DNA, 25 bp, Artificial
  Probe
actatgccattgtggccaatgtgga

SEQ ID NO: 342861 - DNA, 25 bp, Artificial
  Probe
gctgcagagactcaaggagatcatc

SEQ ID NO: 342862 - DNA, 25 bp, Artificial
  Probe
gagagttcattgtttccactatctc

SEQ ID NO: 342863 - DNA, 25 bp, Artificial
  Probe
agcctccagcaacacaagttccagt

SEQ ID NO: 342864 - DNA, 25 bp, Artificial
  Probe
catcagtgagtctggcatcaagaaa

SEQ ID NO: 342865 - DNA, 25 bp, Artificial
  Probe
cgaaggtctgggacacctcatctcc

SEQ ID NO: 342866 - DNA, 25 bp, Artificial
  Probe
cacaagttccagtacatcttcgaag

SEQ ID NO: 342867 - DNA, 25 bp, Artificial
  Probe
ggattatgaccctttagtggtcaag

SEQ ID NO: 342868 - DNA, 25 bp, Artificial
  Probe
gacatcagtgccatggaagaggcca

SEQ ID NO: 342869 - DNA, 25 bp, Artificial
  Probe
gaagaggccatgagcgccagcctcc

SEQ ID NO: 342870 - DNA, 25 bp, Artificial
  Probe
tgatgagctcctgaacctggtggtg

SEQ ID NO: 342871 - DNA, 25 bp, Artificial
  Probe
cagtgccatggaagaggccatgagc

SEQ ID NO: 342872 - DNA, 25 bp, Artificial
  Probe
catcaccatgtcacgggaggcagac

SEQ ID NO: 342873 - DNA, 25 bp, Artificial
  Probe
gggaactatgccattgtggccaatg

SEQ ID NO: 342874 - DNA, 25 bp, Artificial
  Probe
tgagagttcattgtttccactatct

SEQ ID NO: 342875 - DNA, 25 bp, Artificial
  Probe
ccattgtggccaatgtggaaagcat

SEQ ID NO: 342876 - DNA, 25 bp, Artificial
  Probe
catctcctgtatcctcattaatggg

SEQ ID NO: 342877 - DNA, 25 bp, Artificial
  Probe
ctgtgagcaggctgccatcaagcaa

SEQ ID NO: 342878 - DNA, 25 bp, Artificial
  Probe
caaagacatcagtgccatggaagag

SEQ ID NO: 342879 - DNA, 25 bp, Artificial
  Probe
ccatgtcacgggaggcagacttgga

SEQ ID NO: 342880 - DNA, 25 bp, Artificial
  Probe
cacccagaacaccaggctgcagaga

SEQ ID NO: 342881 - DNA, 25 bp, Artificial
  Probe
gaaatacacagagctagagtacatc

SEQ ID NO: 342882 - DNA, 25 bp, Artificial
  Probe
ggaggcagacttggactttgcaaga

SEQ ID NO: 342883 - DNA, 25 bp, Artificial
  Probe
atcaagcaagccaccaaggacaaga

SEQ ID NO: 342884 - DNA, 25 bp, Artificial
  Probe
tacttccggcgcatcagtgagtctg

SEQ ID NO: 342885 - DNA, 25 bp, Artificial
  Probe
gcagaatttgaccaacatcaccatg

SEQ ID NO: 342886 - DNA, 25 bp, Artificial
  Probe
ctgctgcaccgaagccagactggcg

SEQ ID NO: 342887 - DNA, 25 bp, Artificial
  Probe
tgggacacctcatctcctgtatcct

SEQ ID NO: 342888 - DNA, 25 bp, Artificial
  Probe
gttcttcagcagaatttgaccaaca

SEQ ID NO: 342889 - DNA, 25 bp, Artificial
  Probe
gggctcagtacttccggcgcatcag

SEQ ID NO: 342890 - DNA, 25 bp, Artificial
  Probe
agcatggattatgaccctttagtgg

SEQ ID NO: 342891 - DNA, 25 bp, Artificial
  Probe
tgccatcaagcaagccaccaaggac

SEQ ID NO: 342892 - DNA, 25 bp, Artificial
  Probe
agagtacatccatgccctgaccctg

SEQ ID NO: 342893 - DNA, 25 bp, Artificial
  Probe
actcaaggagatcatctgtgagcag

SEQ ID NO: 342894 - DNA, 25 bp, Artificial
  Probe
cgttgcagtggcagaggtcattaag

SEQ ID NO: 342895 - DNA, 25 bp, Artificial
  Probe
tggcactggccgtcgttttacaacg

SEQ ID NO: 342896 - DNA, 25 bp, Artificial
  Probe
acgccagccgggacatgaagcagac

SEQ ID NO: 342897 - DNA, 25 bp, Artificial
  Probe
caatcgttgcagtggcagaggtcat

SEQ ID NO: 342898 - DNA, 25 bp, Artificial
  Probe
gtggctttcctattgtcactgtatt

SEQ ID NO: 342899 - DNA, 25 bp, Artificial
  Probe
aagctccttaagtagccctgtcctc

SEQ ID NO: 342900 - DNA, 25 bp, Artificial
  Probe
ttccaggagattgtggtgcccagtc

SEQ ID NO: 342901 - DNA, 25 bp, Artificial
  Probe
tggtcagcaaatatccagacatcag

SEQ ID NO: 342902 - DNA, 25 bp, Artificial
  Probe
gaggtcattaagctcacggacccgt

SEQ ID NO: 342903 - DNA, 25 bp, Artificial
  Probe
tgcagatggacactgtgacacaatc

SEQ ID NO: 342904 - DNA, 25 bp, Artificial
  Probe
tgtggcatctctactgtgagaaaaa

SEQ ID NO: 342905 - DNA, 25 bp, Artificial
  Probe
ttgtggctttcctattgtcactgta

SEQ ID NO: 342906 - DNA, 25 bp, Artificial
  Probe
taagtagccctgtcctccctgctgt

SEQ ID NO: 342907 - DNA, 25 bp, Artificial
  Probe
tcagcaaatatccagacatcagaga

SEQ ID NO: 342908 - DNA, 25 bp, Artificial
  Probe
aggagattgtggtgcccagtctgaa

SEQ ID NO: 342909 - DNA, 25 bp, Artificial
  Probe
ttagcttggcactggccgtcgtttt

SEQ ID NO: 342910 - DNA, 25 bp, Artificial
  Probe
gtcctgtgtgtctttactttgtggc

SEQ ID NO: 342911 - DNA, 25 bp, Artificial
  Probe
acacgttcctgacttgtgtggcatc

SEQ ID NO: 342912 - DNA, 25 bp, Artificial
  Probe
gtgagcgtcactttttcctccctat

SEQ ID NO: 342913 - DNA, 25 bp, Artificial
  Probe
cagccgggacatgaagcagaccatc

SEQ ID NO: 342914 - DNA, 25 bp, Artificial
  Probe
ttaagtagccctgtcctccctgctg

SEQ ID NO: 342915 - DNA, 25 bp, Artificial
  Probe
agaggtcattaagctcacggacccg

SEQ ID NO: 342916 - DNA, 25 bp, Artificial
  Probe
ggctttcctattgtcactgtattaa

SEQ ID NO: 342917 - DNA, 25 bp, Artificial
  Probe
ccaggagattgtggtgcccagtctg

SEQ ID NO: 342918 - DNA, 25 bp, Artificial
  Probe
gagcagggccccatgcaagcgagcc

SEQ ID NO: 342919 - DNA, 25 bp, Artificial
  Probe
gtttagtgagcgtcactttttcctc

SEQ ID NO: 342920 - DNA, 25 bp, Artificial
  Probe
gacttgtgtggcatctctactgtga

SEQ ID NO: 342921 - DNA, 25 bp, Artificial
  Probe
acatgcggccgcaagcttattccct

SEQ ID NO: 342922 - DNA, 25 bp, Artificial
  Probe
ctggcactgcgaggagacgccagcc

SEQ ID NO: 342923 - DNA, 25 bp, Artificial
  Probe
gagacactggagcagggccccatgc

SEQ ID NO: 342924 - DNA, 25 bp, Artificial
  Probe
tgtcctccctgctgtcctgtgtgtc

SEQ ID NO: 342925 - DNA, 25 bp, Artificial
  Probe
tatgtgcccatcttccaggagattg

SEQ ID NO: 342926 - DNA, 25 bp, Artificial
  Probe
tcctgacttgtgtggcatctctact

SEQ ID NO: 342927 - DNA, 25 bp, Artificial
  Probe
tgcagtggcagaggtcattaagctc

SEQ ID NO: 342928 - DNA, 25 bp, Artificial
  Probe
agacactggagcagggccccatgca

SEQ ID NO: 342929 - DNA, 25 bp, Artificial
  Probe
gacatgaagcagaccatcatggaga

SEQ ID NO: 342930 - DNA, 25 bp, Artificial
  Probe
ttttagcttggcactggccgtcgtt

SEQ ID NO: 342931 - DNA, 25 bp, Artificial
  Probe
gtggcaaagctccttaagtagccct

SEQ ID NO: 342932 - DNA, 25 bp, Artificial
  Probe
cagatggacactgtgacacaatcgt

SEQ ID NO: 342933 - DNA, 25 bp, Artificial
  Probe
tggcaaagctccttaagtagccctg

SEQ ID NO: 342934 - DNA, 25 bp, Artificial
  Probe
tggagacactggagcagggccccat

SEQ ID NO: 342935 - DNA, 25 bp, Artificial
  Probe
tactttgtggctttcctattgtcac

SEQ ID NO: 342936 - DNA, 25 bp, Artificial
  Probe
ctttgtggctttcctattgtcactg

SEQ ID NO: 342937 - DNA, 25 bp, Artificial
  Probe
ccgcaagcttattccctttagtgag

SEQ ID NO: 342938 - DNA, 25 bp, Artificial
  Probe
cctgctgtcctgtgtgtctttactt

SEQ ID NO: 342939 - DNA, 25 bp, Artificial
  Probe
catgaagcagaccatcatggagaca

SEQ ID NO: 342940 - DNA, 25 bp, Artificial
  Probe
ctgatgctttcctggccagtgcgga

SEQ ID NO: 342941 - DNA, 25 bp, Artificial
  Probe
tacaaacagtgctcgcctcatggaa

SEQ ID NO: 342942 - DNA, 25 bp, Artificial
  Probe
ctcatggaagccatgagtgaggtga

SEQ ID NO: 342943 - DNA, 25 bp, Artificial
  Probe
tttcctggccagtgcggaagtaatt

SEQ ID NO: 342944 - DNA, 25 bp, Artificial
  Probe
tgcagtgactttgcattcacagaca

SEQ ID NO: 342945 - DNA, 25 bp, Artificial
  Probe
tgacaactgctgttacaaacagtgc

SEQ ID NO: 342946 - DNA, 25 bp, Artificial
  Probe
ccctgcgcttcctgggtagagagaa

SEQ ID NO: 342947 - DNA, 25 bp, Artificial
  Probe
acagacatggctaaggaagacaagg

SEQ ID NO: 342948 - DNA, 25 bp, Artificial
  Probe
gaagccatgagtgaggtgaaatcct

SEQ ID NO: 342949 - DNA, 25 bp, Artificial
  Probe
ggaagacaaggcttccagtgagtca

SEQ ID NO: 342950 - DNA, 25 bp, Artificial
  Probe
tcccagctatactcttcagaactgg

SEQ ID NO: 342951 - DNA, 25 bp, Artificial
  Probe
cagctatactcttcagaactgggaa

SEQ ID NO: 342952 - DNA, 25 bp, Artificial
  Probe
cattcacagacatggctaaggaaga

SEQ ID NO: 342953 - DNA, 25 bp, Artificial
  Probe
aagtggtccggctgctaaactgcag

SEQ ID NO: 342954 - DNA, 25 bp, Artificial
  Probe
aggtgaaatcctgatgctttcctgg

SEQ ID NO: 342955 - DNA, 25 bp, Artificial
  Probe
gctcgcctcatggaagccatgagtg

SEQ ID NO: 342956 - DNA, 25 bp, Artificial
  Probe
tgcattcacagacatggctaaggaa

SEQ ID NO: 342957 - DNA, 25 bp, Artificial
  Probe
ttacaaacagtgctcgcctcatgga

SEQ ID NO: 342958 - DNA, 25 bp, Artificial
  Probe
ggaagtaattcctgattgtggaccc

SEQ ID NO: 342959 - DNA, 25 bp, Artificial
  Probe
agatatcagccctgcgcttcctggg

SEQ ID NO: 342960 - DNA, 25 bp, Artificial
  Probe
ggaagccatgagtgaggtgaaatcc

SEQ ID NO: 342961 - DNA, 25 bp, Artificial
  Probe
attgtggaccccagtgagaagctgg

SEQ ID NO: 342962 - DNA, 25 bp, Artificial
  Probe
attcctgattgtggaccccagtgag

SEQ ID NO: 342963 - DNA, 25 bp, Artificial
  Probe
acagtgctcgcctcatggaagccat

SEQ ID NO: 342964 - DNA, 25 bp, Artificial
  Probe
tttgcattcacagacatggctaagg

SEQ ID NO: 342965 - DNA, 25 bp, Artificial
  Probe
tgagaagctggtgtttcacatctac

SEQ ID NO: 342966 - DNA, 25 bp, Artificial
  Probe
ttgtggaccccagtgagaagctggt

SEQ ID NO: 342967 - DNA, 25 bp, Artificial
  Probe
gctttcctggccagtgcggaagtaa

SEQ ID NO: 342968 - DNA, 25 bp, Artificial
  Probe
gaagctggtgtttcacatctacctt

SEQ ID NO: 342969 - DNA, 25 bp, Artificial
  Probe
actcttcagaactgggaacttcaga

SEQ ID NO: 342970 - DNA, 25 bp, Artificial
  Probe
cctcatcttggtggtgttcttgggg

SEQ ID NO: 342971 - DNA, 25 bp, Artificial
  Probe
cacagacatggctaaggaagacaag

SEQ ID NO: 342972 - DNA, 25 bp, Artificial
  Probe
tagatgaagtggtccggctgctaaa

SEQ ID NO: 342973 - DNA, 25 bp, Artificial
  Probe
gaagtaattcctgattgtggacccc

SEQ ID NO: 342974 - DNA, 25 bp, Artificial
  Probe
tggaccccagtgagaagctggtgtt

SEQ ID NO: 342975 - DNA, 25 bp, Artificial
  Probe
tggccagtgcggaagtaattcctga

SEQ ID NO: 342976 - DNA, 25 bp, Artificial
  Probe
ccagctatactcttcagaactggga

SEQ ID NO: 342977 - DNA, 25 bp, Artificial
  Probe
tcagccctgcgcttcctgggtagag

SEQ ID NO: 342978 - DNA, 25 bp, Artificial
  Probe
ttcagaactgggaacttcagaacta

SEQ ID NO: 342979 - DNA, 25 bp, Artificial
  Probe
gaagacaaggcttccagtgagtcac

SEQ ID NO: 342980 - DNA, 25 bp, Artificial
  Probe
ttctgacaactgctgttacaaacag

SEQ ID NO: 342981 - DNA, 25 bp, Artificial
  Probe
agaagctggtgtttcacatctacct

SEQ ID NO: 342982 - DNA, 25 bp, Artificial
  Probe
aactgctgttacaaacagtgctcgc

SEQ ID NO: 342983 - DNA, 25 bp, Artificial
  Probe
tcctgattgtggaccccagtgagaa

SEQ ID NO: 342984 - DNA, 25 bp, Artificial
  Probe
actttgcattcacagacatggctaa

SEQ ID NO: 342985 - DNA, 25 bp, Artificial
  Probe
cccagtgagaagctggtgtttcaca

SEQ ID NO: 342986 - DNA, 25 bp, Artificial
  Probe
gacatgtcatccacctgcctcttgg

SEQ ID NO: 342987 - DNA, 25 bp, Artificial
  Probe
gttcctccttcatttgacctcagtg

SEQ ID NO: 342988 - DNA, 25 bp, Artificial
  Probe
aggctaccaagaaggcagctccatc

SEQ ID NO: 342989 - DNA, 25 bp, Artificial
  Probe
attctgggttcttgggacccaggca

SEQ ID NO: 342990 - DNA, 25 bp, Artificial
  Probe
gggtggctttctcttagacctcagg

SEQ ID NO: 342991 - DNA, 25 bp, Artificial
  Probe
tccaacaacaagaacagcaatagcg

SEQ ID NO: 342992 - DNA, 25 bp, Artificial
  Probe
cttgagttggtgctgcctgcctggt

SEQ ID NO: 342993 - DNA, 25 bp, Artificial
  Probe
aggcactgtctctgcagccctagca

SEQ ID NO: 342994 - DNA, 25 bp, Artificial
  Probe
acaacaagaacagcaatagcgatgg

SEQ ID NO: 342995 - DNA, 25 bp, Artificial
  Probe
agacctcaggggacatgtcatccac

SEQ ID NO: 342996 - DNA, 25 bp, Artificial
  Probe
ttcttgggacccaggcactgtctct

SEQ ID NO: 342997 - DNA, 25 bp, Artificial
  Probe
cttcctggattctgggttcttggga

SEQ ID NO: 342998 - DNA, 25 bp, Artificial
  Probe
tgcagccctagcatagcctgggact

SEQ ID NO: 342999 - DNA, 25 bp, Artificial
  Probe
caagaaggcagctccatctacagcc

SEQ ID NO: 343000 - DNA, 25 bp, Artificial
  Probe
ggacatgtcatccacctgcctcttg

SEQ ID NO: 343001 - DNA, 25 bp, Artificial
  Probe
ctcaggcaggacttgagttggtgct

SEQ ID NO: 343002 - DNA, 25 bp, Artificial
  Probe
agacagtggctcaggcaggacttga

SEQ ID NO: 343003 - DNA, 25 bp, Artificial
  Probe
catagcctgggactgcagccctgtg

SEQ ID NO: 343004 - DNA, 25 bp, Artificial
  Probe
ctgcagccctgtgcaatgtcagcta

SEQ ID NO: 343005 - DNA, 25 bp, Artificial
  Probe
ggactgcagccctgtgcaatgtcag

SEQ ID NO: 343006 - DNA, 25 bp, Artificial
  Probe
agaactggtaggagccttgctgcac

SEQ ID NO: 343007 - DNA, 25 bp, Artificial
  Probe
gctgggacaaccagaactggtagga

SEQ ID NO: 343008 - DNA, 25 bp, Artificial
  Probe
cctagcatagcctgggactgcagcc

SEQ ID NO: 343009 - DNA, 25 bp, Artificial
  Probe
tctgcagccctagcatagcctggga

SEQ ID NO: 343010 - DNA, 25 bp, Artificial
  Probe
ggtcctctgagcagccttcctggat

SEQ ID NO: 343011 - DNA, 25 bp, Artificial
  Probe
ctcaggggacatgtcatccacctgc

SEQ ID NO: 343012 - DNA, 25 bp, Artificial
  Probe
cactgtctctgcagccctagcatag

SEQ ID NO: 343013 - DNA, 25 bp, Artificial
  Probe
ggcaaaggctaccaagaaggcagct

SEQ ID NO: 343014 - DNA, 25 bp, Artificial
  Probe
ctcttagacctcaggggacatgtca

SEQ ID NO: 343015 - DNA, 25 bp, Artificial
  Probe
ctctgagcagccttcctggattctg

SEQ ID NO: 343016 - DNA, 25 bp, Artificial
  Probe
ccttcatttgacctcagtgtgaaga

SEQ ID NO: 343017 - DNA, 25 bp, Artificial
  Probe
cctcagtgtgaagacagtggctcag

SEQ ID NO: 343018 - DNA, 25 bp, Artificial
  Probe
gggacccaggcactgtctctgcagc

SEQ ID NO: 343019 - DNA, 25 bp, Artificial
  Probe
tgggacccaggcactgtctctgcag

SEQ ID NO: 343020 - DNA, 25 bp, Artificial
  Probe
tgggttcttgggacccaggcactgt

SEQ ID NO: 343021 - DNA, 25 bp, Artificial
  Probe
gaagacagtggctcaggcaggactt

SEQ ID NO: 343022 - DNA, 25 bp, Artificial
  Probe
caggacttgagttggtgctgcctgc

SEQ ID NO: 343023 - DNA, 25 bp, Artificial
  Probe
ggtaggagccttgctgcaccctaac

SEQ ID NO: 343024 - DNA, 25 bp, Artificial
  Probe
ctggtaggagccttgctgcacccta

SEQ ID NO: 343025 - DNA, 25 bp, Artificial
  Probe
gcctgggactgcagccctgtgcaat

SEQ ID NO: 343026 - DNA, 25 bp, Artificial
  Probe
taccaagaaggcagctccatctaca

SEQ ID NO: 343027 - DNA, 25 bp, Artificial
  Probe
tctctgcagccctagcatagcctgg

SEQ ID NO: 343028 - DNA, 25 bp, Artificial
  Probe
tggattctgggttcttgggacccag

SEQ ID NO: 343029 - DNA, 25 bp, Artificial
  Probe
ctgcctcttgggtcctctgagcagc

SEQ ID NO: 343030 - DNA, 25 bp, Artificial
  Probe
aggggacatgtcatccacctgcctc

SEQ ID NO: 343031 - DNA, 25 bp, Artificial
  Probe
ctggattctgggttcttgggaccca

SEQ ID NO: 343032 - DNA, 25 bp, Artificial
  Probe
ttatgtaagattgctcatgttcaag

SEQ ID NO: 343033 - DNA, 25 bp, Artificial
  Probe
ttccatttctataaacagagaaatt

SEQ ID NO: 343034 - DNA, 25 bp, Artificial
  Probe
gcctattccatagtcagcagttact

SEQ ID NO: 343035 - DNA, 25 bp, Artificial
  Probe
aaactgtgttagctgatgctgcaat

SEQ ID NO: 343036 - DNA, 25 bp, Artificial
  Probe
gtgttagctgatgctgcaatgaacc

SEQ ID NO: 343037 - DNA, 25 bp, Artificial
  Probe
cctattccatagtcagcagttactc

SEQ ID NO: 343038 - DNA, 25 bp, Artificial
  Probe
ctacagctcaatagaacccaattaa

SEQ ID NO: 343039 - DNA, 25 bp, Artificial
  Probe
actgtgttagctgatgctgcaatga

SEQ ID NO: 343040 - DNA, 25 bp, Artificial
  Probe
attaggtttattgtggaggtaaatg

SEQ ID NO: 343041 - DNA, 25 bp, Artificial
  Probe
taaatcgagttttgcaaaagattaa

SEQ ID NO: 343042 - DNA, 25 bp, Artificial
  Probe
aaagcctattccatagtcagcagtt

SEQ ID NO: 343043 - DNA, 25 bp, Artificial
  Probe
agctgatgctgcaatgaacccttta

SEQ ID NO: 343044 - DNA, 25 bp, Artificial
  Probe
taaactgtgttagctgatgctgcaa

SEQ ID NO: 343045 - DNA, 25 bp, Artificial
  Probe
cagctcaatagaacccaattaattg

SEQ ID NO: 343046 - DNA, 25 bp, Artificial
  Probe
gattaaatgtcccaacttcctttca

SEQ ID NO: 343047 - DNA, 25 bp, Artificial
  Probe
ctgatgctgcaatgaaccctttacc

SEQ ID NO: 343048 - DNA, 25 bp, Artificial
  Probe
ttagtattaggtttattgtggaggt

SEQ ID NO: 343049 - DNA, 25 bp, Artificial
  Probe
aacccaattaattgttatgtaagat

SEQ ID NO: 343050 - DNA, 25 bp, Artificial
  Probe
agcactgatggtagaattggtctgt

SEQ ID NO: 343051 - DNA, 25 bp, Artificial
  Probe
gctcatgttcaagttagatattgtt

SEQ ID NO: 343052 - DNA, 25 bp, Artificial
  Probe
tagctgatgctgcaatgaacccttt

SEQ ID NO: 343053 - DNA, 25 bp, Artificial
  Probe
tcaatatttaatcatccataaatgc

SEQ ID NO: 343054 - DNA, 25 bp, Artificial
  Probe
caaagcctattccatagtcagcagt

SEQ ID NO: 343055 - DNA, 25 bp, Artificial
  Probe
gttagctgatgctgcaatgaaccct

SEQ ID NO: 343056 - DNA, 25 bp, Artificial
  Probe
agcctattccatagtcagcagttac

SEQ ID NO: 343057 - DNA, 25 bp, Artificial
  Probe
ttagctgatgctgcaatgaaccctt

SEQ ID NO: 343058 - DNA, 25 bp, Artificial
  Probe
agtataaactgtgttagctgatgct

SEQ ID NO: 343059 - DNA, 25 bp, Artificial
  Probe
atgctgcaatgaaccctttaccaaa

SEQ ID NO: 343060 - DNA, 25 bp, Artificial
  Probe
tgttagctgatgctgcaatgaaccc

SEQ ID NO: 343061 - DNA, 25 bp, Artificial
  Probe
tctttataactttgtattctacagc

SEQ ID NO: 343062 - DNA, 25 bp, Artificial
  Probe
ccaaagcctattccatagtcagcag

SEQ ID NO: 343063 - DNA, 25 bp, Artificial
  Probe
gatgctgcaatgaaccctttaccaa

SEQ ID NO: 343064 - DNA, 25 bp, Artificial
  Probe
gtatatgaaaacccaaagcctattc

SEQ ID NO: 343065 - DNA, 25 bp, Artificial
  Probe
ctgtgttagctgatgctgcaatgaa

SEQ ID NO: 343066 - DNA, 25 bp, Artificial
  Probe
agtcagcagttactctaaacattag

SEQ ID NO: 343067 - DNA, 25 bp, Artificial
  Probe
tgatgctgcaatgaaccctttacca

SEQ ID NO: 343068 - DNA, 25 bp, Artificial
  Probe
aagttacaatagcactgatggtaga

SEQ ID NO: 343069 - DNA, 25 bp, Artificial
  Probe
ctctaaacattagtattaggtttat

SEQ ID NO: 343070 - DNA, 25 bp, Artificial
  Probe
tataaactgtgttagctgatgctgc

SEQ ID NO: 343071 - DNA, 25 bp, Artificial
  Probe
tatgtaagattgctcatgttcaagt

SEQ ID NO: 343072 - DNA, 25 bp, Artificial
  Probe
aactgtgttagctgatgctgcaatg

SEQ ID NO: 343073 - DNA, 25 bp, Artificial
  Probe
aagcctattccatagtcagcagtta

SEQ ID NO: 343074 - DNA, 25 bp, Artificial
  Probe
ataaactgtgttagctgatgctgca

SEQ ID NO: 343075 - DNA, 25 bp, Artificial
  Probe
gtcagcagttactctaaacattagt

SEQ ID NO: 343076 - DNA, 25 bp, Artificial
  Probe
tgtgttagctgatgctgcaatgaac

SEQ ID NO: 343077 - DNA, 25 bp, Artificial
  Probe
ctcatgttcaagttagatattgtta

SEQ ID NO: 343078 - DNA, 25 bp, Artificial
  Probe
cttatcgggtcagatacacaagttg

SEQ ID NO: 343079 - DNA, 25 bp, Artificial
  Probe
tgaagagctggtcattaagggatcc

SEQ ID NO: 343080 - DNA, 25 bp, Artificial
  Probe
tcctgatgaggcagacatggggact

SEQ ID NO: 343081 - DNA, 25 bp, Artificial
  Probe
cttgccatgttaatgaggaaaggac

SEQ ID NO: 343082 - DNA, 25 bp, Artificial
  Probe
agccagatattgtgtgcattcctga

SEQ ID NO: 343083 - DNA, 25 bp, Artificial
  Probe
gaactgattccgtacctagtaagaa

SEQ ID NO: 343084 - DNA, 25 bp, Artificial
  Probe
tctgtcattggctcatcctgtgtca

SEQ ID NO: 343085 - DNA, 25 bp, Artificial
  Probe
gcccaagtctttagatatttacagt

SEQ ID NO: 343086 - DNA, 25 bp, Artificial
  Probe
aagagagcacagaaccagttccagg

SEQ ID NO: 343087 - DNA, 25 bp, Artificial
  Probe
tgattggagccgacagccttatcgg

SEQ ID NO: 343088 - DNA, 25 bp, Artificial
  Probe
aagatgtccaaaaggctctgtgtgc

SEQ ID NO: 343089 - DNA, 25 bp, Artificial
  Probe
tctgactttggctccctatgatgcc

SEQ ID NO: 343090 - DNA, 25 bp, Artificial
  Probe
ctctgtgtgcagagttcaagatgaa

SEQ ID NO: 343091 - DNA, 25 bp, Artificial
  Probe
tgataacagatgttgccttacacga

SEQ ID NO: 343092 - DNA, 25 bp, Artificial
  Probe
ctttatggctaatgaagcagacttg

SEQ ID NO: 343093 - DNA, 25 bp, Artificial
  Probe
gactgcagattctctacgccacata

SEQ ID NO: 343094 - DNA, 25 bp, Artificial
  Probe
agcccaagtctttagatatttacag

SEQ ID NO: 343095 - DNA, 25 bp, Artificial
  Probe
cctgcttgagcgagttggatttgaa

SEQ ID NO: 343096 - DNA, 25 bp, Artificial
  Probe
aaaggctgctctttatggctaatga

SEQ ID NO: 343097 - DNA, 25 bp, Artificial
  Probe
ctggaatgcttttcgaagagacaag

SEQ ID NO: 343098 - DNA, 25 bp, Artificial
  Probe
ttggctccctatgatgcctgctgga

SEQ ID NO: 343099 - DNA, 25 bp, Artificial
  Probe
agagctggtcattaagggatccatc

SEQ ID NO: 343100 - DNA, 25 bp, Artificial
  Probe
cacttctatccgaagcgaactgatt

SEQ ID NO: 343101 - DNA, 25 bp, Artificial
  Probe
aagatttgtctagatcacaggttcg

SEQ ID NO: 343102 - DNA, 25 bp, Artificial
  Probe
aagtcaatcacttctatccgaagcg

SEQ ID NO: 343103 - DNA, 25 bp, Artificial
  Probe
aaggaaggactttgctctcgagtaa

SEQ ID NO: 343104 - DNA, 25 bp, Artificial
  Probe
gaaccagttccaggtcagaagggga

SEQ ID NO: 343105 - DNA, 25 bp, Artificial
  Probe
tgaagaagtcatcgtggttacaacc

SEQ ID NO: 343106 - DNA, 25 bp, Artificial
  Probe
cgatctgataacagatgttgcctta

SEQ ID NO: 343107 - DNA, 25 bp, Artificial
  Probe
gattccgtacctagtaagaaaacag

SEQ ID NO: 343108 - DNA, 25 bp, Artificial
  Probe
cagcctcctcacagcaaaggcagga

SEQ ID NO: 343109 - DNA, 25 bp, Artificial
  Probe
agtggagcagcgtgacttcattgga

SEQ ID NO: 343110 - DNA, 25 bp, Artificial
  Probe
gttctttgtcctgaggaatcaatga

SEQ ID NO: 343111 - DNA, 25 bp, Artificial
  Probe
tccacatcatgaaggaaggactttg

SEQ ID NO: 343112 - DNA, 25 bp, Artificial
  Probe
tgttctttgtcctgaggaatcaatg

SEQ ID NO: 343113 - DNA, 25 bp, Artificial
  Probe
cattggagtggacagcacaggaaaa

SEQ ID NO: 343114 - DNA, 25 bp, Artificial
  Probe
atcgtggttacaaccaaagatgtcc

SEQ ID NO: 343115 - DNA, 25 bp, Artificial
  Probe
aagacaacactctgactttggctcc

SEQ ID NO: 343116 - DNA, 25 bp, Artificial
  Probe
gcagacatggggactgcagattctc

SEQ ID NO: 343117 - DNA, 25 bp, Artificial
  Probe
ctctactgcttgaagaaatatgttg

SEQ ID NO: 343118 - DNA, 25 bp, Artificial
  Probe
gtcattaagggatccatcctgcaga

SEQ ID NO: 343119 - DNA, 25 bp, Artificial
  Probe
cctgggctgcgatctgataacagat

SEQ ID NO: 343120 - DNA, 25 bp, Artificial
  Probe
tcctcacagcaaaggcaggaagaca

SEQ ID NO: 343121 - DNA, 25 bp, Artificial
  Probe
ttgaagccagatattgtgtgcattc

SEQ ID NO: 343122 - DNA, 25 bp, Artificial
  Probe
atattgtgtgcattcctgatgaggc

SEQ ID NO: 343123 - DNA, 25 bp, Artificial
  Probe
caacagacaggtacccaaattgctg

SEQ ID NO: 343124 - DNA, 25 bp, Artificial
  Probe
cctcagtaatgttgaggcaagaaaa

SEQ ID NO: 343125 - DNA, 25 bp, Artificial
  Probe
caacacactgaacaacattgatgtg

SEQ ID NO: 343126 - DNA, 25 bp, Artificial
  Probe
aaagcttcccattgtgtgtgaatgt

SEQ ID NO: 343127 - DNA, 25 bp, Artificial
  Probe
aacgaatatatgaaccactggatgt

SEQ ID NO: 343128 - DNA, 25 bp, Artificial
  Probe
ctgcttgcagagaagtgggctaaaa

SEQ ID NO: 343129 - DNA, 25 bp, Artificial
  Probe
acactgaacaacattgatgtgataa

SEQ ID NO: 343130 - DNA, 25 bp, Artificial
  Probe
gacaaccaagcaagttgggtccatc

SEQ ID NO: 343131 - DNA, 25 bp, Artificial
  Probe
gaaatagctgactttgacattttcg

SEQ ID NO: 343132 - DNA, 25 bp, Artificial
  Probe
agcccccaagattccttcgatgatg

SEQ ID NO: 343133 - DNA, 25 bp, Artificial
  Probe
ggacccaaaggcaccgagaatgaag

SEQ ID NO: 343134 - DNA, 25 bp, Artificial
  Probe
tgcacaagagactgactgctactca

SEQ ID NO: 343135 - DNA, 25 bp, Artificial
  Probe
atcggatgctaatggccttggtgag

SEQ ID NO: 343136 - DNA, 25 bp, Artificial
  Probe
tgtttaaacctaagaatcctgatgt

SEQ ID NO: 343137 - DNA, 25 bp, Artificial
  Probe
cctcagagaggtgtggatctcatca

SEQ ID NO: 343138 - DNA, 25 bp, Artificial
  Probe
tgcaaggccaagtgacaccagccct

SEQ ID NO: 343139 - DNA, 25 bp, Artificial
  Probe
ccttacgtgtttgatcgggaaggat

SEQ ID NO: 343140 - DNA, 25 bp, Artificial
  Probe
gctttattcaatacccgagaaggac

SEQ ID NO: 343141 - DNA, 25 bp, Artificial
  Probe
cagccctccattcaaggaacttctg

SEQ ID NO: 343142 - DNA, 25 bp, Artificial
  Probe
agcagatccagatgaatttgaacga

SEQ ID NO: 343143 - DNA, 25 bp, Artificial
  Probe
ctgccgtatcccttgattctgcgac

SEQ ID NO: 343144 - DNA, 25 bp, Artificial
  Probe
gtatccaaatcaagcattcaaaagg

SEQ ID NO: 343145 - DNA, 25 bp, Artificial
  Probe
catttcctttgacttttctgcaagg

SEQ ID NO: 343146 - DNA, 25 bp, Artificial
  Probe
tgagagatcatcttactatgcacaa

SEQ ID NO: 343147 - DNA, 25 bp, Artificial
  Probe
ggctcacgtttaacctgccgtatcc

SEQ ID NO: 343148 - DNA, 25 bp, Artificial
  Probe
caacagtttctgacagtatgaattt

SEQ ID NO: 343149 - DNA, 25 bp, Artificial
  Probe
ggcttgaatctcaacacatcgtatc

SEQ ID NO: 343150 - DNA, 25 bp, Artificial
  Probe
ttaaacctaagaatcctgatgtgga

SEQ ID NO: 343151 - DNA, 25 bp, Artificial
  Probe
ttgttctggccaacatcaacttcag

SEQ ID NO: 343152 - DNA, 25 bp, Artificial
  Probe
tcttcaacaaggagttcctaagtaa

SEQ ID NO: 343153 - DNA, 25 bp, Artificial
  Probe
gttgattatgcaatacttggcaaca

SEQ ID NO: 343154 - DNA, 25 bp, Artificial
  Probe
gatgaccccgaatcgccattttcaa

SEQ ID NO: 343155 - DNA, 25 bp, Artificial
  Probe
actgtctcccctgagagacttcagc

SEQ ID NO: 343156 - DNA, 25 bp, Artificial
  Probe
tattctgaactagatttgttcatgc

SEQ ID NO: 343157 - DNA, 25 bp, Artificial
  Probe
atcgtatccactgtctcccctgaga

SEQ ID NO: 343158 - DNA, 25 bp, Artificial
  Probe
gcaagaaaattcttcaacaaggagt

SEQ ID NO: 343159 - DNA, 25 bp, Artificial
  Probe
gattcatgttgtagacagtgggctc

SEQ ID NO: 343160 - DNA, 25 bp, Artificial
  Probe
gccccaggtgttctgagggaaacca

SEQ ID NO: 343161 - DNA, 25 bp, Artificial
  Probe
gcataacttcatgttgggcttgaat

SEQ ID NO: 343162 - DNA, 25 bp, Artificial
  Probe
atacccgagaaggacgtgctgggaa

SEQ ID NO: 343163 - DNA, 25 bp, Artificial
  Probe
ttttccaaagattgatccttacgtg

SEQ ID NO: 343164 - DNA, 25 bp, Artificial
  Probe
accactggatgtcaaaagtaaaaag

SEQ ID NO: 343165 - DNA, 25 bp, Artificial
  Probe
gttcagagcacatgagagatcatct

SEQ ID NO: 343166 - DNA, 25 bp, Artificial
  Probe
gatctgatgtacttcaacacactga

SEQ ID NO: 343167 - DNA, 25 bp, Artificial
  Probe
gtccatttgaattccatgactactg

SEQ ID NO: 343168 - DNA, 25 bp, Artificial
  Probe
cccattgtgtgtgaatgttattctg

SEQ ID NO: 343169 - DNA, 25 bp, Artificial
  Probe
aatacagaagacagaacccatctcg

SEQ ID NO: 343170 - DNA, 25 bp, Artificial
  Probe
gcgtccaaagtttcccatgctgcca

SEQ ID NO: 343171 - DNA, 25 bp, Artificial
  Probe
tctaacaaccggagcccaacgaaca

SEQ ID NO: 343172 - DNA, 25 bp, Artificial
  Probe
tttttatgtcccacataagtgaggc

SEQ ID NO: 343173 - DNA, 25 bp, Artificial
  Probe
agtgaggctttgacgtggtaagcac

SEQ ID NO: 343174 - DNA, 25 bp, Artificial
  Probe
atgtggaaggactcgcccaaatctt

SEQ ID NO: 343175 - DNA, 25 bp, Artificial
  Probe
tgctgccacagcatggcgcagaaat

SEQ ID NO: 343176 - DNA, 25 bp, Artificial
  Probe
ccagctagagatcgtaagagcagat

SEQ ID NO: 343177 - DNA, 25 bp, Artificial
  Probe
gttcgcaagcatactgactttatat

SEQ ID NO: 343178 - DNA, 25 bp, Artificial
  Probe
caaagtttcccatgctgccacagca

SEQ ID NO: 343179 - DNA, 25 bp, Artificial
  Probe
gcagacataaatcaactcagtgtat

SEQ ID NO: 343180 - DNA, 25 bp, Artificial
  Probe
ccagaaatgtgtaggcccggttcgc

SEQ ID NO: 343181 - DNA, 25 bp, Artificial
  Probe
aactcagtgtatacactgtttctag

SEQ ID NO: 343182 - DNA, 25 bp, Artificial
  Probe
acagcactgggatgtggaaggactc

SEQ ID NO: 343183 - DNA, 25 bp, Artificial
  Probe
ttcccattgctgtgaccaaaacctg

SEQ ID NO: 343184 - DNA, 25 bp, Artificial
  Probe
tgtgtttttcccattgctgtgacca

SEQ ID NO: 343185 - DNA, 25 bp, Artificial
  Probe
tctagctgtgtttttcccattgctg

SEQ ID NO: 343186 - DNA, 25 bp, Artificial
  Probe
aaccggagcccaacgaacagcactg

SEQ ID NO: 343187 - DNA, 25 bp, Artificial
  Probe
gccgaagacagacttcttattctaa

SEQ ID NO: 343188 - DNA, 25 bp, Artificial
  Probe
gccaaggatgactccgatagcatga

SEQ ID NO: 343189 - DNA, 25 bp, Artificial
  Probe
gctgtgaccaaaacctgaatccttt

SEQ ID NO: 343190 - DNA, 25 bp, Artificial
  Probe
agattcattcctgtctccacttgag

SEQ ID NO: 343191 - DNA, 25 bp, Artificial
  Probe
tggcgcagaaattcgccaaggatga

SEQ ID NO: 343192 - DNA, 25 bp, Artificial
  Probe
ggcccggttcgcaagcatactgact

SEQ ID NO: 343193 - DNA, 25 bp, Artificial
  Probe
gtgtaggcccggttcgcaagcatac

SEQ ID NO: 343194 - DNA, 25 bp, Artificial
  Probe
aggatgactccgatagcatgagccg

SEQ ID NO: 343195 - DNA, 25 bp, Artificial
  Probe
cactgtttctagctgtgtttttccc

SEQ ID NO: 343196 - DNA, 25 bp, Artificial
  Probe
agtttcccatgctgccacagcatgg

SEQ ID NO: 343197 - DNA, 25 bp, Artificial
  Probe
tccgatagcatgagccgaagacaga

SEQ ID NO: 343198 - DNA, 25 bp, Artificial
  Probe
ggcagacataaatcaactcagtgta

SEQ ID NO: 343199 - DNA, 25 bp, Artificial
  Probe
ctaaacaaagtgaactcgttcatga

SEQ ID NO: 343200 - DNA, 25 bp, Artificial
  Probe
tgcaagactgcgtccaaagtttccc

SEQ ID NO: 343201 - DNA, 25 bp, Artificial
  Probe
gattcattcctgtctccacttgagc

SEQ ID NO: 343202 - DNA, 25 bp, Artificial
  Probe
tagcatgagccgaagacagacttct

SEQ ID NO: 343203 - DNA, 25 bp, Artificial
  Probe
ggagggacttttgtgtccagctaga

SEQ ID NO: 343204 - DNA, 25 bp, Artificial
  Probe
cagaaattcgccaaggatgactccg

SEQ ID NO: 343205 - DNA, 25 bp, Artificial
  Probe
gtttttcccattgctgtgaccaaaa

SEQ ID NO: 343206 - DNA, 25 bp, Artificial
  Probe
ccatgctgccacagcatggcgcaga

SEQ ID NO: 343207 - DNA, 25 bp, Artificial
  Probe
atgaaaatgtgctacaccagaaatg

SEQ ID NO: 343208 - DNA, 25 bp, Artificial
  Probe
acagcatggcgcagaaattcgccaa

SEQ ID NO: 343209 - DNA, 25 bp, Artificial
  Probe
agacttcttattctaacaaccggag

SEQ ID NO: 343210 - DNA, 25 bp, Artificial
  Probe
ctgtttctaaacaaagtgaactcgt

SEQ ID NO: 343211 - DNA, 25 bp, Artificial
  Probe
cccacataagtgaggctttgacgtg

SEQ ID NO: 343212 - DNA, 25 bp, Artificial
  Probe
gacttcttattctaacaaccggagc

SEQ ID NO: 343213 - DNA, 25 bp, Artificial
  Probe
caaagtgaactcgttcatgatttaa

SEQ ID NO: 343214 - DNA, 25 bp, Artificial
  Probe
tggccatctcctgcaagactgcgtc

SEQ ID NO: 343215 - DNA, 25 bp, Artificial
  Probe
aacagcactgggatgtggaaggact

SEQ ID NO: 343216 - DNA, 25 bp, Artificial
  Probe
caagttgctgggttactgtggttca

SEQ ID NO: 343217 - DNA, 25 bp, Artificial
  Probe
agactgttctgaaaatctcggcctt

SEQ ID NO: 343218 - DNA, 25 bp, Artificial
  Probe
taccagtggttcaggggaaatgctt

SEQ ID NO: 343219 - DNA, 25 bp, Artificial
  Probe
gtacatttacaaagggaccgtagag

SEQ ID NO: 343220 - DNA, 25 bp, Artificial
  Probe
aaagccgggccacaagctactgata

SEQ ID NO: 343221 - DNA, 25 bp, Artificial
  Probe
tgggaaacccttgtcgggcatggaa

SEQ ID NO: 343222 - DNA, 25 bp, Artificial
  Probe
ttttctctgaccaccagggccaaac

SEQ ID NO: 343223 - DNA, 25 bp, Artificial
  Probe
cttgtcgggcatggaataagtacat

SEQ ID NO: 343224 - DNA, 25 bp, Artificial
  Probe
gtaggaatggctggttctgtcccct

SEQ ID NO: 343225 - DNA, 25 bp, Artificial
  Probe
tgaataagcttcatcggaaggtgac

SEQ ID NO: 343226 - DNA, 25 bp, Artificial
  Probe
ttagtgctggcctgaaaggcaagtg

SEQ ID NO: 343227 - DNA, 25 bp, Artificial
  Probe
tcatgtaattttcaagacagagatc

SEQ ID NO: 343228 - DNA, 25 bp, Artificial
  Probe
atcgtgccaaagataacagaaaggt

SEQ ID NO: 343229 - DNA, 25 bp, Artificial
  Probe
gaaggcttcattcttcaagtacact

SEQ ID NO: 343230 - DNA, 25 bp, Artificial
  Probe
gactccgaactttgaagtacaaata

SEQ ID NO: 343231 - DNA, 25 bp, Artificial
  Probe
atgtttctgtagtgcccttaactca

SEQ ID NO: 343232 - DNA, 25 bp, Artificial
  Probe
tctaaggtcaagctccctggagggt

SEQ ID NO: 343233 - DNA, 25 bp, Artificial
  Probe
gtcatccttgtaaccagctgcttaa

SEQ ID NO: 343234 - DNA, 25 bp, Artificial
  Probe
accaccagggccaaaccagcagtgg

SEQ ID NO: 343235 - DNA, 25 bp, Artificial
  Probe
ctctggagaagactgttctgaaaat

SEQ ID NO: 343236 - DNA, 25 bp, Artificial
  Probe
acttcaaggcccacttcacaaggct

SEQ ID NO: 343237 - DNA, 25 bp, Artificial
  Probe
agaggcaagatgtgctccgatagca

SEQ ID NO: 343238 - DNA, 25 bp, Artificial
  Probe
gaagctacagcctgaccctcacagt

SEQ ID NO: 343239 - DNA, 25 bp, Artificial
  Probe
gaaactctagggtggcccagccatc

SEQ ID NO: 343240 - DNA, 25 bp, Artificial
  Probe
atttgagaagccagaaatcgtgcca

SEQ ID NO: 343241 - DNA, 25 bp, Artificial
  Probe
gaatcctctgcctgtctttctcctg

SEQ ID NO: 343242 - DNA, 25 bp, Artificial
  Probe
ggtggcccagccatccattgacaac

SEQ ID NO: 343243 - DNA, 25 bp, Artificial
  Probe
gtaaacgagtgttgaccatggccac

SEQ ID NO: 343244 - DNA, 25 bp, Artificial
  Probe
gctgtttcaaaatgggctgcataaa

SEQ ID NO: 343245 - DNA, 25 bp, Artificial
  Probe
ggtgaccaagctattctaatactgt

SEQ ID NO: 343246 - DNA, 25 bp, Artificial
  Probe
atcaggtggttcttgtctgtggcac

SEQ ID NO: 343247 - DNA, 25 bp, Artificial
  Probe
taatgtggacggattcagaacagcc

SEQ ID NO: 343248 - DNA, 25 bp, Artificial
  Probe
tagtgctggcctgaaaggcaagtgc

SEQ ID NO: 343249 - DNA, 25 bp, Artificial
  Probe
gcctgaccctcacagtgaccagtga

SEQ ID NO: 343250 - DNA, 25 bp, Artificial
  Probe
caccatgcccagctctatgctgaat

SEQ ID NO: 343251 - DNA, 25 bp, Artificial
  Probe
aaactcgttcttaatgtggacggat

SEQ ID NO: 343252 - DNA, 25 bp, Artificial
  Probe
ggaaatgcttcagtctgtctctgga

SEQ ID NO: 343253 - DNA, 25 bp, Artificial
  Probe
catgcccagctctatgctgaattct

SEQ ID NO: 343254 - DNA, 25 bp, Artificial
  Probe
tgtaggaatggctggttctgtcccc

SEQ ID NO: 343255 - DNA, 25 bp, Artificial
  Probe
ctgtggcactgaattaattggcaga

SEQ ID NO: 343256 - DNA, 25 bp, Artificial
  Probe
tggccacctgaagctacagcctgac

SEQ ID NO: 343257 - DNA, 25 bp, Artificial
  Probe
acgaggacgctctcaggcgctctgg

SEQ ID NO: 343258 - DNA, 25 bp, Artificial
  Probe
ccagcagtggcgagccatcacctaa

SEQ ID NO: 343259 - DNA, 25 bp, Artificial
  Probe
gaattaattggcagagctgtccacg

SEQ ID NO: 343260 - DNA, 25 bp, Artificial
  Probe
caaagggaccgtagaggcaagatgt

SEQ ID NO: 343261 - DNA, 25 bp, Artificial
  Probe
tgtacttgaatcagggctctagctc

SEQ ID NO: 343262 - DNA, 25 bp, Artificial
  Probe
accgaaggctccacaggtgtacacc

SEQ ID NO: 343263 - DNA, 25 bp, Artificial
  Probe
ctgaagacattactgtggagtggca

SEQ ID NO: 343264 - DNA, 25 bp, Artificial
  Probe
gcatgataacagacttcttccctga

SEQ ID NO: 343265 - DNA, 25 bp, Artificial
  Probe
ttccctgaagacattactgtggagt

SEQ ID NO: 343266 - DNA, 25 bp, Artificial
  Probe
cagtctgacctgcatgataacagac

SEQ ID NO: 343267 - DNA, 25 bp, Artificial
  Probe
cttccctgaagacattactgtggag

SEQ ID NO: 343268 - DNA, 25 bp, Artificial
  Probe
gtctgacctgcatgataacagactt

SEQ ID NO: 343269 - DNA, 25 bp, Artificial
  Probe
cagaccgaaggctccacaggtgtac

SEQ ID NO: 343270 - DNA, 25 bp, Artificial
  Probe
ggctccacaggtgtacaccattcca

SEQ ID NO: 343271 - DNA, 25 bp, Artificial
  Probe
gcccatcatggactcagatggctct

SEQ ID NO: 343272 - DNA, 25 bp, Artificial
  Probe
tgacctgcatgataacagacttctt

SEQ ID NO: 343273 - DNA, 25 bp, Artificial
  Probe
tctgacctgcatgataacagacttc

SEQ ID NO: 343274 - DNA, 25 bp, Artificial
  Probe
tcagtctgacctgcatgataacaga

SEQ ID NO: 343275 - DNA, 25 bp, Artificial
  Probe
cccaaggagcagatggccaaggata

SEQ ID NO: 343276 - DNA, 25 bp, Artificial
  Probe
aaggctccacaggtgtacaccattc

SEQ ID NO: 343277 - DNA, 25 bp, Artificial
  Probe
ctcccaaggagcagatggccaagga

SEQ ID NO: 343278 - DNA, 25 bp, Artificial
  Probe
tcagcccatcatggactcagatggc

SEQ ID NO: 343279 - DNA, 25 bp, Artificial
  Probe
aaccaaaggcagaccgaaggctcca

SEQ ID NO: 343280 - DNA, 25 bp, Artificial
  Probe
tctccaaaaccaaaggcagaccgaa

SEQ ID NO: 343281 - DNA, 25 bp, Artificial
  Probe
tcatggactcagatggctcttactt

SEQ ID NO: 343282 - DNA, 25 bp, Artificial
  Probe
aaggcagaccgaaggctccacaggt

SEQ ID NO: 343283 - DNA, 25 bp, Artificial
  Probe
aaaggcagaccgaaggctccacagg

SEQ ID NO: 343284 - DNA, 25 bp, Artificial
  Probe
cactcagcccatcatggactcagat

SEQ ID NO: 343285 - DNA, 25 bp, Artificial
  Probe
agctcaatgtgcagaagagcaactg

SEQ ID NO: 343286 - DNA, 25 bp, Artificial
  Probe
gataacagacttcttccctgaagac

SEQ ID NO: 343287 - DNA, 25 bp, Artificial
  Probe
gataaagtcagtctgacctgcatga

SEQ ID NO: 343288 - DNA, 25 bp, Artificial
  Probe
cctgaagacattactgtggagtggc

SEQ ID NO: 343289 - DNA, 25 bp, Artificial
  Probe
actcagcccatcatggactcagatg

SEQ ID NO: 343290 - DNA, 25 bp, Artificial
  Probe
agaccgaaggctccacaggtgtaca

SEQ ID NO: 343291 - DNA, 25 bp, Artificial
  Probe
acactcagcccatcatggactcaga

SEQ ID NO: 343292 - DNA, 25 bp, Artificial
  Probe
gacttcttccctgaagacattactg

SEQ ID NO: 343293 - DNA, 25 bp, Artificial
  Probe
acctcccaaggagcagatggccaag

SEQ ID NO: 343294 - DNA, 25 bp, Artificial
  Probe
acaagaacactcagcccatcatgga

SEQ ID NO: 343295 - DNA, 25 bp, Artificial
  Probe
cttcttccctgaagacattactgtg

SEQ ID NO: 343296 - DNA, 25 bp, Artificial
  Probe
ctgacctgcatgataacagacttct

SEQ ID NO: 343297 - DNA, 25 bp, Artificial
  Probe
atcatggactcagatggctcttact

SEQ ID NO: 343298 - DNA, 25 bp, Artificial
  Probe
tacaagaacactcagcccatcatgg

SEQ ID NO: 343299 - DNA, 25 bp, Artificial
  Probe
ctccaaaaccaaaggcagaccgaag

SEQ ID NO: 343300 - DNA, 25 bp, Artificial
  Probe
gaccgaaggctccacaggtgtacac

SEQ ID NO: 343301 - DNA, 25 bp, Artificial
  Probe
tccctgaagacattactgtggagtg

SEQ ID NO: 343302 - DNA, 25 bp, Artificial
  Probe
atgataacagacttcttccctgaag

SEQ ID NO: 343303 - DNA, 25 bp, Artificial
  Probe
ccatcatggactcagatggctctta

SEQ ID NO: 343304 - DNA, 25 bp, Artificial
  Probe
ccctgaagacattactgtggagtgg

SEQ ID NO: 343305 - DNA, 25 bp, Artificial
  Probe
aagctcaatgtgcagaagagcaact

SEQ ID NO: 343306 - DNA, 25 bp, Artificial
  Probe
ccaaggagcagatggccaaggataa

SEQ ID NO: 343307 - DNA, 25 bp, Artificial
  Probe
gacctgcatgataacagacttcttc

SEQ ID NO: 343308 - DNA, 25 bp, Artificial
  Probe
tctgcatggaggacactggtgtctg

SEQ ID NO: 343309 - DNA, 25 bp, Artificial
  Probe
ggtccgagctgttcatttttatcac

SEQ ID NO: 343310 - DNA, 25 bp, Artificial
  Probe
attcctaggctgtgatgtcgaagag

SEQ ID NO: 343311 - DNA, 25 bp, Artificial
  Probe
agaatgtccgtcaccatttccccag

SEQ ID NO: 343312 - DNA, 25 bp, Artificial
  Probe
caggtccgagctgttcatttttatc

SEQ ID NO: 343313 - DNA, 25 bp, Artificial
  Probe
agtagaaagccacttgtgagctcaa

SEQ ID NO: 343314 - DNA, 25 bp, Artificial
  Probe
gcaattcagaatgtccgtcaccatt

SEQ ID NO: 343315 - DNA, 25 bp, Artificial
  Probe
tcctaggctgtgatgtcgaagagga

SEQ ID NO: 343316 - DNA, 25 bp, Artificial
  Probe
agtcaccgcctttgcgcaattccta

SEQ ID NO: 343317 - DNA, 25 bp, Artificial
  Probe
actgacatcttgcagagaaaaatga

SEQ ID NO: 343318 - DNA, 25 bp, Artificial
  Probe
ttgtgagctcaatggtacagcttca

SEQ ID NO: 343319 - DNA, 25 bp, Artificial
  Probe
cttcacgactgacatcttgcagaga

SEQ ID NO: 343320 - DNA, 25 bp, Artificial
  Probe
acatcttgcagagaaaaatgattct

SEQ ID NO: 343321 - DNA, 25 bp, Artificial
  Probe
ttgcgcaattcctaggctgtgatgt

SEQ ID NO: 343322 - DNA, 25 bp, Artificial
  Probe
gaatgtccgtcaccatttccccagt

SEQ ID NO: 343323 - DNA, 25 bp, Artificial
  Probe
acagcttcacgactgacatcttgca

SEQ ID NO: 343324 - DNA, 25 bp, Artificial
  Probe
ccacttgtgagctcaatggtacagc

SEQ ID NO: 343325 - DNA, 25 bp, Artificial
  Probe
acttgtgagctcaatggtacagctt

SEQ ID NO: 343326 - DNA, 25 bp, Artificial
  Probe
tgtgagctcaatggtacagcttcac

SEQ ID NO: 343327 - DNA, 25 bp, Artificial
  Probe
tcacgactgacatcttgcagagaaa

SEQ ID NO: 343328 - DNA, 25 bp, Artificial
  Probe
tgagctcaatggtacagcttcacga

SEQ ID NO: 343329 - DNA, 25 bp, Artificial
  Probe
ccgcctttgcgcaattcctaggctg

SEQ ID NO: 343330 - DNA, 25 bp, Artificial
  Probe
tgcgcaattcctaggctgtgatgtc

SEQ ID NO: 343331 - DNA, 25 bp, Artificial
  Probe
tagtctgcaattcagaatgtccgtc

SEQ ID NO: 343332 - DNA, 25 bp, Artificial
  Probe
tgcaattcagaatgtccgtcaccat

SEQ ID NO: 343333 - DNA, 25 bp, Artificial
  Probe
ctgacatcttgcagagaaaaatgat

SEQ ID NO: 343334 - DNA, 25 bp, Artificial
  Probe
agcttcacgactgacatcttgcaga

SEQ ID NO: 343335 - DNA, 25 bp, Artificial
  Probe
cctaggctgtgatgtcgaagaggaa

SEQ ID NO: 343336 - DNA, 25 bp, Artificial
  Probe
caatggtacagcttcacgactgaca

SEQ ID NO: 343337 - DNA, 25 bp, Artificial
  Probe
tagaaagccacttgtgagctcaatg

SEQ ID NO: 343338 - DNA, 25 bp, Artificial
  Probe
ctttgcgcaattcctaggctgtgat

SEQ ID NO: 343339 - DNA, 25 bp, Artificial
  Probe
aatggtacagcttcacgactgacat

SEQ ID NO: 343340 - DNA, 25 bp, Artificial
  Probe
agtctgcaattcagaatgtccgtca

SEQ ID NO: 343341 - DNA, 25 bp, Artificial
  Probe
tacagcttcacgactgacatcttgc

SEQ ID NO: 343342 - DNA, 25 bp, Artificial
  Probe
gaaagccacttgtgagctcaatggt

SEQ ID NO: 343343 - DNA, 25 bp, Artificial
  Probe
aaagccacttgtgagctcaatggta

SEQ ID NO: 343344 - DNA, 25 bp, Artificial
  Probe
gcttcacgactgacatcttgcagag

SEQ ID NO: 343345 - DNA, 25 bp, Artificial
  Probe
ggtacagcttcacgactgacatctt

SEQ ID NO: 343346 - DNA, 25 bp, Artificial
  Probe
caattcctaggctgtgatgtcgaag

SEQ ID NO: 343347 - DNA, 25 bp, Artificial
  Probe
cctttgcgcaattcctaggctgtga

SEQ ID NO: 343348 - DNA, 25 bp, Artificial
  Probe
ttagtctgcaattcagaatgtccgt

SEQ ID NO: 343349 - DNA, 25 bp, Artificial
  Probe
cgcctttgcgcaattcctaggctgt

SEQ ID NO: 343350 - DNA, 25 bp, Artificial
  Probe
tctgcaattcagaatgtccgtcacc

SEQ ID NO: 343351 - DNA, 25 bp, Artificial
  Probe
gtccgagctgttcatttttatcact

SEQ ID NO: 343352 - DNA, 25 bp, Artificial
  Probe
tggtacagcttcacgactgacatct

SEQ ID NO: 343353 - DNA, 25 bp, Artificial
  Probe
aagtagaaagccacttgtgagctca

SEQ ID NO: 343354 - DNA, 25 bp, Artificial
  Probe
cccctacagtattgctgtggatgct

SEQ ID NO: 343355 - DNA, 25 bp, Artificial
  Probe
ggcaggtgagccattcgatccctca

SEQ ID NO: 343356 - DNA, 25 bp, Artificial
  Probe
gaatggactcccttgtcctcaaagc

SEQ ID NO: 343357 - DNA, 25 bp, Artificial
  Probe
caagctcatctgagccaaggaatgg

SEQ ID NO: 343358 - DNA, 25 bp, Artificial
  Probe
catgctactaggtggctaagccacg

SEQ ID NO: 343359 - DNA, 25 bp, Artificial
  Probe
gggccctagtctgctaaaccaagct

SEQ ID NO: 343360 - DNA, 25 bp, Artificial
  Probe
gaggcttgttcaagccagcctgtgt

SEQ ID NO: 343361 - DNA, 25 bp, Artificial
  Probe
tcacttcggagtaccctactgctct

SEQ ID NO: 343362 - DNA, 25 bp, Artificial
  Probe
cctgtgctaaaaacccatgactagt

SEQ ID NO: 343363 - DNA, 25 bp, Artificial
  Probe
tgagccattcgatccctcatttatg

SEQ ID NO: 343364 - DNA, 25 bp, Artificial
  Probe
caaggaatggactcccttgtcctca

SEQ ID NO: 343365 - DNA, 25 bp, Artificial
  Probe
cttactagtcattccgtgccatcag

SEQ ID NO: 343366 - DNA, 25 bp, Artificial
  Probe
acccatgactagtgaggctgagtca

SEQ ID NO: 343367 - DNA, 25 bp, Artificial
  Probe
agtcaagaggcttgttcaagccagc

SEQ ID NO: 343368 - DNA, 25 bp, Artificial
  Probe
ttcggagtaccctactgctcttcaa

SEQ ID NO: 343369 - DNA, 25 bp, Artificial
  Probe
tgtgttacatagcaaaactgtcttg

SEQ ID NO: 343370 - DNA, 25 bp, Artificial
  Probe
cttagagtgacaggtggccattgag

SEQ ID NO: 343371 - DNA, 25 bp, Artificial
  Probe
gcaaagatttctcttatgctgtcct

SEQ ID NO: 343372 - DNA, 25 bp, Artificial
  Probe
aatggactcccttgtcctcaaagcc

SEQ ID NO: 343373 - DNA, 25 bp, Artificial
  Probe
ccatcaggagacaacataggagtca

SEQ ID NO: 343374 - DNA, 25 bp, Artificial
  Probe
tggaggtgaacctgtgctaaaaacc

SEQ ID NO: 343375 - DNA, 25 bp, Artificial
  Probe
ctagtgaggctgagtcaagaggctt

SEQ ID NO: 343376 - DNA, 25 bp, Artificial
  Probe
ctcacttcaggcaggtgagccattc

SEQ ID NO: 343377 - DNA, 25 bp, Artificial
  Probe
cgtaagctcacttcggagtacccta

SEQ ID NO: 343378 - DNA, 25 bp, Artificial
  Probe
tcattccgtgccatcaggagacaac

SEQ ID NO: 343379 - DNA, 25 bp, Artificial
  Probe
cgtgcagagtcctcatacctactca

SEQ ID NO: 343380 - DNA, 25 bp, Artificial
  Probe
tatcgcaaagatttctcttatgctg

SEQ ID NO: 343381 - DNA, 25 bp, Artificial
  Probe
tatgctgtccttactagtcattccg

SEQ ID NO: 343382 - DNA, 25 bp, Artificial
  Probe
aggctgagtcaagaggcttgttcaa

SEQ ID NO: 343383 - DNA, 25 bp, Artificial
  Probe
aggaaatccacaagcagggttaagc

SEQ ID NO: 343384 - DNA, 25 bp, Artificial
  Probe
ctagtcattccgtgccatcaggaga

SEQ ID NO: 343385 - DNA, 25 bp, Artificial
  Probe
tactaggtggctaagccacgacctc

SEQ ID NO: 343386 - DNA, 25 bp, Artificial
  Probe
gcttaaccagtcaggttccagtcat

SEQ ID NO: 343387 - DNA, 25 bp, Artificial
  Probe
ttcaggcaggtgagccattcgatcc

SEQ ID NO: 343388 - DNA, 25 bp, Artificial
  Probe
cagggttaagcttggaccagcatgg

SEQ ID NO: 343389 - DNA, 25 bp, Artificial
  Probe
tctgagccaaggaatggactccctt

SEQ ID NO: 343390 - DNA, 25 bp, Artificial
  Probe
cacaagcagggttaagcttggacca

SEQ ID NO: 343391 - DNA, 25 bp, Artificial
  Probe
ctcatacctactcacttcaggcagg

SEQ ID NO: 343392 - DNA, 25 bp, Artificial
  Probe
ttgctgtggatgctggccatgagct

SEQ ID NO: 343393 - DNA, 25 bp, Artificial
  Probe
gtgcagagtcctcatacctactcac

SEQ ID NO: 343394 - DNA, 25 bp, Artificial
  Probe
agcagctttgctctcctcctgctgg

SEQ ID NO: 343395 - DNA, 25 bp, Artificial
  Probe
ctcctgctggctcttttccttcatg

SEQ ID NO: 343396 - DNA, 25 bp, Artificial
  Probe
aaacccatgactagtgaggctgagt

SEQ ID NO: 343397 - DNA, 25 bp, Artificial
  Probe
agacaacataggagtcactgcctta

SEQ ID NO: 343398 - DNA, 25 bp, Artificial
  Probe
gccaaggaatggactcccttgtcct

SEQ ID NO: 343399 - DNA, 25 bp, Artificial
  Probe
gctgcttttctatcgcaaagatttc

SEQ ID NO: 343400 - DNA, 25 bp, Artificial
  Probe
tctgccctgatcgaaggattccttc

SEQ ID NO: 343401 - DNA, 25 bp, Artificial
  Probe
gatcgaaggattccttcagtcacat

SEQ ID NO: 343402 - DNA, 25 bp, Artificial
  Probe
ctattcagccttgctgcactccgga

SEQ ID NO: 343403 - DNA, 25 bp, Artificial
  Probe
aaacttgagacctactgagccggcc

SEQ ID NO: 343404 - DNA, 25 bp, Artificial
  Probe
cattcggctagatgccagggacccc

SEQ ID NO: 343405 - DNA, 25 bp, Artificial
  Probe
tgccctgatcgaaggattccttcag

SEQ ID NO: 343406 - DNA, 25 bp, Artificial
  Probe
taagactccggaaaacttgagacct

SEQ ID NO: 343407 - DNA, 25 bp, Artificial
  Probe
acttgagacctactgagccggccaa

SEQ ID NO: 343408 - DNA, 25 bp, Artificial
  Probe
acattcggctagatgccagggaccc

SEQ ID NO: 343409 - DNA, 25 bp, Artificial
  Probe
gtcacattcggctagatgccaggga

SEQ ID NO: 343410 - DNA, 25 bp, Artificial
  Probe
tgtagcctgaccactgcaccctatt

SEQ ID NO: 343411 - DNA, 25 bp, Artificial
  Probe
actccggaaaacttgagacctactg

SEQ ID NO: 343412 - DNA, 25 bp, Artificial
  Probe
actctgccctgatcgaaggattcct

SEQ ID NO: 343413 - DNA, 25 bp, Artificial
  Probe
cttgagacctactgagccggccaac

SEQ ID NO: 343414 - DNA, 25 bp, Artificial
  Probe
ctactctgccctgatcgaaggattc

SEQ ID NO: 343415 - DNA, 25 bp, Artificial
  Probe
gtggctgtaccctactctgccctga

SEQ ID NO: 343416 - DNA, 25 bp, Artificial
  Probe
tttatctaagactccggaaaacttg

SEQ ID NO: 343417 - DNA, 25 bp, Artificial
  Probe
aacttgagacctactgagccggcca

SEQ ID NO: 343418 - DNA, 25 bp, Artificial
  Probe
ttcagtgtagcctgaccactgcacc

SEQ ID NO: 343419 - DNA, 25 bp, Artificial
  Probe
ccacttcagtgtagcctgaccactg

SEQ ID NO: 343420 - DNA, 25 bp, Artificial
  Probe
gattccttcagtcacattcggctag

SEQ ID NO: 343421 - DNA, 25 bp, Artificial
  Probe
ctccggaaaacttgagacctactga

SEQ ID NO: 343422 - DNA, 25 bp, Artificial
  Probe
agtgtagcctgaccactgcacccta

SEQ ID NO: 343423 - DNA, 25 bp, Artificial
  Probe
gtgtagcctgaccactgcaccctat

SEQ ID NO: 343424 - DNA, 25 bp, Artificial
  Probe
tggctgtaccctactctgccctgat

SEQ ID NO: 343425 - DNA, 25 bp, Artificial
  Probe
cctactctgccctgatcgaaggatt

SEQ ID NO: 343426 - DNA, 25 bp, Artificial
  Probe
ccctgatcgaaggattccttcagtc

SEQ ID NO: 343427 - DNA, 25 bp, Artificial
  Probe
ggaaaacttgagacctactgagccg

SEQ ID NO: 343428 - DNA, 25 bp, Artificial
  Probe
cttcagtcacattcggctagatgcc

SEQ ID NO: 343429 - DNA, 25 bp, Artificial
  Probe
ttgagacctactgagccggccaaca

SEQ ID NO: 343430 - DNA, 25 bp, Artificial
  Probe
ggattccttcagtcacattcggcta

SEQ ID NO: 343431 - DNA, 25 bp, Artificial
  Probe
gactccggaaaacttgagacctact

SEQ ID NO: 343432 - DNA, 25 bp, Artificial
  Probe
ctctatcatccctttggctgcagtc

SEQ ID NO: 343433 - DNA, 25 bp, Artificial
  Probe
tccttcagtcacattcggctagatg

SEQ ID NO: 343434 - DNA, 25 bp, Artificial
  Probe
gaaagcagtggcaccgtccgttccc

SEQ ID NO: 343435 - DNA, 25 bp, Artificial
  Probe
attccttcagtcacattcggctaga

SEQ ID NO: 343436 - DNA, 25 bp, Artificial
  Probe
ttccttcagtcacattcggctagat

SEQ ID NO: 343437 - DNA, 25 bp, Artificial
  Probe
ctatcatccctttggctgcagtcgc

SEQ ID NO: 343438 - DNA, 25 bp, Artificial
  Probe
gccctgatcgaaggattccttcagt

SEQ ID NO: 343439 - DNA, 25 bp, Artificial
  Probe
cacattcggctagatgccagggacc

SEQ ID NO: 343440 - DNA, 25 bp, Artificial
  Probe
ccttcagtcacattcggctagatgc

SEQ ID NO: 343441 - DNA, 25 bp, Artificial
  Probe
tgtaccctactctgccctgatcgaa

SEQ ID NO: 343442 - DNA, 25 bp, Artificial
  Probe
attcagccttgctgcactccggaaa

SEQ ID NO: 343443 - DNA, 25 bp, Artificial
  Probe
tgagacctactgagccggccaacaa

SEQ ID NO: 343444 - DNA, 25 bp, Artificial
  Probe
ttccgctctatcatccctttggctg

SEQ ID NO: 343445 - DNA, 25 bp, Artificial
  Probe
aggattccttcagtcacattcggct

SEQ ID NO: 343446 - DNA, 25 bp, Artificial
  Probe
aacgtttaagcacatgctttttgta

SEQ ID NO: 343447 - DNA, 25 bp, Artificial
  Probe
tgcgttctcaacctggaaccaatgt

SEQ ID NO: 343448 - DNA, 25 bp, Artificial
  Probe
ttgatttgccccttgatgccgtccg

SEQ ID NO: 343449 - DNA, 25 bp, Artificial
  Probe
atcctgaggcttcatcgggagctag

SEQ ID NO: 343450 - DNA, 25 bp, Artificial
  Probe
tggccgccgttatacaacgtttgga

SEQ ID NO: 343451 - DNA, 25 bp, Artificial
  Probe
agatctgtgggcttctagtcctctg

SEQ ID NO: 343452 - DNA, 25 bp, Artificial
  Probe
gagccagctaacatttcctcgtttc

SEQ ID NO: 343453 - DNA, 25 bp, Artificial
  Probe
taacgggtgtgcagccatagcgacg

SEQ ID NO: 343454 - DNA, 25 bp, Artificial
  Probe
atatataacgggtgtgcagccatag

SEQ ID NO: 343455 - DNA, 25 bp, Artificial
  Probe
cccttgatgccgtccgtgtatttcg

SEQ ID NO: 343456 - DNA, 25 bp, Artificial
  Probe
aggtcctgcgttctcaacctggaac

SEQ ID NO: 343457 - DNA, 25 bp, Artificial
  Probe
atcgggagctagagccagctaacat

SEQ ID NO: 343458 - DNA, 25 bp, Artificial
  Probe
tgatttgccccttgatgccgtccgt

SEQ ID NO: 343459 - DNA, 25 bp, Artificial
  Probe
cctgcgttctcaacctggaaccaat

SEQ ID NO: 343460 - DNA, 25 bp, Artificial
  Probe
tgcttagatctgtgggcttctagtc

SEQ ID NO: 343461 - DNA, 25 bp, Artificial
  Probe
ggaaccaatgtctgccatacctagt

SEQ ID NO: 343462 - DNA, 25 bp, Artificial
  Probe
agcaaaatccccttttgccacttgg

SEQ ID NO: 343463 - DNA, 25 bp, Artificial
  Probe
tcgtttcaagactgcctttgatttg

SEQ ID NO: 343464 - DNA, 25 bp, Artificial
  Probe
tcaaactggagcatcctcctttatg

SEQ ID NO: 343465 - DNA, 25 bp, Artificial
  Probe
tgccacttggcgaaaaacccaaaag

SEQ ID NO: 343466 - DNA, 25 bp, Artificial
  Probe
tttcctatgcacagcgagctcagaa

SEQ ID NO: 343467 - DNA, 25 bp, Artificial
  Probe
ttactgatgcttagatctgtgggct

SEQ ID NO: 343468 - DNA, 25 bp, Artificial
  Probe
tatgcacagcgagctcagaaataaa

SEQ ID NO: 343469 - DNA, 25 bp, Artificial
  Probe
tttgccccttgatgccgtccgtgta

SEQ ID NO: 343470 - DNA, 25 bp, Artificial
  Probe
ggagcatcctcctttatgtatttat

SEQ ID NO: 343471 - DNA, 25 bp, Artificial
  Probe
gtcctgcgttctcaacctggaacca

SEQ ID NO: 343472 - DNA, 25 bp, Artificial
  Probe
ctggccgccgttatacaacgtttgg

SEQ ID NO: 343473 - DNA, 25 bp, Artificial
  Probe
cctagttccacttctcaaactggag

SEQ ID NO: 343474 - DNA, 25 bp, Artificial
  Probe
cctgaggcttcatcgggagctagag

SEQ ID NO: 343475 - DNA, 25 bp, Artificial
  Probe
gttccacttctcaaactggagcatc

SEQ ID NO: 343476 - DNA, 25 bp, Artificial
  Probe
ggagctagagccagctaacatttcc

SEQ ID NO: 343477 - DNA, 25 bp, Artificial
  Probe
actgatgcttagatctgtgggcttc

SEQ ID NO: 343478 - DNA, 25 bp, Artificial
  Probe
agagccagctaacatttcctcgttt

SEQ ID NO: 343479 - DNA, 25 bp, Artificial
  Probe
tttcctcgtttcaagactgcctttg

SEQ ID NO: 343480 - DNA, 25 bp, Artificial
  Probe
ccaatgatttccacccagtagagca

SEQ ID NO: 343481 - DNA, 25 bp, Artificial
  Probe
ttcaagactgcctttgatttgcccc

SEQ ID NO: 343482 - DNA, 25 bp, Artificial
  Probe
gccgccgttatacaacgtttggact

SEQ ID NO: 343483 - DNA, 25 bp, Artificial
  Probe
ggcttcatcgggagctagagccagc

SEQ ID NO: 343484 - DNA, 25 bp, Artificial
  Probe
ctgtgggcttctagtcctctgaaag

SEQ ID NO: 343485 - DNA, 25 bp, Artificial
  Probe
taaggtcctgcgttctcaacctgga

SEQ ID NO: 343486 - DNA, 25 bp, Artificial
  Probe
ctgcctttgatttgccccttgatgc

SEQ ID NO: 343487 - DNA, 25 bp, Artificial
  Probe
cgtccaatgatttccacccagtaga

SEQ ID NO: 343488 - DNA, 25 bp, Artificial
  Probe
aacctggaaccaatgtctgccatac

SEQ ID NO: 343489 - DNA, 25 bp, Artificial
  Probe
atataacgggtgtgcagccatagcg

SEQ ID NO: 343490 - DNA, 25 bp, Artificial
  Probe
ctatgcacagcgagctcagaaataa

SEQ ID NO: 343491 - DNA, 25 bp, Artificial
  Probe
ctaacgtttaagcacatgctttttg

SEQ ID NO: 343492 - DNA, 25 bp, Artificial
  Probe
tgccgccggattcaacagcaccggg

SEQ ID NO: 343493 - DNA, 25 bp, Artificial
  Probe
tgtatagctctatcccagagcacaa

SEQ ID NO: 343494 - DNA, 25 bp, Artificial
  Probe
caaacacagacagatgtggacatgc

SEQ ID NO: 343495 - DNA, 25 bp, Artificial
  Probe
gttgcagaccttgcacccctataac

SEQ ID NO: 343496 - DNA, 25 bp, Artificial
  Probe
agcagacccatctgcacaaacacag

SEQ ID NO: 343497 - DNA, 25 bp, Artificial
  Probe
gtgccccagaattgggaactgctcc

SEQ ID NO: 343498 - DNA, 25 bp, Artificial
  Probe
aactggtgccccagaattgggaact

SEQ ID NO: 343499 - DNA, 25 bp, Artificial
  Probe
gggttgcagaccttgcacccctata

SEQ ID NO: 343500 - DNA, 25 bp, Artificial
  Probe
gatgtggacatgcacccgcatgtac

SEQ ID NO: 343501 - DNA, 25 bp, Artificial
  Probe
gagctggcagcattacagttgggtc

SEQ ID NO: 343502 - DNA, 25 bp, Artificial
  Probe
ttcccaattccctggttgggttgca

SEQ ID NO: 343503 - DNA, 25 bp, Artificial
  Probe
attacagttgggtcccactcaccat

SEQ ID NO: 343504 - DNA, 25 bp, Artificial
  Probe
tccctggttgggttgcagaccttgc

SEQ ID NO: 343505 - DNA, 25 bp, Artificial
  Probe
ctcaccatgagtgtgaggccggccc

SEQ ID NO: 343506 - DNA, 25 bp, Artificial
  Probe
ctccagaggaggagctggcagcatt

SEQ ID NO: 343507 - DNA, 25 bp, Artificial
  Probe
agaattgggaactgctccagaggag

SEQ ID NO: 343508 - DNA, 25 bp, Artificial
  Probe
aattgggaactgctccagaggagga

SEQ ID NO: 343509 - DNA, 25 bp, Artificial
  Probe
cacaaacacagacagatgtggacat

SEQ ID NO: 343510 - DNA, 25 bp, Artificial
  Probe
ccatctgcacaaacacagacagatg

SEQ ID NO: 343511 - DNA, 25 bp, Artificial
  Probe
tgggtcccactcaccatgagtgtga

SEQ ID NO: 343512 - DNA, 25 bp, Artificial
  Probe
tccagaggaggagctggcagcatta

SEQ ID NO: 343513 - DNA, 25 bp, Artificial
  Probe
gacccatctgcacaaacacagacag

SEQ ID NO: 343514 - DNA, 25 bp, Artificial
  Probe
ggtcccactcaccatgagtgtgagg

SEQ ID NO: 343515 - DNA, 25 bp, Artificial
  Probe
ctacccgtgtatagctctatcccag

SEQ ID NO: 343516 - DNA, 25 bp, Artificial
  Probe
cctataacacctttgccgccggatt

SEQ ID NO: 343517 - DNA, 25 bp, Artificial
  Probe
gcacaaacacagacagatgtggaca

SEQ ID NO: 343518 - DNA, 25 bp, Artificial
  Probe
ctgcacaaacacagacagatgtgga

SEQ ID NO: 343519 - DNA, 25 bp, Artificial
  Probe
cggaggcagcctagcccccaaaggg

SEQ ID NO: 343520 - DNA, 25 bp, Artificial
  Probe
cacagacagatgtggacatgcaccc

SEQ ID NO: 343521 - DNA, 25 bp, Artificial
  Probe
tgcacaaacacagacagatgtggac

SEQ ID NO: 343522 - DNA, 25 bp, Artificial
  Probe
actatgattcccaattccctggttg

SEQ ID NO: 343523 - DNA, 25 bp, Artificial
  Probe
cagatgtggacatgcacccgcatgt

SEQ ID NO: 343524 - DNA, 25 bp, Artificial
  Probe
tctgcacaaacacagacagatgtgg

SEQ ID NO: 343525 - DNA, 25 bp, Artificial
  Probe
cagttgggtcccactcaccatgagt

SEQ ID NO: 343526 - DNA, 25 bp, Artificial
  Probe
gccggattcaacagcaccgggctgc

SEQ ID NO: 343527 - DNA, 25 bp, Artificial
  Probe
tttgccgccggattcaacagcaccg

SEQ ID NO: 343528 - DNA, 25 bp, Artificial
  Probe
gttgggtcccactcaccatgagtgt

SEQ ID NO: 343529 - DNA, 25 bp, Artificial
  Probe
gcagacccatctgcacaaacacaga

SEQ ID NO: 343530 - DNA, 25 bp, Artificial
  Probe
ctataacacctttgccgccggattc

SEQ ID NO: 343531 - DNA, 25 bp, Artificial
  Probe
aaggggaactggtgccccagaattg

SEQ ID NO: 343532 - DNA, 25 bp, Artificial
  Probe
catctgcacaaacacagacagatgt

SEQ ID NO: 343533 - DNA, 25 bp, Artificial
  Probe
aacacagacagatgtggacatgcac

SEQ ID NO: 343534 - DNA, 25 bp, Artificial
  Probe
cagcattacagttgggtcccactca

SEQ ID NO: 343535 - DNA, 25 bp, Artificial
  Probe
tggttgggttgcagaccttgcaccc

SEQ ID NO: 343536 - DNA, 25 bp, Artificial
  Probe
caattccctggttgggttgcagacc

SEQ ID NO: 343537 - DNA, 25 bp, Artificial
  Probe
atgattcccaattccctggttgggt

SEQ ID NO: 343538 - DNA, 25 bp, Artificial
  Probe
gatgacaacgttggagaaagtcatc

SEQ ID NO: 343539 - DNA, 25 bp, Artificial
  Probe
acctgacaaagaagggcttggtaca

SEQ ID NO: 343540 - DNA, 25 bp, Artificial
  Probe
cggcccaaggacaagaatggcaccc

SEQ ID NO: 343541 - DNA, 25 bp, Artificial
  Probe
ggaaaaggtcattccacctacaggc

SEQ ID NO: 343542 - DNA, 25 bp, Artificial
  Probe
cggccacggcccaaggacaagaatg

SEQ ID NO: 343543 - DNA, 25 bp, Artificial
  Probe
tggtacagaggcagcagactctgag

SEQ ID NO: 343544 - DNA, 25 bp, Artificial
  Probe
aattaggaggtcctggtgcagaatc

SEQ ID NO: 343545 - DNA, 25 bp, Artificial
  Probe
gacaagaatggcacccggacagagc

SEQ ID NO: 343546 - DNA, 25 bp, Artificial
  Probe
aggtgcagtatctactcaataaggc

SEQ ID NO: 343547 - DNA, 25 bp, Artificial
  Probe
cagagaaacccgtgctgctttcaaa

SEQ ID NO: 343548 - DNA, 25 bp, Artificial
  Probe
cctggaagaatgcaaccctggccga

SEQ ID NO: 343549 - DNA, 25 bp, Artificial
  Probe
gaaagtcatcaatgacacctggacc

SEQ ID NO: 343550 - DNA, 25 bp, Artificial
  Probe
ccctcaatgccagtgctggtgacca

SEQ ID NO: 343551 - DNA, 25 bp, Artificial
  Probe
gacatcgaggccaaaatgatggccc

SEQ ID NO: 343552 - DNA, 25 bp, Artificial
  Probe
aagcttcctgccacagagaaacccg

SEQ ID NO: 343553 - DNA, 25 bp, Artificial
  Probe
cagcagactctgagcctctggaatt

SEQ ID NO: 343554 - DNA, 25 bp, Artificial
  Probe
aacaggcagagcagacagcagggca

SEQ ID NO: 343555 - DNA, 25 bp, Artificial
  Probe
tcactccagcattttcctcaagggt

SEQ ID NO: 343556 - DNA, 25 bp, Artificial
  Probe
gcagaagcggcctttgaagaatgat

SEQ ID NO: 343557 - DNA, 25 bp, Artificial
  Probe
tggtgcagaatctgaacaggcagag

SEQ ID NO: 343558 - DNA, 25 bp, Artificial
  Probe
tgccacagagaaacccgtgctgctt

SEQ ID NO: 343559 - DNA, 25 bp, Artificial
  Probe
ggcttggtacagaggcagcagactc

SEQ ID NO: 343560 - DNA, 25 bp, Artificial
  Probe
tttcctcaagggtgcccgactcatc

SEQ ID NO: 343561 - DNA, 25 bp, Artificial
  Probe
tggaagaatgcaaccctggccgagc

SEQ ID NO: 343562 - DNA, 25 bp, Artificial
  Probe
caggccaagcttcctgccacagaga

SEQ ID NO: 343563 - DNA, 25 bp, Artificial
  Probe
agcctctggaattaggaggtcctgg

SEQ ID NO: 343564 - DNA, 25 bp, Artificial
  Probe
caagggtgcccgactcatcccagag

SEQ ID NO: 343565 - DNA, 25 bp, Artificial
  Probe
tgctggtgaccaagaggaaaaggtc

SEQ ID NO: 343566 - DNA, 25 bp, Artificial
  Probe
acagaggcagcagactctgagcctc

SEQ ID NO: 343567 - DNA, 25 bp, Artificial
  Probe
gaggcgaaggccatcttagaacctg

SEQ ID NO: 343568 - DNA, 25 bp, Artificial
  Probe
acagcagggcagaagcggcctttga

SEQ ID NO: 343569 - DNA, 25 bp, Artificial
  Probe
gtatctactcaataaggccaagttt

SEQ ID NO: 343570 - DNA, 25 bp, Artificial
  Probe
gctttcagctctggataatctcctc

SEQ ID NO: 343571 - DNA, 25 bp, Artificial
  Probe
ggtcctggtgcagaatctgaacagg

SEQ ID NO: 343572 - DNA, 25 bp, Artificial
  Probe
gagatggaccagatcttcactgacg

SEQ ID NO: 343573 - DNA, 25 bp, Artificial
  Probe
gagcaggccaagcttcctgccacag

SEQ ID NO: 343574 - DNA, 25 bp, Artificial
  Probe
agacagcagggcagaagcggccttt

SEQ ID NO: 343575 - DNA, 25 bp, Artificial
  Probe
cagaatctgaacaggcagagcagac

SEQ ID NO: 343576 - DNA, 25 bp, Artificial
  Probe
aggccaaaatgatggccctggaccg

SEQ ID NO: 343577 - DNA, 25 bp, Artificial
  Probe
acatcgaggccaaaatgatggccct

SEQ ID NO: 343578 - DNA, 25 bp, Artificial
  Probe
cctggacctggaagaatgcaaccct

SEQ ID NO: 343579 - DNA, 25 bp, Artificial
  Probe
tacaggccagactgaagaggcgaag

SEQ ID NO: 343580 - DNA, 25 bp, Artificial
  Probe
cattccacctacaggccagactgaa

SEQ ID NO: 343581 - DNA, 25 bp, Artificial
  Probe
aagcggcctttgaagaatgatgagc

SEQ ID NO: 343582 - DNA, 25 bp, Artificial
  Probe
tcaaaagacatcgaggccaaaatga

SEQ ID NO: 343583 - DNA, 25 bp, Artificial
  Probe
cactgacgtggagatgacaacgttg

SEQ ID NO: 343584 - DNA, 25 bp, Artificial
  Probe
aatcagcctggcatgcctgcgagtg

SEQ ID NO: 343585 - DNA, 25 bp, Artificial
  Probe
atgagaagctctgctttccttctct

SEQ ID NO: 343586 - DNA, 25 bp, Artificial
  Probe
cgagtgtgagacctggtaagaaaac

SEQ ID NO: 343587 - DNA, 25 bp, Artificial
  Probe
catcacagtagaagttcagcatcac

SEQ ID NO: 343588 - DNA, 25 bp, Artificial
  Probe
agaagctctgctttccttctctgcc

SEQ ID NO: 343589 - DNA, 25 bp, Artificial
  Probe
tacaaatcagcctggcatgcctgcg

SEQ ID NO: 343590 - DNA, 25 bp, Artificial
  Probe
catgagaagctctgctttccttctc

SEQ ID NO: 343591 - DNA, 25 bp, Artificial
  Probe
agtgtgagacctggtaagaaaactc

SEQ ID NO: 343592 - DNA, 25 bp, Artificial
  Probe
atcagcctggcatgcctgcgagtgt

SEQ ID NO: 343593 - DNA, 25 bp, Artificial
  Probe
gtagaagttcagcatcacctgaaga

SEQ ID NO: 343594 - DNA, 25 bp, Artificial
  Probe
catgcctgcgagtgtgagacctggt

SEQ ID NO: 343595 - DNA, 25 bp, Artificial
  Probe
atgcctgcgagtgtgagacctggta

SEQ ID NO: 343596 - DNA, 25 bp, Artificial
  Probe
tgacaacagtgatggcgtgtttcct

SEQ ID NO: 343597 - DNA, 25 bp, Artificial
  Probe
cctgcgagtgtgagacctggtaaga

SEQ ID NO: 343598 - DNA, 25 bp, Artificial
  Probe
tgcacaattatagtaccaagagttt

SEQ ID NO: 343599 - DNA, 25 bp, Artificial
  Probe
aaactcccacaaggatcctgcagtg

SEQ ID NO: 343600 - DNA, 25 bp, Artificial
  Probe
gtcctgacaacagtgatggcgtgtt

SEQ ID NO: 343601 - DNA, 25 bp, Artificial
  Probe
gcagtggaacgcaggcgcatcacag

SEQ ID NO: 343602 - DNA, 25 bp, Artificial
  Probe
gaacgcaggcgcatcacagtagaag

SEQ ID NO: 343603 - DNA, 25 bp, Artificial
  Probe
acatcacaagtcctgacaacagtga

SEQ ID NO: 343604 - DNA, 25 bp, Artificial
  Probe
ctgtgatgcgcatctccataacatc

SEQ ID NO: 343605 - DNA, 25 bp, Artificial
  Probe
ctgcgagtgtgagacctggtaagaa

SEQ ID NO: 343606 - DNA, 25 bp, Artificial
  Probe
gatcctgcagtggaacgcaggcgca

SEQ ID NO: 343607 - DNA, 25 bp, Artificial
  Probe
acagtgatggcgtgtttcctttcta

SEQ ID NO: 343608 - DNA, 25 bp, Artificial
  Probe
aacatcacaagtcctgacaacagtg

SEQ ID NO: 343609 - DNA, 25 bp, Artificial
  Probe
gtgatgcgcatctccataacatcac

SEQ ID NO: 343610 - DNA, 25 bp, Artificial
  Probe
tgatggcgtgtttcctttctagacc

SEQ ID NO: 343611 - DNA, 25 bp, Artificial
  Probe
ggcgcatcacagtagaagttcagca

SEQ ID NO: 343612 - DNA, 25 bp, Artificial
  Probe
ttcagcatcacctgaagactgactg

SEQ ID NO: 343613 - DNA, 25 bp, Artificial
  Probe
aagttcagcatcacctgaagactga

SEQ ID NO: 343614 - DNA, 25 bp, Artificial
  Probe
tgcctgcgagtgtgagacctggtaa

SEQ ID NO: 343615 - DNA, 25 bp, Artificial
  Probe
atttgcacaattatagtaccaagag

SEQ ID NO: 343616 - DNA, 25 bp, Artificial
  Probe
tcctgcagtggaacgcaggcgcatc

SEQ ID NO: 343617 - DNA, 25 bp, Artificial
  Probe
agagggctgtgatgcgcatctccat

SEQ ID NO: 343618 - DNA, 25 bp, Artificial
  Probe
cctgacaacagtgatggcgtgtttc

SEQ ID NO: 343619 - DNA, 25 bp, Artificial
  Probe
tgaatcctcactagagagctaagca

SEQ ID NO: 343620 - DNA, 25 bp, Artificial
  Probe
aaggatcctgcagtggaacgcaggc

SEQ ID NO: 343621 - DNA, 25 bp, Artificial
  Probe
gcatcacctgaagactgactggcag

SEQ ID NO: 343622 - DNA, 25 bp, Artificial
  Probe
gctgtgatgcgcatctccataacat

SEQ ID NO: 343623 - DNA, 25 bp, Artificial
  Probe
cctgaagactgactggcaggcagca

SEQ ID NO: 343624 - DNA, 25 bp, Artificial
  Probe
tggtaagaaaactcccacaaggatc

SEQ ID NO: 343625 - DNA, 25 bp, Artificial
  Probe
ctggtaagaaaactcccacaaggat

SEQ ID NO: 343626 - DNA, 25 bp, Artificial
  Probe
gtgtgagacctggtaagaaaactcc

SEQ ID NO: 343627 - DNA, 25 bp, Artificial
  Probe
aacgcaggcgcatcacagtagaagt

SEQ ID NO: 343628 - DNA, 25 bp, Artificial
  Probe
tagaagttcagcatcacctgaagac

SEQ ID NO: 343629 - DNA, 25 bp, Artificial
  Probe
caacacatgagaagctctgctttcc

SEQ ID NO: 343630 - DNA, 25 bp, Artificial
  Probe
gggcatgttcactgctgaagacctg

SEQ ID NO: 343631 - DNA, 25 bp, Artificial
  Probe
agggcatgttcactgctgaagacct

SEQ ID NO: 343632 - DNA, 25 bp, Artificial
  Probe
ccaagggcatgttcactgctgaaga

SEQ ID NO: 343633 - DNA, 25 bp, Artificial
  Probe
agaaggataccaccatcaatgaaat

SEQ ID NO: 343634 - DNA, 25 bp, Artificial
  Probe
caccctaatttcctggtagtggaga

SEQ ID NO: 343635 - DNA, 25 bp, Artificial
  Probe
catgttcactgctgaagacctgcgc

SEQ ID NO: 343636 - DNA, 25 bp, Artificial
  Probe
tgttcactgctgaagacctgcgcta

SEQ ID NO: 343637 - DNA, 25 bp, Artificial
  Probe
ggataccaccatcaatgaaatcgaa

SEQ ID NO: 343638 - DNA, 25 bp, Artificial
  Probe
gcatgttcactgctgaagacctgcg

SEQ ID NO: 343639 - DNA, 25 bp, Artificial
  Probe
cctaatttcctggtagtggagaagg

SEQ ID NO: 343640 - DNA, 25 bp, Artificial
  Probe
ccaccctaatttcctggtagtggag

SEQ ID NO: 343641 - DNA, 25 bp, Artificial
  Probe
gccaccctaatttcctggtagtgga

SEQ ID NO: 343642 - DNA, 25 bp, Artificial
  Probe
aggataccaccatcaatgaaatcga

SEQ ID NO: 343643 - DNA, 25 bp, Artificial
  Probe
gagaaggataccaccatcaatgaaa

SEQ ID NO: 343644 - DNA, 25 bp, Artificial
  Probe
tcactgctgaagacctgcgctaggg

SEQ ID NO: 343645 - DNA, 25 bp, Artificial
  Probe
gttcactgctgaagacctgcgctag

SEQ ID NO: 343646 - DNA, 25 bp, Artificial
  Probe
gaaggataccaccatcaatgaaatc

SEQ ID NO: 343647 - DNA, 25 bp, Artificial
  Probe
ttcactgctgaagacctgcgctagg

SEQ ID NO: 343648 - DNA, 25 bp, Artificial
  Probe
caagggcatgttcactgctgaagac

SEQ ID NO: 343649 - DNA, 25 bp, Artificial
  Probe
aagggcatgttcactgctgaagacc

SEQ ID NO: 343650 - DNA, 25 bp, Artificial
  Probe
atgttcactgctgaagacctgcgct

SEQ ID NO: 343651 - DNA, 25 bp, Artificial
  Probe
ttcctggtagtggagaaggatacca

SEQ ID NO: 343652 - DNA, 25 bp, Artificial
  Probe
ccctaatttcctggtagtggagaag

SEQ ID NO: 343653 - DNA, 25 bp, Artificial
  Probe
ggcatgttcactgctgaagacctgc

SEQ ID NO: 343654 - DNA, 25 bp, Artificial
  Probe
aaggataccaccatcaatgaaatcg

SEQ ID NO: 343655 - DNA, 25 bp, Artificial
  Probe
tttcctggtagtggagaaggatacc

SEQ ID NO: 343656 - DNA, 25 bp, Artificial
  Probe
gctatacctcaaattagctgtggat

SEQ ID NO: 343657 - DNA, 25 bp, Artificial
  Probe
tgtctcctgcactgccagtatgcaa

SEQ ID NO: 343658 - DNA, 25 bp, Artificial
  Probe
ttctctcccatgtaagaggctacat

SEQ ID NO: 343659 - DNA, 25 bp, Artificial
  Probe
ttgctctcagctgttgagtggtccg

SEQ ID NO: 343660 - DNA, 25 bp, Artificial
  Probe
tagaggctatacctcaaattagctg

SEQ ID NO: 343661 - DNA, 25 bp, Artificial
  Probe
ctcccatgtaagaggctacataaca

SEQ ID NO: 343662 - DNA, 25 bp, Artificial
  Probe
tctctcccatgtaagaggctacata

SEQ ID NO: 343663 - DNA, 25 bp, Artificial
  Probe
caaattagctgtggattttgtctcc

SEQ ID NO: 343664 - DNA, 25 bp, Artificial
  Probe
gaggctatacctcaaattagctgtg

SEQ ID NO: 343665 - DNA, 25 bp, Artificial
  Probe
gattttgtctcctgcactgccagta

SEQ ID NO: 343666 - DNA, 25 bp, Artificial
  Probe
aattgcctggagctttgctctcagc

SEQ ID NO: 343667 - DNA, 25 bp, Artificial
  Probe
ttttagaggctatacctcaaattag

SEQ ID NO: 343668 - DNA, 25 bp, Artificial
  Probe
ctggagctttgctctcagctgttga

SEQ ID NO: 343669 - DNA, 25 bp, Artificial
  Probe
gccagtatgcaactgatcttgcatt

SEQ ID NO: 343670 - DNA, 25 bp, Artificial
  Probe
gctttgctctcagctgttgagtggt

SEQ ID NO: 343671 - DNA, 25 bp, Artificial
  Probe
ctcaaattagctgtggattttgtct

SEQ ID NO: 343672 - DNA, 25 bp, Artificial
  Probe
atacctcaaattagctgtggatttt

SEQ ID NO: 343673 - DNA, 25 bp, Artificial
  Probe
tcctgcactgccagtatgcaactga

SEQ ID NO: 343674 - DNA, 25 bp, Artificial
  Probe
cagctgttgagtggtccgaattagg

SEQ ID NO: 343675 - DNA, 25 bp, Artificial
  Probe
gtataggttctctcccatgtaagag

SEQ ID NO: 343676 - DNA, 25 bp, Artificial
  Probe
catatccatgatgctgctttaaggt

SEQ ID NO: 343677 - DNA, 25 bp, Artificial
  Probe
cagtatgcaactgatcttgcattta

SEQ ID NO: 343678 - DNA, 25 bp, Artificial
  Probe
cctcaaattagctgtggattttgtc

SEQ ID NO: 343679 - DNA, 25 bp, Artificial
  Probe
gttttagaggctatacctcaaatta

SEQ ID NO: 343680 - DNA, 25 bp, Artificial
  Probe
ctgcactgccagtatgcaactgatc

SEQ ID NO: 343681 - DNA, 25 bp, Artificial
  Probe
atccatgatgctgctttaaggtttt

SEQ ID NO: 343682 - DNA, 25 bp, Artificial
  Probe
tcagctgttgagtggtccgaattag

SEQ ID NO: 343683 - DNA, 25 bp, Artificial
  Probe
aggttctctcccatgtaagaggcta

SEQ ID NO: 343684 - DNA, 25 bp, Artificial
  Probe
actgccagtatgcaactgatcttgc

SEQ ID NO: 343685 - DNA, 25 bp, Artificial
  Probe
tgctctcagctgttgagtggtccga

SEQ ID NO: 343686 - DNA, 25 bp, Artificial
  Probe
gtatgcaactgatcttgcatttatt

SEQ ID NO: 343687 - DNA, 25 bp, Artificial
  Probe
ggctacataacatatccatgatgct

SEQ ID NO: 343688 - DNA, 25 bp, Artificial
  Probe
cactgccagtatgcaactgatcttg

SEQ ID NO: 343689 - DNA, 25 bp, Artificial
  Probe
aggctacataacatatccatgatgc

SEQ ID NO: 343690 - DNA, 25 bp, Artificial
  Probe
gctacataacatatccatgatgctg

SEQ ID NO: 343691 - DNA, 25 bp, Artificial
  Probe
aattagctgtggattttgtctcctg

SEQ ID NO: 343692 - DNA, 25 bp, Artificial
  Probe
gaggctacataacatatccatgatg

SEQ ID NO: 343693 - DNA, 25 bp, Artificial
  Probe
agtataggttctctcccatgtaaga

SEQ ID NO: 343694 - DNA, 25 bp, Artificial
  Probe
gtggattttgtctcctgcactgcca

SEQ ID NO: 343695 - DNA, 25 bp, Artificial
  Probe
cctggagctttgctctcagctgttg

SEQ ID NO: 343696 - DNA, 25 bp, Artificial
  Probe
tggattttgtctcctgcactgccag

SEQ ID NO: 343697 - DNA, 25 bp, Artificial
  Probe
ttgcctggagctttgctctcagctg

SEQ ID NO: 343698 - DNA, 25 bp, Artificial
  Probe
gctctcagctgttgagtggtccgaa

SEQ ID NO: 343699 - DNA, 25 bp, Artificial
  Probe
tagctgtggattttgtctcctgcac

SEQ ID NO: 343700 - DNA, 25 bp, Artificial
  Probe
ccatgatgctgctttaaggttttag

SEQ ID NO: 343701 - DNA, 25 bp, Artificial
  Probe
tttgtctcctgcactgccagtatgc

SEQ ID NO: 343702 - DNA, 25 bp, Artificial
  Probe
agtggtgttgtatcacatggaccag

SEQ ID NO: 343703 - DNA, 25 bp, Artificial
  Probe
caactcgtggttcttgtgggatggc

SEQ ID NO: 343704 - DNA, 25 bp, Artificial
  Probe
tcaactcgtggttcttgtgggatgg

SEQ ID NO: 343705 - DNA, 25 bp, Artificial
  Probe
gtgttgtatcacatggaccagaaac

SEQ ID NO: 343706 - DNA, 25 bp, Artificial
  Probe
tttctcagcctctgtgcaagttgtt

SEQ ID NO: 343707 - DNA, 25 bp, Artificial
  Probe
gcctctgtgcaagttgttttctgtg

SEQ ID NO: 343708 - DNA, 25 bp, Artificial
  Probe
ttgggtgttctttgagctttctcag

SEQ ID NO: 343709 - DNA, 25 bp, Artificial
  Probe
atggcctatagtggtgttgtatcac

SEQ ID NO: 343710 - DNA, 25 bp, Artificial
  Probe
tttgagctttctcagcctctgtgca

SEQ ID NO: 343711 - DNA, 25 bp, Artificial
  Probe
ttctcagcctctgtgcaagttgttt

SEQ ID NO: 343712 - DNA, 25 bp, Artificial
  Probe
gttcttgtgggatggcctatgttac

SEQ ID NO: 343713 - DNA, 25 bp, Artificial
  Probe
ctttgagctttctcagcctctgtgc

SEQ ID NO: 343714 - DNA, 25 bp, Artificial
  Probe
aaccagttcatattgtgaatgaatc

SEQ ID NO: 343715 - DNA, 25 bp, Artificial
  Probe
cctctgtgcaagttgttttctgtgg

SEQ ID NO: 343716 - DNA, 25 bp, Artificial
  Probe
tgtatcacatggaccagaaaccagt

SEQ ID NO: 343717 - DNA, 25 bp, Artificial
  Probe
aatatattcaactcgtggttcttgt

SEQ ID NO: 343718 - DNA, 25 bp, Artificial
  Probe
atatattcaactcgtggttcttgtg

SEQ ID NO: 343719 - DNA, 25 bp, Artificial
  Probe
cagaaaccagttcatattgtgaatg

SEQ ID NO: 343720 - DNA, 25 bp, Artificial
  Probe
gaccagaaaccagttcatattgtga

SEQ ID NO: 343721 - DNA, 25 bp, Artificial
  Probe
cactgcttctaaaagttgtgtccag

SEQ ID NO: 343722 - DNA, 25 bp, Artificial
  Probe
ctctgtgcaagttgttttctgtgga

SEQ ID NO: 343723 - DNA, 25 bp, Artificial
  Probe
tgttgtatcacatggaccagaaacc

SEQ ID NO: 343724 - DNA, 25 bp, Artificial
  Probe
ctgtgcaagttgttttctgtggaac

SEQ ID NO: 343725 - DNA, 25 bp, Artificial
  Probe
actcgtggttcttgtgggatggcct

SEQ ID NO: 343726 - DNA, 25 bp, Artificial
  Probe
accaaatactctgatttctgatgag

SEQ ID NO: 343727 - DNA, 25 bp, Artificial
  Probe
tgggatggcctatgttaccttcatt

SEQ ID NO: 343728 - DNA, 25 bp, Artificial
  Probe
tgtgggatggcctatgttaccttca

SEQ ID NO: 343729 - DNA, 25 bp, Artificial
  Probe
gcctatagtggtgttgtatcacatg

SEQ ID NO: 343730 - DNA, 25 bp, Artificial
  Probe
tatcacatggaccagaaaccagttc

SEQ ID NO: 343731 - DNA, 25 bp, Artificial
  Probe
ccagaaaagccactgcttctaaaag

SEQ ID NO: 343732 - DNA, 25 bp, Artificial
  Probe
gccactgcttctaaaagttgtgtcc

SEQ ID NO: 343733 - DNA, 25 bp, Artificial
  Probe
ggtgttctttgagctttctcagcct

SEQ ID NO: 343734 - DNA, 25 bp, Artificial
  Probe
gcttctaaaagttgtgtccagagat

SEQ ID NO: 343735 - DNA, 25 bp, Artificial
  Probe
cagaaaagccactgcttctaaaagt

SEQ ID NO: 343736 - DNA, 25 bp, Artificial
  Probe
tggcctatgttaccttcattgttac

SEQ ID NO: 343737 - DNA, 25 bp, Artificial
  Probe
ggcctatgttaccttcattgttacc

SEQ ID NO: 343738 - DNA, 25 bp, Artificial
  Probe
cacatggaccagaaaccagttcata

SEQ ID NO: 343739 - DNA, 25 bp, Artificial
  Probe
atggaccagaaaccagttcatattg

SEQ ID NO: 343740 - DNA, 25 bp, Artificial
  Probe
aaagccactgcttctaaaagttgtg

SEQ ID NO: 343741 - DNA, 25 bp, Artificial
  Probe
gctttctcagcctctgtgcaagttg

SEQ ID NO: 343742 - DNA, 25 bp, Artificial
  Probe
tagtggtgttgtatcacatggacca

SEQ ID NO: 343743 - DNA, 25 bp, Artificial
  Probe
tcgtggttcttgtgggatggcctat

SEQ ID NO: 343744 - DNA, 25 bp, Artificial
  Probe
ccagttcatattgtgaatgaatcca

SEQ ID NO: 343745 - DNA, 25 bp, Artificial
  Probe
gggtgttctttgagctttctcagcc

SEQ ID NO: 343746 - DNA, 25 bp, Artificial
  Probe
ccaaatactctgatttctgatgaga

SEQ ID NO: 343747 - DNA, 25 bp, Artificial
  Probe
cttctaaaagttgtgtccagagatg

SEQ ID NO: 343748 - DNA, 25 bp, Artificial
  Probe
ggagcaaacacaacctctggtccta

SEQ ID NO: 343749 - DNA, 25 bp, Artificial
  Probe
gaaacataaccattacagggagctg

SEQ ID NO: 343750 - DNA, 25 bp, Artificial
  Probe
gacaaggaacctgcagaatgtggac

SEQ ID NO: 343751 - DNA, 25 bp, Artificial
  Probe
gggtgtaacacctacaccattatct

SEQ ID NO: 343752 - DNA, 25 bp, Artificial
  Probe
tggtcctataaggacaccccaaatt

SEQ ID NO: 343753 - DNA, 25 bp, Artificial
  Probe
ctctggtcctataaggacaccccaa

SEQ ID NO: 343754 - DNA, 25 bp, Artificial
  Probe
tcgtcagaaactccagaccagttta

SEQ ID NO: 343755 - DNA, 25 bp, Artificial
  Probe
cataccactcatggatctgaatcag

SEQ ID NO: 343756 - DNA, 25 bp, Artificial
  Probe
aaggacaccccaaattccagaatgg

SEQ ID NO: 343757 - DNA, 25 bp, Artificial
  Probe
agtttgcattgcagtcaacagtcga

SEQ ID NO: 343758 - DNA, 25 bp, Artificial
  Probe
ttggccttggctttgattcttgcag

SEQ ID NO: 343759 - DNA, 25 bp, Artificial
  Probe
aaggaacctgcagaatgtggacatg

SEQ ID NO: 343760 - DNA, 25 bp, Artificial
  Probe
ccttggctttgattcttgcagtttg

SEQ ID NO: 343761 - DNA, 25 bp, Artificial
  Probe
gacaccccaaattccagaatggctg

SEQ ID NO: 343762 - DNA, 25 bp, Artificial
  Probe
ctcacatgggagtcaagaaggtgga

SEQ ID NO: 343763 - DNA, 25 bp, Artificial
  Probe
ggggtcccataccactcatggatct

SEQ ID NO: 343764 - DNA, 25 bp, Artificial
  Probe
atctgaatcagatggacactcacat

SEQ ID NO: 343765 - DNA, 25 bp, Artificial
  Probe
taaggacaccccaaattccagaatg

SEQ ID NO: 343766 - DNA, 25 bp, Artificial
  Probe
ggagtcgtcagaaactccagaccag

SEQ ID NO: 343767 - DNA, 25 bp, Artificial
  Probe
tcaggagaccaagacacattccacc

SEQ ID NO: 343768 - DNA, 25 bp, Artificial
  Probe
gtcccataccactcatggatctgaa

SEQ ID NO: 343769 - DNA, 25 bp, Artificial
  Probe
aacataaccattacagggagctggg

SEQ ID NO: 343770 - DNA, 25 bp, Artificial
  Probe
gggggtcccataccactcatggatc

SEQ ID NO: 343771 - DNA, 25 bp, Artificial
  Probe
gagcaaacacaacctctggtcctat

SEQ ID NO: 343772 - DNA, 25 bp, Artificial
  Probe
cttatcaggagaccaagacacattc

SEQ ID NO: 343773 - DNA, 25 bp, Artificial
  Probe
accactcatggatctgaatcagatg

SEQ ID NO: 343774 - DNA, 25 bp, Artificial
  Probe
aacacaacctctggtcctataagga

SEQ ID NO: 343775 - DNA, 25 bp, Artificial
  Probe
ctaatgtcaatcgttccttatcagg

SEQ ID NO: 343776 - DNA, 25 bp, Artificial
  Probe
aatcagatggacactcacatgggag

SEQ ID NO: 343777 - DNA, 25 bp, Artificial
  Probe
tccttatcaggagaccaagacacat

SEQ ID NO: 343778 - DNA, 25 bp, Artificial
  Probe
tgtcaatcgttccttatcaggagac

SEQ ID NO: 343779 - DNA, 25 bp, Artificial
  Probe
ggggtgtaacacctacaccattatc

SEQ ID NO: 343780 - DNA, 25 bp, Artificial
  Probe
gagattccaactctaatgtcaatcg

SEQ ID NO: 343781 - DNA, 25 bp, Artificial
  Probe
cagatggacactcacatgggagtca

SEQ ID NO: 343782 - DNA, 25 bp, Artificial
  Probe
cttggccttggctttgattcttgca

SEQ ID NO: 343783 - DNA, 25 bp, Artificial
  Probe
tgaatcagatggacactcacatggg

SEQ ID NO: 343784 - DNA, 25 bp, Artificial
  Probe
tgtgctactgattgtttcattgcga

SEQ ID NO: 343785 - DNA, 25 bp, Artificial
  Probe
caacctctggtcctataaggacacc

SEQ ID NO: 343786 - DNA, 25 bp, Artificial
  Probe
agtcgtcagaaactccagaccagtt

SEQ ID NO: 343787 - DNA, 25 bp, Artificial
  Probe
tgctactgattgtttcattgcgaat

SEQ ID NO: 343788 - DNA, 25 bp, Artificial
  Probe
actcacatgggagtcaagaaggtgg

SEQ ID NO: 343789 - DNA, 25 bp, Artificial
  Probe
taatgtcaatcgttccttatcagga

SEQ ID NO: 343790 - DNA, 25 bp, Artificial
  Probe
ttggaaacataaccattacagggag

SEQ ID NO: 343791 - DNA, 25 bp, Artificial
  Probe
cactcacatgggagtcaagaaggtg

SEQ ID NO: 343792 - DNA, 25 bp, Artificial
  Probe
caccccaaattccagaatggctgat

SEQ ID NO: 343793 - DNA, 25 bp, Artificial
  Probe
ggccttggctttgattcttgcagtt

SEQ ID NO: 343794 - DNA, 25 bp, Artificial
  Probe
gacatgcggcccacagagaaccgca

SEQ ID NO: 343795 - DNA, 25 bp, Artificial
  Probe
gccgcatcttcctagggctcggcat

SEQ ID NO: 343796 - DNA, 25 bp, Artificial
  Probe
tgagcatcagctacgcggccctgct

SEQ ID NO: 343797 - DNA, 25 bp, Artificial
  Probe
cctgcaccgggtaccagtaccaagt

SEQ ID NO: 343798 - DNA, 25 bp, Artificial
  Probe
tttgagcagggcaaacggtcggtca

SEQ ID NO: 343799 - DNA, 25 bp, Artificial
  Probe
cttccaggaccaacggacacttgac

SEQ ID NO: 343800 - DNA, 25 bp, Artificial
  Probe
agctacgtgctgctggcgggcatct

SEQ ID NO: 343801 - DNA, 25 bp, Artificial
  Probe
gcatctttgagcagggcaaacggtc

SEQ ID NO: 343802 - DNA, 25 bp, Artificial
  Probe
tcgccgccacgctgttcgtggtggt

SEQ ID NO: 343803 - DNA, 25 bp, Artificial
  Probe
caagtggaccgctacacctgtaaga

SEQ ID NO: 343804 - DNA, 25 bp, Artificial
  Probe
cggacctggggacctgttcgctccg

SEQ ID NO: 343805 - DNA, 25 bp, Artificial
  Probe
tcatgatcgcagagccggacctggg

SEQ ID NO: 343806 - DNA, 25 bp, Artificial
  Probe
ggcccacagagaaccgcacgagctg

SEQ ID NO: 343807 - DNA, 25 bp, Artificial
  Probe
cagagccggacctggggacctgttc

SEQ ID NO: 343808 - DNA, 25 bp, Artificial
  Probe
tgaccaagaccaaccgcatttaccg

SEQ ID NO: 343809 - DNA, 25 bp, Artificial
  Probe
ggacctggggacctgttcgctccgc

SEQ ID NO: 343810 - DNA, 25 bp, Artificial
  Probe
tggtcacgtttgtgcgctacaacga

SEQ ID NO: 343811 - DNA, 25 bp, Artificial
  Probe
gcaaacggtcggtcagtgccccgcg

SEQ ID NO: 343812 - DNA, 25 bp, Artificial
  Probe
tgcgagccctgcaccgggtaccagt

SEQ ID NO: 343813 - DNA, 25 bp, Artificial
  Probe
agtaccaagtggaccgctacacctg

SEQ ID NO: 343814 - DNA, 25 bp, Artificial
  Probe
caagtgcgacatctcggacctgtcc

SEQ ID NO: 343815 - DNA, 25 bp, Artificial
  Probe
tcttcctagggctcggcatgagcat

SEQ ID NO: 343816 - DNA, 25 bp, Artificial
  Probe
gggtaccagtaccaagtggaccgct

SEQ ID NO: 343817 - DNA, 25 bp, Artificial
  Probe
ctagggctcggcatgagcatcagct

SEQ ID NO: 343818 - DNA, 25 bp, Artificial
  Probe
ggaccgctacacctgtaagacctgc

SEQ ID NO: 343819 - DNA, 25 bp, Artificial
  Probe
gcaccgggtaccagtaccaagtgga

SEQ ID NO: 343820 - DNA, 25 bp, Artificial
  Probe
ccttcctcatgatcgcagagccgga

SEQ ID NO: 343821 - DNA, 25 bp, Artificial
  Probe
ccgcatcttcctagggctcggcatg

SEQ ID NO: 343822 - DNA, 25 bp, Artificial
  Probe
ctgctggcgggcatctttctgtgct

SEQ ID NO: 343823 - DNA, 25 bp, Artificial
  Probe
tgcggcccacagagaaccgcacgag

SEQ ID NO: 343824 - DNA, 25 bp, Artificial
  Probe
taccgcatctttgagcagggcaaac

SEQ ID NO: 343825 - DNA, 25 bp, Artificial
  Probe
acagagaaccgcacgagctgccagc

SEQ ID NO: 343826 - DNA, 25 bp, Artificial
  Probe
acgtttgtgcgctacaacgataccc

SEQ ID NO: 343827 - DNA, 25 bp, Artificial
  Probe
gcatctttctgtgctacgccactac

SEQ ID NO: 343828 - DNA, 25 bp, Artificial
  Probe
gtggtggacttccaggaccaacgga

SEQ ID NO: 343829 - DNA, 25 bp, Artificial
  Probe
atgcggcccacagagaaccgcacga

SEQ ID NO: 343830 - DNA, 25 bp, Artificial
  Probe
cctcatgatcgcagagccggacctg

SEQ ID NO: 343831 - DNA, 25 bp, Artificial
  Probe
caaacggtcggtcagtgccccgcgt

SEQ ID NO: 343832 - DNA, 25 bp, Artificial
  Probe
tgctgaccaagaccaaccgcattta

SEQ ID NO: 343833 - DNA, 25 bp, Artificial
  Probe
cagctgctcggcatctgcgtgtggt

SEQ ID NO: 343834 - DNA, 25 bp, Artificial
  Probe
ctgttcgtggtggtcacgtttgtgc

SEQ ID NO: 343835 - DNA, 25 bp, Artificial
  Probe
ctgctcggcatctgcgtgtggttcg

SEQ ID NO: 343836 - DNA, 25 bp, Artificial
  Probe
cagggcaaacggtcggtcagtgccc

SEQ ID NO: 343837 - DNA, 25 bp, Artificial
  Probe
gctacgtgctgctggcgggcatctt

SEQ ID NO: 343838 - DNA, 25 bp, Artificial
  Probe
cactaccttcctcatgatcgcagag

SEQ ID NO: 343839 - DNA, 25 bp, Artificial
  Probe
ttgtgcgctacaacgatacccccat

SEQ ID NO: 343840 - DNA, 25 bp, Artificial
  Probe
tgctcctgaatgtggccggtgccag

SEQ ID NO: 343841 - DNA, 25 bp, Artificial
  Probe
atttctgaaaatcaacagttccagg

SEQ ID NO: 343842 - DNA, 25 bp, Artificial
  Probe
atatgtcgcgggtgtgaattcccca

SEQ ID NO: 343843 - DNA, 25 bp, Artificial
  Probe
tggcatgacacttgctttgtgtgct

SEQ ID NO: 343844 - DNA, 25 bp, Artificial
  Probe
cttgctttgtgtgctccgtgtgttg

SEQ ID NO: 343845 - DNA, 25 bp, Artificial
  Probe
cacgtgtcctgttttgtgtgtgtgg

SEQ ID NO: 343846 - DNA, 25 bp, Artificial
  Probe
tggccggtgccagaggaagatcctt

SEQ ID NO: 343847 - DNA, 25 bp, Artificial
  Probe
atcaatgctttgaagcagacctggc

SEQ ID NO: 343848 - DNA, 25 bp, Artificial
  Probe
tccttggggaagtcatcaatgcttt

SEQ ID NO: 343849 - DNA, 25 bp, Artificial
  Probe
atgagaagttctttgctcctgaatg

SEQ ID NO: 343850 - DNA, 25 bp, Artificial
  Probe
tcgcgggtgtgaattccccatagag

SEQ ID NO: 343851 - DNA, 25 bp, Artificial
  Probe
agggcagacatttttctccaagaag

SEQ ID NO: 343852 - DNA, 25 bp, Artificial
  Probe
ctttttggaacaatatgtcgcgggt

SEQ ID NO: 343853 - DNA, 25 bp, Artificial
  Probe
cgatggcctatataggctttgtgga

SEQ ID NO: 343854 - DNA, 25 bp, Artificial
  Probe
aacatgctcattctgtgaatttctg

SEQ ID NO: 343855 - DNA, 25 bp, Artificial
  Probe
agactattatgcactttttggaaca

SEQ ID NO: 343856 - DNA, 25 bp, Artificial
  Probe
gaggaagatccttggggaagtcatc

SEQ ID NO: 343857 - DNA, 25 bp, Artificial
  Probe
aatcaacagttccaggaaagagaag

SEQ ID NO: 343858 - DNA, 25 bp, Artificial
  Probe
tgtcgcgggtgtgaattccccatag

SEQ ID NO: 343859 - DNA, 25 bp, Artificial
  Probe
ctccacctggcatgacacttgcttt

SEQ ID NO: 343860 - DNA, 25 bp, Artificial
  Probe
gaaggacaagccactttgcaaaaaa

SEQ ID NO: 343861 - DNA, 25 bp, Artificial
  Probe
agacagactattatgcactttttgg

SEQ ID NO: 343862 - DNA, 25 bp, Artificial
  Probe
agatccttggggaagtcatcaatgc

SEQ ID NO: 343863 - DNA, 25 bp, Artificial
  Probe
aattccccatagaggctggtgacat

SEQ ID NO: 343864 - DNA, 25 bp, Artificial
  Probe
gtcctgttttgtgtgtgtggcctgt

SEQ ID NO: 343865 - DNA, 25 bp, Artificial
  Probe
tgtgaattccccatagaggctggtg

SEQ ID NO: 343866 - DNA, 25 bp, Artificial
  Probe
tatgcactttttggaacaatatgtc

SEQ ID NO: 343867 - DNA, 25 bp, Artificial
  Probe
gactattatgcactttttggaacaa

SEQ ID NO: 343868 - DNA, 25 bp, Artificial
  Probe
ccagaggaagatccttggggaagtc

SEQ ID NO: 343869 - DNA, 25 bp, Artificial
  Probe
atagaggctggtgacatgttcctgg

SEQ ID NO: 343870 - DNA, 25 bp, Artificial
  Probe
acctggcatgacacttgctttgtgt

SEQ ID NO: 343871 - DNA, 25 bp, Artificial
  Probe
tgaaaatcaacagttccaggaaaga

SEQ ID NO: 343872 - DNA, 25 bp, Artificial
  Probe
ccccatagaggctggtgacatgttc

SEQ ID NO: 343873 - DNA, 25 bp, Artificial
  Probe
gctcattctgtgaatttctgaaaat

SEQ ID NO: 343874 - DNA, 25 bp, Artificial
  Probe
ttgaagcagacctggcacgtgtcct

SEQ ID NO: 343875 - DNA, 25 bp, Artificial
  Probe
atgcactttttggaacaatatgtcg

SEQ ID NO: 343876 - DNA, 25 bp, Artificial
  Probe
gaagtcatcaatgctttgaagcaga

SEQ ID NO: 343877 - DNA, 25 bp, Artificial
  Probe
cagaggaagatccttggggaagtca

SEQ ID NO: 343878 - DNA, 25 bp, Artificial
  Probe
ggcacgtgtcctgttttgtgtgtgt

SEQ ID NO: 343879 - DNA, 25 bp, Artificial
  Probe
gtcatcaatgctttgaagcagacct

SEQ ID NO: 343880 - DNA, 25 bp, Artificial
  Probe
ggctggtgacatgttcctggaagct

SEQ ID NO: 343881 - DNA, 25 bp, Artificial
  Probe
tgctttgtgtgctccgtgtgttgtg

SEQ ID NO: 343882 - DNA, 25 bp, Artificial
  Probe
cactttttggaacaatatgtcgcgg

SEQ ID NO: 343883 - DNA, 25 bp, Artificial
  Probe
ttctgaaaatcaacagttccaggaa

SEQ ID NO: 343884 - DNA, 25 bp, Artificial
  Probe
agcagacctggcacgtgtcctgttt

SEQ ID NO: 343885 - DNA, 25 bp, Artificial
  Probe
aggctggtgacatgttcctggaagc

SEQ ID NO: 343886 - DNA, 25 bp, Artificial
  Probe
tgccaatggagcagctaggctgaca

SEQ ID NO: 343887 - DNA, 25 bp, Artificial
  Probe
tagtattctgggaaatcgctcgacg

SEQ ID NO: 343888 - DNA, 25 bp, Artificial
  Probe
ccaaatattcccaacagatggcaga

SEQ ID NO: 343889 - DNA, 25 bp, Artificial
  Probe
acgctgttccattggcggaatccac

SEQ ID NO: 343890 - DNA, 25 bp, Artificial
  Probe
ttgcccatagagatttgaaatcaaa

SEQ ID NO: 343891 - DNA, 25 bp, Artificial
  Probe
gggaaatcgctcgacgctgttccat

SEQ ID NO: 343892 - DNA, 25 bp, Artificial
  Probe
gatcttgtaccttctgatccatccg

SEQ ID NO: 343893 - DNA, 25 bp, Artificial
  Probe
taaggccaaatattcccaacagatg

SEQ ID NO: 343894 - DNA, 25 bp, Artificial
  Probe
ccctgaagttctagatgattccata

SEQ ID NO: 343895 - DNA, 25 bp, Artificial
  Probe
attgatattgctccaaaccacagag

SEQ ID NO: 343896 - DNA, 25 bp, Artificial
  Probe
aacattgtcacagctcagccaacag

SEQ ID NO: 343897 - DNA, 25 bp, Artificial
  Probe
tcttgcccatcttcacatggagatt

SEQ ID NO: 343898 - DNA, 25 bp, Artificial
  Probe
acttgctgtgagacatgattctgcc

SEQ ID NO: 343899 - DNA, 25 bp, Artificial
  Probe
tcacatggagattgttggtacccaa

SEQ ID NO: 343900 - DNA, 25 bp, Artificial
  Probe
tgggcttagtattctgggaaatcgc

SEQ ID NO: 343901 - DNA, 25 bp, Artificial
  Probe
cggcaagtggtcttgcccatcttca

SEQ ID NO: 343902 - DNA, 25 bp, Artificial
  Probe
cagctattgcccatagagatttgaa

SEQ ID NO: 343903 - DNA, 25 bp, Artificial
  Probe
tattctgggaaatcgctcgacgctg

SEQ ID NO: 343904 - DNA, 25 bp, Artificial
  Probe
gttgccttactatgatcttgtacct

SEQ ID NO: 343905 - DNA, 25 bp, Artificial
  Probe
gccttgagagtgatggccaaaatta

SEQ ID NO: 343906 - DNA, 25 bp, Artificial
  Probe
gacttgctgtgagacatgattctgc

SEQ ID NO: 343907 - DNA, 25 bp, Artificial
  Probe
tgccacagatacaattgatattgct

SEQ ID NO: 343908 - DNA, 25 bp, Artificial
  Probe
ccatccgttgaagaaatgagaaaag

SEQ ID NO: 343909 - DNA, 25 bp, Artificial
  Probe
cctgttgtattgcagatttgggact

SEQ ID NO: 343910 - DNA, 25 bp, Artificial
  Probe
tgaggccttgagagtgatggccaaa

SEQ ID NO: 343911 - DNA, 25 bp, Artificial
  Probe
acagatggcagagctgtgaggcctt

SEQ ID NO: 343912 - DNA, 25 bp, Artificial
  Probe
cagatttgggacttgctgtgagaca

SEQ ID NO: 343913 - DNA, 25 bp, Artificial
  Probe
gttaaggccaaatattcccaacaga

SEQ ID NO: 343914 - DNA, 25 bp, Artificial
  Probe
attcccaacagatggcagagctgtg

SEQ ID NO: 343915 - DNA, 25 bp, Artificial
  Probe
tctgtccacggcaagtggtcttgcc

SEQ ID NO: 343916 - DNA, 25 bp, Artificial
  Probe
ttcaaacgtgctgacatctatgcaa

SEQ ID NO: 343917 - DNA, 25 bp, Artificial
  Probe
acctgttgtattgcagatttgggac

SEQ ID NO: 343918 - DNA, 25 bp, Artificial
  Probe
gcagatttgggacttgctgtgagac

SEQ ID NO: 343919 - DNA, 25 bp, Artificial
  Probe
aaaccacagagtaggcactaaaagg

SEQ ID NO: 343920 - DNA, 25 bp, Artificial
  Probe
acatctatgcaatgggcttagtatt

SEQ ID NO: 343921 - DNA, 25 bp, Artificial
  Probe
ttggtatgccaatggagcagctagg

SEQ ID NO: 343922 - DNA, 25 bp, Artificial
  Probe
ctcgctctgtccacggcaagtggtc

SEQ ID NO: 343923 - DNA, 25 bp, Artificial
  Probe
caacagatggcagagctgtgaggcc

SEQ ID NO: 343924 - DNA, 25 bp, Artificial
  Probe
gggcttagtattctgggaaatcgct

SEQ ID NO: 343925 - DNA, 25 bp, Artificial
  Probe
ttccattggcggaatccacgaagac

SEQ ID NO: 343926 - DNA, 25 bp, Artificial
  Probe
ggaaaaccagctattgcccatagag

SEQ ID NO: 343927 - DNA, 25 bp, Artificial
  Probe
ccagttgccttactatgatcttgta

SEQ ID NO: 343928 - DNA, 25 bp, Artificial
  Probe
aggctgacagctttgcgaattaaaa

SEQ ID NO: 343929 - DNA, 25 bp, Artificial
  Probe
tgttggtacccaaggaaaaccagct

SEQ ID NO: 343930 - DNA, 25 bp, Artificial
  Probe
tgagacatgattctgccacagatac

SEQ ID NO: 343931 - DNA, 25 bp, Artificial
  Probe
cacgaagactaccagttgccttact

SEQ ID NO: 343932 - DNA, 25 bp, Artificial
  Probe
cttttgcagcaatattagcagctgg

SEQ ID NO: 343933 - DNA, 25 bp, Artificial
  Probe
aaggcggtggagtttgcatgattaa

SEQ ID NO: 343934 - DNA, 25 bp, Artificial
  Probe
ctgggggctcaggatcaactttact

SEQ ID NO: 343935 - DNA, 25 bp, Artificial
  Probe
tcaggatcaactttactgtgtcact

SEQ ID NO: 343936 - DNA, 25 bp, Artificial
  Probe
acaactcgtgcaggagctgtaaacc

SEQ ID NO: 343937 - DNA, 25 bp, Artificial
  Probe
caactcgtgcaggagctgtaaaccg

SEQ ID NO: 343938 - DNA, 25 bp, Artificial
  Probe
atattagcagctgggggctcaggat

SEQ ID NO: 343939 - DNA, 25 bp, Artificial
  Probe
tttggagcacttttgcagcaatatt

SEQ ID NO: 343940 - DNA, 25 bp, Artificial
  Probe
caggatcaactttactgtgtcactt

SEQ ID NO: 343941 - DNA, 25 bp, Artificial
  Probe
gtaaaccgtgcctttcacaggacgc

SEQ ID NO: 343942 - DNA, 25 bp, Artificial
  Probe
aggcggtggagtttgcatgattaaa

SEQ ID NO: 343943 - DNA, 25 bp, Artificial
  Probe
tacaactcgtgcaggagctgtaaac

SEQ ID NO: 343944 - DNA, 25 bp, Artificial
  Probe
tgcagcaatattagcagctgggggc

SEQ ID NO: 343945 - DNA, 25 bp, Artificial
  Probe
ttaggtgagcaggaaggcggtggag

SEQ ID NO: 343946 - DNA, 25 bp, Artificial
  Probe
gatcaactttactgtgtcacttctt

SEQ ID NO: 343947 - DNA, 25 bp, Artificial
  Probe
aatttatttttggagcacttttgca

SEQ ID NO: 343948 - DNA, 25 bp, Artificial
  Probe
agcacttttgcagcaatattagcag

SEQ ID NO: 343949 - DNA, 25 bp, Artificial
  Probe
ttttggagcacttttgcagcaatat

SEQ ID NO: 343950 - DNA, 25 bp, Artificial
  Probe
ttggagcacttttgcagcaatatta

SEQ ID NO: 343951 - DNA, 25 bp, Artificial
  Probe
tttttggagcacttttgcagcaata

SEQ ID NO: 343952 - DNA, 25 bp, Artificial
  Probe
tggagcacttttgcagcaatattag

SEQ ID NO: 343953 - DNA, 25 bp, Artificial
  Probe
atttttggagcacttttgcagcaat

SEQ ID NO: 343954 - DNA, 25 bp, Artificial
  Probe
ggatcaactttactgtgtcacttct

SEQ ID NO: 343955 - DNA, 25 bp, Artificial
  Probe
gagcacttttgcagcaatattagca

SEQ ID NO: 343956 - DNA, 25 bp, Artificial
  Probe
tttgcagcaatattagcagctgggg

SEQ ID NO: 343957 - DNA, 25 bp, Artificial
  Probe
ttatttttggagcacttttgcagca

SEQ ID NO: 343958 - DNA, 25 bp, Artificial
  Probe
gcacttttgcagcaatattagcagc

SEQ ID NO: 343959 - DNA, 25 bp, Artificial
  Probe
ggagcacttttgcagcaatattagc

SEQ ID NO: 343960 - DNA, 25 bp, Artificial
  Probe
tatttttggagcacttttgcagcaa

SEQ ID NO: 343961 - DNA, 25 bp, Artificial
  Probe
agctgtaaaccgtgcctttcacagg

SEQ ID NO: 343962 - DNA, 25 bp, Artificial
  Probe
taaaccgtgcctttcacaggacgct

SEQ ID NO: 343963 - DNA, 25 bp, Artificial
  Probe
acttttgcagcaatattagcagctg

SEQ ID NO: 343964 - DNA, 25 bp, Artificial
  Probe
cacttttgcagcaatattagcagct

SEQ ID NO: 343965 - DNA, 25 bp, Artificial
  Probe
caggaaggcggtggagtttgcatga

SEQ ID NO: 343966 - DNA, 25 bp, Artificial
  Probe
ctcgtgcaggagctgtaaaccgtgc

SEQ ID NO: 343967 - DNA, 25 bp, Artificial
  Probe
gctgggggctcaggatcaactttac

SEQ ID NO: 343968 - DNA, 25 bp, Artificial
  Probe
tgcaggagctgtaaaccgtgccttt

SEQ ID NO: 343969 - DNA, 25 bp, Artificial
  Probe
tgggggctcaggatcaactttactg

SEQ ID NO: 343970 - DNA, 25 bp, Artificial
  Probe
ttttgcagcaatattagcagctggg

SEQ ID NO: 343971 - DNA, 25 bp, Artificial
  Probe
cgtgcaggagctgtaaaccgtgcct

SEQ ID NO: 343972 - DNA, 25 bp, Artificial
  Probe
tgtaaaccgtgcctttcacaggacg

SEQ ID NO: 343973 - DNA, 25 bp, Artificial
  Probe
actcgtgcaggagctgtaaaccgtg

SEQ ID NO: 343974 - DNA, 25 bp, Artificial
  Probe
gctgtaaaccgtgcctttcacagga

SEQ ID NO: 343975 - DNA, 25 bp, Artificial
  Probe
aactcgtgcaggagctgtaaaccgt

SEQ ID NO: 343976 - DNA, 25 bp, Artificial
  Probe
aggatcaactttactgtgtcacttc

SEQ ID NO: 343977 - DNA, 25 bp, Artificial
  Probe
ggctcaggatcaactttactgtgtc

SEQ ID NO: 343978 - DNA, 25 bp, Artificial
  Probe
ccagctgggcttcagaaaagcttcc

SEQ ID NO: 343979 - DNA, 25 bp, Artificial
  Probe
cagcacaagcactactgcaaagact

SEQ ID NO: 343980 - DNA, 25 bp, Artificial
  Probe
ttccagcacaagcactactgcaaag

SEQ ID NO: 343981 - DNA, 25 bp, Artificial
  Probe
agaagttgctcctttggtagaagac

SEQ ID NO: 343982 - DNA, 25 bp, Artificial
  Probe
ctcctttggtagaagacaagatgat

SEQ ID NO: 343983 - DNA, 25 bp, Artificial
  Probe
attagttgtagtgttccaagcacca

SEQ ID NO: 343984 - DNA, 25 bp, Artificial
  Probe
tccagcacaagcactactgcaaaga

SEQ ID NO: 343985 - DNA, 25 bp, Artificial
  Probe
ctccagctgggcttcagaaaagctt

SEQ ID NO: 343986 - DNA, 25 bp, Artificial
  Probe
aacagttacctctccagctgggctt

SEQ ID NO: 343987 - DNA, 25 bp, Artificial
  Probe
gttgtagtgttccaagcaccacatc

SEQ ID NO: 343988 - DNA, 25 bp, Artificial
  Probe
accatagaagttgctcctttggtag

SEQ ID NO: 343989 - DNA, 25 bp, Artificial
  Probe
ccagcaggcacacagagcaggtcat

SEQ ID NO: 343990 - DNA, 25 bp, Artificial
  Probe
agctgggcttcagaaaagcttcctt

SEQ ID NO: 343991 - DNA, 25 bp, Artificial
  Probe
gctcctttggtagaagacaagatga

SEQ ID NO: 343992 - DNA, 25 bp, Artificial
  Probe
ttgctcctttggtagaagacaagat

SEQ ID NO: 343993 - DNA, 25 bp, Artificial
  Probe
acagttacctctccagctgggcttc

SEQ ID NO: 343994 - DNA, 25 bp, Artificial
  Probe
aagttgctcctttggtagaagacaa

SEQ ID NO: 343995 - DNA, 25 bp, Artificial
  Probe
aggcacacagagcaggtcatacctc

SEQ ID NO: 343996 - DNA, 25 bp, Artificial
  Probe
tccccagcaggcacacagagcaggt

SEQ ID NO: 343997 - DNA, 25 bp, Artificial
  Probe
gtagtgttccaagcaccacatcaac

SEQ ID NO: 343998 - DNA, 25 bp, Artificial
  Probe
ttagttgtagtgttccaagcaccac

SEQ ID NO: 343999 - DNA, 25 bp, Artificial
  Probe
gcacacagagcaggtcatacctcac

SEQ ID NO: 344000 - DNA, 25 bp, Artificial
  Probe
cccagcaggcacacagagcaggtca

SEQ ID NO: 344001 - DNA, 25 bp, Artificial
  Probe
tgtagtgttccaagcaccacatcaa

SEQ ID NO: 344002 - DNA, 25 bp, Artificial
  Probe
agttacctctccagctgggcttcag

SEQ ID NO: 344003 - DNA, 25 bp, Artificial
  Probe
ccagcacaagcactactgcaaagac

SEQ ID NO: 344004 - DNA, 25 bp, Artificial
  Probe
ggcttcagaaaagcttcctttccag

SEQ ID NO: 344005 - DNA, 25 bp, Artificial
  Probe
ttaccatagaagttgctcctttggt

SEQ ID NO: 344006 - DNA, 25 bp, Artificial
  Probe
cttaccatagaagttgctcctttgg

SEQ ID NO: 344007 - DNA, 25 bp, Artificial
  Probe
caggcacacagagcaggtcatacct

SEQ ID NO: 344008 - DNA, 25 bp, Artificial
  Probe
tagttgtagtgttccaagcaccaca

SEQ ID NO: 344009 - DNA, 25 bp, Artificial
  Probe
cacacagagcaggtcatacctcact

SEQ ID NO: 344010 - DNA, 25 bp, Artificial
  Probe
catagaagttgctcctttggtagaa

SEQ ID NO: 344011 - DNA, 25 bp, Artificial
  Probe
agcaggcacacagagcaggtcatac

SEQ ID NO: 344012 - DNA, 25 bp, Artificial
  Probe
tacctctccagctgggcttcagaaa

SEQ ID NO: 344013 - DNA, 25 bp, Artificial
  Probe
gttgctcctttggtagaagacaaga

SEQ ID NO: 344014 - DNA, 25 bp, Artificial
  Probe
gaagttgctcctttggtagaagaca

SEQ ID NO: 344015 - DNA, 25 bp, Artificial
  Probe
gcacaagcactactgcaaagactcc

SEQ ID NO: 344016 - DNA, 25 bp, Artificial
  Probe
cagttacctctccagctgggcttca

SEQ ID NO: 344017 - DNA, 25 bp, Artificial
  Probe
caacagttacctctccagctgggct

SEQ ID NO: 344018 - DNA, 25 bp, Artificial
  Probe
cagctgggcttcagaaaagcttcct

SEQ ID NO: 344019 - DNA, 25 bp, Artificial
  Probe
gcttcagaaaagcttcctttccagc

SEQ ID NO: 344020 - DNA, 25 bp, Artificial
  Probe
accaacagttacctctccagctggg

SEQ ID NO: 344021 - DNA, 25 bp, Artificial
  Probe
tgctcctttggtagaagacaagatg

SEQ ID NO: 344022 - DNA, 25 bp, Artificial
  Probe
gcaggcacacagagcaggtcatacc

SEQ ID NO: 344023 - DNA, 25 bp, Artificial
  Probe
acttaccatagaagttgctcctttg

SEQ ID NO: 344024 - DNA, 25 bp, Artificial
  Probe
gcacatgggactagagctttcttgg

SEQ ID NO: 344025 - DNA, 25 bp, Artificial
  Probe
cctctgggaagcaaagggctcctct

SEQ ID NO: 344026 - DNA, 25 bp, Artificial
  Probe
ggatacagttcctcaccttcaagcc

SEQ ID NO: 344027 - DNA, 25 bp, Artificial
  Probe
acccaaggcctctgggaagcaaagg

SEQ ID NO: 344028 - DNA, 25 bp, Artificial
  Probe
cggatgtctgcacatgggactagag

SEQ ID NO: 344029 - DNA, 25 bp, Artificial
  Probe
ccggatgtctgcacatgggactaga

SEQ ID NO: 344030 - DNA, 25 bp, Artificial
  Probe
gacatgcagcctagggctgttggat

SEQ ID NO: 344031 - DNA, 25 bp, Artificial
  Probe
cccgacctgtgaactgagctgcgga

SEQ ID NO: 344032 - DNA, 25 bp, Artificial
  Probe
agccggatgtctgcacatgggacta

SEQ ID NO: 344033 - DNA, 25 bp, Artificial
  Probe
cgaagccggatgtctgcacatggga

SEQ ID NO: 344034 - DNA, 25 bp, Artificial
  Probe
gcccgacctgtgaactgagctgcgg

SEQ ID NO: 344035 - DNA, 25 bp, Artificial
  Probe
ctgagctgcggaatcgaagccggat

SEQ ID NO: 344036 - DNA, 25 bp, Artificial
  Probe
gactagagctttcttggacaaaaag

SEQ ID NO: 344037 - DNA, 25 bp, Artificial
  Probe
aatcgaagccggatgtctgcacatg

SEQ ID NO: 344038 - DNA, 25 bp, Artificial
  Probe
agctgcggaatcgaagccggatgtc

SEQ ID NO: 344039 - DNA, 25 bp, Artificial
  Probe
cagcccgacctgtgaactgagctgc

SEQ ID NO: 344040 - DNA, 25 bp, Artificial
  Probe
tgtgaactgagctgcggaatcgaag

SEQ ID NO: 344041 - DNA, 25 bp, Artificial
  Probe
atatgcacaacagaggcgatgaagc

SEQ ID NO: 344042 - DNA, 25 bp, Artificial
  Probe
cacccaaggcctctgggaagcaaag

SEQ ID NO: 344043 - DNA, 25 bp, Artificial
  Probe
gcctctgggaagcaaagggctcctc

SEQ ID NO: 344044 - DNA, 25 bp, Artificial
  Probe
acctgtgaactgagctgcggaatcg

SEQ ID NO: 344045 - DNA, 25 bp, Artificial
  Probe
tcgaagccggatgtctgcacatggg

SEQ ID NO: 344046 - DNA, 25 bp, Artificial
  Probe
actgagctgcggaatcgaagccgga

SEQ ID NO: 344047 - DNA, 25 bp, Artificial
  Probe
tctgcacatgggactagagctttct

SEQ ID NO: 344048 - DNA, 25 bp, Artificial
  Probe
gtatatgcacaacagaggcgatgaa

SEQ ID NO: 344049 - DNA, 25 bp, Artificial
  Probe
tccagcccgacctgtgaactgagct

SEQ ID NO: 344050 - DNA, 25 bp, Artificial
  Probe
ctgtgaactgagctgcggaatcgaa

SEQ ID NO: 344051 - DNA, 25 bp, Artificial
  Probe
tatgcacaacagaggcgatgaagcg

SEQ ID NO: 344052 - DNA, 25 bp, Artificial
  Probe
aaggcctctgggaagcaaagggctc

SEQ ID NO: 344053 - DNA, 25 bp, Artificial
  Probe
ctgcggaatcgaagccggatgtctg

SEQ ID NO: 344054 - DNA, 25 bp, Artificial
  Probe
aagccggatgtctgcacatgggact

SEQ ID NO: 344055 - DNA, 25 bp, Artificial
  Probe
agacatgcagcctagggctgttgga

SEQ ID NO: 344056 - DNA, 25 bp, Artificial
  Probe
agcccgacctgtgaactgagctgcg

SEQ ID NO: 344057 - DNA, 25 bp, Artificial
  Probe
atgggactagagctttcttggacaa

SEQ ID NO: 344058 - DNA, 25 bp, Artificial
  Probe
tatatgcacaacagaggcgatgaag

SEQ ID NO: 344059 - DNA, 25 bp, Artificial
  Probe
gacctgtgaactgagctgcggaatc

SEQ ID NO: 344060 - DNA, 25 bp, Artificial
  Probe
gatgtctgcacatgggactagagct

SEQ ID NO: 344061 - DNA, 25 bp, Artificial
  Probe
ccacccaaggcctctgggaagcaaa

SEQ ID NO: 344062 - DNA, 25 bp, Artificial
  Probe
ccgacctgtgaactgagctgcggaa

SEQ ID NO: 344063 - DNA, 25 bp, Artificial
  Probe
ggcctctgggaagcaaagggctcct

SEQ ID NO: 344064 - DNA, 25 bp, Artificial
  Probe
gctgcggaatcgaagccggatgtct

SEQ ID NO: 344065 - DNA, 25 bp, Artificial
  Probe
tgcacatgggactagagctttcttg

SEQ ID NO: 344066 - DNA, 25 bp, Artificial
  Probe
acaacagaggcgatgaagcgctgcc

SEQ ID NO: 344067 - DNA, 25 bp, Artificial
  Probe
tcggatacagttcctcaccttcaag

SEQ ID NO: 344068 - DNA, 25 bp, Artificial
  Probe
actagagctttcttggacaaaaaga

SEQ ID NO: 344069 - DNA, 25 bp, Artificial
  Probe
cggatacagttcctcaccttcaagc

SEQ ID NO: 344070 - DNA, 25 bp, Artificial
  Probe
tgctgcgctgcctgggtgagtttct

SEQ ID NO: 344071 - DNA, 25 bp, Artificial
  Probe
agcgactcctcctggggctcgatcg

SEQ ID NO: 344072 - DNA, 25 bp, Artificial
  Probe
gcagatcaatgctgacccacactat

SEQ ID NO: 344073 - DNA, 25 bp, Artificial
  Probe
ggcaatgaaatctcctacccgctca

SEQ ID NO: 344074 - DNA, 25 bp, Artificial
  Probe
gctcgatcggtgagccccctgtagc

SEQ ID NO: 344075 - DNA, 25 bp, Artificial
  Probe
agagctgcaaggaagccttttggga

SEQ ID NO: 344076 - DNA, 25 bp, Artificial
  Probe
gggtcatcgtccaggcgtccactag

SEQ ID NO: 344077 - DNA, 25 bp, Artificial
  Probe
tcctacatgggcaatgaaatctcct

SEQ ID NO: 344078 - DNA, 25 bp, Artificial
  Probe
tcctggggctcgatcggtgagcccc

SEQ ID NO: 344079 - DNA, 25 bp, Artificial
  Probe
ggtatcctggctcaaggattccatt

SEQ ID NO: 344080 - DNA, 25 bp, Artificial
  Probe
ctctcctattcctacatgggcaatg

SEQ ID NO: 344081 - DNA, 25 bp, Artificial
  Probe
tttcacacaagtgttctctgacttg

SEQ ID NO: 344082 - DNA, 25 bp, Artificial
  Probe
agggatgttatctcctctgaggtgg

SEQ ID NO: 344083 - DNA, 25 bp, Artificial
  Probe
gcctctcagttatcaacctcatgag

SEQ ID NO: 344084 - DNA, 25 bp, Artificial
  Probe
ctctggctgcgcagcgtggaccgct

SEQ ID NO: 344085 - DNA, 25 bp, Artificial
  Probe
actagtgagctgctgcgctgcctgg

SEQ ID NO: 344086 - DNA, 25 bp, Artificial
  Probe
gaccgttgcctctcagttatcaacc

SEQ ID NO: 344087 - DNA, 25 bp, Artificial
  Probe
gggctcggaccacgagctccaggct

SEQ ID NO: 344088 - DNA, 25 bp, Artificial
  Probe
ggaccacgagctccaggctgtcctg

SEQ ID NO: 344089 - DNA, 25 bp, Artificial
  Probe
gcaaggaagccttttgggaccgttg

SEQ ID NO: 344090 - DNA, 25 bp, Artificial
  Probe
ccgctcaagcccttcctggtggaga

SEQ ID NO: 344091 - DNA, 25 bp, Artificial
  Probe
atcacaccggccaatgtggtcttcc

SEQ ID NO: 344092 - DNA, 25 bp, Artificial
  Probe
gcctgaagcacttgtccccaacgga

SEQ ID NO: 344093 - DNA, 25 bp, Artificial
  Probe
tgtacctctcctattcctacatggg

SEQ ID NO: 344094 - DNA, 25 bp, Artificial
  Probe
cttcctggtggagagctgcaaggaa

SEQ ID NO: 344095 - DNA, 25 bp, Artificial
  Probe
cctattcctacatgggcaatgaaat

SEQ ID NO: 344096 - DNA, 25 bp, Artificial
  Probe
tcctcctggggctcgatcggtgagc

SEQ ID NO: 344097 - DNA, 25 bp, Artificial
  Probe
tagctggtatcctggctcaaggatt

SEQ ID NO: 344098 - DNA, 25 bp, Artificial
  Probe
gtgctaccgcctgaagcacttgtcc

SEQ ID NO: 344099 - DNA, 25 bp, Artificial
  Probe
gcgctgcctgggtgagtttctctgc

SEQ ID NO: 344100 - DNA, 25 bp, Artificial
  Probe
gctgacctgtctgtacctctcctat

SEQ ID NO: 344101 - DNA, 25 bp, Artificial
  Probe
cagggatgttatctcctctgaggtg

SEQ ID NO: 344102 - DNA, 25 bp, Artificial
  Probe
gagctccaggctgtcctgctgacct

SEQ ID NO: 344103 - DNA, 25 bp, Artificial
  Probe
caagtgttctctgacttgaagaatg

SEQ ID NO: 344104 - DNA, 25 bp, Artificial
  Probe
ctctgcagggatgttatctcctctg

SEQ ID NO: 344105 - DNA, 25 bp, Artificial
  Probe
agttatcaacctcatgagctccaag

SEQ ID NO: 344106 - DNA, 25 bp, Artificial
  Probe
ggacaagaagcgactcctcctgggg

SEQ ID NO: 344107 - DNA, 25 bp, Artificial
  Probe
gggctcgatcggtgagccccctgta

SEQ ID NO: 344108 - DNA, 25 bp, Artificial
  Probe
ggtgagtttctctgccgccggtgct

SEQ ID NO: 344109 - DNA, 25 bp, Artificial
  Probe
cggtgagccccctgtagctggtatc

SEQ ID NO: 344110 - DNA, 25 bp, Artificial
  Probe
gggtttcatcacaccggccaatgtg

SEQ ID NO: 344111 - DNA, 25 bp, Artificial
  Probe
ggatggcaggaccagggtttcatca

SEQ ID NO: 344112 - DNA, 25 bp, Artificial
  Probe
ggtgctaccgcctgaagcacttgtc

SEQ ID NO: 344113 - DNA, 25 bp, Artificial
  Probe
gggaccgttgcctctcagttatcaa

SEQ ID NO: 344114 - DNA, 25 bp, Artificial
  Probe
cttttgggaccgttgcctctcagtt

SEQ ID NO: 344115 - DNA, 25 bp, Artificial
  Probe
atcgtccaggcgtccactagtgagc

SEQ ID NO: 344116 - DNA, 25 bp, Artificial
  Probe
ccactgagcttgttggtgcccgggc

SEQ ID NO: 344117 - DNA, 25 bp, Artificial
  Probe
cccacgcttttcatggaaacatggc

SEQ ID NO: 344118 - DNA, 25 bp, Artificial
  Probe
gcccactgagcttgttggtgcccgg

SEQ ID NO: 344119 - DNA, 25 bp, Artificial
  Probe
acccacgcttttcatggaaacatgg

SEQ ID NO: 344120 - DNA, 25 bp, Artificial
  Probe
gcatgaggcggcagcagccaagact

SEQ ID NO: 344121 - DNA, 25 bp, Artificial
  Probe
gtcctgcttggtaatgaaatttgct

SEQ ID NO: 344122 - DNA, 25 bp, Artificial
  Probe
tttcatggaaacatggctcctgtgc

SEQ ID NO: 344123 - DNA, 25 bp, Artificial
  Probe
ggccggaagccctgccggaagtcct

SEQ ID NO: 344124 - DNA, 25 bp, Artificial
  Probe
cagcttccagcagaaggccagcggg

SEQ ID NO: 344125 - DNA, 25 bp, Artificial
  Probe
tcacaggctgactcggacgagagag

SEQ ID NO: 344126 - DNA, 25 bp, Artificial
  Probe
agcctaggagctcttccaaaaggaa

SEQ ID NO: 344127 - DNA, 25 bp, Artificial
  Probe
tccctcacaggctgactcggacgag

SEQ ID NO: 344128 - DNA, 25 bp, Artificial
  Probe
gctgactcggacgagagagaaagtt

SEQ ID NO: 344129 - DNA, 25 bp, Artificial
  Probe
gagctcttccaaaaggaagtcctgc

SEQ ID NO: 344130 - DNA, 25 bp, Artificial
  Probe
caaatgaagcctaggagctcttcca

SEQ ID NO: 344131 - DNA, 25 bp, Artificial
  Probe
cacgcttttcatggaaacatggctc

SEQ ID NO: 344132 - DNA, 25 bp, Artificial
  Probe
gaagtcctgcccactgagcttgttg

SEQ ID NO: 344133 - DNA, 25 bp, Artificial
  Probe
agtcctgcttggtaatgaaatttgc

SEQ ID NO: 344134 - DNA, 25 bp, Artificial
  Probe
agtcctgcccactgagcttgttggt

SEQ ID NO: 344135 - DNA, 25 bp, Artificial
  Probe
gaagcctaggagctcttccaaaagg

SEQ ID NO: 344136 - DNA, 25 bp, Artificial
  Probe
actgagcttgttggtgcccgggcat

SEQ ID NO: 344137 - DNA, 25 bp, Artificial
  Probe
gcaggcagcttccagcagaaggcca

SEQ ID NO: 344138 - DNA, 25 bp, Artificial
  Probe
tgccggaagtcctgcccactgagct

SEQ ID NO: 344139 - DNA, 25 bp, Artificial
  Probe
agcttccagcagaaggccagcggga

SEQ ID NO: 344140 - DNA, 25 bp, Artificial
  Probe
aatgaagcctaggagctcttccaaa

SEQ ID NO: 344141 - DNA, 25 bp, Artificial
  Probe
cgcttttcatggaaacatggctcct

SEQ ID NO: 344142 - DNA, 25 bp, Artificial
  Probe
gcagcttccagcagaaggccagcgg

SEQ ID NO: 344143 - DNA, 25 bp, Artificial
  Probe
atgaagcctaggagctcttccaaaa

SEQ ID NO: 344144 - DNA, 25 bp, Artificial
  Probe
tgagcttgttggtgcccgggcatct

SEQ ID NO: 344145 - DNA, 25 bp, Artificial
  Probe
ggagctcttccaaaaggaagtcctg

SEQ ID NO: 344146 - DNA, 25 bp, Artificial
  Probe
taggagctcttccaaaaggaagtcc

SEQ ID NO: 344147 - DNA, 25 bp, Artificial
  Probe
tcctgcccactgagcttgttggtgc

SEQ ID NO: 344148 - DNA, 25 bp, Artificial
  Probe
ccaaaaggaagtcctgcttggtaat

SEQ ID NO: 344149 - DNA, 25 bp, Artificial
  Probe
ctgactcggacgagagagaaagttt

SEQ ID NO: 344150 - DNA, 25 bp, Artificial
  Probe
aaatgaagcctaggagctcttccaa

SEQ ID NO: 344151 - DNA, 25 bp, Artificial
  Probe
tacccacgcttttcatggaaacatg

SEQ ID NO: 344152 - DNA, 25 bp, Artificial
  Probe
gctcttccaaaaggaagtcctgctt

SEQ ID NO: 344153 - DNA, 25 bp, Artificial
  Probe
ctcacaggctgactcggacgagaga

SEQ ID NO: 344154 - DNA, 25 bp, Artificial
  Probe
cactgggccggaagccctgccggaa

SEQ ID NO: 344155 - DNA, 25 bp, Artificial
  Probe
gcgactgtctgaagagaagacaaat

SEQ ID NO: 344156 - DNA, 25 bp, Artificial
  Probe
cttccaaaaggaagtcctgcttggt

SEQ ID NO: 344157 - DNA, 25 bp, Artificial
  Probe
aggcaggcagcttccagcagaaggc

SEQ ID NO: 344158 - DNA, 25 bp, Artificial
  Probe
caggcaggcagcttccagcagaagg

SEQ ID NO: 344159 - DNA, 25 bp, Artificial
  Probe
tcttccaaaaggaagtcctgcttgg

SEQ ID NO: 344160 - DNA, 25 bp, Artificial
  Probe
acactgggccggaagccctgccgga

SEQ ID NO: 344161 - DNA, 25 bp, Artificial
  Probe
ctgagcttgttggtgcccgggcatc

SEQ ID NO: 344162 - DNA, 25 bp, Artificial
  Probe
agatgtcaagaaacccaaggtgatg

SEQ ID NO: 344163 - DNA, 25 bp, Artificial
  Probe
acaaggagcgctcctagctcccaaa

SEQ ID NO: 344164 - DNA, 25 bp, Artificial
  Probe
tgccgctccatgtccatctgagact

SEQ ID NO: 344165 - DNA, 25 bp, Artificial
  Probe
gtggtggactgttgcacagatccag

SEQ ID NO: 344166 - DNA, 25 bp, Artificial
  Probe
agtttggggagcacaccaagatgac

SEQ ID NO: 344167 - DNA, 25 bp, Artificial
  Probe
cccagctaggctcagacatcatgct

SEQ ID NO: 344168 - DNA, 25 bp, Artificial
  Probe
tccgcaagggccagggcaacaaggt

SEQ ID NO: 344169 - DNA, 25 bp, Artificial
  Probe
gtgtttcggggctcacggccctatg

SEQ ID NO: 344170 - DNA, 25 bp, Artificial
  Probe
ggaacctcgctgtaccccaaacatt

SEQ ID NO: 344171 - DNA, 25 bp, Artificial
  Probe
gaccagttagtatggcgggcagccc

SEQ ID NO: 344172 - DNA, 25 bp, Artificial
  Probe
tttggagccaaggaactgggcaaga

SEQ ID NO: 344173 - DNA, 25 bp, Artificial
  Probe
atgctcttctctggaaggagagtgg

SEQ ID NO: 344174 - DNA, 25 bp, Artificial
  Probe
aggtgaagaaactctccatagtcgt

SEQ ID NO: 344175 - DNA, 25 bp, Artificial
  Probe
gcaacccttgggaactggccaagac

SEQ ID NO: 344176 - DNA, 25 bp, Artificial
  Probe
caccccgtcatcaggtgaaatccag

SEQ ID NO: 344177 - DNA, 25 bp, Artificial
  Probe
aggaaagtcccctcaagtgcctgta

SEQ ID NO: 344178 - DNA, 25 bp, Artificial
  Probe
cacccagcctgcagaccagttagta

SEQ ID NO: 344179 - DNA, 25 bp, Artificial
  Probe
cttcccctgactatgaaggacaact

SEQ ID NO: 344180 - DNA, 25 bp, Artificial
  Probe
ccaatggacgcttcttggatggtgg

SEQ ID NO: 344181 - DNA, 25 bp, Artificial
  Probe
gaaggacaactgattccatctacta

SEQ ID NO: 344182 - DNA, 25 bp, Artificial
  Probe
cacaccaagatgacagatgtcaaga

SEQ ID NO: 344183 - DNA, 25 bp, Artificial
  Probe
gcctgtaacctgtgtagatgtcttt

SEQ ID NO: 344184 - DNA, 25 bp, Artificial
  Probe
tatccagtacttcaggctgaacccc

SEQ ID NO: 344185 - DNA, 25 bp, Artificial
  Probe
aactctccatagtcgtgtctctggg

SEQ ID NO: 344186 - DNA, 25 bp, Artificial
  Probe
tccatctgagactagggctcggagc

SEQ ID NO: 344187 - DNA, 25 bp, Artificial
  Probe
tctacatctatgagtaccgggagga

SEQ ID NO: 344188 - DNA, 25 bp, Artificial
  Probe
acactggatgccatgactgaaatcc

SEQ ID NO: 344189 - DNA, 25 bp, Artificial
  Probe
gtccagctgctgctatctccctgag

SEQ ID NO: 344190 - DNA, 25 bp, Artificial
  Probe
aggagttccagaagcttgtccagct

SEQ ID NO: 344191 - DNA, 25 bp, Artificial
  Probe
tatttccggcccaatggacgcttct

SEQ ID NO: 344192 - DNA, 25 bp, Artificial
  Probe
cctggtgtgagatggtcggtatcca

SEQ ID NO: 344193 - DNA, 25 bp, Artificial
  Probe
tctcccacttcctgatgtcagggat

SEQ ID NO: 344194 - DNA, 25 bp, Artificial
  Probe
acgatgccccagaggccgttcggga

SEQ ID NO: 344195 - DNA, 25 bp, Artificial
  Probe
tgtcagaccggcagccagcagagct

SEQ ID NO: 344196 - DNA, 25 bp, Artificial
  Probe
cttcctgatgtcagggattagagaa

SEQ ID NO: 344197 - DNA, 25 bp, Artificial
  Probe
ccctggaggagttcctgaagcgtga

SEQ ID NO: 344198 - DNA, 25 bp, Artificial
  Probe
ctgttgcacagatccagatgggcgg

SEQ ID NO: 344199 - DNA, 25 bp, Artificial
  Probe
cgtgtacttccgtatgaaggatgag

SEQ ID NO: 344200 - DNA, 25 bp, Artificial
  Probe
gggctcaaggccacctcaactgtga

SEQ ID NO: 344201 - DNA, 25 bp, Artificial
  Probe
atatatcagagatcaacactaaggg

SEQ ID NO: 344202 - DNA, 25 bp, Artificial
  Probe
ctcttccggaattacgatgccccag

SEQ ID NO: 344203 - DNA, 25 bp, Artificial
  Probe
gggaacctcgctgtaccccaaacat

SEQ ID NO: 344204 - DNA, 25 bp, Artificial
  Probe
gagatcaacactaagggccagtgtc

SEQ ID NO: 344205 - DNA, 25 bp, Artificial
  Probe
atggtgggctgctggccaacaaccc

SEQ ID NO: 344206 - DNA, 25 bp, Artificial
  Probe
caggctaatgaaacccagcgccatt

SEQ ID NO: 344207 - DNA, 25 bp, Artificial
  Probe
gcagagctccacctcttccggaatt

SEQ ID NO: 344208 - DNA, 25 bp, Artificial
  Probe
tccgctcagccagcaaacgcattgt

SEQ ID NO: 344209 - DNA, 25 bp, Artificial
  Probe
acccaagtggatgagggtgtccgct

SEQ ID NO: 344210 - DNA, 25 bp, Artificial
  Probe
gcggaatacaacatctttgaaggga

SEQ ID NO: 344211 - DNA, 25 bp, Artificial
  Probe
ccatcagtcgggatttagtctgtca

SEQ ID NO: 344212 - DNA, 25 bp, Artificial
  Probe
atgatggaccagtgtttgacttgac

SEQ ID NO: 344213 - DNA, 25 bp, Artificial
  Probe
catgtatgatggaccagtgtttgac

SEQ ID NO: 344214 - DNA, 25 bp, Artificial
  Probe
cacccaagtggatgagggtgtccgc

SEQ ID NO: 344215 - DNA, 25 bp, Artificial
  Probe
atcgtctctgccaagaaccaccagt

SEQ ID NO: 344216 - DNA, 25 bp, Artificial
  Probe
aagatggtaacctgcacgtgaccca

SEQ ID NO: 344217 - DNA, 25 bp, Artificial
  Probe
agtctgtcaggcacccaagtggatg

SEQ ID NO: 344218 - DNA, 25 bp, Artificial
  Probe
ccaccagtcggttgcggaatacaac

SEQ ID NO: 344219 - DNA, 25 bp, Artificial
  Probe
gcagcccattctctgactatgtcta

SEQ ID NO: 344220 - DNA, 25 bp, Artificial
  Probe
gaccagtgtttgacttgaccaccac

SEQ ID NO: 344221 - DNA, 25 bp, Artificial
  Probe
agtcggttgcggaatacaacatctt

SEQ ID NO: 344222 - DNA, 25 bp, Artificial
  Probe
taacctgcacgtgacccagggggcc

SEQ ID NO: 344223 - DNA, 25 bp, Artificial
  Probe
cagcgaccttgtcatctgggatcca

SEQ ID NO: 344224 - DNA, 25 bp, Artificial
  Probe
caagaaccaccagtcggttgcggaa

SEQ ID NO: 344225 - DNA, 25 bp, Artificial
  Probe
aaacccaccagtgaggaacctccat

SEQ ID NO: 344226 - DNA, 25 bp, Artificial
  Probe
ccaccagtgaggaacctccatcagt

SEQ ID NO: 344227 - DNA, 25 bp, Artificial
  Probe
gaagatggcggacctgcatgcagtc

SEQ ID NO: 344228 - DNA, 25 bp, Artificial
  Probe
ttgcggaatacaacatctttgaagg

SEQ ID NO: 344229 - DNA, 25 bp, Artificial
  Probe
attctctgactatgtctataagcgc

SEQ ID NO: 344230 - DNA, 25 bp, Artificial
  Probe
accaccagtcggttgcggaatacaa

SEQ ID NO: 344231 - DNA, 25 bp, Artificial
  Probe
cctgcagcccattctctgactatgt

SEQ ID NO: 344232 - DNA, 25 bp, Artificial
  Probe
caacctgtaccctcgcaaggggaga

SEQ ID NO: 344233 - DNA, 25 bp, Artificial
  Probe
gtgggttctgacagcgaccttgtca

SEQ ID NO: 344234 - DNA, 25 bp, Artificial
  Probe
ccagggcaagatcatgctggaagat

SEQ ID NO: 344235 - DNA, 25 bp, Artificial
  Probe
tgcagtcccaagaggcatgtatgat

SEQ ID NO: 344236 - DNA, 25 bp, Artificial
  Probe
gggtgtccgctcagccagcaaacgc

SEQ ID NO: 344237 - DNA, 25 bp, Artificial
  Probe
ctgccagggcaagatcatgctggaa

SEQ ID NO: 344238 - DNA, 25 bp, Artificial
  Probe
gcatgcagtcccaagaggcatgtat

SEQ ID NO: 344239 - DNA, 25 bp, Artificial
  Probe
ggccaaacccaccagtgaggaacct

SEQ ID NO: 344240 - DNA, 25 bp, Artificial
  Probe
caagatcatgctggaagatggtaac

SEQ ID NO: 344241 - DNA, 25 bp, Artificial
  Probe
cccaagaggcatgtatgatggacca

SEQ ID NO: 344242 - DNA, 25 bp, Artificial
  Probe
actatgtctataagcgcattaaagc

SEQ ID NO: 344243 - DNA, 25 bp, Artificial
  Probe
gtctataagcgcattaaagcaagga

SEQ ID NO: 344244 - DNA, 25 bp, Artificial
  Probe
aatagctgtgggttctgacagcgac

SEQ ID NO: 344245 - DNA, 25 bp, Artificial
  Probe
ctataagcgcattaaagcaaggagg

SEQ ID NO: 344246 - DNA, 25 bp, Artificial
  Probe
aacctccatcagtcgggatttagtc

SEQ ID NO: 344247 - DNA, 25 bp, Artificial
  Probe
atcatgctggaagatggtaacctgc

SEQ ID NO: 344248 - DNA, 25 bp, Artificial
  Probe
atgccgtgaagatcgtctctgccaa

SEQ ID NO: 344249 - DNA, 25 bp, Artificial
  Probe
gcacctctggtggttatctgccagg

SEQ ID NO: 344250 - DNA, 25 bp, Artificial
  Probe
tcggccaaacccaccagtgaggaac

SEQ ID NO: 344251 - DNA, 25 bp, Artificial
  Probe
tgtaccctcgcaaggggagaatagc

SEQ ID NO: 344252 - DNA, 25 bp, Artificial
  Probe
cgtggggcacctctggtggttatct

SEQ ID NO: 344253 - DNA, 25 bp, Artificial
  Probe
ccgtgaagatcgtctctgccaagaa

SEQ ID NO: 344254 - DNA, 25 bp, Artificial
  Probe
acacaagtttgagtggatgtggagg

SEQ ID NO: 344255 - DNA, 25 bp, Artificial
  Probe
aatggttccacctgacacaagtttg

SEQ ID NO: 344256 - DNA, 25 bp, Artificial
  Probe
ggttccacctgacacaagtttgagt

SEQ ID NO: 344257 - DNA, 25 bp, Artificial
  Probe
tccacctgacacaagtttgagtgga

SEQ ID NO: 344258 - DNA, 25 bp, Artificial
  Probe
acctgacacaagtttgagtggatgt

SEQ ID NO: 344259 - DNA, 25 bp, Artificial
  Probe
aaatggttccacctgacacaagttt

SEQ ID NO: 344260 - DNA, 25 bp, Artificial
  Probe
cacaagtttgagtggatgtggaggc

SEQ ID NO: 344261 - DNA, 25 bp, Artificial
  Probe
gatgtggaggctttggtttaaggaa

SEQ ID NO: 344262 - DNA, 25 bp, Artificial
  Probe
ctgacacaagtttgagtggatgtgg

SEQ ID NO: 344263 - DNA, 25 bp, Artificial
  Probe
ttatttgtgacccctaagtctcctt

SEQ ID NO: 344264 - DNA, 25 bp, Artificial
  Probe
ggaaatggttccacctgacacaagt

SEQ ID NO: 344265 - DNA, 25 bp, Artificial
  Probe
tggatgtggaggctttggtttaagg

SEQ ID NO: 344266 - DNA, 25 bp, Artificial
  Probe
ggatgtggaggctttggtttaagga

SEQ ID NO: 344267 - DNA, 25 bp, Artificial
  Probe
ccacctgacacaagtttgagtggat

SEQ ID NO: 344268 - DNA, 25 bp, Artificial
  Probe
tggttccacctgacacaagtttgag

SEQ ID NO: 344269 - DNA, 25 bp, Artificial
  Probe
caagtttgagtggatgtggaggctt

SEQ ID NO: 344270 - DNA, 25 bp, Artificial
  Probe
gttatttgtgacccctaagtctcct

SEQ ID NO: 344271 - DNA, 25 bp, Artificial
  Probe
gaggttatttgtgacccctaagtct

SEQ ID NO: 344272 - DNA, 25 bp, Artificial
  Probe
atggttccacctgacacaagtttga

SEQ ID NO: 344273 - DNA, 25 bp, Artificial
  Probe
cctgacacaagtttgagtggatgtg

SEQ ID NO: 344274 - DNA, 25 bp, Artificial
  Probe
agtggatgtggaggctttggtttaa

SEQ ID NO: 344275 - DNA, 25 bp, Artificial
  Probe
tatttgtgacccctaagtctccttt

SEQ ID NO: 344276 - DNA, 25 bp, Artificial
  Probe
cacctgacacaagtttgagtggatg

SEQ ID NO: 344277 - DNA, 25 bp, Artificial
  Probe
gtttgagtggatgtggaggctttgg

SEQ ID NO: 344278 - DNA, 25 bp, Artificial
  Probe
acaagtttgagtggatgtggaggct

SEQ ID NO: 344279 - DNA, 25 bp, Artificial
  Probe
gttccacctgacacaagtttgagtg

SEQ ID NO: 344280 - DNA, 25 bp, Artificial
  Probe
gaaatggttccacctgacacaagtt

SEQ ID NO: 344281 - DNA, 25 bp, Artificial
  Probe
tcgaaattttctaaccatgtttgtg

SEQ ID NO: 344282 - DNA, 25 bp, Artificial
  Probe
taatgtgtacattggcaccattgag

SEQ ID NO: 344283 - DNA, 25 bp, Artificial
  Probe
ctggttgttacctgggtcatgactg

SEQ ID NO: 344284 - DNA, 25 bp, Artificial
  Probe
gcctttactgtgaccattgtctgca

SEQ ID NO: 344285 - DNA, 25 bp, Artificial
  Probe
gttcgaaattttctaaccatgtttg

SEQ ID NO: 344286 - DNA, 25 bp, Artificial
  Probe
aaatctggatcaaagtgctggcaga

SEQ ID NO: 344287 - DNA, 25 bp, Artificial
  Probe
aaagtgctggcagaccgggacccag

SEQ ID NO: 344288 - DNA, 25 bp, Artificial
  Probe
ttgttacctgggtcatgactgttct

SEQ ID NO: 344289 - DNA, 25 bp, Artificial
  Probe
ctaatgtgtacattggcaccattga

SEQ ID NO: 344290 - DNA, 25 bp, Artificial
  Probe
aagtgctggcagaccgggacccagc

SEQ ID NO: 344291 - DNA, 25 bp, Artificial
  Probe
gtgtacattggcaccattgagtatg

SEQ ID NO: 344292 - DNA, 25 bp, Artificial
  Probe
gcctaatgtgtacattggcaccatt

SEQ ID NO: 344293 - DNA, 25 bp, Artificial
  Probe
gcaccattgagtatgaccctcgcac

SEQ ID NO: 344294 - DNA, 25 bp, Artificial
  Probe
agcctccagtacaatgcggatcttc

SEQ ID NO: 344295 - DNA, 25 bp, Artificial
  Probe
gttattgctacacaaaaatctggat

SEQ ID NO: 344296 - DNA, 25 bp, Artificial
  Probe
cacagcctccagtacaatgcggatc

SEQ ID NO: 344297 - DNA, 25 bp, Artificial
  Probe
aaccctgcctttactgtgaccattg

SEQ ID NO: 344298 - DNA, 25 bp, Artificial
  Probe
accagtttgctgaggttcgaaattt

SEQ ID NO: 344299 - DNA, 25 bp, Artificial
  Probe
agaccgggacccagctggacagaat

SEQ ID NO: 344300 - DNA, 25 bp, Artificial
  Probe
agtacaatgcggatcttcagcctgc

SEQ ID NO: 344301 - DNA, 25 bp, Artificial
  Probe
gaccattgtctgcatccacttcgtc

SEQ ID NO: 344302 - DNA, 25 bp, Artificial
  Probe
accattgagtatgaccctcgcacct

SEQ ID NO: 344303 - DNA, 25 bp, Artificial
  Probe
cctgacaaccagtttgctgaggttc

SEQ ID NO: 344304 - DNA, 25 bp, Artificial
  Probe
cacaaaaatctggatcaaagtgctg

SEQ ID NO: 344305 - DNA, 25 bp, Artificial
  Probe
ctttactgtgaccattgtctgcatc

SEQ ID NO: 344306 - DNA, 25 bp, Artificial
  Probe
tgacaaccagtttgctgaggttcga

SEQ ID NO: 344307 - DNA, 25 bp, Artificial
  Probe
ctctcatcatagtcggttattgcta

SEQ ID NO: 344308 - DNA, 25 bp, Artificial
  Probe
ggatgtcctgcctaatgtgtacatt

SEQ ID NO: 344309 - DNA, 25 bp, Artificial
  Probe
ctggatcaaagtgctggcagaccgg

SEQ ID NO: 344310 - DNA, 25 bp, Artificial
  Probe
ccattgagtatgaccctcgcaccta

SEQ ID NO: 344311 - DNA, 25 bp, Artificial
  Probe
ggatcttcagcctgctaacacttgc

SEQ ID NO: 344312 - DNA, 25 bp, Artificial
  Probe
gccacagcctccagtacaatgcgga

SEQ ID NO: 344313 - DNA, 25 bp, Artificial
  Probe
cctccagtacaatgcggatcttcag

SEQ ID NO: 344314 - DNA, 25 bp, Artificial
  Probe
tggcagaccgggacccagctggaca

SEQ ID NO: 344315 - DNA, 25 bp, Artificial
  Probe
tgtgaacaaccctgcctttactgtg

SEQ ID NO: 344316 - DNA, 25 bp, Artificial
  Probe
tgaccattgtctgcatccacttcgt

SEQ ID NO: 344317 - DNA, 25 bp, Artificial
  Probe
tgctacacaaaaatctggatcaaag

SEQ ID NO: 344318 - DNA, 25 bp, Artificial
  Probe
gcctgctaacacttgcatctatctg

SEQ ID NO: 344319 - DNA, 25 bp, Artificial
  Probe
tgtcctgcctaatgtgtacattggc

SEQ ID NO: 344320 - DNA, 25 bp, Artificial
  Probe
cagtttgctgaggttcgaaattttc

SEQ ID NO: 344321 - DNA, 25 bp, Artificial
  Probe
atgcggatcttcagcctgctaacac

SEQ ID NO: 344322 - DNA, 25 bp, Artificial
  Probe
caaagtgctggcagaccgggaccca

SEQ ID NO: 344323 - DNA, 25 bp, Artificial
  Probe
ttctggatgtcctgcctaatgtgta

SEQ ID NO: 344324 - DNA, 25 bp, Artificial
  Probe
tccctctcatcatagtcggttattg

SEQ ID NO: 344325 - DNA, 25 bp, Artificial
  Probe
catcatagtcggttattgctacaca

SEQ ID NO: 344326 - DNA, 25 bp, Artificial
  Probe
gatcttcagcctgctaacacttgca

SEQ ID NO: 344327 - DNA, 25 bp, Artificial
  Probe
agcatcctaccctagagcgaatcct

SEQ ID NO: 344328 - DNA, 25 bp, Artificial
  Probe
tttttatccctaatgaagaatcggc

SEQ ID NO: 344329 - DNA, 25 bp, Artificial
  Probe
tgccttttcccacaggcaatgccaa

SEQ ID NO: 344330 - DNA, 25 bp, Artificial
  Probe
atggaaatcctaccaacctctgatg

SEQ ID NO: 344331 - DNA, 25 bp, Artificial
  Probe
caacttagcatcctaccctagagcg

SEQ ID NO: 344332 - DNA, 25 bp, Artificial
  Probe
cactgccaagtagaaagcagcttgc

SEQ ID NO: 344333 - DNA, 25 bp, Artificial
  Probe
caggactgccttttcccacaggcaa

SEQ ID NO: 344334 - DNA, 25 bp, Artificial
  Probe
tgcatacgcaaagaaacagaatatg

SEQ ID NO: 344335 - DNA, 25 bp, Artificial
  Probe
atcctcactgccaagtagaaagcag

SEQ ID NO: 344336 - DNA, 25 bp, Artificial
  Probe
agaatcggcagtgagatatgccagg

SEQ ID NO: 344337 - DNA, 25 bp, Artificial
  Probe
tgaagaatcggcagtgagatatgcc

SEQ ID NO: 344338 - DNA, 25 bp, Artificial
  Probe
tcctttgacaatgaaagatgcatac

SEQ ID NO: 344339 - DNA, 25 bp, Artificial
  Probe
gcgaatcctcactgccaagtagaaa

SEQ ID NO: 344340 - DNA, 25 bp, Artificial
  Probe
tgctagaaagtgctacccatgtcaa

SEQ ID NO: 344341 - DNA, 25 bp, Artificial
  Probe
cctagagcgaatcctcactgccaag

SEQ ID NO: 344342 - DNA, 25 bp, Artificial
  Probe
cctggttcacatggaaggtggaaaa

SEQ ID NO: 344343 - DNA, 25 bp, Artificial
  Probe
gcttgcttcatggaaatcctaccaa

SEQ ID NO: 344344 - DNA, 25 bp, Artificial
  Probe
cacaatcaagtttaaggggattgcc

SEQ ID NO: 344345 - DNA, 25 bp, Artificial
  Probe
gaaatcctaccaacctctgatgtcg

SEQ ID NO: 344346 - DNA, 25 bp, Artificial
  Probe
ctaccaacctctgatgtcgtctctg

SEQ ID NO: 344347 - DNA, 25 bp, Artificial
  Probe
aggactgccttttcccacaggcaat

SEQ ID NO: 344348 - DNA, 25 bp, Artificial
  Probe
atggacagtgcatgtgctcctgcac

SEQ ID NO: 344349 - DNA, 25 bp, Artificial
  Probe
aaacggaggcacagcaattcttctg

SEQ ID NO: 344350 - DNA, 25 bp, Artificial
  Probe
aaacctggttcacatggaaggtgga

SEQ ID NO: 344351 - DNA, 25 bp, Artificial
  Probe
acttagcatcctaccctagagcgaa

SEQ ID NO: 344352 - DNA, 25 bp, Artificial
  Probe
gtttaaggggattgcctgcgaaatc

SEQ ID NO: 344353 - DNA, 25 bp, Artificial
  Probe
acccatgtcaaaacggaggcacagc

SEQ ID NO: 344354 - DNA, 25 bp, Artificial
  Probe
tgagatatgccaggactgccttttc

SEQ ID NO: 344355 - DNA, 25 bp, Artificial
  Probe
tggatggacagtgcatgtgctcctg

SEQ ID NO: 344356 - DNA, 25 bp, Artificial
  Probe
ccctaatgaagaatcggcagtgaga

SEQ ID NO: 344357 - DNA, 25 bp, Artificial
  Probe
tgaattcagtgctagaaagtgctac

SEQ ID NO: 344358 - DNA, 25 bp, Artificial
  Probe
ttgcctgcgaaatcagtaaacaaag

SEQ ID NO: 344359 - DNA, 25 bp, Artificial
  Probe
gaaacaaagcaaaacctggttcaca

SEQ ID NO: 344360 - DNA, 25 bp, Artificial
  Probe
attcagtgctagaaagtgctaccca

SEQ ID NO: 344361 - DNA, 25 bp, Artificial
  Probe
aagatagccttcaggaaacaaagca

SEQ ID NO: 344362 - DNA, 25 bp, Artificial
  Probe
ggattgcctgcgaaatcagtaaaca

SEQ ID NO: 344363 - DNA, 25 bp, Artificial
  Probe
aaagtgctacccatgtcaaaacgga

SEQ ID NO: 344364 - DNA, 25 bp, Artificial
  Probe
caaagcaaaacctggttcacatgga

SEQ ID NO: 344365 - DNA, 25 bp, Artificial
  Probe
caaagatagccttcaggaaacaaag

SEQ ID NO: 344366 - DNA, 25 bp, Artificial
  Probe
atatgccaggactgccttttcccac

SEQ ID NO: 344367 - DNA, 25 bp, Artificial
  Probe
gcaaaacctggttcacatggaaggt

SEQ ID NO: 344368 - DNA, 25 bp, Artificial
  Probe
aaggggattgcctgcgaaatcagta

SEQ ID NO: 344369 - DNA, 25 bp, Artificial
  Probe
gtagaaagcagcttgcttcatggaa

SEQ ID NO: 344370 - DNA, 25 bp, Artificial
  Probe
ttcaggtctacagtgcctttctccc

SEQ ID NO: 344371 - DNA, 25 bp, Artificial
  Probe
ctagaaagtgctacccatgtcaaaa

SEQ ID NO: 344372 - DNA, 25 bp, Artificial
  Probe
atgtcaaaacggaggcacagcaatt

SEQ ID NO: 344373 - DNA, 25 bp, Artificial
  Probe
aagggactccttcctcacacagttt

SEQ ID NO: 344374 - DNA, 25 bp, Artificial
  Probe
tagctcgtggccagccttgagctcc

SEQ ID NO: 344375 - DNA, 25 bp, Artificial
  Probe
gacatttgcctctgcacctgctggg

SEQ ID NO: 344376 - DNA, 25 bp, Artificial
  Probe
ccggtgcacagaagggctgccgaca

SEQ ID NO: 344377 - DNA, 25 bp, Artificial
  Probe
tgtcctgtgtaacactgacacagtc

SEQ ID NO: 344378 - DNA, 25 bp, Artificial
  Probe
cacctgctgggctttttctctcatt

SEQ ID NO: 344379 - DNA, 25 bp, Artificial
  Probe
tttggttttagttttccacatacag

SEQ ID NO: 344380 - DNA, 25 bp, Artificial
  Probe
ctaatgacagagaccttgccttaaa

SEQ ID NO: 344381 - DNA, 25 bp, Artificial
  Probe
ggttttagttttccacatacagtct

SEQ ID NO: 344382 - DNA, 25 bp, Artificial
  Probe
gcctttcaggaggtcctggctccct

SEQ ID NO: 344383 - DNA, 25 bp, Artificial
  Probe
ctcatacagagaaggtcacaagtac

SEQ ID NO: 344384 - DNA, 25 bp, Artificial
  Probe
gaggagatcctccatcttctcctct

SEQ ID NO: 344385 - DNA, 25 bp, Artificial
  Probe
tcaacagacaaggtagaaggatgtc

SEQ ID NO: 344386 - DNA, 25 bp, Artificial
  Probe
cctgtcctgtgaagggactccttcc

SEQ ID NO: 344387 - DNA, 25 bp, Artificial
  Probe
gctccgaggagatcctccatcttct

SEQ ID NO: 344388 - DNA, 25 bp, Artificial
  Probe
cacagtctggccagcctttcaggag

SEQ ID NO: 344389 - DNA, 25 bp, Artificial
  Probe
taagttcagggctctttctagggtc

SEQ ID NO: 344390 - DNA, 25 bp, Artificial
  Probe
acccaccagactcatacagagaagg

SEQ ID NO: 344391 - DNA, 25 bp, Artificial
  Probe
cttttgttcttaaacacatggaagt

SEQ ID NO: 344392 - DNA, 25 bp, Artificial
  Probe
tctcaaatacccagggcccagacat

SEQ ID NO: 344393 - DNA, 25 bp, Artificial
  Probe
tacttggcagggagacatttctaga

SEQ ID NO: 344394 - DNA, 25 bp, Artificial
  Probe
agggcccagacatttgcctctgcac

SEQ ID NO: 344395 - DNA, 25 bp, Artificial
  Probe
tttgcctctgcacctgctgggcttt

SEQ ID NO: 344396 - DNA, 25 bp, Artificial
  Probe
actgacacagtctggccagcctttc

SEQ ID NO: 344397 - DNA, 25 bp, Artificial
  Probe
aagttacttggcagggagacatttc

SEQ ID NO: 344398 - DNA, 25 bp, Artificial
  Probe
cagggcccagacatttgcctctgca

SEQ ID NO: 344399 - DNA, 25 bp, Artificial
  Probe
aggtcacaagtactaaatgaaaggc

SEQ ID NO: 344400 - DNA, 25 bp, Artificial
  Probe
aatttcatcgactgcctatgtaggt

SEQ ID NO: 344401 - DNA, 25 bp, Artificial
  Probe
cctgtgaagggactccttcctcaca

SEQ ID NO: 344402 - DNA, 25 bp, Artificial
  Probe
cagtctagctcgtggccagccttga

SEQ ID NO: 344403 - DNA, 25 bp, Artificial
  Probe
agaagtactagacatcatttttgca

SEQ ID NO: 344404 - DNA, 25 bp, Artificial
  Probe
acctgctgggctttttctctcattt

SEQ ID NO: 344405 - DNA, 25 bp, Artificial
  Probe
ccaacatcaacagacaaggtagaag

SEQ ID NO: 344406 - DNA, 25 bp, Artificial
  Probe
tctcagcccctgtcctgtgaaggga

SEQ ID NO: 344407 - DNA, 25 bp, Artificial
  Probe
tcatacaacgatccagaagtactag

SEQ ID NO: 344408 - DNA, 25 bp, Artificial
  Probe
cgatccagaagtactagacatcatt

SEQ ID NO: 344409 - DNA, 25 bp, Artificial
  Probe
cagggctctttctagggtcaccact

SEQ ID NO: 344410 - DNA, 25 bp, Artificial
  Probe
aacacatggaagttacttggcaggg

SEQ ID NO: 344411 - DNA, 25 bp, Artificial
  Probe
catggaagttacttggcagggagac

SEQ ID NO: 344412 - DNA, 25 bp, Artificial
  Probe
acacagtttctgtgacttccttttg

SEQ ID NO: 344413 - DNA, 25 bp, Artificial
  Probe
acgggtaatttcatcgactgcctat

SEQ ID NO: 344414 - DNA, 25 bp, Artificial
  Probe
cacagtttctgtgacttccttttgt

SEQ ID NO: 344415 - DNA, 25 bp, Artificial
  Probe
ccccggtgcacagaagggctgccga

SEQ ID NO: 344416 - DNA, 25 bp, Artificial
  Probe
agttttccacatacagtctagctcg

SEQ ID NO: 344417 - DNA, 25 bp, Artificial
  Probe
ccatacatgactttgatgatatctg

SEQ ID NO: 344418 - DNA, 25 bp, Artificial
  Probe
ctagacatcatttttgcagtgaatt

SEQ ID NO: 344419 - DNA, 25 bp, Artificial
  Probe
aaattgcctattgttctatgccgcc

SEQ ID NO: 344420 - DNA, 25 bp, Artificial
  Probe
gaaattgcctattgttctatgccgc

SEQ ID NO: 344421 - DNA, 25 bp, Artificial
  Probe
gcctattgttctatgccgcctgacg

SEQ ID NO: 344422 - DNA, 25 bp, Artificial
  Probe
tgcagggcagccattcctgtgcaga

SEQ ID NO: 344423 - DNA, 25 bp, Artificial
  Probe
attgcctattgttctatgccgcctg

SEQ ID NO: 344424 - DNA, 25 bp, Artificial
  Probe
atgccgcctgacgtgtctgcatgag

SEQ ID NO: 344425 - DNA, 25 bp, Artificial
  Probe
gacgctccggatgaaattgcctatt

SEQ ID NO: 344426 - DNA, 25 bp, Artificial
  Probe
ttgcctattgttctatgccgcctga

SEQ ID NO: 344427 - DNA, 25 bp, Artificial
  Probe
tatgccgcctgacgtgtctgcatga

SEQ ID NO: 344428 - DNA, 25 bp, Artificial
  Probe
gggcagccattcctgtgcagaaaga

SEQ ID NO: 344429 - DNA, 25 bp, Artificial
  Probe
gttaaaccaaaaccatgttgtgcta

SEQ ID NO: 344430 - DNA, 25 bp, Artificial
  Probe
cctattgttctatgccgcctgacgt

SEQ ID NO: 344431 - DNA, 25 bp, Artificial
  Probe
cgctccggatgaaattgcctattgt

SEQ ID NO: 344432 - DNA, 25 bp, Artificial
  Probe
aattgcctattgttctatgccgcct

SEQ ID NO: 344433 - DNA, 25 bp, Artificial
  Probe
ggctaatgacgctccggatgaaatt

SEQ ID NO: 344434 - DNA, 25 bp, Artificial
  Probe
cagggcagccattcctgtgcagaaa

SEQ ID NO: 344435 - DNA, 25 bp, Artificial
  Probe
atgaaattgcctattgttctatgcc

SEQ ID NO: 344436 - DNA, 25 bp, Artificial
  Probe
gaatggctaatgacgctccggatga

SEQ ID NO: 344437 - DNA, 25 bp, Artificial
  Probe
agggcagccattcctgtgcagaaag

SEQ ID NO: 344438 - DNA, 25 bp, Artificial
  Probe
tgacgtgtctgcatgagaggtttcc

SEQ ID NO: 344439 - DNA, 25 bp, Artificial
  Probe
gctccggatgaaattgcctattgtt

SEQ ID NO: 344440 - DNA, 25 bp, Artificial
  Probe
tgccgcctgacgtgtctgcatgaga

SEQ ID NO: 344441 - DNA, 25 bp, Artificial
  Probe
gccgcctgacgtgtctgcatgagag

SEQ ID NO: 344442 - DNA, 25 bp, Artificial
  Probe
agctgctgttaaaccaaaaccatgt

SEQ ID NO: 344443 - DNA, 25 bp, Artificial
  Probe
gctgttaaaccaaaaccatgttgtg

SEQ ID NO: 344444 - DNA, 25 bp, Artificial
  Probe
aagctgctgttaaaccaaaaccatg

SEQ ID NO: 344445 - DNA, 25 bp, Artificial
  Probe
tgttaaaccaaaaccatgttgtgct

SEQ ID NO: 344446 - DNA, 25 bp, Artificial
  Probe
tgaaattgcctattgttctatgccg

SEQ ID NO: 344447 - DNA, 25 bp, Artificial
  Probe
tgacgctccggatgaaattgcctat

SEQ ID NO: 344448 - DNA, 25 bp, Artificial
  Probe
ttctatgccgcctgacgtgtctgca

SEQ ID NO: 344449 - DNA, 25 bp, Artificial
  Probe
gcctgacgtgtctgcatgagaggtt

SEQ ID NO: 344450 - DNA, 25 bp, Artificial
  Probe
ctatgccgcctgacgtgtctgcatg

SEQ ID NO: 344451 - DNA, 25 bp, Artificial
  Probe
aaaccaaaaccatgttgtgctactg

SEQ ID NO: 344452 - DNA, 25 bp, Artificial
  Probe
atgacgctccggatgaaattgccta

SEQ ID NO: 344453 - DNA, 25 bp, Artificial
  Probe
ctgttaaaccaaaaccatgttgtgc

SEQ ID NO: 344454 - DNA, 25 bp, Artificial
  Probe
ccgcctgacgtgtctgcatgagagg

SEQ ID NO: 344455 - DNA, 25 bp, Artificial
  Probe
ggcagccattcctgtgcagaaagag

SEQ ID NO: 344456 - DNA, 25 bp, Artificial
  Probe
tgaatggctaatgacgctccggatg

SEQ ID NO: 344457 - DNA, 25 bp, Artificial
  Probe
acgctccggatgaaattgcctattg

SEQ ID NO: 344458 - DNA, 25 bp, Artificial
  Probe
ctgctgttaaaccaaaaccatgttg

SEQ ID NO: 344459 - DNA, 25 bp, Artificial
  Probe
cgcctgacgtgtctgcatgagaggt

SEQ ID NO: 344460 - DNA, 25 bp, Artificial
  Probe
cctgacgtgtctgcatgagaggttt

SEQ ID NO: 344461 - DNA, 25 bp, Artificial
  Probe
agccattcctgtgcagaaagagaga

SEQ ID NO: 344462 - DNA, 25 bp, Artificial
  Probe
tctatgccgcctgacgtgtctgcat

SEQ ID NO: 344463 - DNA, 25 bp, Artificial
  Probe
gcagggcagccattcctgtgcagaa

SEQ ID NO: 344464 - DNA, 25 bp, Artificial
  Probe
cagccattcctgtgcagaaagagag

SEQ ID NO: 344465 - DNA, 25 bp, Artificial
  Probe
ctgctctgcccgatgaactttgtgc

SEQ ID NO: 344466 - DNA, 25 bp, Artificial
  Probe
agctgcggcacctgactgaggcgct

SEQ ID NO: 344467 - DNA, 25 bp, Artificial
  Probe
ccttggtttgacactcaggagtttc

SEQ ID NO: 344468 - DNA, 25 bp, Artificial
  Probe
agcaggagaactctgtgctgcgcag

SEQ ID NO: 344469 - DNA, 25 bp, Artificial
  Probe
acatctgtgtccaggggtacggcgt

SEQ ID NO: 344470 - DNA, 25 bp, Artificial
  Probe
ccccaaggatgatgacaggaaggtt

SEQ ID NO: 344471 - DNA, 25 bp, Artificial
  Probe
agcacgagaagatgtgcccgctgct

SEQ ID NO: 344472 - DNA, 25 bp, Artificial
  Probe
tgcggcacctgactgaggcgctgaa

SEQ ID NO: 344473 - DNA, 25 bp, Artificial
  Probe
agacacagaagtctgacaagcttca

SEQ ID NO: 344474 - DNA, 25 bp, Artificial
  Probe
gacactcaggagtttctctacacat

SEQ ID NO: 344475 - DNA, 25 bp, Artificial
  Probe
ctgacaagcttcacgaggaacatga

SEQ ID NO: 344476 - DNA, 25 bp, Artificial
  Probe
gcagctcagaggagccgaaagaagc

SEQ ID NO: 344477 - DNA, 25 bp, Artificial
  Probe
acaagcttcacgaggaacatgagag

SEQ ID NO: 344478 - DNA, 25 bp, Artificial
  Probe
cttttatctggctcggaaccttggt

SEQ ID NO: 344479 - DNA, 25 bp, Artificial
  Probe
tgcccgatgaactttgtgcagcttc

SEQ ID NO: 344480 - DNA, 25 bp, Artificial
  Probe
agaactctgtgctgcgcagggagat

SEQ ID NO: 344481 - DNA, 25 bp, Artificial
  Probe
ctacacatctgtgtccaggggtacg

SEQ ID NO: 344482 - DNA, 25 bp, Artificial
  Probe
ccctcttttatctggctcggaacct

SEQ ID NO: 344483 - DNA, 25 bp, Artificial
  Probe
ctggctcggaaccttggtttgacac

SEQ ID NO: 344484 - DNA, 25 bp, Artificial
  Probe
tatctggctcggaaccttggtttga

SEQ ID NO: 344485 - DNA, 25 bp, Artificial
  Probe
gctggtctgcccatgatgccccaga

SEQ ID NO: 344486 - DNA, 25 bp, Artificial
  Probe
ggccagctggtctgcccatgatgcc

SEQ ID NO: 344487 - DNA, 25 bp, Artificial
  Probe
agcagacacagaagtctgacaagct

SEQ ID NO: 344488 - DNA, 25 bp, Artificial
  Probe
aaaccgggttgcagctcagaggagc

SEQ ID NO: 344489 - DNA, 25 bp, Artificial
  Probe
cagacacagaagtctgacaagcttc

SEQ ID NO: 344490 - DNA, 25 bp, Artificial
  Probe
actttgtgcagcttcggccagaccc

SEQ ID NO: 344491 - DNA, 25 bp, Artificial
  Probe
catgagagtctggagcaggagaact

SEQ ID NO: 344492 - DNA, 25 bp, Artificial
  Probe
aggagtttctctacacatctgtgtc

SEQ ID NO: 344493 - DNA, 25 bp, Artificial
  Probe
gttgcagctcagaggagccgaaaga

SEQ ID NO: 344494 - DNA, 25 bp, Artificial
  Probe
tttctctacacatctgtgtccaggg

SEQ ID NO: 344495 - DNA, 25 bp, Artificial
  Probe
actcaggagtttctctacacatctg

SEQ ID NO: 344496 - DNA, 25 bp, Artificial
  Probe
agagccccaaggatgatgacaggaa

SEQ ID NO: 344497 - DNA, 25 bp, Artificial
  Probe
aaccagccgcagagccccaaggatg

SEQ ID NO: 344498 - DNA, 25 bp, Artificial
  Probe
aaccgggttgcagctcagaggagcc

SEQ ID NO: 344499 - DNA, 25 bp, Artificial
  Probe
tggccagctggtctgcccatgatgc

SEQ ID NO: 344500 - DNA, 25 bp, Artificial
  Probe
tgtgtccaggggtacggcgtccctc

SEQ ID NO: 344501 - DNA, 25 bp, Artificial
  Probe
ctgcggcacctgactgaggcgctga

SEQ ID NO: 344502 - DNA, 25 bp, Artificial
  Probe
ggtctgcccatgatgccccagatca

SEQ ID NO: 344503 - DNA, 25 bp, Artificial
  Probe
ggctcggaaccttggtttgacactc

SEQ ID NO: 344504 - DNA, 25 bp, Artificial
  Probe
tcggaaccttggtttgacactcagg

SEQ ID NO: 344505 - DNA, 25 bp, Artificial
  Probe
ctggtctgcccatgatgccccagat

SEQ ID NO: 344506 - DNA, 25 bp, Artificial
  Probe
cttcacgaggaacatgagagtctgg

SEQ ID NO: 344507 - DNA, 25 bp, Artificial
  Probe
atctggctcggaaccttggtttgac

SEQ ID NO: 344508 - DNA, 25 bp, Artificial
  Probe
gcagagccccaaggatgatgacagg

SEQ ID NO: 344509 - DNA, 25 bp, Artificial
  Probe
ccgcagagccccaaggatgatgaca

SEQ ID NO: 344510 - DNA, 25 bp, Artificial
  Probe
atgagagtctggagcaggagaactc

SEQ ID NO: 344511 - DNA, 25 bp, Artificial
  Probe
cagcctcagagtcacctcacccggc

SEQ ID NO: 344512 - DNA, 25 bp, Artificial
  Probe
cctctctgaaagcacaggctaccca

SEQ ID NO: 344513 - DNA, 25 bp, Artificial
  Probe
caggctacccagcctcagagtcacc

SEQ ID NO: 344514 - DNA, 25 bp, Artificial
  Probe
ctctgaaagcacaggctacccagcc

SEQ ID NO: 344515 - DNA, 25 bp, Artificial
  Probe
tctctgaaagcacaggctacccagc

SEQ ID NO: 344516 - DNA, 25 bp, Artificial
  Probe
ctctctgaaagcacaggctacccag

SEQ ID NO: 344517 - DNA, 25 bp, Artificial
  Probe
ccgcctctctgaaagcacaggctac

SEQ ID NO: 344518 - DNA, 25 bp, Artificial
  Probe
tacccagcctcagagtcacctcacc

SEQ ID NO: 344519 - DNA, 25 bp, Artificial
  Probe
aggctacccagcctcagagtcacct

SEQ ID NO: 344520 - DNA, 25 bp, Artificial
  Probe
gcctcagagtcacctcacccggctg

SEQ ID NO: 344521 - DNA, 25 bp, Artificial
  Probe
agcctcagagtcacctcacccggct

SEQ ID NO: 344522 - DNA, 25 bp, Artificial
  Probe
tccccgcctctctgaaagcacaggc

SEQ ID NO: 344523 - DNA, 25 bp, Artificial
  Probe
ccagcctcagagtcacctcacccgg

SEQ ID NO: 344524 - DNA, 25 bp, Artificial
  Probe
gcctctctgaaagcacaggctaccc

SEQ ID NO: 344525 - DNA, 25 bp, Artificial
  Probe
ccccgcctctctgaaagcacaggct

SEQ ID NO: 344526 - DNA, 25 bp, Artificial
  Probe
acaggctacccagcctcagagtcac

SEQ ID NO: 344527 - DNA, 25 bp, Artificial
  Probe
tgaaagcacaggctacccagcctca

SEQ ID NO: 344528 - DNA, 25 bp, Artificial
  Probe
ctacccagcctcagagtcacctcac

SEQ ID NO: 344529 - DNA, 25 bp, Artificial
  Probe
ctgaaagcacaggctacccagcctc

SEQ ID NO: 344530 - DNA, 25 bp, Artificial
  Probe
cccagcctcagagtcacctcacccg

SEQ ID NO: 344531 - DNA, 25 bp, Artificial
  Probe
agcacaggctacccagcctcagagt

SEQ ID NO: 344532 - DNA, 25 bp, Artificial
  Probe
cctcagagtcacctcacccggctgc

SEQ ID NO: 344533 - DNA, 25 bp, Artificial
  Probe
gctacccagcctcagagtcacctca

SEQ ID NO: 344534 - DNA, 25 bp, Artificial
  Probe
tcagagtcacctcacccggctgctg

SEQ ID NO: 344535 - DNA, 25 bp, Artificial
  Probe
ggctacccagcctcagagtcacctc

SEQ ID NO: 344536 - DNA, 25 bp, Artificial
  Probe
aagcacaggctacccagcctcagag

SEQ ID NO: 344537 - DNA, 25 bp, Artificial
  Probe
tctgaaagcacaggctacccagcct

SEQ ID NO: 344538 - DNA, 25 bp, Artificial
  Probe
ctcagagtcacctcacccggctgct

SEQ ID NO: 344539 - DNA, 25 bp, Artificial
  Probe
acccagcctcagagtcacctcaccc

SEQ ID NO: 344540 - DNA, 25 bp, Artificial
  Probe
cccgcctctctgaaagcacaggcta

SEQ ID NO: 344541 - DNA, 25 bp, Artificial
  Probe
cacaggctacccagcctcagagtca

SEQ ID NO: 344542 - DNA, 25 bp, Artificial
  Probe
gcacaggctacccagcctcagagtc

SEQ ID NO: 344543 - DNA, 25 bp, Artificial
  Probe
gaaagcacaggctacccagcctcag

SEQ ID NO: 344544 - DNA, 25 bp, Artificial
  Probe
aaagcacaggctacccagcctcaga

SEQ ID NO: 344545 - DNA, 25 bp, Artificial
  Probe
cgcctctctgaaagcacaggctacc

SEQ ID NO: 344546 - DNA, 25 bp, Artificial
  Probe
ctcccaggggcctttgaggcagcag

SEQ ID NO: 344547 - DNA, 25 bp, Artificial
  Probe
gtggaacagccatgcgtatcctggg

SEQ ID NO: 344548 - DNA, 25 bp, Artificial
  Probe
tcgtgacccgacacccagatctgaa

SEQ ID NO: 344549 - DNA, 25 bp, Artificial
  Probe
tcctcaacaaggtcgtgacccgaca

SEQ ID NO: 344550 - DNA, 25 bp, Artificial
  Probe
ggtggaacagccatgcgtatcctgg

SEQ ID NO: 344551 - DNA, 25 bp, Artificial
  Probe
gaggtcagcgctacagaactcatga

SEQ ID NO: 344552 - DNA, 25 bp, Artificial
  Probe
ggtcgtgacccgacacccagatctg

SEQ ID NO: 344553 - DNA, 25 bp, Artificial
  Probe
tgatactgaccgatcagggaccatt

SEQ ID NO: 344554 - DNA, 25 bp, Artificial
  Probe
tgggctttgaggagttcaagtacct

SEQ ID NO: 344555 - DNA, 25 bp, Artificial
  Probe
gtcattagcgccatcagcgaggctg

SEQ ID NO: 344556 - DNA, 25 bp, Artificial
  Probe
actttttgtccagctggctggagac

SEQ ID NO: 344557 - DNA, 25 bp, Artificial
  Probe
acgtttttacggtcatgtcctgcta

SEQ ID NO: 344558 - DNA, 25 bp, Artificial
  Probe
gggaccattggtagcaatgaactcc

SEQ ID NO: 344559 - DNA, 25 bp, Artificial
  Probe
gcctttgaggcagcaggattccacc

SEQ ID NO: 344560 - DNA, 25 bp, Artificial
  Probe
ccacaggcaagctgggctttgagga

SEQ ID NO: 344561 - DNA, 25 bp, Artificial
  Probe
ctcatgaatatcctcaacaaggtcg

SEQ ID NO: 344562 - DNA, 25 bp, Artificial
  Probe
aaactgatgggttcggcattgacac

SEQ ID NO: 344563 - DNA, 25 bp, Artificial
  Probe
tgtccagctggctggagacgacatg

SEQ ID NO: 344564 - DNA, 25 bp, Artificial
  Probe
gacaccacaggcaagctgggctttg

SEQ ID NO: 344565 - DNA, 25 bp, Artificial
  Probe
catcagcgaggctgctgcgcagtac

SEQ ID NO: 344566 - DNA, 25 bp, Artificial
  Probe
cctctggaacaacattaaaaagtgg

SEQ ID NO: 344567 - DNA, 25 bp, Artificial
  Probe
tatacaaacgctttgatactgaccg

SEQ ID NO: 344568 - DNA, 25 bp, Artificial
  Probe
gaactcatgaatatcctcaacaagg

SEQ ID NO: 344569 - DNA, 25 bp, Artificial
  Probe
gctgctgcgcagtacaacccggagc

SEQ ID NO: 344570 - DNA, 25 bp, Artificial
  Probe
aacagccatgcgtatcctgggcgga

SEQ ID NO: 344571 - DNA, 25 bp, Artificial
  Probe
gctttgatactgaccgatcagggac

SEQ ID NO: 344572 - DNA, 25 bp, Artificial
  Probe
gcgctacagaactcatgaatatcct

SEQ ID NO: 344573 - DNA, 25 bp, Artificial
  Probe
agatctgaaaactgatgggttcggc

SEQ ID NO: 344574 - DNA, 25 bp, Artificial
  Probe
ttggtagcaatgaactcccaggggc

SEQ ID NO: 344575 - DNA, 25 bp, Artificial
  Probe
cagcgaggctgctgcgcagtacaac

SEQ ID NO: 344576 - DNA, 25 bp, Artificial
  Probe
agacgacatggaggtcagcgctaca

SEQ ID NO: 344577 - DNA, 25 bp, Artificial
  Probe
gtacctctggaacaacattaaaaag

SEQ ID NO: 344578 - DNA, 25 bp, Artificial
  Probe
ggcctttgaggcagcaggattccac

SEQ ID NO: 344579 - DNA, 25 bp, Artificial
  Probe
gacccgacacccagatctgaaaact

SEQ ID NO: 344580 - DNA, 25 bp, Artificial
  Probe
cattgacacttgtcggagcatggtg

SEQ ID NO: 344581 - DNA, 25 bp, Artificial
  Probe
gcaagctgggctttgaggagttcaa

SEQ ID NO: 344582 - DNA, 25 bp, Artificial
  Probe
gtagcaatgaactcccaggggcctt

SEQ ID NO: 344583 - DNA, 25 bp, Artificial
  Probe
ggaaactttttgtccagctggctgg

SEQ ID NO: 344584 - DNA, 25 bp, Artificial
  Probe
tactgaccgatcagggaccattggt

SEQ ID NO: 344585 - DNA, 25 bp, Artificial
  Probe
cgacatggaggtcagcgctacagaa

SEQ ID NO: 344586 - DNA, 25 bp, Artificial
  Probe
aggctgctgcgcagtacaacccgga

SEQ ID NO: 344587 - DNA, 25 bp, Artificial
  Probe
tctgaaaactgatgggttcggcatt

SEQ ID NO: 344588 - DNA, 25 bp, Artificial
  Probe
gaccgatcagggaccattggtagca

SEQ ID NO: 344589 - DNA, 25 bp, Artificial
  Probe
attagcgccatcagcgaggctgctg

SEQ ID NO: 344590 - DNA, 25 bp, Artificial
  Probe
caatgtgctcggaggcctgatcagc

SEQ ID NO: 344591 - DNA, 25 bp, Artificial
  Probe
gatgggttcggcattgacacttgtc

SEQ ID NO: 344592 - DNA, 25 bp, Artificial
  Probe
aaagtcagaactctattacagatgt

SEQ ID NO: 344593 - DNA, 25 bp, Artificial
  Probe
atatgcatcgttgatgttccaaaat

SEQ ID NO: 344594 - DNA, 25 bp, Artificial
  Probe
attgtcagtttaacccggctgtcct

SEQ ID NO: 344595 - DNA, 25 bp, Artificial
  Probe
gaaagatctgctcctattagtgaag

SEQ ID NO: 344596 - DNA, 25 bp, Artificial
  Probe
atattaggtatcgtgttgtctcact

SEQ ID NO: 344597 - DNA, 25 bp, Artificial
  Probe
attaaacactgtcaaataaaggctg

SEQ ID NO: 344598 - DNA, 25 bp, Artificial
  Probe
gtcagaactctattacagatgtatg

SEQ ID NO: 344599 - DNA, 25 bp, Artificial
  Probe
cactgtcaaataaaggctgttttta

SEQ ID NO: 344600 - DNA, 25 bp, Artificial
  Probe
agtctaaatggtgtctgtatttcca

SEQ ID NO: 344601 - DNA, 25 bp, Artificial
  Probe
gtatcgtgttgtctcactaaagtga

SEQ ID NO: 344602 - DNA, 25 bp, Artificial
  Probe
gttgtctcactaaagtgaaagcaaa

SEQ ID NO: 344603 - DNA, 25 bp, Artificial
  Probe
tgtctcactaaagtgaaagcaaacg

SEQ ID NO: 344604 - DNA, 25 bp, Artificial
  Probe
cgtgttgtctcactaaagtgaaagc

SEQ ID NO: 344605 - DNA, 25 bp, Artificial
  Probe
aacactgtcaaataaaggctgtttt

SEQ ID NO: 344606 - DNA, 25 bp, Artificial
  Probe
agtcagaactctattacagatgtat

SEQ ID NO: 344607 - DNA, 25 bp, Artificial
  Probe
aagtctaaatggtgtctgtatttcc

SEQ ID NO: 344608 - DNA, 25 bp, Artificial
  Probe
tctaaatggtgtctgtatttccaat

SEQ ID NO: 344609 - DNA, 25 bp, Artificial
  Probe
gaatttctattatctgggtatcttc

SEQ ID NO: 344610 - DNA, 25 bp, Artificial
  Probe
aagttgtcccaaagagcatttaact

SEQ ID NO: 344611 - DNA, 25 bp, Artificial
  Probe
tgcatcgttgatgttccaaaatgtg

SEQ ID NO: 344612 - DNA, 25 bp, Artificial
  Probe
cgttgatgttccaaaatgtgaagtc

SEQ ID NO: 344613 - DNA, 25 bp, Artificial
  Probe
gatctgctcctattagtgaagattg

SEQ ID NO: 344614 - DNA, 25 bp, Artificial
  Probe
tgtcccaaagagcatttaactacag

SEQ ID NO: 344615 - DNA, 25 bp, Artificial
  Probe
gttgtcccaaagagcatttaactac

SEQ ID NO: 344616 - DNA, 25 bp, Artificial
  Probe
ctgctcctattagtgaagattggta

SEQ ID NO: 344617 - DNA, 25 bp, Artificial
  Probe
gtcccaaagagcatttaactacaga

SEQ ID NO: 344618 - DNA, 25 bp, Artificial
  Probe
ggtatcgtgttgtctcactaaagtg

SEQ ID NO: 344619 - DNA, 25 bp, Artificial
  Probe
tctgctcctattagtgaagattggt

SEQ ID NO: 344620 - DNA, 25 bp, Artificial
  Probe
gcatcgttgatgttccaaaatgtga

SEQ ID NO: 344621 - DNA, 25 bp, Artificial
  Probe
acactgtcaaataaaggctgttttt

SEQ ID NO: 344622 - DNA, 25 bp, Artificial
  Probe
gagaaagatctgctcctattagtga

SEQ ID NO: 344623 - DNA, 25 bp, Artificial
  Probe
gaactctattacagatgtatgcata

SEQ ID NO: 344624 - DNA, 25 bp, Artificial
  Probe
aagatctgctcctattagtgaagat

SEQ ID NO: 344625 - DNA, 25 bp, Artificial
  Probe
catcgttgatgttccaaaatgtgaa

SEQ ID NO: 344626 - DNA, 25 bp, Artificial
  Probe
caagttgtcccaaagagcatttaac

SEQ ID NO: 344627 - DNA, 25 bp, Artificial
  Probe
ttaaacactgtcaaataaaggctgt

SEQ ID NO: 344628 - DNA, 25 bp, Artificial
  Probe
ttttatatgcatcgttgatgttcca

SEQ ID NO: 344629 - DNA, 25 bp, Artificial
  Probe
tatgcatcgttgatgttccaaaatg

SEQ ID NO: 344630 - DNA, 25 bp, Artificial
  Probe
ctgatttatgttgtacctatgtcgt

SEQ ID NO: 344631 - DNA, 25 bp, Artificial
  Probe
taaacactgtcaaataaaggctgtt

SEQ ID NO: 344632 - DNA, 25 bp, Artificial
  Probe
gggtatcttcatttctatttcacag

SEQ ID NO: 344633 - DNA, 25 bp, Artificial
  Probe
tatattaggtatcgtgttgtctcac

SEQ ID NO: 344634 - DNA, 25 bp, Artificial
  Probe
tatcgtgttgtctcactaaagtgaa

SEQ ID NO: 344635 - DNA, 25 bp, Artificial
  Probe
attaggtatcgtgttgtctcactaa

SEQ ID NO: 344636 - DNA, 25 bp, Artificial
  Probe
ggtatcttcatttctatttcacagg

SEQ ID NO: 344637 - DNA, 25 bp, Artificial
  Probe
cagaactctattacagatgtatgca

SEQ ID NO: 344638 - DNA, 25 bp, Artificial
  Probe
ctgcatgctggacatgtatggtaat

SEQ ID NO: 344639 - DNA, 25 bp, Artificial
  Probe
cctgcatgctggacatgtatggtaa

SEQ ID NO: 344640 - DNA, 25 bp, Artificial
  Probe
cagcaagctgagtctatgtttgggt

SEQ ID NO: 344641 - DNA, 25 bp, Artificial
  Probe
agacgcgggcctcagttaggacttt

SEQ ID NO: 344642 - DNA, 25 bp, Artificial
  Probe
aatgcctgctcgattatatagaaaa

SEQ ID NO: 344643 - DNA, 25 bp, Artificial
  Probe
acagctctgtctgtccagagtatgg

SEQ ID NO: 344644 - DNA, 25 bp, Artificial
  Probe
acactggctctcagccggagacgcg

SEQ ID NO: 344645 - DNA, 25 bp, Artificial
  Probe
tgtccagagtatggtgaacactggc

SEQ ID NO: 344646 - DNA, 25 bp, Artificial
  Probe
tctcatcagttttaatgcctgctcg

SEQ ID NO: 344647 - DNA, 25 bp, Artificial
  Probe
ttttaatgcctgctcgattatatag

SEQ ID NO: 344648 - DNA, 25 bp, Artificial
  Probe
ctcagttaggactttcggcgcgcga

SEQ ID NO: 344649 - DNA, 25 bp, Artificial
  Probe
catcagttttaatgcctgctcgatt

SEQ ID NO: 344650 - DNA, 25 bp, Artificial
  Probe
agctctgtctgtccagagtatggtg

SEQ ID NO: 344651 - DNA, 25 bp, Artificial
  Probe
acgcgggcctcagttaggactttcg

SEQ ID NO: 344652 - DNA, 25 bp, Artificial
  Probe
aatcctgcatgctggacatgtatgg

SEQ ID NO: 344653 - DNA, 25 bp, Artificial
  Probe
aggtagcagcaagctgagtctatgt

SEQ ID NO: 344654 - DNA, 25 bp, Artificial
  Probe
aggaaaaacggacagctctgtctgt

SEQ ID NO: 344655 - DNA, 25 bp, Artificial
  Probe
tcatcagttttaatgcctgctcgat

SEQ ID NO: 344656 - DNA, 25 bp, Artificial
  Probe
tattaatcctgcatgctggacatgt

SEQ ID NO: 344657 - DNA, 25 bp, Artificial
  Probe
cggagtttcagttcgccggccggct

SEQ ID NO: 344658 - DNA, 25 bp, Artificial
  Probe
aacactggctctcagccggagacgc

SEQ ID NO: 344659 - DNA, 25 bp, Artificial
  Probe
gtatggtgaacactggctctcagcc

SEQ ID NO: 344660 - DNA, 25 bp, Artificial
  Probe
agttttaatgcctgctcgattatat

SEQ ID NO: 344661 - DNA, 25 bp, Artificial
  Probe
aagcgagcggagtttcagttcgccg

SEQ ID NO: 344662 - DNA, 25 bp, Artificial
  Probe
tgtctgtccagagtatggtgaacac

SEQ ID NO: 344663 - DNA, 25 bp, Artificial
  Probe
tatggtgaacactggctctcagccg

SEQ ID NO: 344664 - DNA, 25 bp, Artificial
  Probe
cgggcctcagttaggactttcggcg

SEQ ID NO: 344665 - DNA, 25 bp, Artificial
  Probe
gctttgcagcccagaactcagttcg

SEQ ID NO: 344666 - DNA, 25 bp, Artificial
  Probe
aacggacagctctgtctgtccagag

SEQ ID NO: 344667 - DNA, 25 bp, Artificial
  Probe
cggacagctctgtctgtccagagta

SEQ ID NO: 344668 - DNA, 25 bp, Artificial
  Probe
atgcctgctcgattatatagaaaaa

SEQ ID NO: 344669 - DNA, 25 bp, Artificial
  Probe
gagacgcgggcctcagttaggactt

SEQ ID NO: 344670 - DNA, 25 bp, Artificial
  Probe
ggaaaaacggacagctctgtctgtc

SEQ ID NO: 344671 - DNA, 25 bp, Artificial
  Probe
atattaatcctgcatgctggacatg

SEQ ID NO: 344672 - DNA, 25 bp, Artificial
  Probe
ctgtccagagtatggtgaacactgg

SEQ ID NO: 344673 - DNA, 25 bp, Artificial
  Probe
gtgaacactggctctcagccggaga

SEQ ID NO: 344674 - DNA, 25 bp, Artificial
  Probe
aaacggacagctctgtctgtccaga

SEQ ID NO: 344675 - DNA, 25 bp, Artificial
  Probe
ttaatgcctgctcgattatatagaa

SEQ ID NO: 344676 - DNA, 25 bp, Artificial
  Probe
cagttaggactttcggcgcgcgaag

SEQ ID NO: 344677 - DNA, 25 bp, Artificial
  Probe
caagcgagcggagtttcagttcgcc

SEQ ID NO: 344678 - DNA, 25 bp, Artificial
  Probe
tctcagccggagacgcgggcctcag

SEQ ID NO: 344679 - DNA, 25 bp, Artificial
  Probe
tttgcagcccagaactcagttcgcc

SEQ ID NO: 344680 - DNA, 25 bp, Artificial
  Probe
tcagttaggactttcggcgcgcgaa

SEQ ID NO: 344681 - DNA, 25 bp, Artificial
  Probe
taatcctgcatgctggacatgtatg

SEQ ID NO: 344682 - DNA, 25 bp, Artificial
  Probe
ctctgtctgtccagagtatggtgaa

SEQ ID NO: 344683 - DNA, 25 bp, Artificial
  Probe
aaggtagcagcaagctgagtctatg

SEQ ID NO: 344684 - DNA, 25 bp, Artificial
  Probe
cgtaatgcaggagctgaagaggcac

SEQ ID NO: 344685 - DNA, 25 bp, Artificial
  Probe
actgaagcagttccaggagagtagg

SEQ ID NO: 344686 - DNA, 25 bp, Artificial
  Probe
ttccaggagagtagggaccatatcg

SEQ ID NO: 344687 - DNA, 25 bp, Artificial
  Probe
agttccaggagagtagggaccatat

SEQ ID NO: 344688 - DNA, 25 bp, Artificial
  Probe
atcactggtccgtccaaatcttgga

SEQ ID NO: 344689 - DNA, 25 bp, Artificial
  Probe
atcgtaatgcaggagctgaagaggc

SEQ ID NO: 344690 - DNA, 25 bp, Artificial
  Probe
gaccatatcgtaatgcaggagctga

SEQ ID NO: 344691 - DNA, 25 bp, Artificial
  Probe
ctcacagctgtgtccgggacttgct

SEQ ID NO: 344692 - DNA, 25 bp, Artificial
  Probe
ccaggcctctggaaactgaagcagt

SEQ ID NO: 344693 - DNA, 25 bp, Artificial
  Probe
tggaatcactggtccgtccaaatct

SEQ ID NO: 344694 - DNA, 25 bp, Artificial
  Probe
ttgctgaaagcctggaatcactggt

SEQ ID NO: 344695 - DNA, 25 bp, Artificial
  Probe
ggaaactgaagcagttccaggagag

SEQ ID NO: 344696 - DNA, 25 bp, Artificial
  Probe
agggaccatatcgtaatgcaggagc

SEQ ID NO: 344697 - DNA, 25 bp, Artificial
  Probe
ggacttgctgaaagcctggaatcac

SEQ ID NO: 344698 - DNA, 25 bp, Artificial
  Probe
acaggataggacgagccttgtgcct

SEQ ID NO: 344699 - DNA, 25 bp, Artificial
  Probe
caatccaggcctctggaaactgaag

SEQ ID NO: 344700 - DNA, 25 bp, Artificial
  Probe
ccaatccaggcctctggaaactgaa

SEQ ID NO: 344701 - DNA, 25 bp, Artificial
  Probe
gcctctggaaactgaagcagttcca

SEQ ID NO: 344702 - DNA, 25 bp, Artificial
  Probe
cctggaatcactggtccgtccaaat

SEQ ID NO: 344703 - DNA, 25 bp, Artificial
  Probe
gtccgtccaaatcttggatataatt

SEQ ID NO: 344704 - DNA, 25 bp, Artificial
  Probe
agaccagggccagaaatcctcgaca

SEQ ID NO: 344705 - DNA, 25 bp, Artificial
  Probe
tgtccgggacttgctgaaagcctgg

SEQ ID NO: 344706 - DNA, 25 bp, Artificial
  Probe
cttggatataattccctttctcagg

SEQ ID NO: 344707 - DNA, 25 bp, Artificial
  Probe
cagaaatcctcgacaggataggacg

SEQ ID NO: 344708 - DNA, 25 bp, Artificial
  Probe
gtccgggacttgctgaaagcctgga

SEQ ID NO: 344709 - DNA, 25 bp, Artificial
  Probe
gtagggaccatatcgtaatgcagga

SEQ ID NO: 344710 - DNA, 25 bp, Artificial
  Probe
agtagggaccatatcgtaatgcagg

SEQ ID NO: 344711 - DNA, 25 bp, Artificial
  Probe
agagtagggaccatatcgtaatgca

SEQ ID NO: 344712 - DNA, 25 bp, Artificial
  Probe
ggacgagccttgtgcctcagtttct

SEQ ID NO: 344713 - DNA, 25 bp, Artificial
  Probe
gagccttgtgcctcagtttctcctt

SEQ ID NO: 344714 - DNA, 25 bp, Artificial
  Probe
gaaatcctcgacaggataggacgag

SEQ ID NO: 344715 - DNA, 25 bp, Artificial
  Probe
ccgggacttgctgaaagcctggaat

SEQ ID NO: 344716 - DNA, 25 bp, Artificial
  Probe
ataggacgagccttgtgcctcagtt

SEQ ID NO: 344717 - DNA, 25 bp, Artificial
  Probe
ccagaaatcctcgacaggataggac

SEQ ID NO: 344718 - DNA, 25 bp, Artificial
  Probe
agggccagaaatcctcgacaggata

SEQ ID NO: 344719 - DNA, 25 bp, Artificial
  Probe
aaggctagcagcatctctggctatg

SEQ ID NO: 344720 - DNA, 25 bp, Artificial
  Probe
aatgcaggagctgaagaggcacaag

SEQ ID NO: 344721 - DNA, 25 bp, Artificial
  Probe
aagcagttccaggagagtagggacc

SEQ ID NO: 344722 - DNA, 25 bp, Artificial
  Probe
tggcctgatcgcttcctggaatccg

SEQ ID NO: 344723 - DNA, 25 bp, Artificial
  Probe
caggcctctggaaactgaagcagtt

SEQ ID NO: 344724 - DNA, 25 bp, Artificial
  Probe
tgcaactaaggctagcagcatctct

SEQ ID NO: 344725 - DNA, 25 bp, Artificial
  Probe
caagttctggcctgatcgcttcctg

SEQ ID NO: 344726 - DNA, 25 bp, Artificial
  Probe
gctgtgtccgggacttgctgaaagc

SEQ ID NO: 344727 - DNA, 25 bp, Artificial
  Probe
gttctggcctgatcgcttcctggaa

SEQ ID NO: 344728 - DNA, 25 bp, Artificial
  Probe
cctcgacaggataggacgagccttg

SEQ ID NO: 344729 - DNA, 25 bp, Artificial
  Probe
ttctcaggttcttccccaatccagg

SEQ ID NO: 344730 - DNA, 25 bp, Artificial
  Probe
ggctagcaggtgattccccagggta

SEQ ID NO: 344731 - DNA, 25 bp, Artificial
  Probe
ggacaaacttctctagttatctgtc

SEQ ID NO: 344732 - DNA, 25 bp, Artificial
  Probe
ttctggcctggtatgaagcagaagg

SEQ ID NO: 344733 - DNA, 25 bp, Artificial
  Probe
aactaaggctagcaggtgattcccc

SEQ ID NO: 344734 - DNA, 25 bp, Artificial
  Probe
tgattccccagggtaagggttgaga

SEQ ID NO: 344735 - DNA, 25 bp, Artificial
  Probe
gctgggacaaacttctctagttatc

SEQ ID NO: 344736 - DNA, 25 bp, Artificial
  Probe
gcctctgctgggacaaacttctcta

SEQ ID NO: 344737 - DNA, 25 bp, Artificial
  Probe
ggaaggcctcgctgggcactcctga

SEQ ID NO: 344738 - DNA, 25 bp, Artificial
  Probe
cctctgctgggacaaacttctctag

SEQ ID NO: 344739 - DNA, 25 bp, Artificial
  Probe
ctggcctggtatgaagcagaaggga

SEQ ID NO: 344740 - DNA, 25 bp, Artificial
  Probe
gctagcaggtgattccccagggtaa

SEQ ID NO: 344741 - DNA, 25 bp, Artificial
  Probe
gccttcctcagcatctctggctatg

SEQ ID NO: 344742 - DNA, 25 bp, Artificial
  Probe
gacccagcctctgctgggacaaact

SEQ ID NO: 344743 - DNA, 25 bp, Artificial
  Probe
actacccacagatcgcttcctggaa

SEQ ID NO: 344744 - DNA, 25 bp, Artificial
  Probe
agacccagcctctgctgggacaaac

SEQ ID NO: 344745 - DNA, 25 bp, Artificial
  Probe
ctgggacaaacttctctagttatct

SEQ ID NO: 344746 - DNA, 25 bp, Artificial
  Probe
tgctgggacaaacttctctagttat

SEQ ID NO: 344747 - DNA, 25 bp, Artificial
  Probe
gcaactaaggctagcaggtgattcc

SEQ ID NO: 344748 - DNA, 25 bp, Artificial
  Probe
ctctgctgggacaaacttctctagt

SEQ ID NO: 344749 - DNA, 25 bp, Artificial
  Probe
agttctggcctggtatgaagcagaa

SEQ ID NO: 344750 - DNA, 25 bp, Artificial
  Probe
tctgctgggacaaacttctctagtt

SEQ ID NO: 344751 - DNA, 25 bp, Artificial
  Probe
gttctggcctggtatgaagcagaag

SEQ ID NO: 344752 - DNA, 25 bp, Artificial
  Probe
ctaaggctagcaggtgattccccag

SEQ ID NO: 344753 - DNA, 25 bp, Artificial
  Probe
aggctagcaggtgattccccagggt

SEQ ID NO: 344754 - DNA, 25 bp, Artificial
  Probe
agaaaggaaggcctcgctgggcact

SEQ ID NO: 344755 - DNA, 25 bp, Artificial
  Probe
ctagcaggtgattccccagggtaag

SEQ ID NO: 344756 - DNA, 25 bp, Artificial
  Probe
tgggagagacccagcctctgctggg

SEQ ID NO: 344757 - DNA, 25 bp, Artificial
  Probe
gagacccagcctctgctgggacaaa

SEQ ID NO: 344758 - DNA, 25 bp, Artificial
  Probe
agagacccagcctctgctgggacaa

SEQ ID NO: 344759 - DNA, 25 bp, Artificial
  Probe
ccttcctcagcatctctggctatga

SEQ ID NO: 344760 - DNA, 25 bp, Artificial
  Probe
caactaaggctagcaggtgattccc

SEQ ID NO: 344761 - DNA, 25 bp, Artificial
  Probe
caagttctggcctggtatgaagcag

SEQ ID NO: 344762 - DNA, 25 bp, Artificial
  Probe
ctgctgggacaaacttctctagtta

SEQ ID NO: 344763 - DNA, 25 bp, Artificial
  Probe
ccagcaagttctggcctggtatgaa

SEQ ID NO: 344764 - DNA, 25 bp, Artificial
  Probe
atgccttcctcagcatctctggcta

SEQ ID NO: 344765 - DNA, 25 bp, Artificial
  Probe
aagttctggcctggtatgaagcaga

SEQ ID NO: 344766 - DNA, 25 bp, Artificial
  Probe
tactacccacagatcgcttcctgga

SEQ ID NO: 344767 - DNA, 25 bp, Artificial
  Probe
aaggctagcaggtgattccccaggg

SEQ ID NO: 344768 - DNA, 25 bp, Artificial
  Probe
taaggctagcaggtgattccccagg

SEQ ID NO: 344769 - DNA, 25 bp, Artificial
  Probe
tgggacaaacttctctagttatctg

SEQ ID NO: 344770 - DNA, 25 bp, Artificial
  Probe
gaaaggaaggcctcgctgggcactc

SEQ ID NO: 344771 - DNA, 25 bp, Artificial
  Probe
actaaggctagcaggtgattcccca

SEQ ID NO: 344772 - DNA, 25 bp, Artificial
  Probe
acccagcctctgctgggacaaactt

SEQ ID NO: 344773 - DNA, 25 bp, Artificial
  Probe
tgccttcctcagcatctctggctat

SEQ ID NO: 344774 - DNA, 25 bp, Artificial
  Probe
catgccttcctcagcatctctggct

SEQ ID NO: 344775 - DNA, 25 bp, Artificial
  Probe
gggacaaacttctctagttatctgt

SEQ ID NO: 344776 - DNA, 25 bp, Artificial
  Probe
tgacgaggacttgctggcagacgat

SEQ ID NO: 344777 - DNA, 25 bp, Artificial
  Probe
agaccaggttgtcagtgtggtgttc

SEQ ID NO: 344778 - DNA, 25 bp, Artificial
  Probe
acagtcctcagctggaggatgcagg

SEQ ID NO: 344779 - DNA, 25 bp, Artificial
  Probe
tgatgacgaggacttgctggcagac

SEQ ID NO: 344780 - DNA, 25 bp, Artificial
  Probe
tctgcccgaggatgcggagacagtc

SEQ ID NO: 344781 - DNA, 25 bp, Artificial
  Probe
gactttcagatggtttatttccggg

SEQ ID NO: 344782 - DNA, 25 bp, Artificial
  Probe
tcccggagaccaggttgtcagtgtg

SEQ ID NO: 344783 - DNA, 25 bp, Artificial
  Probe
ggacttgctggcagacgatgcctct

SEQ ID NO: 344784 - DNA, 25 bp, Artificial
  Probe
ccgaggctgtggtagacacgctcga

SEQ ID NO: 344785 - DNA, 25 bp, Artificial
  Probe
acgaggacttgctggcagacgatgc

SEQ ID NO: 344786 - DNA, 25 bp, Artificial
  Probe
cgggccctggtaaacttcactcgct

SEQ ID NO: 344787 - DNA, 25 bp, Artificial
  Probe
ctcagctggaggatgcaggctccga

SEQ ID NO: 344788 - DNA, 25 bp, Artificial
  Probe
agacgatgcctctggagatggcctg

SEQ ID NO: 344789 - DNA, 25 bp, Artificial
  Probe
tgtccgaggctgtggtagacacgct

SEQ ID NO: 344790 - DNA, 25 bp, Artificial
  Probe
atggcttgtctctgcccgaggatgc

SEQ ID NO: 344791 - DNA, 25 bp, Artificial
  Probe
tccgggccctggtaaacttcactcg

SEQ ID NO: 344792 - DNA, 25 bp, Artificial
  Probe
cagatggtttatttccgggccctgg

SEQ ID NO: 344793 - DNA, 25 bp, Artificial
  Probe
cagtgtggtgttcatcaaggagctg

SEQ ID NO: 344794 - DNA, 25 bp, Artificial
  Probe
actacagtcctcagctggaggatgc

SEQ ID NO: 344795 - DNA, 25 bp, Artificial
  Probe
tcagtgtggtgttcatcaaggagct

SEQ ID NO: 344796 - DNA, 25 bp, Artificial
  Probe
gagtacttgaagattcccggagacc

SEQ ID NO: 344797 - DNA, 25 bp, Artificial
  Probe
tgcacacagtcatttccagcggctc

SEQ ID NO: 344798 - DNA, 25 bp, Artificial
  Probe
cgagtcggagtacttgaagattccc

SEQ ID NO: 344799 - DNA, 25 bp, Artificial
  Probe
ttcagatggtttatttccgggccct

SEQ ID NO: 344800 - DNA, 25 bp, Artificial
  Probe
acacagtcatttccagcggctccgt

SEQ ID NO: 344801 - DNA, 25 bp, Artificial
  Probe
tgtctctgcccgaggatgcggagac

SEQ ID NO: 344802 - DNA, 25 bp, Artificial
  Probe
gcagacgatgcctctggagatggcc

SEQ ID NO: 344803 - DNA, 25 bp, Artificial
  Probe
gtacttgaagattcccggagaccag

SEQ ID NO: 344804 - DNA, 25 bp, Artificial
  Probe
atccactacagtcctcagctggagg

SEQ ID NO: 344805 - DNA, 25 bp, Artificial
  Probe
gctggcagacgatgcctctggagat

SEQ ID NO: 344806 - DNA, 25 bp, Artificial
  Probe
atgacgaggacttgctggcagacga

SEQ ID NO: 344807 - DNA, 25 bp, Artificial
  Probe
gggccctggtaaacttcactcgctc

SEQ ID NO: 344808 - DNA, 25 bp, Artificial
  Probe
gacacgctcgagtcggagtacttga

SEQ ID NO: 344809 - DNA, 25 bp, Artificial
  Probe
acagtcatttccagcggctccgtgg

SEQ ID NO: 344810 - DNA, 25 bp, Artificial
  Probe
ccagggattccagttccgacgcctg

SEQ ID NO: 344811 - DNA, 25 bp, Artificial
  Probe
ggctcagattcaggaggtgctgcac

SEQ ID NO: 344812 - DNA, 25 bp, Artificial
  Probe
caggttgtcagtgtggtgttcatca

SEQ ID NO: 344813 - DNA, 25 bp, Artificial
  Probe
tggtagacacgctcgagtcggagta

SEQ ID NO: 344814 - DNA, 25 bp, Artificial
  Probe
gaagattcccggagaccaggttgtc

SEQ ID NO: 344815 - DNA, 25 bp, Artificial
  Probe
gcctacgatggcttgtctctgcccg

SEQ ID NO: 344816 - DNA, 25 bp, Artificial
  Probe
gtagacacgctcgagtcggagtact

SEQ ID NO: 344817 - DNA, 25 bp, Artificial
  Probe
ggactttcagatggtttatttccgg

SEQ ID NO: 344818 - DNA, 25 bp, Artificial
  Probe
cgctcgagtcggagtacttgaagat

SEQ ID NO: 344819 - DNA, 25 bp, Artificial
  Probe
gagggcctacgatggcttgtctctg

SEQ ID NO: 344820 - DNA, 25 bp, Artificial
  Probe
ccgggctggctggagctactcagac

SEQ ID NO: 344821 - DNA, 25 bp, Artificial
  Probe
ttcaggaggtgctgcacacagtcat

SEQ ID NO: 344822 - DNA, 25 bp, Artificial
  Probe
gcttacagtttgaatactgagaatc

SEQ ID NO: 344823 - DNA, 25 bp, Artificial
  Probe
gtgctgcttacagtttgaatactga

SEQ ID NO: 344824 - DNA, 25 bp, Artificial
  Probe
ctgcttacagtttgaatactgagaa

SEQ ID NO: 344825 - DNA, 25 bp, Artificial
  Probe
gggcaaggctatccaggttccggct

SEQ ID NO: 344826 - DNA, 25 bp, Artificial
  Probe
tctaagtctccagtgctgcttacag

SEQ ID NO: 344827 - DNA, 25 bp, Artificial
  Probe
aatactgagaatcctgtttctgaaa

SEQ ID NO: 344828 - DNA, 25 bp, Artificial
  Probe
ggcaaggctatccaggttccggcta

SEQ ID NO: 344829 - DNA, 25 bp, Artificial
  Probe
aggctatccaggttccggctaacaa

SEQ ID NO: 344830 - DNA, 25 bp, Artificial
  Probe
cagtgctgcttacagtttgaatact

SEQ ID NO: 344831 - DNA, 25 bp, Artificial
  Probe
aaggctatccaggttccggctaaca

SEQ ID NO: 344832 - DNA, 25 bp, Artificial
  Probe
aaccaggcccaggaggcagaccagg

SEQ ID NO: 344833 - DNA, 25 bp, Artificial
  Probe
gtctccagtgctgcttacagtttga

SEQ ID NO: 344834 - DNA, 25 bp, Artificial
  Probe
tccagtgctgcttacagtttgaata

SEQ ID NO: 344835 - DNA, 25 bp, Artificial
  Probe
atactgagaatcctgtttctgaaaa

SEQ ID NO: 344836 - DNA, 25 bp, Artificial
  Probe
ggcccaggaggcagaccaggattcc

SEQ ID NO: 344837 - DNA, 25 bp, Artificial
  Probe
aaactttctaagtctccagtgctgc

SEQ ID NO: 344838 - DNA, 25 bp, Artificial
  Probe
gcccaggaggcagaccaggattccc

SEQ ID NO: 344839 - DNA, 25 bp, Artificial
  Probe
caaactttctaagtctccagtgctg

SEQ ID NO: 344840 - DNA, 25 bp, Artificial
  Probe
actttctaagtctccagtgctgctt

SEQ ID NO: 344841 - DNA, 25 bp, Artificial
  Probe
cgggcaaggctatccaggttccggc

SEQ ID NO: 344842 - DNA, 25 bp, Artificial
  Probe
gaatactgagaatcctgtttctgaa

SEQ ID NO: 344843 - DNA, 25 bp, Artificial
  Probe
accaggcccaggaggcagaccagga

SEQ ID NO: 344844 - DNA, 25 bp, Artificial
  Probe
ttctaagtctccagtgctgcttaca

SEQ ID NO: 344845 - DNA, 25 bp, Artificial
  Probe
agtctccagtgctgcttacagtttg

SEQ ID NO: 344846 - DNA, 25 bp, Artificial
  Probe
agtgctgcttacagtttgaatactg

SEQ ID NO: 344847 - DNA, 25 bp, Artificial
  Probe
tttgaatactgagaatcctgtttct

SEQ ID NO: 344848 - DNA, 25 bp, Artificial
  Probe
gcaaggctatccaggttccggctaa

SEQ ID NO: 344849 - DNA, 25 bp, Artificial
  Probe
ctaagtctccagtgctgcttacagt

SEQ ID NO: 344850 - DNA, 25 bp, Artificial
  Probe
aagtctccagtgctgcttacagttt

SEQ ID NO: 344851 - DNA, 25 bp, Artificial
  Probe
tttctaagtctccagtgctgcttac

SEQ ID NO: 344852 - DNA, 25 bp, Artificial
  Probe
ctttctaagtctccagtgctgctta

SEQ ID NO: 344853 - DNA, 25 bp, Artificial
  Probe
cccaggaggcagaccaggattccct

SEQ ID NO: 344854 - DNA, 25 bp, Artificial
  Probe
caaggctatccaggttccggctaac

SEQ ID NO: 344855 - DNA, 25 bp, Artificial
  Probe
acgggcaaggctatccaggttccgg

SEQ ID NO: 344856 - DNA, 25 bp, Artificial
  Probe
taagtctccagtgctgcttacagtt

SEQ ID NO: 344857 - DNA, 25 bp, Artificial
  Probe
ctccagtgctgcttacagtttgaat

SEQ ID NO: 344858 - DNA, 25 bp, Artificial
  Probe
gctgcttacagtttgaatactgaga

SEQ ID NO: 344859 - DNA, 25 bp, Artificial
  Probe
tactgagaatcctgtttctgaaaaa

SEQ ID NO: 344860 - DNA, 25 bp, Artificial
  Probe
tgaatactgagaatcctgtttctga

SEQ ID NO: 344861 - DNA, 25 bp, Artificial
  Probe
ccagtgctgcttacagtttgaatac

SEQ ID NO: 344862 - DNA, 25 bp, Artificial
  Probe
aggcagaccaggattccctggacct

SEQ ID NO: 344863 - DNA, 25 bp, Artificial
  Probe
cttacagtttgaatactgagaatcc

SEQ ID NO: 344864 - DNA, 25 bp, Artificial
  Probe
actgagaatcctgtttctgaaaaaa

SEQ ID NO: 344865 - DNA, 25 bp, Artificial
  Probe
ggctatccaggttccggctaacaaa

SEQ ID NO: 344866 - DNA, 25 bp, Artificial
  Probe
ttgaatactgagaatcctgtttctg

SEQ ID NO: 344867 - DNA, 25 bp, Artificial
  Probe
aactttctaagtctccagtgctgct

SEQ ID NO: 344868 - DNA, 25 bp, Artificial
  Probe
agttcctgagtatgccctgccagtc

SEQ ID NO: 344869 - DNA, 25 bp, Artificial
  Probe
ggatgccagacatgggccccgtgtt

SEQ ID NO: 344870 - DNA, 25 bp, Artificial
  Probe
cccgtgttggtgcactgtagcgccg

SEQ ID NO: 344871 - DNA, 25 bp, Artificial
  Probe
tcggcagcccggatgccagacatgg

SEQ ID NO: 344872 - DNA, 25 bp, Artificial
  Probe
cacctttgaagatttctggaggatg

SEQ ID NO: 344873 - DNA, 25 bp, Artificial
  Probe
tgttggtgcactgtagcgccggtac

SEQ ID NO: 344874 - DNA, 25 bp, Artificial
  Probe
catgggccccgtgttggtgcactgt

SEQ ID NO: 344875 - DNA, 25 bp, Artificial
  Probe
tggccaacggagaacactgaggagt

SEQ ID NO: 344876 - DNA, 25 bp, Artificial
  Probe
agtgatccagtatcactacacacag

SEQ ID NO: 344877 - DNA, 25 bp, Artificial
  Probe
acaggaatcatcatcatgatcacga

SEQ ID NO: 344878 - DNA, 25 bp, Artificial
  Probe
tgatccagtatcactacacacagtg

SEQ ID NO: 344879 - DNA, 25 bp, Artificial
  Probe
acactgaagagcacagaagtacacg

SEQ ID NO: 344880 - DNA, 25 bp, Artificial
  Probe
gaaacattattgtcacactgaagag

SEQ ID NO: 344881 - DNA, 25 bp, Artificial
  Probe
tcctgacctttgtgagaaggtcatc

SEQ ID NO: 344882 - DNA, 25 bp, Artificial
  Probe
ccccgtgttggtgcactgtagcgcc

SEQ ID NO: 344883 - DNA, 25 bp, Artificial
  Probe
caacggagaacactgaggagtatgg

SEQ ID NO: 344884 - DNA, 25 bp, Artificial
  Probe
atccagtatcactacacacagtggc

SEQ ID NO: 344885 - DNA, 25 bp, Artificial
  Probe
tttgtgagaaggtcatcggcagccc

SEQ ID NO: 344886 - DNA, 25 bp, Artificial
  Probe
tacgtcgatggttacaacaaagcga

SEQ ID NO: 344887 - DNA, 25 bp, Artificial
  Probe
accgttcgtcgcttttcagtcagaa

SEQ ID NO: 344888 - DNA, 25 bp, Artificial
  Probe
gtatgccctgccagtcctgaccttt

SEQ ID NO: 344889 - DNA, 25 bp, Artificial
  Probe
agtacacgcctgctacaccgttcgt

SEQ ID NO: 344890 - DNA, 25 bp, Artificial
  Probe
taaagtccacctttgaagatttctg

SEQ ID NO: 344891 - DNA, 25 bp, Artificial
  Probe
gcctgacatgggagttcctgagtat

SEQ ID NO: 344892 - DNA, 25 bp, Artificial
  Probe
ggaatcatcatcatgatcacgaacc

SEQ ID NO: 344893 - DNA, 25 bp, Artificial
  Probe
catcatcatgatcacgaaccttgtg

SEQ ID NO: 344894 - DNA, 25 bp, Artificial
  Probe
cttttcagtcagaaatacaaaagtg

SEQ ID NO: 344895 - DNA, 25 bp, Artificial
  Probe
agtggcctgacatgggagttcctga

SEQ ID NO: 344896 - DNA, 25 bp, Artificial
  Probe
gtcctgacctttgtgagaaggtcat

SEQ ID NO: 344897 - DNA, 25 bp, Artificial
  Probe
gcacagaagtacacgcctgctacac

SEQ ID NO: 344898 - DNA, 25 bp, Artificial
  Probe
cactacacacagtggcctgacatgg

SEQ ID NO: 344899 - DNA, 25 bp, Artificial
  Probe
tacaacaaagcgaaagcctacatcg

SEQ ID NO: 344900 - DNA, 25 bp, Artificial
  Probe
gacagtgatccagtatcactacaca

SEQ ID NO: 344901 - DNA, 25 bp, Artificial
  Probe
cacgaaccttgtggagaaaggacgg

SEQ ID NO: 344902 - DNA, 25 bp, Artificial
  Probe
aaggtcatcggcagcccggatgcca

SEQ ID NO: 344903 - DNA, 25 bp, Artificial
  Probe
ctacaccgttcgtcgcttttcagtc

SEQ ID NO: 344904 - DNA, 25 bp, Artificial
  Probe
ctgagtatgccctgccagtcctgac

SEQ ID NO: 344905 - DNA, 25 bp, Artificial
  Probe
gaagtacacgcctgctacaccgttc

SEQ ID NO: 344906 - DNA, 25 bp, Artificial
  Probe
caacaaagcgaaagcctacatcgcc

SEQ ID NO: 344907 - DNA, 25 bp, Artificial
  Probe
acatgggccccgtgttggtgcactg

SEQ ID NO: 344908 - DNA, 25 bp, Artificial
  Probe
ccggatgccagacatgggccccgtg

SEQ ID NO: 344909 - DNA, 25 bp, Artificial
  Probe
ctgccagtcctgacctttgtgagaa

SEQ ID NO: 344910 - DNA, 25 bp, Artificial
  Probe
tgacctttgtgagaaggtcatcggc

SEQ ID NO: 344911 - DNA, 25 bp, Artificial
  Probe
cacacagtggcctgacatgggagtt

SEQ ID NO: 344912 - DNA, 25 bp, Artificial
  Probe
gagcacagaagtacacgcctgctac

SEQ ID NO: 344913 - DNA, 25 bp, Artificial
  Probe
ctgctacaccgttcgtcgcttttca

SEQ ID NO: 344914 - DNA, 25 bp, Artificial
  Probe
tcagtacatcctgagggaattcaag

SEQ ID NO: 344915 - DNA, 25 bp, Artificial
  Probe
gttgtgatgctcaccaagctgagag

SEQ ID NO: 344916 - DNA, 25 bp, Artificial
  Probe
aacagtgaggcagttccagttcact

SEQ ID NO: 344917 - DNA, 25 bp, Artificial
  Probe
gttgtagatcccatggctgaataca

SEQ ID NO: 344918 - DNA, 25 bp, Artificial
  Probe
catcctgagggaattcaaggtcacg

SEQ ID NO: 344919 - DNA, 25 bp, Artificial
  Probe
actgaagacttttggcgcatgcttt

SEQ ID NO: 344920 - DNA, 25 bp, Artificial
  Probe
tagctgagacgactgaagacttttg

SEQ ID NO: 344921 - DNA, 25 bp, Artificial
  Probe
tggccagccgaacgatctgcaagat

SEQ ID NO: 344922 - DNA, 25 bp, Artificial
  Probe
gacggccagtctcgaacagtgaggc

SEQ ID NO: 344923 - DNA, 25 bp, Artificial
  Probe
catgctttgggaacacaactccact

SEQ ID NO: 344924 - DNA, 25 bp, Artificial
  Probe
tttccttgatggatatagacaacag

SEQ ID NO: 344925 - DNA, 25 bp, Artificial
  Probe
actggccagccgaacgatctgcaag

SEQ ID NO: 344926 - DNA, 25 bp, Artificial
  Probe
cttagctgagacgactgaagacttt

SEQ ID NO: 344927 - DNA, 25 bp, Artificial
  Probe
tgttgtgatgctcaccaagctgaga

SEQ ID NO: 344928 - DNA, 25 bp, Artificial
  Probe
acccaggggcccttagctgagacga

SEQ ID NO: 344929 - DNA, 25 bp, Artificial
  Probe
tgctttgggaacacaactccactat

SEQ ID NO: 344930 - DNA, 25 bp, Artificial
  Probe
ctcaccaagctgagagaaatgggca

SEQ ID NO: 344931 - DNA, 25 bp, Artificial
  Probe
acggccagtctcgaacagtgaggca

SEQ ID NO: 344932 - DNA, 25 bp, Artificial
  Probe
agggacggccagtctcgaacagtga

SEQ ID NO: 344933 - DNA, 25 bp, Artificial
  Probe
ttttgttgtagatcccatggctgaa

SEQ ID NO: 344934 - DNA, 25 bp, Artificial
  Probe
ttccttgatggatatagacaacaga

SEQ ID NO: 344935 - DNA, 25 bp, Artificial
  Probe
tgtgatgctcaccaagctgagagaa

SEQ ID NO: 344936 - DNA, 25 bp, Artificial
  Probe
ccagtctcgaacagtgaggcagttc

SEQ ID NO: 344937 - DNA, 25 bp, Artificial
  Probe
ataccagtattttgttgtagatccc

SEQ ID NO: 344938 - DNA, 25 bp, Artificial
  Probe
ttgtagatcccatggctgaatacaa

SEQ ID NO: 344939 - DNA, 25 bp, Artificial
  Probe
acgactgaagacttttggcgcatgc

SEQ ID NO: 344940 - DNA, 25 bp, Artificial
  Probe
agacgactgaagacttttggcgcat

SEQ ID NO: 344941 - DNA, 25 bp, Artificial
  Probe
cagtttccttgatggatatagacaa

SEQ ID NO: 344942 - DNA, 25 bp, Artificial
  Probe
gtattttgttgtagatcccatggct

SEQ ID NO: 344943 - DNA, 25 bp, Artificial
  Probe
caaggagtgccaaagtctggagaag

SEQ ID NO: 344944 - DNA, 25 bp, Artificial
  Probe
tctcgaacagtgaggcagttccagt

SEQ ID NO: 344945 - DNA, 25 bp, Artificial
  Probe
cgatctgcaagataccagtattttg

SEQ ID NO: 344946 - DNA, 25 bp, Artificial
  Probe
cgaacgatctgcaagataccagtat

SEQ ID NO: 344947 - DNA, 25 bp, Artificial
  Probe
acaaggagtgccaaagtctggagaa

SEQ ID NO: 344948 - DNA, 25 bp, Artificial
  Probe
ggggcccttagctgagacgactgaa

SEQ ID NO: 344949 - DNA, 25 bp, Artificial
  Probe
caccaagctgagagaaatgggcaga

SEQ ID NO: 344950 - DNA, 25 bp, Artificial
  Probe
ccagggacggccagtctcgaacagt

SEQ ID NO: 344951 - DNA, 25 bp, Artificial
  Probe
gataccagtattttgttgtagatcc

SEQ ID NO: 344952 - DNA, 25 bp, Artificial
  Probe
cgactgaagacttttggcgcatgct

SEQ ID NO: 344953 - DNA, 25 bp, Artificial
  Probe
cagccgaacgatctgcaagatacca

SEQ ID NO: 344954 - DNA, 25 bp, Artificial
  Probe
taccagtattttgttgtagatccca

SEQ ID NO: 344955 - DNA, 25 bp, Artificial
  Probe
gaacagtgaggcagttccagttcac

SEQ ID NO: 344956 - DNA, 25 bp, Artificial
  Probe
ctgcaagataccagtattttgttgt

SEQ ID NO: 344957 - DNA, 25 bp, Artificial
  Probe
gatgctcaccaagctgagagaaatg

SEQ ID NO: 344958 - DNA, 25 bp, Artificial
  Probe
ttggcgcatgctttgggaacacaac

SEQ ID NO: 344959 - DNA, 25 bp, Artificial
  Probe
tgatgctcaccaagctgagagaaat

SEQ ID NO: 344960 - DNA, 25 bp, Artificial
  Probe
aagcgaagtgatgctgccggcagcc

SEQ ID NO: 344961 - DNA, 25 bp, Artificial
  Probe
ccgcttgggatccttgaagtggccg

SEQ ID NO: 344962 - DNA, 25 bp, Artificial
  Probe
aagccgccgttcttgcagtagagcc

SEQ ID NO: 344963 - DNA, 25 bp, Artificial
  Probe
aagaagccgccgttcttgcagtaga

SEQ ID NO: 344964 - DNA, 25 bp, Artificial
  Probe
tcttgcagtagagccgcttgggatc

SEQ ID NO: 344965 - DNA, 25 bp, Artificial
  Probe
agcgaagtgatgctgccggcagcca

SEQ ID NO: 344966 - DNA, 25 bp, Artificial
  Probe
gcagtctcggggctccccggccccg

SEQ ID NO: 344967 - DNA, 25 bp, Artificial
  Probe
gaagccgccgttcttgcagtagagc

SEQ ID NO: 344968 - DNA, 25 bp, Artificial
  Probe
agaagccgccgttcttgcagtagag

SEQ ID NO: 344969 - DNA, 25 bp, Artificial
  Probe
gcgaagtgatgctgccggcagccat

SEQ ID NO: 344970 - DNA, 25 bp, Artificial
  Probe
accgagcccctgtgtgctacagcgg

SEQ ID NO: 344971 - DNA, 25 bp, Artificial
  Probe
ggcagccatggcccctccgcggccc

SEQ ID NO: 344972 - DNA, 25 bp, Artificial
  Probe
cgcttgggatccttgaagtggccgg

SEQ ID NO: 344973 - DNA, 25 bp, Artificial
  Probe
cgccgttcttgcagtagagccgctt

SEQ ID NO: 344974 - DNA, 25 bp, Artificial
  Probe
gaccgagcccctgtgtgctacagcg

SEQ ID NO: 344975 - DNA, 25 bp, Artificial
  Probe
cagtgcgggaagcgaagtgatgctg

SEQ ID NO: 344976 - DNA, 25 bp, Artificial
  Probe
tgaagccgagagaccgagcccctgt

SEQ ID NO: 344977 - DNA, 25 bp, Artificial
  Probe
ctagtgcagccggactccgcctgaa

SEQ ID NO: 344978 - DNA, 25 bp, Artificial
  Probe
gccgccgttcttgcagtagagccgc

SEQ ID NO: 344979 - DNA, 25 bp, Artificial
  Probe
gcgctcccagcctagtgcagccgga

SEQ ID NO: 344980 - DNA, 25 bp, Artificial
  Probe
ctgaagccgagagaccgagcccctg

SEQ ID NO: 344981 - DNA, 25 bp, Artificial
  Probe
tgcgcaggaagaagccgccgttctt

SEQ ID NO: 344982 - DNA, 25 bp, Artificial
  Probe
gactccgcctgaagccgagagaccg

SEQ ID NO: 344983 - DNA, 25 bp, Artificial
  Probe
ggaccccgctgcggcagtctcgggg

SEQ ID NO: 344984 - DNA, 25 bp, Artificial
  Probe
gttcttgcagtagagccgcttggga

SEQ ID NO: 344985 - DNA, 25 bp, Artificial
  Probe
tggccgggtgggaaggcgccgccgc

SEQ ID NO: 344986 - DNA, 25 bp, Artificial
  Probe
agtgcagccggactccgcctgaagc

SEQ ID NO: 344987 - DNA, 25 bp, Artificial
  Probe
agaccgagcccctgtgtgctacagc

SEQ ID NO: 344988 - DNA, 25 bp, Artificial
  Probe
cagtagagccgcttgggatccttga

SEQ ID NO: 344989 - DNA, 25 bp, Artificial
  Probe
ccgccgttcttgcagtagagccgct

SEQ ID NO: 344990 - DNA, 25 bp, Artificial
  Probe
tagtgcagccggactccgcctgaag

SEQ ID NO: 344991 - DNA, 25 bp, Artificial
  Probe
gccgttcttgcagtagagccgcttg

SEQ ID NO: 344992 - DNA, 25 bp, Artificial
  Probe
ctcgcccgcgggctgccagcctccc

SEQ ID NO: 344993 - DNA, 25 bp, Artificial
  Probe
gcggccccgggaccccgctgcggca

SEQ ID NO: 344994 - DNA, 25 bp, Artificial
  Probe
ccgttcttgcagtagagccgcttgg

SEQ ID NO: 344995 - DNA, 25 bp, Artificial
  Probe
ccggactccgcctgaagccgagaga

SEQ ID NO: 344996 - DNA, 25 bp, Artificial
  Probe
cgttcttgcagtagagccgcttggg

SEQ ID NO: 344997 - DNA, 25 bp, Artificial
  Probe
ccccagcgcggctcgcccgcgggct

SEQ ID NO: 344998 - DNA, 25 bp, Artificial
  Probe
cgccgtcctccggcagtgcgggaag

SEQ ID NO: 344999 - DNA, 25 bp, Artificial
  Probe
cgaagtgatgctgccggcagccatg

SEQ ID NO: 345000 - DNA, 25 bp, Artificial
  Probe
agccgccgttcttgcagtagagccg

SEQ ID NO: 345001 - DNA, 25 bp, Artificial
  Probe
gcagtagagccgcttgggatccttg

SEQ ID NO: 345002 - DNA, 25 bp, Artificial
  Probe
cggactccgcctgaagccgagagac

SEQ ID NO: 345003 - DNA, 25 bp, Artificial
  Probe
tgccagcctcccggttccgtcccgc

SEQ ID NO: 345004 - DNA, 25 bp, Artificial
  Probe
ttcttgcagtagagccgcttgggat

SEQ ID NO: 345005 - DNA, 25 bp, Artificial
  Probe
gccgagagaccgagcccctgtgtgc

SEQ ID NO: 345006 - DNA, 25 bp, Artificial
  Probe
aaatgcctctaaaccaaataaggcg

SEQ ID NO: 345007 - DNA, 25 bp, Artificial
  Probe
gtccaagtgcccacgtgaatctgct

SEQ ID NO: 345008 - DNA, 25 bp, Artificial
  Probe
ttcatgactcaatcgcagagcaaaa

SEQ ID NO: 345009 - DNA, 25 bp, Artificial
  Probe
ttttaatgtccaagtgcccacgtga

SEQ ID NO: 345010 - DNA, 25 bp, Artificial
  Probe
tgcaataaagcagcagtgcagcgca

SEQ ID NO: 345011 - DNA, 25 bp, Artificial
  Probe
taaagcagcagtgcagcgcaaccga

SEQ ID NO: 345012 - DNA, 25 bp, Artificial
  Probe
tactctggtgcgactaagtaccatg

SEQ ID NO: 345013 - DNA, 25 bp, Artificial
  Probe
caaataaggcggtcaccaacagaga

SEQ ID NO: 345014 - DNA, 25 bp, Artificial
  Probe
cagtgcagcgcaaccgaggttatgt

SEQ ID NO: 345015 - DNA, 25 bp, Artificial
  Probe
tgactcaatcgcagagcaaaatgcc

SEQ ID NO: 345016 - DNA, 25 bp, Artificial
  Probe
agactggcagccttttaatgtctct

SEQ ID NO: 345017 - DNA, 25 bp, Artificial
  Probe
taccatgtggggaattggtccatgt

SEQ ID NO: 345018 - DNA, 25 bp, Artificial
  Probe
tctaaaccaaataaggcggtcacca

SEQ ID NO: 345019 - DNA, 25 bp, Artificial
  Probe
gcagtgcagcgcaaccgaggttatg

SEQ ID NO: 345020 - DNA, 25 bp, Artificial
  Probe
atgtctcttcatgactcaatcgcag

SEQ ID NO: 345021 - DNA, 25 bp, Artificial
  Probe
gcagcgcaaccgaggttatgtgccg

SEQ ID NO: 345022 - DNA, 25 bp, Artificial
  Probe
ggtactgtaactgtatccatattat

SEQ ID NO: 345023 - DNA, 25 bp, Artificial
  Probe
ggtccgtgatgacagaagagactga

SEQ ID NO: 345024 - DNA, 25 bp, Artificial
  Probe
gcattcgtgtgtatattcaatctct

SEQ ID NO: 345025 - DNA, 25 bp, Artificial
  Probe
tgtctgtctgtaaggggtccgtgat

SEQ ID NO: 345026 - DNA, 25 bp, Artificial
  Probe
cttcttgtgtgtgtgaccaagtatt

SEQ ID NO: 345027 - DNA, 25 bp, Artificial
  Probe
ggttatgtgccgtgtgtctgtctgt

SEQ ID NO: 345028 - DNA, 25 bp, Artificial
  Probe
ccgtgtgtctgtctgtaaggggtcc

SEQ ID NO: 345029 - DNA, 25 bp, Artificial
  Probe
ataaggcggtcaccaacagagagcc

SEQ ID NO: 345030 - DNA, 25 bp, Artificial
  Probe
tttttaatgtccaagtgcccacgtg

SEQ ID NO: 345031 - DNA, 25 bp, Artificial
  Probe
gtgcgactaagtaccatgtggggaa

SEQ ID NO: 345032 - DNA, 25 bp, Artificial
  Probe
gcagccttttaatgtctcttcatga

SEQ ID NO: 345033 - DNA, 25 bp, Artificial
  Probe
caataaagcagcagtgcagcgcaac

SEQ ID NO: 345034 - DNA, 25 bp, Artificial
  Probe
ttatgtgccgtgtgtctgtctgtaa

SEQ ID NO: 345035 - DNA, 25 bp, Artificial
  Probe
ttagcattcgtgtgtatattcaatc

SEQ ID NO: 345036 - DNA, 25 bp, Artificial
  Probe
cgactaagtaccatgtggggaattg

SEQ ID NO: 345037 - DNA, 25 bp, Artificial
  Probe
aagcagcagtgcagcgcaaccgagg

SEQ ID NO: 345038 - DNA, 25 bp, Artificial
  Probe
ggaattggtccatgtgcaataaagc

SEQ ID NO: 345039 - DNA, 25 bp, Artificial
  Probe
ccaagtatttatactctggtgcgac

SEQ ID NO: 345040 - DNA, 25 bp, Artificial
  Probe
aagagactgagtgtctgcttcaaag

SEQ ID NO: 345041 - DNA, 25 bp, Artificial
  Probe
atcatggtactgtaactgtatccat

SEQ ID NO: 345042 - DNA, 25 bp, Artificial
  Probe
ccacgtgaatctgctggtaaaattt

SEQ ID NO: 345043 - DNA, 25 bp, Artificial
  Probe
caaagcacagactggcagcctttta

SEQ ID NO: 345044 - DNA, 25 bp, Artificial
  Probe
ctaagtaccatgtggggaattggtc

SEQ ID NO: 345045 - DNA, 25 bp, Artificial
  Probe
gcacagactggcagccttttaatgt

SEQ ID NO: 345046 - DNA, 25 bp, Artificial
  Probe
attcaatctcttcttgtgtgtgtga

SEQ ID NO: 345047 - DNA, 25 bp, Artificial
  Probe
accgaggttatgtgccgtgtgtctg

SEQ ID NO: 345048 - DNA, 25 bp, Artificial
  Probe
cgcagagcaaaatgcctctaaacca

SEQ ID NO: 345049 - DNA, 25 bp, Artificial
  Probe
ggtccatgtgcaataaagcagcagt

SEQ ID NO: 345050 - DNA, 25 bp, Artificial
  Probe
tttatactctggtgcgactaagtac

SEQ ID NO: 345051 - DNA, 25 bp, Artificial
  Probe
tggtactgtaactgtatccatatta

SEQ ID NO: 345052 - DNA, 25 bp, Artificial
  Probe
gtgagtttggcttacgggagtactc

SEQ ID NO: 345053 - DNA, 25 bp, Artificial
  Probe
ataacctgcctgtccacgatgtttt

SEQ ID NO: 345054 - DNA, 25 bp, Artificial
  Probe
gtcggtttaccactcttgcctcaca

SEQ ID NO: 345055 - DNA, 25 bp, Artificial
  Probe
gatcccccagaagaactcctaagag

SEQ ID NO: 345056 - DNA, 25 bp, Artificial
  Probe
caaatgaggacaacgcgctcagcag

SEQ ID NO: 345057 - DNA, 25 bp, Artificial
  Probe
gtcttcactaatgacatcaacaagg

SEQ ID NO: 345058 - DNA, 25 bp, Artificial
  Probe
gaaagagccaataactcagacttcg

SEQ ID NO: 345059 - DNA, 25 bp, Artificial
  Probe
gtgtgccaagactgccacctatcac

SEQ ID NO: 345060 - DNA, 25 bp, Artificial
  Probe
ctgttactgacaaatgaggacaacg

SEQ ID NO: 345061 - DNA, 25 bp, Artificial
  Probe
gctttgagtccttccagcaggcgcc

SEQ ID NO: 345062 - DNA, 25 bp, Artificial
  Probe
ctccatactgttactgacaaatgag

SEQ ID NO: 345063 - DNA, 25 bp, Artificial
  Probe
tgttacaacgccttaaatgctcaga

SEQ ID NO: 345064 - DNA, 25 bp, Artificial
  Probe
gaacacacgattaaccagctagctc

SEQ ID NO: 345065 - DNA, 25 bp, Artificial
  Probe
gggagcccctttgatcccactactg

SEQ ID NO: 345066 - DNA, 25 bp, Artificial
  Probe
aagcaatacaacaaaatcctggagc

SEQ ID NO: 345067 - DNA, 25 bp, Artificial
  Probe
ttacagatgacatgcggatcgccaa

SEQ ID NO: 345068 - DNA, 25 bp, Artificial
  Probe
gaccagtccaggaaattttgaggtt

SEQ ID NO: 345069 - DNA, 25 bp, Artificial
  Probe
aatatggtcatgtatctattgcctt

SEQ ID NO: 345070 - DNA, 25 bp, Artificial
  Probe
gcccgacgtcggtttaccactcttg

SEQ ID NO: 345071 - DNA, 25 bp, Artificial
  Probe
tgcaatgcaagctgggacagtttgg

SEQ ID NO: 345072 - DNA, 25 bp, Artificial
  Probe
gagcagggtcctcagattgataaga

SEQ ID NO: 345073 - DNA, 25 bp, Artificial
  Probe
aaggaagggcttcttcattgagcct

SEQ ID NO: 345074 - DNA, 25 bp, Artificial
  Probe
aggacaacgcgctcagcagacagcc

SEQ ID NO: 345075 - DNA, 25 bp, Artificial
  Probe
ttcctacagcgcacccatgtgaaca

SEQ ID NO: 345076 - DNA, 25 bp, Artificial
  Probe
caacaaaatcctggagctcatccag

SEQ ID NO: 345077 - DNA, 25 bp, Artificial
  Probe
taacctgggtgaataccatttattt

SEQ ID NO: 345078 - DNA, 25 bp, Artificial
  Probe
ccagtgctgcactgcggggtctcga

SEQ ID NO: 345079 - DNA, 25 bp, Artificial
  Probe
ttttggaccagtccaggaaattttg

SEQ ID NO: 345080 - DNA, 25 bp, Artificial
  Probe
ctgcggggtctcgaatctttgtgga

SEQ ID NO: 345081 - DNA, 25 bp, Artificial
  Probe
ttaaatgctcagagccccttcgggg

SEQ ID NO: 345082 - DNA, 25 bp, Artificial
  Probe
gaagaactcctaagaggcccaggcc

SEQ ID NO: 345083 - DNA, 25 bp, Artificial
  Probe
gagcaggctcaccagggtgtgttct

SEQ ID NO: 345084 - DNA, 25 bp, Artificial
  Probe
cctaagaggcccaggccgaagagca

SEQ ID NO: 345085 - DNA, 25 bp, Artificial
  Probe
tgtgagcagcactggcttccttccc

SEQ ID NO: 345086 - DNA, 25 bp, Artificial
  Probe
cactcttgcctcacaacaagtgagc

SEQ ID NO: 345087 - DNA, 25 bp, Artificial
  Probe
gggtgtgttcttcaaccaaggccag

SEQ ID NO: 345088 - DNA, 25 bp, Artificial
  Probe
cctggagctcatccagagcggtgtg

SEQ ID NO: 345089 - DNA, 25 bp, Artificial
  Probe
gccttccaatgaaccccattttgtg

SEQ ID NO: 345090 - DNA, 25 bp, Artificial
  Probe
gcagacagcccctgacatgggcttt

SEQ ID NO: 345091 - DNA, 25 bp, Artificial
  Probe
tctaacctgggtgaataccatttat

SEQ ID NO: 345092 - DNA, 25 bp, Artificial
  Probe
ccttcaacccacagtatagaatgtg

SEQ ID NO: 345093 - DNA, 25 bp, Artificial
  Probe
ctgtccacgatgttttcaagcaagc

SEQ ID NO: 345094 - DNA, 25 bp, Artificial
  Probe
gcttcagcctgcagaagggagctgt

SEQ ID NO: 345095 - DNA, 25 bp, Artificial
  Probe
ggtcatgtatctattgccttctcta

SEQ ID NO: 345096 - DNA, 25 bp, Artificial
  Probe
tacgctgtggagcaggctcaccagg

SEQ ID NO: 345097 - DNA, 25 bp, Artificial
  Probe
cttacgggagtactcagaagtaaag

SEQ ID NO: 345098 - DNA, 25 bp, Artificial
  Probe
ccaaggttctgtcagcctgaatggc

SEQ ID NO: 345099 - DNA, 25 bp, Artificial
  Probe
gtgtggaactcattttttggctgtc

SEQ ID NO: 345100 - DNA, 25 bp, Artificial
  Probe
tctgtcagcctgaatggctgccctg

SEQ ID NO: 345101 - DNA, 25 bp, Artificial
  Probe
gtcattttgagttccaaccacacag

SEQ ID NO: 345102 - DNA, 25 bp, Artificial
  Probe
tgtcagcctgaatggctgccctgac

SEQ ID NO: 345103 - DNA, 25 bp, Artificial
  Probe
aacattcgcacaaggcttttgttaa

SEQ ID NO: 345104 - DNA, 25 bp, Artificial
  Probe
cagaagccacagaagtccaaggttc

SEQ ID NO: 345105 - DNA, 25 bp, Artificial
  Probe
catcaaagccatcaagccggcacag

SEQ ID NO: 345106 - DNA, 25 bp, Artificial
  Probe
ttcgcacaaggcttttgttaatatt

SEQ ID NO: 345107 - DNA, 25 bp, Artificial
  Probe
attgaaaatgcttacactccctgtg

SEQ ID NO: 345108 - DNA, 25 bp, Artificial
  Probe
atcacagaagccacagaagtccaag

SEQ ID NO: 345109 - DNA, 25 bp, Artificial
  Probe
gaactcattttttggctgtctgaag

SEQ ID NO: 345110 - DNA, 25 bp, Artificial
  Probe
cctgtgtggaactcattttttggct

SEQ ID NO: 345111 - DNA, 25 bp, Artificial
  Probe
gtcattcaaacattcgcacaaggct

SEQ ID NO: 345112 - DNA, 25 bp, Artificial
  Probe
ctccctgtgtggaactcattttttg

SEQ ID NO: 345113 - DNA, 25 bp, Artificial
  Probe
tcaaacattcgcacaaggcttttgt

SEQ ID NO: 345114 - DNA, 25 bp, Artificial
  Probe
tcacagaagccacagaagtccaagg

SEQ ID NO: 345115 - DNA, 25 bp, Artificial
  Probe
agcctgaatggctgccctgaccact

SEQ ID NO: 345116 - DNA, 25 bp, Artificial
  Probe
gaattaaatgccttttagagaacct

SEQ ID NO: 345117 - DNA, 25 bp, Artificial
  Probe
tccccatcacagaagccacagaagt

SEQ ID NO: 345118 - DNA, 25 bp, Artificial
  Probe
tgtccccatcacagaagccacagaa

SEQ ID NO: 345119 - DNA, 25 bp, Artificial
  Probe
gaagccacagaagtccaaggttctg

SEQ ID NO: 345120 - DNA, 25 bp, Artificial
  Probe
tgtcccagacaaattgaaaatgctt

SEQ ID NO: 345121 - DNA, 25 bp, Artificial
  Probe
aagccacagaagtccaaggttctgt

SEQ ID NO: 345122 - DNA, 25 bp, Artificial
  Probe
agtccaaggttctgtcagcctgaat

SEQ ID NO: 345123 - DNA, 25 bp, Artificial
  Probe
aagtccaaggttctgtcagcctgaa

SEQ ID NO: 345124 - DNA, 25 bp, Artificial
  Probe
gttctgtcagcctgaatggctgccc

SEQ ID NO: 345125 - DNA, 25 bp, Artificial
  Probe
tgaaaatgcttacactccctgtgtg

SEQ ID NO: 345126 - DNA, 25 bp, Artificial
  Probe
ggtgtcccagacaaattgaaaatgc

SEQ ID NO: 345127 - DNA, 25 bp, Artificial
  Probe
cccaattcatgaagaaaatgagcaa

SEQ ID NO: 345128 - DNA, 25 bp, Artificial
  Probe
aaatgcttacactccctgtgtggaa

SEQ ID NO: 345129 - DNA, 25 bp, Artificial
  Probe
gaagtccaaggttctgtcagcctga

SEQ ID NO: 345130 - DNA, 25 bp, Artificial
  Probe
ttgtcattcaaacattcgcacaagg

SEQ ID NO: 345131 - DNA, 25 bp, Artificial
  Probe
caaggttctgtcagcctgaatggct

SEQ ID NO: 345132 - DNA, 25 bp, Artificial
  Probe
ttacactccctgtgtggaactcatt

SEQ ID NO: 345133 - DNA, 25 bp, Artificial
  Probe
ccctgtgtggaactcattttttggc

SEQ ID NO: 345134 - DNA, 25 bp, Artificial
  Probe
ggaactcattttttggctgtctgaa

SEQ ID NO: 345135 - DNA, 25 bp, Artificial
  Probe
tggaactcattttttggctgtctga

SEQ ID NO: 345136 - DNA, 25 bp, Artificial
  Probe
acagaagtccaaggttctgtcagcc

SEQ ID NO: 345137 - DNA, 25 bp, Artificial
  Probe
ccccaattcatgaagaaaatgagca

SEQ ID NO: 345138 - DNA, 25 bp, Artificial
  Probe
cttgtttagagcactttatgaatac

SEQ ID NO: 345139 - DNA, 25 bp, Artificial
  Probe
aaccccaattcatgaagaaaatgag

SEQ ID NO: 345140 - DNA, 25 bp, Artificial
  Probe
caaacattcgcacaaggcttttgtt

SEQ ID NO: 345141 - DNA, 25 bp, Artificial
  Probe
gatacagacagtagctacacagtcg

SEQ ID NO: 345142 - DNA, 25 bp, Artificial
  Probe
actccctgtgtggaactcatttttt

SEQ ID NO: 345143 - DNA, 25 bp, Artificial
  Probe
tgtggaactcattttttggctgtct

SEQ ID NO: 345144 - DNA, 25 bp, Artificial
  Probe
ccagcttgatgatgatgctggtgat

SEQ ID NO: 345145 - DNA, 25 bp, Artificial
  Probe
tgtgtgttagggatgccaccacaac

SEQ ID NO: 345146 - DNA, 25 bp, Artificial
  Probe
ccaacaagttctccaggaaatccag

SEQ ID NO: 345147 - DNA, 25 bp, Artificial
  Probe
tgctgtccatgtacttcatctgctt

SEQ ID NO: 345148 - DNA, 25 bp, Artificial
  Probe
tctgccgaagcgtccgcaccgtgaa

SEQ ID NO: 345149 - DNA, 25 bp, Artificial
  Probe
agggatgccaccacaacgcacgggg

SEQ ID NO: 345150 - DNA, 25 bp, Artificial
  Probe
tgtacttcatctgcttcgctcccag

SEQ ID NO: 345151 - DNA, 25 bp, Artificial
  Probe
tgtgtgtgtgttagggatgccacca

SEQ ID NO: 345152 - DNA, 25 bp, Artificial
  Probe
gtctactactttgtttcgaaagatt

SEQ ID NO: 345153 - DNA, 25 bp, Artificial
  Probe
tttgtctactactttgtttcgaaag

SEQ ID NO: 345154 - DNA, 25 bp, Artificial
  Probe
aaagccagaggcagagccacgtcta

SEQ ID NO: 345155 - DNA, 25 bp, Artificial
  Probe
tcccagcaacgtgctgctcgtcgtg

SEQ ID NO: 345156 - DNA, 25 bp, Artificial
  Probe
cgaagcgtccgcaccgtgaaacgca

SEQ ID NO: 345157 - DNA, 25 bp, Artificial
  Probe
ttaaaacctcctactgagctgggtc

SEQ ID NO: 345158 - DNA, 25 bp, Artificial
  Probe
tcatcaaaagccagaggcagagcca

SEQ ID NO: 345159 - DNA, 25 bp, Artificial
  Probe
ctactttgtttcgaaagatttcagg

SEQ ID NO: 345160 - DNA, 25 bp, Artificial
  Probe
ccgtgaaacgcatgcagatatcgct

SEQ ID NO: 345161 - DNA, 25 bp, Artificial
  Probe
atggagccagcttgatgatgatgct

SEQ ID NO: 345162 - DNA, 25 bp, Artificial
  Probe
ttcctcatcaaaagccagaggcaga

SEQ ID NO: 345163 - DNA, 25 bp, Artificial
  Probe
accgtgaaacgcatgcagatatcgc

SEQ ID NO: 345164 - DNA, 25 bp, Artificial
  Probe
atcaaaagccagaggcagagccacg

SEQ ID NO: 345165 - DNA, 25 bp, Artificial
  Probe
gtttcgaaagatttcagggaccagg

SEQ ID NO: 345166 - DNA, 25 bp, Artificial
  Probe
agccagaggcagagccacgtctacg

SEQ ID NO: 345167 - DNA, 25 bp, Artificial
  Probe
caattgtgcgtgcatgcgtgtgtgt

SEQ ID NO: 345168 - DNA, 25 bp, Artificial
  Probe
ggaaatccagctcttactcctccag

SEQ ID NO: 345169 - DNA, 25 bp, Artificial
  Probe
agggaccaggccagaaacgcgctcc

SEQ ID NO: 345170 - DNA, 25 bp, Artificial
  Probe
aacgcatgcagatatcgctcacctc

SEQ ID NO: 345171 - DNA, 25 bp, Artificial
  Probe
gttctccaggaaatccagctcttac

SEQ ID NO: 345172 - DNA, 25 bp, Artificial
  Probe
gttagggatgccaccacaacgcacg

SEQ ID NO: 345173 - DNA, 25 bp, Artificial
  Probe
gcagatatcgctcacctccaacaag

SEQ ID NO: 345174 - DNA, 25 bp, Artificial
  Probe
tcatcatcacggtgctgtccatgta

SEQ ID NO: 345175 - DNA, 25 bp, Artificial
  Probe
tatggagccagcttgatgatgatgc

SEQ ID NO: 345176 - DNA, 25 bp, Artificial
  Probe
tgaaacgcatgcagatatcgctcac

SEQ ID NO: 345177 - DNA, 25 bp, Artificial
  Probe
gggaccaggccagaaacgcgctcct

SEQ ID NO: 345178 - DNA, 25 bp, Artificial
  Probe
tgcaattgtgcgtgcatgcgtgtgt

SEQ ID NO: 345179 - DNA, 25 bp, Artificial
  Probe
ttatttcctcatcaaaagccagagg

SEQ ID NO: 345180 - DNA, 25 bp, Artificial
  Probe
actactttgtttcgaaagatttcag

SEQ ID NO: 345181 - DNA, 25 bp, Artificial
  Probe
gcgtccgcaccgtgaaacgcatgca

SEQ ID NO: 345182 - DNA, 25 bp, Artificial
  Probe
accagtgttaaaacctcctactgag

SEQ ID NO: 345183 - DNA, 25 bp, Artificial
  Probe
aagatttcagggaccaggccagaaa

SEQ ID NO: 345184 - DNA, 25 bp, Artificial
  Probe
ccgcaccgtgaaacgcatgcagata

SEQ ID NO: 345185 - DNA, 25 bp, Artificial
  Probe
gctcgtcgtgcattatttcctcatc

SEQ ID NO: 345186 - DNA, 25 bp, Artificial
  Probe
atccgcctcatcatcacggtgctgt

SEQ ID NO: 345187 - DNA, 25 bp, Artificial
  Probe
atttcagggaccaggccagaaacgc

SEQ ID NO: 345188 - DNA, 25 bp, Artificial
  Probe
ttgtttcgaaagatttcagggacca

SEQ ID NO: 345189 - DNA, 25 bp, Artificial
  Probe
aacgcacggggctgtcatttccatt

SEQ ID NO: 345190 - DNA, 25 bp, Artificial
  Probe
agaacatatcccagatctcccggca

SEQ ID NO: 345191 - DNA, 25 bp, Artificial
  Probe
ataccccagtcttgccaacaggact

SEQ ID NO: 345192 - DNA, 25 bp, Artificial
  Probe
gcaaagccaggcttctactgcccag

SEQ ID NO: 345193 - DNA, 25 bp, Artificial
  Probe
atatcccagatctcccggcagctga

SEQ ID NO: 345194 - DNA, 25 bp, Artificial
  Probe
ggtcccagtggcagagccagcatca

SEQ ID NO: 345195 - DNA, 25 bp, Artificial
  Probe
tccattttctgagtagcttcaggca

SEQ ID NO: 345196 - DNA, 25 bp, Artificial
  Probe
gctgacctgggcatgttccctccat

SEQ ID NO: 345197 - DNA, 25 bp, Artificial
  Probe
cggccctcagaggtctggtcccagt

SEQ ID NO: 345198 - DNA, 25 bp, Artificial
  Probe
gcggaaacgcataccccagtcttgc

SEQ ID NO: 345199 - DNA, 25 bp, Artificial
  Probe
ctccagggtttgctgagagtggaca

SEQ ID NO: 345200 - DNA, 25 bp, Artificial
  Probe
agatctcccggcagctgaaccaggg

SEQ ID NO: 345201 - DNA, 25 bp, Artificial
  Probe
ccgacgcaggggactggcaactata

SEQ ID NO: 345202 - DNA, 25 bp, Artificial
  Probe
gggccagaacatatcccagatctcc

SEQ ID NO: 345203 - DNA, 25 bp, Artificial
  Probe
caagacgcagtcatctgccttcgga

SEQ ID NO: 345204 - DNA, 25 bp, Artificial
  Probe
tcccagtggcagagccagcatcacg

SEQ ID NO: 345205 - DNA, 25 bp, Artificial
  Probe
ccagcaagacgcagtcatctgcctt

SEQ ID NO: 345206 - DNA, 25 bp, Artificial
  Probe
acagcagagcggtgagcagcactcc

SEQ ID NO: 345207 - DNA, 25 bp, Artificial
  Probe
gtagcttcaggcaaagccaggcttc

SEQ ID NO: 345208 - DNA, 25 bp, Artificial
  Probe
agcagcctggccagactgaagtgtt

SEQ ID NO: 345209 - DNA, 25 bp, Artificial
  Probe
atcacggacagcagagcggtgagca

SEQ ID NO: 345210 - DNA, 25 bp, Artificial
  Probe
caacaggactccagggtttgctgag

SEQ ID NO: 345211 - DNA, 25 bp, Artificial
  Probe
gcagcccagcaagacgcagtcatct

SEQ ID NO: 345212 - DNA, 25 bp, Artificial
  Probe
ctgcccaggcgctattatcatacca

SEQ ID NO: 345213 - DNA, 25 bp, Artificial
  Probe
agagccagcatcacggacagcagag

SEQ ID NO: 345214 - DNA, 25 bp, Artificial
  Probe
tccaggacatgctacccatgccggg

SEQ ID NO: 345215 - DNA, 25 bp, Artificial
  Probe
cgacgcaggggactggcaactataa

SEQ ID NO: 345216 - DNA, 25 bp, Artificial
  Probe
aagcggaaacgcataccccagtctt

SEQ ID NO: 345217 - DNA, 25 bp, Artificial
  Probe
gactggcaactataacatcgaggac

SEQ ID NO: 345218 - DNA, 25 bp, Artificial
  Probe
tcagaggtctggtcccagtggcaga

SEQ ID NO: 345219 - DNA, 25 bp, Artificial
  Probe
ccagggcagcccagcaagacgcagt

SEQ ID NO: 345220 - DNA, 25 bp, Artificial
  Probe
ccagtcttgccaacaggactccagg

SEQ ID NO: 345221 - DNA, 25 bp, Artificial
  Probe
gagggcaattccagggccggccctc

SEQ ID NO: 345222 - DNA, 25 bp, Artificial
  Probe
ccttcggaattggatcaagccaccc

SEQ ID NO: 345223 - DNA, 25 bp, Artificial
  Probe
tcaggcaaagccaggcttctactgc

SEQ ID NO: 345224 - DNA, 25 bp, Artificial
  Probe
cagtcatctgccttcggaattggat

SEQ ID NO: 345225 - DNA, 25 bp, Artificial
  Probe
ccatagatgcccatgttcaaagagt

SEQ ID NO: 345226 - DNA, 25 bp, Artificial
  Probe
aagccaggcttctactgcccaggcg

SEQ ID NO: 345227 - DNA, 25 bp, Artificial
  Probe
tttctgagtagcttcaggcaaagcc

SEQ ID NO: 345228 - DNA, 25 bp, Artificial
  Probe
cagcagagcggtgagcagcactccc

SEQ ID NO: 345229 - DNA, 25 bp, Artificial
  Probe
gggcatgttccctccattttctgag

SEQ ID NO: 345230 - DNA, 25 bp, Artificial
  Probe
cttctactgcccaggcgctattatc

SEQ ID NO: 345231 - DNA, 25 bp, Artificial
  Probe
actttgctgacctgggcatgttccc

SEQ ID NO: 345232 - DNA, 25 bp, Artificial
  Probe
gcataccccagtcttgccaacagga

SEQ ID NO: 345233 - DNA, 25 bp, Artificial
  Probe
actccagggtttgctgagagtggac

SEQ ID NO: 345234 - DNA, 25 bp, Artificial
  Probe
cccggcagctgaaccagggccaggt

SEQ ID NO: 345235 - DNA, 25 bp, Artificial
  Probe
gcgctattatcataccatagatgcc

SEQ ID NO: 345236 - DNA, 25 bp, Artificial
  Probe
agggctcagcgtatatcgaaagcag

SEQ ID NO: 345237 - DNA, 25 bp, Artificial
  Probe
tgagtcacccctttcggggtctcgg

SEQ ID NO: 345238 - DNA, 25 bp, Artificial
  Probe
aggctcccttgactttcaacttagg

SEQ ID NO: 345239 - DNA, 25 bp, Artificial
  Probe
ctgggtctccgcagtacctggatcc

SEQ ID NO: 345240 - DNA, 25 bp, Artificial
  Probe
ctgcccttggctaccagggatagtc

SEQ ID NO: 345241 - DNA, 25 bp, Artificial
  Probe
accagggatagtccaggagttttga

SEQ ID NO: 345242 - DNA, 25 bp, Artificial
  Probe
tcacggttgagtcacccctttcggg

SEQ ID NO: 345243 - DNA, 25 bp, Artificial
  Probe
gaacagcccgggagcctgggtctcc

SEQ ID NO: 345244 - DNA, 25 bp, Artificial
  Probe
aacttaggtccctccaacagcgcaa

SEQ ID NO: 345245 - DNA, 25 bp, Artificial
  Probe
gtaaggctcccttgactttcaactt

SEQ ID NO: 345246 - DNA, 25 bp, Artificial
  Probe
tgggtctccgcagtacctggatccg

SEQ ID NO: 345247 - DNA, 25 bp, Artificial
  Probe
gggtctccgcagtacctggatccgc

SEQ ID NO: 345248 - DNA, 25 bp, Artificial
  Probe
actcgctccgtctgatcgctcgtgt

SEQ ID NO: 345249 - DNA, 25 bp, Artificial
  Probe
catcctctgctgagggctcagcgta

SEQ ID NO: 345250 - DNA, 25 bp, Artificial
  Probe
gggctttcgaactgcccttggctac

SEQ ID NO: 345251 - DNA, 25 bp, Artificial
  Probe
gatagtccaggagttttgatacatc

SEQ ID NO: 345252 - DNA, 25 bp, Artificial
  Probe
gcggaccccggcagcctgggtacaa

SEQ ID NO: 345253 - DNA, 25 bp, Artificial
  Probe
tcgaactgcccttggctaccaggga

SEQ ID NO: 345254 - DNA, 25 bp, Artificial
  Probe
caccgggtgctcaggctgggctttc

SEQ ID NO: 345255 - DNA, 25 bp, Artificial
  Probe
gttgaatcacggttgagtcacccct

SEQ ID NO: 345256 - DNA, 25 bp, Artificial
  Probe
tctgctgagggctcagcgtatatcg

SEQ ID NO: 345257 - DNA, 25 bp, Artificial
  Probe
gctcccttgactttcaacttaggtc

SEQ ID NO: 345258 - DNA, 25 bp, Artificial
  Probe
gggtacaaccggtacccatcactcg

SEQ ID NO: 345259 - DNA, 25 bp, Artificial
  Probe
ccagcaaaccacctagggtggtcac

SEQ ID NO: 345260 - DNA, 25 bp, Artificial
  Probe
gcagcctgggtacaaccggtaccca

SEQ ID NO: 345261 - DNA, 25 bp, Artificial
  Probe
ctcaggctgggctttcgaactgccc

SEQ ID NO: 345262 - DNA, 25 bp, Artificial
  Probe
cgctccgtctgatcgctcgtgtagc

SEQ ID NO: 345263 - DNA, 25 bp, Artificial
  Probe
gagttttgatacatcctctgctgag

SEQ ID NO: 345264 - DNA, 25 bp, Artificial
  Probe
aaggctcccttgactttcaacttag

SEQ ID NO: 345265 - DNA, 25 bp, Artificial
  Probe
gtcacccagggaacagcccgggagc

SEQ ID NO: 345266 - DNA, 25 bp, Artificial
  Probe
tgctgagggctcagcgtatatcgaa

SEQ ID NO: 345267 - DNA, 25 bp, Artificial
  Probe
gcccttggctaccagggatagtcca

SEQ ID NO: 345268 - DNA, 25 bp, Artificial
  Probe
tggtgttgaatcacggttgagtcac

SEQ ID NO: 345269 - DNA, 25 bp, Artificial
  Probe
cccagcaaaccacctagggtggtca

SEQ ID NO: 345270 - DNA, 25 bp, Artificial
  Probe
gggagcctgggtctccgcagtacct

SEQ ID NO: 345271 - DNA, 25 bp, Artificial
  Probe
tccccagcaaaccacctagggtggt

SEQ ID NO: 345272 - DNA, 25 bp, Artificial
  Probe
agtaaggctcccttgactttcaact

SEQ ID NO: 345273 - DNA, 25 bp, Artificial
  Probe
tggctaccagggatagtccaggagt

SEQ ID NO: 345274 - DNA, 25 bp, Artificial
  Probe
tcagcgtatatcgaaagcagagtga

SEQ ID NO: 345275 - DNA, 25 bp, Artificial
  Probe
ttgagtcacccctttcggggtctcg

SEQ ID NO: 345276 - DNA, 25 bp, Artificial
  Probe
cctagggtggtcacccagggaacag

SEQ ID NO: 345277 - DNA, 25 bp, Artificial
  Probe
tagtccaggagttttgatacatcct

SEQ ID NO: 345278 - DNA, 25 bp, Artificial
  Probe
cagcctgggtacaaccggtacccat

SEQ ID NO: 345279 - DNA, 25 bp, Artificial
  Probe
ttcgaactgcccttggctaccaggg

SEQ ID NO: 345280 - DNA, 25 bp, Artificial
  Probe
ccgtctgatcgctcgtgtagcgtag

SEQ ID NO: 345281 - DNA, 25 bp, Artificial
  Probe
gagggctcagcgtatatcgaaagca

SEQ ID NO: 345282 - DNA, 25 bp, Artificial
  Probe
agttagtgtcttaatctcttgacga

SEQ ID NO: 345283 - DNA, 25 bp, Artificial
  Probe
tggcagcaaccatggggccacattg

SEQ ID NO: 345284 - DNA, 25 bp, Artificial
  Probe
gtcacagtttctaagtgataccttc

SEQ ID NO: 345285 - DNA, 25 bp, Artificial
  Probe
tttattccgtgctgggatctgagtt

SEQ ID NO: 345286 - DNA, 25 bp, Artificial
  Probe
agttgctgccgtctgggctatggct

SEQ ID NO: 345287 - DNA, 25 bp, Artificial
  Probe
tatatcctgttagaataagcttggc

SEQ ID NO: 345288 - DNA, 25 bp, Artificial
  Probe
gaattcaaaccattaacaatgtagg

SEQ ID NO: 345289 - DNA, 25 bp, Artificial
  Probe
cagttgctgccgtctgggctatggc

SEQ ID NO: 345290 - DNA, 25 bp, Artificial
  Probe
gggccacattgaattatctacatct

SEQ ID NO: 345291 - DNA, 25 bp, Artificial
  Probe
agtgagctgaagctttcctatgcgg

SEQ ID NO: 345292 - DNA, 25 bp, Artificial
  Probe
gttgttcttttattccgtgctggga

SEQ ID NO: 345293 - DNA, 25 bp, Artificial
  Probe
aaagcagcagacaccaaacacctgc

SEQ ID NO: 345294 - DNA, 25 bp, Artificial
  Probe
ttccgtgctgggatctgagttgata

SEQ ID NO: 345295 - DNA, 25 bp, Artificial
  Probe
gccgtgcctctggtgtatgggtaac

SEQ ID NO: 345296 - DNA, 25 bp, Artificial
  Probe
agcagtggcatctggccggtcagtt

SEQ ID NO: 345297 - DNA, 25 bp, Artificial
  Probe
gccgtctgggctatggctgccctgc

SEQ ID NO: 345298 - DNA, 25 bp, Artificial
  Probe
tgaagctttcctatgcggcctctcc

SEQ ID NO: 345299 - DNA, 25 bp, Artificial
  Probe
gctaaatgtatccatttaaagctgt

SEQ ID NO: 345300 - DNA, 25 bp, Artificial
  Probe
aaactcagagtacttctagagcgcc

SEQ ID NO: 345301 - DNA, 25 bp, Artificial
  Probe
cagcagggccacacgggccatttca

SEQ ID NO: 345302 - DNA, 25 bp, Artificial
  Probe
catctctggagaactgtgagagaag

SEQ ID NO: 345303 - DNA, 25 bp, Artificial
  Probe
gccacacgggccatttcaacagtca

SEQ ID NO: 345304 - DNA, 25 bp, Artificial
  Probe
gcctctggtgtatgggtaacacctg

SEQ ID NO: 345305 - DNA, 25 bp, Artificial
  Probe
gtgtcttaatctcttgacgacctca

SEQ ID NO: 345306 - DNA, 25 bp, Artificial
  Probe
accattaacaatgtagggaacagac

SEQ ID NO: 345307 - DNA, 25 bp, Artificial
  Probe
tgctgggatctgagttgatatatcc

SEQ ID NO: 345308 - DNA, 25 bp, Artificial
  Probe
aaccatggggccacattgaattatc

SEQ ID NO: 345309 - DNA, 25 bp, Artificial
  Probe
tgccgtctgggctatggctgccctg

SEQ ID NO: 345310 - DNA, 25 bp, Artificial
  Probe
tatgggtaacacctggttgttcttt

SEQ ID NO: 345311 - DNA, 25 bp, Artificial
  Probe
gtcagcagggccacacgggccattt

SEQ ID NO: 345312 - DNA, 25 bp, Artificial
  Probe
tctcccagttgctgccgtctgggct

SEQ ID NO: 345313 - DNA, 25 bp, Artificial
  Probe
tcttttattccgtgctgggatctga

SEQ ID NO: 345314 - DNA, 25 bp, Artificial
  Probe
ttctaagtgataccttcatctctgg

SEQ ID NO: 345315 - DNA, 25 bp, Artificial
  Probe
ggaacagacaggagcagtggcatct

SEQ ID NO: 345316 - DNA, 25 bp, Artificial
  Probe
cagacaggagcagtggcatctggcc

SEQ ID NO: 345317 - DNA, 25 bp, Artificial
  Probe
ctgcagtgagctgaagctttcctat

SEQ ID NO: 345318 - DNA, 25 bp, Artificial
  Probe
atcctgttagaataagcttggcatg

SEQ ID NO: 345319 - DNA, 25 bp, Artificial
  Probe
aactgtgagagaagggccgtgcctc

SEQ ID NO: 345320 - DNA, 25 bp, Artificial
  Probe
tttcaacagtcacagtttctaagtg

SEQ ID NO: 345321 - DNA, 25 bp, Artificial
  Probe
ctaaatgtatccatttaaagctgtg

SEQ ID NO: 345322 - DNA, 25 bp, Artificial
  Probe
cacctggttgttcttttattccgtg

SEQ ID NO: 345323 - DNA, 25 bp, Artificial
  Probe
cggtcagtttcattttcctgttact

SEQ ID NO: 345324 - DNA, 25 bp, Artificial
  Probe
ggttgttcttttattccgtgctggg

SEQ ID NO: 345325 - DNA, 25 bp, Artificial
  Probe
gcatctggccggtcagtttcatttt

SEQ ID NO: 345326 - DNA, 25 bp, Artificial
  Probe
ggccatttcaacagtcacagtttct

SEQ ID NO: 345327 - DNA, 25 bp, Artificial
  Probe
tgtatgggtaacacctggttgttct

SEQ ID NO: 345328 - DNA, 25 bp, Artificial
  Probe
gtatttgcagcatggtgacatggac

SEQ ID NO: 345329 - DNA, 25 bp, Artificial
  Probe
ttttactacaatatggctgctcagt

SEQ ID NO: 345330 - DNA, 25 bp, Artificial
  Probe
atatggctgctcagtgctgtgttgt

SEQ ID NO: 345331 - DNA, 25 bp, Artificial
  Probe
gaatgcctgacctgaatagggattg

SEQ ID NO: 345332 - DNA, 25 bp, Artificial
  Probe
attttactacaatatggctgctcag

SEQ ID NO: 345333 - DNA, 25 bp, Artificial
  Probe
atagccattaagcaggattttacta

SEQ ID NO: 345334 - DNA, 25 bp, Artificial
  Probe
gacgcttggtctcatacatgataga

SEQ ID NO: 345335 - DNA, 25 bp, Artificial
  Probe
gtttcttaactatacctgtctgctg

SEQ ID NO: 345336 - DNA, 25 bp, Artificial
  Probe
taaatgaatgcctgacctgaatagg

SEQ ID NO: 345337 - DNA, 25 bp, Artificial
  Probe
ctaattatagccattaagcaggatt

SEQ ID NO: 345338 - DNA, 25 bp, Artificial
  Probe
tacctgtctgctgtctacctgtagc

SEQ ID NO: 345339 - DNA, 25 bp, Artificial
  Probe
agccagggacgcttggtctcataca

SEQ ID NO: 345340 - DNA, 25 bp, Artificial
  Probe
cagggacgcttggtctcatacatga

SEQ ID NO: 345341 - DNA, 25 bp, Artificial
  Probe
ttatagccattaagcaggattttac

SEQ ID NO: 345342 - DNA, 25 bp, Artificial
  Probe
agccattaagcaggattttactaca

SEQ ID NO: 345343 - DNA, 25 bp, Artificial
  Probe
tgtctacctgtagcagccagggacg

SEQ ID NO: 345344 - DNA, 25 bp, Artificial
  Probe
cctgacctgaatagggattgctgaa

SEQ ID NO: 345345 - DNA, 25 bp, Artificial
  Probe
tagcagccagggacgcttggtctca

SEQ ID NO: 345346 - DNA, 25 bp, Artificial
  Probe
aaatgaatgcctgacctgaataggg

SEQ ID NO: 345347 - DNA, 25 bp, Artificial
  Probe
aatgaatgcctgacctgaataggga

SEQ ID NO: 345348 - DNA, 25 bp, Artificial
  Probe
cctgtagcagccagggacgcttggt

SEQ ID NO: 345349 - DNA, 25 bp, Artificial
  Probe
caatatggctgctcagtgctgtgtt

SEQ ID NO: 345350 - DNA, 25 bp, Artificial
  Probe
atggctgctcagtgctgtgttgtcg

SEQ ID NO: 345351 - DNA, 25 bp, Artificial
  Probe
tttactacaatatggctgctcagtg

SEQ ID NO: 345352 - DNA, 25 bp, Artificial
  Probe
ggctgctcagtgctgtgttgtcgtt

SEQ ID NO: 345353 - DNA, 25 bp, Artificial
  Probe
tgaatgcctgacctgaatagggatt

SEQ ID NO: 345354 - DNA, 25 bp, Artificial
  Probe
tggctgctcagtgctgtgttgtcgt

SEQ ID NO: 345355 - DNA, 25 bp, Artificial
  Probe
tctacctgtagcagccagggacgct

SEQ ID NO: 345356 - DNA, 25 bp, Artificial
  Probe
gctgtctacctgtagcagccaggga

SEQ ID NO: 345357 - DNA, 25 bp, Artificial
  Probe
atttgcagcatggtgacatggacca

SEQ ID NO: 345358 - DNA, 25 bp, Artificial
  Probe
cctgtctgctgtctacctgtagcag

SEQ ID NO: 345359 - DNA, 25 bp, Artificial
  Probe
gggacgcttggtctcatacatgata

SEQ ID NO: 345360 - DNA, 25 bp, Artificial
  Probe
cagtgctgtgttgtcgttccccctg

SEQ ID NO: 345361 - DNA, 25 bp, Artificial
  Probe
tatacctgtctgctgtctacctgta

SEQ ID NO: 345362 - DNA, 25 bp, Artificial
  Probe
aggattttactacaatatggctgct

SEQ ID NO: 345363 - DNA, 25 bp, Artificial
  Probe
ctgtctgctgtctacctgtagcagc

SEQ ID NO: 345364 - DNA, 25 bp, Artificial
  Probe
atgcctgacctgaatagggattgct

SEQ ID NO: 345365 - DNA, 25 bp, Artificial
  Probe
actatacctgtctgctgtctacctg

SEQ ID NO: 345366 - DNA, 25 bp, Artificial
  Probe
cgcttggtctcatacatgatagaaa

SEQ ID NO: 345367 - DNA, 25 bp, Artificial
  Probe
gctcagtgctgtgttgtcgttcccc

SEQ ID NO: 345368 - DNA, 25 bp, Artificial
  Probe
tacaatatggctgctcagtgctgtg

SEQ ID NO: 345369 - DNA, 25 bp, Artificial
  Probe
ggattttactacaatatggctgctc

SEQ ID NO: 345370 - DNA, 25 bp, Artificial
  Probe
aatgctaattatagccattaagcag

SEQ ID NO: 345371 - DNA, 25 bp, Artificial
  Probe
gccagggacgcttggtctcatacat

SEQ ID NO: 345372 - DNA, 25 bp, Artificial
  Probe
ctacaatatggctgctcagtgctgt

SEQ ID NO: 345373 - DNA, 25 bp, Artificial
  Probe
gcctgacctgaatagggattgctga

SEQ ID NO: 345374 - DNA, 25 bp, Artificial
  Probe
tgttctcctggctgcctttccatgt

SEQ ID NO: 345375 - DNA, 25 bp, Artificial
  Probe
atgtggctcagctctggcatcccca

SEQ ID NO: 345376 - DNA, 25 bp, Artificial
  Probe
gttcctgttctcctggctgcctttc

SEQ ID NO: 345377 - DNA, 25 bp, Artificial
  Probe
ccccatgagcaagagtacaggaaga

SEQ ID NO: 345378 - DNA, 25 bp, Artificial
  Probe
tctgctcttcaaccttgtgttcctg

SEQ ID NO: 345379 - DNA, 25 bp, Artificial
  Probe
tgtcctcaatgaaatgttaccgcag

SEQ ID NO: 345380 - DNA, 25 bp, Artificial
  Probe
catcacgaccagttcaaggatggcc

SEQ ID NO: 345381 - DNA, 25 bp, Artificial
  Probe
ctgctcttcaaccttgtgttcctgt

SEQ ID NO: 345382 - DNA, 25 bp, Artificial
  Probe
tttctgcatgtcctcaatgaaatgt

SEQ ID NO: 345383 - DNA, 25 bp, Artificial
  Probe
ctgcatgtcctcaatgaaatgttac

SEQ ID NO: 345384 - DNA, 25 bp, Artificial
  Probe
tttccatgtggctcagctctggcat

SEQ ID NO: 345385 - DNA, 25 bp, Artificial
  Probe
tccccaggaccaaggtgaagacggt

SEQ ID NO: 345386 - DNA, 25 bp, Artificial
  Probe
aacattgtccccaggaccaaggtga

SEQ ID NO: 345387 - DNA, 25 bp, Artificial
  Probe
aagatgtttctgctcttcaaccttg

SEQ ID NO: 345388 - DNA, 25 bp, Artificial
  Probe
gtttctgctcttcaaccttgtgttc

SEQ ID NO: 345389 - DNA, 25 bp, Artificial
  Probe
tccccatgagcaagagtacaggaag

SEQ ID NO: 345390 - DNA, 25 bp, Artificial
  Probe
gtggctcagctctggcatccccatg

SEQ ID NO: 345391 - DNA, 25 bp, Artificial
  Probe
tccatgtggctcagctctggcatcc

SEQ ID NO: 345392 - DNA, 25 bp, Artificial
  Probe
caatgaacattgtccccaggaccaa

SEQ ID NO: 345393 - DNA, 25 bp, Artificial
  Probe
tctggcatccccatgagcaagagta

SEQ ID NO: 345394 - DNA, 25 bp, Artificial
  Probe
tcctcaatgaaatgttaccgcagca

SEQ ID NO: 345395 - DNA, 25 bp, Artificial
  Probe
ctcaatgaaatgttaccgcagcaat

SEQ ID NO: 345396 - DNA, 25 bp, Artificial
  Probe
aagagactttctgcatgtcctcaat

SEQ ID NO: 345397 - DNA, 25 bp, Artificial
  Probe
acggtcaagatgtttctgctcttca

SEQ ID NO: 345398 - DNA, 25 bp, Artificial
  Probe
cctggctgcctttccatgtggctca

SEQ ID NO: 345399 - DNA, 25 bp, Artificial
  Probe
agacggtcaagatgtttctgctctt

SEQ ID NO: 345400 - DNA, 25 bp, Artificial
  Probe
acagcagtcacgtgggtgtctttca

SEQ ID NO: 345401 - DNA, 25 bp, Artificial
  Probe
ctcctggctgcctttccatgtggct

SEQ ID NO: 345402 - DNA, 25 bp, Artificial
  Probe
tcacagcagtcacgtgggtgtcttt

SEQ ID NO: 345403 - DNA, 25 bp, Artificial
  Probe
atgtttctgctcttcaaccttgtgt

SEQ ID NO: 345404 - DNA, 25 bp, Artificial
  Probe
gaaagagactttctgcatgtcctca

SEQ ID NO: 345405 - DNA, 25 bp, Artificial
  Probe
atttataacgccaattttcggagag

SEQ ID NO: 345406 - DNA, 25 bp, Artificial
  Probe
tgaaagagactttctgcatgtcctc

SEQ ID NO: 345407 - DNA, 25 bp, Artificial
  Probe
acaatgaacattgtccccaggacca

SEQ ID NO: 345408 - DNA, 25 bp, Artificial
  Probe
agatgtttctgctcttcaaccttgt

SEQ ID NO: 345409 - DNA, 25 bp, Artificial
  Probe
tgcctttccatgtggctcagctctg

SEQ ID NO: 345410 - DNA, 25 bp, Artificial
  Probe
caggaccaaggtgaagacggtcaag

SEQ ID NO: 345411 - DNA, 25 bp, Artificial
  Probe
cacgaccagttcaaggatggccaaa

SEQ ID NO: 345412 - DNA, 25 bp, Artificial
  Probe
ttgtgttcctgttctcctggctgcc

SEQ ID NO: 345413 - DNA, 25 bp, Artificial
  Probe
gactttctgcatgtcctcaatgaaa

SEQ ID NO: 345414 - DNA, 25 bp, Artificial
  Probe
caatgaaatgttaccgcagcaatgc

SEQ ID NO: 345415 - DNA, 25 bp, Artificial
  Probe
tcagctctggcatccccatgagcaa

SEQ ID NO: 345416 - DNA, 25 bp, Artificial
  Probe
cccaggaccaaggtgaagacggtca

SEQ ID NO: 345417 - DNA, 25 bp, Artificial
  Probe
ttcacagcagtcacgtgggtgtctt

SEQ ID NO: 345418 - DNA, 25 bp, Artificial
  Probe
tttataacgccaattttcggagagg

SEQ ID NO: 345419 - DNA, 25 bp, Artificial
  Probe
gtcaagatgtttctgctcttcaacc

SEQ ID NO: 345420 - DNA, 25 bp, Artificial
  Probe
ctcgcagccgaagaagataaagtga

SEQ ID NO: 345421 - DNA, 25 bp, Artificial
  Probe
gtgctgctccagcacggggccaaac

SEQ ID NO: 345422 - DNA, 25 bp, Artificial
  Probe
gcaaaaaccaagaatggctatacac

SEQ ID NO: 345423 - DNA, 25 bp, Artificial
  Probe
acagccctggcgattgctaagcggc

SEQ ID NO: 345424 - DNA, 25 bp, Artificial
  Probe
aacatccacatgtcaaccaagagtg

SEQ ID NO: 345425 - DNA, 25 bp, Artificial
  Probe
accctgaaggttgtgactgaagagg

SEQ ID NO: 345426 - DNA, 25 bp, Artificial
  Probe
ttctcaccaagcacggggctgatca

SEQ ID NO: 345427 - DNA, 25 bp, Artificial
  Probe
aagcggctgggctacatctccgtgg

SEQ ID NO: 345428 - DNA, 25 bp, Artificial
  Probe
atgttaacgcaaaaaccaagaatgg

SEQ ID NO: 345429 - DNA, 25 bp, Artificial
  Probe
aagcttggttacacacctttaatcg

SEQ ID NO: 345430 - DNA, 25 bp, Artificial
  Probe
cagcacggggccaaacctaatgcta

SEQ ID NO: 345431 - DNA, 25 bp, Artificial
  Probe
caggccagaagatctcaaggagctt

SEQ ID NO: 345432 - DNA, 25 bp, Artificial
  Probe
caagaatggctatacacctttgcac

SEQ ID NO: 345433 - DNA, 25 bp, Artificial
  Probe
cacctttaatcgtggcctgtcacta

SEQ ID NO: 345434 - DNA, 25 bp, Artificial
  Probe
cgactatcacggaaaaacataagct

SEQ ID NO: 345435 - DNA, 25 bp, Artificial
  Probe
aatggtcaactttcttctgaagcag

SEQ ID NO: 345436 - DNA, 25 bp, Artificial
  Probe
ggagccaacatccacatgtcaacca

SEQ ID NO: 345437 - DNA, 25 bp, Artificial
  Probe
aacataagctaaatgctcctgagac

SEQ ID NO: 345438 - DNA, 25 bp, Artificial
  Probe
gtaacacagccctggcgattgctaa

SEQ ID NO: 345439 - DNA, 25 bp, Artificial
  Probe
tgaatgttgccgacattctcaccaa

SEQ ID NO: 345440 - DNA, 25 bp, Artificial
  Probe
ttcttctgaagcagggagcaaatgt

SEQ ID NO: 345441 - DNA, 25 bp, Artificial
  Probe
aggccagaagatctcaaggagcttg

SEQ ID NO: 345442 - DNA, 25 bp, Artificial
  Probe
agccctggcgattgctaagcggctg

SEQ ID NO: 345443 - DNA, 25 bp, Artificial
  Probe
ggagaatatctcaggccagaagatc

SEQ ID NO: 345444 - DNA, 25 bp, Artificial
  Probe
caagcacggggctgatcaggatgcc

SEQ ID NO: 345445 - DNA, 25 bp, Artificial
  Probe
cggaagtcctggatgtttctgatga

SEQ ID NO: 345446 - DNA, 25 bp, Artificial
  Probe
tttacacctcgcagccgaagaagat

SEQ ID NO: 345447 - DNA, 25 bp, Artificial
  Probe
agaagggagccaacatccacatgtc

SEQ ID NO: 345448 - DNA, 25 bp, Artificial
  Probe
ttgctaagcggctgggctacatctc

SEQ ID NO: 345449 - DNA, 25 bp, Artificial
  Probe
gactatcacggaaaaacataagcta

SEQ ID NO: 345450 - DNA, 25 bp, Artificial
  Probe
tgaagaggtcaccaccactaccacg

SEQ ID NO: 345451 - DNA, 25 bp, Artificial
  Probe
agtggactcacctctttacacctcg

SEQ ID NO: 345452 - DNA, 25 bp, Artificial
  Probe
taatgctaccactgcgaatggtaac

SEQ ID NO: 345453 - DNA, 25 bp, Artificial
  Probe
atatctcaggccagaagatctcaag

SEQ ID NO: 345454 - DNA, 25 bp, Artificial
  Probe
cttggttctagagaagggagccaac

SEQ ID NO: 345455 - DNA, 25 bp, Artificial
  Probe
gcctacacaaagcttggttacacac

SEQ ID NO: 345456 - DNA, 25 bp, Artificial
  Probe
cgtggcctgtcactatggaaatgtg

SEQ ID NO: 345457 - DNA, 25 bp, Artificial
  Probe
gaagaggtcaccaccactaccacga

SEQ ID NO: 345458 - DNA, 25 bp, Artificial
  Probe
tttgcaccaagctgcccagcaggga

SEQ ID NO: 345459 - DNA, 25 bp, Artificial
  Probe
tcctgagacaatgacggaagtcctg

SEQ ID NO: 345460 - DNA, 25 bp, Artificial
  Probe
acctcgcagccgaagaagataaagt

SEQ ID NO: 345461 - DNA, 25 bp, Artificial
  Probe
gctaccactgcgaatggtaacacag

SEQ ID NO: 345462 - DNA, 25 bp, Artificial
  Probe
agacaatgacggaagtcctggatgt

SEQ ID NO: 345463 - DNA, 25 bp, Artificial
  Probe
gctatacacctttgcaccaagctgc

SEQ ID NO: 345464 - DNA, 25 bp, Artificial
  Probe
atcattaatgtgctgctccagcacg

SEQ ID NO: 345465 - DNA, 25 bp, Artificial
  Probe
cttggtgatgactcactacccagca

SEQ ID NO: 345466 - DNA, 25 bp, Artificial
  Probe
caaagacctgccagcggaaacacta

SEQ ID NO: 345467 - DNA, 25 bp, Artificial
  Probe
agctcaggggagaccacaagctgag

SEQ ID NO: 345468 - DNA, 25 bp, Artificial
  Probe
acttttcttcgcagctcaggggaga

SEQ ID NO: 345469 - DNA, 25 bp, Artificial
  Probe
ttttcttcgcagctcaggggagacc

SEQ ID NO: 345470 - DNA, 25 bp, Artificial
  Probe
tcttcgcagctcaggggagaccaca

SEQ ID NO: 345471 - DNA, 25 bp, Artificial
  Probe
ccaggctgggctacttcgtgaggcc

SEQ ID NO: 345472 - DNA, 25 bp, Artificial
  Probe
tgacatgggtatggtggtccaagct

SEQ ID NO: 345473 - DNA, 25 bp, Artificial
  Probe
ggtatggtggtccaagctcgtactc

SEQ ID NO: 345474 - DNA, 25 bp, Artificial
  Probe
cagctcaggggagaccacaagctga

SEQ ID NO: 345475 - DNA, 25 bp, Artificial
  Probe
gagctagacacacaggctcatgccc

SEQ ID NO: 345476 - DNA, 25 bp, Artificial
  Probe
gatatgagctagacacacaggctca

SEQ ID NO: 345477 - DNA, 25 bp, Artificial
  Probe
gtctggagccacctctgacatgggt

SEQ ID NO: 345478 - DNA, 25 bp, Artificial
  Probe
ggagaccacaagctgagaggcagat

SEQ ID NO: 345479 - DNA, 25 bp, Artificial
  Probe
ggatctcagtgcagaacagaagcat

SEQ ID NO: 345480 - DNA, 25 bp, Artificial
  Probe
acctgccagcggaaacactagagac

SEQ ID NO: 345481 - DNA, 25 bp, Artificial
  Probe
gaatacagtgggtctggagccacct

SEQ ID NO: 345482 - DNA, 25 bp, Artificial
  Probe
agaccacaagctgagaggcagattt

SEQ ID NO: 345483 - DNA, 25 bp, Artificial
  Probe
ccacctctgacatgggtatggtggt

SEQ ID NO: 345484 - DNA, 25 bp, Artificial
  Probe
gaggcagatttcaggccccaaacaa

SEQ ID NO: 345485 - DNA, 25 bp, Artificial
  Probe
gggtctggagccacctctgacatgg

SEQ ID NO: 345486 - DNA, 25 bp, Artificial
  Probe
tcccagaagcactgagagctccagg

SEQ ID NO: 345487 - DNA, 25 bp, Artificial
  Probe
ggtggtccaagctcgtactcccaga

SEQ ID NO: 345488 - DNA, 25 bp, Artificial
  Probe
tagcctaggccacttagcaagtttg

SEQ ID NO: 345489 - DNA, 25 bp, Artificial
  Probe
caggatctcagtgcagaacagaagc

SEQ ID NO: 345490 - DNA, 25 bp, Artificial
  Probe
acgtctcctttctggccctcagtag

SEQ ID NO: 345491 - DNA, 25 bp, Artificial
  Probe
gtccaagctcgtactcccagaagca

SEQ ID NO: 345492 - DNA, 25 bp, Artificial
  Probe
ggagccacctctgacatgggtatgg

SEQ ID NO: 345493 - DNA, 25 bp, Artificial
  Probe
ctgccagcggaaacactagagaccc

SEQ ID NO: 345494 - DNA, 25 bp, Artificial
  Probe
atgggtatggtggtccaagctcgta

SEQ ID NO: 345495 - DNA, 25 bp, Artificial
  Probe
agcaggacttttcttcgcagctcag

SEQ ID NO: 345496 - DNA, 25 bp, Artificial
  Probe
tcatgcccctcaggatctcagtgca

SEQ ID NO: 345497 - DNA, 25 bp, Artificial
  Probe
aagccaaagacctgccagcggaaac

SEQ ID NO: 345498 - DNA, 25 bp, Artificial
  Probe
gccagcggaaacactagagacccaa

SEQ ID NO: 345499 - DNA, 25 bp, Artificial
  Probe
aggctgggctacttcgtgaggccct

SEQ ID NO: 345500 - DNA, 25 bp, Artificial
  Probe
tctgacatgggtatggtggtccaag

SEQ ID NO: 345501 - DNA, 25 bp, Artificial
  Probe
ccacaagctgagaggcagatttcag

SEQ ID NO: 345502 - DNA, 25 bp, Artificial
  Probe
gcagctcaggggagaccacaagctg

SEQ ID NO: 345503 - DNA, 25 bp, Artificial
  Probe
cccagaagcactgagagctccaggc

SEQ ID NO: 345504 - DNA, 25 bp, Artificial
  Probe
gctcgtactcccagaagcactgaga

SEQ ID NO: 345505 - DNA, 25 bp, Artificial
  Probe
cagtgggtctggagccacctctgac

SEQ ID NO: 345506 - DNA, 25 bp, Artificial
  Probe
aagcaggacttttcttcgcagctca

SEQ ID NO: 345507 - DNA, 25 bp, Artificial
  Probe
ctctgacatgggtatggtggtccaa

SEQ ID NO: 345508 - DNA, 25 bp, Artificial
  Probe
cagaagcactgagagctccaggcta

SEQ ID NO: 345509 - DNA, 25 bp, Artificial
  Probe
ctggagccacctctgacatgggtat

SEQ ID NO: 345510 - DNA, 25 bp, Artificial
  Probe
acactccaaatgtggttgaggctca

SEQ ID NO: 345511 - DNA, 25 bp, Artificial
  Probe
cgtactcccagaagcactgagagct

SEQ ID NO: 345512 - DNA, 25 bp, Artificial
  Probe
cattcactgcagtgcaggcactggc

SEQ ID NO: 345513 - DNA, 25 bp, Artificial
  Probe
tgatgctgggcctgttgtcattcac

SEQ ID NO: 345514 - DNA, 25 bp, Artificial
  Probe
gagaggttactcagcccggcatgag

SEQ ID NO: 345515 - DNA, 25 bp, Artificial
  Probe
actcaagggccaaagcctgagatga

SEQ ID NO: 345516 - DNA, 25 bp, Artificial
  Probe
cacagcgtggccagagcatggtgtt

SEQ ID NO: 345517 - DNA, 25 bp, Artificial
  Probe
atccagaccgaggaacaatacatct

SEQ ID NO: 345518 - DNA, 25 bp, Artificial
  Probe
tgaggtccgccagttccacttcaca

SEQ ID NO: 345519 - DNA, 25 bp, Artificial
  Probe
tagacggctaccacaggccaaacca

SEQ ID NO: 345520 - DNA, 25 bp, Artificial
  Probe
catcttcatccacgatgcgattctg

SEQ ID NO: 345521 - DNA, 25 bp, Artificial
  Probe
aagacagagacactggctgagtacg

SEQ ID NO: 345522 - DNA, 25 bp, Artificial
  Probe
catagccactcaagggccaaagcct

SEQ ID NO: 345523 - DNA, 25 bp, Artificial
  Probe
ccgcacaggctgctacatcgtcttg

SEQ ID NO: 345524 - DNA, 25 bp, Artificial
  Probe
agtgtgtgagcgtcgtcatgatcag

SEQ ID NO: 345525 - DNA, 25 bp, Artificial
  Probe
aaaccacttcatagccactcaaggg

SEQ ID NO: 345526 - DNA, 25 bp, Artificial
  Probe
tgccacggggctgctggccttcatc

SEQ ID NO: 345527 - DNA, 25 bp, Artificial
  Probe
agcccggcatgaggtccgccagttc

SEQ ID NO: 345528 - DNA, 25 bp, Artificial
  Probe
tcagcccggcatgaggtccgccagt

SEQ ID NO: 345529 - DNA, 25 bp, Artificial
  Probe
tcatccggcgcgtgaaggcttccac

SEQ ID NO: 345530 - DNA, 25 bp, Artificial
  Probe
cttggatgtgatgctggacatggct

SEQ ID NO: 345531 - DNA, 25 bp, Artificial
  Probe
cagtgcaggcactggccgcacaggc

SEQ ID NO: 345532 - DNA, 25 bp, Artificial
  Probe
atccggcgcgtgaaggcttccactc

SEQ ID NO: 345533 - DNA, 25 bp, Artificial
  Probe
gttcccggcgggtcaacatgatcca

SEQ ID NO: 345534 - DNA, 25 bp, Artificial
  Probe
gatactggcccgagcactcagacat

SEQ ID NO: 345535 - DNA, 25 bp, Artificial
  Probe
agggtaaagtgctctcgatactggc

SEQ ID NO: 345536 - DNA, 25 bp, Artificial
  Probe
tgagatgatctacgacttctggcgc

SEQ ID NO: 345537 - DNA, 25 bp, Artificial
  Probe
atctacgacttctggcgcatggtgt

SEQ ID NO: 345538 - DNA, 25 bp, Artificial
  Probe
tggtgcgcacctttgccctggagcg

SEQ ID NO: 345539 - DNA, 25 bp, Artificial
  Probe
ctcagacatgtatggggacatcaag

SEQ ID NO: 345540 - DNA, 25 bp, Artificial
  Probe
tgctctcgatactggcccgagcact

SEQ ID NO: 345541 - DNA, 25 bp, Artificial
  Probe
tgggcctgttgtcattcactgcagt

SEQ ID NO: 345542 - DNA, 25 bp, Artificial
  Probe
tgttgtcattcactgcagtgcaggc

SEQ ID NO: 345543 - DNA, 25 bp, Artificial
  Probe
tgctggccttcatccggcgcgtgaa

SEQ ID NO: 345544 - DNA, 25 bp, Artificial
  Probe
gggacatcaagatcacgctggtaaa

SEQ ID NO: 345545 - DNA, 25 bp, Artificial
  Probe
catgatcagcaagctggtagaggtg

SEQ ID NO: 345546 - DNA, 25 bp, Artificial
  Probe
ctgctggccttcatccggcgcgtga

SEQ ID NO: 345547 - DNA, 25 bp, Artificial
  Probe
agacagagacactggctgagtacgt

SEQ ID NO: 345548 - DNA, 25 bp, Artificial
  Probe
gtcgtggacatttacaactgcgtga

SEQ ID NO: 345549 - DNA, 25 bp, Artificial
  Probe
tgttccctaccatgccacggggctg

SEQ ID NO: 345550 - DNA, 25 bp, Artificial
  Probe
tcacgctggtaaagacagagacact

SEQ ID NO: 345551 - DNA, 25 bp, Artificial
  Probe
cactccacctgatgctgggcctgtt

SEQ ID NO: 345552 - DNA, 25 bp, Artificial
  Probe
gcgtgaaggcttccactccacctga

SEQ ID NO: 345553 - DNA, 25 bp, Artificial
  Probe
atgccacggggctgctggccttcat

SEQ ID NO: 345554 - DNA, 25 bp, Artificial
  Probe
acactggctgagtacgtggtgcgca

SEQ ID NO: 345555 - DNA, 25 bp, Artificial
  Probe
ccctggagcggagaggttactcagc

SEQ ID NO: 345556 - DNA, 25 bp, Artificial
  Probe
tgaagaccctctgttcccggcgggt

SEQ ID NO: 345557 - DNA, 25 bp, Artificial
  Probe
gaaggcttccactccacctgatgct

SEQ ID NO: 345558 - DNA, 25 bp, Artificial
  Probe
ctggccggacgacacggagatctat

SEQ ID NO: 345559 - DNA, 25 bp, Artificial
  Probe
atactggccggacgacacggagatc

SEQ ID NO: 345560 - DNA, 25 bp, Artificial
  Probe
ttcgtccggcaggtcaaatccaaga

SEQ ID NO: 345561 - DNA, 25 bp, Artificial
  Probe
acgctaatagacacagagctgctgg

SEQ ID NO: 345562 - DNA, 25 bp, Artificial
  Probe
aacgcaggcccactggtggtacact

SEQ ID NO: 345563 - DNA, 25 bp, Artificial
  Probe
aatagacacagagctgctggcagaa

SEQ ID NO: 345564 - DNA, 25 bp, Artificial
  Probe
gtttcgtccggcaggtcaaatccaa

SEQ ID NO: 345565 - DNA, 25 bp, Artificial
  Probe
aatgctgcaaatactggccggacga

SEQ ID NO: 345566 - DNA, 25 bp, Artificial
  Probe
agtcacgctaatagacacagagctg

SEQ ID NO: 345567 - DNA, 25 bp, Artificial
  Probe
aatactggccggacgacacggagat

SEQ ID NO: 345568 - DNA, 25 bp, Artificial
  Probe
gacgacacggagatctataaagaca

SEQ ID NO: 345569 - DNA, 25 bp, Artificial
  Probe
tccggcaggtcaaatccaagagccc

SEQ ID NO: 345570 - DNA, 25 bp, Artificial
  Probe
actggccggacgacacggagatcta

SEQ ID NO: 345571 - DNA, 25 bp, Artificial
  Probe
gtccggcaggtcaaatccaagagcc

SEQ ID NO: 345572 - DNA, 25 bp, Artificial
  Probe
tggccggacgacacggagatctata

SEQ ID NO: 345573 - DNA, 25 bp, Artificial
  Probe
cgctaatagacacagagctgctggc

SEQ ID NO: 345574 - DNA, 25 bp, Artificial
  Probe
actggtggtacactgcagtgccggc

SEQ ID NO: 345575 - DNA, 25 bp, Artificial
  Probe
agagatcagacagttccacttcact

SEQ ID NO: 345576 - DNA, 25 bp, Artificial
  Probe
tcacgctaatagacacagagctgct

SEQ ID NO: 345577 - DNA, 25 bp, Artificial
  Probe
gacataaaagtcacgctaatagaca

SEQ ID NO: 345578 - DNA, 25 bp, Artificial
  Probe
cggacgacacggagatctataaaga

SEQ ID NO: 345579 - DNA, 25 bp, Artificial
  Probe
gtgataagaacctttgccgtggaga

SEQ ID NO: 345580 - DNA, 25 bp, Artificial
  Probe
cacttcactggctggccggatcacg

SEQ ID NO: 345581 - DNA, 25 bp, Artificial
  Probe
ccggcaggtcaaatccaagagccca

SEQ ID NO: 345582 - DNA, 25 bp, Artificial
  Probe
agacacagagctgctggcagaatat

SEQ ID NO: 345583 - DNA, 25 bp, Artificial
  Probe
tgtgataagaacctttgccgtggag

SEQ ID NO: 345584 - DNA, 25 bp, Artificial
  Probe
gtcacgctaatagacacagagctgc

SEQ ID NO: 345585 - DNA, 25 bp, Artificial
  Probe
caacgcaggcccactggtggtacac

SEQ ID NO: 345586 - DNA, 25 bp, Artificial
  Probe
cgtccggcaggtcaaatccaagagc

SEQ ID NO: 345587 - DNA, 25 bp, Artificial
  Probe
gataagaacctttgccgtggagaag

SEQ ID NO: 345588 - DNA, 25 bp, Artificial
  Probe
atagacacagagctgctggcagaat

SEQ ID NO: 345589 - DNA, 25 bp, Artificial
  Probe
ctaatagacacagagctgctggcag

SEQ ID NO: 345590 - DNA, 25 bp, Artificial
  Probe
aaatgctgcaaatactggccggacg

SEQ ID NO: 345591 - DNA, 25 bp, Artificial
  Probe
tttcgtccggcaggtcaaatccaag

SEQ ID NO: 345592 - DNA, 25 bp, Artificial
  Probe
tagacacagagctgctggcagaata

SEQ ID NO: 345593 - DNA, 25 bp, Artificial
  Probe
gctaatagacacagagctgctggca

SEQ ID NO: 345594 - DNA, 25 bp, Artificial
  Probe
agacataaaagtcacgctaatagac

SEQ ID NO: 345595 - DNA, 25 bp, Artificial
  Probe
aaagtcacgctaatagacacagagc

SEQ ID NO: 345596 - DNA, 25 bp, Artificial
  Probe
acacagagctgctggcagaatatgt

SEQ ID NO: 345597 - DNA, 25 bp, Artificial
  Probe
ctgttgggtttcgtccggcaggtca

SEQ ID NO: 345598 - DNA, 25 bp, Artificial
  Probe
tgttgggtttcgtccggcaggtcaa

SEQ ID NO: 345599 - DNA, 25 bp, Artificial
  Probe
tactggccggacgacacggagatct

SEQ ID NO: 345600 - DNA, 25 bp, Artificial
  Probe
tgctgcaaatactggccggacgaca

SEQ ID NO: 345601 - DNA, 25 bp, Artificial
  Probe
gacacagagctgctggcagaatatg

SEQ ID NO: 345602 - DNA, 25 bp, Artificial
  Probe
aagtcacgctaatagacacagagct

SEQ ID NO: 345603 - DNA, 25 bp, Artificial
  Probe
cggcaggtcaaatccaagagcccac

SEQ ID NO: 345604 - DNA, 25 bp, Artificial
  Probe
cagcggagcctctggctgtgcattg

SEQ ID NO: 345605 - DNA, 25 bp, Artificial
  Probe
aatccttcaggcaaatggacacagt

SEQ ID NO: 345606 - DNA, 25 bp, Artificial
  Probe
aaatgttacttataatcacggcgtt

SEQ ID NO: 345607 - DNA, 25 bp, Artificial
  Probe
tgtatcagttccagcggagcctctg

SEQ ID NO: 345608 - DNA, 25 bp, Artificial
  Probe
atattgtacgttagccttgaccacc

SEQ ID NO: 345609 - DNA, 25 bp, Artificial
  Probe
ggacacagttttgtgcatatggaac

SEQ ID NO: 345610 - DNA, 25 bp, Artificial
  Probe
ttacttataatcacggcgtttgcgc

SEQ ID NO: 345611 - DNA, 25 bp, Artificial
  Probe
ggcaaacatcagtgccaggtgtata

SEQ ID NO: 345612 - DNA, 25 bp, Artificial
  Probe
aatcacggcgtttgcgcggttctgt

SEQ ID NO: 345613 - DNA, 25 bp, Artificial
  Probe
acacagtagacctagttattcaacg

SEQ ID NO: 345614 - DNA, 25 bp, Artificial
  Probe
gaagagcttccagaacacagtagac

SEQ ID NO: 345615 - DNA, 25 bp, Artificial
  Probe
cctctggctgtgcattggtgcggtt

SEQ ID NO: 345616 - DNA, 25 bp, Artificial
  Probe
tacgttagccttgaccaccctggaa

SEQ ID NO: 345617 - DNA, 25 bp, Artificial
  Probe
ggataaaatccttcaggcaaatgga

SEQ ID NO: 345618 - DNA, 25 bp, Artificial
  Probe
cttcaggcaaatggacacagttttg

SEQ ID NO: 345619 - DNA, 25 bp, Artificial
  Probe
ttactactgaagagcttccagaaca

SEQ ID NO: 345620 - DNA, 25 bp, Artificial
  Probe
cttgaccaccctggaaaatgttact

SEQ ID NO: 345621 - DNA, 25 bp, Artificial
  Probe
caaattttgccagttgctgaccaat

SEQ ID NO: 345622 - DNA, 25 bp, Artificial
  Probe
ataatcacggcgtttgcgcggttct

SEQ ID NO: 345623 - DNA, 25 bp, Artificial
  Probe
ttacaagttatgctctccatcagag

SEQ ID NO: 345624 - DNA, 25 bp, Artificial
  Probe
tgtacgttagccttgaccaccctgg

SEQ ID NO: 345625 - DNA, 25 bp, Artificial
  Probe
tttctagcacaaggtatatgttggc

SEQ ID NO: 345626 - DNA, 25 bp, Artificial
  Probe
gaagcacacacaagctctttacaag

SEQ ID NO: 345627 - DNA, 25 bp, Artificial
  Probe
gtcttctcaaagtggatttcctatc

SEQ ID NO: 345628 - DNA, 25 bp, Artificial
  Probe
gttagccttgaccaccctggaaaat

SEQ ID NO: 345629 - DNA, 25 bp, Artificial
  Probe
ttagccttgaccaccctggaaaatg

SEQ ID NO: 345630 - DNA, 25 bp, Artificial
  Probe
aaagctgttttactactgaagagct

SEQ ID NO: 345631 - DNA, 25 bp, Artificial
  Probe
gctctccatcagagatactgcctca

SEQ ID NO: 345632 - DNA, 25 bp, Artificial
  Probe
aagttgtcttctcaaagtggatttc

SEQ ID NO: 345633 - DNA, 25 bp, Artificial
  Probe
tctggctgtgcattggtgcggtttt

SEQ ID NO: 345634 - DNA, 25 bp, Artificial
  Probe
ggagcacggaagcacacacaagctc

SEQ ID NO: 345635 - DNA, 25 bp, Artificial
  Probe
gttgctgaccaatggcaaacatcag

SEQ ID NO: 345636 - DNA, 25 bp, Artificial
  Probe
ctgaccaatggcaaacatcagtgcc

SEQ ID NO: 345637 - DNA, 25 bp, Artificial
  Probe
tcaaataagttgtcttctcaaagtg

SEQ ID NO: 345638 - DNA, 25 bp, Artificial
  Probe
caaatggacacagttttgtgcatat

SEQ ID NO: 345639 - DNA, 25 bp, Artificial
  Probe
ataatattgtacgttagccttgacc

SEQ ID NO: 345640 - DNA, 25 bp, Artificial
  Probe
acagttttgtgcatatggaacacga

SEQ ID NO: 345641 - DNA, 25 bp, Artificial
  Probe
tgccagttgctgaccaatggcaaac

SEQ ID NO: 345642 - DNA, 25 bp, Artificial
  Probe
tccagcggagcctctggctgtgcat

SEQ ID NO: 345643 - DNA, 25 bp, Artificial
  Probe
gcgtttgcgcggttctgtatcagtt

SEQ ID NO: 345644 - DNA, 25 bp, Artificial
  Probe
gagctcactgtctaaatgtttttat

SEQ ID NO: 345645 - DNA, 25 bp, Artificial
  Probe
gaccaccctggaaaatgttacttat

SEQ ID NO: 345646 - DNA, 25 bp, Artificial
  Probe
aacatcagtgccaggtgtataatat

SEQ ID NO: 345647 - DNA, 25 bp, Artificial
  Probe
tccaaccttctacagcccggggata

SEQ ID NO: 345648 - DNA, 25 bp, Artificial
  Probe
ttttgccagttgctgaccaatggca

SEQ ID NO: 345649 - DNA, 25 bp, Artificial
  Probe
caaataagttgtcttctcaaagtgg

SEQ ID NO: 345650 - DNA, 25 bp, Artificial
  Probe
tgactcatgcttaaaaaggatgcct

SEQ ID NO: 345651 - DNA, 25 bp, Artificial
  Probe
cagctgcctcacatggatccaatca

SEQ ID NO: 345652 - DNA, 25 bp, Artificial
  Probe
tacaaatcaagatcgttatcagagt

SEQ ID NO: 345653 - DNA, 25 bp, Artificial
  Probe
ttttgtgtgctctcgagatagtacc

SEQ ID NO: 345654 - DNA, 25 bp, Artificial
  Probe
ttctgtcggaacagtgttatgctac

SEQ ID NO: 345655 - DNA, 25 bp, Artificial
  Probe
ctactttgacggaaatgtatacaaa

SEQ ID NO: 345656 - DNA, 25 bp, Artificial
  Probe
ggtgactcatgcttaaaaaggatgc

SEQ ID NO: 345657 - DNA, 25 bp, Artificial
  Probe
gctcctgcacgagttggccaacctg

SEQ ID NO: 345658 - DNA, 25 bp, Artificial
  Probe
tgatgcttacgtgactactttgacg

SEQ ID NO: 345659 - DNA, 25 bp, Artificial
  Probe
ctgtcggaacagtgttatgctacaa

SEQ ID NO: 345660 - DNA, 25 bp, Artificial
  Probe
ctgtaacttaccagaaagtgttata

SEQ ID NO: 345661 - DNA, 25 bp, Artificial
  Probe
tgttatgctacaagacttcataatg

SEQ ID NO: 345662 - DNA, 25 bp, Artificial
  Probe
acatagtgtgatttcccatgtaatg

SEQ ID NO: 345663 - DNA, 25 bp, Artificial
  Probe
gtgctctcgagatagtacctgcaga

SEQ ID NO: 345664 - DNA, 25 bp, Artificial
  Probe
gaacagtgttatgctacaagacttc

SEQ ID NO: 345665 - DNA, 25 bp, Artificial
  Probe
tataagctgacatagtgtgatttcc

SEQ ID NO: 345666 - DNA, 25 bp, Artificial
  Probe
aggaattcaggtctgaacagctgct

SEQ ID NO: 345667 - DNA, 25 bp, Artificial
  Probe
cttgctgctgtaacttaccagaaag

SEQ ID NO: 345668 - DNA, 25 bp, Artificial
  Probe
taagctgacatagtgtgatttccca

SEQ ID NO: 345669 - DNA, 25 bp, Artificial
  Probe
atccagctgcctcacatggatccaa

SEQ ID NO: 345670 - DNA, 25 bp, Artificial
  Probe
caaatcaagatcgttatcagagtcc

SEQ ID NO: 345671 - DNA, 25 bp, Artificial
  Probe
ttggccaacctgagccagtccctga

SEQ ID NO: 345672 - DNA, 25 bp, Artificial
  Probe
aacagtgttatgctacaagacttca

SEQ ID NO: 345673 - DNA, 25 bp, Artificial
  Probe
gcttacgtgactactttgacggaaa

SEQ ID NO: 345674 - DNA, 25 bp, Artificial
  Probe
cgttttcatataagctgacatagtg

SEQ ID NO: 345675 - DNA, 25 bp, Artificial
  Probe
gcctcacatggatccaatcaatgaa

SEQ ID NO: 345676 - DNA, 25 bp, Artificial
  Probe
tccagctgcctcacatggatccaat

SEQ ID NO: 345677 - DNA, 25 bp, Artificial
  Probe
actcatgcttaaaaaggatgcctct

SEQ ID NO: 345678 - DNA, 25 bp, Artificial
  Probe
aaattttgatgcttacgtgactact

SEQ ID NO: 345679 - DNA, 25 bp, Artificial
  Probe
ttgtacgttttcatataagctgaca

SEQ ID NO: 345680 - DNA, 25 bp, Artificial
  Probe
atcaagatcgttatcagagtccaga

SEQ ID NO: 345681 - DNA, 25 bp, Artificial
  Probe
aagatcgttatcagagtccagaaaa

SEQ ID NO: 345682 - DNA, 25 bp, Artificial
  Probe
tacgttttcatataagctgacatag

SEQ ID NO: 345683 - DNA, 25 bp, Artificial
  Probe
ctcctgcacgagttggccaacctga

SEQ ID NO: 345684 - DNA, 25 bp, Artificial
  Probe
gtgttatgctacaagacttcataat

SEQ ID NO: 345685 - DNA, 25 bp, Artificial
  Probe
cgtgactactttgacggaaatgtat

SEQ ID NO: 345686 - DNA, 25 bp, Artificial
  Probe
cacgagttggccaacctgagccagt

SEQ ID NO: 345687 - DNA, 25 bp, Artificial
  Probe
gtcgctcctgcacgagttggccaac

SEQ ID NO: 345688 - DNA, 25 bp, Artificial
  Probe
gtatacaaatcaagatcgttatcag

SEQ ID NO: 345689 - DNA, 25 bp, Artificial
  Probe
tgtcggaacagtgttatgctacaag

SEQ ID NO: 345690 - DNA, 25 bp, Artificial
  Probe
tatttctgtcggaacagtgttatgc

SEQ ID NO: 345691 - DNA, 25 bp, Artificial
  Probe
atcgttatcagagtccagaaaataa

SEQ ID NO: 345692 - DNA, 25 bp, Artificial
  Probe
gtacgttttcatataagctgacata

SEQ ID NO: 345693 - DNA, 25 bp, Artificial
  Probe
atacaaatcaagatcgttatcagag

SEQ ID NO: 345694 - DNA, 25 bp, Artificial
  Probe
atttctgtcggaacagtgttatgct

SEQ ID NO: 345695 - DNA, 25 bp, Artificial
  Probe
tgtacgttttcatataagctgacat

SEQ ID NO: 345696 - DNA, 25 bp, Artificial
  Probe
ctaaatacaagtcctacaagtgtga

SEQ ID NO: 345697 - DNA, 25 bp, Artificial
  Probe
aacattgtggcagatgttattcctc

SEQ ID NO: 345698 - DNA, 25 bp, Artificial
  Probe
tagcccttaggaaacaccagacagt

SEQ ID NO: 345699 - DNA, 25 bp, Artificial
  Probe
actgttacagcaagaccactaactg

SEQ ID NO: 345700 - DNA, 25 bp, Artificial
  Probe
actgatgaaaaaacccacaagtgtg

SEQ ID NO: 345701 - DNA, 25 bp, Artificial
  Probe
gctgaaacaacatcagagaattcat

SEQ ID NO: 345702 - DNA, 25 bp, Artificial
  Probe
agccgccgctgtgcacccaggaata

SEQ ID NO: 345703 - DNA, 25 bp, Artificial
  Probe
tgtcataaggcctttagtactcgct

SEQ ID NO: 345704 - DNA, 25 bp, Artificial
  Probe
gcagagacaagcagccgccgctgtg

SEQ ID NO: 345705 - DNA, 25 bp, Artificial
  Probe
tctaaatacaagtcctacaagtgtg

SEQ ID NO: 345706 - DNA, 25 bp, Artificial
  Probe
gttacagcaagaccactaactgtaa

SEQ ID NO: 345707 - DNA, 25 bp, Artificial
  Probe
gccgccgctgtgcacccaggaatag

SEQ ID NO: 345708 - DNA, 25 bp, Artificial
  Probe
gaaacaccagacagttcattttgga

SEQ ID NO: 345709 - DNA, 25 bp, Artificial
  Probe
aggaatagcactcaatgatcctaac

SEQ ID NO: 345710 - DNA, 25 bp, Artificial
  Probe
acgacgaaaacttcatataggggag

SEQ ID NO: 345711 - DNA, 25 bp, Artificial
  Probe
taaacgacgaaaacttcatataggg

SEQ ID NO: 345712 - DNA, 25 bp, Artificial
  Probe
tcaatgctgaaacaacatcagagaa

SEQ ID NO: 345713 - DNA, 25 bp, Artificial
  Probe
taaggcctttagtactcgctcagca

SEQ ID NO: 345714 - DNA, 25 bp, Artificial
  Probe
gtggccgatgttattccacatcttt

SEQ ID NO: 345715 - DNA, 25 bp, Artificial
  Probe
ctaccagtttaaagaatgtgtcaaa

SEQ ID NO: 345716 - DNA, 25 bp, Artificial
  Probe
catacctaccagtttaaagaatgtg

SEQ ID NO: 345717 - DNA, 25 bp, Artificial
  Probe
gaatagcactcaatgatcctaactg

SEQ ID NO: 345718 - DNA, 25 bp, Artificial
  Probe
gatcctaactgttacagcaagacca

SEQ ID NO: 345719 - DNA, 25 bp, Artificial
  Probe
cacccaggaatagcactcaatgatc

SEQ ID NO: 345720 - DNA, 25 bp, Artificial
  Probe
ggcagatgttattcctcaacttcct

SEQ ID NO: 345721 - DNA, 25 bp, Artificial
  Probe
cttagcccttaggaaacaccagaca

SEQ ID NO: 345722 - DNA, 25 bp, Artificial
  Probe
cgacgaaaacttcatataggggaga

SEQ ID NO: 345723 - DNA, 25 bp, Artificial
  Probe
gcagatgttattcctcaacttcctg

SEQ ID NO: 345724 - DNA, 25 bp, Artificial
  Probe
acattgtggcagatgttattcctca

SEQ ID NO: 345725 - DNA, 25 bp, Artificial
  Probe
ggcctttagtactcgctcagcactt

SEQ ID NO: 345726 - DNA, 25 bp, Artificial
  Probe
ttaggaaacaccagacagttcattt

SEQ ID NO: 345727 - DNA, 25 bp, Artificial
  Probe
caatgatcctaactgttacagcaag

SEQ ID NO: 345728 - DNA, 25 bp, Artificial
  Probe
ccaggaatagcactcaatgatccta

SEQ ID NO: 345729 - DNA, 25 bp, Artificial
  Probe
acctaccagtttaaagaatgtgtca

SEQ ID NO: 345730 - DNA, 25 bp, Artificial
  Probe
accttcaggaacaaatccatactgg

SEQ ID NO: 345731 - DNA, 25 bp, Artificial
  Probe
tactgatgaaaaaacccacaagtgt

SEQ ID NO: 345732 - DNA, 25 bp, Artificial
  Probe
cttcaatgctgaaacaacatcagag

SEQ ID NO: 345733 - DNA, 25 bp, Artificial
  Probe
aatacaagtcctacaagtgtgaaca

SEQ ID NO: 345734 - DNA, 25 bp, Artificial
  Probe
gtcataaggcctttagtactcgctc

SEQ ID NO: 345735 - DNA, 25 bp, Artificial
  Probe
ggccgatgttattccacatctttct

SEQ ID NO: 345736 - DNA, 25 bp, Artificial
  Probe
ccttcaggaacaaatccatactgga

SEQ ID NO: 345737 - DNA, 25 bp, Artificial
  Probe
cgctgtgcacccaggaatagcactc

SEQ ID NO: 345738 - DNA, 25 bp, Artificial
  Probe
tacaagtcctacaagtgtgaacatt

SEQ ID NO: 345739 - DNA, 25 bp, Artificial
  Probe
aatgctgaaacaacatcagagaatt

SEQ ID NO: 345740 - DNA, 25 bp, Artificial
  Probe
ggcaaaatcccaagtgtgtggaatg

SEQ ID NO: 345741 - DNA, 25 bp, Artificial
  Probe
ttaaacgacgaaaacttcatatagg

SEQ ID NO: 345742 - DNA, 25 bp, Artificial
  Probe
agaatggagccaattgctattatca

SEQ ID NO: 345743 - DNA, 25 bp, Artificial
  Probe
ggcccaggcaaaggaaactgtattg

SEQ ID NO: 345744 - DNA, 25 bp, Artificial
  Probe
caggcacagagtcaggcaaaggaag

SEQ ID NO: 345745 - DNA, 25 bp, Artificial
  Probe
agccacagtgggtcaagcagaggaa

SEQ ID NO: 345746 - DNA, 25 bp, Artificial
  Probe
agttggacaggcagaggaagctaca

SEQ ID NO: 345747 - DNA, 25 bp, Artificial
  Probe
agttggtcaggcagaggaagccaca

SEQ ID NO: 345748 - DNA, 25 bp, Artificial
  Probe
agttggccaggcagaggaagccaca

SEQ ID NO: 345749 - DNA, 25 bp, Artificial
  Probe
gagaacttcagaacagtatgaaaca

SEQ ID NO: 345750 - DNA, 25 bp, Artificial
  Probe
ctatagttggtcaggcagaggaagc

SEQ ID NO: 345751 - DNA, 25 bp, Artificial
  Probe
agttggccaggcagaggaagctata

SEQ ID NO: 345752 - DNA, 25 bp, Artificial
  Probe
gaaacagcttcttctctcgtcaaga

SEQ ID NO: 345753 - DNA, 25 bp, Artificial
  Probe
gtgtactaagccaggcagaagaagc

SEQ ID NO: 345754 - DNA, 25 bp, Artificial
  Probe
acagtgggtcaagcagaggaagcta

SEQ ID NO: 345755 - DNA, 25 bp, Artificial
  Probe
ggaagctatagttagccaggcagag

SEQ ID NO: 345756 - DNA, 25 bp, Artificial
  Probe
gtcagccaggcagacaaaagtgtac

SEQ ID NO: 345757 - DNA, 25 bp, Artificial
  Probe
aggaagctacagttggccaggcaga

SEQ ID NO: 345758 - DNA, 25 bp, Artificial
  Probe
aatcaggagagactgcgctgggcca

SEQ ID NO: 345759 - DNA, 25 bp, Artificial
  Probe
ataacagacactgaaatcagtgaat

SEQ ID NO: 345760 - DNA, 25 bp, Artificial
  Probe
aggaagctacagtggcccaggcaaa

SEQ ID NO: 345761 - DNA, 25 bp, Artificial
  Probe
aggaagctacagtgggtcaagcaga

SEQ ID NO: 345762 - DNA, 25 bp, Artificial
  Probe
aggaagccacagtgggtcaagcaga

SEQ ID NO: 345763 - DNA, 25 bp, Artificial
  Probe
ctaagccaggcagaagaagctacag

SEQ ID NO: 345764 - DNA, 25 bp, Artificial
  Probe
agagaaaaccacagtgggccaggca

SEQ ID NO: 345765 - DNA, 25 bp, Artificial
  Probe
gagaaaaccacagtgggccaggcag

SEQ ID NO: 345766 - DNA, 25 bp, Artificial
  Probe
gaacttcagaacagtatgaaacact

SEQ ID NO: 345767 - DNA, 25 bp, Artificial
  Probe
acagtggatcaagcagaggaagcta

SEQ ID NO: 345768 - DNA, 25 bp, Artificial
  Probe
tcaagcagaggaagccacagtgggt

SEQ ID NO: 345769 - DNA, 25 bp, Artificial
  Probe
agctacagtaggacaagcaaaggaa

SEQ ID NO: 345770 - DNA, 25 bp, Artificial
  Probe
attcctaatttccatggaaaatgag

SEQ ID NO: 345771 - DNA, 25 bp, Artificial
  Probe
tggccaggcagaggaagctacagtt

SEQ ID NO: 345772 - DNA, 25 bp, Artificial
  Probe
agaggaagccacagtgggtcaagca

SEQ ID NO: 345773 - DNA, 25 bp, Artificial
  Probe
agaggaagccacagttggtcaggca

SEQ ID NO: 345774 - DNA, 25 bp, Artificial
  Probe
cagaggaagccacagtgggtcaagc

SEQ ID NO: 345775 - DNA, 25 bp, Artificial
  Probe
ctaatttccatggaaaatgagcaag

SEQ ID NO: 345776 - DNA, 25 bp, Artificial
  Probe
cacagtgggtcaagcagaggaagcc

SEQ ID NO: 345777 - DNA, 25 bp, Artificial
  Probe
acagctggttaacgaaatggtttct

SEQ ID NO: 345778 - DNA, 25 bp, Artificial
  Probe
catgcatcagatctgaaagtaaatg

SEQ ID NO: 345779 - DNA, 25 bp, Artificial
  Probe
gggaagctacagttggccaagcaga

SEQ ID NO: 345780 - DNA, 25 bp, Artificial
  Probe
aaatcaggagagactgcgctgggcc

SEQ ID NO: 345781 - DNA, 25 bp, Artificial
  Probe
aggaagctacagttggacaggcaga

SEQ ID NO: 345782 - DNA, 25 bp, Artificial
  Probe
ctacagttagccacatagagaaaac

SEQ ID NO: 345783 - DNA, 25 bp, Artificial
  Probe
ctacagtgggccacacagaggaagc

SEQ ID NO: 345784 - DNA, 25 bp, Artificial
  Probe
agtgcaccaagtggaaaagatgacg

SEQ ID NO: 345785 - DNA, 25 bp, Artificial
  Probe
agtgggtcaagcagaggaagctaca

SEQ ID NO: 345786 - DNA, 25 bp, Artificial
  Probe
ttaaactgagccagatagaagaacc

SEQ ID NO: 345787 - DNA, 25 bp, Artificial
  Probe
taaatacgctgttccagtgactcca

SEQ ID NO: 345788 - DNA, 25 bp, Artificial
  Probe
atccatttatttatcttaagaaaat

SEQ ID NO: 345789 - DNA, 25 bp, Artificial
  Probe
atcctctataaggaatccatttatt

SEQ ID NO: 345790 - DNA, 25 bp, Artificial
  Probe
atcaactcttcttgtactctgtgta

SEQ ID NO: 345791 - DNA, 25 bp, Artificial
  Probe
tttaagatcctctataaggaatcca

SEQ ID NO: 345792 - DNA, 25 bp, Artificial
  Probe
aaattaatctattctgaaaggcaat

SEQ ID NO: 345793 - DNA, 25 bp, Artificial
  Probe
caactcttcttgtactctgtgtatt

SEQ ID NO: 345794 - DNA, 25 bp, Artificial
  Probe
ctctataaggaatccatttatttat

SEQ ID NO: 345795 - DNA, 25 bp, Artificial
  Probe
ttaagatcctctataaggaatccat

SEQ ID NO: 345796 - DNA, 25 bp, Artificial
  Probe
ggaatccatttatttatcttaagaa

SEQ ID NO: 345797 - DNA, 25 bp, Artificial
  Probe
atctattctgaaaggcaataaaacg

SEQ ID NO: 345798 - DNA, 25 bp, Artificial
  Probe
ctcttcttgtactctgtgtattata

SEQ ID NO: 345799 - DNA, 25 bp, Artificial
  Probe
cctctataaggaatccatttattta

SEQ ID NO: 345800 - DNA, 25 bp, Artificial
  Probe
aggaatccatttatttatcttaaga

SEQ ID NO: 345801 - DNA, 25 bp, Artificial
  Probe
taatcaactcttcttgtactctgtg

SEQ ID NO: 345802 - DNA, 25 bp, Artificial
  Probe
tattataatggcatggcaatgattt

SEQ ID NO: 345803 - DNA, 25 bp, Artificial
  Probe
gtttaagatcctctataaggaatcc

SEQ ID NO: 345804 - DNA, 25 bp, Artificial
  Probe
gatcctctataaggaatccatttat

SEQ ID NO: 345805 - DNA, 25 bp, Artificial
  Probe
cttgtactctgtgtattataatggc

SEQ ID NO: 345806 - DNA, 25 bp, Artificial
  Probe
tactctgtgtattataatggcatgg

SEQ ID NO: 345807 - DNA, 25 bp, Artificial
  Probe
aattaatctattctgaaaggcaata

SEQ ID NO: 345808 - DNA, 25 bp, Artificial
  Probe
attataatggcatggcaatgatttt

SEQ ID NO: 345809 - DNA, 25 bp, Artificial
  Probe
acaccggtggtttaagatcctctat

SEQ ID NO: 345810 - DNA, 25 bp, Artificial
  Probe
ttttaatcaactcttcttgtactct

SEQ ID NO: 345811 - DNA, 25 bp, Artificial
  Probe
ttaatcaactcttcttgtactctgt

SEQ ID NO: 345812 - DNA, 25 bp, Artificial
  Probe
cttcttgtactctgtgtattataat

SEQ ID NO: 345813 - DNA, 25 bp, Artificial
  Probe
ggtttaagatcctctataaggaatc

SEQ ID NO: 345814 - DNA, 25 bp, Artificial
  Probe
aactcttcttgtactctgtgtatta

SEQ ID NO: 345815 - DNA, 25 bp, Artificial
  Probe
tccatttatttatcttaagaaaatt

SEQ ID NO: 345816 - DNA, 25 bp, Artificial
  Probe
tctattctgaaaggcaataaaacga

SEQ ID NO: 345817 - DNA, 25 bp, Artificial
  Probe
aatctattctgaaaggcaataaaac

SEQ ID NO: 345818 - DNA, 25 bp, Artificial
  Probe
aagatcctctataaggaatccattt

SEQ ID NO: 345819 - DNA, 25 bp, Artificial
  Probe
tcttgtactctgtgtattataatgg

SEQ ID NO: 345820 - DNA, 25 bp, Artificial
  Probe
tttttaatcaactcttcttgtactc

SEQ ID NO: 345821 - DNA, 25 bp, Artificial
  Probe
actcttcttgtactctgtgtattat

SEQ ID NO: 345822 - DNA, 25 bp, Artificial
  Probe
ttttttaatcaactcttcttgtact

SEQ ID NO: 345823 - DNA, 25 bp, Artificial
  Probe
tgtactctgtgtattataatggcat

SEQ ID NO: 345824 - DNA, 25 bp, Artificial
  Probe
tggtttaagatcctctataaggaat

SEQ ID NO: 345825 - DNA, 25 bp, Artificial
  Probe
gaaattaatctattctgaaaggcaa

SEQ ID NO: 345826 - DNA, 25 bp, Artificial
  Probe
taatggcatggcaatgattttcaaa

SEQ ID NO: 345827 - DNA, 25 bp, Artificial
  Probe
ttaatctattctgaaaggcaataaa

SEQ ID NO: 345828 - DNA, 25 bp, Artificial
  Probe
ataatggcatggcaatgattttcaa

SEQ ID NO: 345829 - DNA, 25 bp, Artificial
  Probe
taatctattctgaaaggcaataaaa

SEQ ID NO: 345830 - DNA, 25 bp, Artificial
  Probe
ataaggaatccatttatttatctta

SEQ ID NO: 345831 - DNA, 25 bp, Artificial
  Probe
ttataatggcatggcaatgattttc

SEQ ID NO: 345832 - DNA, 25 bp, Artificial
  Probe
gaatccatttatttatcttaagaaa

SEQ ID NO: 345833 - DNA, 25 bp, Artificial
  Probe
taagatcctctataaggaatccatt

SEQ ID NO: 345834 - DNA, 25 bp, Artificial
  Probe
gaggaccagaggtggccacacgcac

SEQ ID NO: 345835 - DNA, 25 bp, Artificial
  Probe
ctggtgagccctgacgtacgtccct

SEQ ID NO: 345836 - DNA, 25 bp, Artificial
  Probe
cacacgcacctggttttgttctttt

SEQ ID NO: 345837 - DNA, 25 bp, Artificial
  Probe
gagctcctggcaagactgactctga

SEQ ID NO: 345838 - DNA, 25 bp, Artificial
  Probe
tggacctgccagacagacagcgcca

SEQ ID NO: 345839 - DNA, 25 bp, Artificial
  Probe
ccggctcatggcagccaagagagct

SEQ ID NO: 345840 - DNA, 25 bp, Artificial
  Probe
gagccctgacgtacgtccctgttct

SEQ ID NO: 345841 - DNA, 25 bp, Artificial
  Probe
tcgcccgagagaaaggaagaaagga

SEQ ID NO: 345842 - DNA, 25 bp, Artificial
  Probe
tctgcactgtagacagtggacgctc

SEQ ID NO: 345843 - DNA, 25 bp, Artificial
  Probe
acagacagcgccaggaagcccggcg

SEQ ID NO: 345844 - DNA, 25 bp, Artificial
  Probe
ctgaagctcaatgactggaagataa

SEQ ID NO: 345845 - DNA, 25 bp, Artificial
  Probe
ccttgccgtgctctctgcactgtag

SEQ ID NO: 345846 - DNA, 25 bp, Artificial
  Probe
aggaacaggcctggtgagccctgac

SEQ ID NO: 345847 - DNA, 25 bp, Artificial
  Probe
agaggtggccacacgcacctggttt

SEQ ID NO: 345848 - DNA, 25 bp, Artificial
  Probe
gggaaaagtccctggacctgccaga

SEQ ID NO: 345849 - DNA, 25 bp, Artificial
  Probe
acctggtagtttctgtctcaccctc

SEQ ID NO: 345850 - DNA, 25 bp, Artificial
  Probe
cctgttctcagaagggccgccaagt

SEQ ID NO: 345851 - DNA, 25 bp, Artificial
  Probe
ccagaggtggccacacgcacctggt

SEQ ID NO: 345852 - DNA, 25 bp, Artificial
  Probe
agactcggctctgaggaccagaggt

SEQ ID NO: 345853 - DNA, 25 bp, Artificial
  Probe
gaaattccccatcacaagggaaaag

SEQ ID NO: 345854 - DNA, 25 bp, Artificial
  Probe
gctctctgcactgtagacagtggac

SEQ ID NO: 345855 - DNA, 25 bp, Artificial
  Probe
cgccaagtggcctcttgaaaatgga

SEQ ID NO: 345856 - DNA, 25 bp, Artificial
  Probe
cccagactcggctctgaggaccaga

SEQ ID NO: 345857 - DNA, 25 bp, Artificial
  Probe
atggcagccaagagagctgcctcgt

SEQ ID NO: 345858 - DNA, 25 bp, Artificial
  Probe
agctcgagctcctggcaagactgac

SEQ ID NO: 345859 - DNA, 25 bp, Artificial
  Probe
agtccctggacctgccagacagaca

SEQ ID NO: 345860 - DNA, 25 bp, Artificial
  Probe
aaatgcttgtacagtttattgccta

SEQ ID NO: 345861 - DNA, 25 bp, Artificial
  Probe
gacagtggacgctccaattcctagt

SEQ ID NO: 345862 - DNA, 25 bp, Artificial
  Probe
gagtcgcccgagagaaaggaagaaa

SEQ ID NO: 345863 - DNA, 25 bp, Artificial
  Probe
acaggcctggtgagccctgacgtac

SEQ ID NO: 345864 - DNA, 25 bp, Artificial
  Probe
tgtagacagtggacgctccaattcc

SEQ ID NO: 345865 - DNA, 25 bp, Artificial
  Probe
aagttcgatgaactgcaccagctga

SEQ ID NO: 345866 - DNA, 25 bp, Artificial
  Probe
catcgggctccgaggaacaggcctg

SEQ ID NO: 345867 - DNA, 25 bp, Artificial
  Probe
agaagggccgccaagtggcctcttg

SEQ ID NO: 345868 - DNA, 25 bp, Artificial
  Probe
ctgtctgtggaagatgtcagcatga

SEQ ID NO: 345869 - DNA, 25 bp, Artificial
  Probe
agggccgccaagtggcctcttgaaa

SEQ ID NO: 345870 - DNA, 25 bp, Artificial
  Probe
agagagctgcctcgttccgccagaa

SEQ ID NO: 345871 - DNA, 25 bp, Artificial
  Probe
cgaggcccagactcggctctgagga

SEQ ID NO: 345872 - DNA, 25 bp, Artificial
  Probe
tgccagacagacagcgccaggaagc

SEQ ID NO: 345873 - DNA, 25 bp, Artificial
  Probe
ctctgaaggacatcgggctccgagg

SEQ ID NO: 345874 - DNA, 25 bp, Artificial
  Probe
gctctgaggaccagaggtggccaca

SEQ ID NO: 345875 - DNA, 25 bp, Artificial
  Probe
agagctgcctcgttccgccagaact

SEQ ID NO: 345876 - DNA, 25 bp, Artificial
  Probe
gacgtacgtccctgttctcagaagg

SEQ ID NO: 345877 - DNA, 25 bp, Artificial
  Probe
tgtacagtttattgcctacctggta

SEQ ID NO: 345878 - DNA, 25 bp, Artificial
  Probe
cagtttattgcctacctggtagttt

SEQ ID NO: 345879 - DNA, 25 bp, Artificial
  Probe
aagataatggagtcgcccgagagaa

SEQ ID NO: 345880 - DNA, 25 bp, Artificial
  Probe
ttccgccacagttcggctactgaga

SEQ ID NO: 345881 - DNA, 25 bp, Artificial
  Probe
gccaacagctggaaactcctggagc

SEQ ID NO: 345882 - DNA, 25 bp, Artificial
  Probe
ggtccagcagttcttcaggctgtgt

SEQ ID NO: 345883 - DNA, 25 bp, Artificial
  Probe
ggagctacaacaactcaaggccaac

SEQ ID NO: 345884 - DNA, 25 bp, Artificial
  Probe
gaggcccagaccaggctgtgacccg

SEQ ID NO: 345885 - DNA, 25 bp, Artificial
  Probe
gtgggcagcacacaacttctcctgt

SEQ ID NO: 345886 - DNA, 25 bp, Artificial
  Probe
aacagctggaaactcctggagccta

SEQ ID NO: 345887 - DNA, 25 bp, Artificial
  Probe
ctgccggaggagatcttagagaaga

SEQ ID NO: 345888 - DNA, 25 bp, Artificial
  Probe
gccgataccaaagaagccctcgcgg

SEQ ID NO: 345889 - DNA, 25 bp, Artificial
  Probe
agcaaagcttggaccccactgcgtt

SEQ ID NO: 345890 - DNA, 25 bp, Artificial
  Probe
cagcagttcttcaggctgtgtcagc

SEQ ID NO: 345891 - DNA, 25 bp, Artificial
  Probe
agttcggctactgagagcgcggaca

SEQ ID NO: 345892 - DNA, 25 bp, Artificial
  Probe
cgtgaccctcaagttcctggagcta

SEQ ID NO: 345893 - DNA, 25 bp, Artificial
  Probe
gttccgccacagttcggctactgag

SEQ ID NO: 345894 - DNA, 25 bp, Artificial
  Probe
gaaggtccagcagttcttcaggctg

SEQ ID NO: 345895 - DNA, 25 bp, Artificial
  Probe
ggaaactcctggagcctaaggagga

SEQ ID NO: 345896 - DNA, 25 bp, Artificial
  Probe
aggctgtgtcagcaaagcttggacc

SEQ ID NO: 345897 - DNA, 25 bp, Artificial
  Probe
agcgctccctggactcggtggaccg

SEQ ID NO: 345898 - DNA, 25 bp, Artificial
  Probe
tcgttccgccacagttcggctactg

SEQ ID NO: 345899 - DNA, 25 bp, Artificial
  Probe
ctggaacactggtgccagcagatgg

SEQ ID NO: 345900 - DNA, 25 bp, Artificial
  Probe
tgtctcagaaggtccagcagttctt

SEQ ID NO: 345901 - DNA, 25 bp, Artificial
  Probe
agctggaaactcctggagcctaagg

SEQ ID NO: 345902 - DNA, 25 bp, Artificial
  Probe
caagttcctggagctacaacaactc

SEQ ID NO: 345903 - DNA, 25 bp, Artificial
  Probe
tcttcaggctgtgtcagcaaagctt

SEQ ID NO: 345904 - DNA, 25 bp, Artificial
  Probe
ttcgaagcgccgtgggcagcacaca

SEQ ID NO: 345905 - DNA, 25 bp, Artificial
  Probe
aacactggtgccagcagatggagcg

SEQ ID NO: 345906 - DNA, 25 bp, Artificial
  Probe
ccttccaggacctggccggtttctg

SEQ ID NO: 345907 - DNA, 25 bp, Artificial
  Probe
gcgccgtgggcagcacacaacttct

SEQ ID NO: 345908 - DNA, 25 bp, Artificial
  Probe
ccacagttcggctactgagagcgcg

SEQ ID NO: 345909 - DNA, 25 bp, Artificial
  Probe
acacaacttctcctgtctcagaagg

SEQ ID NO: 345910 - DNA, 25 bp, Artificial
  Probe
ttcggctactgagagcgcggacagc

SEQ ID NO: 345911 - DNA, 25 bp, Artificial
  Probe
cgtgggcagcacacaacttctcctg

SEQ ID NO: 345912 - DNA, 25 bp, Artificial
  Probe
gacgtgaccctcaagttcctggagc

SEQ ID NO: 345913 - DNA, 25 bp, Artificial
  Probe
cgataccaaagaagccctcgcgggg

SEQ ID NO: 345914 - DNA, 25 bp, Artificial
  Probe
agttcttcaggctgtgtcagcaaag

SEQ ID NO: 345915 - DNA, 25 bp, Artificial
  Probe
gagcgctccctggactcggtggacc

SEQ ID NO: 345916 - DNA, 25 bp, Artificial
  Probe
ctcaagttcctggagctacaacaac

SEQ ID NO: 345917 - DNA, 25 bp, Artificial
  Probe
agcgccgtgggcagcacacaacttc

SEQ ID NO: 345918 - DNA, 25 bp, Artificial
  Probe
tcctggagcctaaggaggagaagaa

SEQ ID NO: 345919 - DNA, 25 bp, Artificial
  Probe
tgtgtcagcaaagcttggaccccac

SEQ ID NO: 345920 - DNA, 25 bp, Artificial
  Probe
atgagctgccggaggagatcttaga

SEQ ID NO: 345921 - DNA, 25 bp, Artificial
  Probe
cagaaggtccagcagttcttcaggc

SEQ ID NO: 345922 - DNA, 25 bp, Artificial
  Probe
agctgccggaggagatcttagagaa

SEQ ID NO: 345923 - DNA, 25 bp, Artificial
  Probe
actcctggagcctaaggaggagaag

SEQ ID NO: 345924 - DNA, 25 bp, Artificial
  Probe
gggcagcacacaacttctcctgtct

SEQ ID NO: 345925 - DNA, 25 bp, Artificial
  Probe
ccagcagttcttcaggctgtgtcag

SEQ ID NO: 345926 - DNA, 25 bp, Artificial
  Probe
gaccctgagccaactttccaattga

SEQ ID NO: 345927 - DNA, 25 bp, Artificial
  Probe
atcgagatttatgtccctgaggccc

SEQ ID NO: 345928 - DNA, 25 bp, Artificial
  Probe
tcgagatttatgtccctgaggccca

SEQ ID NO: 345929 - DNA, 25 bp, Artificial
  Probe
ggacatcagcatgaagttcgatgag

SEQ ID NO: 345930 - DNA, 25 bp, Artificial
  Probe
ttgacacgtacaagggctcacaagg

SEQ ID NO: 345931 - DNA, 25 bp, Artificial
  Probe
tgtgcggcagaactcggccacagag

SEQ ID NO: 345932 - DNA, 25 bp, Artificial
  Probe
tatggttattatctctagagaccct

SEQ ID NO: 345933 - DNA, 25 bp, Artificial
  Probe
caagggctcacaaggtggcttttct

SEQ ID NO: 345934 - DNA, 25 bp, Artificial
  Probe
atttatgtccctgaggcccagacca

SEQ ID NO: 345935 - DNA, 25 bp, Artificial
  Probe
gagccaactttccaattgacacgta

SEQ ID NO: 345936 - DNA, 25 bp, Artificial
  Probe
gatttatgtccctgaggcccagacc

SEQ ID NO: 345937 - DNA, 25 bp, Artificial
  Probe
ctcggccacagagagtgcagacagc

SEQ ID NO: 345938 - DNA, 25 bp, Artificial
  Probe
cggccacagagagtgcagacagcat

SEQ ID NO: 345939 - DNA, 25 bp, Artificial
  Probe
caattgacacgtacaagggctcaca

SEQ ID NO: 345940 - DNA, 25 bp, Artificial
  Probe
tctagagaccctgagccaactttcc

SEQ ID NO: 345941 - DNA, 25 bp, Artificial
  Probe
gccacagagagtgcagacagcatcg

SEQ ID NO: 345942 - DNA, 25 bp, Artificial
  Probe
tgcagacagcatcgagatttatgtc

SEQ ID NO: 345943 - DNA, 25 bp, Artificial
  Probe
ttccaattgacacgtacaagggctc

SEQ ID NO: 345944 - DNA, 25 bp, Artificial
  Probe
cgtacaagggctcacaaggtggctt

SEQ ID NO: 345945 - DNA, 25 bp, Artificial
  Probe
aactttccaattgacacgtacaagg

SEQ ID NO: 345946 - DNA, 25 bp, Artificial
  Probe
tggttattatctctagagaccctga

SEQ ID NO: 345947 - DNA, 25 bp, Artificial
  Probe
acgtacaagggctcacaaggtggct

SEQ ID NO: 345948 - DNA, 25 bp, Artificial
  Probe
taaggccacaaaggagaaagcactc

SEQ ID NO: 345949 - DNA, 25 bp, Artificial
  Probe
tccaattgacacgtacaagggctca

SEQ ID NO: 345950 - DNA, 25 bp, Artificial
  Probe
agaccctgagccaactttccaattg

SEQ ID NO: 345951 - DNA, 25 bp, Artificial
  Probe
ctagagaccctgagccaactttcca

SEQ ID NO: 345952 - DNA, 25 bp, Artificial
  Probe
attgacacgtacaagggctcacaag

SEQ ID NO: 345953 - DNA, 25 bp, Artificial
  Probe
gacagcatcgagatttatgtccctg

SEQ ID NO: 345954 - DNA, 25 bp, Artificial
  Probe
gcatcgagatttatgtccctgaggc

SEQ ID NO: 345955 - DNA, 25 bp, Artificial
  Probe
gtgcggcagaactcggccacagaga

SEQ ID NO: 345956 - DNA, 25 bp, Artificial
  Probe
ctgagccaactttccaattgacacg

SEQ ID NO: 345957 - DNA, 25 bp, Artificial
  Probe
gtacaagggctcacaaggtggcttt

SEQ ID NO: 345958 - DNA, 25 bp, Artificial
  Probe
tttatgtccctgaggcccagaccag

SEQ ID NO: 345959 - DNA, 25 bp, Artificial
  Probe
agaactcggccacagagagtgcaga

SEQ ID NO: 345960 - DNA, 25 bp, Artificial
  Probe
ctctagagaccctgagccaactttc

SEQ ID NO: 345961 - DNA, 25 bp, Artificial
  Probe
tgagccgcgacaaggcctcagatgc

SEQ ID NO: 345962 - DNA, 25 bp, Artificial
  Probe
ttattatctctagagaccctgagcc

SEQ ID NO: 345963 - DNA, 25 bp, Artificial
  Probe
cagaactcggccacagagagtgcag

SEQ ID NO: 345964 - DNA, 25 bp, Artificial
  Probe
cagtgagccgcgacaaggcctcaga

SEQ ID NO: 345965 - DNA, 25 bp, Artificial
  Probe
ttatctctagagaccctgagccaac

SEQ ID NO: 345966 - DNA, 25 bp, Artificial
  Probe
acatcagcatgaagttcgatgagct

SEQ ID NO: 345967 - DNA, 25 bp, Artificial
  Probe
ggttattatctctagagaccctgag

SEQ ID NO: 345968 - DNA, 25 bp, Artificial
  Probe
ccaattgacacgtacaagggctcac

SEQ ID NO: 345969 - DNA, 25 bp, Artificial
  Probe
agagtgcagacagcatcgagattta

SEQ ID NO: 345970 - DNA, 25 bp, Artificial
  Probe
gacatcagcatgaagttcgatgagc

SEQ ID NO: 345971 - DNA, 25 bp, Artificial
  Probe
gtgcagacagcatcgagatttatgt

SEQ ID NO: 345972 - DNA, 25 bp, Artificial
  Probe
gcataatgacccagcaggggaaact

SEQ ID NO: 345973 - DNA, 25 bp, Artificial
  Probe
tcaaagccatccagcgcataatgac

SEQ ID NO: 345974 - DNA, 25 bp, Artificial
  Probe
gtgtattcatcagcaggctgaggga

SEQ ID NO: 345975 - DNA, 25 bp, Artificial
  Probe
tggttctggtcttcgggtgtcgaca

SEQ ID NO: 345976 - DNA, 25 bp, Artificial
  Probe
aatccgtgccccatggttctggtct

SEQ ID NO: 345977 - DNA, 25 bp, Artificial
  Probe
ggcgtcttcagagagctgtacactg

SEQ ID NO: 345978 - DNA, 25 bp, Artificial
  Probe
gacatccaacacaaaggaatgaatc

SEQ ID NO: 345979 - DNA, 25 bp, Artificial
  Probe
atggccgccgatgtcctcaaagcca

SEQ ID NO: 345980 - DNA, 25 bp, Artificial
  Probe
tgcaggaacagctggctgagtctgt

SEQ ID NO: 345981 - DNA, 25 bp, Artificial
  Probe
aatatgtacaggacgtgctgcagga

SEQ ID NO: 345982 - DNA, 25 bp, Artificial
  Probe
agcaaggaggccacatttatgtctg

SEQ ID NO: 345983 - DNA, 25 bp, Artificial
  Probe
tgtctgtggggacgttaccatggcc

SEQ ID NO: 345984 - DNA, 25 bp, Artificial
  Probe
agaacaagggcgtcttcagagagct

SEQ ID NO: 345985 - DNA, 25 bp, Artificial
  Probe
ggaacagctggctgagtctgtgtac

SEQ ID NO: 345986 - DNA, 25 bp, Artificial
  Probe
acaggacgtgctgcaggaacagctg

SEQ ID NO: 345987 - DNA, 25 bp, Artificial
  Probe
ggaatgaatccgtgccccatggttc

SEQ ID NO: 345988 - DNA, 25 bp, Artificial
  Probe
ctggtcttcgggtgtcgacaatcca

SEQ ID NO: 345989 - DNA, 25 bp, Artificial
  Probe
tctcagaggaggacgctggtgtatt

SEQ ID NO: 345990 - DNA, 25 bp, Artificial
  Probe
tgctgcaggaacagctggctgagtc

SEQ ID NO: 345991 - DNA, 25 bp, Artificial
  Probe
ctgtggggacgttaccatggccgcc

SEQ ID NO: 345992 - DNA, 25 bp, Artificial
  Probe
gaaactctcagaggaggacgctggt

SEQ ID NO: 345993 - DNA, 25 bp, Artificial
  Probe
atgtctgtggggacgttaccatggc

SEQ ID NO: 345994 - DNA, 25 bp, Artificial
  Probe
tcttcgggtgtcgacaatccaagat

SEQ ID NO: 345995 - DNA, 25 bp, Artificial
  Probe
gggtgtcgacaatccaagatagatc

SEQ ID NO: 345996 - DNA, 25 bp, Artificial
  Probe
taatgacccagcaggggaaactctc

SEQ ID NO: 345997 - DNA, 25 bp, Artificial
  Probe
agaggaggacgctggtgtattcatc

SEQ ID NO: 345998 - DNA, 25 bp, Artificial
  Probe
tggtgtattcatcagcaggctgagg

SEQ ID NO: 345999 - DNA, 25 bp, Artificial
  Probe
cagcgcataatgacccagcagggga

SEQ ID NO: 346000 - DNA, 25 bp, Artificial
  Probe
acgtgctgcaggaacagctggctga

SEQ ID NO: 346001 - DNA, 25 bp, Artificial
  Probe
tagatcatatctacagagaggagac

SEQ ID NO: 346002 - DNA, 25 bp, Artificial
  Probe
aggaggccacatttatgtctgtggg

SEQ ID NO: 346003 - DNA, 25 bp, Artificial
  Probe
acccagcaggggaaactctcagagg

SEQ ID NO: 346004 - DNA, 25 bp, Artificial
  Probe
catccagcgcataatgacccagcag

SEQ ID NO: 346005 - DNA, 25 bp, Artificial
  Probe
atccaacacaaaggaatgaatccgt

SEQ ID NO: 346006 - DNA, 25 bp, Artificial
  Probe
tatctacagagaggagaccctgcag

SEQ ID NO: 346007 - DNA, 25 bp, Artificial
  Probe
gggacgttaccatggccgccgatgt

SEQ ID NO: 346008 - DNA, 25 bp, Artificial
  Probe
ggaggacgctggtgtattcatcagc

SEQ ID NO: 346009 - DNA, 25 bp, Artificial
  Probe
catttatgtctgtggggacgttacc

SEQ ID NO: 346010 - DNA, 25 bp, Artificial
  Probe
tggccgccgatgtcctcaaagccat

SEQ ID NO: 346011 - DNA, 25 bp, Artificial
  Probe
cccagcaggggaaactctcagagga

SEQ ID NO: 346012 - DNA, 25 bp, Artificial
  Probe
tggggacgttaccatggccgccgat

SEQ ID NO: 346013 - DNA, 25 bp, Artificial
  Probe
accggacaggccaaagaaatatgta

SEQ ID NO: 346014 - DNA, 25 bp, Artificial
  Probe
gtcctcaaagccatccagcgcataa

SEQ ID NO: 346015 - DNA, 25 bp, Artificial
  Probe
gaacaagggcgtcttcagagagctg

SEQ ID NO: 346016 - DNA, 25 bp, Artificial
  Probe
gtcgacaatccaagatagatcatat

SEQ ID NO: 346017 - DNA, 25 bp, Artificial
  Probe
gctggctgagtctgtgtaccgcgcc

SEQ ID NO: 346018 - DNA, 25 bp, Artificial
  Probe
ttctttctgtggtagcagaaatcag

SEQ ID NO: 346019 - DNA, 25 bp, Artificial
  Probe
ctctactgtatagtgctttggttgg

SEQ ID NO: 346020 - DNA, 25 bp, Artificial
  Probe
ccctctcatttatgccctgcggagt

SEQ ID NO: 346021 - DNA, 25 bp, Artificial
  Probe
caacgtgttatgtttattgacctta

SEQ ID NO: 346022 - DNA, 25 bp, Artificial
  Probe
tgaggaaaaccttcaaagagatcat

SEQ ID NO: 346023 - DNA, 25 bp, Artificial
  Probe
tgttctacagcgtgggcgctatgga

SEQ ID NO: 346024 - DNA, 25 bp, Artificial
  Probe
gtcactcaggcacaacctgagcagt

SEQ ID NO: 346025 - DNA, 25 bp, Artificial
  Probe
tacctggcaggtattaagtggggac

SEQ ID NO: 346026 - DNA, 25 bp, Artificial
  Probe
cctgcggagtcaagaactgaggaaa

SEQ ID NO: 346027 - DNA, 25 bp, Artificial
  Probe
agcagaaatcagagccttctgaaaa

SEQ ID NO: 346028 - DNA, 25 bp, Artificial
  Probe
tgcatactaggtagagacctgcaga

SEQ ID NO: 346029 - DNA, 25 bp, Artificial
  Probe
tatttaaacactggatgctcgatca

SEQ ID NO: 346030 - DNA, 25 bp, Artificial
  Probe
ctgtgagttacctggcaggtattaa

SEQ ID NO: 346031 - DNA, 25 bp, Artificial
  Probe
tcatttaatgagtcagctctactcg

SEQ ID NO: 346032 - DNA, 25 bp, Artificial
  Probe
aggaaaaccttcaaagagatcatct

SEQ ID NO: 346033 - DNA, 25 bp, Artificial
  Probe
acctggcaggtattaagtggggaca

SEQ ID NO: 346034 - DNA, 25 bp, Artificial
  Probe
tcatttatgccctgcggagtcaaga

SEQ ID NO: 346035 - DNA, 25 bp, Artificial
  Probe
gtctcaacgtgttatgtttattgac

SEQ ID NO: 346036 - DNA, 25 bp, Artificial
  Probe
aactgcttatttatgttctacagcg

SEQ ID NO: 346037 - DNA, 25 bp, Artificial
  Probe
cccctgggaggcatctgtgagttac

SEQ ID NO: 346038 - DNA, 25 bp, Artificial
  Probe
ctgattccactgtttatggggaaat

SEQ ID NO: 346039 - DNA, 25 bp, Artificial
  Probe
ctttctgtggtagcagaaatcagag

SEQ ID NO: 346040 - DNA, 25 bp, Artificial
  Probe
aagagtcaacccttgttctttctgt

SEQ ID NO: 346041 - DNA, 25 bp, Artificial
  Probe
acagcagaagcctgattccactgtt

SEQ ID NO: 346042 - DNA, 25 bp, Artificial
  Probe
aacactggatgctcgatcatttaat

SEQ ID NO: 346043 - DNA, 25 bp, Artificial
  Probe
ctgggaggcatctgtgagttacctg

SEQ ID NO: 346044 - DNA, 25 bp, Artificial
  Probe
cagcgtgggcgctatggagttccat

SEQ ID NO: 346045 - DNA, 25 bp, Artificial
  Probe
ccaacagctgcctctactgtatagt

SEQ ID NO: 346046 - DNA, 25 bp, Artificial
  Probe
acagagtgcatactaggtagagacc

SEQ ID NO: 346047 - DNA, 25 bp, Artificial
  Probe
cagcacagcagaagcctgattccac

SEQ ID NO: 346048 - DNA, 25 bp, Artificial
  Probe
tgttctttctgtggtagcagaaatc

SEQ ID NO: 346049 - DNA, 25 bp, Artificial
  Probe
gtgtacttcccaacagctgcctcta

SEQ ID NO: 346050 - DNA, 25 bp, Artificial
  Probe
aaatcagagccttctgaaaagctgt

SEQ ID NO: 346051 - DNA, 25 bp, Artificial
  Probe
tatgccctgcggagtcaagaactga

SEQ ID NO: 346052 - DNA, 25 bp, Artificial
  Probe
tttatgttctacagcgtgggcgcta

SEQ ID NO: 346053 - DNA, 25 bp, Artificial
  Probe
aggcatctgtgagttacctggcagg

SEQ ID NO: 346054 - DNA, 25 bp, Artificial
  Probe
aatttgtcactcaggcacaacctga

SEQ ID NO: 346055 - DNA, 25 bp, Artificial
  Probe
ggcgctatggagttccataaaagaa

SEQ ID NO: 346056 - DNA, 25 bp, Artificial
  Probe
agtgtacttcccaacagctgcctct

SEQ ID NO: 346057 - DNA, 25 bp, Artificial
  Probe
tgaaaagctgtttccattgcatcac

SEQ ID NO: 346058 - DNA, 25 bp, Artificial
  Probe
ccttgttctttctgtggtagcagaa

SEQ ID NO: 346059 - DNA, 25 bp, Artificial
  Probe
gtcagctctactcgtgaaatttcac

SEQ ID NO: 346060 - DNA, 25 bp, Artificial
  Probe
gatgctcgatcatttaatgagtcag

SEQ ID NO: 346061 - DNA, 25 bp, Artificial
  Probe
cccacagcacagcagaagcctgatt

SEQ ID NO: 346062 - DNA, 25 bp, Artificial
  Probe
gagcagtgtacttcccaacagctgc

SEQ ID NO: 346063 - DNA, 25 bp, Artificial
  Probe
aggtagagacctgcagaatttgtca

SEQ ID NO: 346064 - DNA, 25 bp, Artificial
  Probe
gagcctttccctggaaagacaacct

SEQ ID NO: 346065 - DNA, 25 bp, Artificial
  Probe
gtctcatgggactcttccccaaaca

SEQ ID NO: 346066 - DNA, 25 bp, Artificial
  Probe
cctttgagcttcgtgataaaggaaa

SEQ ID NO: 346067 - DNA, 25 bp, Artificial
  Probe
ggaaaatctggtttccttcttccag

SEQ ID NO: 346068 - DNA, 25 bp, Artificial
  Probe
cccttggtttgaaatgtgctaatta

SEQ ID NO: 346069 - DNA, 25 bp, Artificial
  Probe
tcgaagtcatctgaactcaatcaag

SEQ ID NO: 346070 - DNA, 25 bp, Artificial
  Probe
tctcagatgctgttatttccttatg

SEQ ID NO: 346071 - DNA, 25 bp, Artificial
  Probe
tacaagacatcaggttcttctttag

SEQ ID NO: 346072 - DNA, 25 bp, Artificial
  Probe
tttagactgggcttatgacctgggc

SEQ ID NO: 346073 - DNA, 25 bp, Artificial
  Probe
caggcagccaagagttatggaaaaa

SEQ ID NO: 346074 - DNA, 25 bp, Artificial
  Probe
cccgttatatctacggcccaatagc

SEQ ID NO: 346075 - DNA, 25 bp, Artificial
  Probe
gtaaagaaaccatgctttctgtcaa

SEQ ID NO: 346076 - DNA, 25 bp, Artificial
  Probe
cccgtattcaatgtagatggataca

SEQ ID NO: 346077 - DNA, 25 bp, Artificial
  Probe
gaaggtattccgtgtgaaactccag

SEQ ID NO: 346078 - DNA, 25 bp, Artificial
  Probe
cctgttcagtttgacagggagaagg

SEQ ID NO: 346079 - DNA, 25 bp, Artificial
  Probe
aaaggctatctttatggactgtggc

SEQ ID NO: 346080 - DNA, 25 bp, Artificial
  Probe
catttggtcatggacaaaggatcga

SEQ ID NO: 346081 - DNA, 25 bp, Artificial
  Probe
agagacaaaagctgtcactaacttc

SEQ ID NO: 346082 - DNA, 25 bp, Artificial
  Probe
gctgtcactaacttcattcgaagtc

SEQ ID NO: 346083 - DNA, 25 bp, Artificial
  Probe
tcggataaagccaacatgtaaagaa

SEQ ID NO: 346084 - DNA, 25 bp, Artificial
  Probe
aaatcatgaccaaacttttggaccg

SEQ ID NO: 346085 - DNA, 25 bp, Artificial
  Probe
agaacccaaattcaacctgcattgg

SEQ ID NO: 346086 - DNA, 25 bp, Artificial
  Probe
atatgactgtggatttccgagttac

SEQ ID NO: 346087 - DNA, 25 bp, Artificial
  Probe
ttctgataaatgacctacaagaaga

SEQ ID NO: 346088 - DNA, 25 bp, Artificial
  Probe
ttctgcatcacctggatccatcctg

SEQ ID NO: 346089 - DNA, 25 bp, Artificial
  Probe
acaacccatgcctcagtgtctacag

SEQ ID NO: 346090 - DNA, 25 bp, Artificial
  Probe
taccttggaacaacataaaatggac

SEQ ID NO: 346091 - DNA, 25 bp, Artificial
  Probe
cacacatttgcctttgagcttcgtg

SEQ ID NO: 346092 - DNA, 25 bp, Artificial
  Probe
agaggaaatcgcaggcaggcacagt

SEQ ID NO: 346093 - DNA, 25 bp, Artificial
  Probe
ccatgatattgctgttaatatgact

SEQ ID NO: 346094 - DNA, 25 bp, Artificial
  Probe
gtcatctgaactcaatcaaggctta

SEQ ID NO: 346095 - DNA, 25 bp, Artificial
  Probe
atacttcctaataagttgcccttgg

SEQ ID NO: 346096 - DNA, 25 bp, Artificial
  Probe
gggacctgcaccagagtccgagaaa

SEQ ID NO: 346097 - DNA, 25 bp, Artificial
  Probe
ccattatatgttctcaagattggga

SEQ ID NO: 346098 - DNA, 25 bp, Artificial
  Probe
atgttctgcccgtattcaatgtaga

SEQ ID NO: 346099 - DNA, 25 bp, Artificial
  Probe
tatgcaaaatacaatgactggaaca

SEQ ID NO: 346100 - DNA, 25 bp, Artificial
  Probe
atgtaaagaaaccatgctttctgtc

SEQ ID NO: 346101 - DNA, 25 bp, Artificial
  Probe
aaagcaagcaagtatcttgaagaac

SEQ ID NO: 346102 - DNA, 25 bp, Artificial
  Probe
atccattatatgttctcaagattgg

SEQ ID NO: 346103 - DNA, 25 bp, Artificial
  Probe
gctgttatttccttatggctacaca

SEQ ID NO: 346104 - DNA, 25 bp, Artificial
  Probe
ctgataaatgacctacaagaagaga

SEQ ID NO: 346105 - DNA, 25 bp, Artificial
  Probe
tacatttggtcatggacaaaggatc

SEQ ID NO: 346106 - DNA, 25 bp, Artificial
  Probe
tggatcaactgttgaagataatcca

SEQ ID NO: 346107 - DNA, 25 bp, Artificial
  Probe
gaccaaacttttggaccggatgaat

SEQ ID NO: 346108 - DNA, 25 bp, Artificial
  Probe
tagaaaaacatcctgaaatggtttc

SEQ ID NO: 346109 - DNA, 25 bp, Artificial
  Probe
ccaaccaccaggacctgctgaaggt

SEQ ID NO: 346110 - DNA, 25 bp, Artificial
  Probe
attatgtacatttgtgtctatttat

SEQ ID NO: 346111 - DNA, 25 bp, Artificial
  Probe
cgaagtcatcgacagtgagtgttga

SEQ ID NO: 346112 - DNA, 25 bp, Artificial
  Probe
gacacatgcagcatggctgtctggt

SEQ ID NO: 346113 - DNA, 25 bp, Artificial
  Probe
gtgttgacacatgcagcatggctgt

SEQ ID NO: 346114 - DNA, 25 bp, Artificial
  Probe
atgtacatttgtgtctatttattta

SEQ ID NO: 346115 - DNA, 25 bp, Artificial
  Probe
tgtacatttgtgtctatttatttac

SEQ ID NO: 346116 - DNA, 25 bp, Artificial
  Probe
acatgcagcatggctgtctggttcg

SEQ ID NO: 346117 - DNA, 25 bp, Artificial
  Probe
catcgacagtgagtgttgacacatg

SEQ ID NO: 346118 - DNA, 25 bp, Artificial
  Probe
gtgtctatttatttacttaaacact

SEQ ID NO: 346119 - DNA, 25 bp, Artificial
  Probe
cacatgcagcatggctgtctggttc

SEQ ID NO: 346120 - DNA, 25 bp, Artificial
  Probe
tgttgacacatgcagcatggctgtc

SEQ ID NO: 346121 - DNA, 25 bp, Artificial
  Probe
tctatttatttacttaaacactatc

SEQ ID NO: 346122 - DNA, 25 bp, Artificial
  Probe
tgtgtctatttatttacttaaacac

SEQ ID NO: 346123 - DNA, 25 bp, Artificial
  Probe
acagtgagtgttgacacatgcagca

SEQ ID NO: 346124 - DNA, 25 bp, Artificial
  Probe
acatttgtgtctatttatttactta

SEQ ID NO: 346125 - DNA, 25 bp, Artificial
  Probe
ttgtgtctatttatttacttaaaca

SEQ ID NO: 346126 - DNA, 25 bp, Artificial
  Probe
catgcagcatggctgtctggttcgt

SEQ ID NO: 346127 - DNA, 25 bp, Artificial
  Probe
agtgttgacacatgcagcatggctg

SEQ ID NO: 346128 - DNA, 25 bp, Artificial
  Probe
gagtgttgacacatgcagcatggct

SEQ ID NO: 346129 - DNA, 25 bp, Artificial
  Probe
tgtctatttatttacttaaacacta

SEQ ID NO: 346130 - DNA, 25 bp, Artificial
  Probe
gtacatttgtgtctatttatttact

SEQ ID NO: 346131 - DNA, 25 bp, Artificial
  Probe
tgagtgttgacacatgcagcatggc

SEQ ID NO: 346132 - DNA, 25 bp, Artificial
  Probe
tacatttgtgtctatttatttactt

SEQ ID NO: 346133 - DNA, 25 bp, Artificial
  Probe
ttgacacatgcagcatggctgtctg

SEQ ID NO: 346134 - DNA, 25 bp, Artificial
  Probe
cattatgtacatttgtgtctattta

SEQ ID NO: 346135 - DNA, 25 bp, Artificial
  Probe
atcgacagtgagtgttgacacatgc

SEQ ID NO: 346136 - DNA, 25 bp, Artificial
  Probe
atgcagcatggctgtctggttcgtt

SEQ ID NO: 346137 - DNA, 25 bp, Artificial
  Probe
acacatgcagcatggctgtctggtt

SEQ ID NO: 346138 - DNA, 25 bp, Artificial
  Probe
gttgacacatgcagcatggctgtct

SEQ ID NO: 346139 - DNA, 25 bp, Artificial
  Probe
tgacacatgcagcatggctgtctgg

SEQ ID NO: 346140 - DNA, 25 bp, Artificial
  Probe
catttgtgtctatttatttacttaa

SEQ ID NO: 346141 - DNA, 25 bp, Artificial
  Probe
tgcagcatggctgtctggttcgttc

SEQ ID NO: 346142 - DNA, 25 bp, Artificial
  Probe
ccgctgaagttctcggagaaattcc

SEQ ID NO: 346143 - DNA, 25 bp, Artificial
  Probe
aaagtctttgtgaggccaacaaaca

SEQ ID NO: 346144 - DNA, 25 bp, Artificial
  Probe
gagagtatttctacatctcctctgc

SEQ ID NO: 346145 - DNA, 25 bp, Artificial
  Probe
agagaacgcggcacaaacaccaagg

SEQ ID NO: 346146 - DNA, 25 bp, Artificial
  Probe
tcgatgtctgtatcaatgactacct

SEQ ID NO: 346147 - DNA, 25 bp, Artificial
  Probe
ccaggccgagagtatttctacatct

SEQ ID NO: 346148 - DNA, 25 bp, Artificial
  Probe
caggccaggccgagagtatttctac

SEQ ID NO: 346149 - DNA, 25 bp, Artificial
  Probe
atgagtcagccgagccatcccgcgg

SEQ ID NO: 346150 - DNA, 25 bp, Artificial
  Probe
aagactgagcgctatgtcctgtaca

SEQ ID NO: 346151 - DNA, 25 bp, Artificial
  Probe
aaattcattagaaccagcagatgac

SEQ ID NO: 346152 - DNA, 25 bp, Artificial
  Probe
gccttttggcaatcctactgttcct

SEQ ID NO: 346153 - DNA, 25 bp, Artificial
  Probe
catccaaagggttcaagagatggga

SEQ ID NO: 346154 - DNA, 25 bp, Artificial
  Probe
cgtcacctgtcacagaaaacatcag

SEQ ID NO: 346155 - DNA, 25 bp, Artificial
  Probe
ctggatgttttctgccctcactatg

SEQ ID NO: 346156 - DNA, 25 bp, Artificial
  Probe
ctatgtcctgtacatggtgaatttt

SEQ ID NO: 346157 - DNA, 25 bp, Artificial
  Probe
tgttttctgccctcactatgaggac

SEQ ID NO: 346158 - DNA, 25 bp, Artificial
  Probe
ctctgtaccagaggataagactgag

SEQ ID NO: 346159 - DNA, 25 bp, Artificial
  Probe
ttcctcctggcgatgcttttgacat

SEQ ID NO: 346160 - DNA, 25 bp, Artificial
  Probe
aattttgatggctacagtgcctgcg

SEQ ID NO: 346161 - DNA, 25 bp, Artificial
  Probe
ccaaggatacccagccgccttttgg

SEQ ID NO: 346162 - DNA, 25 bp, Artificial
  Probe
tctcctctgcaatcccagacaatgg

SEQ ID NO: 346163 - DNA, 25 bp, Artificial
  Probe
ggaagaagatcctgcctaaagctca

SEQ ID NO: 346164 - DNA, 25 bp, Artificial
  Probe
ggcacaaacaccaaggatacccagc

SEQ ID NO: 346165 - DNA, 25 bp, Artificial
  Probe
ccgccttttggcaatcctactgttc

SEQ ID NO: 346166 - DNA, 25 bp, Artificial
  Probe
ctttgtgaggccaacaaacagctgt

SEQ ID NO: 346167 - DNA, 25 bp, Artificial
  Probe
tgatggctacagtgcctgcgaccac

SEQ ID NO: 346168 - DNA, 25 bp, Artificial
  Probe
cgtgttttcgatgttaacgacaaag

SEQ ID NO: 346169 - DNA, 25 bp, Artificial
  Probe
cccgcggagagaacgcggcacaaac

SEQ ID NO: 346170 - DNA, 25 bp, Artificial
  Probe
ccagcagatgacaccgtacatgagt

SEQ ID NO: 346171 - DNA, 25 bp, Artificial
  Probe
acatccaaagggttcaagagatggg

SEQ ID NO: 346172 - DNA, 25 bp, Artificial
  Probe
tactgttcctcctggcgatgctttt

SEQ ID NO: 346173 - DNA, 25 bp, Artificial
  Probe
cgtacatgagtcagccgagccatcc

SEQ ID NO: 346174 - DNA, 25 bp, Artificial
  Probe
agtgcctgcgaccacacatccaaag

SEQ ID NO: 346175 - DNA, 25 bp, Artificial
  Probe
cctgtacatggtgaattttgatggc

SEQ ID NO: 346176 - DNA, 25 bp, Artificial
  Probe
tcgtgatcgtgttttcgatgttaac

SEQ ID NO: 346177 - DNA, 25 bp, Artificial
  Probe
caaacggaccgctgaagttctcgga

SEQ ID NO: 346178 - DNA, 25 bp, Artificial
  Probe
cagatgacaccgtacatgagtcagc

SEQ ID NO: 346179 - DNA, 25 bp, Artificial
  Probe
atcccagacaatggaagaagatcct

SEQ ID NO: 346180 - DNA, 25 bp, Artificial
  Probe
ggatttgaattcaggccaggccgag

SEQ ID NO: 346181 - DNA, 25 bp, Artificial
  Probe
ctctccaaacggaccgctgaagttc

SEQ ID NO: 346182 - DNA, 25 bp, Artificial
  Probe
tcagccgagccatcccgcggagaga

SEQ ID NO: 346183 - DNA, 25 bp, Artificial
  Probe
gccatcccgcggagagaacgcggca

SEQ ID NO: 346184 - DNA, 25 bp, Artificial
  Probe
gcttttgacattatagcacagtctc

SEQ ID NO: 346185 - DNA, 25 bp, Artificial
  Probe
tgaattcaggccaggccgagagtat

SEQ ID NO: 346186 - DNA, 25 bp, Artificial
  Probe
ggctacagtgcctgcgaccacacat

SEQ ID NO: 346187 - DNA, 25 bp, Artificial
  Probe
gccaacaaacagctgtatgaaaact

SEQ ID NO: 346188 - DNA, 25 bp, Artificial
  Probe
gaaagatctccgtctggtcagggaa

SEQ ID NO: 346189 - DNA, 25 bp, Artificial
  Probe
agctagaaagatctccgtctggtca

SEQ ID NO: 346190 - DNA, 25 bp, Artificial
  Probe
acttgcaatgagctagaaagatctc

SEQ ID NO: 346191 - DNA, 25 bp, Artificial
  Probe
tatagcagtcaaagccaggggctag

SEQ ID NO: 346192 - DNA, 25 bp, Artificial
  Probe
catgtaaacttgcaatgagctagaa

SEQ ID NO: 346193 - DNA, 25 bp, Artificial
  Probe
aatagtgtgccatccagaagacaga

SEQ ID NO: 346194 - DNA, 25 bp, Artificial
  Probe
gaactgcaagataccgtctttctca

SEQ ID NO: 346195 - DNA, 25 bp, Artificial
  Probe
gaaatggatcacctagtcaggtaaa

SEQ ID NO: 346196 - DNA, 25 bp, Artificial
  Probe
acttgacagtgcacctcagacaggt

SEQ ID NO: 346197 - DNA, 25 bp, Artificial
  Probe
gacagaactgcaagataccgtcttt

SEQ ID NO: 346198 - DNA, 25 bp, Artificial
  Probe
aaacttgcaatgagctagaaagatc

SEQ ID NO: 346199 - DNA, 25 bp, Artificial
  Probe
tctagtcagtcctgactgtggcctc

SEQ ID NO: 346200 - DNA, 25 bp, Artificial
  Probe
ttggaatgcccgtcttgaacttgat

SEQ ID NO: 346201 - DNA, 25 bp, Artificial
  Probe
gactcatgggcctgaatcaaaataa

SEQ ID NO: 346202 - DNA, 25 bp, Artificial
  Probe
cgtctttctcaaaatggaagaaaat

SEQ ID NO: 346203 - DNA, 25 bp, Artificial
  Probe
gggactttggccagtggttatagca

SEQ ID NO: 346204 - DNA, 25 bp, Artificial
  Probe
cacaaacaagtcagggtctatatga

SEQ ID NO: 346205 - DNA, 25 bp, Artificial
  Probe
gttatagcagtcaaagccaggggct

SEQ ID NO: 346206 - DNA, 25 bp, Artificial
  Probe
gcaagataccgtctttctcaaaatg

SEQ ID NO: 346207 - DNA, 25 bp, Artificial
  Probe
tatgagtgggactcatgggcctgaa

SEQ ID NO: 346208 - DNA, 25 bp, Artificial
  Probe
acaagtcagggtctatatgacagtt

SEQ ID NO: 346209 - DNA, 25 bp, Artificial
  Probe
aacccccatgctgctgtgtgctgtc

SEQ ID NO: 346210 - DNA, 25 bp, Artificial
  Probe
aggctcagatagtgccttctgcaga

SEQ ID NO: 346211 - DNA, 25 bp, Artificial
  Probe
cttgatgaaagcttctaccgggaac

SEQ ID NO: 346212 - DNA, 25 bp, Artificial
  Probe
caaatagggactttggccagtggtt

SEQ ID NO: 346213 - DNA, 25 bp, Artificial
  Probe
acctagtcaggtaaatagtgtgcca

SEQ ID NO: 346214 - DNA, 25 bp, Artificial
  Probe
ctgactgtggcctctgcaggctcag

SEQ ID NO: 346215 - DNA, 25 bp, Artificial
  Probe
gtgctgtaccagttccagcctgtca

SEQ ID NO: 346216 - DNA, 25 bp, Artificial
  Probe
tcagatagtgccttctgcagactct

SEQ ID NO: 346217 - DNA, 25 bp, Artificial
  Probe
tggccagtggttatagcagtcaaag

SEQ ID NO: 346218 - DNA, 25 bp, Artificial
  Probe
cgtcttgaacttgatgaaagcttct

SEQ ID NO: 346219 - DNA, 25 bp, Artificial
  Probe
gctagaaagatctccgtctggtcag

SEQ ID NO: 346220 - DNA, 25 bp, Artificial
  Probe
ctgctgtgtgctgtcttatgtatga

SEQ ID NO: 346221 - DNA, 25 bp, Artificial
  Probe
agactcttggaatgcccgtcttgaa

SEQ ID NO: 346222 - DNA, 25 bp, Artificial
  Probe
tagatcctcatgtaaacttgcaatg

SEQ ID NO: 346223 - DNA, 25 bp, Artificial
  Probe
aaagtgcaccccagacagagtccta

SEQ ID NO: 346224 - DNA, 25 bp, Artificial
  Probe
tgccataatgtcacaaacaagtcag

SEQ ID NO: 346225 - DNA, 25 bp, Artificial
  Probe
gcctctgcaggctcagatagtgcct

SEQ ID NO: 346226 - DNA, 25 bp, Artificial
  Probe
gatcctcaagaataaatgtatgtac

SEQ ID NO: 346227 - DNA, 25 bp, Artificial
  Probe
ctgtcttatgtatgagtgggactca

SEQ ID NO: 346228 - DNA, 25 bp, Artificial
  Probe
gagtgggactcatgggcctgaatca

SEQ ID NO: 346229 - DNA, 25 bp, Artificial
  Probe
cagtcctgactgtggcctctgcagg

SEQ ID NO: 346230 - DNA, 25 bp, Artificial
  Probe
ctccgtctggtcagggaaatggatc

SEQ ID NO: 346231 - DNA, 25 bp, Artificial
  Probe
gctgtcttatgtatgagtgggactc

SEQ ID NO: 346232 - DNA, 25 bp, Artificial
  Probe
tgccatccagaagacagaactgcaa

SEQ ID NO: 346233 - DNA, 25 bp, Artificial
  Probe
atccagaagacagaactgcaagata

SEQ ID NO: 346234 - DNA, 25 bp, Artificial
  Probe
ctcgaaggtgttcagttggaggact

SEQ ID NO: 346235 - DNA, 25 bp, Artificial
  Probe
ttgttttagttctacctcaaagatg

SEQ ID NO: 346236 - DNA, 25 bp, Artificial
  Probe
cgctccgggtcatgggaagaataat

SEQ ID NO: 346237 - DNA, 25 bp, Artificial
  Probe
ctcaaagatgattcactacagtgtt

SEQ ID NO: 346238 - DNA, 25 bp, Artificial
  Probe
agttgccttattatgacatggtgcc

SEQ ID NO: 346239 - DNA, 25 bp, Artificial
  Probe
tgattcactacagtgttgaagtgtc

SEQ ID NO: 346240 - DNA, 25 bp, Artificial
  Probe
atgtctcctgctttgtgtaaatgtt

SEQ ID NO: 346241 - DNA, 25 bp, Artificial
  Probe
gaagaagaccatttctcagctgtgt

SEQ ID NO: 346242 - DNA, 25 bp, Artificial
  Probe
gcatgggcaggtcttgactttccca

SEQ ID NO: 346243 - DNA, 25 bp, Artificial
  Probe
ttcactacagtgttgaagtgtccaa

SEQ ID NO: 346244 - DNA, 25 bp, Artificial
  Probe
atggtgccttcagatccttccatag

SEQ ID NO: 346245 - DNA, 25 bp, Artificial
  Probe
caaatctcccaaaccagtggcaaag

SEQ ID NO: 346246 - DNA, 25 bp, Artificial
  Probe
tgtccaaaggcagcatgaaaagata

SEQ ID NO: 346247 - DNA, 25 bp, Artificial
  Probe
cagatccttccatagaggaaatgag

SEQ ID NO: 346248 - DNA, 25 bp, Artificial
  Probe
tgggcaggtcttgactttcccagtt

SEQ ID NO: 346249 - DNA, 25 bp, Artificial
  Probe
ccagtggcaaagctgtgaggcgctc

SEQ ID NO: 346250 - DNA, 25 bp, Artificial
  Probe
gcgctccgggtcatgggaagaataa

SEQ ID NO: 346251 - DNA, 25 bp, Artificial
  Probe
taaggcgcatacaggcgacgggaaa

SEQ ID NO: 346252 - DNA, 25 bp, Artificial
  Probe
ccctgcgcgtgaagaagaccatttc

SEQ ID NO: 346253 - DNA, 25 bp, Artificial
  Probe
tgacatggtgccttcagatccttcc

SEQ ID NO: 346254 - DNA, 25 bp, Artificial
  Probe
tgaagaagaccatttctcagctgtg

SEQ ID NO: 346255 - DNA, 25 bp, Artificial
  Probe
tgccttcagatccttccatagagga

SEQ ID NO: 346256 - DNA, 25 bp, Artificial
  Probe
tgaagtgtccaaaggcagcatgaaa

SEQ ID NO: 346257 - DNA, 25 bp, Artificial
  Probe
cagtggcaaagctgtgaggcgctcc

SEQ ID NO: 346258 - DNA, 25 bp, Artificial
  Probe
cttgactttcccagtttccatgttg

SEQ ID NO: 346259 - DNA, 25 bp, Artificial
  Probe
agtgttgaagtgtccaaaggcagca

SEQ ID NO: 346260 - DNA, 25 bp, Artificial
  Probe
aaaccagtggcaaagctgtgaggcg

SEQ ID NO: 346261 - DNA, 25 bp, Artificial
  Probe
ccgccctgcgcgtgaagaagaccat

SEQ ID NO: 346262 - DNA, 25 bp, Artificial
  Probe
ctcctgctttgtgtaaatgttttcg

SEQ ID NO: 346263 - DNA, 25 bp, Artificial
  Probe
acctcaaagatgattcactacagtg

SEQ ID NO: 346264 - DNA, 25 bp, Artificial
  Probe
ctcccaaaccagtggcaaagctgtg

SEQ ID NO: 346265 - DNA, 25 bp, Artificial
  Probe
ccttccatagaggaaatgaggaagg

SEQ ID NO: 346266 - DNA, 25 bp, Artificial
  Probe
attatgacatggtgccttcagatcc

SEQ ID NO: 346267 - DNA, 25 bp, Artificial
  Probe
tttcatgtctcctgctttgtgtaaa

SEQ ID NO: 346268 - DNA, 25 bp, Artificial
  Probe
aggtcttgactttcccagtttccat

SEQ ID NO: 346269 - DNA, 25 bp, Artificial
  Probe
gtgtccaaaggcagcatgaaaagat

SEQ ID NO: 346270 - DNA, 25 bp, Artificial
  Probe
caaagatgattcactacagtgttga

SEQ ID NO: 346271 - DNA, 25 bp, Artificial
  Probe
cgcatacaggcgacgggaaagccct

SEQ ID NO: 346272 - DNA, 25 bp, Artificial
  Probe
gttttagttctacctcaaagatgat

SEQ ID NO: 346273 - DNA, 25 bp, Artificial
  Probe
cagctgtgtgtcaaggaagactgta

SEQ ID NO: 346274 - DNA, 25 bp, Artificial
  Probe
cctaaggcgcatacaggcgacggga

SEQ ID NO: 346275 - DNA, 25 bp, Artificial
  Probe
gactgtaaggcctaaggcgcataca

SEQ ID NO: 346276 - DNA, 25 bp, Artificial
  Probe
ccagttgccttattatgacatggtg

SEQ ID NO: 346277 - DNA, 25 bp, Artificial
  Probe
ttcagatccttccatagaggaaatg

SEQ ID NO: 346278 - DNA, 25 bp, Artificial
  Probe
tgccttattatgacatggtgccttc

SEQ ID NO: 346279 - DNA, 25 bp, Artificial
  Probe
taagcatgggcaggtcttgactttc

SEQ ID NO: 346280 - DNA, 25 bp, Artificial
  Probe
tataaattattcagtggctgtcaac

SEQ ID NO: 346281 - DNA, 25 bp, Artificial
  Probe
tcccggaccataggaggccaaggcc

SEQ ID NO: 346282 - DNA, 25 bp, Artificial
  Probe
cccttgccagcaccacgctgcctcc

SEQ ID NO: 346283 - DNA, 25 bp, Artificial
  Probe
cggaccataggaggccaaggccgtg

SEQ ID NO: 346284 - DNA, 25 bp, Artificial
  Probe
ccttgccagcaccacgctgcctccc

SEQ ID NO: 346285 - DNA, 25 bp, Artificial
  Probe
ctgcctcccggaccataggaggcca

SEQ ID NO: 346286 - DNA, 25 bp, Artificial
  Probe
gcctccaggctggtacccagaaccc

SEQ ID NO: 346287 - DNA, 25 bp, Artificial
  Probe
ttgccagcaccacgctgcctcccgg

SEQ ID NO: 346288 - DNA, 25 bp, Artificial
  Probe
ataggaggccaaggccgtgtgcata

SEQ ID NO: 346289 - DNA, 25 bp, Artificial
  Probe
ggctggtacccagaacccttgccag

SEQ ID NO: 346290 - DNA, 25 bp, Artificial
  Probe
tgtgcatagtttctttattttgtgt

SEQ ID NO: 346291 - DNA, 25 bp, Artificial
  Probe
aggccgtgtgcatagtttctttatt

SEQ ID NO: 346292 - DNA, 25 bp, Artificial
  Probe
gctggtacccagaacccttgccagc

SEQ ID NO: 346293 - DNA, 25 bp, Artificial
  Probe
aaggccgtgtgcatagtttctttat

SEQ ID NO: 346294 - DNA, 25 bp, Artificial
  Probe
caaggccgtgtgcatagtttcttta

SEQ ID NO: 346295 - DNA, 25 bp, Artificial
  Probe
gtgcatagtttctttattttgtgta

SEQ ID NO: 346296 - DNA, 25 bp, Artificial
  Probe
aggaggccaaggccgtgtgcatagt

SEQ ID NO: 346297 - DNA, 25 bp, Artificial
  Probe
cccagaacccttgccagcaccacgc

SEQ ID NO: 346298 - DNA, 25 bp, Artificial
  Probe
gccgtgtgcatagtttctttatttt

SEQ ID NO: 346299 - DNA, 25 bp, Artificial
  Probe
gcatagtttctttattttgtgtaaa

SEQ ID NO: 346300 - DNA, 25 bp, Artificial
  Probe
gaggccaaggccgtgtgcatagttt

SEQ ID NO: 346301 - DNA, 25 bp, Artificial
  Probe
tgccagcaccacgctgcctcccgga

SEQ ID NO: 346302 - DNA, 25 bp, Artificial
  Probe
cgtgtgcatagtttctttattttgt

SEQ ID NO: 346303 - DNA, 25 bp, Artificial
  Probe
tgcgctgtgctggcagggagtagcc

SEQ ID NO: 346304 - DNA, 25 bp, Artificial
  Probe
aggctggtacccagaacccttgcca

SEQ ID NO: 346305 - DNA, 25 bp, Artificial
  Probe
tgcctcccggaccataggaggccaa

SEQ ID NO: 346306 - DNA, 25 bp, Artificial
  Probe
cccggaccataggaggccaaggccg

SEQ ID NO: 346307 - DNA, 25 bp, Artificial
  Probe
ctggtacccagaacccttgccagca

SEQ ID NO: 346308 - DNA, 25 bp, Artificial
  Probe
gctgcctcccggaccataggaggcc

SEQ ID NO: 346309 - DNA, 25 bp, Artificial
  Probe
ccaggctggtacccagaacccttgc

SEQ ID NO: 346310 - DNA, 25 bp, Artificial
  Probe
ctcccggaccataggaggccaaggc

SEQ ID NO: 346311 - DNA, 25 bp, Artificial
  Probe
aggccaaggccgtgtgcatagtttc

SEQ ID NO: 346312 - DNA, 25 bp, Artificial
  Probe
tttaaccttgtataaattattcagt

SEQ ID NO: 346313 - DNA, 25 bp, Artificial
  Probe
tctttaaccttgtataaattattca

SEQ ID NO: 346314 - DNA, 25 bp, Artificial
  Probe
ccggaccataggaggccaaggccgt

SEQ ID NO: 346315 - DNA, 25 bp, Artificial
  Probe
ggccgtgtgcatagtttctttattt

SEQ ID NO: 346316 - DNA, 25 bp, Artificial
  Probe
gtgtgcatagtttctttattttgtg

SEQ ID NO: 346317 - DNA, 25 bp, Artificial
  Probe
cagaacccttgccagcaccacgctg

SEQ ID NO: 346318 - DNA, 25 bp, Artificial
  Probe
caggctggtacccagaacccttgcc

SEQ ID NO: 346319 - DNA, 25 bp, Artificial
  Probe
ggccaaggccgtgtgcatagtttct

SEQ ID NO: 346320 - DNA, 25 bp, Artificial
  Probe
gtacccagaacccttgccagcacca

SEQ ID NO: 346321 - DNA, 25 bp, Artificial
  Probe
gcctcccggaccataggaggccaag

SEQ ID NO: 346322 - DNA, 25 bp, Artificial
  Probe
cctcccggaccataggaggccaagg

SEQ ID NO: 346323 - DNA, 25 bp, Artificial
  Probe
ccaaggccgtgtgcatagtttcttt

SEQ ID NO: 346324 - DNA, 25 bp, Artificial
  Probe
gccaaggccgtgtgcatagtttctt

SEQ ID NO: 346325 - DNA, 25 bp, Artificial
  Probe
ctccaggctggtacccagaaccctt

SEQ ID NO: 346326 - DNA, 25 bp, Artificial
  Probe
tattaaacttctgagaattaccaga

SEQ ID NO: 346327 - DNA, 25 bp, Artificial
  Probe
ctattaaacttctgagaattaccag

SEQ ID NO: 346328 - DNA, 25 bp, Artificial
  Probe
cgctctccctcaaagggaaggataa

SEQ ID NO: 346329 - DNA, 25 bp, Artificial
  Probe
gagagtgatcgctctccctcaaagg

SEQ ID NO: 346330 - DNA, 25 bp, Artificial
  Probe
taccagagagtgatcgctctccctc

SEQ ID NO: 346331 - DNA, 25 bp, Artificial
  Probe
gaattaccagagagtgatcgctctc

SEQ ID NO: 346332 - DNA, 25 bp, Artificial
  Probe
ctctccctcaaagggaaggataact

SEQ ID NO: 346333 - DNA, 25 bp, Artificial
  Probe
atgtgcgtgcatgtatgtgtgctgt

SEQ ID NO: 346334 - DNA, 25 bp, Artificial
  Probe
agtgatcgctctccctcaaagggaa

SEQ ID NO: 346335 - DNA, 25 bp, Artificial
  Probe
atctattaaacttctgagaattacc

SEQ ID NO: 346336 - DNA, 25 bp, Artificial
  Probe
caccactatctattaaacttctgag

SEQ ID NO: 346337 - DNA, 25 bp, Artificial
  Probe
gttgtgtatgtgcgtgcatgtatgt

SEQ ID NO: 346338 - DNA, 25 bp, Artificial
  Probe
aaacttctgagaattaccagagagt

SEQ ID NO: 346339 - DNA, 25 bp, Artificial
  Probe
ctcaccactatctattaaacttctg

SEQ ID NO: 346340 - DNA, 25 bp, Artificial
  Probe
ctccctcaaagggaaggataactat

SEQ ID NO: 346341 - DNA, 25 bp, Artificial
  Probe
cgtgcatgtatgtgtgctgtgtgta

SEQ ID NO: 346342 - DNA, 25 bp, Artificial
  Probe
aacttctgagaattaccagagagtg

SEQ ID NO: 346343 - DNA, 25 bp, Artificial
  Probe
cttctgagaattaccagagagtgat

SEQ ID NO: 346344 - DNA, 25 bp, Artificial
  Probe
attaccagagagtgatcgctctccc

SEQ ID NO: 346345 - DNA, 25 bp, Artificial
  Probe
tcgctctccctcaaagggaaggata

SEQ ID NO: 346346 - DNA, 25 bp, Artificial
  Probe
aactattgtgccaatgtgttgtgtg

SEQ ID NO: 346347 - DNA, 25 bp, Artificial
  Probe
cgtctctcaccactatctattaaac

SEQ ID NO: 346348 - DNA, 25 bp, Artificial
  Probe
tgctgtgtgtatgtatgatggatgc

SEQ ID NO: 346349 - DNA, 25 bp, Artificial
  Probe
tccctcaaagggaaggataactatt

SEQ ID NO: 346350 - DNA, 25 bp, Artificial
  Probe
acttctgagaattaccagagagtga

SEQ ID NO: 346351 - DNA, 25 bp, Artificial
  Probe
gagtgatcgctctccctcaaaggga

SEQ ID NO: 346352 - DNA, 25 bp, Artificial
  Probe
ttctgagaattaccagagagtgatc

SEQ ID NO: 346353 - DNA, 25 bp, Artificial
  Probe
taaacttctgagaattaccagagag

SEQ ID NO: 346354 - DNA, 25 bp, Artificial
  Probe
aattaccagagagtgatcgctctcc

SEQ ID NO: 346355 - DNA, 25 bp, Artificial
  Probe
ggataactattgtgccaatgtgttg

SEQ ID NO: 346356 - DNA, 25 bp, Artificial
  Probe
gtgtgctgtgtgtatgtatgatgga

SEQ ID NO: 346357 - DNA, 25 bp, Artificial
  Probe
ttaaacttctgagaattaccagaga

SEQ ID NO: 346358 - DNA, 25 bp, Artificial
  Probe
ccaatgtgttgtgtgagtgtgtgtg

SEQ ID NO: 346359 - DNA, 25 bp, Artificial
  Probe
ctattgtgccaatgtgttgtgtgag

SEQ ID NO: 346360 - DNA, 25 bp, Artificial
  Probe
ttgtgccaatgtgttgtgtgagtgt

SEQ ID NO: 346361 - DNA, 25 bp, Artificial
  Probe
attaaacttctgagaattaccagag

SEQ ID NO: 346362 - DNA, 25 bp, Artificial
  Probe
tgtatgtgcgtgcatgtatgtgtgc

SEQ ID NO: 346363 - DNA, 25 bp, Artificial
  Probe
agagtgatcgctctccctcaaaggg

SEQ ID NO: 346364 - DNA, 25 bp, Artificial
  Probe
ttaccagagagtgatcgctctccct

SEQ ID NO: 346365 - DNA, 25 bp, Artificial
  Probe
tctctcaccactatctattaaactt

SEQ ID NO: 346366 - DNA, 25 bp, Artificial
  Probe
gtgttgtgtatgtgcgtgcatgtat

SEQ ID NO: 346367 - DNA, 25 bp, Artificial
  Probe
tgtgttgtgtatgtgcgtgcatgta

SEQ ID NO: 346368 - DNA, 25 bp, Artificial
  Probe
ttgtgtatgtgcgtgcatgtatgtg

SEQ ID NO: 346369 - DNA, 25 bp, Artificial
  Probe
agagagtgatcgctctccctcaaag

SEQ ID NO: 346370 - DNA, 25 bp, Artificial
  Probe
catgtatgtgtgctgtgtgtatgta

SEQ ID NO: 346371 - DNA, 25 bp, Artificial
  Probe
gctctccctcaaagggaaggataac

SEQ ID NO: 346372 - DNA, 25 bp, Artificial
  Probe
ctggtgaatgtggttttggtcccag

SEQ ID NO: 346373 - DNA, 25 bp, Artificial
  Probe
atgtggttttggtcccagacaatgg

SEQ ID NO: 346374 - DNA, 25 bp, Artificial
  Probe
catgtttgaggctggcctggtgaat

SEQ ID NO: 346375 - DNA, 25 bp, Artificial
  Probe
ctacaaacgccaaggacacaacctg

SEQ ID NO: 346376 - DNA, 25 bp, Artificial
  Probe
gagagctgccccaagcgtctggtct

SEQ ID NO: 346377 - DNA, 25 bp, Artificial
  Probe
aggccctggatcctgccctgtggac

SEQ ID NO: 346378 - DNA, 25 bp, Artificial
  Probe
aagcgtctggtctcctccatcactg

SEQ ID NO: 346379 - DNA, 25 bp, Artificial
  Probe
ctaccaaggccgttactatgagagt

SEQ ID NO: 346380 - DNA, 25 bp, Artificial
  Probe
ctattaccggcgtcctgtgctgacc

SEQ ID NO: 346381 - DNA, 25 bp, Artificial
  Probe
ttgcttctacaaacgccaaggacac

SEQ ID NO: 346382 - DNA, 25 bp, Artificial
  Probe
caatggcacaggtgggtcctggtct

SEQ ID NO: 346383 - DNA, 25 bp, Artificial
  Probe
ggagatgatctttcacagagagctg

SEQ ID NO: 346384 - DNA, 25 bp, Artificial
  Probe
tgaagtcttcagtgccaccaggccg

SEQ ID NO: 346385 - DNA, 25 bp, Artificial
  Probe
tggatcctgccctgtggaccatcca

SEQ ID NO: 346386 - DNA, 25 bp, Artificial
  Probe
ccagacaatggcacaggtgggtcct

SEQ ID NO: 346387 - DNA, 25 bp, Artificial
  Probe
ctttggtggacaacccaagcctaat

SEQ ID NO: 346388 - DNA, 25 bp, Artificial
  Probe
cccgtggtttgcaatcaggggaccg

SEQ ID NO: 346389 - DNA, 25 bp, Artificial
  Probe
catacatgcgggatgtgactgtgga

SEQ ID NO: 346390 - DNA, 25 bp, Artificial
  Probe
acctggtttggcatatattacaatc

SEQ ID NO: 346391 - DNA, 25 bp, Artificial
  Probe
ttcacagagagctgccccaagcgtc

SEQ ID NO: 346392 - DNA, 25 bp, Artificial
  Probe
cgggccacctggtttggcatatatt

SEQ ID NO: 346393 - DNA, 25 bp, Artificial
  Probe
tgcaatcaggggaccgggccacctg

SEQ ID NO: 346394 - DNA, 25 bp, Artificial
  Probe
ttctggtagatcacaaggccctgga

SEQ ID NO: 346395 - DNA, 25 bp, Artificial
  Probe
gtcttcagtgccaccaggccgagct

SEQ ID NO: 346396 - DNA, 25 bp, Artificial
  Probe
tcagctggaggacatgtttgaggct

SEQ ID NO: 346397 - DNA, 25 bp, Artificial
  Probe
tctttcacagagagctgccccaagc

SEQ ID NO: 346398 - DNA, 25 bp, Artificial
  Probe
cagaaggtattctaccaaggccgtt

SEQ ID NO: 346399 - DNA, 25 bp, Artificial
  Probe
ggaccgggccacctggtttggcata

SEQ ID NO: 346400 - DNA, 25 bp, Artificial
  Probe
acccctcatacatgcgggatgtgac

SEQ ID NO: 346401 - DNA, 25 bp, Artificial
  Probe
cactgttgcttctacaaacgccaag

SEQ ID NO: 346402 - DNA, 25 bp, Artificial
  Probe
ggtattctaccaaggccgttactat

SEQ ID NO: 346403 - DNA, 25 bp, Artificial
  Probe
acaaggccctggatcctgccctgtg

SEQ ID NO: 346404 - DNA, 25 bp, Artificial
  Probe
catatattacaatctctcaggggct

SEQ ID NO: 346405 - DNA, 25 bp, Artificial
  Probe
caccccattggcttagagcttctgg

SEQ ID NO: 346406 - DNA, 25 bp, Artificial
  Probe
ggtctcctccatcactgttgcttct

SEQ ID NO: 346407 - DNA, 25 bp, Artificial
  Probe
ctgaccagagagtatcaggatattc

SEQ ID NO: 346408 - DNA, 25 bp, Artificial
  Probe
caagcctaatgtgagcgagttggtg

SEQ ID NO: 346409 - DNA, 25 bp, Artificial
  Probe
gcacaggtgggtcctggtctctgaa

SEQ ID NO: 346410 - DNA, 25 bp, Artificial
  Probe
tggtcccagacaatggcacaggtgg

SEQ ID NO: 346411 - DNA, 25 bp, Artificial
  Probe
atatattacaatctctcaggggctg

SEQ ID NO: 346412 - DNA, 25 bp, Artificial
  Probe
ggacacaacctgctaaaaatgacta

SEQ ID NO: 346413 - DNA, 25 bp, Artificial
  Probe
cctggtgaatgtggttttggtccca

SEQ ID NO: 346414 - DNA, 25 bp, Artificial
  Probe
ggtggacaacccaagcctaatgtga

SEQ ID NO: 346415 - DNA, 25 bp, Artificial
  Probe
agagctgccccaagcgtctggtctc

SEQ ID NO: 346416 - DNA, 25 bp, Artificial
  Probe
atattcaggagatgatctttcacag

SEQ ID NO: 346417 - DNA, 25 bp, Artificial
  Probe
acaacccaagcctaatgtgagcgag

SEQ ID NO: 346418 - DNA, 25 bp, Artificial
  Probe
cacagctgggccagcccaggggtca

SEQ ID NO: 346419 - DNA, 25 bp, Artificial
  Probe
catatcctatatgctcctgatgaag

SEQ ID NO: 346420 - DNA, 25 bp, Artificial
  Probe
tgcttatggcgtagaaatggctctg

SEQ ID NO: 346421 - DNA, 25 bp, Artificial
  Probe
agctgaatcacattaaaaagtgcaa

SEQ ID NO: 346422 - DNA, 25 bp, Artificial
  Probe
catgacctactgtcccaagaccaag

SEQ ID NO: 346423 - DNA, 25 bp, Artificial
  Probe
ctgagacagagactctgtgtgtgtg

SEQ ID NO: 346424 - DNA, 25 bp, Artificial
  Probe
aatgggtatggaccagggccctcag

SEQ ID NO: 346425 - DNA, 25 bp, Artificial
  Probe
cacctcggcctgtctctagctgata

SEQ ID NO: 346426 - DNA, 25 bp, Artificial
  Probe
agtggtgagccacaagtacaagact

SEQ ID NO: 346427 - DNA, 25 bp, Artificial
  Probe
caacaaagcatcaaacccgggcctg

SEQ ID NO: 346428 - DNA, 25 bp, Artificial
  Probe
gctcctgatgaaggtgaacaagaac

SEQ ID NO: 346429 - DNA, 25 bp, Artificial
  Probe
aagcgcctggaggatgatgaagatc

SEQ ID NO: 346430 - DNA, 25 bp, Artificial
  Probe
cggctgcccggcaacaaagcatcaa

SEQ ID NO: 346431 - DNA, 25 bp, Artificial
  Probe
gcagcaggcacatgaagaagcagac

SEQ ID NO: 346432 - DNA, 25 bp, Artificial
  Probe
aaagtgcaatacagttcgaggcgtc

SEQ ID NO: 346433 - DNA, 25 bp, Artificial
  Probe
accctggaagggatcaatctcaagt

SEQ ID NO: 346434 - DNA, 25 bp, Artificial
  Probe
ctttttcatggaagtgtgtgacgac

SEQ ID NO: 346435 - DNA, 25 bp, Artificial
  Probe
ttgtcctggaagaatttgttcctga

SEQ ID NO: 346436 - DNA, 25 bp, Artificial
  Probe
tgtgtgtgttctctgcaaggtgttc

SEQ ID NO: 346437 - DNA, 25 bp, Artificial
  Probe
ggaccagttagaggatgctgctatg

SEQ ID NO: 346438 - DNA, 25 bp, Artificial
  Probe
taggagagcatgaccggaagcgcct

SEQ ID NO: 346439 - DNA, 25 bp, Artificial
  Probe
acctcttgctgctcctaagcgctga

SEQ ID NO: 346440 - DNA, 25 bp, Artificial
  Probe
aagatcgcttactggccacactctt

SEQ ID NO: 346441 - DNA, 25 bp, Artificial
  Probe
cgttcctagatgctgtgatgttgga

SEQ ID NO: 346442 - DNA, 25 bp, Artificial
  Probe
gtgttgtgtctcttctcgtatgtgg

SEQ ID NO: 346443 - DNA, 25 bp, Artificial
  Probe
tacggcgcctaatgggaaagtccca

SEQ ID NO: 346444 - DNA, 25 bp, Artificial
  Probe
ggacaaaggatccatgtgggaccag

SEQ ID NO: 346445 - DNA, 25 bp, Artificial
  Probe
atgagaagcttatcaacatgaccta

SEQ ID NO: 346446 - DNA, 25 bp, Artificial
  Probe
ctactgtgtgaaggacagcatggag

SEQ ID NO: 346447 - DNA, 25 bp, Artificial
  Probe
gtgtgtgacgactgtgtggtcttac

SEQ ID NO: 346448 - DNA, 25 bp, Artificial
  Probe
ccctgtgcaggacatgaagactgga

SEQ ID NO: 346449 - DNA, 25 bp, Artificial
  Probe
ggcctgaactaggtggtgagttccc

SEQ ID NO: 346450 - DNA, 25 bp, Artificial
  Probe
gatgaagatcgcttactggccacac

SEQ ID NO: 346451 - DNA, 25 bp, Artificial
  Probe
ctgcggttgagctggtttcgtttta

SEQ ID NO: 346452 - DNA, 25 bp, Artificial
  Probe
gatctgctattctgtgttgtgtctc

SEQ ID NO: 346453 - DNA, 25 bp, Artificial
  Probe
cgttttatgtctgagtgtgtccttg

SEQ ID NO: 346454 - DNA, 25 bp, Artificial
  Probe
gaagcttatcaacatgacctactgt

SEQ ID NO: 346455 - DNA, 25 bp, Artificial
  Probe
agggcggcttgcttcaggtcaccct

SEQ ID NO: 346456 - DNA, 25 bp, Artificial
  Probe
acatcgggacagtgtacgagcgctg

SEQ ID NO: 346457 - DNA, 25 bp, Artificial
  Probe
gaaagtcccacgttgggctggtgta

SEQ ID NO: 346458 - DNA, 25 bp, Artificial
  Probe
gaagaagcagacgttcgttgtgcac

SEQ ID NO: 346459 - DNA, 25 bp, Artificial
  Probe
gttcgtagcagtgaagaagacctcc

SEQ ID NO: 346460 - DNA, 25 bp, Artificial
  Probe
aggggttacacagctgggccagccc

SEQ ID NO: 346461 - DNA, 25 bp, Artificial
  Probe
cgttgtgcacgcagggacggacaca

SEQ ID NO: 346462 - DNA, 25 bp, Artificial
  Probe
cgcagggacggacacaaatggagat

SEQ ID NO: 346463 - DNA, 25 bp, Artificial
  Probe
ctctatgagggactactaggaaggg

SEQ ID NO: 346464 - DNA, 25 bp, Artificial
  Probe
aaccaatcaagtttacgtcctgcgc

SEQ ID NO: 346465 - DNA, 25 bp, Artificial
  Probe
cctgcgccagctttatagatttctg

SEQ ID NO: 346466 - DNA, 25 bp, Artificial
  Probe
aaatcgaggtcttaagtgtctaatc

SEQ ID NO: 346467 - DNA, 25 bp, Artificial
  Probe
atcataaggttgttttgttaatccg

SEQ ID NO: 346468 - DNA, 25 bp, Artificial
  Probe
tgagagccccgggactcgtggctag

SEQ ID NO: 346469 - DNA, 25 bp, Artificial
  Probe
gcctctgggaggaaccaatcaagtt

SEQ ID NO: 346470 - DNA, 25 bp, Artificial
  Probe
cgtcctgcgccagctttatagattt

SEQ ID NO: 346471 - DNA, 25 bp, Artificial
  Probe
cctctgggaggaaccaatcaagttt

SEQ ID NO: 346472 - DNA, 25 bp, Artificial
  Probe
accaatcaagtttacgtcctgcgcc

SEQ ID NO: 346473 - DNA, 25 bp, Artificial
  Probe
ggcctctgggaggaaccaatcaagt

SEQ ID NO: 346474 - DNA, 25 bp, Artificial
  Probe
gggcctctgggaggaaccaatcaag

SEQ ID NO: 346475 - DNA, 25 bp, Artificial
  Probe
tgggcctctgggaggaaccaatcaa

SEQ ID NO: 346476 - DNA, 25 bp, Artificial
  Probe
tcaagtttacgtcctgcgccagctt

SEQ ID NO: 346477 - DNA, 25 bp, Artificial
  Probe
cgccagctttatagatttctgtatt

SEQ ID NO: 346478 - DNA, 25 bp, Artificial
  Probe
ctgcgccagctttatagatttctgt

SEQ ID NO: 346479 - DNA, 25 bp, Artificial
  Probe
tattttaatcaggaacttctggtgg

SEQ ID NO: 346480 - DNA, 25 bp, Artificial
  Probe
ggactcgtggctagcggtccgacca

SEQ ID NO: 346481 - DNA, 25 bp, Artificial
  Probe
tcctgcgccagctttatagatttct

SEQ ID NO: 346482 - DNA, 25 bp, Artificial
  Probe
atcgaggtcttaagtgtctaatcat

SEQ ID NO: 346483 - DNA, 25 bp, Artificial
  Probe
aagtttacgtcctgcgccagcttta

SEQ ID NO: 346484 - DNA, 25 bp, Artificial
  Probe
aggaaccaatcaagtttacgtcctg

SEQ ID NO: 346485 - DNA, 25 bp, Artificial
  Probe
gtcctgcgccagctttatagatttc

SEQ ID NO: 346486 - DNA, 25 bp, Artificial
  Probe
gccagctttatagatttctgtattt

SEQ ID NO: 346487 - DNA, 25 bp, Artificial
  Probe
aaaatcgaggtcttaagtgtctaat

SEQ ID NO: 346488 - DNA, 25 bp, Artificial
  Probe
tagcggtccgaccagtgggcctctg

SEQ ID NO: 346489 - DNA, 25 bp, Artificial
  Probe
caagtttacgtcctgcgccagcttt

SEQ ID NO: 346490 - DNA, 25 bp, Artificial
  Probe
ctagcggtccgaccagtgggcctct

SEQ ID NO: 346491 - DNA, 25 bp, Artificial
  Probe
aatcgaggtcttaagtgtctaatca

SEQ ID NO: 346492 - DNA, 25 bp, Artificial
  Probe
tgttaatccggggttggttttcatg

SEQ ID NO: 346493 - DNA, 25 bp, Artificial
  Probe
ccagtgggcctctgggaggaaccaa

SEQ ID NO: 346494 - DNA, 25 bp, Artificial
  Probe
gcgccagctttatagatttctgtat

SEQ ID NO: 346495 - DNA, 25 bp, Artificial
  Probe
acttctggtggtgtaaatttctagt

SEQ ID NO: 346496 - DNA, 25 bp, Artificial
  Probe
agtttacgtcctgcgccagctttat

SEQ ID NO: 346497 - DNA, 25 bp, Artificial
  Probe
ccaatcaagtttacgtcctgcgcca

SEQ ID NO: 346498 - DNA, 25 bp, Artificial
  Probe
gaaccaatcaagtttacgtcctgcg

SEQ ID NO: 346499 - DNA, 25 bp, Artificial
  Probe
gctagcggtccgaccagtgggcctc

SEQ ID NO: 346500 - DNA, 25 bp, Artificial
  Probe
aatcaagtttacgtcctgcgccagc

SEQ ID NO: 346501 - DNA, 25 bp, Artificial
  Probe
ggaaccaatcaagtttacgtcctgc

SEQ ID NO: 346502 - DNA, 25 bp, Artificial
  Probe
ccagctttatagatttctgtatttt

SEQ ID NO: 346503 - DNA, 25 bp, Artificial
  Probe
atcaagtttacgtcctgcgccagct

SEQ ID NO: 346504 - DNA, 25 bp, Artificial
  Probe
accagtgggcctctgggaggaacca

SEQ ID NO: 346505 - DNA, 25 bp, Artificial
  Probe
tgcgccagctttatagatttctgta

SEQ ID NO: 346506 - DNA, 25 bp, Artificial
  Probe
tacgtcctgcgccagctttatagat

SEQ ID NO: 346507 - DNA, 25 bp, Artificial
  Probe
acgtcctgcgccagctttatagatt

SEQ ID NO: 346508 - DNA, 25 bp, Artificial
  Probe
caatcaagtttacgtcctgcgccag

SEQ ID NO: 346509 - DNA, 25 bp, Artificial
  Probe
gtgggcctctgggaggaaccaatca

SEQ ID NO: 346510 - DNA, 25 bp, Artificial
  Probe
ggtgcctgaaggacggagcccccgg

SEQ ID NO: 346511 - DNA, 25 bp, Artificial
  Probe
gggaatggcagcttggtgcctgaag

SEQ ID NO: 346512 - DNA, 25 bp, Artificial
  Probe
agccccctctgcaggcatgcagccc

SEQ ID NO: 346513 - DNA, 25 bp, Artificial
  Probe
acgaagatctcaaagctgccccgct

SEQ ID NO: 346514 - DNA, 25 bp, Artificial
  Probe
ctcctcagccatgcgaaaacaggag

SEQ ID NO: 346515 - DNA, 25 bp, Artificial
  Probe
cttggtgcctgaaggacggagcccc

SEQ ID NO: 346516 - DNA, 25 bp, Artificial
  Probe
cgaagatctcaaagctgccccgctc

SEQ ID NO: 346517 - DNA, 25 bp, Artificial
  Probe
tgctcctcagccatgcgaaaacagg

SEQ ID NO: 346518 - DNA, 25 bp, Artificial
  Probe
aagatctcaaagctgccccgctccg

SEQ ID NO: 346519 - DNA, 25 bp, Artificial
  Probe
tgcaggcatgcagccccagccttct

SEQ ID NO: 346520 - DNA, 25 bp, Artificial
  Probe
cccgggacagaacagccccctctgc

SEQ ID NO: 346521 - DNA, 25 bp, Artificial
  Probe
ccccgggacagaacagccccctctg

SEQ ID NO: 346522 - DNA, 25 bp, Artificial
  Probe
gcttggtgcctgaaggacggagccc

SEQ ID NO: 346523 - DNA, 25 bp, Artificial
  Probe
caggcatgcagccccagccttctct

SEQ ID NO: 346524 - DNA, 25 bp, Artificial
  Probe
ctgggaatggcagcttggtgcctga

SEQ ID NO: 346525 - DNA, 25 bp, Artificial
  Probe
ctgctcctcagccatgcgaaaacag

SEQ ID NO: 346526 - DNA, 25 bp, Artificial
  Probe
ggacagaacagccccctctgcaggc

SEQ ID NO: 346527 - DNA, 25 bp, Artificial
  Probe
tggtgcctgaaggacggagcccccg

SEQ ID NO: 346528 - DNA, 25 bp, Artificial
  Probe
tctctgctcctcagccatgcgaaaa

SEQ ID NO: 346529 - DNA, 25 bp, Artificial
  Probe
atctcaaagctgccccgctccgcac

SEQ ID NO: 346530 - DNA, 25 bp, Artificial
  Probe
tgaaggacggagcccccgggacaga

SEQ ID NO: 346531 - DNA, 25 bp, Artificial
  Probe
tctgctcctcagccatgcgaaaaca

SEQ ID NO: 346532 - DNA, 25 bp, Artificial
  Probe
gcactgggaatggcagcttggtgcc

SEQ ID NO: 346533 - DNA, 25 bp, Artificial
  Probe
ccctctgcaggcatgcagccccagc

SEQ ID NO: 346534 - DNA, 25 bp, Artificial
  Probe
agcttggtgcctgaaggacggagcc

SEQ ID NO: 346535 - DNA, 25 bp, Artificial
  Probe
ctgaaggacggagcccccgggacag

SEQ ID NO: 346536 - DNA, 25 bp, Artificial
  Probe
ctctgcaggcatgcagccccagcct

SEQ ID NO: 346537 - DNA, 25 bp, Artificial
  Probe
gcagcttggtgcctgaaggacggag

SEQ ID NO: 346538 - DNA, 25 bp, Artificial
  Probe
aatggcagcttggtgcctgaaggac

SEQ ID NO: 346539 - DNA, 25 bp, Artificial
  Probe
tctcaaagctgccccgctccgcact

SEQ ID NO: 346540 - DNA, 25 bp, Artificial
  Probe
ccgcactgggaatggcagcttggtg

SEQ ID NO: 346541 - DNA, 25 bp, Artificial
  Probe
actgggaatggcagcttggtgcctg

SEQ ID NO: 346542 - DNA, 25 bp, Artificial
  Probe
ggcagcttggtgcctgaaggacgga

SEQ ID NO: 346543 - DNA, 25 bp, Artificial
  Probe
gctcctcagccatgcgaaaacagga

SEQ ID NO: 346544 - DNA, 25 bp, Artificial
  Probe
tgcctgaaggacggagcccccggga

SEQ ID NO: 346545 - DNA, 25 bp, Artificial
  Probe
aggcatgcagccccagccttctctc

SEQ ID NO: 346546 - DNA, 25 bp, Artificial
  Probe
ctccgcactgggaatggcagcttgg

SEQ ID NO: 346547 - DNA, 25 bp, Artificial
  Probe
gctccgcactgggaatggcagcttg

SEQ ID NO: 346548 - DNA, 25 bp, Artificial
  Probe
ctgcaggcatgcagccccagccttc

SEQ ID NO: 346549 - DNA, 25 bp, Artificial
  Probe
cctcagccatgcgaaaacaggagat

SEQ ID NO: 346550 - DNA, 25 bp, Artificial
  Probe
cccctctgcaggcatgcagccccag

SEQ ID NO: 346551 - DNA, 25 bp, Artificial
  Probe
tccgcactgggaatggcagcttggt

SEQ ID NO: 346552 - DNA, 25 bp, Artificial
  Probe
ttggtgcctgaaggacggagccccc

SEQ ID NO: 346553 - DNA, 25 bp, Artificial
  Probe
ccccgctccgcactgggaatggcag

SEQ ID NO: 346554 - DNA, 25 bp, Artificial
  Probe
gaatggcagcttggtgcctgaagga

SEQ ID NO: 346555 - DNA, 25 bp, Artificial
  Probe
atggcagcttggtgcctgaaggacg

SEQ ID NO: 346556 - DNA, 25 bp, Artificial
  Probe
tcagtgaccactttccagttgagtt

SEQ ID NO: 346557 - DNA, 25 bp, Artificial
  Probe
tggtttggttccaggcgcccttcac

SEQ ID NO: 346558 - DNA, 25 bp, Artificial
  Probe
ttcctcagagaagtgaaagtggccc

SEQ ID NO: 346559 - DNA, 25 bp, Artificial
  Probe
tgccatggatatcattgtgaagatc

SEQ ID NO: 346560 - DNA, 25 bp, Artificial
  Probe
taaagtcgtcccttgcttccagata

SEQ ID NO: 346561 - DNA, 25 bp, Artificial
  Probe
tgcgaaccaccatgggtaacctgaa

SEQ ID NO: 346562 - DNA, 25 bp, Artificial
  Probe
ttctgttacatcaccctgaccacgg

SEQ ID NO: 346563 - DNA, 25 bp, Artificial
  Probe
tcaaacgctgcgacctcatactgct

SEQ ID NO: 346564 - DNA, 25 bp, Artificial
  Probe
atgacaggattgtgcttcgcggaca

SEQ ID NO: 346565 - DNA, 25 bp, Artificial
  Probe
acctccgttaaagagatagatgagc

SEQ ID NO: 346566 - DNA, 25 bp, Artificial
  Probe
atagtcaactctgtggttccccgct

SEQ ID NO: 346567 - DNA, 25 bp, Artificial
  Probe
aacagtatgccttcctctacaagga

SEQ ID NO: 346568 - DNA, 25 bp, Artificial
  Probe
gagcaccagctgtgcctatgacagg

SEQ ID NO: 346569 - DNA, 25 bp, Artificial
  Probe
cagagaatttcatcttcatgggtga

SEQ ID NO: 346570 - DNA, 25 bp, Artificial
  Probe
ctttcagaaagcttatgagttgtct

SEQ ID NO: 346571 - DNA, 25 bp, Artificial
  Probe
gttaattttgcctggagccaagttg

SEQ ID NO: 346572 - DNA, 25 bp, Artificial
  Probe
cagtaattcctgttatcggccagct

SEQ ID NO: 346573 - DNA, 25 bp, Artificial
  Probe
ggctaagctgttttcactgtccact

SEQ ID NO: 346574 - DNA, 25 bp, Artificial
  Probe
agatgagctggctgacgtctacacg

SEQ ID NO: 346575 - DNA, 25 bp, Artificial
  Probe
aatggaaactcacgaagaagcacga

SEQ ID NO: 346576 - DNA, 25 bp, Artificial
  Probe
atccttgcccttcatggtgccctgt

SEQ ID NO: 346577 - DNA, 25 bp, Artificial
  Probe
gaaggaaaaccacaatgccatggat

SEQ ID NO: 346578 - DNA, 25 bp, Artificial
  Probe
tcccttgcttccagataaaatggcc

SEQ ID NO: 346579 - DNA, 25 bp, Artificial
  Probe
gaaggcaaaatacctctaccatgac

SEQ ID NO: 346580 - DNA, 25 bp, Artificial
  Probe
tgctggctgcagctacgtccccaag

SEQ ID NO: 346581 - DNA, 25 bp, Artificial
  Probe
caatgtgaggtcctttggagagagc

SEQ ID NO: 346582 - DNA, 25 bp, Artificial
  Probe
aattttgcctggagccaagttggga

SEQ ID NO: 346583 - DNA, 25 bp, Artificial
  Probe
ctacaaggagaagctggtgtctgtg

SEQ ID NO: 346584 - DNA, 25 bp, Artificial
  Probe
gtgattgtccccttgcacacaactc

SEQ ID NO: 346585 - DNA, 25 bp, Artificial
  Probe
gctgcagctacgtccccaagaaggc

SEQ ID NO: 346586 - DNA, 25 bp, Artificial
  Probe
atgagttgtctgaagaggaggccct

SEQ ID NO: 346587 - DNA, 25 bp, Artificial
  Probe
ccatgctgatggagaagctgaatgg

SEQ ID NO: 346588 - DNA, 25 bp, Artificial
  Probe
tctacacggatgtgagaagacgatg

SEQ ID NO: 346589 - DNA, 25 bp, Artificial
  Probe
tcaaggacagcaacaacaacatctg

SEQ ID NO: 346590 - DNA, 25 bp, Artificial
  Probe
gccgaaaatctgtttctctaaagaa

SEQ ID NO: 346591 - DNA, 25 bp, Artificial
  Probe
ggaggccctggatgtcagtgaccac

SEQ ID NO: 346592 - DNA, 25 bp, Artificial
  Probe
ttcactgctgccaaggacttcgtga

SEQ ID NO: 346593 - DNA, 25 bp, Artificial
  Probe
gctccagtggcgtctttgactttca

SEQ ID NO: 346594 - DNA, 25 bp, Artificial
  Probe
caaagatgtccctgtacccagcttc

SEQ ID NO: 346595 - DNA, 25 bp, Artificial
  Probe
cagccgaaaatctgtttctctaaag

SEQ ID NO: 346596 - DNA, 25 bp, Artificial
  Probe
ctctcggcttggaagaaacacatat

SEQ ID NO: 346597 - DNA, 25 bp, Artificial
  Probe
gaggagagccttctgttacatcacc

SEQ ID NO: 346598 - DNA, 25 bp, Artificial
  Probe
actgctgatggaaatcaaggacagc

SEQ ID NO: 346599 - DNA, 25 bp, Artificial
  Probe
attaagactggctaagctgttttca

SEQ ID NO: 346600 - DNA, 25 bp, Artificial
  Probe
ctgaaacctccgttaaagagataga

SEQ ID NO: 346601 - DNA, 25 bp, Artificial
  Probe
cccaagaaggcctggaagaacatcc

SEQ ID NO: 346602 - DNA, 25 bp, Artificial
  Probe
agtgataacctcagtcgacatgaca

SEQ ID NO: 346603 - DNA, 25 bp, Artificial
  Probe
tcaatgaatctctgcagttgaatct

SEQ ID NO: 346604 - DNA, 25 bp, Artificial
  Probe
caagccggcttcaagaagatgggct

SEQ ID NO: 346605 - DNA, 25 bp, Artificial
  Probe
agaacttcaaaatactacaagccgg

SEQ ID NO: 346606 - DNA, 25 bp, Artificial
  Probe
gttcaggggctgcatactgtcagtt

SEQ ID NO: 346607 - DNA, 25 bp, Artificial
  Probe
cgacgtcagtcaccagtgataacct

SEQ ID NO: 346608 - DNA, 25 bp, Artificial
  Probe
ttcatggacatgctcttccccggct

SEQ ID NO: 346609 - DNA, 25 bp, Artificial
  Probe
agccggcttcaagaagatgggcttg

SEQ ID NO: 346610 - DNA, 25 bp, Artificial
  Probe
agtgaatgtgtactcgacgtcagtc

SEQ ID NO: 346611 - DNA, 25 bp, Artificial
  Probe
tgaatgtgtactcgacgtcagtcac

SEQ ID NO: 346612 - DNA, 25 bp, Artificial
  Probe
atgttcaggggctgcatactgtcag

SEQ ID NO: 346613 - DNA, 25 bp, Artificial
  Probe
gatagaacagctatgttcaggggct

SEQ ID NO: 346614 - DNA, 25 bp, Artificial
  Probe
ggatcaatgaatctctgcagttgaa

SEQ ID NO: 346615 - DNA, 25 bp, Artificial
  Probe
gtgtactcgacgtcagtcaccagtg

SEQ ID NO: 346616 - DNA, 25 bp, Artificial
  Probe
gtcaccagtgataacctcagtcgac

SEQ ID NO: 346617 - DNA, 25 bp, Artificial
  Probe
tctgcagttgaatctgacaaagata

SEQ ID NO: 346618 - DNA, 25 bp, Artificial
  Probe
agttcatggacatgctcttccccgg

SEQ ID NO: 346619 - DNA, 25 bp, Artificial
  Probe
cattgccttgaagaaagtgaaattc

SEQ ID NO: 346620 - DNA, 25 bp, Artificial
  Probe
gacatgacatgctggcttggatcaa

SEQ ID NO: 346621 - DNA, 25 bp, Artificial
  Probe
gaacttcaaaatactacaagccggc

SEQ ID NO: 346622 - DNA, 25 bp, Artificial
  Probe
ccccggctccattgccttgaagaaa

SEQ ID NO: 346623 - DNA, 25 bp, Artificial
  Probe
acagctatgttcaggggctgcatac

SEQ ID NO: 346624 - DNA, 25 bp, Artificial
  Probe
ccattgccttgaagaaagtgaaatt

SEQ ID NO: 346625 - DNA, 25 bp, Artificial
  Probe
tggatcaatgaatctctgcagttga

SEQ ID NO: 346626 - DNA, 25 bp, Artificial
  Probe
gaatgtgtactcgacgtcagtcacc

SEQ ID NO: 346627 - DNA, 25 bp, Artificial
  Probe
tcagtcgacatgacatgctggcttg

SEQ ID NO: 346628 - DNA, 25 bp, Artificial
  Probe
acatgctggcttggatcaatgaatc

SEQ ID NO: 346629 - DNA, 25 bp, Artificial
  Probe
ggctccattgccttgaagaaagtga

SEQ ID NO: 346630 - DNA, 25 bp, Artificial
  Probe
catactgtcagttcatggacatgct

SEQ ID NO: 346631 - DNA, 25 bp, Artificial
  Probe
cgacatgacatgctggcttggatca

SEQ ID NO: 346632 - DNA, 25 bp, Artificial
  Probe
gctgcatactgtcagttcatggaca

SEQ ID NO: 346633 - DNA, 25 bp, Artificial
  Probe
acgtcagtcaccagtgataacctca

SEQ ID NO: 346634 - DNA, 25 bp, Artificial
  Probe
ccggcttcaagaagatgggcttgac

SEQ ID NO: 346635 - DNA, 25 bp, Artificial
  Probe
gggctgcatactgtcagttcatgga

SEQ ID NO: 346636 - DNA, 25 bp, Artificial
  Probe
gcttcaagaagatgggcttgacaaa

SEQ ID NO: 346637 - DNA, 25 bp, Artificial
  Probe
tgacatgctggcttggatcaatgaa

SEQ ID NO: 346638 - DNA, 25 bp, Artificial
  Probe
ctctgcagttgaatctgacaaagat

SEQ ID NO: 346639 - DNA, 25 bp, Artificial
  Probe
tgcatactgtcagttcatggacatg

SEQ ID NO: 346640 - DNA, 25 bp, Artificial
  Probe
cttggatcaatgaatctctgcagtt

SEQ ID NO: 346641 - DNA, 25 bp, Artificial
  Probe
atctctgcagttgaatctgacaaag

SEQ ID NO: 346642 - DNA, 25 bp, Artificial
  Probe
atgaatctctgcagttgaatctgac

SEQ ID NO: 346643 - DNA, 25 bp, Artificial
  Probe
tgctggcttggatcaatgaatctct

SEQ ID NO: 346644 - DNA, 25 bp, Artificial
  Probe
tcgacgtcagtcaccagtgataacc

SEQ ID NO: 346645 - DNA, 25 bp, Artificial
  Probe
aatctctgcagttgaatctgacaaa

SEQ ID NO: 346646 - DNA, 25 bp, Artificial
  Probe
ttccccggctccattgccttgaaga

SEQ ID NO: 346647 - DNA, 25 bp, Artificial
  Probe
ctacaagccggcttcaagaagatgg

SEQ ID NO: 346648 - DNA, 25 bp, Artificial
  Probe
cacatctttttagaaatcgaatgga

SEQ ID NO: 346649 - DNA, 25 bp, Artificial
  Probe
ggcctcggtccctggcagctgaatg

SEQ ID NO: 346650 - DNA, 25 bp, Artificial
  Probe
gagtatccttctaagtaatgctcac

SEQ ID NO: 346651 - DNA, 25 bp, Artificial
  Probe
gatggatattcttttacgtgcccag

SEQ ID NO: 346652 - DNA, 25 bp, Artificial
  Probe
ctgactttctcatgggcctcacttt

SEQ ID NO: 346653 - DNA, 25 bp, Artificial
  Probe
aacatcattctgacaaaccagagtg

SEQ ID NO: 346654 - DNA, 25 bp, Artificial
  Probe
ccctttccaagtattatggaccttg

SEQ ID NO: 346655 - DNA, 25 bp, Artificial
  Probe
cctttcaaagtcctcagcgactcag

SEQ ID NO: 346656 - DNA, 25 bp, Artificial
  Probe
tgggcctcactttccctttcaaagt

SEQ ID NO: 346657 - DNA, 25 bp, Artificial
  Probe
ttaagaatgtcactaacagtccaga

SEQ ID NO: 346658 - DNA, 25 bp, Artificial
  Probe
tcaaggatgtcactaacatacagtg

SEQ ID NO: 346659 - DNA, 25 bp, Artificial
  Probe
cgttcttcgggctcatcagctttga

SEQ ID NO: 346660 - DNA, 25 bp, Artificial
  Probe
ccaggccaaggagaccctgctctat

SEQ ID NO: 346661 - DNA, 25 bp, Artificial
  Probe
tgtgtttgtattcagggtgtctgcc

SEQ ID NO: 346662 - DNA, 25 bp, Artificial
  Probe
agaattcaccctgctgctctcggct

SEQ ID NO: 346663 - DNA, 25 bp, Artificial
  Probe
tggcacaaggcgtctaactatgtct

SEQ ID NO: 346664 - DNA, 25 bp, Artificial
  Probe
taagttcccatgtaaagtgaaagtc

SEQ ID NO: 346665 - DNA, 25 bp, Artificial
  Probe
ctggcagctgaatgtgtttgtattc

SEQ ID NO: 346666 - DNA, 25 bp, Artificial
  Probe
atgggcctcactttccctttcaaag

SEQ ID NO: 346667 - DNA, 25 bp, Artificial
  Probe
ctcaacggaatatcgggatggatat

SEQ ID NO: 346668 - DNA, 25 bp, Artificial
  Probe
agtcctcagcgactcaggcctcggt

SEQ ID NO: 346669 - DNA, 25 bp, Artificial
  Probe
aagtaatgctcacctctgtttcatg

SEQ ID NO: 346670 - DNA, 25 bp, Artificial
  Probe
tggaccttgttacacggtaattaag

SEQ ID NO: 346671 - DNA, 25 bp, Artificial
  Probe
gcacgtcacatctttttagaaatcg

SEQ ID NO: 346672 - DNA, 25 bp, Artificial
  Probe
tgtgggtgctagtctgcgagttacc

SEQ ID NO: 346673 - DNA, 25 bp, Artificial
  Probe
ctgccaatgtgtgtctggaccccat

SEQ ID NO: 346674 - DNA, 25 bp, Artificial
  Probe
ctataaaatcgtgaagccccttctg

SEQ ID NO: 346675 - DNA, 25 bp, Artificial
  Probe
gcccagctctaagagttttatcatc

SEQ ID NO: 346676 - DNA, 25 bp, Artificial
  Probe
tataaaatcgtgaagccccttctgg

SEQ ID NO: 346677 - DNA, 25 bp, Artificial
  Probe
tggaactcaaaaacgagctggggcg

SEQ ID NO: 346678 - DNA, 25 bp, Artificial
  Probe
caccctttcagaagttcctcctgag

SEQ ID NO: 346679 - DNA, 25 bp, Artificial
  Probe
catgtgggtgctagtctgcgagtta

SEQ ID NO: 346680 - DNA, 25 bp, Artificial
  Probe
agctttgacaggtactataaaatcg

SEQ ID NO: 346681 - DNA, 25 bp, Artificial
  Probe
gctgctctcggctgccaatgtgtgt

SEQ ID NO: 346682 - DNA, 25 bp, Artificial
  Probe
ggaagatcttcaagtctcacctcaa

SEQ ID NO: 346683 - DNA, 25 bp, Artificial
  Probe
tagagacttccaaaaccagaagggg

SEQ ID NO: 346684 - DNA, 25 bp, Artificial
  Probe
aagccccttctggtgtctatcgtcc

SEQ ID NO: 346685 - DNA, 25 bp, Artificial
  Probe
tattaacgggcttcttagaagacac

SEQ ID NO: 346686 - DNA, 25 bp, Artificial
  Probe
attccatctccgtcaaaaggaagtc

SEQ ID NO: 346687 - DNA, 25 bp, Artificial
  Probe
catctatctcaagaacatagttgtg

SEQ ID NO: 346688 - DNA, 25 bp, Artificial
  Probe
tgtgctcgcatttgtcgcctgtttc

SEQ ID NO: 346689 - DNA, 25 bp, Artificial
  Probe
tcaaaaggaagtccagccgcaatat

SEQ ID NO: 346690 - DNA, 25 bp, Artificial
  Probe
gtctcacctcaagtccagaaagaat

SEQ ID NO: 346691 - DNA, 25 bp, Artificial
  Probe
tctcttctattaacgggcttcttag

SEQ ID NO: 346692 - DNA, 25 bp, Artificial
  Probe
atggccataacgaggaagatcttca

SEQ ID NO: 346693 - DNA, 25 bp, Artificial
  Probe
ggtgctcatgcttctcctcgctgtc

SEQ ID NO: 346694 - DNA, 25 bp, Artificial
  Probe
gtgtgatccttttgagcgcttgacc

SEQ ID NO: 346695 - DNA, 25 bp, Artificial
  Probe
agtcctggagattacatatgcaaga

SEQ ID NO: 346696 - DNA, 25 bp, Artificial
  Probe
gattaatgtgtctgtgtcaggatcc

SEQ ID NO: 346697 - DNA, 25 bp, Artificial
  Probe
gcaaaaaccatgcacgccgtgtgat

SEQ ID NO: 346698 - DNA, 25 bp, Artificial
  Probe
cctgacaaactcagggcagagattg

SEQ ID NO: 346699 - DNA, 25 bp, Artificial
  Probe
gcagcagaaactcaagcaaagatta

SEQ ID NO: 346700 - DNA, 25 bp, Artificial
  Probe
taaagacctggaagagaaggtcact

SEQ ID NO: 346701 - DNA, 25 bp, Artificial
  Probe
agagattgccatcaatgttcaccta

SEQ ID NO: 346702 - DNA, 25 bp, Artificial
  Probe
gacggtctactggatataaacattg

SEQ ID NO: 346703 - DNA, 25 bp, Artificial
  Probe
agatacctccctgacaaactcaggg

SEQ ID NO: 346704 - DNA, 25 bp, Artificial
  Probe
agtatgaatcgatgcagcagaaact

SEQ ID NO: 346705 - DNA, 25 bp, Artificial
  Probe
agaagttctgagatacctccctgac

SEQ ID NO: 346706 - DNA, 25 bp, Artificial
  Probe
cagcccttgaggaacccggaggaga

SEQ ID NO: 346707 - DNA, 25 bp, Artificial
  Probe
aaatgtattcagtgcaactgcgtcc

SEQ ID NO: 346708 - DNA, 25 bp, Artificial
  Probe
gatcagcattcttaacatcaaaggc

SEQ ID NO: 346709 - DNA, 25 bp, Artificial
  Probe
tggtgttgagtgacggcagctactt

SEQ ID NO: 346710 - DNA, 25 bp, Artificial
  Probe
gtgcaacactgcaacaaaagtatca

SEQ ID NO: 346711 - DNA, 25 bp, Artificial
  Probe
tgaaactgaattttcagcccttgag

SEQ ID NO: 346712 - DNA, 25 bp, Artificial
  Probe
gtatctctcactttcaggccacctg

SEQ ID NO: 346713 - DNA, 25 bp, Artificial
  Probe
aaaggttcgtatctttgctgactgt

SEQ ID NO: 346714 - DNA, 25 bp, Artificial
  Probe
tacagagtacccagatgccaaaact

SEQ ID NO: 346715 - DNA, 25 bp, Artificial
  Probe
tttcaatcaagagttgatgctatca

SEQ ID NO: 346716 - DNA, 25 bp, Artificial
  Probe
actttcaggccacctgcatcactga

SEQ ID NO: 346717 - DNA, 25 bp, Artificial
  Probe
atttcaatcaagagttgatgctatc

SEQ ID NO: 346718 - DNA, 25 bp, Artificial
  Probe
ttgctgactgtgaggctggtctgtt

SEQ ID NO: 346719 - DNA, 25 bp, Artificial
  Probe
ttgagtgacggcagctactttggcg

SEQ ID NO: 346720 - DNA, 25 bp, Artificial
  Probe
gcaaggctggcaaccgaagaacagc

SEQ ID NO: 346721 - DNA, 25 bp, Artificial
  Probe
tcttggctgagtatgaatcgatgca

SEQ ID NO: 346722 - DNA, 25 bp, Artificial
  Probe
tgttcacctagacacgttaaaaaag

SEQ ID NO: 346723 - DNA, 25 bp, Artificial
  Probe
ttccaatatgaatgcagcccgggca

SEQ ID NO: 346724 - DNA, 25 bp, Artificial
  Probe
tgcagcccgggcagaatttcaatca

SEQ ID NO: 346725 - DNA, 25 bp, Artificial
  Probe
aacctggccaatagcaaaaaccatg

SEQ ID NO: 346726 - DNA, 25 bp, Artificial
  Probe
gccatcaatgttcacctagacacgt

SEQ ID NO: 346727 - DNA, 25 bp, Artificial
  Probe
gtcaggatccgtttattctctttcc

SEQ ID NO: 346728 - DNA, 25 bp, Artificial
  Probe
gaaagacggtctactggatataaac

SEQ ID NO: 346729 - DNA, 25 bp, Artificial
  Probe
cagatgccaaaactatgttggagga

SEQ ID NO: 346730 - DNA, 25 bp, Artificial
  Probe
aacattgcgaatttgggcagtgacc

SEQ ID NO: 346731 - DNA, 25 bp, Artificial
  Probe
tgtcggtaacataggctccatgatt

SEQ ID NO: 346732 - DNA, 25 bp, Artificial
  Probe
tgttgtgcaacactgcaacaaaagt

SEQ ID NO: 346733 - DNA, 25 bp, Artificial
  Probe
agcccgggcagaatttcaatcaaga

SEQ ID NO: 346734 - DNA, 25 bp, Artificial
  Probe
tgttgaaattacaaccccaggtgta

SEQ ID NO: 346735 - DNA, 25 bp, Artificial
  Probe
aggggtcagtggacctcctgcaaac

SEQ ID NO: 346736 - DNA, 25 bp, Artificial
  Probe
ctcaaaggatgacctcatggaagct

SEQ ID NO: 346737 - DNA, 25 bp, Artificial
  Probe
catcactgagtcaaatgtattcagt

SEQ ID NO: 346738 - DNA, 25 bp, Artificial
  Probe
tgaacacgtatctctcactttcagg

SEQ ID NO: 346739 - DNA, 25 bp, Artificial
  Probe
caatatgaatgcagcccgggcagaa

SEQ ID NO: 346740 - DNA, 25 bp, Artificial
  Probe
ccccatcttgttgtaatttaagtga

SEQ ID NO: 346741 - DNA, 25 bp, Artificial
  Probe
cctccgctgggcagacagagacctg

SEQ ID NO: 346742 - DNA, 25 bp, Artificial
  Probe
tgtgtcccatactggcctgaggtgg

SEQ ID NO: 346743 - DNA, 25 bp, Artificial
  Probe
gcggggcccatcattgtgcattgca

SEQ ID NO: 346744 - DNA, 25 bp, Artificial
  Probe
tggcactaccagtacctgagctggc

SEQ ID NO: 346745 - DNA, 25 bp, Artificial
  Probe
agcaagaaccgctacaagaacattc

SEQ ID NO: 346746 - DNA, 25 bp, Artificial
  Probe
cgatcggcagacaaggagaagaaca

SEQ ID NO: 346747 - DNA, 25 bp, Artificial
  Probe
atacaatcccagaggggccaggagt

SEQ ID NO: 346748 - DNA, 25 bp, Artificial
  Probe
gagtcagaggacacagccaaggccg

SEQ ID NO: 346749 - DNA, 25 bp, Artificial
  Probe
actaccagagaggtggagaaaggcc

SEQ ID NO: 346750 - DNA, 25 bp, Artificial
  Probe
gagtcagacccttctcttcttgtaa

SEQ ID NO: 346751 - DNA, 25 bp, Artificial
  Probe
tcttgtaaataaagcccctggacaa

SEQ ID NO: 346752 - DNA, 25 bp, Artificial
  Probe
caatgccaactacgttaagaaccag

SEQ ID NO: 346753 - DNA, 25 bp, Artificial
  Probe
gctaccgtcaatgacttctggcaga

SEQ ID NO: 346754 - DNA, 25 bp, Artificial
  Probe
gtacaaacttcgaacattgcagatc

SEQ ID NO: 346755 - DNA, 25 bp, Artificial
  Probe
ggaacatcagccttactccgtgcag

SEQ ID NO: 346756 - DNA, 25 bp, Artificial
  Probe
agatggcttggcaggagaacactcg

SEQ ID NO: 346757 - DNA, 25 bp, Artificial
  Probe
ggcaccatcatcgtcattgatatgc

SEQ ID NO: 346758 - DNA, 25 bp, Artificial
  Probe
attcttccctttgaccacagccgag

SEQ ID NO: 346759 - DNA, 25 bp, Artificial
  Probe
ccaggagtcggagtatgggaacatc

SEQ ID NO: 346760 - DNA, 25 bp, Artificial
  Probe
aggcaaagaacttgcaccagcgtct

SEQ ID NO: 346761 - DNA, 25 bp, Artificial
  Probe
agaacaaaggttctctcaagaggaa

SEQ ID NO: 346762 - DNA, 25 bp, Artificial
  Probe
gcactcagcgcgtctatgggctcta

SEQ ID NO: 346763 - DNA, 25 bp, Artificial
  Probe
atcccagggtctgattacatcaatg

SEQ ID NO: 346764 - DNA, 25 bp, Artificial
  Probe
agagtctgcaaaagcaagaggcaaa

SEQ ID NO: 346765 - DNA, 25 bp, Artificial
  Probe
cagcgatcggcagacaaggagaaga

SEQ ID NO: 346766 - DNA, 25 bp, Artificial
  Probe
cagcggccggagaacaagagcaaga

SEQ ID NO: 346767 - DNA, 25 bp, Artificial
  Probe
ctccggctttgaggagtgcccacgc

SEQ ID NO: 346768 - DNA, 25 bp, Artificial
  Probe
tccccactggacaatggggacctgg

SEQ ID NO: 346769 - DNA, 25 bp, Artificial
  Probe
agagcgtctccaccaaggggctaga

SEQ ID NO: 346770 - DNA, 25 bp, Artificial
  Probe
tatgggaacatcacctaccctccgg

SEQ ID NO: 346771 - DNA, 25 bp, Artificial
  Probe
tggagatcatacaatcccagagggg

SEQ ID NO: 346772 - DNA, 25 bp, Artificial
  Probe
cagtacctgagctggcctgaccatg

SEQ ID NO: 346773 - DNA, 25 bp, Artificial
  Probe
cagtgagcctggaggtgtcctcagc

SEQ ID NO: 346774 - DNA, 25 bp, Artificial
  Probe
ttgcaccagcgtctggaagggcagc

SEQ ID NO: 346775 - DNA, 25 bp, Artificial
  Probe
cagttcatcgaaacaaccaagaaga

SEQ ID NO: 346776 - DNA, 25 bp, Artificial
  Probe
agtctgcaaaagcaagaggcaaaga

SEQ ID NO: 346777 - DNA, 25 bp, Artificial
  Probe
ccgggtcttggaactgaacaagaag

SEQ ID NO: 346778 - DNA, 25 bp, Artificial
  Probe
atttatgtggccatcgcccagttca

SEQ ID NO: 346779 - DNA, 25 bp, Artificial
  Probe
gcaagaaccgctacaagaacattct

SEQ ID NO: 346780 - DNA, 25 bp, Artificial
  Probe
ccggaacaaatgtgtcccatactgg

SEQ ID NO: 346781 - DNA, 25 bp, Artificial
  Probe
ctggatcagatcaaccagcggcagg

SEQ ID NO: 346782 - DNA, 25 bp, Artificial
  Probe
ctgggcagacagagacctgtagtcc

SEQ ID NO: 346783 - DNA, 25 bp, Artificial
  Probe
tgaccatggggttcccagtgagcct

SEQ ID NO: 346784 - DNA, 25 bp, Artificial
  Probe
ttggcaggagaacactcgtgtcatc

SEQ ID NO: 346785 - DNA, 25 bp, Artificial
  Probe
aggacacagccaaggccggcttctg

SEQ ID NO: 346786 - DNA, 25 bp, Artificial
  Probe
ttaaatcaggtctttgtcttgccct

SEQ ID NO: 346787 - DNA, 25 bp, Artificial
  Probe
agagcttgagtatctgaccaaaaat

SEQ ID NO: 346788 - DNA, 25 bp, Artificial
  Probe
ttgccctgagaagaaggatgagacc

SEQ ID NO: 346789 - DNA, 25 bp, Artificial
  Probe
aaattcaggctacttaaatcaggtc

SEQ ID NO: 346790 - DNA, 25 bp, Artificial
  Probe
gatcagtaagtgctctgtggcctga

SEQ ID NO: 346791 - DNA, 25 bp, Artificial
  Probe
atgatcagtaagtgctctgtggcct

SEQ ID NO: 346792 - DNA, 25 bp, Artificial
  Probe
acttgtatgatcagtaagtgctctg

SEQ ID NO: 346793 - DNA, 25 bp, Artificial
  Probe
cttaaatcaggtctttgtcttgccc

SEQ ID NO: 346794 - DNA, 25 bp, Artificial
  Probe
tgccctgagaagaaggatgagacca

SEQ ID NO: 346795 - DNA, 25 bp, Artificial
  Probe
tgatcagtaagtgctctgtggcctg

SEQ ID NO: 346796 - DNA, 25 bp, Artificial
  Probe
ttttagagcttgagtatctgaccaa

SEQ ID NO: 346797 - DNA, 25 bp, Artificial
  Probe
caggtctttgtcttgccctgagaag

SEQ ID NO: 346798 - DNA, 25 bp, Artificial
  Probe
tagataaccaagctatatgaattgc

SEQ ID NO: 346799 - DNA, 25 bp, Artificial
  Probe
gtcttgccctgagaagaaggatgag

SEQ ID NO: 346800 - DNA, 25 bp, Artificial
  Probe
caggctacttaaatcaggtctttgt

SEQ ID NO: 346801 - DNA, 25 bp, Artificial
  Probe
tcttgccctgagaagaaggatgaga

SEQ ID NO: 346802 - DNA, 25 bp, Artificial
  Probe
tgtcttgccctgagaagaaggatga

SEQ ID NO: 346803 - DNA, 25 bp, Artificial
  Probe
tacttaaatcaggtctttgtcttgc

SEQ ID NO: 346804 - DNA, 25 bp, Artificial
  Probe
ggctacttaaatcaggtctttgtct

SEQ ID NO: 346805 - DNA, 25 bp, Artificial
  Probe
aggtctttgtcttgccctgagaaga

SEQ ID NO: 346806 - DNA, 25 bp, Artificial
  Probe
ttcaggctacttaaatcaggtcttt

SEQ ID NO: 346807 - DNA, 25 bp, Artificial
  Probe
tttttagagcttgagtatctgacca

SEQ ID NO: 346808 - DNA, 25 bp, Artificial
  Probe
attcaggctacttaaatcaggtctt

SEQ ID NO: 346809 - DNA, 25 bp, Artificial
  Probe
ttttttagagcttgagtatctgacc

SEQ ID NO: 346810 - DNA, 25 bp, Artificial
  Probe
aatcaggtctttgtcttgccctgag

SEQ ID NO: 346811 - DNA, 25 bp, Artificial
  Probe
aaaattcaggctacttaaatcaggt

SEQ ID NO: 346812 - DNA, 25 bp, Artificial
  Probe
aaatcaggtctttgtcttgccctga

SEQ ID NO: 346813 - DNA, 25 bp, Artificial
  Probe
aattcaggctacttaaatcaggtct

SEQ ID NO: 346814 - DNA, 25 bp, Artificial
  Probe
agtaagtgctctgtggcctgagaag

SEQ ID NO: 346815 - DNA, 25 bp, Artificial
  Probe
atcaggtctttgtcttgccctgaga

SEQ ID NO: 346816 - DNA, 25 bp, Artificial
  Probe
gctacttaaatcaggtctttgtctt

SEQ ID NO: 346817 - DNA, 25 bp, Artificial
  Probe
tatgatcagtaagtgctctgtggcc

SEQ ID NO: 346818 - DNA, 25 bp, Artificial
  Probe
tcagtaagtgctctgtggcctgaga

SEQ ID NO: 346819 - DNA, 25 bp, Artificial
  Probe
aggctacttaaatcaggtctttgtc

SEQ ID NO: 346820 - DNA, 25 bp, Artificial
  Probe
ctacttaaatcaggtctttgtcttg

SEQ ID NO: 346821 - DNA, 25 bp, Artificial
  Probe
taaatcaggtctttgtcttgccctg

SEQ ID NO: 346822 - DNA, 25 bp, Artificial
  Probe
tttagagcttgagtatctgaccaaa

SEQ ID NO: 346823 - DNA, 25 bp, Artificial
  Probe
cttgccctgagaagaaggatgagac

SEQ ID NO: 346824 - DNA, 25 bp, Artificial
  Probe
ttgtcttgccctgagaagaaggatg

SEQ ID NO: 346825 - DNA, 25 bp, Artificial
  Probe
tcaggtctttgtcttgccctgagaa

SEQ ID NO: 346826 - DNA, 25 bp, Artificial
  Probe
acttaaatcaggtctttgtcttgcc

SEQ ID NO: 346827 - DNA, 25 bp, Artificial
  Probe
tcaggctacttaaatcaggtctttg

SEQ ID NO: 346828 - DNA, 25 bp, Artificial
  Probe
tttgtcttgccctgagaagaaggat

SEQ ID NO: 346829 - DNA, 25 bp, Artificial
  Probe
agataaccaagctatatgaattgct

SEQ ID NO: 346830 - DNA, 25 bp, Artificial
  Probe
cagtaagtgctctgtggcctgagaa

SEQ ID NO: 346831 - DNA, 25 bp, Artificial
  Probe
gataaccaagctatatgaattgctt

SEQ ID NO: 346832 - DNA, 25 bp, Artificial
  Probe
cagctgttccgcatcctcttcagga

SEQ ID NO: 346833 - DNA, 25 bp, Artificial
  Probe
tggcattgagcagagtcgccgagat

SEQ ID NO: 346834 - DNA, 25 bp, Artificial
  Probe
agctgttccgcatcctcttcaggac

SEQ ID NO: 346835 - DNA, 25 bp, Artificial
  Probe
ttttaatagaaccagtctgccatgg

SEQ ID NO: 346836 - DNA, 25 bp, Artificial
  Probe
aaccagtctgccatggcaagggcta

SEQ ID NO: 346837 - DNA, 25 bp, Artificial
  Probe
tacatgtatctgaggcagctgttcc

SEQ ID NO: 346838 - DNA, 25 bp, Artificial
  Probe
aaagcagaaagcagcccagcaggca

SEQ ID NO: 346839 - DNA, 25 bp, Artificial
  Probe
tcctgcagaatttgccatgtactta

SEQ ID NO: 346840 - DNA, 25 bp, Artificial
  Probe
aaagcagcccagcaggcagcctctt

SEQ ID NO: 346841 - DNA, 25 bp, Artificial
  Probe
ggaagataaaaacctcactggcact

SEQ ID NO: 346842 - DNA, 25 bp, Artificial
  Probe
tcgccgagatgacatggaatcttta

SEQ ID NO: 346843 - DNA, 25 bp, Artificial
  Probe
atagaaccagtctgccatggcaagg

SEQ ID NO: 346844 - DNA, 25 bp, Artificial
  Probe
gtaaggggtttcctgcagaatttgc

SEQ ID NO: 346845 - DNA, 25 bp, Artificial
  Probe
aacctcactggcactgcccggtatg

SEQ ID NO: 346846 - DNA, 25 bp, Artificial
  Probe
ggcactgcccggtatgccagcatca

SEQ ID NO: 346847 - DNA, 25 bp, Artificial
  Probe
gtccactcctgttgaagttttgtgt

SEQ ID NO: 346848 - DNA, 25 bp, Artificial
  Probe
ctttgaggaagctccggattacatg

SEQ ID NO: 346849 - DNA, 25 bp, Artificial
  Probe
cactgcccggtatgccagcatcaat

SEQ ID NO: 346850 - DNA, 25 bp, Artificial
  Probe
tgaggcagctgttccgcatcctctt

SEQ ID NO: 346851 - DNA, 25 bp, Artificial
  Probe
caacacataccatacagggaagata

SEQ ID NO: 346852 - DNA, 25 bp, Artificial
  Probe
atcttggcattgagcagagtcgccg

SEQ ID NO: 346853 - DNA, 25 bp, Artificial
  Probe
cagcaggcagcctcttccagtgggc

SEQ ID NO: 346854 - DNA, 25 bp, Artificial
  Probe
aggaagctccggattacatgtatct

SEQ ID NO: 346855 - DNA, 25 bp, Artificial
  Probe
ttgccatgtacttaaattactgtcg

SEQ ID NO: 346856 - DNA, 25 bp, Artificial
  Probe
caatgcacatcttggcattgagcag

SEQ ID NO: 346857 - DNA, 25 bp, Artificial
  Probe
gcagagtcgccgagatgacatggaa

SEQ ID NO: 346858 - DNA, 25 bp, Artificial
  Probe
cattgagcagagtcgccgagatgac

SEQ ID NO: 346859 - DNA, 25 bp, Artificial
  Probe
tccttattgattttggtttggccaa

SEQ ID NO: 346860 - DNA, 25 bp, Artificial
  Probe
tgtatctgaggcagctgttccgcat

SEQ ID NO: 346861 - DNA, 25 bp, Artificial
  Probe
taaagcagaaagcagcccagcaggc

SEQ ID NO: 346862 - DNA, 25 bp, Artificial
  Probe
acaggacaaggcaacacataccata

SEQ ID NO: 346863 - DNA, 25 bp, Artificial
  Probe
accagtctgccatggcaagggctaa

SEQ ID NO: 346864 - DNA, 25 bp, Artificial
  Probe
tcttcaggaccctgaaccaccagta

SEQ ID NO: 346865 - DNA, 25 bp, Artificial
  Probe
gataaaaacctcactggcactgccc

SEQ ID NO: 346866 - DNA, 25 bp, Artificial
  Probe
gctgcgctttgaggaagctccggat

SEQ ID NO: 346867 - DNA, 25 bp, Artificial
  Probe
aaattactgtcgtgggctgcgcttt

SEQ ID NO: 346868 - DNA, 25 bp, Artificial
  Probe
gcagaatttgccatgtacttaaatt

SEQ ID NO: 346869 - DNA, 25 bp, Artificial
  Probe
ggacaaggcaacacataccatacag

SEQ ID NO: 346870 - DNA, 25 bp, Artificial
  Probe
tacagagacaacaggacaaggcaac

SEQ ID NO: 346871 - DNA, 25 bp, Artificial
  Probe
gcacatcttggcattgagcagagtc

SEQ ID NO: 346872 - DNA, 25 bp, Artificial
  Probe
gcccggtatgccagcatcaatgcac

SEQ ID NO: 346873 - DNA, 25 bp, Artificial
  Probe
agcatcaatgcacatcttggcattg

SEQ ID NO: 346874 - DNA, 25 bp, Artificial
  Probe
gtctgccatggcaagggctaaaggc

SEQ ID NO: 346875 - DNA, 25 bp, Artificial
  Probe
gaaagcagcccagcaggcagcctct

SEQ ID NO: 346876 - DNA, 25 bp, Artificial
  Probe
ctacacgtttgattggacgatgtta

SEQ ID NO: 346877 - DNA, 25 bp, Artificial
  Probe
cactcctgttgaagttttgtgtaag

SEQ ID NO: 346878 - DNA, 25 bp, Artificial
  Probe
atctttctcaggattaaaccagtta

SEQ ID NO: 346879 - DNA, 25 bp, Artificial
  Probe
gttagtccttctcaggacccatctt

SEQ ID NO: 346880 - DNA, 25 bp, Artificial
  Probe
catctttctcaggattaaaccagtt

SEQ ID NO: 346881 - DNA, 25 bp, Artificial
  Probe
tagtccttctcaggacccatctttc

SEQ ID NO: 346882 - DNA, 25 bp, Artificial
  Probe
tgactgttagtccttctcaggaccc

SEQ ID NO: 346883 - DNA, 25 bp, Artificial
  Probe
tttctcaggattaaaccagttattc

SEQ ID NO: 346884 - DNA, 25 bp, Artificial
  Probe
atgactgttagtccttctcaggacc

SEQ ID NO: 346885 - DNA, 25 bp, Artificial
  Probe
gtccttctcaggacccatctttctc

SEQ ID NO: 346886 - DNA, 25 bp, Artificial
  Probe
gactgttagtccttctcaggaccca

SEQ ID NO: 346887 - DNA, 25 bp, Artificial
  Probe
ggacccatctttctcaggattaaac

SEQ ID NO: 346888 - DNA, 25 bp, Artificial
  Probe
ccatctttctcaggattaaaccagt

SEQ ID NO: 346889 - DNA, 25 bp, Artificial
  Probe
ttctcaggacccatctttctcagga

SEQ ID NO: 346890 - DNA, 25 bp, Artificial
  Probe
gattaaaccagttattccttattga

SEQ ID NO: 346891 - DNA, 25 bp, Artificial
  Probe
cttctcaggacccatctttctcagg

SEQ ID NO: 346892 - DNA, 25 bp, Artificial
  Probe
ttagtccttctcaggacccatcttt

SEQ ID NO: 346893 - DNA, 25 bp, Artificial
  Probe
tcaggacccatctttctcaggatta

SEQ ID NO: 346894 - DNA, 25 bp, Artificial
  Probe
ctcaggacccatctttctcaggatt

SEQ ID NO: 346895 - DNA, 25 bp, Artificial
  Probe
ctgttagtccttctcaggacccatc

SEQ ID NO: 346896 - DNA, 25 bp, Artificial
  Probe
gacccatctttctcaggattaaacc

SEQ ID NO: 346897 - DNA, 25 bp, Artificial
  Probe
caggacccatctttctcaggattaa

SEQ ID NO: 346898 - DNA, 25 bp, Artificial
  Probe
agcatgactgttagtccttctcagg

SEQ ID NO: 346899 - DNA, 25 bp, Artificial
  Probe
ttctcaggattaaaccagttattcc

SEQ ID NO: 346900 - DNA, 25 bp, Artificial
  Probe
gcatgactgttagtccttctcagga

SEQ ID NO: 346901 - DNA, 25 bp, Artificial
  Probe
catgactgttagtccttctcaggac

SEQ ID NO: 346902 - DNA, 25 bp, Artificial
  Probe
tccttctcaggacccatctttctca

SEQ ID NO: 346903 - DNA, 25 bp, Artificial
  Probe
tctcaggacccatctttctcaggat

SEQ ID NO: 346904 - DNA, 25 bp, Artificial
  Probe
ggattaaaccagttattccttattg

SEQ ID NO: 346905 - DNA, 25 bp, Artificial
  Probe
aagcatgactgttagtccttctcag

SEQ ID NO: 346906 - DNA, 25 bp, Artificial
  Probe
acccatctttctcaggattaaacca

SEQ ID NO: 346907 - DNA, 25 bp, Artificial
  Probe
gaagcatgactgttagtccttctca

SEQ ID NO: 346908 - DNA, 25 bp, Artificial
  Probe
actgttagtccttctcaggacccat

SEQ ID NO: 346909 - DNA, 25 bp, Artificial
  Probe
ccttctcaggacccatctttctcag

SEQ ID NO: 346910 - DNA, 25 bp, Artificial
  Probe
cccatctttctcaggattaaaccag

SEQ ID NO: 346911 - DNA, 25 bp, Artificial
  Probe
tgttagtccttctcaggacccatct

SEQ ID NO: 346912 - DNA, 25 bp, Artificial
  Probe
agtccttctcaggacccatctttct

SEQ ID NO: 346913 - DNA, 25 bp, Artificial
  Probe
tctttctcaggattaaaccagttat

SEQ ID NO: 346914 - DNA, 25 bp, Artificial
  Probe
aggacccatctttctcaggattaaa

SEQ ID NO: 346915 - DNA, 25 bp, Artificial
  Probe
attaaaccagttattccttattgat

SEQ ID NO: 346916 - DNA, 25 bp, Artificial
  Probe
ctttctcaggattaaaccagttatt

SEQ ID NO: 346917 - DNA, 25 bp, Artificial
  Probe
taatagccccggtggatgaagttac

SEQ ID NO: 346918 - DNA, 25 bp, Artificial
  Probe
agcgttcaacagagccagcattgtg

SEQ ID NO: 346919 - DNA, 25 bp, Artificial
  Probe
tggtgcttcggtgctctgtgaaaga

SEQ ID NO: 346920 - DNA, 25 bp, Artificial
  Probe
agttgcagccaaatactacttcctg

SEQ ID NO: 346921 - DNA, 25 bp, Artificial
  Probe
cctcctaagagcaaagagcaacttc

SEQ ID NO: 346922 - DNA, 25 bp, Artificial
  Probe
gccccggtggatgaagttacgatct

SEQ ID NO: 346923 - DNA, 25 bp, Artificial
  Probe
cttgatagttgcagccaaatactac

SEQ ID NO: 346924 - DNA, 25 bp, Artificial
  Probe
attgtgaccagtctccgaagcggcc

SEQ ID NO: 346925 - DNA, 25 bp, Artificial
  Probe
agatcctgagggtcaaggtaatagc

SEQ ID NO: 346926 - DNA, 25 bp, Artificial
  Probe
tggagtggtcattgccgccttgata

SEQ ID NO: 346927 - DNA, 25 bp, Artificial
  Probe
acttccagaccgtccagaagaactc

SEQ ID NO: 346928 - DNA, 25 bp, Artificial
  Probe
atcctgagggtcaaggtaatagccc

SEQ ID NO: 346929 - DNA, 25 bp, Artificial
  Probe
tattgtacagcgttcaacagagcca

SEQ ID NO: 346930 - DNA, 25 bp, Artificial
  Probe
gaaagggctcattgcagtcgttgtc

SEQ ID NO: 346931 - DNA, 25 bp, Artificial
  Probe
gagggcagacccttccacgaagaaa

SEQ ID NO: 346932 - DNA, 25 bp, Artificial
  Probe
atggtgcttcggtgctctgtgaaag

SEQ ID NO: 346933 - DNA, 25 bp, Artificial
  Probe
tccaatgacccagtgacattcacag

SEQ ID NO: 346934 - DNA, 25 bp, Artificial
  Probe
actagcaaggagcaggaaggccagt

SEQ ID NO: 346935 - DNA, 25 bp, Artificial
  Probe
tgaggaaagccaaggccaagcagaa

SEQ ID NO: 346936 - DNA, 25 bp, Artificial
  Probe
aaagccaaggccaagcagaagcccg

SEQ ID NO: 346937 - DNA, 25 bp, Artificial
  Probe
gggactggccctgtcacgtttcagt

SEQ ID NO: 346938 - DNA, 25 bp, Artificial
  Probe
acccaagtgttttggcaccatgaac

SEQ ID NO: 346939 - DNA, 25 bp, Artificial
  Probe
ttcaacagagccagcattgtgacca

SEQ ID NO: 346940 - DNA, 25 bp, Artificial
  Probe
tgaatgacacccaagtgttttggca

SEQ ID NO: 346941 - DNA, 25 bp, Artificial
  Probe
tgcgcagcgagatcctgagggtcaa

SEQ ID NO: 346942 - DNA, 25 bp, Artificial
  Probe
gatgaagttacgatctccatcctgt

SEQ ID NO: 346943 - DNA, 25 bp, Artificial
  Probe
cttcctgaggaaagccaaggccaag

SEQ ID NO: 346944 - DNA, 25 bp, Artificial
  Probe
agaactccaatgacccagtgacatt

SEQ ID NO: 346945 - DNA, 25 bp, Artificial
  Probe
tgaaatggtgcttcggtgctctgtg

SEQ ID NO: 346946 - DNA, 25 bp, Artificial
  Probe
ccaccagagacatggaataccagtg

SEQ ID NO: 346947 - DNA, 25 bp, Artificial
  Probe
cattcacagacaagcccaccagaga

SEQ ID NO: 346948 - DNA, 25 bp, Artificial
  Probe
caggaaggccagtactattgtacag

SEQ ID NO: 346949 - DNA, 25 bp, Artificial
  Probe
agcgagatcctgagggtcaaggtaa

SEQ ID NO: 346950 - DNA, 25 bp, Artificial
  Probe
tgtcacgtttcagttttacaaagaa

SEQ ID NO: 346951 - DNA, 25 bp, Artificial
  Probe
tttcttgctccgtggaagaaagggc

SEQ ID NO: 346952 - DNA, 25 bp, Artificial
  Probe
agagcaaagagcaacttccagaccg

SEQ ID NO: 346953 - DNA, 25 bp, Artificial
  Probe
cccgaggtgcgcagcgagatcctga

SEQ ID NO: 346954 - DNA, 25 bp, Artificial
  Probe
agatgaaatggtgcttcggtgctct

SEQ ID NO: 346955 - DNA, 25 bp, Artificial
  Probe
acagacaagcccaccagagacatgg

SEQ ID NO: 346956 - DNA, 25 bp, Artificial
  Probe
ttacgatctccatcctgtcgggtaa

SEQ ID NO: 346957 - DNA, 25 bp, Artificial
  Probe
aagtgttttggcaccatgaacaaac

SEQ ID NO: 346958 - DNA, 25 bp, Artificial
  Probe
tctaacagtcagagtctttcttgct

SEQ ID NO: 346959 - DNA, 25 bp, Artificial
  Probe
ttcttgctccgtggaagaaagggct

SEQ ID NO: 346960 - DNA, 25 bp, Artificial
  Probe
cagcgagatcctgagggtcaaggta

SEQ ID NO: 346961 - DNA, 25 bp, Artificial
  Probe
agcaacttccagaccgtccagaaga

SEQ ID NO: 346962 - DNA, 25 bp, Artificial
  Probe
gtcattgccgccttgatagttgcag

SEQ ID NO: 346963 - DNA, 25 bp, Artificial
  Probe
agcatatatacaaagcatttgtgca

SEQ ID NO: 346964 - DNA, 25 bp, Artificial
  Probe
agactgatcttttgcataacaaagc

SEQ ID NO: 346965 - DNA, 25 bp, Artificial
  Probe
gatcttttgcataacaaagcagagc

SEQ ID NO: 346966 - DNA, 25 bp, Artificial
  Probe
aacagagactgatcttttgcataac

SEQ ID NO: 346967 - DNA, 25 bp, Artificial
  Probe
aatattgactttcatactcgggaat

SEQ ID NO: 346968 - DNA, 25 bp, Artificial
  Probe
tgtctttgggaaattcctaaagtct

SEQ ID NO: 346969 - DNA, 25 bp, Artificial
  Probe
agagactgatcttttgcataacaaa

SEQ ID NO: 346970 - DNA, 25 bp, Artificial
  Probe
caatattgactttcatactcgggaa

SEQ ID NO: 346971 - DNA, 25 bp, Artificial
  Probe
ttcatactcgggaatcgacagccaa

SEQ ID NO: 346972 - DNA, 25 bp, Artificial
  Probe
gcactcagatgctgtgaaacaaatc

SEQ ID NO: 346973 - DNA, 25 bp, Artificial
  Probe
gtgcactcagatgctgtgaaacaaa

SEQ ID NO: 346974 - DNA, 25 bp, Artificial
  Probe
ggaaattcctaaagtctgaattcag

SEQ ID NO: 346975 - DNA, 25 bp, Artificial
  Probe
agcatttgtgcactcagatgctgtg

SEQ ID NO: 346976 - DNA, 25 bp, Artificial
  Probe
tactcgggaatcgacagccaagaag

SEQ ID NO: 346977 - DNA, 25 bp, Artificial
  Probe
gcataacaaagcagagcatatatac

SEQ ID NO: 346978 - DNA, 25 bp, Artificial
  Probe
tcttttgcataacaaagcagagcat

SEQ ID NO: 346979 - DNA, 25 bp, Artificial
  Probe
tgatcttttgcataacaaagcagag

SEQ ID NO: 346980 - DNA, 25 bp, Artificial
  Probe
gactgatcttttgcataacaaagca

SEQ ID NO: 346981 - DNA, 25 bp, Artificial
  Probe
tcatactcgggaatcgacagccaag

SEQ ID NO: 346982 - DNA, 25 bp, Artificial
  Probe
actcagatgctgtgaaacaaatcaa

SEQ ID NO: 346983 - DNA, 25 bp, Artificial
  Probe
caaccagatgggtcaaaatgtcttt

SEQ ID NO: 346984 - DNA, 25 bp, Artificial
  Probe
gcatatatacaaagcatttgtgcac

SEQ ID NO: 346985 - DNA, 25 bp, Artificial
  Probe
tctttgggaaattcctaaagtctga

SEQ ID NO: 346986 - DNA, 25 bp, Artificial
  Probe
tgcactcagatgctgtgaaacaaat

SEQ ID NO: 346987 - DNA, 25 bp, Artificial
  Probe
ttgtgcactcagatgctgtgaaaca

SEQ ID NO: 346988 - DNA, 25 bp, Artificial
  Probe
atttgtgcactcagatgctgtgaaa

SEQ ID NO: 346989 - DNA, 25 bp, Artificial
  Probe
aaagcatttgtgcactcagatgctg

SEQ ID NO: 346990 - DNA, 25 bp, Artificial
  Probe
cactcagatgctgtgaaacaaatca

SEQ ID NO: 346991 - DNA, 25 bp, Artificial
  Probe
tcgggaatcgacagccaagaagatc

SEQ ID NO: 346992 - DNA, 25 bp, Artificial
  Probe
tcgacagccaagaagatcaaaacac

SEQ ID NO: 346993 - DNA, 25 bp, Artificial
  Probe
caaagcatttgtgcactcagatgct

SEQ ID NO: 346994 - DNA, 25 bp, Artificial
  Probe
tatacaaagcatttgtgcactcaga

SEQ ID NO: 346995 - DNA, 25 bp, Artificial
  Probe
ttgcataacaaagcagagcatatat

SEQ ID NO: 346996 - DNA, 25 bp, Artificial
  Probe
acagagactgatcttttgcataaca

SEQ ID NO: 346997 - DNA, 25 bp, Artificial
  Probe
tattgactttcatactcgggaatcg

SEQ ID NO: 346998 - DNA, 25 bp, Artificial
  Probe
ttgactttcatactcgggaatcgac

SEQ ID NO: 346999 - DNA, 25 bp, Artificial
  Probe
tacaaagcatttgtgcactcagatg

SEQ ID NO: 347000 - DNA, 25 bp, Artificial
  Probe
atactcgggaatcgacagccaagaa

SEQ ID NO: 347001 - DNA, 25 bp, Artificial
  Probe
tgactttcatactcgggaatcgaca

SEQ ID NO: 347002 - DNA, 25 bp, Artificial
  Probe
atatacaaagcatttgtgcactcag

SEQ ID NO: 347003 - DNA, 25 bp, Artificial
  Probe
gagactgatcttttgcataacaaag

SEQ ID NO: 347004 - DNA, 25 bp, Artificial
  Probe
tttgtgcactcagatgctgtgaaac

SEQ ID NO: 347005 - DNA, 25 bp, Artificial
  Probe
ctcgggaatcgacagccaagaagat

SEQ ID NO: 347006 - DNA, 25 bp, Artificial
  Probe
gaaattcctaaagtctgaattcagt

SEQ ID NO: 347007 - DNA, 25 bp, Artificial
  Probe
atcaatattgactttcatactcggg

SEQ ID NO: 347008 - DNA, 25 bp, Artificial
  Probe
ttttgcataacaaagcagagcatat

SEQ ID NO: 347009 - DNA, 25 bp, Artificial
  Probe
gcccttctgtgttcttccccgtgat

SEQ ID NO: 347010 - DNA, 25 bp, Artificial
  Probe
aacctgtgatcctgggcaaaggacc

SEQ ID NO: 347011 - DNA, 25 bp, Artificial
  Probe
gcaatatgtcctataaactcaagag

SEQ ID NO: 347012 - DNA, 25 bp, Artificial
  Probe
tccctttgaccctcgatgccagttg

SEQ ID NO: 347013 - DNA, 25 bp, Artificial
  Probe
ggaccctaatggagcccagctctgt

SEQ ID NO: 347014 - DNA, 25 bp, Artificial
  Probe
actttaatggcttgggacggacttg

SEQ ID NO: 347015 - DNA, 25 bp, Artificial
  Probe
gccctagaacagtgaatggaagttt

SEQ ID NO: 347016 - DNA, 25 bp, Artificial
  Probe
gccttctgaaaacttaggccatttt

SEQ ID NO: 347017 - DNA, 25 bp, Artificial
  Probe
cagcctgtgcggtaacagcgccatt

SEQ ID NO: 347018 - DNA, 25 bp, Artificial
  Probe
ggttgtacagtgagcacagtttagc

SEQ ID NO: 347019 - DNA, 25 bp, Artificial
  Probe
cccgtgatcccgtgaacctgtgatc

SEQ ID NO: 347020 - DNA, 25 bp, Artificial
  Probe
agaggccctctatccactcgagctg

SEQ ID NO: 347021 - DNA, 25 bp, Artificial
  Probe
ttgactatggtctgcgagcccttcc

SEQ ID NO: 347022 - DNA, 25 bp, Artificial
  Probe
tctcggaccaggaccccgtgagatg

SEQ ID NO: 347023 - DNA, 25 bp, Artificial
  Probe
caagatccaccttcgccagaaggag

SEQ ID NO: 347024 - DNA, 25 bp, Artificial
  Probe
aggagttgactgtcactccaagaaa

SEQ ID NO: 347025 - DNA, 25 bp, Artificial
  Probe
ctgtgcggtaacagcgccattggag

SEQ ID NO: 347026 - DNA, 25 bp, Artificial
  Probe
ccctgacagagagatgtttgactat

SEQ ID NO: 347027 - DNA, 25 bp, Artificial
  Probe
actctgtggccctagaacagtgaat

SEQ ID NO: 347028 - DNA, 25 bp, Artificial
  Probe
aatggaagtttctcgagccatctca

SEQ ID NO: 347029 - DNA, 25 bp, Artificial
  Probe
agatgtttgactatggtctgcgagc

SEQ ID NO: 347030 - DNA, 25 bp, Artificial
  Probe
cactttaatggcttgggacggactt

SEQ ID NO: 347031 - DNA, 25 bp, Artificial
  Probe
tgagcacagtttagccctggcctgg

SEQ ID NO: 347032 - DNA, 25 bp, Artificial
  Probe
ggcctacagggctgtgctctaaccc

SEQ ID NO: 347033 - DNA, 25 bp, Artificial
  Probe
tgaatggaagtttctcgagccatct

SEQ ID NO: 347034 - DNA, 25 bp, Artificial
  Probe
aaattaaagcaaaaccgatgtggca

SEQ ID NO: 347035 - DNA, 25 bp, Artificial
  Probe
accaggaccccgtgagatgaagctc

SEQ ID NO: 347036 - DNA, 25 bp, Artificial
  Probe
tcacagacggccttctgaaaactta

SEQ ID NO: 347037 - DNA, 25 bp, Artificial
  Probe
cagtcttcagcctctggtcctgggg

SEQ ID NO: 347038 - DNA, 25 bp, Artificial
  Probe
cactccaagaaatggggagccagaa

SEQ ID NO: 347039 - DNA, 25 bp, Artificial
  Probe
tccaccttcgccagaaggagaggaa

SEQ ID NO: 347040 - DNA, 25 bp, Artificial
  Probe
ctgagactttttctacaataggttg

SEQ ID NO: 347041 - DNA, 25 bp, Artificial
  Probe
gctgacacaccagtttcttcaggcc

SEQ ID NO: 347042 - DNA, 25 bp, Artificial
  Probe
acaccagtttcttcaggccccagag

SEQ ID NO: 347043 - DNA, 25 bp, Artificial
  Probe
ttggaggaccactggcctcctgcac

SEQ ID NO: 347044 - DNA, 25 bp, Artificial
  Probe
accagtttcttcaggccccagaggc

SEQ ID NO: 347045 - DNA, 25 bp, Artificial
  Probe
cttcgccagaaggagaggaagagca

SEQ ID NO: 347046 - DNA, 25 bp, Artificial
  Probe
gttgttgattcctttgagcaaggac

SEQ ID NO: 347047 - DNA, 25 bp, Artificial
  Probe
ggtaacagcgccattggaggaccac

SEQ ID NO: 347048 - DNA, 25 bp, Artificial
  Probe
ggcccctggcctacagggctgtgct

SEQ ID NO: 347049 - DNA, 25 bp, Artificial
  Probe
ccaggaccccgtgagatgaagctcc

SEQ ID NO: 347050 - DNA, 25 bp, Artificial
  Probe
ctttgagcaaggacagcgaaaaaga

SEQ ID NO: 347051 - DNA, 25 bp, Artificial
  Probe
tcagcctctggtcctgggggctcgc

SEQ ID NO: 347052 - DNA, 25 bp, Artificial
  Probe
ctctcggaccaggaccccgtgagat

SEQ ID NO: 347053 - DNA, 25 bp, Artificial
  Probe
cattttaaaggagttgactgtcact

SEQ ID NO: 347054 - DNA, 25 bp, Artificial
  Probe
accttctcacagacggccttctgaa

SEQ ID NO: 347055 - DNA, 25 bp, Artificial
  Probe
aaccataatgcacatcttacagtgc

SEQ ID NO: 347056 - DNA, 25 bp, Artificial
  Probe
taaccataatgcacatcttacagtg

SEQ ID NO: 347057 - DNA, 25 bp, Artificial
  Probe
cataatgcacatcttacagtgcaca

SEQ ID NO: 347058 - DNA, 25 bp, Artificial
  Probe
atcttacagtgcacaagagaatcca

SEQ ID NO: 347059 - DNA, 25 bp, Artificial
  Probe
cgtttaaccataatgcacatcttac

SEQ ID NO: 347060 - DNA, 25 bp, Artificial
  Probe
accataatgcacatcttacagtgca

SEQ ID NO: 347061 - DNA, 25 bp, Artificial
  Probe
acagtgcacaagagaatccatacgg

SEQ ID NO: 347062 - DNA, 25 bp, Artificial
  Probe
cacatcttacagtgcacaagagaat

SEQ ID NO: 347063 - DNA, 25 bp, Artificial
  Probe
tcttacagtgcacaagagaatccat

SEQ ID NO: 347064 - DNA, 25 bp, Artificial
  Probe
aagtcgtttaaccataatgcacatc

SEQ ID NO: 347065 - DNA, 25 bp, Artificial
  Probe
taatgcacatcttacagtgcacaag

SEQ ID NO: 347066 - DNA, 25 bp, Artificial
  Probe
catcttacagtgcacaagagaatcc

SEQ ID NO: 347067 - DNA, 25 bp, Artificial
  Probe
agtcgtttaaccataatgcacatct

SEQ ID NO: 347068 - DNA, 25 bp, Artificial
  Probe
gtcgtttaaccataatgcacatctt

SEQ ID NO: 347069 - DNA, 25 bp, Artificial
  Probe
gaagtcgtttaaccataatgcacat

SEQ ID NO: 347070 - DNA, 25 bp, Artificial
  Probe
acatcttacagtgcacaagagaatc

SEQ ID NO: 347071 - DNA, 25 bp, Artificial
  Probe
tgtccggagtgtgggaagtcgttta

SEQ ID NO: 347072 - DNA, 25 bp, Artificial
  Probe
aatgcacatcttacagtgcacaaga

SEQ ID NO: 347073 - DNA, 25 bp, Artificial
  Probe
ataatgcacatcttacagtgcacaa

SEQ ID NO: 347074 - DNA, 25 bp, Artificial
  Probe
tgcacatcttacagtgcacaagaga

SEQ ID NO: 347075 - DNA, 25 bp, Artificial
  Probe
tcgtttaaccataatgcacatctta

SEQ ID NO: 347076 - DNA, 25 bp, Artificial
  Probe
cttacagtgcacaagagaatccata

SEQ ID NO: 347077 - DNA, 25 bp, Artificial
  Probe
ttaaccataatgcacatcttacagt

SEQ ID NO: 347078 - DNA, 25 bp, Artificial
  Probe
gcacatcttacagtgcacaagagaa

SEQ ID NO: 347079 - DNA, 25 bp, Artificial
  Probe
atgcacatcttacagtgcacaagag

SEQ ID NO: 347080 - DNA, 25 bp, Artificial
  Probe
ccataatgcacatcttacagtgcac

SEQ ID NO: 347081 - DNA, 25 bp, Artificial
  Probe
gtttaaccataatgcacatcttaca

SEQ ID NO: 347082 - DNA, 25 bp, Artificial
  Probe
tttaaccataatgcacatcttacag

SEQ ID NO: 347083 - DNA, 25 bp, Artificial
  Probe
tcagaaaatccatcttggtgagaag

SEQ ID NO: 347084 - DNA, 25 bp, Artificial
  Probe
aatccatcttggtgagaagccttac

SEQ ID NO: 347085 - DNA, 25 bp, Artificial
  Probe
ctttgccggagtgcgggaagtcgtt

SEQ ID NO: 347086 - DNA, 25 bp, Artificial
  Probe
gtgcgggaagtcgttcagagaaagt

SEQ ID NO: 347087 - DNA, 25 bp, Artificial
  Probe
ccatcttggtgagaagccttaccag

SEQ ID NO: 347088 - DNA, 25 bp, Artificial
  Probe
aaaatccatcttggtgagaagcctt

SEQ ID NO: 347089 - DNA, 25 bp, Artificial
  Probe
cacacctcatcagacatcagaaaat

SEQ ID NO: 347090 - DNA, 25 bp, Artificial
  Probe
ttcacacctcatcagacatcagaaa

SEQ ID NO: 347091 - DNA, 25 bp, Artificial
  Probe
gaaaatccatcttggtgagaagcct

SEQ ID NO: 347092 - DNA, 25 bp, Artificial
  Probe
cagaaaatccatcttggtgagaagc

SEQ ID NO: 347093 - DNA, 25 bp, Artificial
  Probe
cagagaaagttcacacctcatcaga

SEQ ID NO: 347094 - DNA, 25 bp, Artificial
  Probe
tttgccggagtgcgggaagtcgttc

SEQ ID NO: 347095 - DNA, 25 bp, Artificial
  Probe
gacatcagaaaatccatcttggtga

SEQ ID NO: 347096 - DNA, 25 bp, Artificial
  Probe
agacatcagaaaatccatcttggtg

SEQ ID NO: 347097 - DNA, 25 bp, Artificial
  Probe
atccatcttggtgagaagccttacc

SEQ ID NO: 347098 - DNA, 25 bp, Artificial
  Probe
agagaaagttcacacctcatcagac

SEQ ID NO: 347099 - DNA, 25 bp, Artificial
  Probe
agaaagttcacacctcatcagacat

SEQ ID NO: 347100 - DNA, 25 bp, Artificial
  Probe
tgccggagtgcgggaagtcgttcag

SEQ ID NO: 347101 - DNA, 25 bp, Artificial
  Probe
agtgcgggaagtcgttcagagaaag

SEQ ID NO: 347102 - DNA, 25 bp, Artificial
  Probe
aagttcacacctcatcagacatcag

SEQ ID NO: 347103 - DNA, 25 bp, Artificial
  Probe
gagaaagttcacacctcatcagaca

SEQ ID NO: 347104 - DNA, 25 bp, Artificial
  Probe
ttgccggagtgcgggaagtcgttca

SEQ ID NO: 347105 - DNA, 25 bp, Artificial
  Probe
aaatccatcttggtgagaagcctta

SEQ ID NO: 347106 - DNA, 25 bp, Artificial
  Probe
ccggagtgcgggaagtcgttcagag

SEQ ID NO: 347107 - DNA, 25 bp, Artificial
  Probe
aaagttcacacctcatcagacatca

SEQ ID NO: 347108 - DNA, 25 bp, Artificial
  Probe
acatcagaaaatccatcttggtgag

SEQ ID NO: 347109 - DNA, 25 bp, Artificial
  Probe
acacctcatcagacatcagaaaatc

SEQ ID NO: 347110 - DNA, 25 bp, Artificial
  Probe
gctttgccggagtgcgggaagtcgt

SEQ ID NO: 347111 - DNA, 25 bp, Artificial
  Probe
tgcgggaagtcgttcagagaaagtt

SEQ ID NO: 347112 - DNA, 25 bp, Artificial
  Probe
gaaagttcacacctcatcagacatc

SEQ ID NO: 347113 - DNA, 25 bp, Artificial
  Probe
tccatcttggtgagaagccttacca

SEQ ID NO: 347114 - DNA, 25 bp, Artificial
  Probe
gccggagtgcgggaagtcgttcaga

SEQ ID NO: 347115 - DNA, 25 bp, Artificial
  Probe
gttcacacctcatcagacatcagaa

SEQ ID NO: 347116 - DNA, 25 bp, Artificial
  Probe
ggcgagcctcacacctgtcccagca

SEQ ID NO: 347117 - DNA, 25 bp, Artificial
  Probe
aggcgagcctcacacctgtcccagc

SEQ ID NO: 347118 - DNA, 25 bp, Artificial
  Probe
tcgtgattcccagctaagtcttcat

SEQ ID NO: 347119 - DNA, 25 bp, Artificial
  Probe
cccagctaagtcttcatcagagact

SEQ ID NO: 347120 - DNA, 25 bp, Artificial
  Probe
gtgattcccagctaagtcttcatca

SEQ ID NO: 347121 - DNA, 25 bp, Artificial
  Probe
attcccagctaagtcttcatcagag

SEQ ID NO: 347122 - DNA, 25 bp, Artificial
  Probe
tcttcatcagagacttcacaccggt

SEQ ID NO: 347123 - DNA, 25 bp, Artificial
  Probe
agctaagtcttcatcagagacttca

SEQ ID NO: 347124 - DNA, 25 bp, Artificial
  Probe
tcccagcatcacactattcacactg

SEQ ID NO: 347125 - DNA, 25 bp, Artificial
  Probe
tgattcccagctaagtcttcatcag

SEQ ID NO: 347126 - DNA, 25 bp, Artificial
  Probe
aggcctttagtcgtgattcccagct

SEQ ID NO: 347127 - DNA, 25 bp, Artificial
  Probe
atcgttcaggcgagcctcacacctg

SEQ ID NO: 347128 - DNA, 25 bp, Artificial
  Probe
ggaaatcgttcaggcgagcctcaca

SEQ ID NO: 347129 - DNA, 25 bp, Artificial
  Probe
cctttagtcgtgattcccagctaag

SEQ ID NO: 347130 - DNA, 25 bp, Artificial
  Probe
gttcaggcgagcctcacacctgtcc

SEQ ID NO: 347131 - DNA, 25 bp, Artificial
  Probe
gcctttagtcgtgattcccagctaa

SEQ ID NO: 347132 - DNA, 25 bp, Artificial
  Probe
ttagtcgtgattcccagctaagtct

SEQ ID NO: 347133 - DNA, 25 bp, Artificial
  Probe
ctttagtcgtgattcccagctaagt

SEQ ID NO: 347134 - DNA, 25 bp, Artificial
  Probe
tcgttcaggcgagcctcacacctgt

SEQ ID NO: 347135 - DNA, 25 bp, Artificial
  Probe
cgtgattcccagctaagtcttcatc

SEQ ID NO: 347136 - DNA, 25 bp, Artificial
  Probe
tttagtcgtgattcccagctaagtc

SEQ ID NO: 347137 - DNA, 25 bp, Artificial
  Probe
cttcacaccggtgagaaacctacac

SEQ ID NO: 347138 - DNA, 25 bp, Artificial
  Probe
cagcatcacactattcacactggtg

SEQ ID NO: 347139 - DNA, 25 bp, Artificial
  Probe
gctaagtcttcatcagagacttcac

SEQ ID NO: 347140 - DNA, 25 bp, Artificial
  Probe
tcccagctaagtcttcatcagagac

SEQ ID NO: 347141 - DNA, 25 bp, Artificial
  Probe
ccagcatcacactattcacactggt

SEQ ID NO: 347142 - DNA, 25 bp, Artificial
  Probe
agtcgtgattcccagctaagtcttc

SEQ ID NO: 347143 - DNA, 25 bp, Artificial
  Probe
ggaaggcctttagtcgtgattccca

SEQ ID NO: 347144 - DNA, 25 bp, Artificial
  Probe
tcaggcgagcctcacacctgtccca

SEQ ID NO: 347145 - DNA, 25 bp, Artificial
  Probe
cccagcatcacactattcacactgg

SEQ ID NO: 347146 - DNA, 25 bp, Artificial
  Probe
aaggcctttagtcgtgattcccagc

SEQ ID NO: 347147 - DNA, 25 bp, Artificial
  Probe
gaaggcctttagtcgtgattcccag

SEQ ID NO: 347148 - DNA, 25 bp, Artificial
  Probe
aagtcttcatcagagacttcacacc

SEQ ID NO: 347149 - DNA, 25 bp, Artificial
  Probe
gattcccagctaagtcttcatcaga

SEQ ID NO: 347150 - DNA, 25 bp, Artificial
  Probe
ccagctaagtcttcatcagagactt

SEQ ID NO: 347151 - DNA, 25 bp, Artificial
  Probe
ttcccagctaagtcttcatcagaga

SEQ ID NO: 347152 - DNA, 25 bp, Artificial
  Probe
tgtcccagcatcacactattcacac

SEQ ID NO: 347153 - DNA, 25 bp, Artificial
  Probe
tgggaaatcgttcaggcgagcctca

SEQ ID NO: 347154 - DNA, 25 bp, Artificial
  Probe
aaatcgttcaggcgagcctcacacc

SEQ ID NO: 347155 - DNA, 25 bp, Artificial
  Probe
gtcgtgattcccagctaagtcttca

SEQ ID NO: 347156 - DNA, 25 bp, Artificial
  Probe
agtgtgggaaatcgttcaggcgagc

SEQ ID NO: 347157 - DNA, 25 bp, Artificial
  Probe
cacctgtcccagcatcacactattc

SEQ ID NO: 347158 - DNA, 25 bp, Artificial
  Probe
agtcttcatcagagacttcacaccg

SEQ ID NO: 347159 - DNA, 25 bp, Artificial
  Probe
cagctaagtcttcatcagagacttc

SEQ ID NO: 347160 - DNA, 25 bp, Artificial
  Probe
ggcctttagtcgtgattcccagcta

SEQ ID NO: 347161 - DNA, 25 bp, Artificial
  Probe
acctgtcccagcatcacactattca

SEQ ID NO: 347162 - DNA, 25 bp, Artificial
  Probe
aagcttttagtgtgcgttctagcct

SEQ ID NO: 347163 - DNA, 25 bp, Artificial
  Probe
catcttgcaaatcatcgtggaattc

SEQ ID NO: 347164 - DNA, 25 bp, Artificial
  Probe
gcgttctagcctgactgcccatcaa

SEQ ID NO: 347165 - DNA, 25 bp, Artificial
  Probe
aacttcaaatcttgcaagacattgg

SEQ ID NO: 347166 - DNA, 25 bp, Artificial
  Probe
aaagcttttagtgtgcgttctagcc

SEQ ID NO: 347167 - DNA, 25 bp, Artificial
  Probe
caaagcttttagtgtgcgttctagc

SEQ ID NO: 347168 - DNA, 25 bp, Artificial
  Probe
tcttgcaaatcatcgtggaattcac

SEQ ID NO: 347169 - DNA, 25 bp, Artificial
  Probe
tcttgcaagacattggagggttcat

SEQ ID NO: 347170 - DNA, 25 bp, Artificial
  Probe
ggcaaagcttttagtgtgcgttcta

SEQ ID NO: 347171 - DNA, 25 bp, Artificial
  Probe
aatgtggcaaagcttttagtgtgcg

SEQ ID NO: 347172 - DNA, 25 bp, Artificial
  Probe
aatcatcgtggaattcacagtgggg

SEQ ID NO: 347173 - DNA, 25 bp, Artificial
  Probe
tcacatcttgcaaatcatcgtggaa

SEQ ID NO: 347174 - DNA, 25 bp, Artificial
  Probe
tgcaaatcatcgtggaattcacagt

SEQ ID NO: 347175 - DNA, 25 bp, Artificial
  Probe
caaatcatcgtggaattcacagtgg

SEQ ID NO: 347176 - DNA, 25 bp, Artificial
  Probe
caaatcttgcaagacattggagggt

SEQ ID NO: 347177 - DNA, 25 bp, Artificial
  Probe
agtgtgcgttctagcctgactgccc

SEQ ID NO: 347178 - DNA, 25 bp, Artificial
  Probe
gcctgactgcccatcaagtaatcca

SEQ ID NO: 347179 - DNA, 25 bp, Artificial
  Probe
acatcttgcaaatcatcgtggaatt

SEQ ID NO: 347180 - DNA, 25 bp, Artificial
  Probe
tcaaatcttgcaagacattggaggg

SEQ ID NO: 347181 - DNA, 25 bp, Artificial
  Probe
tgcgttctagcctgactgcccatca

SEQ ID NO: 347182 - DNA, 25 bp, Artificial
  Probe
gttctagcctgactgcccatcaagt

SEQ ID NO: 347183 - DNA, 25 bp, Artificial
  Probe
ttgcaaatcatcgtggaattcacag

SEQ ID NO: 347184 - DNA, 25 bp, Artificial
  Probe
cgttctagcctgactgcccatcaag

SEQ ID NO: 347185 - DNA, 25 bp, Artificial
  Probe
ttctagcctgactgcccatcaagta

SEQ ID NO: 347186 - DNA, 25 bp, Artificial
  Probe
ttttagtgtgcgttctagcctgact

SEQ ID NO: 347187 - DNA, 25 bp, Artificial
  Probe
agcttttagtgtgcgttctagcctg

SEQ ID NO: 347188 - DNA, 25 bp, Artificial
  Probe
ttcaaatcttgcaagacattggagg

SEQ ID NO: 347189 - DNA, 25 bp, Artificial
  Probe
atcatcgtggaattcacagtgggga

SEQ ID NO: 347190 - DNA, 25 bp, Artificial
  Probe
tttagtgtgcgttctagcctgactg

SEQ ID NO: 347191 - DNA, 25 bp, Artificial
  Probe
cttgcaaatcatcgtggaattcaca

SEQ ID NO: 347192 - DNA, 25 bp, Artificial
  Probe
gtggcaaagcttttagtgtgcgttc

SEQ ID NO: 347193 - DNA, 25 bp, Artificial
  Probe
tagtgtgcgttctagcctgactgcc

SEQ ID NO: 347194 - DNA, 25 bp, Artificial
  Probe
ttggagggttcatactggagagaag

SEQ ID NO: 347195 - DNA, 25 bp, Artificial
  Probe
ttgcaagacattggagggttcatac

SEQ ID NO: 347196 - DNA, 25 bp, Artificial
  Probe
aaatcatcgtggaattcacagtggg

SEQ ID NO: 347197 - DNA, 25 bp, Artificial
  Probe
acttcaaatcttgcaagacattgga

SEQ ID NO: 347198 - DNA, 25 bp, Artificial
  Probe
atcttgcaagacattggagggttca

SEQ ID NO: 347199 - DNA, 25 bp, Artificial
  Probe
aaatcttgcaagacattggagggtt

SEQ ID NO: 347200 - DNA, 25 bp, Artificial
  Probe
aatcttgcaagacattggagggttc

SEQ ID NO: 347201 - DNA, 25 bp, Artificial
  Probe
gcaaagcttttagtgtgcgttctag

SEQ ID NO: 347202 - DNA, 25 bp, Artificial
  Probe
ttagtgtgcgttctagcctgactgc

SEQ ID NO: 347203 - DNA, 25 bp, Artificial
  Probe
atcttgcaaatcatcgtggaattca

SEQ ID NO: 347204 - DNA, 25 bp, Artificial
  Probe
gcaaatcatcgtggaattcacagtg

SEQ ID NO: 347205 - DNA, 25 bp, Artificial
  Probe
cacatcttgcaaatcatcgtggaat

SEQ ID NO: 347206 - DNA, 25 bp, Artificial
  Probe
cttgcaagacattggagggttcata

SEQ ID NO: 347207 - DNA, 25 bp, Artificial
  Probe
tgtggcaaagcttttagtgtgcgtt

SEQ ID NO: 347208 - DNA, 25 bp, Artificial
  Probe
ttgtgccatcaacgaatccacactg

SEQ ID NO: 347209 - DNA, 25 bp, Artificial
  Probe
atcttgttgtgccatcaacgaatcc

SEQ ID NO: 347210 - DNA, 25 bp, Artificial
  Probe
tgcaaatcttgttgtgccatcaacg

SEQ ID NO: 347211 - DNA, 25 bp, Artificial
  Probe
tgcaaccttgttgtgcatcagagga

SEQ ID NO: 347212 - DNA, 25 bp, Artificial
  Probe
aggccttcattcagagtgcaacctt

SEQ ID NO: 347213 - DNA, 25 bp, Artificial
  Probe
ggccttcattcagagtgcaaccttg

SEQ ID NO: 347214 - DNA, 25 bp, Artificial
  Probe
aaatcttgttgtgccatcaacgaat

SEQ ID NO: 347215 - DNA, 25 bp, Artificial
  Probe
cttgttgtgccatcaacgaatccac

SEQ ID NO: 347216 - DNA, 25 bp, Artificial
  Probe
ggaagtcgttagtcagagtgcaaat

SEQ ID NO: 347217 - DNA, 25 bp, Artificial
  Probe
tcgttagtcagagtgcaaatcttgt

SEQ ID NO: 347218 - DNA, 25 bp, Artificial
  Probe
ttcattcagagtgcaaccttgttgt

SEQ ID NO: 347219 - DNA, 25 bp, Artificial
  Probe
agtcgttagtcagagtgcaaatctt

SEQ ID NO: 347220 - DNA, 25 bp, Artificial
  Probe
gcaaccttgttgtgcatcagaggat

SEQ ID NO: 347221 - DNA, 25 bp, Artificial
  Probe
gtgcaaccttgttgtgcatcagagg

SEQ ID NO: 347222 - DNA, 25 bp, Artificial
  Probe
cattcagagtgcaaccttgttgtgc

SEQ ID NO: 347223 - DNA, 25 bp, Artificial
  Probe
tcattcagagtgcaaccttgttgtg

SEQ ID NO: 347224 - DNA, 25 bp, Artificial
  Probe
ttgttgtgccatcaacgaatccaca

SEQ ID NO: 347225 - DNA, 25 bp, Artificial
  Probe
tcttgttgtgccatcaacgaatcca

SEQ ID NO: 347226 - DNA, 25 bp, Artificial
  Probe
ccttgttgtgcatcagaggatccac

SEQ ID NO: 347227 - DNA, 25 bp, Artificial
  Probe
agagtgcaaatcttgttgtgccatc

SEQ ID NO: 347228 - DNA, 25 bp, Artificial
  Probe
gccttcattcagagtgcaaccttgt

SEQ ID NO: 347229 - DNA, 25 bp, Artificial
  Probe
agagtgcaaccttgttgtgcatcag

SEQ ID NO: 347230 - DNA, 25 bp, Artificial
  Probe
gagtgcaaatcttgttgtgccatca

SEQ ID NO: 347231 - DNA, 25 bp, Artificial
  Probe
gagtgcaaccttgttgtgcatcaga

SEQ ID NO: 347232 - DNA, 25 bp, Artificial
  Probe
gaagtcgttagtcagagtgcaaatc

SEQ ID NO: 347233 - DNA, 25 bp, Artificial
  Probe
aagtcgttagtcagagtgcaaatct

SEQ ID NO: 347234 - DNA, 25 bp, Artificial
  Probe
cagagtgcaaccttgttgtgcatca

SEQ ID NO: 347235 - DNA, 25 bp, Artificial
  Probe
attcagagtgcaaccttgttgtgca

SEQ ID NO: 347236 - DNA, 25 bp, Artificial
  Probe
tcagagtgcaaccttgttgtgcatc

SEQ ID NO: 347237 - DNA, 25 bp, Artificial
  Probe
aatcttgttgtgccatcaacgaatc

SEQ ID NO: 347238 - DNA, 25 bp, Artificial
  Probe
tagtcagagtgcaaatcttgttgtg

SEQ ID NO: 347239 - DNA, 25 bp, Artificial
  Probe
ttcagagtgcaaccttgttgtgcat

SEQ ID NO: 347240 - DNA, 25 bp, Artificial
  Probe
gttgtgccatcaacgaatccacact

SEQ ID NO: 347241 - DNA, 25 bp, Artificial
  Probe
tgttgtgccatcaacgaatccacac

SEQ ID NO: 347242 - DNA, 25 bp, Artificial
  Probe
gtcgttagtcagagtgcaaatcttg

SEQ ID NO: 347243 - DNA, 25 bp, Artificial
  Probe
caaatcttgttgtgccatcaacgaa

SEQ ID NO: 347244 - DNA, 25 bp, Artificial
  Probe
gcaaatcttgttgtgccatcaacga

SEQ ID NO: 347245 - DNA, 25 bp, Artificial
  Probe
agtgcaaccttgttgtgcatcagag

SEQ ID NO: 347246 - DNA, 25 bp, Artificial
  Probe
gaaacattatgactgttcagtctgt

SEQ ID NO: 347247 - DNA, 25 bp, Artificial
  Probe
ggattacacacatgagaattccact

SEQ ID NO: 347248 - DNA, 25 bp, Artificial
  Probe
aggttcttaatatcgccagcgttaa

SEQ ID NO: 347249 - DNA, 25 bp, Artificial
  Probe
gcaattgttttgcactttcagatag

SEQ ID NO: 347250 - DNA, 25 bp, Artificial
  Probe
aaatcaggattacacacatgagaat

SEQ ID NO: 347251 - DNA, 25 bp, Artificial
  Probe
cttaatatcgccagcgttaagatag

SEQ ID NO: 347252 - DNA, 25 bp, Artificial
  Probe
ttcagtctgtaatttcggaatgatc

SEQ ID NO: 347253 - DNA, 25 bp, Artificial
  Probe
aaggttcttaatatcgccagcgtta

SEQ ID NO: 347254 - DNA, 25 bp, Artificial
  Probe
gaattccactaagaaacaccaaggt

SEQ ID NO: 347255 - DNA, 25 bp, Artificial
  Probe
gaaacaccaaggttcttaatatcgc

SEQ ID NO: 347256 - DNA, 25 bp, Artificial
  Probe
tatcgccagcgttaagatagaaagt

SEQ ID NO: 347257 - DNA, 25 bp, Artificial
  Probe
gactgttcagtctgtaatttcggaa

SEQ ID NO: 347258 - DNA, 25 bp, Artificial
  Probe
ttgctacataatagacattgtgcca

SEQ ID NO: 347259 - DNA, 25 bp, Artificial
  Probe
caaatcaggattacacacatgagaa

SEQ ID NO: 347260 - DNA, 25 bp, Artificial
  Probe
atttgctacataatagacattgtgc

SEQ ID NO: 347261 - DNA, 25 bp, Artificial
  Probe
atatcgccagcgttaagatagaaag

SEQ ID NO: 347262 - DNA, 25 bp, Artificial
  Probe
ttcagcaattgttttgcactttcag

SEQ ID NO: 347263 - DNA, 25 bp, Artificial
  Probe
caccaaggttcttaatatcgccagc

SEQ ID NO: 347264 - DNA, 25 bp, Artificial
  Probe
aacattatgactgttcagtctgtaa

SEQ ID NO: 347265 - DNA, 25 bp, Artificial
  Probe
agcaattgttttgcactttcagata

SEQ ID NO: 347266 - DNA, 25 bp, Artificial
  Probe
caaggttcttaatatcgccagcgtt

SEQ ID NO: 347267 - DNA, 25 bp, Artificial
  Probe
tcagcaattgttttgcactttcaga

SEQ ID NO: 347268 - DNA, 25 bp, Artificial
  Probe
cagtctgtaatttcggaatgatcta

SEQ ID NO: 347269 - DNA, 25 bp, Artificial
  Probe
tcgccagcgttaagatagaaagtaa

SEQ ID NO: 347270 - DNA, 25 bp, Artificial
  Probe
tatgactgttcagtctgtaatttcg

SEQ ID NO: 347271 - DNA, 25 bp, Artificial
  Probe
tgactgttcagtctgtaatttcgga

SEQ ID NO: 347272 - DNA, 25 bp, Artificial
  Probe
tcagtctgtaatttcggaatgatct

SEQ ID NO: 347273 - DNA, 25 bp, Artificial
  Probe
cagcaattgttttgcactttcagat

SEQ ID NO: 347274 - DNA, 25 bp, Artificial
  Probe
caattgttttgcactttcagataga

SEQ ID NO: 347275 - DNA, 25 bp, Artificial
  Probe
gagaattccactaagaaacaccaag

SEQ ID NO: 347276 - DNA, 25 bp, Artificial
  Probe
ttatgactgttcagtctgtaatttc

SEQ ID NO: 347277 - DNA, 25 bp, Artificial
  Probe
aggattacacacatgagaattccac

SEQ ID NO: 347278 - DNA, 25 bp, Artificial
  Probe
ggaatggaacctcatcacaacacta

SEQ ID NO: 347279 - DNA, 25 bp, Artificial
  Probe
actgttcagtctgtaatttcggaat

SEQ ID NO: 347280 - DNA, 25 bp, Artificial
  Probe
acaccaaggttcttaatatcgccag

SEQ ID NO: 347281 - DNA, 25 bp, Artificial
  Probe
caggattacacacatgagaattcca

SEQ ID NO: 347282 - DNA, 25 bp, Artificial
  Probe
atcgccagcgttaagatagaaagta

SEQ ID NO: 347283 - DNA, 25 bp, Artificial
  Probe
atcaggattacacacatgagaattc

SEQ ID NO: 347284 - DNA, 25 bp, Artificial
  Probe
aatcaggattacacacatgagaatt

SEQ ID NO: 347285 - DNA, 25 bp, Artificial
  Probe
gctacataatagacattgtgccaaa

SEQ ID NO: 347286 - DNA, 25 bp, Artificial
  Probe
ccaaggttcttaatatcgccagcgt

SEQ ID NO: 347287 - DNA, 25 bp, Artificial
  Probe
tcaggattacacacatgagaattcc

SEQ ID NO: 347288 - DNA, 25 bp, Artificial
  Probe
ctgttcagtctgtaatttcggaatg

SEQ ID NO: 347289 - DNA, 25 bp, Artificial
  Probe
atgactgttcagtctgtaatttcgg

SEQ ID NO: 347290 - DNA, 25 bp, Artificial
  Probe
tacaaatcaggattacacacatgag

SEQ ID NO: 347291 - DNA, 25 bp, Artificial
  Probe
tttgctacataatagacattgtgcc

SEQ ID NO: 347292 - DNA, 25 bp, Artificial
  Probe
gcccttttatgagtggtggttaaca

SEQ ID NO: 347293 - DNA, 25 bp, Artificial
  Probe
ggaaaacacttgatgctctgcgttc

SEQ ID NO: 347294 - DNA, 25 bp, Artificial
  Probe
cccctcaacattgtagaaggaacca

SEQ ID NO: 347295 - DNA, 25 bp, Artificial
  Probe
gagaaccattatactaatgagtaca

SEQ ID NO: 347296 - DNA, 25 bp, Artificial
  Probe
gttaaggtcttcagtccctgggaat

SEQ ID NO: 347297 - DNA, 25 bp, Artificial
  Probe
gtcgccgtaattctccactgaacta

SEQ ID NO: 347298 - DNA, 25 bp, Artificial
  Probe
taaacgacggaaaacacttgatgct

SEQ ID NO: 347299 - DNA, 25 bp, Artificial
  Probe
atcaattctgtagatgagaaccatt

SEQ ID NO: 347300 - DNA, 25 bp, Artificial
  Probe
tctgcttagcccttttatgagtggt

SEQ ID NO: 347301 - DNA, 25 bp, Artificial
  Probe
tatcatgactgtttgcctatctttg

SEQ ID NO: 347302 - DNA, 25 bp, Artificial
  Probe
gaactatcatgactgtttgcctatc

SEQ ID NO: 347303 - DNA, 25 bp, Artificial
  Probe
aggcttccctgcagtctgcttagcc

SEQ ID NO: 347304 - DNA, 25 bp, Artificial
  Probe
tgttccaaactgttagaagaaaacg

SEQ ID NO: 347305 - DNA, 25 bp, Artificial
  Probe
tcagtccctgggaatgctctgactg

SEQ ID NO: 347306 - DNA, 25 bp, Artificial
  Probe
tccactgaactatcatgactgtttg

SEQ ID NO: 347307 - DNA, 25 bp, Artificial
  Probe
caagaccagtcttgtggtattggaa

SEQ ID NO: 347308 - DNA, 25 bp, Artificial
  Probe
cctgtaaatcaattctgtagatgag

SEQ ID NO: 347309 - DNA, 25 bp, Artificial
  Probe
taaatcaattctgtagatgagaacc

SEQ ID NO: 347310 - DNA, 25 bp, Artificial
  Probe
ggaaccactttatttgtcatgatca

SEQ ID NO: 347311 - DNA, 25 bp, Artificial
  Probe
tgagaaccattatactaatgagtac

SEQ ID NO: 347312 - DNA, 25 bp, Artificial
  Probe
ccttaccaacaagaccagtcttgtg

SEQ ID NO: 347313 - DNA, 25 bp, Artificial
  Probe
ttcctgtaaatcaattctgtagatg

SEQ ID NO: 347314 - DNA, 25 bp, Artificial
  Probe
cacttgatgctctgcgttcctgagg

SEQ ID NO: 347315 - DNA, 25 bp, Artificial
  Probe
tctgcgttcctgaggcttccctgca

SEQ ID NO: 347316 - DNA, 25 bp, Artificial
  Probe
aacacttgatgctctgcgttcctga

SEQ ID NO: 347317 - DNA, 25 bp, Artificial
  Probe
tgcagtctgcttagcccttttatga

SEQ ID NO: 347318 - DNA, 25 bp, Artificial
  Probe
ttccctgcagtctgcttagcccttt

SEQ ID NO: 347319 - DNA, 25 bp, Artificial
  Probe
tgcttcctgtaaatcaattctgtag

SEQ ID NO: 347320 - DNA, 25 bp, Artificial
  Probe
ctgtttgcctatctttgagtattga

SEQ ID NO: 347321 - DNA, 25 bp, Artificial
  Probe
cccttttatgagtggtggttaacag

SEQ ID NO: 347322 - DNA, 25 bp, Artificial
  Probe
cttagcccttttatgagtggtggtt

SEQ ID NO: 347323 - DNA, 25 bp, Artificial
  Probe
gtcttcagtccctgggaatgctctg

SEQ ID NO: 347324 - DNA, 25 bp, Artificial
  Probe
tgatgctctgcgttcctgaggcttc

SEQ ID NO: 347325 - DNA, 25 bp, Artificial
  Probe
cggaaaacacttgatgctctgcgtt

SEQ ID NO: 347326 - DNA, 25 bp, Artificial
  Probe
cgttcctgaggcttccctgcagtct

SEQ ID NO: 347327 - DNA, 25 bp, Artificial
  Probe
ggttaacaggcctgtcacatagtgt

SEQ ID NO: 347328 - DNA, 25 bp, Artificial
  Probe
tgactgtttgcctatctttgagtat

SEQ ID NO: 347329 - DNA, 25 bp, Artificial
  Probe
acaagaccagtcttgtggtattgga

SEQ ID NO: 347330 - DNA, 25 bp, Artificial
  Probe
taaggtcttcagtccctgggaatgc

SEQ ID NO: 347331 - DNA, 25 bp, Artificial
  Probe
tgggaatgctctgactgtagccccc

SEQ ID NO: 347332 - DNA, 25 bp, Artificial
  Probe
tagaaggaaccactttatttgtcat

SEQ ID NO: 347333 - DNA, 25 bp, Artificial
  Probe
cccttccaggcatatttaagttggg

SEQ ID NO: 347334 - DNA, 25 bp, Artificial
  Probe
ctgaggcttccctgcagtctgctta

SEQ ID NO: 347335 - DNA, 25 bp, Artificial
  Probe
cctcaacattgtagaaggaaccact

SEQ ID NO: 347336 - DNA, 25 bp, Artificial
  Probe
gtcacatagtgttgagagagcgcag

SEQ ID NO: 347337 - DNA, 25 bp, Artificial
  Probe
gttcctgaggcttccctgcagtctg

SEQ ID NO: 347338 - DNA, 25 bp, Artificial
  Probe
ttctctggccctctgggaacagcgc

SEQ ID NO: 347339 - DNA, 25 bp, Artificial
  Probe
tgttgaccaagaaggcaaggatcag

SEQ ID NO: 347340 - DNA, 25 bp, Artificial
  Probe
agcacaggttgcacctccaagacct

SEQ ID NO: 347341 - DNA, 25 bp, Artificial
  Probe
tccaacgttctctggccctctggga

SEQ ID NO: 347342 - DNA, 25 bp, Artificial
  Probe
gcccaggagctccaacgttctctgg

SEQ ID NO: 347343 - DNA, 25 bp, Artificial
  Probe
acatgcagctagaggaacaaaaggc

SEQ ID NO: 347344 - DNA, 25 bp, Artificial
  Probe
ccgagtgacccaaccggatgcattt

SEQ ID NO: 347345 - DNA, 25 bp, Artificial
  Probe
aaggatcaggccagaggaggtcaca

SEQ ID NO: 347346 - DNA, 25 bp, Artificial
  Probe
taccaggaccccagcacaggttgca

SEQ ID NO: 347347 - DNA, 25 bp, Artificial
  Probe
aaaggcagagggatgcccggcttta

SEQ ID NO: 347348 - DNA, 25 bp, Artificial
  Probe
cccgagacccagagggctgcaacag

SEQ ID NO: 347349 - DNA, 25 bp, Artificial
  Probe
caagttccgagtgacccaaccggat

SEQ ID NO: 347350 - DNA, 25 bp, Artificial
  Probe
gtgccaccaagttccgagtgaccca

SEQ ID NO: 347351 - DNA, 25 bp, Artificial
  Probe
gttctctggccctctgggaacagcg

SEQ ID NO: 347352 - DNA, 25 bp, Artificial
  Probe
tgttgagtggcctaagccaggccca

SEQ ID NO: 347353 - DNA, 25 bp, Artificial
  Probe
acaggcttcccacaactggttacct

SEQ ID NO: 347354 - DNA, 25 bp, Artificial
  Probe
gaaatctgagatagctgttgaccaa

SEQ ID NO: 347355 - DNA, 25 bp, Artificial
  Probe
cagagggctgcaacagagaagacca

SEQ ID NO: 347356 - DNA, 25 bp, Artificial
  Probe
cctgagtcaactctgtgccaccaag

SEQ ID NO: 347357 - DNA, 25 bp, Artificial
  Probe
accggatgcatttggcctctttctc

SEQ ID NO: 347358 - DNA, 25 bp, Artificial
  Probe
tagtccacaggcttcccacaactgg

SEQ ID NO: 347359 - DNA, 25 bp, Artificial
  Probe
aactggttacctcatctaccgccgg

SEQ ID NO: 347360 - DNA, 25 bp, Artificial
  Probe
ggatgcccggctttagaagagtagc

SEQ ID NO: 347361 - DNA, 25 bp, Artificial
  Probe
agtccacaggcttcccacaactggt

SEQ ID NO: 347362 - DNA, 25 bp, Artificial
  Probe
tcttcgattgccaccctgagtcaac

SEQ ID NO: 347363 - DNA, 25 bp, Artificial
  Probe
ggccttgttgagtggcctaagccag

SEQ ID NO: 347364 - DNA, 25 bp, Artificial
  Probe
caagaccttggctgtgcccccgggg

SEQ ID NO: 347365 - DNA, 25 bp, Artificial
  Probe
tgcccaggagctccaacgttctctg

SEQ ID NO: 347366 - DNA, 25 bp, Artificial
  Probe
ttgcacctccaagaccttggctgtg

SEQ ID NO: 347367 - DNA, 25 bp, Artificial
  Probe
gacccagagggctgcaacagagaag

SEQ ID NO: 347368 - DNA, 25 bp, Artificial
  Probe
gtgcccccggggtcttcgattgcca

SEQ ID NO: 347369 - DNA, 25 bp, Artificial
  Probe
gttacctcatctaccgccgggcaga

SEQ ID NO: 347370 - DNA, 25 bp, Artificial
  Probe
aggaggtcacatgcagctagaggaa

SEQ ID NO: 347371 - DNA, 25 bp, Artificial
  Probe
gccagcctggccttgttgagtggcc

SEQ ID NO: 347372 - DNA, 25 bp, Artificial
  Probe
gattgccaccctgagtcaactctgt

SEQ ID NO: 347373 - DNA, 25 bp, Artificial
  Probe
agagcgccccgagacccagagggct

SEQ ID NO: 347374 - DNA, 25 bp, Artificial
  Probe
tctcagccagcctggccttgttgag

SEQ ID NO: 347375 - DNA, 25 bp, Artificial
  Probe
tctacaaggaccagggctaccatcg

SEQ ID NO: 347376 - DNA, 25 bp, Artificial
  Probe
ggcttcccacaactggttacctcat

SEQ ID NO: 347377 - DNA, 25 bp, Artificial
  Probe
aaggaccagggctaccatcgcctgc

SEQ ID NO: 347378 - DNA, 25 bp, Artificial
  Probe
ccggggtcttcgattgccaccctga

SEQ ID NO: 347379 - DNA, 25 bp, Artificial
  Probe
tgcatttggcctctttctctacaag

SEQ ID NO: 347380 - DNA, 25 bp, Artificial
  Probe
tcaggccagaggaggtcacatgcag

SEQ ID NO: 347381 - DNA, 25 bp, Artificial
  Probe
tgacccaaccggatgcatttggcct

SEQ ID NO: 347382 - DNA, 25 bp, Artificial
  Probe
ttgagtggcctaagccaggcccacg

SEQ ID NO: 347383 - DNA, 25 bp, Artificial
  Probe
ttgccaccctgagtcaactctgtgc

SEQ ID NO: 347384 - DNA, 25 bp, Artificial
  Probe
agaaccccaaaatcaaggacaggca

SEQ ID NO: 347385 - DNA, 25 bp, Artificial
  Probe
atggccatccagagctaccccgggg

SEQ ID NO: 347386 - DNA, 25 bp, Artificial
  Probe
gaatggccatccagagctaccccgg

SEQ ID NO: 347387 - DNA, 25 bp, Artificial
  Probe
tgtgaactctgacatgtctactgtg

SEQ ID NO: 347388 - DNA, 25 bp, Artificial
  Probe
gacactggccagagtacatacaggg

SEQ ID NO: 347389 - DNA, 25 bp, Artificial
  Probe
ccgctgttcggacactggccagagt

SEQ ID NO: 347390 - DNA, 25 bp, Artificial
  Probe
ctggccagagtacatacaggggcgc

SEQ ID NO: 347391 - DNA, 25 bp, Artificial
  Probe
gtctactgtggtagccttcgggaac

SEQ ID NO: 347392 - DNA, 25 bp, Artificial
  Probe
gctgttcggacactggccagagtac

SEQ ID NO: 347393 - DNA, 25 bp, Artificial
  Probe
ctgaaggtcccctagggttcatggc

SEQ ID NO: 347394 - DNA, 25 bp, Artificial
  Probe
tggctcgtggacatgtgtgaactct

SEQ ID NO: 347395 - DNA, 25 bp, Artificial
  Probe
caaggacaggcaacacctttggccc

SEQ ID NO: 347396 - DNA, 25 bp, Artificial
  Probe
tgaactctgacatgtctactgtggt

SEQ ID NO: 347397 - DNA, 25 bp, Artificial
  Probe
atgtctactgtggtagccttcggga

SEQ ID NO: 347398 - DNA, 25 bp, Artificial
  Probe
tggacatgtgtgaactctgacatgt

SEQ ID NO: 347399 - DNA, 25 bp, Artificial
  Probe
accggcgaccgctgttcggacactg

SEQ ID NO: 347400 - DNA, 25 bp, Artificial
  Probe
tcaaggacaggcaacacctttggcc

SEQ ID NO: 347401 - DNA, 25 bp, Artificial
  Probe
ggacaggcaacacctttggccccgg

SEQ ID NO: 347402 - DNA, 25 bp, Artificial
  Probe
cggacactggccagagtacatacag

SEQ ID NO: 347403 - DNA, 25 bp, Artificial
  Probe
ccggcgaccgctgttcggacactgg

SEQ ID NO: 347404 - DNA, 25 bp, Artificial
  Probe
ggtcccctagggttcatggctcgtg

SEQ ID NO: 347405 - DNA, 25 bp, Artificial
  Probe
tagccttcgggaaccggcgaccgct

SEQ ID NO: 347406 - DNA, 25 bp, Artificial
  Probe
accccaaaatcaaggacaggcaaca

SEQ ID NO: 347407 - DNA, 25 bp, Artificial
  Probe
gagagggttcctgaaggtcccctag

SEQ ID NO: 347408 - DNA, 25 bp, Artificial
  Probe
gtcgaatggccatccagagctaccc

SEQ ID NO: 347409 - DNA, 25 bp, Artificial
  Probe
accgctgttcggacactggccagag

SEQ ID NO: 347410 - DNA, 25 bp, Artificial
  Probe
ggctcgtggacatgtgtgaactctg

SEQ ID NO: 347411 - DNA, 25 bp, Artificial
  Probe
caggcaacacctttggccccgggag

SEQ ID NO: 347412 - DNA, 25 bp, Artificial
  Probe
cactggccagagtacatacaggggc

SEQ ID NO: 347413 - DNA, 25 bp, Artificial
  Probe
ggtcgaatggccatccagagctacc

SEQ ID NO: 347414 - DNA, 25 bp, Artificial
  Probe
aactctgacatgtctactgtggtag

SEQ ID NO: 347415 - DNA, 25 bp, Artificial
  Probe
gttcatggctcgtggacatgtgtga

SEQ ID NO: 347416 - DNA, 25 bp, Artificial
  Probe
ctcgtggacatgtgtgaactctgac

SEQ ID NO: 347417 - DNA, 25 bp, Artificial
  Probe
aggacaggcaacacctttggccccg

SEQ ID NO: 347418 - DNA, 25 bp, Artificial
  Probe
ccctagggttcatggctcgtggaca

SEQ ID NO: 347419 - DNA, 25 bp, Artificial
  Probe
gtcccctagggttcatggctcgtgg

SEQ ID NO: 347420 - DNA, 25 bp, Artificial
  Probe
acatgtgtgaactctgacatgtcta

SEQ ID NO: 347421 - DNA, 25 bp, Artificial
  Probe
catgtgtgaactctgacatgtctac

SEQ ID NO: 347422 - DNA, 25 bp, Artificial
  Probe
gacaggcaacacctttggccccggg

SEQ ID NO: 347423 - DNA, 25 bp, Artificial
  Probe
tgaaggtcccctagggttcatggct

SEQ ID NO: 347424 - DNA, 25 bp, Artificial
  Probe
ggcgaccgctgttcggacactggcc

SEQ ID NO: 347425 - DNA, 25 bp, Artificial
  Probe
tcatggctcgtggacatgtgtgaac

SEQ ID NO: 347426 - DNA, 25 bp, Artificial
  Probe
tctgacatgtctactgtggtagcct

SEQ ID NO: 347427 - DNA, 25 bp, Artificial
  Probe
gacatgtctactgtggtagccttcg

SEQ ID NO: 347428 - DNA, 25 bp, Artificial
  Probe
ccaaaatcaaggacaggcaacacct

SEQ ID NO: 347429 - DNA, 25 bp, Artificial
  Probe
gaaccccaaaatcaaggacaggcaa

SEQ ID NO: 347430 - DNA, 25 bp, Artificial
  Probe
ttacacaatggtctgggcatagcac

SEQ ID NO: 347431 - DNA, 25 bp, Artificial
  Probe
aaacccacagcctgtgagggatgct

SEQ ID NO: 347432 - DNA, 25 bp, Artificial
  Probe
attaagtggatctggacctttgctg

SEQ ID NO: 347433 - DNA, 25 bp, Artificial
  Probe
gatccacaagaagaagcaagctgtt

SEQ ID NO: 347434 - DNA, 25 bp, Artificial
  Probe
atgagaattctgttctgccctgagg

SEQ ID NO: 347435 - DNA, 25 bp, Artificial
  Probe
agagcttttagagacgcatttcaag

SEQ ID NO: 347436 - DNA, 25 bp, Artificial
  Probe
tctgggcatagcaccccttaagcat

SEQ ID NO: 347437 - DNA, 25 bp, Artificial
  Probe
atgctgtacggcactgtggtcctac

SEQ ID NO: 347438 - DNA, 25 bp, Artificial
  Probe
gttggagttcctgcaaggaggctct

SEQ ID NO: 347439 - DNA, 25 bp, Artificial
  Probe
aatggtctgggcatagcacccctta

SEQ ID NO: 347440 - DNA, 25 bp, Artificial
  Probe
gacgcatttcaagttcctaatcagc

SEQ ID NO: 347441 - DNA, 25 bp, Artificial
  Probe
agttcctgcaaggaggctctgagag

SEQ ID NO: 347442 - DNA, 25 bp, Artificial
  Probe
agctgcatggacaatacaagattga

SEQ ID NO: 347443 - DNA, 25 bp, Artificial
  Probe
aggttcctgactcaaaacccacagc

SEQ ID NO: 347444 - DNA, 25 bp, Artificial
  Probe
tgttctgccctgagggccctcgtga

SEQ ID NO: 347445 - DNA, 25 bp, Artificial
  Probe
ctgttccttacacaatggtctgggc

SEQ ID NO: 347446 - DNA, 25 bp, Artificial
  Probe
ccacagcctgtgagggatgctgtac

SEQ ID NO: 347447 - DNA, 25 bp, Artificial
  Probe
tcaagttcctaatcagcttacttgg

SEQ ID NO: 347448 - DNA, 25 bp, Artificial
  Probe
gtgaacttatccttctagattccag

SEQ ID NO: 347449 - DNA, 25 bp, Artificial
  Probe
agaacattaagtggatctggacctt

SEQ ID NO: 347450 - DNA, 25 bp, Artificial
  Probe
agaattctgttctgccctgagggcc

SEQ ID NO: 347451 - DNA, 25 bp, Artificial
  Probe
ctgagagccactaacaccacgacag

SEQ ID NO: 347452 - DNA, 25 bp, Artificial
  Probe
tgttataaatgctacagccagaaga

SEQ ID NO: 347453 - DNA, 25 bp, Artificial
  Probe
attctgagatgacaacacttcacag

SEQ ID NO: 347454 - DNA, 25 bp, Artificial
  Probe
ttcatgaagtttagggccaaagtcc

SEQ ID NO: 347455 - DNA, 25 bp, Artificial
  Probe
ccctgagggccctcgtgaacttatc

SEQ ID NO: 347456 - DNA, 25 bp, Artificial
  Probe
gccctcgtgaacttatccttctaga

SEQ ID NO: 347457 - DNA, 25 bp, Artificial
  Probe
gctgcagcaacaagaaagagcatag

SEQ ID NO: 347458 - DNA, 25 bp, Artificial
  Probe
cacgacagggttggagttcctgcaa

SEQ ID NO: 347459 - DNA, 25 bp, Artificial
  Probe
gtcctacattctgagatgacaacac

SEQ ID NO: 347460 - DNA, 25 bp, Artificial
  Probe
tctgttctgccctgagggccctcgt

SEQ ID NO: 347461 - DNA, 25 bp, Artificial
  Probe
tttagagacgcatttcaagttccta

SEQ ID NO: 347462 - DNA, 25 bp, Artificial
  Probe
ctctgagaggctgtggcatgaagct

SEQ ID NO: 347463 - DNA, 25 bp, Artificial
  Probe
agattccagccctagcttagagctc

SEQ ID NO: 347464 - DNA, 25 bp, Artificial
  Probe
atcgtaaatggatctaccctgactg

SEQ ID NO: 347465 - DNA, 25 bp, Artificial
  Probe
gactagcactgaagagaaggttcct

SEQ ID NO: 347466 - DNA, 25 bp, Artificial
  Probe
agtttagggccaaagtccctgagag

SEQ ID NO: 347467 - DNA, 25 bp, Artificial
  Probe
cttctagattccagccctagcttag

SEQ ID NO: 347468 - DNA, 25 bp, Artificial
  Probe
cctgtgagggatgctgtacggcact

SEQ ID NO: 347469 - DNA, 25 bp, Artificial
  Probe
agattgtgattttgctgcagcaaca

SEQ ID NO: 347470 - DNA, 25 bp, Artificial
  Probe
gagaaggttcctgactcaaaaccca

SEQ ID NO: 347471 - DNA, 25 bp, Artificial
  Probe
gcatagcaccccttaagcatgctgg

SEQ ID NO: 347472 - DNA, 25 bp, Artificial
  Probe
cagcttacttggaaagattatcgta

SEQ ID NO: 347473 - DNA, 25 bp, Artificial
  Probe
gctacagccagaagaaaggatgaga

SEQ ID NO: 347474 - DNA, 25 bp, Artificial
  Probe
aaagtccctgagagccactaacacc

SEQ ID NO: 347475 - DNA, 25 bp, Artificial
  Probe
cctgactgcagagaacattaagtgg

SEQ ID NO: 347476 - DNA, 25 bp, Artificial
  Probe
gtgacacaagccactcagagtcctc

SEQ ID NO: 347477 - DNA, 25 bp, Artificial
  Probe
tcagctacacccaggttgagaagtg

SEQ ID NO: 347478 - DNA, 25 bp, Artificial
  Probe
gacacaagccactcagagtcctcag

SEQ ID NO: 347479 - DNA, 25 bp, Artificial
  Probe
gtcccaaccaagaagtcctcctgag

SEQ ID NO: 347480 - DNA, 25 bp, Artificial
  Probe
ccaaagggtcccaggagtgacagtc

SEQ ID NO: 347481 - DNA, 25 bp, Artificial
  Probe
acaagccactcagagtcctcagaac

SEQ ID NO: 347482 - DNA, 25 bp, Artificial
  Probe
aaagtgaggaacctggccagcagtc

SEQ ID NO: 347483 - DNA, 25 bp, Artificial
  Probe
ctacctgctgcttcctcttcaagag

SEQ ID NO: 347484 - DNA, 25 bp, Artificial
  Probe
acaagagttcaagtccaaggaaagt

SEQ ID NO: 347485 - DNA, 25 bp, Artificial
  Probe
aagtgaggaacctggccagcagtca

SEQ ID NO: 347486 - DNA, 25 bp, Artificial
  Probe
ttcaagtccaaggaaagtgaggaac

SEQ ID NO: 347487 - DNA, 25 bp, Artificial
  Probe
tgtgatgacggctccagtcggacct

SEQ ID NO: 347488 - DNA, 25 bp, Artificial
  Probe
gcttgaattctacctacctgctgct

SEQ ID NO: 347489 - DNA, 25 bp, Artificial
  Probe
tgaggccagcaggacgtgtacttta

SEQ ID NO: 347490 - DNA, 25 bp, Artificial
  Probe
gccacgggctccttttgaaagaact

SEQ ID NO: 347491 - DNA, 25 bp, Artificial
  Probe
cagtcagcatccagggtcagcgagg

SEQ ID NO: 347492 - DNA, 25 bp, Artificial
  Probe
catccccaggaaatgaccaatatgt

SEQ ID NO: 347493 - DNA, 25 bp, Artificial
  Probe
aggagtgtgactctgcactgtgatg

SEQ ID NO: 347494 - DNA, 25 bp, Artificial
  Probe
ggctccttttgaaagaacttcatta

SEQ ID NO: 347495 - DNA, 25 bp, Artificial
  Probe
cctctccactgattaggagcgtgat

SEQ ID NO: 347496 - DNA, 25 bp, Artificial
  Probe
tcttcaagagggaccccggatgttc

SEQ ID NO: 347497 - DNA, 25 bp, Artificial
  Probe
cctcacagaggagtgtgactctgca

SEQ ID NO: 347498 - DNA, 25 bp, Artificial
  Probe
atcaccaaagggtcccaggagtgac

SEQ ID NO: 347499 - DNA, 25 bp, Artificial
  Probe
ccaggtgacacaagccactcagagt

SEQ ID NO: 347500 - DNA, 25 bp, Artificial
  Probe
tctgcactgtgatgacggctccagt

SEQ ID NO: 347501 - DNA, 25 bp, Artificial
  Probe
atggccacgggctccttttgaaaga

SEQ ID NO: 347502 - DNA, 25 bp, Artificial
  Probe
gcatccagggtcagcgaggacaccc

SEQ ID NO: 347503 - DNA, 25 bp, Artificial
  Probe
cagcatccagggtcagcgaggacac

SEQ ID NO: 347504 - DNA, 25 bp, Artificial
  Probe
accttcagctacacccaggttgaga

SEQ ID NO: 347505 - DNA, 25 bp, Artificial
  Probe
agtcggaccttcagctacacccagg

SEQ ID NO: 347506 - DNA, 25 bp, Artificial
  Probe
gaagtcctcctgaggccagcaggac

SEQ ID NO: 347507 - DNA, 25 bp, Artificial
  Probe
caagagttcaagtccaaggaaagtg

SEQ ID NO: 347508 - DNA, 25 bp, Artificial
  Probe
caagtccaaggaaagtgaggaacct

SEQ ID NO: 347509 - DNA, 25 bp, Artificial
  Probe
cacccaggttgagaagtgtggctgc

SEQ ID NO: 347510 - DNA, 25 bp, Artificial
  Probe
ttcctcttcaagagggaccccggat

SEQ ID NO: 347511 - DNA, 25 bp, Artificial
  Probe
cattatcaccaaagggtcccaggag

SEQ ID NO: 347512 - DNA, 25 bp, Artificial
  Probe
gaaagaacttcattatcaccaaagg

SEQ ID NO: 347513 - DNA, 25 bp, Artificial
  Probe
aggaacctggccagcagtcagcatc

SEQ ID NO: 347514 - DNA, 25 bp, Artificial
  Probe
cctcagaacaagagttcaagtccaa

SEQ ID NO: 347515 - DNA, 25 bp, Artificial
  Probe
gccagcggtgccatgctccaggtga

SEQ ID NO: 347516 - DNA, 25 bp, Artificial
  Probe
agcgtgatggccacgggctcctttt

SEQ ID NO: 347517 - DNA, 25 bp, Artificial
  Probe
ccactgattaggagcgtgatggcca

SEQ ID NO: 347518 - DNA, 25 bp, Artificial
  Probe
cctcctgaggccagcaggacgtgta

SEQ ID NO: 347519 - DNA, 25 bp, Artificial
  Probe
gatgcaggtatcagcctcgctctca

SEQ ID NO: 347520 - DNA, 25 bp, Artificial
  Probe
tgacggctccagtcggaccttcagc

SEQ ID NO: 347521 - DNA, 25 bp, Artificial
  Probe
ggcttgaattctacctacctgctgc

SEQ ID NO: 347522 - DNA, 25 bp, Artificial
  Probe
agtggtttttacagcgtcacaggaa

SEQ ID NO: 347523 - DNA, 25 bp, Artificial
  Probe
cagtctaagtcatggctctgttcat

SEQ ID NO: 347524 - DNA, 25 bp, Artificial
  Probe
gtttttacagcgtcacaggaatgat

SEQ ID NO: 347525 - DNA, 25 bp, Artificial
  Probe
aatagtgcttgttctgtttccctga

SEQ ID NO: 347526 - DNA, 25 bp, Artificial
  Probe
cgactttgtgttggagctctaagaa

SEQ ID NO: 347527 - DNA, 25 bp, Artificial
  Probe
agaatgtacttttcccagggctgac

SEQ ID NO: 347528 - DNA, 25 bp, Artificial
  Probe
attttccccggctgaccattttgat

SEQ ID NO: 347529 - DNA, 25 bp, Artificial
  Probe
tttacaaggttagcagctaatctta

SEQ ID NO: 347530 - DNA, 25 bp, Artificial
  Probe
ctgaggcaattttccccggctgacc

SEQ ID NO: 347531 - DNA, 25 bp, Artificial
  Probe
ggctgaccattttgatggcagctgg

SEQ ID NO: 347532 - DNA, 25 bp, Artificial
  Probe
caagaatgtacttttcccagggctg

SEQ ID NO: 347533 - DNA, 25 bp, Artificial
  Probe
ctaagtcatggctctgttcatgtgg

SEQ ID NO: 347534 - DNA, 25 bp, Artificial
  Probe
ccggctgaccattttgatggcagct

SEQ ID NO: 347535 - DNA, 25 bp, Artificial
  Probe
ttccctgagggctgtggctaaaggt

SEQ ID NO: 347536 - DNA, 25 bp, Artificial
  Probe
agcgtcacaggaatgatcgactttg

SEQ ID NO: 347537 - DNA, 25 bp, Artificial
  Probe
tgtacttttcccagggctgactcag

SEQ ID NO: 347538 - DNA, 25 bp, Artificial
  Probe
acatctagtttgcaactttacaagg

SEQ ID NO: 347539 - DNA, 25 bp, Artificial
  Probe
tgcgatgatttatctcactgtttct

SEQ ID NO: 347540 - DNA, 25 bp, Artificial
  Probe
cagctggggtagtcaggaaacagac

SEQ ID NO: 347541 - DNA, 25 bp, Artificial
  Probe
tccccaggcatttagttggttagaa

SEQ ID NO: 347542 - DNA, 25 bp, Artificial
  Probe
gagtgtatgtgcacatctagtttgc

SEQ ID NO: 347543 - DNA, 25 bp, Artificial
  Probe
gtgcacatctagtttgcaactttac

SEQ ID NO: 347544 - DNA, 25 bp, Artificial
  Probe
acctctctgctctagttccagggca

SEQ ID NO: 347545 - DNA, 25 bp, Artificial
  Probe
gatgactatttaatgcctctttgtc

SEQ ID NO: 347546 - DNA, 25 bp, Artificial
  Probe
tcccagggctgactcaggagaatcc

SEQ ID NO: 347547 - DNA, 25 bp, Artificial
  Probe
aatgatcgactttgtgttggagctc

SEQ ID NO: 347548 - DNA, 25 bp, Artificial
  Probe
tcttccccaggcatttagttggtta

SEQ ID NO: 347549 - DNA, 25 bp, Artificial
  Probe
tttaatgcctctttgtcttagaatg

SEQ ID NO: 347550 - DNA, 25 bp, Artificial
  Probe
aattaaatcacagtctaagtcatgg

SEQ ID NO: 347551 - DNA, 25 bp, Artificial
  Probe
tcatggctctgttcatgtggtggtg

SEQ ID NO: 347552 - DNA, 25 bp, Artificial
  Probe
ccctgagggctgtggctaaaggtta

SEQ ID NO: 347553 - DNA, 25 bp, Artificial
  Probe
cagcgtcacaggaatgatcgacttt

SEQ ID NO: 347554 - DNA, 25 bp, Artificial
  Probe
tctgtttccctgagggctgtggcta

SEQ ID NO: 347555 - DNA, 25 bp, Artificial
  Probe
agggctgactcaggagaatccccac

SEQ ID NO: 347556 - DNA, 25 bp, Artificial
  Probe
cattttgatggcagctggggtagtc

SEQ ID NO: 347557 - DNA, 25 bp, Artificial
  Probe
caaagaaggtcgtctcagtgtagga

SEQ ID NO: 347558 - DNA, 25 bp, Artificial
  Probe
gcttgttctgtttccctgagggctg

SEQ ID NO: 347559 - DNA, 25 bp, Artificial
  Probe
taatgcgatgatttatctcactgtt

SEQ ID NO: 347560 - DNA, 25 bp, Artificial
  Probe
gttctgtttccctgagggctgtggc

SEQ ID NO: 347561 - DNA, 25 bp, Artificial
  Probe
ccaagaatgtacttttcccagggct

SEQ ID NO: 347562 - DNA, 25 bp, Artificial
  Probe
cacccaagaatgtacttttcccagg

SEQ ID NO: 347563 - DNA, 25 bp, Artificial
  Probe
ttttcccagggctgactcaggagaa

SEQ ID NO: 347564 - DNA, 25 bp, Artificial
  Probe
tgaccattttgatggcagctggggt

SEQ ID NO: 347565 - DNA, 25 bp, Artificial
  Probe
gcgatgatttatctcactgtttctc

SEQ ID NO: 347566 - DNA, 25 bp, Artificial
  Probe
tacagcgtcacaggaatgatcgact

SEQ ID NO: 347567 - DNA, 25 bp, Artificial
  Probe
cctctttgtcttagaatggagaagt

SEQ ID NO: 347568 - DNA, 25 bp, Artificial
  Probe
tacgagatgcttgcagcacggaaaa

SEQ ID NO: 347569 - DNA, 25 bp, Artificial
  Probe
agcagagggcttctctgccagttcc

SEQ ID NO: 347570 - DNA, 25 bp, Artificial
  Probe
ggaagggaaccacactgtgtaccgc

SEQ ID NO: 347571 - DNA, 25 bp, Artificial
  Probe
aggtctcctccacaaagaggcactg

SEQ ID NO: 347572 - DNA, 25 bp, Artificial
  Probe
agagcagagggcttctctgccagtt

SEQ ID NO: 347573 - DNA, 25 bp, Artificial
  Probe
caataaagaccaggtgattaaggcc

SEQ ID NO: 347574 - DNA, 25 bp, Artificial
  Probe
gagatgcttgcagcacggaaaaaga

SEQ ID NO: 347575 - DNA, 25 bp, Artificial
  Probe
ctggatcaagtgcatcaaagccgcc

SEQ ID NO: 347576 - DNA, 25 bp, Artificial
  Probe
aaagccgccatcagcagagacccgt

SEQ ID NO: 347577 - DNA, 25 bp, Artificial
  Probe
ttaaaatcccagaagatgacggcaa

SEQ ID NO: 347578 - DNA, 25 bp, Artificial
  Probe
acgagatgcttgcagcacggaaaaa

SEQ ID NO: 347579 - DNA, 25 bp, Artificial
  Probe
ggatcaagtgcatcaaagccgccat

SEQ ID NO: 347580 - DNA, 25 bp, Artificial
  Probe
ctgagtatccgagaggtggaagact

SEQ ID NO: 347581 - DNA, 25 bp, Artificial
  Probe
acggccagcccgtgaagctgtggcc

SEQ ID NO: 347582 - DNA, 25 bp, Artificial
  Probe
caagtgcatcaaagccgccatcagc

SEQ ID NO: 347583 - DNA, 25 bp, Artificial
  Probe
atcaagtgcatcaaagccgccatca

SEQ ID NO: 347584 - DNA, 25 bp, Artificial
  Probe
aggcgctggttcattctgactgaca

SEQ ID NO: 347585 - DNA, 25 bp, Artificial
  Probe
tcctccacaaagaggcactgagggt

SEQ ID NO: 347586 - DNA, 25 bp, Artificial
  Probe
agaaggtctcctccacaaagaggca

SEQ ID NO: 347587 - DNA, 25 bp, Artificial
  Probe
aagactccaagaagccgaactgctt

SEQ ID NO: 347588 - DNA, 25 bp, Artificial
  Probe
ccacaaagaggcactgagggtgcac

SEQ ID NO: 347589 - DNA, 25 bp, Artificial
  Probe
gaagaggcgctggttcattctgact

SEQ ID NO: 347590 - DNA, 25 bp, Artificial
  Probe
actggatcaagtgcatcaaagccgc

SEQ ID NO: 347591 - DNA, 25 bp, Artificial
  Probe
gttctacgagatgcttgcagcacgg

SEQ ID NO: 347592 - DNA, 25 bp, Artificial
  Probe
agcccgtgaagctgtggccccttct

SEQ ID NO: 347593 - DNA, 25 bp, Artificial
  Probe
ctgacaataaagaccaggtgattaa

SEQ ID NO: 347594 - DNA, 25 bp, Artificial
  Probe
cacaaagaggcactgagggtgcacc

SEQ ID NO: 347595 - DNA, 25 bp, Artificial
  Probe
aagccgccatcagcagagacccgtt

SEQ ID NO: 347596 - DNA, 25 bp, Artificial
  Probe
tggaagactccaagaagccgaactg

SEQ ID NO: 347597 - DNA, 25 bp, Artificial
  Probe
tatatccctgacaataaagaccagg

SEQ ID NO: 347598 - DNA, 25 bp, Artificial
  Probe
cagagggcttctctgccagttcctg

SEQ ID NO: 347599 - DNA, 25 bp, Artificial
  Probe
tctcctccacaaagaggcactgagg

SEQ ID NO: 347600 - DNA, 25 bp, Artificial
  Probe
taaagaccaggtgattaaggcctgc

SEQ ID NO: 347601 - DNA, 25 bp, Artificial
  Probe
atcaaagccgccatcagcagagacc

SEQ ID NO: 347602 - DNA, 25 bp, Artificial
  Probe
gtatccgagaggtggaagactccaa

SEQ ID NO: 347603 - DNA, 25 bp, Artificial
  Probe
agactggatcaagtgcatcaaagcc

SEQ ID NO: 347604 - DNA, 25 bp, Artificial
  Probe
tccctgacaataaagaccaggtgat

SEQ ID NO: 347605 - DNA, 25 bp, Artificial
  Probe
tatccgagaggtggaagactccaag

SEQ ID NO: 347606 - DNA, 25 bp, Artificial
  Probe
acaataaagaccaggtgattaaggc

SEQ ID NO: 347607 - DNA, 25 bp, Artificial
  Probe
gaggcgctggttcattctgactgac

SEQ ID NO: 347608 - DNA, 25 bp, Artificial
  Probe
caaagaggcactgagggtgcaccag

SEQ ID NO: 347609 - DNA, 25 bp, Artificial
  Probe
cagggcacggccagcccgtgaagct

SEQ ID NO: 347610 - DNA, 25 bp, Artificial
  Probe
cgagatgcttgcagcacggaaaaag

SEQ ID NO: 347611 - DNA, 25 bp, Artificial
  Probe
ggtctcctccacaaagaggcactga

SEQ ID NO: 347612 - DNA, 25 bp, Artificial
  Probe
tgagtatccgagaggtggaagactc

SEQ ID NO: 347613 - DNA, 25 bp, Artificial
  Probe
cagagacccgttctacgagatgctt

SEQ ID NO: 347614 - DNA, 25 bp, Artificial
  Probe
gacatgctggccacaaggaagagga

SEQ ID NO: 347615 - DNA, 25 bp, Artificial
  Probe
tttggggacccttgtccacaacagc

SEQ ID NO: 347616 - DNA, 25 bp, Artificial
  Probe
aagagccagccaaggccggagccct

SEQ ID NO: 347617 - DNA, 25 bp, Artificial
  Probe
cacaagccgcaggactggggacagt

SEQ ID NO: 347618 - DNA, 25 bp, Artificial
  Probe
tagtattgacctttggggacccttg

SEQ ID NO: 347619 - DNA, 25 bp, Artificial
  Probe
tctatgacatgctggccacaaggaa

SEQ ID NO: 347620 - DNA, 25 bp, Artificial
  Probe
gaagtccatcaaagcgagcatcagt

SEQ ID NO: 347621 - DNA, 25 bp, Artificial
  Probe
acacctgctctctggggcagcacta

SEQ ID NO: 347622 - DNA, 25 bp, Artificial
  Probe
ccttgtccacaacagcacctggtga

SEQ ID NO: 347623 - DNA, 25 bp, Artificial
  Probe
tccatcaaagcgagcatcagtaggg

SEQ ID NO: 347624 - DNA, 25 bp, Artificial
  Probe
tggccagctgtgagcgtctctttcc

SEQ ID NO: 347625 - DNA, 25 bp, Artificial
  Probe
gtgatgacagcctccagacctgcac

SEQ ID NO: 347626 - DNA, 25 bp, Artificial
  Probe
ggatgaagtccatcaaagcgagcat

SEQ ID NO: 347627 - DNA, 25 bp, Artificial
  Probe
ggacattggccagctgtgagcgtct

SEQ ID NO: 347628 - DNA, 25 bp, Artificial
  Probe
cagcggatacactggcctcacaagc

SEQ ID NO: 347629 - DNA, 25 bp, Artificial
  Probe
tgggactcctgttccggagccagag

SEQ ID NO: 347630 - DNA, 25 bp, Artificial
  Probe
tgcacagcccacgtgggactcctgt

SEQ ID NO: 347631 - DNA, 25 bp, Artificial
  Probe
gtcctccagaagagccagccaaggc

SEQ ID NO: 347632 - DNA, 25 bp, Artificial
  Probe
agactccagcggatacactggcctc

SEQ ID NO: 347633 - DNA, 25 bp, Artificial
  Probe
tccagaagagccagccaaggccgga

SEQ ID NO: 347634 - DNA, 25 bp, Artificial
  Probe
caccgtcctagtattgacctttggg

SEQ ID NO: 347635 - DNA, 25 bp, Artificial
  Probe
aaagtcaagatccagactccagcgg

SEQ ID NO: 347636 - DNA, 25 bp, Artificial
  Probe
gtgagcgtctctttcctgccaccgt

SEQ ID NO: 347637 - DNA, 25 bp, Artificial
  Probe
gatccagactccagcggatacactg

SEQ ID NO: 347638 - DNA, 25 bp, Artificial
  Probe
gctctctggggcagcactacatgtt

SEQ ID NO: 347639 - DNA, 25 bp, Artificial
  Probe
actggcctcacaagccgcaggactg

SEQ ID NO: 347640 - DNA, 25 bp, Artificial
  Probe
tggggacccttgtccacaacagcac

SEQ ID NO: 347641 - DNA, 25 bp, Artificial
  Probe
tgacctttggggacccttgtccaca

SEQ ID NO: 347642 - DNA, 25 bp, Artificial
  Probe
gatgacagcctccagacctgcacag

SEQ ID NO: 347643 - DNA, 25 bp, Artificial
  Probe
gggaaccatgttgtataccggatct

SEQ ID NO: 347644 - DNA, 25 bp, Artificial
  Probe
ttcctgccaccgtcctagtattgac

SEQ ID NO: 347645 - DNA, 25 bp, Artificial
  Probe
tgttccggagccagagcctcagcca

SEQ ID NO: 347646 - DNA, 25 bp, Artificial
  Probe
gatacactggcctcacaagccgcag

SEQ ID NO: 347647 - DNA, 25 bp, Artificial
  Probe
accatgttgtataccggatctctgc

SEQ ID NO: 347648 - DNA, 25 bp, Artificial
  Probe
ctcacaagccgcaggactggggaca

SEQ ID NO: 347649 - DNA, 25 bp, Artificial
  Probe
ggacccgttctatgacatgctggcc

SEQ ID NO: 347650 - DNA, 25 bp, Artificial
  Probe
cctccagcctgtgctctgggacatt

SEQ ID NO: 347651 - DNA, 25 bp, Artificial
  Probe
gcaagtcattaaagcctgcaagacg

SEQ ID NO: 347652 - DNA, 25 bp, Artificial
  Probe
gctctgggacattggccagctgtga

SEQ ID NO: 347653 - DNA, 25 bp, Artificial
  Probe
cagctgtgagcgtctctttcctgcc

SEQ ID NO: 347654 - DNA, 25 bp, Artificial
  Probe
ccccagtcacaaagggcaagtcatt

SEQ ID NO: 347655 - DNA, 25 bp, Artificial
  Probe
tagggacccgttctatgacatgctg

SEQ ID NO: 347656 - DNA, 25 bp, Artificial
  Probe
agcgagcatcagtagggacccgttc

SEQ ID NO: 347657 - DNA, 25 bp, Artificial
  Probe
ctgtgctctgggacattggccagct

SEQ ID NO: 347658 - DNA, 25 bp, Artificial
  Probe
agtgtggaccccatgggtcctccag

SEQ ID NO: 347659 - DNA, 25 bp, Artificial
  Probe
acatgctggccacaaggaagaggag

SEQ ID NO: 347660 - DNA, 25 bp, Artificial
  Probe
ccagctctggaggaaccggccagac

SEQ ID NO: 347661 - DNA, 25 bp, Artificial
  Probe
gaaaccaaagcgaaactccatcgca

SEQ ID NO: 347662 - DNA, 25 bp, Artificial
  Probe
tctgctccacgaggagcgcagccgg

SEQ ID NO: 347663 - DNA, 25 bp, Artificial
  Probe
taccagggagccagtgagatttgaa

SEQ ID NO: 347664 - DNA, 25 bp, Artificial
  Probe
tgcctctactcttgccttttatgag

SEQ ID NO: 347665 - DNA, 25 bp, Artificial
  Probe
gaggaaccggccagactttctgcct

SEQ ID NO: 347666 - DNA, 25 bp, Artificial
  Probe
ggccaggtgcactcttccacaggct

SEQ ID NO: 347667 - DNA, 25 bp, Artificial
  Probe
tggcctctcaagagtttgccttccc

SEQ ID NO: 347668 - DNA, 25 bp, Artificial
  Probe
tgtttgctgctttgcggcgcttcta

SEQ ID NO: 347669 - DNA, 25 bp, Artificial
  Probe
gcgatactgatcagctatgctataa

SEQ ID NO: 347670 - DNA, 25 bp, Artificial
  Probe
aggcctctttgtccagcgcctggcg

SEQ ID NO: 347671 - DNA, 25 bp, Artificial
  Probe
ggccgctgcgaaggtgagtcccctt

SEQ ID NO: 347672 - DNA, 25 bp, Artificial
  Probe
cctgtaggagcgatactgatcagct

SEQ ID NO: 347673 - DNA, 25 bp, Artificial
  Probe
acacacatgtgcaggggagatcgct

SEQ ID NO: 347674 - DNA, 25 bp, Artificial
  Probe
ttgaggccgaacagctttgggccgt

SEQ ID NO: 347675 - DNA, 25 bp, Artificial
  Probe
agaatttcccatctttcctgtagga

SEQ ID NO: 347676 - DNA, 25 bp, Artificial
  Probe
actgttacatactagaataaactgg

SEQ ID NO: 347677 - DNA, 25 bp, Artificial
  Probe
ttgtttcctctggtgctgtgcttag

SEQ ID NO: 347678 - DNA, 25 bp, Artificial
  Probe
cgcattgttccctgcgcaaattgtt

SEQ ID NO: 347679 - DNA, 25 bp, Artificial
  Probe
agcgtctggcttctgctgccgctcg

SEQ ID NO: 347680 - DNA, 25 bp, Artificial
  Probe
ctcgtggtccctgtgggctgcgatc

SEQ ID NO: 347681 - DNA, 25 bp, Artificial
  Probe
ccagggagccagtgagatttgaact

SEQ ID NO: 347682 - DNA, 25 bp, Artificial
  Probe
actcagagtcccacacacatgtgca

SEQ ID NO: 347683 - DNA, 25 bp, Artificial
  Probe
tcccgctcgtggtccctgtgggctg

SEQ ID NO: 347684 - DNA, 25 bp, Artificial
  Probe
gcgaggcctctttgtccagcgcctg

SEQ ID NO: 347685 - DNA, 25 bp, Artificial
  Probe
agaccgtgatggttgaggccgaaca

SEQ ID NO: 347686 - DNA, 25 bp, Artificial
  Probe
tgagatttgaactctcatagccaag

SEQ ID NO: 347687 - DNA, 25 bp, Artificial
  Probe
gtatttttgctttcccacgactttg

SEQ ID NO: 347688 - DNA, 25 bp, Artificial
  Probe
ccttttatgagtgtgtgcctgaaaa

SEQ ID NO: 347689 - DNA, 25 bp, Artificial
  Probe
gatcgcacatccattacggaacctc

SEQ ID NO: 347690 - DNA, 25 bp, Artificial
  Probe
gcttgagaacagacgcgggctcttc

SEQ ID NO: 347691 - DNA, 25 bp, Artificial
  Probe
ttataaccacatttagacttgagtg

SEQ ID NO: 347692 - DNA, 25 bp, Artificial
  Probe
gatactgatcagctatgctataaat

SEQ ID NO: 347693 - DNA, 25 bp, Artificial
  Probe
cgctgggagatgtttgcaagagcca

SEQ ID NO: 347694 - DNA, 25 bp, Artificial
  Probe
agggactgaagcttagcgcgtaccg

SEQ ID NO: 347695 - DNA, 25 bp, Artificial
  Probe
aagatgtttgctgctttgcggcgct

SEQ ID NO: 347696 - DNA, 25 bp, Artificial
  Probe
tacatactagaataaactggtaacg

SEQ ID NO: 347697 - DNA, 25 bp, Artificial
  Probe
ttctgctccacgaggagcgcagccg

SEQ ID NO: 347698 - DNA, 25 bp, Artificial
  Probe
ttcttaattgagttttgcctccctg

SEQ ID NO: 347699 - DNA, 25 bp, Artificial
  Probe
ggtggcacggccaggtgcactcttc

SEQ ID NO: 347700 - DNA, 25 bp, Artificial
  Probe
catttagacttgagtgtgaaaccaa

SEQ ID NO: 347701 - DNA, 25 bp, Artificial
  Probe
aggtgagtccccttcgggctgcgct

SEQ ID NO: 347702 - DNA, 25 bp, Artificial
  Probe
ctctcatagccaaggcgctcggcgg

SEQ ID NO: 347703 - DNA, 25 bp, Artificial
  Probe
ggactgaagcttagcgcgtaccgtg

SEQ ID NO: 347704 - DNA, 25 bp, Artificial
  Probe
ggaaacatctgtatttttgctttcc

SEQ ID NO: 347705 - DNA, 25 bp, Artificial
  Probe
cctctggtgctgtgcttagccagga

SEQ ID NO: 347706 - DNA, 25 bp, Artificial
  Probe
cagagtaacgccatcttgcggtaca

SEQ ID NO: 347707 - DNA, 25 bp, Artificial
  Probe
ggctctgctacaattctaaccacga

SEQ ID NO: 347708 - DNA, 25 bp, Artificial
  Probe
agctggttcggctctgctacaattc

SEQ ID NO: 347709 - DNA, 25 bp, Artificial
  Probe
gaagccaatggctggacgtgaaatt

SEQ ID NO: 347710 - DNA, 25 bp, Artificial
  Probe
gatctggattttcctaacctgccct

SEQ ID NO: 347711 - DNA, 25 bp, Artificial
  Probe
gaagaacaagatcacccagagtaac

SEQ ID NO: 347712 - DNA, 25 bp, Artificial
  Probe
tcctggggaaattcacatggtttgc

SEQ ID NO: 347713 - DNA, 25 bp, Artificial
  Probe
atcttgcggtacatcgcacgcaagc

SEQ ID NO: 347714 - DNA, 25 bp, Artificial
  Probe
tgccctaccttatggacgggaagaa

SEQ ID NO: 347715 - DNA, 25 bp, Artificial
  Probe
cagccttgtcccatccgatctggag

SEQ ID NO: 347716 - DNA, 25 bp, Artificial
  Probe
acatcgcacgcaagcacaacatgtg

SEQ ID NO: 347717 - DNA, 25 bp, Artificial
  Probe
ggagtttactgataccagctatgaa

SEQ ID NO: 347718 - DNA, 25 bp, Artificial
  Probe
taacctgccctaccttatggacggg

SEQ ID NO: 347719 - DNA, 25 bp, Artificial
  Probe
ggttctgggttactgggatatccgc

SEQ ID NO: 347720 - DNA, 25 bp, Artificial
  Probe
gttctgggttactgggatatccgcg

SEQ ID NO: 347721 - DNA, 25 bp, Artificial
  Probe
gccatcttgcggtacatcgcacgca

SEQ ID NO: 347722 - DNA, 25 bp, Artificial
  Probe
ccaaaatgtcgtgctccaagtctat

SEQ ID NO: 347723 - DNA, 25 bp, Artificial
  Probe
aaattcaagctagatctggattttc

SEQ ID NO: 347724 - DNA, 25 bp, Artificial
  Probe
atgccaatcaacaacaagatggcca

SEQ ID NO: 347725 - DNA, 25 bp, Artificial
  Probe
gtatttggaacaactgcctgcacag

SEQ ID NO: 347726 - DNA, 25 bp, Artificial
  Probe
tacatcgcacgcaagcacaacatgt

SEQ ID NO: 347727 - DNA, 25 bp, Artificial
  Probe
agcctcagtatttggaacaactgcc

SEQ ID NO: 347728 - DNA, 25 bp, Artificial
  Probe
tgccatccgtatgctcctggagttt

SEQ ID NO: 347729 - DNA, 25 bp, Artificial
  Probe
ctctgtaagcttcctgccagccttg

SEQ ID NO: 347730 - DNA, 25 bp, Artificial
  Probe
catgtgtggtgacaccgaagaagaa

SEQ ID NO: 347731 - DNA, 25 bp, Artificial
  Probe
cgggctggctcatgccatccgtatg

SEQ ID NO: 347732 - DNA, 25 bp, Artificial
  Probe
accacgaaagcctgaagcctcagta

SEQ ID NO: 347733 - DNA, 25 bp, Artificial
  Probe
gtctgaccgctgcttcaagatgcca

SEQ ID NO: 347734 - DNA, 25 bp, Artificial
  Probe
caattctaaccacgaaagcctgaag

SEQ ID NO: 347735 - DNA, 25 bp, Artificial
  Probe
caagtctatggttctgggttactgg

SEQ ID NO: 347736 - DNA, 25 bp, Artificial
  Probe
cttccgcatgcagctggttcggctc

SEQ ID NO: 347737 - DNA, 25 bp, Artificial
  Probe
ggaagaacaagatcacccagagtaa

SEQ ID NO: 347738 - DNA, 25 bp, Artificial
  Probe
gcggtacatcgcacgcaagcacaac

SEQ ID NO: 347739 - DNA, 25 bp, Artificial
  Probe
caacatgtgtggtgacaccgaagaa

SEQ ID NO: 347740 - DNA, 25 bp, Artificial
  Probe
ttcacatggtttgcaggagaaaagc

SEQ ID NO: 347741 - DNA, 25 bp, Artificial
  Probe
ctcctggagtttactgataccagct

SEQ ID NO: 347742 - DNA, 25 bp, Artificial
  Probe
catgcagctggttcggctctgctac

SEQ ID NO: 347743 - DNA, 25 bp, Artificial
  Probe
gtaacgccatcttgcggtacatcgc

SEQ ID NO: 347744 - DNA, 25 bp, Artificial
  Probe
caagatgccaatcaacaacaagatg

SEQ ID NO: 347745 - DNA, 25 bp, Artificial
  Probe
cgcgggctggctcatgccatccgta

SEQ ID NO: 347746 - DNA, 25 bp, Artificial
  Probe
ataccagctatgaagagaaacagta

SEQ ID NO: 347747 - DNA, 25 bp, Artificial
  Probe
ctgtaagcttcctgccagccttgtc

SEQ ID NO: 347748 - DNA, 25 bp, Artificial
  Probe
caatggctggacgtgaaattcaagc

SEQ ID NO: 347749 - DNA, 25 bp, Artificial
  Probe
cacatggtttgcaggagaaaagctg

SEQ ID NO: 347750 - DNA, 25 bp, Artificial
  Probe
gctgcttcaagatgccaatcaacaa

SEQ ID NO: 347751 - DNA, 25 bp, Artificial
  Probe
ttgttcctggggaaattcacatggt

SEQ ID NO: 347752 - DNA, 25 bp, Artificial
  Probe
tcagcaacaatgtgagcagcagttg

SEQ ID NO: 347753 - DNA, 25 bp, Artificial
  Probe
ggcagccgcagctgcagcagcagca

SEQ ID NO: 347754 - DNA, 25 bp, Artificial
  Probe
agccgaggcaccagcggcagctgca

SEQ ID NO: 347755 - DNA, 25 bp, Artificial
  Probe
gggcaaccgcgacagcagcgtcagc

SEQ ID NO: 347756 - DNA, 25 bp, Artificial
  Probe
cagccgaggcatcagaggcagcagc

SEQ ID NO: 347757 - DNA, 25 bp, Artificial
  Probe
agcagcagtgccagcaggagcagct

SEQ ID NO: 347758 - DNA, 25 bp, Artificial
  Probe
agttgctgcaacagcagcaatgcca

SEQ ID NO: 347759 - DNA, 25 bp, Artificial
  Probe
gcagcagtgccagcaggagcagctt

SEQ ID NO: 347760 - DNA, 25 bp, Artificial
  Probe
agcctcggcagcagcggcagcagca

SEQ ID NO: 347761 - DNA, 25 bp, Artificial
  Probe
agccgaggcatcagaggcagcagca

SEQ ID NO: 347762 - DNA, 25 bp, Artificial
  Probe
gcaatgccagcaggagcagcagcag

SEQ ID NO: 347763 - DNA, 25 bp, Artificial
  Probe
atgtgagcagcagttgctgcaacag

SEQ ID NO: 347764 - DNA, 25 bp, Artificial
  Probe
gagcagcagcagcagcagcagcagc

SEQ ID NO: 347765 - DNA, 25 bp, Artificial
  Probe
ccgcgacagcagcagcagcagcagg

SEQ ID NO: 347766 - DNA, 25 bp, Artificial
  Probe
cagcagcagcagcagcagcagcagc

SEQ ID NO: 347767 - DNA, 25 bp, Artificial
  Probe
agcagcagcagcagcagcagcagca

SEQ ID NO: 347768 - DNA, 25 bp, Artificial
  Probe
agcagcagcagcagcagcggaaaag

SEQ ID NO: 347769 - DNA, 25 bp, Artificial
  Probe
cagcagcagcagcagctgcagcagc

SEQ ID NO: 347770 - DNA, 25 bp, Artificial
  Probe
agccgcagctgcagcagcagcagca

SEQ ID NO: 347771 - DNA, 25 bp, Artificial
  Probe
atgccagcaggagcagcagcagcag

SEQ ID NO: 347772 - DNA, 25 bp, Artificial
  Probe
cgcagctgcagcagcagcagcagca

SEQ ID NO: 347773 - DNA, 25 bp, Artificial
  Probe
gcagcagcagcagcagcagcagcag

SEQ ID NO: 347774 - DNA, 25 bp, Artificial
  Probe
aaccgcgacagcagcgtcagcagca

SEQ ID NO: 347775 - DNA, 25 bp, Artificial
  Probe
gcagccgcagctgcagcagcagcag

SEQ ID NO: 347776 - DNA, 25 bp, Artificial
  Probe
cagcagcagcagcagcggaaaagga

SEQ ID NO: 347777 - DNA, 25 bp, Artificial
  Probe
agcaggagcagcagcagcagcagca

SEQ ID NO: 347778 - DNA, 25 bp, Artificial
  Probe
agcagcaggggcaaccgcgacagca

SEQ ID NO: 347779 - DNA, 25 bp, Artificial
  Probe
cagcagttgctgcaacagcagcaat

SEQ ID NO: 347780 - DNA, 25 bp, Artificial
  Probe
agaggaccagaaggaccaggagaac

SEQ ID NO: 347781 - DNA, 25 bp, Artificial
  Probe
ctacagcagcagtgccagcaggagc

SEQ ID NO: 347782 - DNA, 25 bp, Artificial
  Probe
caacagcagcaatgccagcaggagc

SEQ ID NO: 347783 - DNA, 25 bp, Artificial
  Probe
agaaggaccaggagaaccaggaaca

SEQ ID NO: 347784 - DNA, 25 bp, Artificial
  Probe
cagcagctgcagcagctacagcagc

SEQ ID NO: 347785 - DNA, 25 bp, Artificial
  Probe
cagcagcagcagcagcagcagcagg

SEQ ID NO: 347786 - DNA, 25 bp, Artificial
  Probe
cagcagcagcagcagcaggggcaac

SEQ ID NO: 347787 - DNA, 25 bp, Artificial
  Probe
cagcgtcagcagcaggggcagcctc

SEQ ID NO: 347788 - DNA, 25 bp, Artificial
  Probe
cagcagcagcagcaggggcaaccgc

SEQ ID NO: 347789 - DNA, 25 bp, Artificial
  Probe
agcagcagcagcagcagcagcagcg

SEQ ID NO: 347790 - DNA, 25 bp, Artificial
  Probe
tgcagcagcagcagcagcagcagca

SEQ ID NO: 347791 - DNA, 25 bp, Artificial
  Probe
caacaatgtgagcagcagttgctgc

SEQ ID NO: 347792 - DNA, 25 bp, Artificial
  Probe
gaaggaccaggagaaccaggaacac

SEQ ID NO: 347793 - DNA, 25 bp, Artificial
  Probe
aggagaaccaggaacaccaggagga

SEQ ID NO: 347794 - DNA, 25 bp, Artificial
  Probe
ggaccagaaggaccaggagaaccag

SEQ ID NO: 347795 - DNA, 25 bp, Artificial
  Probe
tgagcagcagttgctgcaacagcag

SEQ ID NO: 347796 - DNA, 25 bp, Artificial
  Probe
aggagcagcagcagcagcagcagca

SEQ ID NO: 347797 - DNA, 25 bp, Artificial
  Probe
agctgcagcagcagcagcagcagca

SEQ ID NO: 347798 - DNA, 25 bp, Artificial
  Probe
cgcctctcgtggaagatgccagatg

SEQ ID NO: 347799 - DNA, 25 bp, Artificial
  Probe
ggaccaaagtcaatccaaactgtgg

SEQ ID NO: 347800 - DNA, 25 bp, Artificial
  Probe
tgggaaagcctggaccaaagtcaat

SEQ ID NO: 347801 - DNA, 25 bp, Artificial
  Probe
catcacaaggggtagttgccgcctc

SEQ ID NO: 347802 - DNA, 25 bp, Artificial
  Probe
gttgccgcctctcgtggaagatgcc

SEQ ID NO: 347803 - DNA, 25 bp, Artificial
  Probe
agtcaatccaaactgtggaagcacc

SEQ ID NO: 347804 - DNA, 25 bp, Artificial
  Probe
tctcgtggaagatgccagatgatga

SEQ ID NO: 347805 - DNA, 25 bp, Artificial
  Probe
ggaaagcctggaccaaagtcaatcc

SEQ ID NO: 347806 - DNA, 25 bp, Artificial
  Probe
tctctgagcagcaatacctcttcag

SEQ ID NO: 347807 - DNA, 25 bp, Artificial
  Probe
gcaccaccttcgtggtgccagatct

SEQ ID NO: 347808 - DNA, 25 bp, Artificial
  Probe
tgccagatcttatctctgagcagca

SEQ ID NO: 347809 - DNA, 25 bp, Artificial
  Probe
aggtcagtgacatcacaaggggtag

SEQ ID NO: 347810 - DNA, 25 bp, Artificial
  Probe
ctgtggaagcaccaccttcgtggtg

SEQ ID NO: 347811 - DNA, 25 bp, Artificial
  Probe
tagttgccgcctctcgtggaagatg

SEQ ID NO: 347812 - DNA, 25 bp, Artificial
  Probe
caatccaaactgtggaagcaccacc

SEQ ID NO: 347813 - DNA, 25 bp, Artificial
  Probe
ccaaagtcaatccaaactgtggaag

SEQ ID NO: 347814 - DNA, 25 bp, Artificial
  Probe
cctctcgtggaagatgccagatgat

SEQ ID NO: 347815 - DNA, 25 bp, Artificial
  Probe
agtgacatcacaaggggtagttgcc

SEQ ID NO: 347816 - DNA, 25 bp, Artificial
  Probe
tctgagcagcaatacctcttcaggg

SEQ ID NO: 347817 - DNA, 25 bp, Artificial
  Probe
tcgtggtgccagatcttatctctga

SEQ ID NO: 347818 - DNA, 25 bp, Artificial
  Probe
ggaagcaccaccttcgtggtgccag

SEQ ID NO: 347819 - DNA, 25 bp, Artificial
  Probe
gccagatcttatctctgagcagcaa

SEQ ID NO: 347820 - DNA, 25 bp, Artificial
  Probe
ccaccttcgtggtgccagatcttat

SEQ ID NO: 347821 - DNA, 25 bp, Artificial
  Probe
ctggaccaaagtcaatccaaactgt

SEQ ID NO: 347822 - DNA, 25 bp, Artificial
  Probe
aaagcctggaccaaagtcaatccaa

SEQ ID NO: 347823 - DNA, 25 bp, Artificial
  Probe
cttcgtggtgccagatcttatctct

SEQ ID NO: 347824 - DNA, 25 bp, Artificial
  Probe
tcacaaggggtagttgccgcctctc

SEQ ID NO: 347825 - DNA, 25 bp, Artificial
  Probe
gagcagcaatacctcttcagggttc

SEQ ID NO: 347826 - DNA, 25 bp, Artificial
  Probe
tcaatccaaactgtggaagcaccac

SEQ ID NO: 347827 - DNA, 25 bp, Artificial
  Probe
cagcaatacctcttcagggttcgag

SEQ ID NO: 347828 - DNA, 25 bp, Artificial
  Probe
gatcttatctctgagcagcaatacc

SEQ ID NO: 347829 - DNA, 25 bp, Artificial
  Probe
caccaccttcgtggtgccagatctt

SEQ ID NO: 347830 - DNA, 25 bp, Artificial
  Probe
atgggaaagcctggaccaaagtcaa

SEQ ID NO: 347831 - DNA, 25 bp, Artificial
  Probe
ggtgccagatcttatctctgagcag

SEQ ID NO: 347832 - DNA, 25 bp, Artificial
  Probe
gcaatacctcttcagggttcgagca

SEQ ID NO: 347833 - DNA, 25 bp, Artificial
  Probe
gtggaagcaccaccttcgtggtgcc

SEQ ID NO: 347834 - DNA, 25 bp, Artificial
  Probe
ttgccgcctctcgtggaagatgcca

SEQ ID NO: 347835 - DNA, 25 bp, Artificial
  Probe
aaagtcaatccaaactgtggaagca

SEQ ID NO: 347836 - DNA, 25 bp, Artificial
  Probe
caaactgtggaagcaccaccttcgt

SEQ ID NO: 347837 - DNA, 25 bp, Artificial
  Probe
agcctggaccaaagtcaatccaaac

SEQ ID NO: 347838 - DNA, 25 bp, Artificial
  Probe
tgtggaagcaccaccttcgtggtgc

SEQ ID NO: 347839 - DNA, 25 bp, Artificial
  Probe
ccagatcttatctctgagcagcaat

SEQ ID NO: 347840 - DNA, 25 bp, Artificial
  Probe
tccaaactgtggaagcaccaccttc

SEQ ID NO: 347841 - DNA, 25 bp, Artificial
  Probe
ctgagcagcaatacctcttcagggt

SEQ ID NO: 347842 - DNA, 25 bp, Artificial
  Probe
gtcagtgacatcacaaggggtagtt

SEQ ID NO: 347843 - DNA, 25 bp, Artificial
  Probe
gtagttgccgcctctcgtggaagat

SEQ ID NO: 347844 - DNA, 25 bp, Artificial
  Probe
accctcaggaactccagcttggcta

SEQ ID NO: 347845 - DNA, 25 bp, Artificial
  Probe
gggctggttcatattcttgggcaga

SEQ ID NO: 347846 - DNA, 25 bp, Artificial
  Probe
tccctgagactgtcaagatctcttc

SEQ ID NO: 347847 - DNA, 25 bp, Artificial
  Probe
gggcgttttacaatcaactggccgg

SEQ ID NO: 347848 - DNA, 25 bp, Artificial
  Probe
attcttgggcagaaatccagaaata

SEQ ID NO: 347849 - DNA, 25 bp, Artificial
  Probe
aatgcaatgggctatcaacagtcca

SEQ ID NO: 347850 - DNA, 25 bp, Artificial
  Probe
gtaactccttttgctcgctgtcttc

SEQ ID NO: 347851 - DNA, 25 bp, Artificial
  Probe
taacatccagcaagagctggcgtgg

SEQ ID NO: 347852 - DNA, 25 bp, Artificial
  Probe
ggaagagaaccctcaactctaattt

SEQ ID NO: 347853 - DNA, 25 bp, Artificial
  Probe
ggaactccagcttggctactccgtg

SEQ ID NO: 347854 - DNA, 25 bp, Artificial
  Probe
gatgggccacatctaactactctct

SEQ ID NO: 347855 - DNA, 25 bp, Artificial
  Probe
gaacttccctcagttcagacagttt

SEQ ID NO: 347856 - DNA, 25 bp, Artificial
  Probe
gcttctcccaacaaagagatagcac

SEQ ID NO: 347857 - DNA, 25 bp, Artificial
  Probe
tggctgtcaacacgtatgaacaaaa

SEQ ID NO: 347858 - DNA, 25 bp, Artificial
  Probe
gccctctgaggcaggttaaagcttt

SEQ ID NO: 347859 - DNA, 25 bp, Artificial
  Probe
agtttcatagaatggcccatctgat

SEQ ID NO: 347860 - DNA, 25 bp, Artificial
  Probe
tcttctctgatgtgctcccttcttg

SEQ ID NO: 347861 - DNA, 25 bp, Artificial
  Probe
gggtcaggctgcttctcccaacaaa

SEQ ID NO: 347862 - DNA, 25 bp, Artificial
  Probe
agcatgctggactggcctctctctc

SEQ ID NO: 347863 - DNA, 25 bp, Artificial
  Probe
cctggctagctgctggaagtgactt

SEQ ID NO: 347864 - DNA, 25 bp, Artificial
  Probe
ccagcatttcccagatttggaagct

SEQ ID NO: 347865 - DNA, 25 bp, Artificial
  Probe
ctatgctctcagaccgaatctcacg

SEQ ID NO: 347866 - DNA, 25 bp, Artificial
  Probe
tccttgccccagcatgctggactgg

SEQ ID NO: 347867 - DNA, 25 bp, Artificial
  Probe
agttgagagtttctcttctctttgg

SEQ ID NO: 347868 - DNA, 25 bp, Artificial
  Probe
tgggagcttgaagcatgggactcca

SEQ ID NO: 347869 - DNA, 25 bp, Artificial
  Probe
tctctgctgtaactccttttgctcg

SEQ ID NO: 347870 - DNA, 25 bp, Artificial
  Probe
cagtcaataaaacctaagaggagag

SEQ ID NO: 347871 - DNA, 25 bp, Artificial
  Probe
catgggactccataggtccctggcc

SEQ ID NO: 347872 - DNA, 25 bp, Artificial
  Probe
tctatagtctgacatttgaggtctg

SEQ ID NO: 347873 - DNA, 25 bp, Artificial
  Probe
tagtgacctgctaccctgcctgagg

SEQ ID NO: 347874 - DNA, 25 bp, Artificial
  Probe
aatggcccatctgatggggaagtag

SEQ ID NO: 347875 - DNA, 25 bp, Artificial
  Probe
tgtctccagctctgtccctctaaag

SEQ ID NO: 347876 - DNA, 25 bp, Artificial
  Probe
taatttagcctctagggggcaaggt

SEQ ID NO: 347877 - DNA, 25 bp, Artificial
  Probe
ctctttggttgtgttgcgcaggttt

SEQ ID NO: 347878 - DNA, 25 bp, Artificial
  Probe
gacagacccgggaactccttatgcc

SEQ ID NO: 347879 - DNA, 25 bp, Artificial
  Probe
gcttaatgggctgtggctctgtagt

SEQ ID NO: 347880 - DNA, 25 bp, Artificial
  Probe
acaagaactatgcaatggagtttca

SEQ ID NO: 347881 - DNA, 25 bp, Artificial
  Probe
ggcagtggtggcatggctaacacca

SEQ ID NO: 347882 - DNA, 25 bp, Artificial
  Probe
ctggcagctgacaaagatgaagttt

SEQ ID NO: 347883 - DNA, 25 bp, Artificial
  Probe
gctctcagaccgaatctcacgttat

SEQ ID NO: 347884 - DNA, 25 bp, Artificial
  Probe
gttcctgacccctgggagagataga

SEQ ID NO: 347885 - DNA, 25 bp, Artificial
  Probe
gaagatatcgcctccttctctgctg

SEQ ID NO: 347886 - DNA, 25 bp, Artificial
  Probe
tcatcagtcaataaaacctaagagg

SEQ ID NO: 347887 - DNA, 25 bp, Artificial
  Probe
ccttccaaagccatattttggggag

SEQ ID NO: 347888 - DNA, 25 bp, Artificial
  Probe
ttcctgccacctgtcttctgctggg

SEQ ID NO: 347889 - DNA, 25 bp, Artificial
  Probe
gaggaacttccctcagttcagacag

SEQ ID NO: 347890 - DNA, 25 bp, Artificial
  Probe
attcctgccttcatggtcaaaggag

SEQ ID NO: 347891 - DNA, 25 bp, Artificial
  Probe
ctgccttcatggtcaaaggaggaga

SEQ ID NO: 347892 - DNA, 25 bp, Artificial
  Probe
gtcctcacagaatgccactggaatt

SEQ ID NO: 347893 - DNA, 25 bp, Artificial
  Probe
aacattgaatgtgctgcacaataga

SEQ ID NO: 347894 - DNA, 25 bp, Artificial
  Probe
tgccactggaattcaaaacattgaa

SEQ ID NO: 347895 - DNA, 25 bp, Artificial
  Probe
gctgtcaaatatcattactatgatg

SEQ ID NO: 347896 - DNA, 25 bp, Artificial
  Probe
tcacctgtatggattctggccattt

SEQ ID NO: 347897 - DNA, 25 bp, Artificial
  Probe
cattaccatgaatccatcagttgtg

SEQ ID NO: 347898 - DNA, 25 bp, Artificial
  Probe
catttcctaaggatctgaacgggaa

SEQ ID NO: 347899 - DNA, 25 bp, Artificial
  Probe
catcagttgtgcaaagagcattcgg

SEQ ID NO: 347900 - DNA, 25 bp, Artificial
  Probe
tgtcctttggattcctgccttcatg

SEQ ID NO: 347901 - DNA, 25 bp, Artificial
  Probe
ctgtatggattctggccatttccta

SEQ ID NO: 347902 - DNA, 25 bp, Artificial
  Probe
cctaaggatctgaacgggaaagctg

SEQ ID NO: 347903 - DNA, 25 bp, Artificial
  Probe
gttgtgcaaagagcattcggaggct

SEQ ID NO: 347904 - DNA, 25 bp, Artificial
  Probe
gtgtaatctagctcccgtggtggag

SEQ ID NO: 347905 - DNA, 25 bp, Artificial
  Probe
tgcggtcagaggttactggctgacc

SEQ ID NO: 347906 - DNA, 25 bp, Artificial
  Probe
gactaagtcagatttcattaccatg

SEQ ID NO: 347907 - DNA, 25 bp, Artificial
  Probe
tggattcctgccttcatggtcaaag

SEQ ID NO: 347908 - DNA, 25 bp, Artificial
  Probe
acccttgccaccagattctgtgacg

SEQ ID NO: 347909 - DNA, 25 bp, Artificial
  Probe
tccatcactgagactcattcatgcg

SEQ ID NO: 347910 - DNA, 25 bp, Artificial
  Probe
cctgtatggattctggccatttcct

SEQ ID NO: 347911 - DNA, 25 bp, Artificial
  Probe
atctagctcccgtggtggagttcgc

SEQ ID NO: 347912 - DNA, 25 bp, Artificial
  Probe
tagctcccgtggtggagttcgctgc

SEQ ID NO: 347913 - DNA, 25 bp, Artificial
  Probe
aattcaaaacattgaatgtgctgca

SEQ ID NO: 347914 - DNA, 25 bp, Artificial
  Probe
agattctgtgacgaaattcacctgt

SEQ ID NO: 347915 - DNA, 25 bp, Artificial
  Probe
tcattcatgcggtcagaggttactg

SEQ ID NO: 347916 - DNA, 25 bp, Artificial
  Probe
cattgaatgtgctgcacaatagagg

SEQ ID NO: 347917 - DNA, 25 bp, Artificial
  Probe
gtgaggactgcctatccatcactga

SEQ ID NO: 347918 - DNA, 25 bp, Artificial
  Probe
aaatttgtgcacagactctccatgc

SEQ ID NO: 347919 - DNA, 25 bp, Artificial
  Probe
gatctgaacgggaaagctgtcaaat

SEQ ID NO: 347920 - DNA, 25 bp, Artificial
  Probe
gactgcctatccatcactgagactc

SEQ ID NO: 347921 - DNA, 25 bp, Artificial
  Probe
tttcctaaggatctgaacgggaaag

SEQ ID NO: 347922 - DNA, 25 bp, Artificial
  Probe
gcattcggaggctttcggaatgaga

SEQ ID NO: 347923 - DNA, 25 bp, Artificial
  Probe
ctgcacaatagaggagctctaaaac

SEQ ID NO: 347924 - DNA, 25 bp, Artificial
  Probe
caacgcaagtcctcacagaatgcca

SEQ ID NO: 347925 - DNA, 25 bp, Artificial
  Probe
ttccaacgcaagtcctcacagaatg

SEQ ID NO: 347926 - DNA, 25 bp, Artificial
  Probe
cactggaattcaaaacattgaatgt

SEQ ID NO: 347927 - DNA, 25 bp, Artificial
  Probe
tgctgcacaatagaggagctctaaa

SEQ ID NO: 347928 - DNA, 25 bp, Artificial
  Probe
tgaatgtgctgcacaatagaggagc

SEQ ID NO: 347929 - DNA, 25 bp, Artificial
  Probe
tggattctggccatttcctaaggat

SEQ ID NO: 347930 - DNA, 25 bp, Artificial
  Probe
tcacagaatgccactggaattcaaa

SEQ ID NO: 347931 - DNA, 25 bp, Artificial
  Probe
gagactcattcatgcggtcagaggt

SEQ ID NO: 347932 - DNA, 25 bp, Artificial
  Probe
ccttcatggtcaaaggaggagagaa

SEQ ID NO: 347933 - DNA, 25 bp, Artificial
  Probe
tgcaaagagcattcggaggctttcg

SEQ ID NO: 347934 - DNA, 25 bp, Artificial
  Probe
aagagcattcggaggctttcggaat

SEQ ID NO: 347935 - DNA, 25 bp, Artificial
  Probe
cattcggaggctttcggaatgagag

SEQ ID NO: 347936 - DNA, 25 bp, Artificial
  Probe
cctgcactgttactgacttgagaaa

SEQ ID NO: 347937 - DNA, 25 bp, Artificial
  Probe
ggtcttcgatgtttcatcctaaaac

SEQ ID NO: 347938 - DNA, 25 bp, Artificial
  Probe
cgacggaaccctgcactgttactga

SEQ ID NO: 347939 - DNA, 25 bp, Artificial
  Probe
tgaacaaggcaagcaggccgcttgg

SEQ ID NO: 347940 - DNA, 25 bp, Artificial
  Probe
tgcactgaccagatgggaaataaat

SEQ ID NO: 347941 - DNA, 25 bp, Artificial
  Probe
tttccggttggatgcctaacattta

SEQ ID NO: 347942 - DNA, 25 bp, Artificial
  Probe
gaatctccattttgaacaaggcaag

SEQ ID NO: 347943 - DNA, 25 bp, Artificial
  Probe
caagcaggccgcttggtactttcct

SEQ ID NO: 347944 - DNA, 25 bp, Artificial
  Probe
aatctccattttgaacaaggcaagc

SEQ ID NO: 347945 - DNA, 25 bp, Artificial
  Probe
cggttggatgcctaacatttaggcc

SEQ ID NO: 347946 - DNA, 25 bp, Artificial
  Probe
aaaggccgcctggaacagaacaaag

SEQ ID NO: 347947 - DNA, 25 bp, Artificial
  Probe
gcaggccgcttggtactttcctcat

SEQ ID NO: 347948 - DNA, 25 bp, Artificial
  Probe
tttggtcttcgatgtttcatcctaa

SEQ ID NO: 347949 - DNA, 25 bp, Artificial
  Probe
ttactgacttgagaaactgaactaa

SEQ ID NO: 347950 - DNA, 25 bp, Artificial
  Probe
ctgcactgttactgacttgagaaac

SEQ ID NO: 347951 - DNA, 25 bp, Artificial
  Probe
tttgaacaaggcaagcaggccgctt

SEQ ID NO: 347952 - DNA, 25 bp, Artificial
  Probe
aggccgcttggtactttcctcatta

SEQ ID NO: 347953 - DNA, 25 bp, Artificial
  Probe
acgacggaaccctgcactgttactg

SEQ ID NO: 347954 - DNA, 25 bp, Artificial
  Probe
gcacacgacggaaccctgcactgtt

SEQ ID NO: 347955 - DNA, 25 bp, Artificial
  Probe
agttttggtcttcgatgtttcatcc

SEQ ID NO: 347956 - DNA, 25 bp, Artificial
  Probe
gttttgcactgaccagatgggaaat

SEQ ID NO: 347957 - DNA, 25 bp, Artificial
  Probe
gttggatgcctaacatttaggccag

SEQ ID NO: 347958 - DNA, 25 bp, Artificial
  Probe
gaacagaacaaagcttctctgccca

SEQ ID NO: 347959 - DNA, 25 bp, Artificial
  Probe
tggtcttcgatgtttcatcctaaaa

SEQ ID NO: 347960 - DNA, 25 bp, Artificial
  Probe
acctttccggttggatgcctaacat

SEQ ID NO: 347961 - DNA, 25 bp, Artificial
  Probe
gttactgacttgagaaactgaacta

SEQ ID NO: 347962 - DNA, 25 bp, Artificial
  Probe
tgcctaacatttaggccagagacaa

SEQ ID NO: 347963 - DNA, 25 bp, Artificial
  Probe
ttggtcttcgatgtttcatcctaaa

SEQ ID NO: 347964 - DNA, 25 bp, Artificial
  Probe
aggccgcctggaacagaacaaagct

SEQ ID NO: 347965 - DNA, 25 bp, Artificial
  Probe
ccattttgaacaaggcaagcaggcc

SEQ ID NO: 347966 - DNA, 25 bp, Artificial
  Probe
tccattttgaacaaggcaagcaggc

SEQ ID NO: 347967 - DNA, 25 bp, Artificial
  Probe
tgcactgttactgacttgagaaact

SEQ ID NO: 347968 - DNA, 25 bp, Artificial
  Probe
gccgcttggtactttcctcattaaa

SEQ ID NO: 347969 - DNA, 25 bp, Artificial
  Probe
ttgttttgcactgaccagatgggaa

SEQ ID NO: 347970 - DNA, 25 bp, Artificial
  Probe
aaccctgcactgttactgacttgag

SEQ ID NO: 347971 - DNA, 25 bp, Artificial
  Probe
gaacaaagcttctctgcccaggggt

SEQ ID NO: 347972 - DNA, 25 bp, Artificial
  Probe
tctccattttgaacaaggcaagcag

SEQ ID NO: 347973 - DNA, 25 bp, Artificial
  Probe
cctttccggttggatgcctaacatt

SEQ ID NO: 347974 - DNA, 25 bp, Artificial
  Probe
actgttactgacttgagaaactgaa

SEQ ID NO: 347975 - DNA, 25 bp, Artificial
  Probe
ccgcctggaacagaacaaagcttct

SEQ ID NO: 347976 - DNA, 25 bp, Artificial
  Probe
tggatgcctaacatttaggccagag

SEQ ID NO: 347977 - DNA, 25 bp, Artificial
  Probe
tttgcactgaccagatgggaaataa

SEQ ID NO: 347978 - DNA, 25 bp, Artificial
  Probe
gagttttggtcttcgatgtttcatc

SEQ ID NO: 347979 - DNA, 25 bp, Artificial
  Probe
tctgcccaggggtcgcaggcccatg

SEQ ID NO: 347980 - DNA, 25 bp, Artificial
  Probe
aacagaacaaagcttctctgcccag

SEQ ID NO: 347981 - DNA, 25 bp, Artificial
  Probe
gaacaaggcaagcaggccgcttggt

SEQ ID NO: 347982 - DNA, 25 bp, Artificial
  Probe
taagcccctttgtcaagggagttgg

SEQ ID NO: 347983 - DNA, 25 bp, Artificial
  Probe
cagctcaagctcagccctagaatgc

SEQ ID NO: 347984 - DNA, 25 bp, Artificial
  Probe
ggtcctcatccttaagtctttaagt

SEQ ID NO: 347985 - DNA, 25 bp, Artificial
  Probe
ctgtttttccccaggaggtcatggt

SEQ ID NO: 347986 - DNA, 25 bp, Artificial
  Probe
ttgctgctcctccttttgttggccc

SEQ ID NO: 347987 - DNA, 25 bp, Artificial
  Probe
tcagttccccaggaggtcctaagcc

SEQ ID NO: 347988 - DNA, 25 bp, Artificial
  Probe
taagctatctcttggttgtgtttgc

SEQ ID NO: 347989 - DNA, 25 bp, Artificial
  Probe
cccacaattgagcagataagctatc

SEQ ID NO: 347990 - DNA, 25 bp, Artificial
  Probe
agaaggaaggtcctcatccttaagt

SEQ ID NO: 347991 - DNA, 25 bp, Artificial
  Probe
agcagataagctatctcttggttgt

SEQ ID NO: 347992 - DNA, 25 bp, Artificial
  Probe
ttcaaagagtatccatgatgttcag

SEQ ID NO: 347993 - DNA, 25 bp, Artificial
  Probe
taacctgtaggctccagctggtagc

SEQ ID NO: 347994 - DNA, 25 bp, Artificial
  Probe
caggaggtcctaagcccctttgtca

SEQ ID NO: 347995 - DNA, 25 bp, Artificial
  Probe
tttgtggtgctaaggggcccagctc

SEQ ID NO: 347996 - DNA, 25 bp, Artificial
  Probe
tgtttgcagttactgtttttcccca

SEQ ID NO: 347997 - DNA, 25 bp, Artificial
  Probe
aggagagtttgtctttgctgctcct

SEQ ID NO: 347998 - DNA, 25 bp, Artificial
  Probe
tgatgttcagtgtgcccacaattga

SEQ ID NO: 347999 - DNA, 25 bp, Artificial
  Probe
gtcctaagcccctttgtcaagggag

SEQ ID NO: 348000 - DNA, 25 bp, Artificial
  Probe
ctcttggttgtgtttgcagttactg

SEQ ID NO: 348001 - DNA, 25 bp, Artificial
  Probe
ctttgctgctcctccttttgttggc

SEQ ID NO: 348002 - DNA, 25 bp, Artificial
  Probe
caagctcagccctagaatgcacaga

SEQ ID NO: 348003 - DNA, 25 bp, Artificial
  Probe
ctcatccttaagtctttaagtcagg

SEQ ID NO: 348004 - DNA, 25 bp, Artificial
  Probe
gccttaacctgtaggctccagctgg

SEQ ID NO: 348005 - DNA, 25 bp, Artificial
  Probe
caagcctgaggagagtttgtctttg

SEQ ID NO: 348006 - DNA, 25 bp, Artificial
  Probe
gagacaatagcaacagcagcaagcc

SEQ ID NO: 348007 - DNA, 25 bp, Artificial
  Probe
gtaccatttgtggtgctaaggggcc

SEQ ID NO: 348008 - DNA, 25 bp, Artificial
  Probe
atctcttggttgtgtttgcagttac

SEQ ID NO: 348009 - DNA, 25 bp, Artificial
  Probe
gctaaggggcccagctcaagctcag

SEQ ID NO: 348010 - DNA, 25 bp, Artificial
  Probe
gctggtagctcatggggcaatcacc

SEQ ID NO: 348011 - DNA, 25 bp, Artificial
  Probe
agctcatggggcaatcacctcagtt

SEQ ID NO: 348012 - DNA, 25 bp, Artificial
  Probe
ttcagtgtgcccacaattgagcaga

SEQ ID NO: 348013 - DNA, 25 bp, Artificial
  Probe
atagcaacagcagcaagcctgagga

SEQ ID NO: 348014 - DNA, 25 bp, Artificial
  Probe
acctgtaggctccagctggtagctc

SEQ ID NO: 348015 - DNA, 25 bp, Artificial
  Probe
tcatggggcaatcacctcagttccc

SEQ ID NO: 348016 - DNA, 25 bp, Artificial
  Probe
tattcttcaaagagtatccatgatg

SEQ ID NO: 348017 - DNA, 25 bp, Artificial
  Probe
cctcagttccccaggaggtcctaag

SEQ ID NO: 348018 - DNA, 25 bp, Artificial
  Probe
agagtatccatgatgttcagtgtgc

SEQ ID NO: 348019 - DNA, 25 bp, Artificial
  Probe
cagcagcaagcctgaggagagtttg

SEQ ID NO: 348020 - DNA, 25 bp, Artificial
  Probe
gcagttactgtttttccccaggagg

SEQ ID NO: 348021 - DNA, 25 bp, Artificial
  Probe
ggagagtttgtctttgctgctcctc

SEQ ID NO: 348022 - DNA, 25 bp, Artificial
  Probe
taaggggcccagctcaagctcagcc

SEQ ID NO: 348023 - DNA, 25 bp, Artificial
  Probe
agagcaacaacagtatagcagaagg

SEQ ID NO: 348024 - DNA, 25 bp, Artificial
  Probe
ccagctcaagctcagccctagaatg

SEQ ID NO: 348025 - DNA, 25 bp, Artificial
  Probe
gaggtcatggtaccatttgtggtgc

SEQ ID NO: 348026 - DNA, 25 bp, Artificial
  Probe
aatcacctcagttccccaggaggtc

SEQ ID NO: 348027 - DNA, 25 bp, Artificial
  Probe
ccccaggaggtcatggtaccatttg

SEQ ID NO: 348028 - DNA, 25 bp, Artificial
  Probe
aagtgcgccctgtgcctcaaagagt

SEQ ID NO: 348029 - DNA, 25 bp, Artificial
  Probe
gcaagcaggacctggtcaggcttga

SEQ ID NO: 348030 - DNA, 25 bp, Artificial
  Probe
acaagtgcgccctgtgcctcaaaga

SEQ ID NO: 348031 - DNA, 25 bp, Artificial
  Probe
ctgctattataagcagctggaaatg

SEQ ID NO: 348032 - DNA, 25 bp, Artificial
  Probe
gaaccacacgatgagccagcacgca

SEQ ID NO: 348033 - DNA, 25 bp, Artificial
  Probe
ggcgctgctattataagcagctgga

SEQ ID NO: 348034 - DNA, 25 bp, Artificial
  Probe
gtgtgcttttagagttttcgccgca

SEQ ID NO: 348035 - DNA, 25 bp, Artificial
  Probe
gcagaagctctacaagtgcgccctg

SEQ ID NO: 348036 - DNA, 25 bp, Artificial
  Probe
cagaagctctacaagtgcgccctgt

SEQ ID NO: 348037 - DNA, 25 bp, Artificial
  Probe
tcgccgcagactacatttctagtgt

SEQ ID NO: 348038 - DNA, 25 bp, Artificial
  Probe
aagctctacaagtgcgccctgtgcc

SEQ ID NO: 348039 - DNA, 25 bp, Artificial
  Probe
tgcagaaccacacgatgagccagca

SEQ ID NO: 348040 - DNA, 25 bp, Artificial
  Probe
attaaaagtattccatgctcagtgt

SEQ ID NO: 348041 - DNA, 25 bp, Artificial
  Probe
cctggtcaggcttgacgtcaatggg

SEQ ID NO: 348042 - DNA, 25 bp, Artificial
  Probe
gccaggggctgcagaagctctacaa

SEQ ID NO: 348043 - DNA, 25 bp, Artificial
  Probe
aagcaggacctggtcaggcttgacg

SEQ ID NO: 348044 - DNA, 25 bp, Artificial
  Probe
tgaggctattgtcctttgttccttc

SEQ ID NO: 348045 - DNA, 25 bp, Artificial
  Probe
tggtcaggcttgacgtcaatgggct

SEQ ID NO: 348046 - DNA, 25 bp, Artificial
  Probe
cctgcttttttgaggctattgtcct

SEQ ID NO: 348047 - DNA, 25 bp, Artificial
  Probe
gaaacctgcttttttgaggctattg

SEQ ID NO: 348048 - DNA, 25 bp, Artificial
  Probe
cgccgcagactacatttctagtgtt

SEQ ID NO: 348049 - DNA, 25 bp, Artificial
  Probe
tgaggcgctgctattataagcagct

SEQ ID NO: 348050 - DNA, 25 bp, Artificial
  Probe
acacgatgagccagcacgcacagtg

SEQ ID NO: 348051 - DNA, 25 bp, Artificial
  Probe
cagagttgcagaaccacacgatgag

SEQ ID NO: 348052 - DNA, 25 bp, Artificial
  Probe
cgccctgtgcctcaaagagttccgt

SEQ ID NO: 348053 - DNA, 25 bp, Artificial
  Probe
atggccaggggctgcagaagctcta

SEQ ID NO: 348054 - DNA, 25 bp, Artificial
  Probe
cccccaatggccaggggctgcagaa

SEQ ID NO: 348055 - DNA, 25 bp, Artificial
  Probe
gcctcaaagagttccgtagcaagca

SEQ ID NO: 348056 - DNA, 25 bp, Artificial
  Probe
acctggtcaggcttgacgtcaatgg

SEQ ID NO: 348057 - DNA, 25 bp, Artificial
  Probe
agttttcgccgcagactacatttct

SEQ ID NO: 348058 - DNA, 25 bp, Artificial
  Probe
cttttagagttttcgccgcagacta

SEQ ID NO: 348059 - DNA, 25 bp, Artificial
  Probe
gcgccctgtgcctcaaagagttccg

SEQ ID NO: 348060 - DNA, 25 bp, Artificial
  Probe
gagaaacctgcttttttgaggctat

SEQ ID NO: 348061 - DNA, 25 bp, Artificial
  Probe
caggacctggtcaggcttgacgtca

SEQ ID NO: 348062 - DNA, 25 bp, Artificial
  Probe
aaagtattccatgctcagtgttttt

SEQ ID NO: 348063 - DNA, 25 bp, Artificial
  Probe
ttaaaagtattccatgctcagtgtt

SEQ ID NO: 348064 - DNA, 25 bp, Artificial
  Probe
aggctattgtcctttgttccttcat

SEQ ID NO: 348065 - DNA, 25 bp, Artificial
  Probe
tgcagaagctctacaagtgcgccct

SEQ ID NO: 348066 - DNA, 25 bp, Artificial
  Probe
aagagttccgtagcaagcaggacct

SEQ ID NO: 348067 - DNA, 25 bp, Artificial
  Probe
caaagagttccgtagcaagcaggac

SEQ ID NO: 348068 - DNA, 25 bp, Artificial
  Probe
ccatgaggcgctgctattataagca

SEQ ID NO: 348069 - DNA, 25 bp, Artificial
  Probe
gcttgacgtcaatgggctgccctat

SEQ ID NO: 348070 - DNA, 25 bp, Artificial
  Probe
gcaggacctggtcaggcttgacgtc

SEQ ID NO: 348071 - DNA, 25 bp, Artificial
  Probe
tcaggcttgacgtcaatgggctgcc

SEQ ID NO: 348072 - DNA, 25 bp, Artificial
  Probe
tgcttttagagttttcgccgcagac

SEQ ID NO: 348073 - DNA, 25 bp, Artificial
  Probe
tgcctcaaagagttccgtagcaagc

SEQ ID NO: 348074 - DNA, 25 bp, Artificial
  Probe
cagggacaagctcaggctgtatgtg

SEQ ID NO: 348075 - DNA, 25 bp, Artificial
  Probe
catcagcgtccacctactgcagtgg

SEQ ID NO: 348076 - DNA, 25 bp, Artificial
  Probe
gtgggcgagctgagccatgtcatac

SEQ ID NO: 348077 - DNA, 25 bp, Artificial
  Probe
agcagtgctgtatgagaggtacctc

SEQ ID NO: 348078 - DNA, 25 bp, Artificial
  Probe
gcaggcgtgcccaggagctgcacac

SEQ ID NO: 348079 - DNA, 25 bp, Artificial
  Probe
acaagctcaggctgtatgtggcgca

SEQ ID NO: 348080 - DNA, 25 bp, Artificial
  Probe
gtgctattccctcatcgtgcgggcc

SEQ ID NO: 348081 - DNA, 25 bp, Artificial
  Probe
gcaagcagtctttccgtcatgccta

SEQ ID NO: 348082 - DNA, 25 bp, Artificial
  Probe
gcccacgcaggcagaaagccctgag

SEQ ID NO: 348083 - DNA, 25 bp, Artificial
  Probe
ggacactccctgcaagcagtctttc

SEQ ID NO: 348084 - DNA, 25 bp, Artificial
  Probe
ggccacatagtcaacctggcagcct

SEQ ID NO: 348085 - DNA, 25 bp, Artificial
  Probe
gtcacgctgggcttcattgtgccct

SEQ ID NO: 348086 - DNA, 25 bp, Artificial
  Probe
tacctcctagaggaaaacggacagg

SEQ ID NO: 348087 - DNA, 25 bp, Artificial
  Probe
agaagacgagcctgccagctctcaa

SEQ ID NO: 348088 - DNA, 25 bp, Artificial
  Probe
ttctgccatgccacgctcaaggcag

SEQ ID NO: 348089 - DNA, 25 bp, Artificial
  Probe
ataccagacagcacggagcagtcag

SEQ ID NO: 348090 - DNA, 25 bp, Artificial
  Probe
gcctgagtcccctcatctatagctt

SEQ ID NO: 348091 - DNA, 25 bp, Artificial
  Probe
cacctactgcagtgggcgcagccag

SEQ ID NO: 348092 - DNA, 25 bp, Artificial
  Probe
atcatcggcctgtgctattccctca

SEQ ID NO: 348093 - DNA, 25 bp, Artificial
  Probe
tccctgcaagcagtctttccgtcat

SEQ ID NO: 348094 - DNA, 25 bp, Artificial
  Probe
atgatcttcgcagtggtccttgtct

SEQ ID NO: 348095 - DNA, 25 bp, Artificial
  Probe
gagaggtacctcctagaggaaaacg

SEQ ID NO: 348096 - DNA, 25 bp, Artificial
  Probe
gctgcacactctagcacaggtggtg

SEQ ID NO: 348097 - DNA, 25 bp, Artificial
  Probe
ggcagaaagccctgaggatgatctt

SEQ ID NO: 348098 - DNA, 25 bp, Artificial
  Probe
tcattgtgcccttcgccatcatcgg

SEQ ID NO: 348099 - DNA, 25 bp, Artificial
  Probe
gcagtggtccttgtcttcttcatct

SEQ ID NO: 348100 - DNA, 25 bp, Artificial
  Probe
gagtcccctcatctatagcttcctg

SEQ ID NO: 348101 - DNA, 25 bp, Artificial
  Probe
tgggcttcattgtgcccttcgccat

SEQ ID NO: 348102 - DNA, 25 bp, Artificial
  Probe
tcatccgggcccacaggcatcgtgg

SEQ ID NO: 348103 - DNA, 25 bp, Artificial
  Probe
tggcgcagaagacgagcctgccagc

SEQ ID NO: 348104 - DNA, 25 bp, Artificial
  Probe
ttcattgtgcccttcgccatcatcg

SEQ ID NO: 348105 - DNA, 25 bp, Artificial
  Probe
gtacctcctagaggaaaacggacag

SEQ ID NO: 348106 - DNA, 25 bp, Artificial
  Probe
cagtcagatgtcaagttcagcagtg

SEQ ID NO: 348107 - DNA, 25 bp, Artificial
  Probe
cggagcagtcagatgtcaagttcag

SEQ ID NO: 348108 - DNA, 25 bp, Artificial
  Probe
gaacgtcttcatcagcgtccaccta

SEQ ID NO: 348109 - DNA, 25 bp, Artificial
  Probe
tgtatgagaggtacctcctagagga

SEQ ID NO: 348110 - DNA, 25 bp, Artificial
  Probe
gcagccaggggacactccctgcaag

SEQ ID NO: 348111 - DNA, 25 bp, Artificial
  Probe
ccttgacaggccacatagtcaacct

SEQ ID NO: 348112 - DNA, 25 bp, Artificial
  Probe
ctcatctatagcttcctgggagaga

SEQ ID NO: 348113 - DNA, 25 bp, Artificial
  Probe
ttcatcagcgtccacctactgcagt

SEQ ID NO: 348114 - DNA, 25 bp, Artificial
  Probe
tgtatgtggcgcagaagacgagcct

SEQ ID NO: 348115 - DNA, 25 bp, Artificial
  Probe
ctggctgccggagaacgtcttcatc

SEQ ID NO: 348116 - DNA, 25 bp, Artificial
  Probe
tcaggctgtatgtggcgcagaagac

SEQ ID NO: 348117 - DNA, 25 bp, Artificial
  Probe
tggaggtcacgctgggcttcattgt

SEQ ID NO: 348118 - DNA, 25 bp, Artificial
  Probe
cttcgcagtggtccttgtcttcttc

SEQ ID NO: 348119 - DNA, 25 bp, Artificial
  Probe
acgcaggcagaaagccctgaggatg

SEQ ID NO: 348120 - DNA, 25 bp, Artificial
  Probe
ttctgtccgtggtgctgagacggca

SEQ ID NO: 348121 - DNA, 25 bp, Artificial
  Probe
tctccagtcacagtttccgccagta

SEQ ID NO: 348122 - DNA, 25 bp, Artificial
  Probe
tgtgttctggtcaggctgaggccac

SEQ ID NO: 348123 - DNA, 25 bp, Artificial
  Probe
ttttactcccgcatcggttgtgttc

SEQ ID NO: 348124 - DNA, 25 bp, Artificial
  Probe
aactgtaaaatcagccaccgtctgg

SEQ ID NO: 348125 - DNA, 25 bp, Artificial
  Probe
tgtctttgggaactgtaaaatcagc

SEQ ID NO: 348126 - DNA, 25 bp, Artificial
  Probe
ggttactgcccaggaagatgtggtc

SEQ ID NO: 348127 - DNA, 25 bp, Artificial
  Probe
agagcagcagggttactgcccagga

SEQ ID NO: 348128 - DNA, 25 bp, Artificial
  Probe
gtaaaatcagccaccgtctggacta

SEQ ID NO: 348129 - DNA, 25 bp, Artificial
  Probe
tcttcccactgttggccatgatttt

SEQ ID NO: 348130 - DNA, 25 bp, Artificial
  Probe
cagcagggttactgcccaggaagat

SEQ ID NO: 348131 - DNA, 25 bp, Artificial
  Probe
tgtggttcccgtacaacctcacctt

SEQ ID NO: 348132 - DNA, 25 bp, Artificial
  Probe
cggccctggtggtagtcttcttcct

SEQ ID NO: 348133 - DNA, 25 bp, Artificial
  Probe
tgacagagagcctggccttctccca

SEQ ID NO: 348134 - DNA, 25 bp, Artificial
  Probe
ccagatgaacctcctggggtttctc

SEQ ID NO: 348135 - DNA, 25 bp, Artificial
  Probe
gccagtaccttaaagcggttctgtc

SEQ ID NO: 348136 - DNA, 25 bp, Artificial
  Probe
tctgcatgtctttgggaactgtaaa

SEQ ID NO: 348137 - DNA, 25 bp, Artificial
  Probe
tggttcccgtacaacctcaccttgt

SEQ ID NO: 348138 - DNA, 25 bp, Artificial
  Probe
tagccattcggagagcagcagggtt

SEQ ID NO: 348139 - DNA, 25 bp, Artificial
  Probe
agatgtggtcagcatgaacgacctt

SEQ ID NO: 348140 - DNA, 25 bp, Artificial
  Probe
tcttcttcctgctgtggttcccgta

SEQ ID NO: 348141 - DNA, 25 bp, Artificial
  Probe
tctgagggacagcatggctgtgctt

SEQ ID NO: 348142 - DNA, 25 bp, Artificial
  Probe
tcctgctgtggttcccgtacaacct

SEQ ID NO: 348143 - DNA, 25 bp, Artificial
  Probe
gtctgggaacggtggttctctctga

SEQ ID NO: 348144 - DNA, 25 bp, Artificial
  Probe
ttggcgagaggcaggctgacatctc

SEQ ID NO: 348145 - DNA, 25 bp, Artificial
  Probe
tggccttctcccattgttgcttcac

SEQ ID NO: 348146 - DNA, 25 bp, Artificial
  Probe
tggtggtagtcttcttcctgctgtg

SEQ ID NO: 348147 - DNA, 25 bp, Artificial
  Probe
cagtttccgccagtaccttaaagcg

SEQ ID NO: 348148 - DNA, 25 bp, Artificial
  Probe
gaacggtggttctctctgagggaca

SEQ ID NO: 348149 - DNA, 25 bp, Artificial
  Probe
accttgttcctgcactcgctgctgg

SEQ ID NO: 348150 - DNA, 25 bp, Artificial
  Probe
tgcaggtgacagagagcctggcctt

SEQ ID NO: 348151 - DNA, 25 bp, Artificial
  Probe
ctcctggggtttctcttcccactgt

SEQ ID NO: 348152 - DNA, 25 bp, Artificial
  Probe
aaagcggttctgtccgtggtgctga

SEQ ID NO: 348153 - DNA, 25 bp, Artificial
  Probe
atgccttctccagtcacagtttccg

SEQ ID NO: 348154 - DNA, 25 bp, Artificial
  Probe
gctgcggccctggtggtagtcttct

SEQ ID NO: 348155 - DNA, 25 bp, Artificial
  Probe
ttctccagtcacagtttccgccagt

SEQ ID NO: 348156 - DNA, 25 bp, Artificial
  Probe
atcggttgtgttctggtcaggctga

SEQ ID NO: 348157 - DNA, 25 bp, Artificial
  Probe
tgtccgtggtgctgagacggcacca

SEQ ID NO: 348158 - DNA, 25 bp, Artificial
  Probe
ctgagacggcaccaggcacctggca

SEQ ID NO: 348159 - DNA, 25 bp, Artificial
  Probe
ggaagctgtacctgcgcttccagat

SEQ ID NO: 348160 - DNA, 25 bp, Artificial
  Probe
agaggcaggctgacatctcccttaa

SEQ ID NO: 348161 - DNA, 25 bp, Artificial
  Probe
ctgacatctcccttaacaaggggga

SEQ ID NO: 348162 - DNA, 25 bp, Artificial
  Probe
tgcccaggaagatgtggtcagcatg

SEQ ID NO: 348163 - DNA, 25 bp, Artificial
  Probe
ggacagcatggctgtgcttgctgct

SEQ ID NO: 348164 - DNA, 25 bp, Artificial
  Probe
catgaacgaccttggcgagaggcag

SEQ ID NO: 348165 - DNA, 25 bp, Artificial
  Probe
ccttaaagcggttctgtccgtggtg

SEQ ID NO: 348166 - DNA, 25 bp, Artificial
  Probe
ctgcataaatggtgacgtgacaaca

SEQ ID NO: 348167 - DNA, 25 bp, Artificial
  Probe
atgaatgttgattcccagagaccag

SEQ ID NO: 348168 - DNA, 25 bp, Artificial
  Probe
tgatccctccaatcagagaagttga

SEQ ID NO: 348169 - DNA, 25 bp, Artificial
  Probe
actgcataaatggtgacgtgacaac

SEQ ID NO: 348170 - DNA, 25 bp, Artificial
  Probe
gctgacaaactgcataaatggtgac

SEQ ID NO: 348171 - DNA, 25 bp, Artificial
  Probe
atccctccaatcagagaagttgaag

SEQ ID NO: 348172 - DNA, 25 bp, Artificial
  Probe
tcaagcccatgagtacccacatggc

SEQ ID NO: 348173 - DNA, 25 bp, Artificial
  Probe
ccatgagtacccacatggctaacca

SEQ ID NO: 348174 - DNA, 25 bp, Artificial
  Probe
ccctccaatcagagaagttgaagat

SEQ ID NO: 348175 - DNA, 25 bp, Artificial
  Probe
tacccacatggctaaccagatgcaa

SEQ ID NO: 348176 - DNA, 25 bp, Artificial
  Probe
aaaggctgacaaactgcataaatgg

SEQ ID NO: 348177 - DNA, 25 bp, Artificial
  Probe
aatcaagcccatgagtacccacatg

SEQ ID NO: 348178 - DNA, 25 bp, Artificial
  Probe
ttaaaggctgacaaactgcataaat

SEQ ID NO: 348179 - DNA, 25 bp, Artificial
  Probe
gttgattcccagagaccagaactat

SEQ ID NO: 348180 - DNA, 25 bp, Artificial
  Probe
tcttacatgctgaatcactggtgga

SEQ ID NO: 348181 - DNA, 25 bp, Artificial
  Probe
gctgaatcactggtggaaacactag

SEQ ID NO: 348182 - DNA, 25 bp, Artificial
  Probe
acatgctgaatcactggtggaaaca

SEQ ID NO: 348183 - DNA, 25 bp, Artificial
  Probe
ggctaaccagatgcaaccaatataa

SEQ ID NO: 348184 - DNA, 25 bp, Artificial
  Probe
acatggctaaccagatgcaaccaat

SEQ ID NO: 348185 - DNA, 25 bp, Artificial
  Probe
ttttaaaggctgacaaactgcataa

SEQ ID NO: 348186 - DNA, 25 bp, Artificial
  Probe
tcactggtggaaacactagaatatg

SEQ ID NO: 348187 - DNA, 25 bp, Artificial
  Probe
atgagtacccacatggctaaccaga

SEQ ID NO: 348188 - DNA, 25 bp, Artificial
  Probe
cctccaatcagagaagttgaagatg

SEQ ID NO: 348189 - DNA, 25 bp, Artificial
  Probe
acccacatggctaaccagatgcaac

SEQ ID NO: 348190 - DNA, 25 bp, Artificial
  Probe
cacatggctaaccagatgcaaccaa

SEQ ID NO: 348191 - DNA, 25 bp, Artificial
  Probe
aggctgacaaactgcataaatggtg

SEQ ID NO: 348192 - DNA, 25 bp, Artificial
  Probe
atgctgaatcactggtggaaacact

SEQ ID NO: 348193 - DNA, 25 bp, Artificial
  Probe
aatggtgacgtgacaacacaacctc

SEQ ID NO: 348194 - DNA, 25 bp, Artificial
  Probe
ttacatgctgaatcactggtggaaa

SEQ ID NO: 348195 - DNA, 25 bp, Artificial
  Probe
aaactgcataaatggtgacgtgaca

SEQ ID NO: 348196 - DNA, 25 bp, Artificial
  Probe
atggctaaccagatgcaaccaatat

SEQ ID NO: 348197 - DNA, 25 bp, Artificial
  Probe
ctccaatcagagaagttgaagatga

SEQ ID NO: 348198 - DNA, 25 bp, Artificial
  Probe
gaaacattcaaatcaagcccatgag

SEQ ID NO: 348199 - DNA, 25 bp, Artificial
  Probe
gacaaactgcataaatggtgacgtg

SEQ ID NO: 348200 - DNA, 25 bp, Artificial
  Probe
gattcccagagaccagaactatttt

SEQ ID NO: 348201 - DNA, 25 bp, Artificial
  Probe
cctcttacatgctgaatcactggtg

SEQ ID NO: 348202 - DNA, 25 bp, Artificial
  Probe
ccacatggctaaccagatgcaacca

SEQ ID NO: 348203 - DNA, 25 bp, Artificial
  Probe
tgagtacccacatggctaaccagat

SEQ ID NO: 348204 - DNA, 25 bp, Artificial
  Probe
tgaatcactggtggaaacactagaa

SEQ ID NO: 348205 - DNA, 25 bp, Artificial
  Probe
gtgacgtgacaacacaacctcttac

SEQ ID NO: 348206 - DNA, 25 bp, Artificial
  Probe
tgacaaactgcataaatggtgacgt

SEQ ID NO: 348207 - DNA, 25 bp, Artificial
  Probe
tgattcccagagaccagaactattt

SEQ ID NO: 348208 - DNA, 25 bp, Artificial
  Probe
atgttgattcccagagaccagaact

SEQ ID NO: 348209 - DNA, 25 bp, Artificial
  Probe
aacctcttacatgctgaatcactgg

SEQ ID NO: 348210 - DNA, 25 bp, Artificial
  Probe
aatcactggtggaaacactagaata

SEQ ID NO: 348211 - DNA, 25 bp, Artificial
  Probe
aagcccatgagtacccacatggcta

SEQ ID NO: 348212 - DNA, 25 bp, Artificial
  Probe
gtagaattctgcaagtttggaaacc

SEQ ID NO: 348213 - DNA, 25 bp, Artificial
  Probe
tccgtagacctgaagcggcgcttgg

SEQ ID NO: 348214 - DNA, 25 bp, Artificial
  Probe
acctcttggccgtggtgcctttggc

SEQ ID NO: 348215 - DNA, 25 bp, Artificial
  Probe
attggccaccatctcaatgtggtga

SEQ ID NO: 348216 - DNA, 25 bp, Artificial
  Probe
gaaatgaattcgtgccctataagag

SEQ ID NO: 348217 - DNA, 25 bp, Artificial
  Probe
tgttggggagctctccgtagacctg

SEQ ID NO: 348218 - DNA, 25 bp, Artificial
  Probe
atcaacttacttacggggcaagaga

SEQ ID NO: 348219 - DNA, 25 bp, Artificial
  Probe
cttgcaaaacagtggctgtcaagat

SEQ ID NO: 348220 - DNA, 25 bp, Artificial
  Probe
ctgaagcggcgcttggacagcatca

SEQ ID NO: 348221 - DNA, 25 bp, Artificial
  Probe
cttggacagcatcaccagcagtcag

SEQ ID NO: 348222 - DNA, 25 bp, Artificial
  Probe
tggaaacctatcaacttacttacgg

SEQ ID NO: 348223 - DNA, 25 bp, Artificial
  Probe
tcaggttttgtggaggagaaatccc

SEQ ID NO: 348224 - DNA, 25 bp, Artificial
  Probe
aaggggcacgcttccgctctgggaa

SEQ ID NO: 348225 - DNA, 25 bp, Artificial
  Probe
ctctcatggtgattgtagaattctg

SEQ ID NO: 348226 - DNA, 25 bp, Artificial
  Probe
gattgaggcagatgcctttggaatc

SEQ ID NO: 348227 - DNA, 25 bp, Artificial
  Probe
cctatcaacttacttacggggcaag

SEQ ID NO: 348228 - DNA, 25 bp, Artificial
  Probe
ggagcaacacacagcgagcaccgag

SEQ ID NO: 348229 - DNA, 25 bp, Artificial
  Probe
tgaaactaggaaaacctcttggccg

SEQ ID NO: 348230 - DNA, 25 bp, Artificial
  Probe
agggagcaacacacagcgagcaccg

SEQ ID NO: 348231 - DNA, 25 bp, Artificial
  Probe
gcccggagggcctctcatggtgatt

SEQ ID NO: 348232 - DNA, 25 bp, Artificial
  Probe
cagcaagtgggagttccccagggac

SEQ ID NO: 348233 - DNA, 25 bp, Artificial
  Probe
gctgtgaacgcttgccttatgatgc

SEQ ID NO: 348234 - DNA, 25 bp, Artificial
  Probe
ccgctctgggaaagactatgttggg

SEQ ID NO: 348235 - DNA, 25 bp, Artificial
  Probe
ctaggaaaacctcttggccgtggtg

SEQ ID NO: 348236 - DNA, 25 bp, Artificial
  Probe
actatgttggggagctctccgtaga

SEQ ID NO: 348237 - DNA, 25 bp, Artificial
  Probe
aatgtggtgaacctgctgggtgcct

SEQ ID NO: 348238 - DNA, 25 bp, Artificial
  Probe
taggaaaacctcttggccgtggtgc

SEQ ID NO: 348239 - DNA, 25 bp, Artificial
  Probe
ctgctgggtgcctgcacgaagcccg

SEQ ID NO: 348240 - DNA, 25 bp, Artificial
  Probe
tcttggccgtggtgcctttggccaa

SEQ ID NO: 348241 - DNA, 25 bp, Artificial
  Probe
gggagctctccgtagacctgaagcg

SEQ ID NO: 348242 - DNA, 25 bp, Artificial
  Probe
gatgaactgcccttggatgagcgct

SEQ ID NO: 348243 - DNA, 25 bp, Artificial
  Probe
cgagccctcatgtccgaactcaaga

SEQ ID NO: 348244 - DNA, 25 bp, Artificial
  Probe
ccgtggtgcctttggccaagtgatt

SEQ ID NO: 348245 - DNA, 25 bp, Artificial
  Probe
tgagcgctgtgaacgcttgccttat

SEQ ID NO: 348246 - DNA, 25 bp, Artificial
  Probe
gtgcctttggccaagtgattgaggc

SEQ ID NO: 348247 - DNA, 25 bp, Artificial
  Probe
ttggatgagcgctgtgaacgcttgc

SEQ ID NO: 348248 - DNA, 25 bp, Artificial
  Probe
tggccaagtgattgaggcagatgcc

SEQ ID NO: 348249 - DNA, 25 bp, Artificial
  Probe
ctgccagctcaggttttgtggagga

SEQ ID NO: 348250 - DNA, 25 bp, Artificial
  Probe
gaattcgtgccctataagagcaaag

SEQ ID NO: 348251 - DNA, 25 bp, Artificial
  Probe
tgcccttggatgagcgctgtgaacg

SEQ ID NO: 348252 - DNA, 25 bp, Artificial
  Probe
attctgcaagtttggaaacctatca

SEQ ID NO: 348253 - DNA, 25 bp, Artificial
  Probe
gccgtggtgcctttggccaagtgat

SEQ ID NO: 348254 - DNA, 25 bp, Artificial
  Probe
atccagatgaactgcccttggatga

SEQ ID NO: 348255 - DNA, 25 bp, Artificial
  Probe
gccctataagagcaaaggggcacgc

SEQ ID NO: 348256 - DNA, 25 bp, Artificial
  Probe
gcacgcttccgctctgggaaagact

SEQ ID NO: 348257 - DNA, 25 bp, Artificial
  Probe
acagcatcaccagcagtcagagctc

SEQ ID NO: 348258 - DNA, 25 bp, Artificial
  Probe
gtctgacagtcttgctgtgtgctat

SEQ ID NO: 348259 - DNA, 25 bp, Artificial
  Probe
tttcccgtgttaaagagcaagagat

SEQ ID NO: 348260 - DNA, 25 bp, Artificial
  Probe
gttggtctgacagtcttgctgtgtg

SEQ ID NO: 348261 - DNA, 25 bp, Artificial
  Probe
atgtcagtcaatcacaaagcagagt

SEQ ID NO: 348262 - DNA, 25 bp, Artificial
  Probe
ttcccgtgttaaagagcaagagatg

SEQ ID NO: 348263 - DNA, 25 bp, Artificial
  Probe
tctctgtgtgccttcagctgtggtg

SEQ ID NO: 348264 - DNA, 25 bp, Artificial
  Probe
cttgctgtgtgctatagtgttagac

SEQ ID NO: 348265 - DNA, 25 bp, Artificial
  Probe
gcagggttccatgtttcccgtgtta

SEQ ID NO: 348266 - DNA, 25 bp, Artificial
  Probe
taccacacagactgggaagctcagt

SEQ ID NO: 348267 - DNA, 25 bp, Artificial
  Probe
acagtcttgctgtgtgctatagtgt

SEQ ID NO: 348268 - DNA, 25 bp, Artificial
  Probe
gcagagtaattaccacacagactgg

SEQ ID NO: 348269 - DNA, 25 bp, Artificial
  Probe
tggtctgacagtcttgctgtgtgct

SEQ ID NO: 348270 - DNA, 25 bp, Artificial
  Probe
tgtgccttcagctgtggtggtgttt

SEQ ID NO: 348271 - DNA, 25 bp, Artificial
  Probe
attgttagcggttggtctgacagtc

SEQ ID NO: 348272 - DNA, 25 bp, Artificial
  Probe
agtcaatcacaaagcagagtaatta

SEQ ID NO: 348273 - DNA, 25 bp, Artificial
  Probe
agtgttagacccaacggaggcagta

SEQ ID NO: 348274 - DNA, 25 bp, Artificial
  Probe
cagactgggaagctcagtgaagatt

SEQ ID NO: 348275 - DNA, 25 bp, Artificial
  Probe
accctgacagtctctctctgtgtgc

SEQ ID NO: 348276 - DNA, 25 bp, Artificial
  Probe
ccatgtttcccgtgttaaagagcaa

SEQ ID NO: 348277 - DNA, 25 bp, Artificial
  Probe
ggcatgcagctcatggtgaaaagaa

SEQ ID NO: 348278 - DNA, 25 bp, Artificial
  Probe
cagtcttgctgtgtgctatagtgtt

SEQ ID NO: 348279 - DNA, 25 bp, Artificial
  Probe
ttgtcagtaggcatgcagctcatgg

SEQ ID NO: 348280 - DNA, 25 bp, Artificial
  Probe
ggcagggttccatgtttcccgtgtt

SEQ ID NO: 348281 - DNA, 25 bp, Artificial
  Probe
caccctgacagtctctctctgtgtg

SEQ ID NO: 348282 - DNA, 25 bp, Artificial
  Probe
agagtaattaccacacagactggga

SEQ ID NO: 348283 - DNA, 25 bp, Artificial
  Probe
tcatgtcagtcaatcacaaagcaga

SEQ ID NO: 348284 - DNA, 25 bp, Artificial
  Probe
tctctctctgtgtgccttcagctgt

SEQ ID NO: 348285 - DNA, 25 bp, Artificial
  Probe
gagcctcatgtcagtcaatcacaaa

SEQ ID NO: 348286 - DNA, 25 bp, Artificial
  Probe
ttagcggttggtctgacagtcttgc

SEQ ID NO: 348287 - DNA, 25 bp, Artificial
  Probe
atgtttgtcagtaggcatgcagctc

SEQ ID NO: 348288 - DNA, 25 bp, Artificial
  Probe
atgtttcccgtgttaaagagcaaga

SEQ ID NO: 348289 - DNA, 25 bp, Artificial
  Probe
tgctatagtgttagacccaacggag

SEQ ID NO: 348290 - DNA, 25 bp, Artificial
  Probe
ctcatgtcagtcaatcacaaagcag

SEQ ID NO: 348291 - DNA, 25 bp, Artificial
  Probe
gtcaatcacaaagcagagtaattac

SEQ ID NO: 348292 - DNA, 25 bp, Artificial
  Probe
taggcatgcagctcatggtgaaaag

SEQ ID NO: 348293 - DNA, 25 bp, Artificial
  Probe
tgttagcggttggtctgacagtctt

SEQ ID NO: 348294 - DNA, 25 bp, Artificial
  Probe
gcctcatgtcagtcaatcacaaagc

SEQ ID NO: 348295 - DNA, 25 bp, Artificial
  Probe
gtgttagacccaacggaggcagtat

SEQ ID NO: 348296 - DNA, 25 bp, Artificial
  Probe
cctgacagtctctctctgtgtgcct

SEQ ID NO: 348297 - DNA, 25 bp, Artificial
  Probe
ctgtgtgctatagtgttagacccaa

SEQ ID NO: 348298 - DNA, 25 bp, Artificial
  Probe
aggcatgcagctcatggtgaaaaga

SEQ ID NO: 348299 - DNA, 25 bp, Artificial
  Probe
tgatgtttgtcagtaggcatgcagc

SEQ ID NO: 348300 - DNA, 25 bp, Artificial
  Probe
tctgtgtgccttcagctgtggtggt

SEQ ID NO: 348301 - DNA, 25 bp, Artificial
  Probe
tagacccaacggaggcagtatttat

SEQ ID NO: 348302 - DNA, 25 bp, Artificial
  Probe
cagtctctctctgtgtgccttcagc

SEQ ID NO: 348303 - DNA, 25 bp, Artificial
  Probe
acacagactgggaagctcagtgaag

SEQ ID NO: 348304 - DNA, 25 bp, Artificial
  Probe
aaatgcctgttgaatatctagagtt

SEQ ID NO: 348305 - DNA, 25 bp, Artificial
  Probe
ttttcgtgtctttgaaatgcctgtt

SEQ ID NO: 348306 - DNA, 25 bp, Artificial
  Probe
gtgtctttgaaatgcctgttgaata

SEQ ID NO: 348307 - DNA, 25 bp, Artificial
  Probe
tagagtttagtacctccttctacaa

SEQ ID NO: 348308 - DNA, 25 bp, Artificial
  Probe
cgtgtctttgaaatgcctgttgaat

SEQ ID NO: 348309 - DNA, 25 bp, Artificial
  Probe
atgttttcgtgtctttgaaatgcct

SEQ ID NO: 348310 - DNA, 25 bp, Artificial
  Probe
tgtctttgaaatgcctgttgaatat

SEQ ID NO: 348311 - DNA, 25 bp, Artificial
  Probe
tttcgtgtctttgaaatgcctgttg

SEQ ID NO: 348312 - DNA, 25 bp, Artificial
  Probe
tacaaacttttttgagtctttctgg

SEQ ID NO: 348313 - DNA, 25 bp, Artificial
  Probe
tgcctgttgaatatctagagtttag

SEQ ID NO: 348314 - DNA, 25 bp, Artificial
  Probe
ctttgaaatgcctgttgaatatcta

SEQ ID NO: 348315 - DNA, 25 bp, Artificial
  Probe
gttttcgtgtctttgaaatgcctgt

SEQ ID NO: 348316 - DNA, 25 bp, Artificial
  Probe
ctacaaacttttttgagtctttctg

SEQ ID NO: 348317 - DNA, 25 bp, Artificial
  Probe
tccttctacaaacttttttgagtct

SEQ ID NO: 348318 - DNA, 25 bp, Artificial
  Probe
tgaaatgcctgttgaatatctagag

SEQ ID NO: 348319 - DNA, 25 bp, Artificial
  Probe
tcgtgtctttgaaatgcctgttgaa

SEQ ID NO: 348320 - DNA, 25 bp, Artificial
  Probe
gaaatgcctgttgaatatctagagt

SEQ ID NO: 348321 - DNA, 25 bp, Artificial
  Probe
atgcctgttgaatatctagagttta

SEQ ID NO: 348322 - DNA, 25 bp, Artificial
  Probe
ttgaaatgcctgttgaatatctaga

SEQ ID NO: 348323 - DNA, 25 bp, Artificial
  Probe
tttgaaatgcctgttgaatatctag

SEQ ID NO: 348324 - DNA, 25 bp, Artificial
  Probe
gtctttgaaatgcctgttgaatatc

SEQ ID NO: 348325 - DNA, 25 bp, Artificial
  Probe
tctacaaacttttttgagtctttct

SEQ ID NO: 348326 - DNA, 25 bp, Artificial
  Probe
ctagagtttagtacctccttctaca

SEQ ID NO: 348327 - DNA, 25 bp, Artificial
  Probe
tctttgaaatgcctgttgaatatct

SEQ ID NO: 348328 - DNA, 25 bp, Artificial
  Probe
atctagagtttagtacctccttcta

SEQ ID NO: 348329 - DNA, 25 bp, Artificial
  Probe
ttcgtgtctttgaaatgcctgttga

SEQ ID NO: 348330 - DNA, 25 bp, Artificial
  Probe
tgttttcgtgtctttgaaatgcctg

SEQ ID NO: 348331 - DNA, 25 bp, Artificial
  Probe
tctagagtttagtacctccttctac

SEQ ID NO: 348332 - DNA, 25 bp, Artificial
  Probe
aatgcctgttgaatatctagagttt

SEQ ID NO: 348333 - DNA, 25 bp, Artificial
  Probe
caggtgcttcttttcaaattatgta

SEQ ID NO: 348334 - DNA, 25 bp, Artificial
  Probe
aagcctactattgggataggagata

SEQ ID NO: 348335 - DNA, 25 bp, Artificial
  Probe
gaaaacctaagcctactattgggat

SEQ ID NO: 348336 - DNA, 25 bp, Artificial
  Probe
ttcttttcaaattatgtaagattat

SEQ ID NO: 348337 - DNA, 25 bp, Artificial
  Probe
ctaagcctactattgggataggaga

SEQ ID NO: 348338 - DNA, 25 bp, Artificial
  Probe
agcctactattgggataggagatag

SEQ ID NO: 348339 - DNA, 25 bp, Artificial
  Probe
gcctactattgggataggagatagt

SEQ ID NO: 348340 - DNA, 25 bp, Artificial
  Probe
ttcctagaaaacctaagcctactat

SEQ ID NO: 348341 - DNA, 25 bp, Artificial
  Probe
tagaaaacctaagcctactattggg

SEQ ID NO: 348342 - DNA, 25 bp, Artificial
  Probe
tgttcattaattcaggtgcttcttt

SEQ ID NO: 348343 - DNA, 25 bp, Artificial
  Probe
ttcattaattcaggtgcttcttttc

SEQ ID NO: 348344 - DNA, 25 bp, Artificial
  Probe
attaattcaggtgcttcttttcaaa

SEQ ID NO: 348345 - DNA, 25 bp, Artificial
  Probe
ctagaaaacctaagcctactattgg

SEQ ID NO: 348346 - DNA, 25 bp, Artificial
  Probe
tcaggtgcttcttttcaaattatgt

SEQ ID NO: 348347 - DNA, 25 bp, Artificial
  Probe
ttaattcaggtgcttcttttcaaat

SEQ ID NO: 348348 - DNA, 25 bp, Artificial
  Probe
gtctgttcattaattcaggtgcttc

SEQ ID NO: 348349 - DNA, 25 bp, Artificial
  Probe
tcttttcaaattatgtaagattatg

SEQ ID NO: 348350 - DNA, 25 bp, Artificial
  Probe
taagcctactattgggataggagat

SEQ ID NO: 348351 - DNA, 25 bp, Artificial
  Probe
aaacctaagcctactattgggatag

SEQ ID NO: 348352 - DNA, 25 bp, Artificial
  Probe
ttcaggtgcttcttttcaaattatg

SEQ ID NO: 348353 - DNA, 25 bp, Artificial
  Probe
aggtgcttcttttcaaattatgtaa

SEQ ID NO: 348354 - DNA, 25 bp, Artificial
  Probe
tcattaattcaggtgcttcttttca

SEQ ID NO: 348355 - DNA, 25 bp, Artificial
  Probe
gcttcttttcaaattatgtaagatt

SEQ ID NO: 348356 - DNA, 25 bp, Artificial
  Probe
atagtctgttcattaattcaggtgc

SEQ ID NO: 348357 - DNA, 25 bp, Artificial
  Probe
cctactattgggataggagatagtc

SEQ ID NO: 348358 - DNA, 25 bp, Artificial
  Probe
ctgttcattaattcaggtgcttctt

SEQ ID NO: 348359 - DNA, 25 bp, Artificial
  Probe
cctaagcctactattgggataggag

SEQ ID NO: 348360 - DNA, 25 bp, Artificial
  Probe
aattcaggtgcttcttttcaaatta

SEQ ID NO: 348361 - DNA, 25 bp, Artificial
  Probe
tctgttcattaattcaggtgcttct

SEQ ID NO: 348362 - DNA, 25 bp, Artificial
  Probe
aacctaagcctactattgggatagg

SEQ ID NO: 348363 - DNA, 25 bp, Artificial
  Probe
taattcaggtgcttcttttcaaatt

SEQ ID NO: 348364 - DNA, 25 bp, Artificial
  Probe
tcctagaaaacctaagcctactatt

SEQ ID NO: 348365 - DNA, 25 bp, Artificial
  Probe
ggtgcttcttttcaaattatgtaag

SEQ ID NO: 348366 - DNA, 25 bp, Artificial
  Probe
agatagtctgttcattaattcaggt

SEQ ID NO: 348367 - DNA, 25 bp, Artificial
  Probe
gtgcttcttttcaaattatgtaaga

SEQ ID NO: 348368 - DNA, 25 bp, Artificial
  Probe
gttcattaattcaggtgcttctttt

SEQ ID NO: 348369 - DNA, 25 bp, Artificial
  Probe
cctagaaaacctaagcctactattg

SEQ ID NO: 348370 - DNA, 25 bp, Artificial
  Probe
cattaattcaggtgcttcttttcaa

SEQ ID NO: 348371 - DNA, 25 bp, Artificial
  Probe
acctaagcctactattgggatagga

SEQ ID NO: 348372 - DNA, 25 bp, Artificial
  Probe
agtctgttcattaattcaggtgctt

SEQ ID NO: 348373 - DNA, 25 bp, Artificial
  Probe
tgcttcttttcaaattatgtaagat

SEQ ID NO: 348374 - DNA, 25 bp, Artificial
  Probe
tagtctgttcattaattcaggtgct

SEQ ID NO: 348375 - DNA, 25 bp, Artificial
  Probe
attcaggtgcttcttttcaaattat

SEQ ID NO: 348376 - DNA, 25 bp, Artificial
  Probe
cttcttttcaaattatgtaagatta

SEQ ID NO: 348377 - DNA, 25 bp, Artificial
  Probe
gccctgcttcttgtcagttcacatc

SEQ ID NO: 348378 - DNA, 25 bp, Artificial
  Probe
gttcacatctgctagttgtgtggct

SEQ ID NO: 348379 - DNA, 25 bp, Artificial
  Probe
gaatgagtcggatgatcctgagaca

SEQ ID NO: 348380 - DNA, 25 bp, Artificial
  Probe
cttgtcagttcacatctgctagttg

SEQ ID NO: 348381 - DNA, 25 bp, Artificial
  Probe
acaggctgcctaagcgataacaagc

SEQ ID NO: 348382 - DNA, 25 bp, Artificial
  Probe
ggccttgaatgagtcggatgatcct

SEQ ID NO: 348383 - DNA, 25 bp, Artificial
  Probe
tggctcattttaagtcttgctttac

SEQ ID NO: 348384 - DNA, 25 bp, Artificial
  Probe
tgatcctgagacaggctgcctaagc

SEQ ID NO: 348385 - DNA, 25 bp, Artificial
  Probe
gacaggctgcctaagcgataacaag

SEQ ID NO: 348386 - DNA, 25 bp, Artificial
  Probe
taagcgataacaagccgacttctcg

SEQ ID NO: 348387 - DNA, 25 bp, Artificial
  Probe
cctgagacaggctgcctaagcgata

SEQ ID NO: 348388 - DNA, 25 bp, Artificial
  Probe
tgcctaagcgataacaagccgactt

SEQ ID NO: 348389 - DNA, 25 bp, Artificial
  Probe
tgtgtggctcattttaagtcttgct

SEQ ID NO: 348390 - DNA, 25 bp, Artificial
  Probe
gcagacaaacccagggggccttgaa

SEQ ID NO: 348391 - DNA, 25 bp, Artificial
  Probe
gtgtggctcattttaagtcttgctt

SEQ ID NO: 348392 - DNA, 25 bp, Artificial
  Probe
tcacatctgctagttgtgtggctca

SEQ ID NO: 348393 - DNA, 25 bp, Artificial
  Probe
ttcacatctgctagttgtgtggctc

SEQ ID NO: 348394 - DNA, 25 bp, Artificial
  Probe
gcttcttgtcagttcacatctgcta

SEQ ID NO: 348395 - DNA, 25 bp, Artificial
  Probe
ttcttgtcagttcacatctgctagt

SEQ ID NO: 348396 - DNA, 25 bp, Artificial
  Probe
agacaggctgcctaagcgataacaa

SEQ ID NO: 348397 - DNA, 25 bp, Artificial
  Probe
catctgctagttgtgtggctcattt

SEQ ID NO: 348398 - DNA, 25 bp, Artificial
  Probe
cctaagcgataacaagccgacttct

SEQ ID NO: 348399 - DNA, 25 bp, Artificial
  Probe
atgatcctgagacaggctgcctaag

SEQ ID NO: 348400 - DNA, 25 bp, Artificial
  Probe
gagtcggatgatcctgagacaggct

SEQ ID NO: 348401 - DNA, 25 bp, Artificial
  Probe
cagttcacatctgctagttgtgtgg

SEQ ID NO: 348402 - DNA, 25 bp, Artificial
  Probe
ttgtgtggctcattttaagtcttgc

SEQ ID NO: 348403 - DNA, 25 bp, Artificial
  Probe
tcggatgatcctgagacaggctgcc

SEQ ID NO: 348404 - DNA, 25 bp, Artificial
  Probe
gataacaagccgacttctcgacact

SEQ ID NO: 348405 - DNA, 25 bp, Artificial
  Probe
ctgctagttgtgtggctcattttaa

SEQ ID NO: 348406 - DNA, 25 bp, Artificial
  Probe
gtggctcattttaagtcttgcttta

SEQ ID NO: 348407 - DNA, 25 bp, Artificial
  Probe
tctgctagttgtgtggctcatttta

SEQ ID NO: 348408 - DNA, 25 bp, Artificial
  Probe
ggatgatcctgagacaggctgccta

SEQ ID NO: 348409 - DNA, 25 bp, Artificial
  Probe
ctgtcgccctgcttcttgtcagttc

SEQ ID NO: 348410 - DNA, 25 bp, Artificial
  Probe
tgtcagttcacatctgctagttgtg

SEQ ID NO: 348411 - DNA, 25 bp, Artificial
  Probe
gcctaagcgataacaagccgacttc

SEQ ID NO: 348412 - DNA, 25 bp, Artificial
  Probe
cgccctgcttcttgtcagttcacat

SEQ ID NO: 348413 - DNA, 25 bp, Artificial
  Probe
gggccttgaatgagtcggatgatcc

SEQ ID NO: 348414 - DNA, 25 bp, Artificial
  Probe
tgcttcttgtcagttcacatctgct

SEQ ID NO: 348415 - DNA, 25 bp, Artificial
  Probe
cctgcttcttgtcagttcacatctg

SEQ ID NO: 348416 - DNA, 25 bp, Artificial
  Probe
gtcagttcacatctgctagttgtgt

SEQ ID NO: 348417 - DNA, 25 bp, Artificial
  Probe
atgagtcggatgatcctgagacagg

SEQ ID NO: 348418 - DNA, 25 bp, Artificial
  Probe
aggagcagacaaacccagggggcct

SEQ ID NO: 348419 - DNA, 25 bp, Artificial
  Probe
gtcgccctgcttcttgtcagttcac

SEQ ID NO: 348420 - DNA, 25 bp, Artificial
  Probe
cctgtcgccctgcttcttgtcagtt

SEQ ID NO: 348421 - DNA, 25 bp, Artificial
  Probe
gccttgaatgagtcggatgatcctg

SEQ ID NO: 348422 - DNA, 25 bp, Artificial
  Probe
gctgcctaagcgataacaagccgac

SEQ ID NO: 348423 - DNA, 25 bp, Artificial
  Probe
tcatccaaggatcacagtggttcag

SEQ ID NO: 348424 - DNA, 25 bp, Artificial
  Probe
gatcatttctccatacctctgtgag

SEQ ID NO: 348425 - DNA, 25 bp, Artificial
  Probe
ccaactacagcgaactggacacaca

SEQ ID NO: 348426 - DNA, 25 bp, Artificial
  Probe
tacagccctataactgtatggacat

SEQ ID NO: 348427 - DNA, 25 bp, Artificial
  Probe
aacataagcagctgcactgtgatgc

SEQ ID NO: 348428 - DNA, 25 bp, Artificial
  Probe
ttcagtgcaatttatgcaataagac

SEQ ID NO: 348429 - DNA, 25 bp, Artificial
  Probe
acctcaggagcgtacagccctataa

SEQ ID NO: 348430 - DNA, 25 bp, Artificial
  Probe
caaacataagcagctgcactgtgat

SEQ ID NO: 348431 - DNA, 25 bp, Artificial
  Probe
ctgacacttcatccaaggatcacag

SEQ ID NO: 348432 - DNA, 25 bp, Artificial
  Probe
acttcatccaaggatcacagtggtt

SEQ ID NO: 348433 - DNA, 25 bp, Artificial
  Probe
gtgatcatttctccatacctctgtg

SEQ ID NO: 348434 - DNA, 25 bp, Artificial
  Probe
atcacagtggttcagaaagtcccat

SEQ ID NO: 348435 - DNA, 25 bp, Artificial
  Probe
tctggtctggccaaacataagcagc

SEQ ID NO: 348436 - DNA, 25 bp, Artificial
  Probe
agcgtacagccctataactgtatgg

SEQ ID NO: 348437 - DNA, 25 bp, Artificial
  Probe
gaaagtcccattagtgacgaagagg

SEQ ID NO: 348438 - DNA, 25 bp, Artificial
  Probe
atacctctgtgagagctaccccatg

SEQ ID NO: 348439 - DNA, 25 bp, Artificial
  Probe
tggttcagaaagtcccattagtgac

SEQ ID NO: 348440 - DNA, 25 bp, Artificial
  Probe
tgccattgaagctgagaagtttcag

SEQ ID NO: 348441 - DNA, 25 bp, Artificial
  Probe
ctactttctctggtctggccaaaca

SEQ ID NO: 348442 - DNA, 25 bp, Artificial
  Probe
actgtgatgcccaggctaggaaatc

SEQ ID NO: 348443 - DNA, 25 bp, Artificial
  Probe
tgacacttcatccaaggatcacagt

SEQ ID NO: 348444 - DNA, 25 bp, Artificial
  Probe
tcatttctccatacctctgtgagag

SEQ ID NO: 348445 - DNA, 25 bp, Artificial
  Probe
gacccccatgccattgaagctgaga

SEQ ID NO: 348446 - DNA, 25 bp, Artificial
  Probe
gcctgtcataccaaaaccagagatc

SEQ ID NO: 348447 - DNA, 25 bp, Artificial
  Probe
cagaaagtcccattagtgacgaaga

SEQ ID NO: 348448 - DNA, 25 bp, Artificial
  Probe
ggacacacacacagtgatcatttct

SEQ ID NO: 348449 - DNA, 25 bp, Artificial
  Probe
actttctctggtctggccaaacata

SEQ ID NO: 348450 - DNA, 25 bp, Artificial
  Probe
gctaggaaatcgttcagctgcaaat

SEQ ID NO: 348451 - DNA, 25 bp, Artificial
  Probe
tctgtgagagctaccccatgcctgt

SEQ ID NO: 348452 - DNA, 25 bp, Artificial
  Probe
atccaaggatcacagtggttcagaa

SEQ ID NO: 348453 - DNA, 25 bp, Artificial
  Probe
gcgctccttcctcgtcaagaaacat

SEQ ID NO: 348454 - DNA, 25 bp, Artificial
  Probe
gctgcactgtgatgcccaggctagg

SEQ ID NO: 348455 - DNA, 25 bp, Artificial
  Probe
aaaccagagatcctcacctcaggag

SEQ ID NO: 348456 - DNA, 25 bp, Artificial
  Probe
gacctattctactttctctggtctg

SEQ ID NO: 348457 - DNA, 25 bp, Artificial
  Probe
gagccaccgcgatgcgataggaccg

SEQ ID NO: 348458 - DNA, 25 bp, Artificial
  Probe
tctccatacctctgtgagagctacc

SEQ ID NO: 348459 - DNA, 25 bp, Artificial
  Probe
ctttctctggtctggccaaacataa

SEQ ID NO: 348460 - DNA, 25 bp, Artificial
  Probe
catgcctgtcataccaaaaccagag

SEQ ID NO: 348461 - DNA, 25 bp, Artificial
  Probe
gagagctaccccatgcctgtcatac

SEQ ID NO: 348462 - DNA, 25 bp, Artificial
  Probe
tgatgcccaggctaggaaatcgttc

SEQ ID NO: 348463 - DNA, 25 bp, Artificial
  Probe
tcaggagcgtacagccctataactg

SEQ ID NO: 348464 - DNA, 25 bp, Artificial
  Probe
gcccaggctaggaaatcgttcagct

SEQ ID NO: 348465 - DNA, 25 bp, Artificial
  Probe
gatcctcacctcaggagcgtacagc

SEQ ID NO: 348466 - DNA, 25 bp, Artificial
  Probe
tcagaaagtcccattagtgacgaag

SEQ ID NO: 348467 - DNA, 25 bp, Artificial
  Probe
tacctctgtgagagctaccccatgc

SEQ ID NO: 348468 - DNA, 25 bp, Artificial
  Probe
ccattagtgacgaagaggagagact

SEQ ID NO: 348469 - DNA, 25 bp, Artificial
  Probe
agacttgtccccagagctgcggaaa

SEQ ID NO: 348470 - DNA, 25 bp, Artificial
  Probe
tccgagaccccgtgttcaagcaggc

SEQ ID NO: 348471 - DNA, 25 bp, Artificial
  Probe
tggaagctcagaacccagaacctgc

SEQ ID NO: 348472 - DNA, 25 bp, Artificial
  Probe
aggcagttcaaacgatacagacgga

SEQ ID NO: 348473 - DNA, 25 bp, Artificial
  Probe
gtctataacttcacccatctaggag

SEQ ID NO: 348474 - DNA, 25 bp, Artificial
  Probe
agcagctttccgagaccccgtgttc

SEQ ID NO: 348475 - DNA, 25 bp, Artificial
  Probe
aagccagacttgtccccagagctgc

SEQ ID NO: 348476 - DNA, 25 bp, Artificial
  Probe
caagtgtgcaggagcagtgaaaatc

SEQ ID NO: 348477 - DNA, 25 bp, Artificial
  Probe
aaatctttgcccatttgatagtgct

SEQ ID NO: 348478 - DNA, 25 bp, Artificial
  Probe
ggaaaatattccagcaggctgtcaa

SEQ ID NO: 348479 - DNA, 25 bp, Artificial
  Probe
cgtatttgtcgactggacaaaggat

SEQ ID NO: 348480 - DNA, 25 bp, Artificial
  Probe
ctattaccaatgagaccctgaaatg

SEQ ID NO: 348481 - DNA, 25 bp, Artificial
  Probe
taacttcacccatctaggagtccag

SEQ ID NO: 348482 - DNA, 25 bp, Artificial
  Probe
agcctcctgcccttgttggaagctc

SEQ ID NO: 348483 - DNA, 25 bp, Artificial
  Probe
cctaggcatacctattaccaatgag

SEQ ID NO: 348484 - DNA, 25 bp, Artificial
  Probe
tgataaacgacacaattgaacttcg

SEQ ID NO: 348485 - DNA, 25 bp, Artificial
  Probe
ggcatacctattaccaatgagaccc

SEQ ID NO: 348486 - DNA, 25 bp, Artificial
  Probe
agcaggctgtcaaagatgtgggcat

SEQ ID NO: 348487 - DNA, 25 bp, Artificial
  Probe
ctctcagacaaatggttttacatgg

SEQ ID NO: 348488 - DNA, 25 bp, Artificial
  Probe
ctaaaaagccagacttgtccccaga

SEQ ID NO: 348489 - DNA, 25 bp, Artificial
  Probe
acctgacagatgagaaccgggggct

SEQ ID NO: 348490 - DNA, 25 bp, Artificial
  Probe
tgaactccggggactgtccccatgc

SEQ ID NO: 348491 - DNA, 25 bp, Artificial
  Probe
tgtccccagagctgcggaaaatatt

SEQ ID NO: 348492 - DNA, 25 bp, Artificial
  Probe
gaaacatgggaccttcatgcttgcc

SEQ ID NO: 348493 - DNA, 25 bp, Artificial
  Probe
gtgtctataacttcacccatctagg

SEQ ID NO: 348494 - DNA, 25 bp, Artificial
  Probe
gttttacatgggagcagctttccga

SEQ ID NO: 348495 - DNA, 25 bp, Artificial
  Probe
agaatgggaccttatccaagtgtgc

SEQ ID NO: 348496 - DNA, 25 bp, Artificial
  Probe
caaatggttttacatgggagcagct

SEQ ID NO: 348497 - DNA, 25 bp, Artificial
  Probe
ttctatgctaaaaagccagacttgt

SEQ ID NO: 348498 - DNA, 25 bp, Artificial
  Probe
ggggctgtccttctatgctaaaaag

SEQ ID NO: 348499 - DNA, 25 bp, Artificial
  Probe
cagctttccgagaccccgtgttcaa

SEQ ID NO: 348500 - DNA, 25 bp, Artificial
  Probe
tcaaacgatacagacggaatatttt

SEQ ID NO: 348501 - DNA, 25 bp, Artificial
  Probe
catctaggagtccagagagagaatg

SEQ ID NO: 348502 - DNA, 25 bp, Artificial
  Probe
ttgaacttcgggagtttcagaccac

SEQ ID NO: 348503 - DNA, 25 bp, Artificial
  Probe
cacaattgaacttcgggagtttcag

SEQ ID NO: 348504 - DNA, 25 bp, Artificial
  Probe
gcatgaactcagctctctgaactcc

SEQ ID NO: 348505 - DNA, 25 bp, Artificial
  Probe
aagcaggcagttcaaacgatacaga

SEQ ID NO: 348506 - DNA, 25 bp, Artificial
  Probe
atcagaaatcgtatttgtcgactgg

SEQ ID NO: 348507 - DNA, 25 bp, Artificial
  Probe
tgtcgactggacaaaggataagtgc

SEQ ID NO: 348508 - DNA, 25 bp, Artificial
  Probe
attccagcaggctgtcaaagatgtg

SEQ ID NO: 348509 - DNA, 25 bp, Artificial
  Probe
agctctctgaactccggggactgtc

SEQ ID NO: 348510 - DNA, 25 bp, Artificial
  Probe
agtgaaaatctttgcccatttgata

SEQ ID NO: 348511 - DNA, 25 bp, Artificial
  Probe
ccatttgatagtgctgaagaaacat

SEQ ID NO: 348512 - DNA, 25 bp, Artificial
  Probe
tgctaaaaagccagacttgtcccca

SEQ ID NO: 348513 - DNA, 25 bp, Artificial
  Probe
gaccagtgtgtctataacttcaccc

SEQ ID NO: 348514 - DNA, 25 bp, Artificial
  Probe
ttttgagcctcctgcccttgttgga

SEQ ID NO: 348515 - DNA, 25 bp, Artificial
  Probe
tcctggcacaaatgaggagactctc

SEQ ID NO: 348516 - DNA, 25 bp, Artificial
  Probe
tctcccctgtctcatgcctgaagga

SEQ ID NO: 348517 - DNA, 25 bp, Artificial
  Probe
tcccctgtctcatgcctgaaggaca

SEQ ID NO: 348518 - DNA, 25 bp, Artificial
  Probe
gagctactggtcagcctgctgtcta

SEQ ID NO: 348519 - DNA, 25 bp, Artificial
  Probe
gaatacttccacagaatcactgtgt

SEQ ID NO: 348520 - DNA, 25 bp, Artificial
  Probe
caaagcagaagtctggagagccctg

SEQ ID NO: 348521 - DNA, 25 bp, Artificial
  Probe
cagaagtctggagagccctgtcttc

SEQ ID NO: 348522 - DNA, 25 bp, Artificial
  Probe
ccatggctcggctctgtgctttctt

SEQ ID NO: 348523 - DNA, 25 bp, Artificial
  Probe
ggtgcaggaatctcccctgacccag

SEQ ID NO: 348524 - DNA, 25 bp, Artificial
  Probe
attggccacatttgccatggctcgg

SEQ ID NO: 348525 - DNA, 25 bp, Artificial
  Probe
ttcacatcaaaggagtcatctactg

SEQ ID NO: 348526 - DNA, 25 bp, Artificial
  Probe
acctcaggaacaagagagtcttcac

SEQ ID NO: 348527 - DNA, 25 bp, Artificial
  Probe
tatccctgtcctgcatgagctgacc

SEQ ID NO: 348528 - DNA, 25 bp, Artificial
  Probe
aagactccctactggctgtgaggga

SEQ ID NO: 348529 - DNA, 25 bp, Artificial
  Probe
cttccacagaatcactgtgtacctg

SEQ ID NO: 348530 - DNA, 25 bp, Artificial
  Probe
tctggagagccctgtcttcctcagc

SEQ ID NO: 348531 - DNA, 25 bp, Artificial
  Probe
gagtcctgagccacattggagagga

SEQ ID NO: 348532 - DNA, 25 bp, Artificial
  Probe
gctcggctctgtgctttcttgatgt

SEQ ID NO: 348533 - DNA, 25 bp, Artificial
  Probe
agaagtctggagagccctgtcttcc

SEQ ID NO: 348534 - DNA, 25 bp, Artificial
  Probe
atgagctgacccagcagatcctcag

SEQ ID NO: 348535 - DNA, 25 bp, Artificial
  Probe
gaccacaagcattggccacatttgc

SEQ ID NO: 348536 - DNA, 25 bp, Artificial
  Probe
agagaataaacacagcccctgtgcc

SEQ ID NO: 348537 - DNA, 25 bp, Artificial
  Probe
agacccaaggaccacaagcattggc

SEQ ID NO: 348538 - DNA, 25 bp, Artificial
  Probe
gggatgcaaccctcctagactcatt

SEQ ID NO: 348539 - DNA, 25 bp, Artificial
  Probe
gcctcttcacatcaaaggagtcatc

SEQ ID NO: 348540 - DNA, 25 bp, Artificial
  Probe
acaagagagtcttcacactcctggc

SEQ ID NO: 348541 - DNA, 25 bp, Artificial
  Probe
gtggtgagctactggtcagcctgct

SEQ ID NO: 348542 - DNA, 25 bp, Artificial
  Probe
ctctgtgctttcttgatgtccctgg

SEQ ID NO: 348543 - DNA, 25 bp, Artificial
  Probe
tgagggaatacttccacagaatcac

SEQ ID NO: 348544 - DNA, 25 bp, Artificial
  Probe
ctgtcctgcatgagctgacccagca

SEQ ID NO: 348545 - DNA, 25 bp, Artificial
  Probe
tggtcaaagcagaagtctggagagc

SEQ ID NO: 348546 - DNA, 25 bp, Artificial
  Probe
caagcattggccacatttgccatgg

SEQ ID NO: 348547 - DNA, 25 bp, Artificial
  Probe
tgctttcttgatgtccctggtggtg

SEQ ID NO: 348548 - DNA, 25 bp, Artificial
  Probe
gagaataaacacagcccctgtgcct

SEQ ID NO: 348549 - DNA, 25 bp, Artificial
  Probe
atttgccatggctcggctctgtgct

SEQ ID NO: 348550 - DNA, 25 bp, Artificial
  Probe
ctgacccaggaagactccctactgg

SEQ ID NO: 348551 - DNA, 25 bp, Artificial
  Probe
atactcataacctcaggaacaagag

SEQ ID NO: 348552 - DNA, 25 bp, Artificial
  Probe
tcagcctcttcacatcaaaggagtc

SEQ ID NO: 348553 - DNA, 25 bp, Artificial
  Probe
taggatgtgacctgcctcatactca

SEQ ID NO: 348554 - DNA, 25 bp, Artificial
  Probe
tgtgtacctgagagagaataaacac

SEQ ID NO: 348555 - DNA, 25 bp, Artificial
  Probe
ctgtctcatgcctgaaggacagaaa

SEQ ID NO: 348556 - DNA, 25 bp, Artificial
  Probe
caagctatccctgtcctgcatgagc

SEQ ID NO: 348557 - DNA, 25 bp, Artificial
  Probe
catgcctgaaggacagaaagtactt

SEQ ID NO: 348558 - DNA, 25 bp, Artificial
  Probe
aaggaccacaagcattggccacatt

SEQ ID NO: 348559 - DNA, 25 bp, Artificial
  Probe
ggagagccctgtcttcctcagccaa

SEQ ID NO: 348560 - DNA, 25 bp, Artificial
  Probe
ctactggctgtgagggaatacttcc

SEQ ID NO: 348561 - DNA, 25 bp, Artificial
  Probe
ccccgtgaggtgctgctgaccagag

SEQ ID NO: 348562 - DNA, 25 bp, Artificial
  Probe
ctccattaggtgaacaacccacaga

SEQ ID NO: 348563 - DNA, 25 bp, Artificial
  Probe
agaactgcaatgaccccgtgaggtg

SEQ ID NO: 348564 - DNA, 25 bp, Artificial
  Probe
cacttacttcacttgccaacgggga

SEQ ID NO: 348565 - DNA, 25 bp, Artificial
  Probe
tgtgcacttacttcacttgccaacg

SEQ ID NO: 348566 - DNA, 25 bp, Artificial
  Probe
gaattctgccagcactatttgaatt

SEQ ID NO: 348567 - DNA, 25 bp, Artificial
  Probe
agctgactgaactcacactgtggct

SEQ ID NO: 348568 - DNA, 25 bp, Artificial
  Probe
tcagaactgcaatgaccccgtgagg

SEQ ID NO: 348569 - DNA, 25 bp, Artificial
  Probe
gcacttacttcacttgccaacgggg

SEQ ID NO: 348570 - DNA, 25 bp, Artificial
  Probe
tgaccccgtgaggtgctgctgacca

SEQ ID NO: 348571 - DNA, 25 bp, Artificial
  Probe
ccaatgacttatatgcttggaatta

SEQ ID NO: 348572 - DNA, 25 bp, Artificial
  Probe
gggacagccaaccagctgactgaac

SEQ ID NO: 348573 - DNA, 25 bp, Artificial
  Probe
agaattctgccagcactatttgaat

SEQ ID NO: 348574 - DNA, 25 bp, Artificial
  Probe
atagtccaatgacttatatgcttgg

SEQ ID NO: 348575 - DNA, 25 bp, Artificial
  Probe
aatagtccaatgacttatatgcttg

SEQ ID NO: 348576 - DNA, 25 bp, Artificial
  Probe
ctgtggcttgtgcacttacttcact

SEQ ID NO: 348577 - DNA, 25 bp, Artificial
  Probe
gcttgtgcacttacttcacttgcca

SEQ ID NO: 348578 - DNA, 25 bp, Artificial
  Probe
aggtgctgctgaccagaggaatgtc

SEQ ID NO: 348579 - DNA, 25 bp, Artificial
  Probe
tcacactgtggcttgtgcacttact

SEQ ID NO: 348580 - DNA, 25 bp, Artificial
  Probe
cattcagaactgcaatgaccccgtg

SEQ ID NO: 348581 - DNA, 25 bp, Artificial
  Probe
tctgactaattaacccagactgtga

SEQ ID NO: 348582 - DNA, 25 bp, Artificial
  Probe
gaatagtccaatgacttatatgctt

SEQ ID NO: 348583 - DNA, 25 bp, Artificial
  Probe
acttcacttgccaacggggaacatt

SEQ ID NO: 348584 - DNA, 25 bp, Artificial
  Probe
agccaaccagctgactgaactcaca

SEQ ID NO: 348585 - DNA, 25 bp, Artificial
  Probe
actgaactcacactgtggcttgtgc

SEQ ID NO: 348586 - DNA, 25 bp, Artificial
  Probe
gaactcacactgtggcttgtgcact

SEQ ID NO: 348587 - DNA, 25 bp, Artificial
  Probe
tgaactcacactgtggcttgtgcac

SEQ ID NO: 348588 - DNA, 25 bp, Artificial
  Probe
ctaattaacccagactgtgattatg

SEQ ID NO: 348589 - DNA, 25 bp, Artificial
  Probe
ttctgactaattaacccagactgtg

SEQ ID NO: 348590 - DNA, 25 bp, Artificial
  Probe
gtgctgctgaccagaggaatgtcta

SEQ ID NO: 348591 - DNA, 25 bp, Artificial
  Probe
attaacccagactgtgattatgaag

SEQ ID NO: 348592 - DNA, 25 bp, Artificial
  Probe
gccaacggggaacattcagaactgc

SEQ ID NO: 348593 - DNA, 25 bp, Artificial
  Probe
actccattaggtgaacaacccacag

SEQ ID NO: 348594 - DNA, 25 bp, Artificial
  Probe
cccagactgtgattatgaagttgta

SEQ ID NO: 348595 - DNA, 25 bp, Artificial
  Probe
ctgaccatgatgtcaagaagaatag

SEQ ID NO: 348596 - DNA, 25 bp, Artificial
  Probe
ggaacattcagaactgcaatgaccc

SEQ ID NO: 348597 - DNA, 25 bp, Artificial
  Probe
caaccagctgactgaactcacactg

SEQ ID NO: 348598 - DNA, 25 bp, Artificial
  Probe
cttcacttgccaacggggaacattc

SEQ ID NO: 348599 - DNA, 25 bp, Artificial
  Probe
cagctgactgaactcacactgtggc

SEQ ID NO: 348600 - DNA, 25 bp, Artificial
  Probe
gtgcacttacttcacttgccaacgg

SEQ ID NO: 348601 - DNA, 25 bp, Artificial
  Probe
acagccaaccagctgactgaactca

SEQ ID NO: 348602 - DNA, 25 bp, Artificial
  Probe
tgctgctgaccagaggaatgtctat

SEQ ID NO: 348603 - DNA, 25 bp, Artificial
  Probe
cactgtggcttgtgcacttacttca

SEQ ID NO: 348604 - DNA, 25 bp, Artificial
  Probe
gggggacagccaaccagctgactga

SEQ ID NO: 348605 - DNA, 25 bp, Artificial
  Probe
ttgccaacggggaacattcagaact

SEQ ID NO: 348606 - DNA, 25 bp, Artificial
  Probe
atgaccccgtgaggtgctgctgacc

SEQ ID NO: 348607 - DNA, 25 bp, Artificial
  Probe
tccagaaatgccaggcatgctgatg

SEQ ID NO: 348608 - DNA, 25 bp, Artificial
  Probe
ggaaaacaaccaagtgattacatta

SEQ ID NO: 348609 - DNA, 25 bp, Artificial
  Probe
acccgccttagaaagcaaatggctg

SEQ ID NO: 348610 - DNA, 25 bp, Artificial
  Probe
agggagattctccagacttccttga

SEQ ID NO: 348611 - DNA, 25 bp, Artificial
  Probe
ctcatggattcatctctccgactag

SEQ ID NO: 348612 - DNA, 25 bp, Artificial
  Probe
gatgcagtcttcacagataactaca

SEQ ID NO: 348613 - DNA, 25 bp, Artificial
  Probe
atacttgaactccattctaaatggg

SEQ ID NO: 348614 - DNA, 25 bp, Artificial
  Probe
ctgggtcagatttctgccaaaaaat

SEQ ID NO: 348615 - DNA, 25 bp, Artificial
  Probe
aatgacacgccctattatgatgtgt

SEQ ID NO: 348616 - DNA, 25 bp, Artificial
  Probe
gctggcctggcctctctatgggcca

SEQ ID NO: 348617 - DNA, 25 bp, Artificial
  Probe
tctctatgggccaccttcttcagtg

SEQ ID NO: 348618 - DNA, 25 bp, Artificial
  Probe
ctttagctcgtgaaaggcttataat

SEQ ID NO: 348619 - DNA, 25 bp, Artificial
  Probe
ctccattctaaatgggaagaggagc

SEQ ID NO: 348620 - DNA, 25 bp, Artificial
  Probe
tgtcttattggcttcctttgctgaa

SEQ ID NO: 348621 - DNA, 25 bp, Artificial
  Probe
cttccttgaagagctagagaaatga

SEQ ID NO: 348622 - DNA, 25 bp, Artificial
  Probe
ctgcagttcgaaggagcaggtgacc

SEQ ID NO: 348623 - DNA, 25 bp, Artificial
  Probe
ccttagcggagaatgacacgcccta

SEQ ID NO: 348624 - DNA, 25 bp, Artificial
  Probe
tctgcaagggtagcaatcgaggaaa

SEQ ID NO: 348625 - DNA, 25 bp, Artificial
  Probe
aaattcatctttagctcgtgaaagg

SEQ ID NO: 348626 - DNA, 25 bp, Artificial
  Probe
ctctgggcagagctgaagatcagag

SEQ ID NO: 348627 - DNA, 25 bp, Artificial
  Probe
taggatttgcaatccccaaaagctt

SEQ ID NO: 348628 - DNA, 25 bp, Artificial
  Probe
acagtagacttctgggtcagatttc

SEQ ID NO: 348629 - DNA, 25 bp, Artificial
  Probe
ctgcttgtgctgtggatgtgtaagc

SEQ ID NO: 348630 - DNA, 25 bp, Artificial
  Probe
ttaaaagcagactctgacatcttgc

SEQ ID NO: 348631 - DNA, 25 bp, Artificial
  Probe
aattgcaattatctgaagctttctg

SEQ ID NO: 348632 - DNA, 25 bp, Artificial
  Probe
tagggactccacctctcatggattc

SEQ ID NO: 348633 - DNA, 25 bp, Artificial
  Probe
cgaaggagcaggtgaccctgatcaa

SEQ ID NO: 348634 - DNA, 25 bp, Artificial
  Probe
acgaatcagcagtagcatctcggaa

SEQ ID NO: 348635 - DNA, 25 bp, Artificial
  Probe
attcctccagtgatagggactccac

SEQ ID NO: 348636 - DNA, 25 bp, Artificial
  Probe
tgacaggctgcagttcgaaggagca

SEQ ID NO: 348637 - DNA, 25 bp, Artificial
  Probe
taactattcaacagagcagaacaga

SEQ ID NO: 348638 - DNA, 25 bp, Artificial
  Probe
acaaccaagtgattacattatgagt

SEQ ID NO: 348639 - DNA, 25 bp, Artificial
  Probe
ccgccttagaaagcaaatggctgtg

SEQ ID NO: 348640 - DNA, 25 bp, Artificial
  Probe
cttcagctaggaaaagctcaacttc

SEQ ID NO: 348641 - DNA, 25 bp, Artificial
  Probe
ctgatggagttttcaccagcgacta

SEQ ID NO: 348642 - DNA, 25 bp, Artificial
  Probe
gcttgatttccagtagtaaatactc

SEQ ID NO: 348643 - DNA, 25 bp, Artificial
  Probe
agctcaacttccaacctggagcttc

SEQ ID NO: 348644 - DNA, 25 bp, Artificial
  Probe
ctgttctcacagtcgctggcctggc

SEQ ID NO: 348645 - DNA, 25 bp, Artificial
  Probe
ttcaacagagcagaacagataatca

SEQ ID NO: 348646 - DNA, 25 bp, Artificial
  Probe
atgacaggctgcagttcgaaggagc

SEQ ID NO: 348647 - DNA, 25 bp, Artificial
  Probe
cagtcgctggcctggcctctctatg

SEQ ID NO: 348648 - DNA, 25 bp, Artificial
  Probe
gcatctcggaagaccccgtgccggt

SEQ ID NO: 348649 - DNA, 25 bp, Artificial
  Probe
aagctagaagcctaacggagtgctt

SEQ ID NO: 348650 - DNA, 25 bp, Artificial
  Probe
ccgtgccggtcaaacgacactctga

SEQ ID NO: 348651 - DNA, 25 bp, Artificial
  Probe
tcctctgggcagagctgaagatcag

SEQ ID NO: 348652 - DNA, 25 bp, Artificial
  Probe
cttcagtgaggttggatgacaggct

SEQ ID NO: 348653 - DNA, 25 bp, Artificial
  Probe
agttgtcgaaggacattcagaagca

SEQ ID NO: 348654 - DNA, 25 bp, Artificial
  Probe
ctcaagttgtcgaaggacattcaga

SEQ ID NO: 348655 - DNA, 25 bp, Artificial
  Probe
cagaagatcgatgcagccatttctt

SEQ ID NO: 348656 - DNA, 25 bp, Artificial
  Probe
acatatggcaccagtcaacctcaag

SEQ ID NO: 348657 - DNA, 25 bp, Artificial
  Probe
atggaaggcgtcgtgtgtttcagct

SEQ ID NO: 348658 - DNA, 25 bp, Artificial
  Probe
tcagctgaccctgatagctcttcct

SEQ ID NO: 348659 - DNA, 25 bp, Artificial
  Probe
aactttccaggcattggcacaaagg

SEQ ID NO: 348660 - DNA, 25 bp, Artificial
  Probe
tggcgcactgaagtggtttccttac

SEQ ID NO: 348661 - DNA, 25 bp, Artificial
  Probe
ctttccaggcattggcacaaaggtg

SEQ ID NO: 348662 - DNA, 25 bp, Artificial
  Probe
ccaggcattggcacaaaggtggatg

SEQ ID NO: 348663 - DNA, 25 bp, Artificial
  Probe
aatccatggatccagaatttcccag

SEQ ID NO: 348664 - DNA, 25 bp, Artificial
  Probe
ggatccagaatttcccaggaaaata

SEQ ID NO: 348665 - DNA, 25 bp, Artificial
  Probe
tgatccaaatgcagggaaagtgacc

SEQ ID NO: 348666 - DNA, 25 bp, Artificial
  Probe
ctgtctttgaagcatttgggtttct

SEQ ID NO: 348667 - DNA, 25 bp, Artificial
  Probe
tgcagccatttctttaaaggaccaa

SEQ ID NO: 348668 - DNA, 25 bp, Artificial
  Probe
cttcttcagcggatcttcacagttg

SEQ ID NO: 348669 - DNA, 25 bp, Artificial
  Probe
gaagatcgatgcagccatttcttta

SEQ ID NO: 348670 - DNA, 25 bp, Artificial
  Probe
ttaagaagatccatggaaggcgtcg

SEQ ID NO: 348671 - DNA, 25 bp, Artificial
  Probe
gaaacaatccatggatccagaattt

SEQ ID NO: 348672 - DNA, 25 bp, Artificial
  Probe
atatggcaccagtcaacctcaagtt

SEQ ID NO: 348673 - DNA, 25 bp, Artificial
  Probe
gaaacttggcgcactgaagtggttt

SEQ ID NO: 348674 - DNA, 25 bp, Artificial
  Probe
atggcaccagtcaacctcaagttgt

SEQ ID NO: 348675 - DNA, 25 bp, Artificial
  Probe
atagctgagaactttccaggcattg

SEQ ID NO: 348676 - DNA, 25 bp, Artificial
  Probe
atccatggatccagaatttcccagg

SEQ ID NO: 348677 - DNA, 25 bp, Artificial
  Probe
agaagatccatggaaggcgtcgtgt

SEQ ID NO: 348678 - DNA, 25 bp, Artificial
  Probe
gctgtctttgaagcatttgggtttc

SEQ ID NO: 348679 - DNA, 25 bp, Artificial
  Probe
atcgatgcagccatttctttaaagg

SEQ ID NO: 348680 - DNA, 25 bp, Artificial
  Probe
agaagaaacaatccatggatccaga

SEQ ID NO: 348681 - DNA, 25 bp, Artificial
  Probe
ttcccaggaaaatagctgagaactt

SEQ ID NO: 348682 - DNA, 25 bp, Artificial
  Probe
caaaggtggatgctgtctttgaagc

SEQ ID NO: 348683 - DNA, 25 bp, Artificial
  Probe
agaatttcccaggaaaatagctgag

SEQ ID NO: 348684 - DNA, 25 bp, Artificial
  Probe
tgagaactttccaggcattggcaca

SEQ ID NO: 348685 - DNA, 25 bp, Artificial
  Probe
acagacaagtaactgtctctgtgta

SEQ ID NO: 348686 - DNA, 25 bp, Artificial
  Probe
gaaggcgtcgtgtgtttcagctgac

SEQ ID NO: 348687 - DNA, 25 bp, Artificial
  Probe
aagatccatggaaggcgtcgtgtgt

SEQ ID NO: 348688 - DNA, 25 bp, Artificial
  Probe
aggcattggcacaaaggtggatgct

SEQ ID NO: 348689 - DNA, 25 bp, Artificial
  Probe
gtgtttcagctgaccctgatagctc

SEQ ID NO: 348690 - DNA, 25 bp, Artificial
  Probe
gtttctttacttcttcagcggatct

SEQ ID NO: 348691 - DNA, 25 bp, Artificial
  Probe
tagcatgtgctatggcagagcaaaa

SEQ ID NO: 348692 - DNA, 25 bp, Artificial
  Probe
ccatggatccagaatttcccaggaa

SEQ ID NO: 348693 - DNA, 25 bp, Artificial
  Probe
gtccagaagatcgatgcagccattt

SEQ ID NO: 348694 - DNA, 25 bp, Artificial
  Probe
ttgatccaaatgcagggaaagtgac

SEQ ID NO: 348695 - DNA, 25 bp, Artificial
  Probe
gtcgtgtgtttcagctgaccctgat

SEQ ID NO: 348696 - DNA, 25 bp, Artificial
  Probe
ccatggaaggcgtcgtgtgtttcag

SEQ ID NO: 348697 - DNA, 25 bp, Artificial
  Probe
gcgtcgtgtgtttcagctgaccctg

SEQ ID NO: 348698 - DNA, 25 bp, Artificial
  Probe
ttcagctgaccctgatagctcttcc

SEQ ID NO: 348699 - DNA, 25 bp, Artificial
  Probe
taagtgcctttgacaagatgtgtct

SEQ ID NO: 348700 - DNA, 25 bp, Artificial
  Probe
ccatgccacctttgcagggcattat

SEQ ID NO: 348701 - DNA, 25 bp, Artificial
  Probe
agcatatgtactgacatcaggtggt

SEQ ID NO: 348702 - DNA, 25 bp, Artificial
  Probe
tatcagcatatgtactgacatcagg

SEQ ID NO: 348703 - DNA, 25 bp, Artificial
  Probe
gtgcctttgacaagatgtgtcttag

SEQ ID NO: 348704 - DNA, 25 bp, Artificial
  Probe
ggtggaatccaagatcctcatgcat

SEQ ID NO: 348705 - DNA, 25 bp, Artificial
  Probe
cctttgacaagatgtgtcttagttt

SEQ ID NO: 348706 - DNA, 25 bp, Artificial
  Probe
accatgccacctttgcagggcatta

SEQ ID NO: 348707 - DNA, 25 bp, Artificial
  Probe
ccaagatcctcatgcattcagagtg

SEQ ID NO: 348708 - DNA, 25 bp, Artificial
  Probe
gcatatgtactgacatcaggtggtt

SEQ ID NO: 348709 - DNA, 25 bp, Artificial
  Probe
gaatccaagatcctcatgcattcag

SEQ ID NO: 348710 - DNA, 25 bp, Artificial
  Probe
atccaagatcctcatgcattcagag

SEQ ID NO: 348711 - DNA, 25 bp, Artificial
  Probe
caccatgccacctttgcagggcatt

SEQ ID NO: 348712 - DNA, 25 bp, Artificial
  Probe
catatgtactgacatcaggtggttt

SEQ ID NO: 348713 - DNA, 25 bp, Artificial
  Probe
atcagcatatgtactgacatcaggt

SEQ ID NO: 348714 - DNA, 25 bp, Artificial
  Probe
catgccacctttgcagggcattatc

SEQ ID NO: 348715 - DNA, 25 bp, Artificial
  Probe
ggaatccaagatcctcatgcattca

SEQ ID NO: 348716 - DNA, 25 bp, Artificial
  Probe
cagcatatgtactgacatcaggtgg

SEQ ID NO: 348717 - DNA, 25 bp, Artificial
  Probe
aagtgcctttgacaagatgtgtctt

SEQ ID NO: 348718 - DNA, 25 bp, Artificial
  Probe
acaagatgtgtcttagtttgcttcc

SEQ ID NO: 348719 - DNA, 25 bp, Artificial
  Probe
tgccacctttgcagggcattatctt

SEQ ID NO: 348720 - DNA, 25 bp, Artificial
  Probe
tgcctttgacaagatgtgtcttagt

SEQ ID NO: 348721 - DNA, 25 bp, Artificial
  Probe
agtgcctttgacaagatgtgtctta

SEQ ID NO: 348722 - DNA, 25 bp, Artificial
  Probe
tggaatccaagatcctcatgcattc

SEQ ID NO: 348723 - DNA, 25 bp, Artificial
  Probe
atgccacctttgcagggcattatct

SEQ ID NO: 348724 - DNA, 25 bp, Artificial
  Probe
gtggaatccaagatcctcatgcatt

SEQ ID NO: 348725 - DNA, 25 bp, Artificial
  Probe
tccaagatcctcatgcattcagagt

SEQ ID NO: 348726 - DNA, 25 bp, Artificial
  Probe
gcaccatgccacctttgcagggcat

SEQ ID NO: 348727 - DNA, 25 bp, Artificial
  Probe
tcagcatatgtactgacatcaggtg

SEQ ID NO: 348728 - DNA, 25 bp, Artificial
  Probe
gcctttgacaagatgtgtcttagtt

SEQ ID NO: 348729 - DNA, 25 bp, Artificial
  Probe
tggtctcacactcactgttagtaaa

SEQ ID NO: 348730 - DNA, 25 bp, Artificial
  Probe
ctatctttccatgttggcatttgtg

SEQ ID NO: 348731 - DNA, 25 bp, Artificial
  Probe
actgttagtaaactactctagtctg

SEQ ID NO: 348732 - DNA, 25 bp, Artificial
  Probe
ctggtctcacactcactgttagtaa

SEQ ID NO: 348733 - DNA, 25 bp, Artificial
  Probe
ctgttagtaaactactctagtctgt

SEQ ID NO: 348734 - DNA, 25 bp, Artificial
  Probe
ttccatgttggcatttgtgttgctg

SEQ ID NO: 348735 - DNA, 25 bp, Artificial
  Probe
ttgtgttgctgcaaaaccccacata

SEQ ID NO: 348736 - DNA, 25 bp, Artificial
  Probe
cccgagaaatgacacctggtctcac

SEQ ID NO: 348737 - DNA, 25 bp, Artificial
  Probe
tggcatttgtgttgctgcaaaaccc

SEQ ID NO: 348738 - DNA, 25 bp, Artificial
  Probe
gtaaactactctagtctgttcaagt

SEQ ID NO: 348739 - DNA, 25 bp, Artificial
  Probe
gacacctggtctcacactcactgtt

SEQ ID NO: 348740 - DNA, 25 bp, Artificial
  Probe
catgttggcatttgtgttgctgcaa

SEQ ID NO: 348741 - DNA, 25 bp, Artificial
  Probe
gagaaatgacacctggtctcacact

SEQ ID NO: 348742 - DNA, 25 bp, Artificial
  Probe
gtgttgctgcaaaaccccacatatc

SEQ ID NO: 348743 - DNA, 25 bp, Artificial
  Probe
ccgagaaatgacacctggtctcaca

SEQ ID NO: 348744 - DNA, 25 bp, Artificial
  Probe
cgagaaatgacacctggtctcacac

SEQ ID NO: 348745 - DNA, 25 bp, Artificial
  Probe
ccccgagaaatgacacctggtctca

SEQ ID NO: 348746 - DNA, 25 bp, Artificial
  Probe
gcccataaacttcttgaaatcgtag

SEQ ID NO: 348747 - DNA, 25 bp, Artificial
  Probe
tactatctttccatgttggcatttg

SEQ ID NO: 348748 - DNA, 25 bp, Artificial
  Probe
atttgtgttgctgcaaaaccccaca

SEQ ID NO: 348749 - DNA, 25 bp, Artificial
  Probe
gtctgttcaagttcctaattcagaa

SEQ ID NO: 348750 - DNA, 25 bp, Artificial
  Probe
atcataccccgagaaatgacacctg

SEQ ID NO: 348751 - DNA, 25 bp, Artificial
  Probe
cataaacttcttgaaatcgtagtgt

SEQ ID NO: 348752 - DNA, 25 bp, Artificial
  Probe
ccatgttggcatttgtgttgctgca

SEQ ID NO: 348753 - DNA, 25 bp, Artificial
  Probe
tgttagtaaactactctagtctgtt

SEQ ID NO: 348754 - DNA, 25 bp, Artificial
  Probe
agtaaactactctagtctgttcaag

SEQ ID NO: 348755 - DNA, 25 bp, Artificial
  Probe
ccataaacttcttgaaatcgtagtg

SEQ ID NO: 348756 - DNA, 25 bp, Artificial
  Probe
actatctttccatgttggcatttgt

SEQ ID NO: 348757 - DNA, 25 bp, Artificial
  Probe
tccatgttggcatttgtgttgctgc

SEQ ID NO: 348758 - DNA, 25 bp, Artificial
  Probe
ggtctcacactcactgttagtaaac

SEQ ID NO: 348759 - DNA, 25 bp, Artificial
  Probe
atgacacctggtctcacactcactg

SEQ ID NO: 348760 - DNA, 25 bp, Artificial
  Probe
tgacacctggtctcacactcactgt

SEQ ID NO: 348761 - DNA, 25 bp, Artificial
  Probe
tgtgttgctgcaaaaccccacatat

SEQ ID NO: 348762 - DNA, 25 bp, Artificial
  Probe
gttagtaaactactctagtctgttc

SEQ ID NO: 348763 - DNA, 25 bp, Artificial
  Probe
gttggcatttgtgttgctgcaaaac

SEQ ID NO: 348764 - DNA, 25 bp, Artificial
  Probe
catttgtgttgctgcaaaaccccac

SEQ ID NO: 348765 - DNA, 25 bp, Artificial
  Probe
taccccgagaaatgacacctggtct

SEQ ID NO: 348766 - DNA, 25 bp, Artificial
  Probe
gaaatgacacctggtctcacactca

SEQ ID NO: 348767 - DNA, 25 bp, Artificial
  Probe
tagtctgttcaagttcctaattcag

SEQ ID NO: 348768 - DNA, 25 bp, Artificial
  Probe
acctggtctcacactcactgttagt

SEQ ID NO: 348769 - DNA, 25 bp, Artificial
  Probe
tcataccccgagaaatgacacctgg

SEQ ID NO: 348770 - DNA, 25 bp, Artificial
  Probe
cacctggtctcacactcactgttag

SEQ ID NO: 348771 - DNA, 25 bp, Artificial
  Probe
tttgtgttgctgcaaaaccccacat

SEQ ID NO: 348772 - DNA, 25 bp, Artificial
  Probe
cctggtctcacactcactgttagta

SEQ ID NO: 348773 - DNA, 25 bp, Artificial
  Probe
ggcatttgtgttgctgcaaaacccc

SEQ ID NO: 348774 - DNA, 25 bp, Artificial
  Probe
cataccccgagaaatgacacctggt

SEQ ID NO: 348775 - DNA, 25 bp, Artificial
  Probe
tcccaccgtgaagaagattgatgca

SEQ ID NO: 348776 - DNA, 25 bp, Artificial
  Probe
cccaccgtgaagaagattgatgcag

SEQ ID NO: 348777 - DNA, 25 bp, Artificial
  Probe
tgtgctgtggctcgagatgagccca

SEQ ID NO: 348778 - DNA, 25 bp, Artificial
  Probe
cccacctggccctggattttatgga

SEQ ID NO: 348779 - DNA, 25 bp, Artificial
  Probe
aggttctccacgagccaagccaaca

SEQ ID NO: 348780 - DNA, 25 bp, Artificial
  Probe
aaatgtgatcctgctttgtcctttg

SEQ ID NO: 348781 - DNA, 25 bp, Artificial
  Probe
atggataaaggcttcccgagactga

SEQ ID NO: 348782 - DNA, 25 bp, Artificial
  Probe
tcagttctgggcagtccgaggaaat

SEQ ID NO: 348783 - DNA, 25 bp, Artificial
  Probe
acctgagaccccagtcaaatgtgat

SEQ ID NO: 348784 - DNA, 25 bp, Artificial
  Probe
acagagcttggctcatgcctaccca

SEQ ID NO: 348785 - DNA, 25 bp, Artificial
  Probe
agatgtctttcttaatgaaccacag

SEQ ID NO: 348786 - DNA, 25 bp, Artificial
  Probe
agtgggacagagcttggctcatgcc

SEQ ID NO: 348787 - DNA, 25 bp, Artificial
  Probe
atgctgcctatgaggcaaataacaa

SEQ ID NO: 348788 - DNA, 25 bp, Artificial
  Probe
gacaagacagcttatggataaaggc

SEQ ID NO: 348789 - DNA, 25 bp, Artificial
  Probe
tcctttgatgcagtcaccatgctga

SEQ ID NO: 348790 - DNA, 25 bp, Artificial
  Probe
tcccgagactgataacagatgactt

SEQ ID NO: 348791 - DNA, 25 bp, Artificial
  Probe
tgggcagtccgaggaaatgaagtcc

SEQ ID NO: 348792 - DNA, 25 bp, Artificial
  Probe
gagccaagccaacattcgcctttct

SEQ ID NO: 348793 - DNA, 25 bp, Artificial
  Probe
tgatgcagtcaccatgctgagaggg

SEQ ID NO: 348794 - DNA, 25 bp, Artificial
  Probe
catttgatttcagcattttggccct

SEQ ID NO: 348795 - DNA, 25 bp, Artificial
  Probe
aaatgaagtccaagcaggttaccca

SEQ ID NO: 348796 - DNA, 25 bp, Artificial
  Probe
atgatgaattgttcctgcatgtgct

SEQ ID NO: 348797 - DNA, 25 bp, Artificial
  Probe
ttttatggagatgctcacttcgatg

SEQ ID NO: 348798 - DNA, 25 bp, Artificial
  Probe
tgagaggatgcatccccatgggtac

SEQ ID NO: 348799 - DNA, 25 bp, Artificial
  Probe
gagtttgaccccaatgccaggacgg

SEQ ID NO: 348800 - DNA, 25 bp, Artificial
  Probe
gcattttggccctctcttccttcag

SEQ ID NO: 348801 - DNA, 25 bp, Artificial
  Probe
gacaggcacttctggcgtagaaccc

SEQ ID NO: 348802 - DNA, 25 bp, Artificial
  Probe
ctgattatcatgatgacaagacata

SEQ ID NO: 348803 - DNA, 25 bp, Artificial
  Probe
ctgttgtgctgattatcatgatgac

SEQ ID NO: 348804 - DNA, 25 bp, Artificial
  Probe
aggatccacactcttggctttcctc

SEQ ID NO: 348805 - DNA, 25 bp, Artificial
  Probe
tcactgggaccctcagggaccaatt

SEQ ID NO: 348806 - DNA, 25 bp, Artificial
  Probe
cagtctacaggttctccacgagcca

SEQ ID NO: 348807 - DNA, 25 bp, Artificial
  Probe
tcctctgatgccacagtggttcctg

SEQ ID NO: 348808 - DNA, 25 bp, Artificial
  Probe
acagtggttcctgtgccctctgtct

SEQ ID NO: 348809 - DNA, 25 bp, Artificial
  Probe
acgagccaagccaacattcgccttt

SEQ ID NO: 348810 - DNA, 25 bp, Artificial
  Probe
caaagaatctctgatgtacccagtc

SEQ ID NO: 348811 - DNA, 25 bp, Artificial
  Probe
cggtgacacacacactgaagagcaa

SEQ ID NO: 348812 - DNA, 25 bp, Artificial
  Probe
tttcttctgtggatcatcacagttc

SEQ ID NO: 348813 - DNA, 25 bp, Artificial
  Probe
cctgagcacagaagtgaaagcttct

SEQ ID NO: 348814 - DNA, 25 bp, Artificial
  Probe
ctttctcaggatgatatagagggca

SEQ ID NO: 348815 - DNA, 25 bp, Artificial
  Probe
agacagcttatggataaaggcttcc

SEQ ID NO: 348816 - DNA, 25 bp, Artificial
  Probe
caagttgatgctgtgttacatgcat

SEQ ID NO: 348817 - DNA, 25 bp, Artificial
  Probe
cctcagggaccaatttattcctggt

SEQ ID NO: 348818 - DNA, 25 bp, Artificial
  Probe
ctgaagagcaacagctggctgttgt

SEQ ID NO: 348819 - DNA, 25 bp, Artificial
  Probe
gtacactaggtgagaggatgcatcc

SEQ ID NO: 348820 - DNA, 25 bp, Artificial
  Probe
taacagatgacttcccaggaattga

SEQ ID NO: 348821 - DNA, 25 bp, Artificial
  Probe
gccacacagtgaatgggtggtggag

SEQ ID NO: 348822 - DNA, 25 bp, Artificial
  Probe
ttactatacccactttacaaatggc

SEQ ID NO: 348823 - DNA, 25 bp, Artificial
  Probe
aaggccacacagtgaatgggtggtg

SEQ ID NO: 348824 - DNA, 25 bp, Artificial
  Probe
tccccagaagactttgttgaaggcc

SEQ ID NO: 348825 - DNA, 25 bp, Artificial
  Probe
caagtccccagaagactttgttgaa

SEQ ID NO: 348826 - DNA, 25 bp, Artificial
  Probe
actatacccactttacaaatggcaa

SEQ ID NO: 348827 - DNA, 25 bp, Artificial
  Probe
gggcaaagcaagtccccagaagact

SEQ ID NO: 348828 - DNA, 25 bp, Artificial
  Probe
tgggcaaagcaagtccccagaagac

SEQ ID NO: 348829 - DNA, 25 bp, Artificial
  Probe
caaaagccaatcattactataccca

SEQ ID NO: 348830 - DNA, 25 bp, Artificial
  Probe
caaggtccaataacccttagagatg

SEQ ID NO: 348831 - DNA, 25 bp, Artificial
  Probe
ttgttgaaggccacacagtgaatgg

SEQ ID NO: 348832 - DNA, 25 bp, Artificial
  Probe
tctaccaaaagccaatcattactat

SEQ ID NO: 348833 - DNA, 25 bp, Artificial
  Probe
gcaaagcaagtccccagaagacttt

SEQ ID NO: 348834 - DNA, 25 bp, Artificial
  Probe
taccaaaagccaatcattactatac

SEQ ID NO: 348835 - DNA, 25 bp, Artificial
  Probe
gcaagtccccagaagactttgttga

SEQ ID NO: 348836 - DNA, 25 bp, Artificial
  Probe
atacccactttacaaatggcaaagc

SEQ ID NO: 348837 - DNA, 25 bp, Artificial
  Probe
ccccagaagactttgttgaaggcca

SEQ ID NO: 348838 - DNA, 25 bp, Artificial
  Probe
aagtccccagaagactttgttgaag

SEQ ID NO: 348839 - DNA, 25 bp, Artificial
  Probe
ggcaaagcaagtccccagaagactt

SEQ ID NO: 348840 - DNA, 25 bp, Artificial
  Probe
agacaaggtccaataacccttagag

SEQ ID NO: 348841 - DNA, 25 bp, Artificial
  Probe
aatcattactatacccactttacaa

SEQ ID NO: 348842 - DNA, 25 bp, Artificial
  Probe
aggccacacagtgaatgggtggtgg

SEQ ID NO: 348843 - DNA, 25 bp, Artificial
  Probe
cactttacaaatggcaaagcctctt

SEQ ID NO: 348844 - DNA, 25 bp, Artificial
  Probe
ccaatcattactatacccactttac

SEQ ID NO: 348845 - DNA, 25 bp, Artificial
  Probe
acagtgaatgggtggtggagacaag

SEQ ID NO: 348846 - DNA, 25 bp, Artificial
  Probe
ttgaaggccacacagtgaatgggtg

SEQ ID NO: 348847 - DNA, 25 bp, Artificial
  Probe
agactttgttgaaggccacacagtg

SEQ ID NO: 348848 - DNA, 25 bp, Artificial
  Probe
tgaaggccacacagtgaatgggtgg

SEQ ID NO: 348849 - DNA, 25 bp, Artificial
  Probe
cattactatacccactttacaaatg

SEQ ID NO: 348850 - DNA, 25 bp, Artificial
  Probe
tttgttgaaggccacacagtgaatg

SEQ ID NO: 348851 - DNA, 25 bp, Artificial
  Probe
gactttgttgaaggccacacagtga

SEQ ID NO: 348852 - DNA, 25 bp, Artificial
  Probe
agccaatcattactatacccacttt

SEQ ID NO: 348853 - DNA, 25 bp, Artificial
  Probe
ccagaagactttgttgaaggccaca

SEQ ID NO: 348854 - DNA, 25 bp, Artificial
  Probe
acacagtgaatgggtggtggagaca

SEQ ID NO: 348855 - DNA, 25 bp, Artificial
  Probe
gacaaggtccaataacccttagaga

SEQ ID NO: 348856 - DNA, 25 bp, Artificial
  Probe
acaaggtccaataacccttagagat

SEQ ID NO: 348857 - DNA, 25 bp, Artificial
  Probe
tgttgaaggccacacagtgaatggg

SEQ ID NO: 348858 - DNA, 25 bp, Artificial
  Probe
gttgaaggccacacagtgaatgggt

SEQ ID NO: 348859 - DNA, 25 bp, Artificial
  Probe
cccactttacaaatggcaaagcctc

SEQ ID NO: 348860 - DNA, 25 bp, Artificial
  Probe
aagcaagtccccagaagactttgtt

SEQ ID NO: 348861 - DNA, 25 bp, Artificial
  Probe
agcaagtccccagaagactttgttg

SEQ ID NO: 348862 - DNA, 25 bp, Artificial
  Probe
agtccccagaagactttgttgaagg

SEQ ID NO: 348863 - DNA, 25 bp, Artificial
  Probe
cccagaagactttgttgaaggccac

SEQ ID NO: 348864 - DNA, 25 bp, Artificial
  Probe
ctttacaaatggcaaagcctctttc

SEQ ID NO: 348865 - DNA, 25 bp, Artificial
  Probe
gtccccagaagactttgttgaaggc

SEQ ID NO: 348866 - DNA, 25 bp, Artificial
  Probe
atgggcaaagcaagtccccagaaga

SEQ ID NO: 348867 - DNA, 25 bp, Artificial
  Probe
gggaggaccttatctgtgcgtgaaa

SEQ ID NO: 348868 - DNA, 25 bp, Artificial
  Probe
gcttattgttccaagacattgtcaa

SEQ ID NO: 348869 - DNA, 25 bp, Artificial
  Probe
ctgaggtctttcgacatgtggaaag

SEQ ID NO: 348870 - DNA, 25 bp, Artificial
  Probe
gctgattttaacaatacctactgtg

SEQ ID NO: 348871 - DNA, 25 bp, Artificial
  Probe
attgtttgtagtgacacctgagagc

SEQ ID NO: 348872 - DNA, 25 bp, Artificial
  Probe
acctcaaggacttgaaagcatccac

SEQ ID NO: 348873 - DNA, 25 bp, Artificial
  Probe
taagcattgtttgcttattgttcca

SEQ ID NO: 348874 - DNA, 25 bp, Artificial
  Probe
gaatgttctgacattaacagttttc

SEQ ID NO: 348875 - DNA, 25 bp, Artificial
  Probe
tgtgttccaatttagaaatgaccaa

SEQ ID NO: 348876 - DNA, 25 bp, Artificial
  Probe
caaccgcatggagtgtattgtttgt

SEQ ID NO: 348877 - DNA, 25 bp, Artificial
  Probe
tcatagcattaactaatctgttggg

SEQ ID NO: 348878 - DNA, 25 bp, Artificial
  Probe
cggattgtatctagtgcagctgatt

SEQ ID NO: 348879 - DNA, 25 bp, Artificial
  Probe
gactgagctggtgcattacagagag

SEQ ID NO: 348880 - DNA, 25 bp, Artificial
  Probe
acctggtgctggatatttttcggat

SEQ ID NO: 348881 - DNA, 25 bp, Artificial
  Probe
ctgatcatgcattgttgaggtggtc

SEQ ID NO: 348882 - DNA, 25 bp, Artificial
  Probe
tgttccaagacattgtcaataaaag

SEQ ID NO: 348883 - DNA, 25 bp, Artificial
  Probe
aagcatccacatctggactccagtc

SEQ ID NO: 348884 - DNA, 25 bp, Artificial
  Probe
cctggcaatagtgtgttccaattta

SEQ ID NO: 348885 - DNA, 25 bp, Artificial
  Probe
ctgtagctcttcagcgtccatgttc

SEQ ID NO: 348886 - DNA, 25 bp, Artificial
  Probe
ctactgtgttcctggcaatagtgtg

SEQ ID NO: 348887 - DNA, 25 bp, Artificial
  Probe
aaatcgctatatccacgtactgtag

SEQ ID NO: 348888 - DNA, 25 bp, Artificial
  Probe
tttttctatcctgaggtctttcgac

SEQ ID NO: 348889 - DNA, 25 bp, Artificial
  Probe
gcctgggtctgtgtctcttttctct

SEQ ID NO: 348890 - DNA, 25 bp, Artificial
  Probe
attaacctggtgctggatatttttc

SEQ ID NO: 348891 - DNA, 25 bp, Artificial
  Probe
agtgtgttccaatttagaaatgacc

SEQ ID NO: 348892 - DNA, 25 bp, Artificial
  Probe
cattaactaatctgttgggttcatt

SEQ ID NO: 348893 - DNA, 25 bp, Artificial
  Probe
ttgtcatgtaactgatcatgcattg

SEQ ID NO: 348894 - DNA, 25 bp, Artificial
  Probe
tagggaggaccttatctgtgcgtga

SEQ ID NO: 348895 - DNA, 25 bp, Artificial
  Probe
catgtaactgatcatgcattgttga

SEQ ID NO: 348896 - DNA, 25 bp, Artificial
  Probe
agctcttcagcgtccatgttcattg

SEQ ID NO: 348897 - DNA, 25 bp, Artificial
  Probe
tgtatctagtgcagctgattttaac

SEQ ID NO: 348898 - DNA, 25 bp, Artificial
  Probe
cattattggaattaacctggtgctg

SEQ ID NO: 348899 - DNA, 25 bp, Artificial
  Probe
acctactgtgttcctggcaatagtg

SEQ ID NO: 348900 - DNA, 25 bp, Artificial
  Probe
gccaggcctgggtctgtgtctcttt

SEQ ID NO: 348901 - DNA, 25 bp, Artificial
  Probe
agttagtagcatgtgagccaggcct

SEQ ID NO: 348902 - DNA, 25 bp, Artificial
  Probe
ttagtagcatgtgagccaggcctgg

SEQ ID NO: 348903 - DNA, 25 bp, Artificial
  Probe
tgactgagctggtgcattacagaga

SEQ ID NO: 348904 - DNA, 25 bp, Artificial
  Probe
aggacttgaaagcatccacatctgg

SEQ ID NO: 348905 - DNA, 25 bp, Artificial
  Probe
tttttcggattgtatctagtgcagc

SEQ ID NO: 348906 - DNA, 25 bp, Artificial
  Probe
tagtgcagctgattttaacaatacc

SEQ ID NO: 348907 - DNA, 25 bp, Artificial
  Probe
aaagcaaccgcatggagtgtattgt

SEQ ID NO: 348908 - DNA, 25 bp, Artificial
  Probe
cctgagagctggtagttagtagcat

SEQ ID NO: 348909 - DNA, 25 bp, Artificial
  Probe
gttctgacattaacagttttccatg

SEQ ID NO: 348910 - DNA, 25 bp, Artificial
  Probe
tgtggacctcaaggacttgaaagca

SEQ ID NO: 348911 - DNA, 25 bp, Artificial
  Probe
ggtctgaatgttctgacattaacag

SEQ ID NO: 348912 - DNA, 25 bp, Artificial
  Probe
ttaacaatacctactgtgttcctgg

SEQ ID NO: 348913 - DNA, 25 bp, Artificial
  Probe
cccaactgctgctcaagtagggagg

SEQ ID NO: 348914 - DNA, 25 bp, Artificial
  Probe
gcttccagcctcagagcccaggtta

SEQ ID NO: 348915 - DNA, 25 bp, Artificial
  Probe
gtagttctgatctttgggcgaaagc

SEQ ID NO: 348916 - DNA, 25 bp, Artificial
  Probe
cagtagttctgatctttgggcgaaa

SEQ ID NO: 348917 - DNA, 25 bp, Artificial
  Probe
actgcagtagttctgatctttgggc

SEQ ID NO: 348918 - DNA, 25 bp, Artificial
  Probe
tgctgctcaagtagggaggcttcca

SEQ ID NO: 348919 - DNA, 25 bp, Artificial
  Probe
acaggcagctttctagaagtttctc

SEQ ID NO: 348920 - DNA, 25 bp, Artificial
  Probe
agccgagaactcctgactattaaga

SEQ ID NO: 348921 - DNA, 25 bp, Artificial
  Probe
gcagctttctagaagtttctcttcc

SEQ ID NO: 348922 - DNA, 25 bp, Artificial
  Probe
agccctgaaagtcaacacagattct

SEQ ID NO: 348923 - DNA, 25 bp, Artificial
  Probe
cttcaaggcccaactgctgctcaag

SEQ ID NO: 348924 - DNA, 25 bp, Artificial
  Probe
agtagggaggcttccagcctcagag

SEQ ID NO: 348925 - DNA, 25 bp, Artificial
  Probe
gaaagtcaacacagattctttctcg

SEQ ID NO: 348926 - DNA, 25 bp, Artificial
  Probe
gcagtagttctgatctttgggcgaa

SEQ ID NO: 348927 - DNA, 25 bp, Artificial
  Probe
cttccaccttctaatccatggggca

SEQ ID NO: 348928 - DNA, 25 bp, Artificial
  Probe
tcaaggcccaactgctgctcaagta

SEQ ID NO: 348929 - DNA, 25 bp, Artificial
  Probe
gcagggcagccctgaaagtcaacac

SEQ ID NO: 348930 - DNA, 25 bp, Artificial
  Probe
ggcccaactgctgctcaagtaggga

SEQ ID NO: 348931 - DNA, 25 bp, Artificial
  Probe
tctttgggcgaaagccgagaactcc

SEQ ID NO: 348932 - DNA, 25 bp, Artificial
  Probe
cagccctgaaagtcaacacagattc

SEQ ID NO: 348933 - DNA, 25 bp, Artificial
  Probe
gatctttgggcgaaagccgagaact

SEQ ID NO: 348934 - DNA, 25 bp, Artificial
  Probe
ttccaccttctaatccatggggcac

SEQ ID NO: 348935 - DNA, 25 bp, Artificial
  Probe
aaagccgagaactcctgactattaa

SEQ ID NO: 348936 - DNA, 25 bp, Artificial
  Probe
tagttctgatctttgggcgaaagcc

SEQ ID NO: 348937 - DNA, 25 bp, Artificial
  Probe
cgagaactcctgactattaagatat

SEQ ID NO: 348938 - DNA, 25 bp, Artificial
  Probe
gaaagccgagaactcctgactatta

SEQ ID NO: 348939 - DNA, 25 bp, Artificial
  Probe
agggaggcttccagcctcagagccc

SEQ ID NO: 348940 - DNA, 25 bp, Artificial
  Probe
gcccaactgctgctcaagtagggag

SEQ ID NO: 348941 - DNA, 25 bp, Artificial
  Probe
aggcttccagcctcagagcccaggt

SEQ ID NO: 348942 - DNA, 25 bp, Artificial
  Probe
aaagtcaacacagattctttctcgg

SEQ ID NO: 348943 - DNA, 25 bp, Artificial
  Probe
tcttccaccttctaatccatggggc

SEQ ID NO: 348944 - DNA, 25 bp, Artificial
  Probe
actgctgctcaagtagggaggcttc

SEQ ID NO: 348945 - DNA, 25 bp, Artificial
  Probe
gcttcaaggcccaactgctgctcaa

SEQ ID NO: 348946 - DNA, 25 bp, Artificial
  Probe
gccatggcttcaaggcccaactgct

SEQ ID NO: 348947 - DNA, 25 bp, Artificial
  Probe
ggcttccagcctcagagcccaggtt

SEQ ID NO: 348948 - DNA, 25 bp, Artificial
  Probe
tgcagtagttctgatctttgggcga

SEQ ID NO: 348949 - DNA, 25 bp, Artificial
  Probe
gccctgaaagtcaacacagattctt

SEQ ID NO: 348950 - DNA, 25 bp, Artificial
  Probe
agggcagccctgaaagtcaacacag

SEQ ID NO: 348951 - DNA, 25 bp, Artificial
  Probe
cacaggcagctttctagaagtttct

SEQ ID NO: 348952 - DNA, 25 bp, Artificial
  Probe
acacaggcagctttctagaagtttc

SEQ ID NO: 348953 - DNA, 25 bp, Artificial
  Probe
cggccatggcttcaaggcccaactg

SEQ ID NO: 348954 - DNA, 25 bp, Artificial
  Probe
agttctgatctttgggcgaaagccg

SEQ ID NO: 348955 - DNA, 25 bp, Artificial
  Probe
ttcaaggcccaactgctgctcaagt

SEQ ID NO: 348956 - DNA, 25 bp, Artificial
  Probe
gcgaaagccgagaactcctgactat

SEQ ID NO: 348957 - DNA, 25 bp, Artificial
  Probe
caactgctgctcaagtagggaggct

SEQ ID NO: 348958 - DNA, 25 bp, Artificial
  Probe
cagggcagccctgaaagtcaacaca

SEQ ID NO: 348959 - DNA, 25 bp, Artificial
  Probe
caattcccagttctaattgaatggc

SEQ ID NO: 348960 - DNA, 25 bp, Artificial
  Probe
cagaggcctgaaaattctggggata

SEQ ID NO: 348961 - DNA, 25 bp, Artificial
  Probe
aaacttcagacagatgttcgttgaa

SEQ ID NO: 348962 - DNA, 25 bp, Artificial
  Probe
gatggaaacatttctgcccaagata

SEQ ID NO: 348963 - DNA, 25 bp, Artificial
  Probe
taagccgcagtgtcgtttatgaaag

SEQ ID NO: 348964 - DNA, 25 bp, Artificial
  Probe
cacctgaactcaagggatggaaaca

SEQ ID NO: 348965 - DNA, 25 bp, Artificial
  Probe
ctcaaagatgttttcttgctagaag

SEQ ID NO: 348966 - DNA, 25 bp, Artificial
  Probe
tcccctgctcggttgataactatct

SEQ ID NO: 348967 - DNA, 25 bp, Artificial
  Probe
ggatcaagacactttatgcttatat

SEQ ID NO: 348968 - DNA, 25 bp, Artificial
  Probe
ctatcatatgtactcccctgctcgg

SEQ ID NO: 348969 - DNA, 25 bp, Artificial
  Probe
aaggctatagccttgtattttgttc

SEQ ID NO: 348970 - DNA, 25 bp, Artificial
  Probe
ttctttcttaggaaacaaagagact

SEQ ID NO: 348971 - DNA, 25 bp, Artificial
  Probe
ggttgataactatctcgataactca

SEQ ID NO: 348972 - DNA, 25 bp, Artificial
  Probe
gatgaacctgatcactgttcccaat

SEQ ID NO: 348973 - DNA, 25 bp, Artificial
  Probe
gcttcaagttaattctttcttagga

SEQ ID NO: 348974 - DNA, 25 bp, Artificial
  Probe
tcttgcaaagtgcagtatgaaactc

SEQ ID NO: 348975 - DNA, 25 bp, Artificial
  Probe
gttcgttgaatctatcatatgtact

SEQ ID NO: 348976 - DNA, 25 bp, Artificial
  Probe
atcatagcacaaccatagtgcatag

SEQ ID NO: 348977 - DNA, 25 bp, Artificial
  Probe
aagacctcgttgcttctattttctg

SEQ ID NO: 348978 - DNA, 25 bp, Artificial
  Probe
gcccaagatatctttggaattaaag

SEQ ID NO: 348979 - DNA, 25 bp, Artificial
  Probe
ttaataagccgcagtgtcgtttatg

SEQ ID NO: 348980 - DNA, 25 bp, Artificial
  Probe
tctctgggagatgactcttcaatcc

SEQ ID NO: 348981 - DNA, 25 bp, Artificial
  Probe
caactcaaagatgttttcttgctag

SEQ ID NO: 348982 - DNA, 25 bp, Artificial
  Probe
gtctcatatattcaagacctcgttg

SEQ ID NO: 348983 - DNA, 25 bp, Artificial
  Probe
tccctagagtctgagagggcaggat

SEQ ID NO: 348984 - DNA, 25 bp, Artificial
  Probe
gactttgctaaacaaacatgtgaaa

SEQ ID NO: 348985 - DNA, 25 bp, Artificial
  Probe
taaagtgaacccacctgaactcaag

SEQ ID NO: 348986 - DNA, 25 bp, Artificial
  Probe
taggatcaagacactttatgcttat

SEQ ID NO: 348987 - DNA, 25 bp, Artificial
  Probe
ctccccagcagttgggaagtgattc

SEQ ID NO: 348988 - DNA, 25 bp, Artificial
  Probe
tatcatatgtactcccctgctcggt

SEQ ID NO: 348989 - DNA, 25 bp, Artificial
  Probe
caggatgaacctgatcactgttccc

SEQ ID NO: 348990 - DNA, 25 bp, Artificial
  Probe
ttatgtagaagtcacatctggcttc

SEQ ID NO: 348991 - DNA, 25 bp, Artificial
  Probe
tactgactagcatcagtccctatag

SEQ ID NO: 348992 - DNA, 25 bp, Artificial
  Probe
catggagctgtaggatcaagacact

SEQ ID NO: 348993 - DNA, 25 bp, Artificial
  Probe
ctttcttaggaaacaaagagacttg

SEQ ID NO: 348994 - DNA, 25 bp, Artificial
  Probe
gccaaaatcatctaaggactttgct

SEQ ID NO: 348995 - DNA, 25 bp, Artificial
  Probe
ggttgattttcctcctttctctagc

SEQ ID NO: 348996 - DNA, 25 bp, Artificial
  Probe
taagaggccaaaatcatctaaggac

SEQ ID NO: 348997 - DNA, 25 bp, Artificial
  Probe
gatattagtccataagtgatcaact

SEQ ID NO: 348998 - DNA, 25 bp, Artificial
  Probe
gtcacatctggcttcaagttaattc

SEQ ID NO: 348999 - DNA, 25 bp, Artificial
  Probe
atatgttttgcgagtgcatcatgca

SEQ ID NO: 349000 - DNA, 25 bp, Artificial
  Probe
gcagagtctcatatattcaagacct

SEQ ID NO: 349001 - DNA, 25 bp, Artificial
  Probe
taatctctgggagatgactcttcaa

SEQ ID NO: 349002 - DNA, 25 bp, Artificial
  Probe
caatctccccagcagttgggaagtg

SEQ ID NO: 349003 - DNA, 25 bp, Artificial
  Probe
caaccatagtgcatagtttgaaaat

SEQ ID NO: 349004 - DNA, 25 bp, Artificial
  Probe
ctaaggactttgctaaacaaacatg

SEQ ID NO: 349005 - DNA, 25 bp, Artificial
  Probe
agatccaggagttcaaggaggcctt

SEQ ID NO: 349006 - DNA, 25 bp, Artificial
  Probe
cccagatccaggagttcaaggaggc

SEQ ID NO: 349007 - DNA, 25 bp, Artificial
  Probe
tctccatgtttgagcagacccagat

SEQ ID NO: 349008 - DNA, 25 bp, Artificial
  Probe
ccaacgtgttctccatgtttgagca

SEQ ID NO: 349009 - DNA, 25 bp, Artificial
  Probe
acccagatccaggagttcaaggagg

SEQ ID NO: 349010 - DNA, 25 bp, Artificial
  Probe
agacccagatccaggagttcaagga

SEQ ID NO: 349011 - DNA, 25 bp, Artificial
  Probe
gaagctccaacgtgttctccatgtt

SEQ ID NO: 349012 - DNA, 25 bp, Artificial
  Probe
gggcggaagctccaacgtgttctcc

SEQ ID NO: 349013 - DNA, 25 bp, Artificial
  Probe
ttctccatgtttgagcagacccaga

SEQ ID NO: 349014 - DNA, 25 bp, Artificial
  Probe
gacccagatccaggagttcaaggag

SEQ ID NO: 349015 - DNA, 25 bp, Artificial
  Probe
cgtgttctccatgtttgagcagacc

SEQ ID NO: 349016 - DNA, 25 bp, Artificial
  Probe
agcctcagacaccatgtcaccaaag

SEQ ID NO: 349017 - DNA, 25 bp, Artificial
  Probe
tcagacaccatgtcaccaaagaaag

SEQ ID NO: 349018 - DNA, 25 bp, Artificial
  Probe
agcagacccagatccaggagttcaa

SEQ ID NO: 349019 - DNA, 25 bp, Artificial
  Probe
ctccaacgtgttctccatgtttgag

SEQ ID NO: 349020 - DNA, 25 bp, Artificial
  Probe
catgtttgagcagacccagatccag

SEQ ID NO: 349021 - DNA, 25 bp, Artificial
  Probe
tccaacgtgttctccatgtttgagc

SEQ ID NO: 349022 - DNA, 25 bp, Artificial
  Probe
tgagcagacccagatccaggagttc

SEQ ID NO: 349023 - DNA, 25 bp, Artificial
  Probe
cagacaccatgtcaccaaagaaagc

SEQ ID NO: 349024 - DNA, 25 bp, Artificial
  Probe
gcagacccagatccaggagttcaag

SEQ ID NO: 349025 - DNA, 25 bp, Artificial
  Probe
gatccaggagttcaaggaggccttc

SEQ ID NO: 349026 - DNA, 25 bp, Artificial
  Probe
atccaggagttcaaggaggccttca

SEQ ID NO: 349027 - DNA, 25 bp, Artificial
  Probe
tgttctccatgtttgagcagaccca

SEQ ID NO: 349028 - DNA, 25 bp, Artificial
  Probe
gtcaccaaagaaagccaagaagagg

SEQ ID NO: 349029 - DNA, 25 bp, Artificial
  Probe
cagacccagatccaggagttcaagg

SEQ ID NO: 349030 - DNA, 25 bp, Artificial
  Probe
gagcagacccagatccaggagttca

SEQ ID NO: 349031 - DNA, 25 bp, Artificial
  Probe
tgtcaccaaagaaagccaagaagag

SEQ ID NO: 349032 - DNA, 25 bp, Artificial
  Probe
gcggaagctccaacgtgttctccat

SEQ ID NO: 349033 - DNA, 25 bp, Artificial
  Probe
agggcggaagctccaacgtgttctc

SEQ ID NO: 349034 - DNA, 25 bp, Artificial
  Probe
atgtttgagcagacccagatccagg

SEQ ID NO: 349035 - DNA, 25 bp, Artificial
  Probe
cagatccaggagttcaaggaggcct

SEQ ID NO: 349036 - DNA, 25 bp, Artificial
  Probe
cggaagctccaacgtgttctccatg

SEQ ID NO: 349037 - DNA, 25 bp, Artificial
  Probe
aagctccaacgtgttctccatgttt

SEQ ID NO: 349038 - DNA, 25 bp, Artificial
  Probe
gacaccatgtcaccaaagaaagcca

SEQ ID NO: 349039 - DNA, 25 bp, Artificial
  Probe
agctccaacgtgttctccatgtttg

SEQ ID NO: 349040 - DNA, 25 bp, Artificial
  Probe
ttgagcagacccagatccaggagtt

SEQ ID NO: 349041 - DNA, 25 bp, Artificial
  Probe
catgtcaccaaagaaagccaagaag

SEQ ID NO: 349042 - DNA, 25 bp, Artificial
  Probe
ctccatgtttgagcagacccagatc

SEQ ID NO: 349043 - DNA, 25 bp, Artificial
  Probe
gttctccatgtttgagcagacccag

SEQ ID NO: 349044 - DNA, 25 bp, Artificial
  Probe
gctccaacgtgttctccatgtttga

SEQ ID NO: 349045 - DNA, 25 bp, Artificial
  Probe
ggcggaagctccaacgtgttctcca

SEQ ID NO: 349046 - DNA, 25 bp, Artificial
  Probe
agacaccatgtcaccaaagaaagcc

SEQ ID NO: 349047 - DNA, 25 bp, Artificial
  Probe
gtgttctccatgtttgagcagaccc

SEQ ID NO: 349048 - DNA, 25 bp, Artificial
  Probe
gcctcagacaccatgtcaccaaaga

SEQ ID NO: 349049 - DNA, 25 bp, Artificial
  Probe
ccatgtcaccaaagaaagccaagaa

SEQ ID NO: 349050 - DNA, 25 bp, Artificial
  Probe
ccatgtttgagcagacccagatcca

SEQ ID NO: 349051 - DNA, 25 bp, Artificial
  Probe
gaatggcgaattcagcctggatgat

SEQ ID NO: 349052 - DNA, 25 bp, Artificial
  Probe
gcttcactacccatcggtgttcatt

SEQ ID NO: 349053 - DNA, 25 bp, Artificial
  Probe
accattgcttcactacccatcggtg

SEQ ID NO: 349054 - DNA, 25 bp, Artificial
  Probe
caaaggtgccatcattggactcatg

SEQ ID NO: 349055 - DNA, 25 bp, Artificial
  Probe
tgcggagttcggacatgattcaggc

SEQ ID NO: 349056 - DNA, 25 bp, Artificial
  Probe
tgtcatagcaacagtgattgtcatc

SEQ ID NO: 349057 - DNA, 25 bp, Artificial
  Probe
gttcaaacaaaggtgccatcattgg

SEQ ID NO: 349058 - DNA, 25 bp, Artificial
  Probe
cgccatcaaaaactggtgttctttg

SEQ ID NO: 349059 - DNA, 25 bp, Artificial
  Probe
ttcaaacaaaggtgccatcattgga

SEQ ID NO: 349060 - DNA, 25 bp, Artificial
  Probe
ccagccaatacagaaaatgaagttg

SEQ ID NO: 349061 - DNA, 25 bp, Artificial
  Probe
tggatgcggagttcggacatgattc

SEQ ID NO: 349062 - DNA, 25 bp, Artificial
  Probe
aggactgaccactcgaccagggtct

SEQ ID NO: 349063 - DNA, 25 bp, Artificial
  Probe
tgtgccagccaatacagaaaatgaa

SEQ ID NO: 349064 - DNA, 25 bp, Artificial
  Probe
tgaacttgacagcaaaaccattgct

SEQ ID NO: 349065 - DNA, 25 bp, Artificial
  Probe
tgccatcattggactcatggtgggt

SEQ ID NO: 349066 - DNA, 25 bp, Artificial
  Probe
tctgtgccagccaatacagaaaatg

SEQ ID NO: 349067 - DNA, 25 bp, Artificial
  Probe
actcgaccagggtctgggttgacaa

SEQ ID NO: 349068 - DNA, 25 bp, Artificial
  Probe
tcgaccagggtctgggttgacaaac

SEQ ID NO: 349069 - DNA, 25 bp, Artificial
  Probe
ccagggtctgggttgacaaacatca

SEQ ID NO: 349070 - DNA, 25 bp, Artificial
  Probe
ggactctgtgccagccaatacagaa

SEQ ID NO: 349071 - DNA, 25 bp, Artificial
  Probe
ggttcaaacaaaggtgccatcattg

SEQ ID NO: 349072 - DNA, 25 bp, Artificial
  Probe
gttgtcatagcaacagtgattgtca

SEQ ID NO: 349073 - DNA, 25 bp, Artificial
  Probe
gctgaccgaggactgaccactcgac

SEQ ID NO: 349074 - DNA, 25 bp, Artificial
  Probe
aggttgacgctgctgtgaccccgga

SEQ ID NO: 349075 - DNA, 25 bp, Artificial
  Probe
ccatcaaaaactggtgttctttgca

SEQ ID NO: 349076 - DNA, 25 bp, Artificial
  Probe
ggagttcggacatgattcaggcttc

SEQ ID NO: 349077 - DNA, 25 bp, Artificial
  Probe
accgaggactgaccactcgaccagg

SEQ ID NO: 349078 - DNA, 25 bp, Artificial
  Probe
ttgacgctgctgtgaccccggagga

SEQ ID NO: 349079 - DNA, 25 bp, Artificial
  Probe
gagaatccaacatacaagttctttg

SEQ ID NO: 349080 - DNA, 25 bp, Artificial
  Probe
tgaagttgagcctgtcgacgcccgc

SEQ ID NO: 349081 - DNA, 25 bp, Artificial
  Probe
tgaccactcgaccagggtctgggtt

SEQ ID NO: 349082 - DNA, 25 bp, Artificial
  Probe
gtccgccatcaaaaactggtgttct

SEQ ID NO: 349083 - DNA, 25 bp, Artificial
  Probe
tgaccgaggactgaccactcgacca

SEQ ID NO: 349084 - DNA, 25 bp, Artificial
  Probe
aatggcgaattcagcctggatgatc

SEQ ID NO: 349085 - DNA, 25 bp, Artificial
  Probe
cattgcttcactacccatcggtgtt

SEQ ID NO: 349086 - DNA, 25 bp, Artificial
  Probe
gagttcggacatgattcaggcttcg

SEQ ID NO: 349087 - DNA, 25 bp, Artificial
  Probe
cagtacacatccatccatcatggcg

SEQ ID NO: 349088 - DNA, 25 bp, Artificial
  Probe
agtccgccatcaaaaactggtgttc

SEQ ID NO: 349089 - DNA, 25 bp, Artificial
  Probe
ggtggcgttgtcatagcaacagtga

SEQ ID NO: 349090 - DNA, 25 bp, Artificial
  Probe
gaccactcgaccagggtctgggttg

SEQ ID NO: 349091 - DNA, 25 bp, Artificial
  Probe
gaacttgacagcaaaaccattgctt

SEQ ID NO: 349092 - DNA, 25 bp, Artificial
  Probe
cgctgctgaccgaggactgaccact

SEQ ID NO: 349093 - DNA, 25 bp, Artificial
  Probe
gaatccaacatacaagttctttgag

SEQ ID NO: 349094 - DNA, 25 bp, Artificial
  Probe
tggcgttgtcatagcaacagtgatt

SEQ ID NO: 349095 - DNA, 25 bp, Artificial
  Probe
cacatccatccatcatggcgtggtg

SEQ ID NO: 349096 - DNA, 25 bp, Artificial
  Probe
aggtgccatcattggactcatggtg

SEQ ID NO: 349097 - DNA, 25 bp, Artificial
  Probe
tacgcaaaatcaagcagggcctggg

SEQ ID NO: 349098 - DNA, 25 bp, Artificial
  Probe
ctatagcctacaaaagtggtcatcg

SEQ ID NO: 349099 - DNA, 25 bp, Artificial
  Probe
cctatagcctacaaaagtggtcatc

SEQ ID NO: 349100 - DNA, 25 bp, Artificial
  Probe
cttcaagggccaggtgtacatcctt

SEQ ID NO: 349101 - DNA, 25 bp, Artificial
  Probe
cctggtcccctatagcctacaaaag

SEQ ID NO: 349102 - DNA, 25 bp, Artificial
  Probe
gcaaaatcaagcagggcctgggcct

SEQ ID NO: 349103 - DNA, 25 bp, Artificial
  Probe
ccaggctccagcattaattgttgtg

SEQ ID NO: 349104 - DNA, 25 bp, Artificial
  Probe
agggcctgggcctcaaattcgcaga

SEQ ID NO: 349105 - DNA, 25 bp, Artificial
  Probe
ggctccagcattaattgttgtgata

SEQ ID NO: 349106 - DNA, 25 bp, Artificial
  Probe
caagggccaggtgtacatccttggc

SEQ ID NO: 349107 - DNA, 25 bp, Artificial
  Probe
atagcctacaaaagtggtcatcgaa

SEQ ID NO: 349108 - DNA, 25 bp, Artificial
  Probe
agagctggtgagcatgaacgtacag

SEQ ID NO: 349109 - DNA, 25 bp, Artificial
  Probe
ctctcccaggctccagcattaattg

SEQ ID NO: 349110 - DNA, 25 bp, Artificial
  Probe
gcctacaaaagtggtcatcgaaggg

SEQ ID NO: 349111 - DNA, 25 bp, Artificial
  Probe
ccaggtgtacatccttggccgggag

SEQ ID NO: 349112 - DNA, 25 bp, Artificial
  Probe
ctcccaggctccagcattaattgtt

SEQ ID NO: 349113 - DNA, 25 bp, Artificial
  Probe
tgggcctcaaattcgcagagctcgt

SEQ ID NO: 349114 - DNA, 25 bp, Artificial
  Probe
ctggcacagccctgaatgtgaattt

SEQ ID NO: 349115 - DNA, 25 bp, Artificial
  Probe
tggcacagccctgaatgtgaatttg

SEQ ID NO: 349116 - DNA, 25 bp, Artificial
  Probe
gctccagcattaattgttgtgataa

SEQ ID NO: 349117 - DNA, 25 bp, Artificial
  Probe
cctacaaaagtggtcatcgaaggga

SEQ ID NO: 349118 - DNA, 25 bp, Artificial
  Probe
ctccagcattaattgttgtgataaa

SEQ ID NO: 349119 - DNA, 25 bp, Artificial
  Probe
tcaagcagggcctgggcctcaaatt

SEQ ID NO: 349120 - DNA, 25 bp, Artificial
  Probe
tcccaggctccagcattaattgttg

SEQ ID NO: 349121 - DNA, 25 bp, Artificial
  Probe
agcctacaaaagtggtcatcgaagg

SEQ ID NO: 349122 - DNA, 25 bp, Artificial
  Probe
gcctgggcctcaaattcgcagagct

SEQ ID NO: 349123 - DNA, 25 bp, Artificial
  Probe
ttcaagggccaggtgtacatccttg

SEQ ID NO: 349124 - DNA, 25 bp, Artificial
  Probe
acgcaaaatcaagcagggcctgggc

SEQ ID NO: 349125 - DNA, 25 bp, Artificial
  Probe
tctcccaggctccagcattaattgt

SEQ ID NO: 349126 - DNA, 25 bp, Artificial
  Probe
tcccctatagcctacaaaagtggtc

SEQ ID NO: 349127 - DNA, 25 bp, Artificial
  Probe
caatgaagagctggtgagcatgaac

SEQ ID NO: 349128 - DNA, 25 bp, Artificial
  Probe
actatacaatgaagagctggtgagc

SEQ ID NO: 349129 - DNA, 25 bp, Artificial
  Probe
aggtgtacatccttggccgggagtc

SEQ ID NO: 349130 - DNA, 25 bp, Artificial
  Probe
tcttcaagggccaggtgtacatcct

SEQ ID NO: 349131 - DNA, 25 bp, Artificial
  Probe
ggtgtacatccttggccgggagtct

SEQ ID NO: 349132 - DNA, 25 bp, Artificial
  Probe
ctggtcccctatagcctacaaaagt

SEQ ID NO: 349133 - DNA, 25 bp, Artificial
  Probe
cccaggctccagcattaattgttgt

SEQ ID NO: 349134 - DNA, 25 bp, Artificial
  Probe
atgaacccattgatgccaccggctt

SEQ ID NO: 349135 - DNA, 25 bp, Artificial
  Probe
cctgggcctcaaattcgcagagctc

SEQ ID NO: 349136 - DNA, 25 bp, Artificial
  Probe
cccctatagcctacaaaagtggtca

SEQ ID NO: 349137 - DNA, 25 bp, Artificial
  Probe
gctctcccaggctccagcattaatt

SEQ ID NO: 349138 - DNA, 25 bp, Artificial
  Probe
cgcaaaatcaagcagggcctgggcc

SEQ ID NO: 349139 - DNA, 25 bp, Artificial
  Probe
ggcctgggcctcaaattcgcagagc

SEQ ID NO: 349140 - DNA, 25 bp, Artificial
  Probe
gccaggtgtacatccttggccggga

SEQ ID NO: 349141 - DNA, 25 bp, Artificial
  Probe
ctgggcctcaaattcgcagagctcg

SEQ ID NO: 349142 - DNA, 25 bp, Artificial
  Probe
caggctccagcattaattgttgtga

SEQ ID NO: 349143 - DNA, 25 bp, Artificial
  Probe
gggcacagacctttttgctttttgt

SEQ ID NO: 349144 - DNA, 25 bp, Artificial
  Probe
actctggatatgaactgagacccat

SEQ ID NO: 349145 - DNA, 25 bp, Artificial
  Probe
gcctttatctgtacccacagtgaac

SEQ ID NO: 349146 - DNA, 25 bp, Artificial
  Probe
tttgtttcttctcgaccagaagcca

SEQ ID NO: 349147 - DNA, 25 bp, Artificial
  Probe
gagcccccaaagaagagagagagag

SEQ ID NO: 349148 - DNA, 25 bp, Artificial
  Probe
ggtctctttggcagcctgactctgg

SEQ ID NO: 349149 - DNA, 25 bp, Artificial
  Probe
atgtggaaggccactccggacatac

SEQ ID NO: 349150 - DNA, 25 bp, Artificial
  Probe
gatttaatacttgcttagtgccttt

SEQ ID NO: 349151 - DNA, 25 bp, Artificial
  Probe
ctgaagaaactcagccaattgattt

SEQ ID NO: 349152 - DNA, 25 bp, Artificial
  Probe
tggacatgaaccataaactggttct

SEQ ID NO: 349153 - DNA, 25 bp, Artificial
  Probe
tctttggcagcctgactctggatat

SEQ ID NO: 349154 - DNA, 25 bp, Artificial
  Probe
atctttgaagtggacatgaaccata

SEQ ID NO: 349155 - DNA, 25 bp, Artificial
  Probe
catggtttcttggtgcattcttagg

SEQ ID NO: 349156 - DNA, 25 bp, Artificial
  Probe
atatgaactgagacccatctttgaa

SEQ ID NO: 349157 - DNA, 25 bp, Artificial
  Probe
gaagtctatagagacttcggccctc

SEQ ID NO: 349158 - DNA, 25 bp, Artificial
  Probe
ggacatgaaccataaactggttcta

SEQ ID NO: 349159 - DNA, 25 bp, Artificial
  Probe
tcgcagtcatgatttgaagtctata

SEQ ID NO: 349160 - DNA, 25 bp, Artificial
  Probe
gaactgagacccatctttgaagtgg

SEQ ID NO: 349161 - DNA, 25 bp, Artificial
  Probe
gaaccataaactggttctattctgt

SEQ ID NO: 349162 - DNA, 25 bp, Artificial
  Probe
catccagagcagagccgatttcttt

SEQ ID NO: 349163 - DNA, 25 bp, Artificial
  Probe
attgatttaatacttgcttagtgcc

SEQ ID NO: 349164 - DNA, 25 bp, Artificial
  Probe
gttggggcacagacctttttgcttt

SEQ ID NO: 349165 - DNA, 25 bp, Artificial
  Probe
aatacttgcttagtgcctttatctg

SEQ ID NO: 349166 - DNA, 25 bp, Artificial
  Probe
ttcttttcgcagtcatgatttgaag

SEQ ID NO: 349167 - DNA, 25 bp, Artificial
  Probe
actgcagaaaagtgcctccataact

SEQ ID NO: 349168 - DNA, 25 bp, Artificial
  Probe
tgaaccataaactggttctattctg

SEQ ID NO: 349169 - DNA, 25 bp, Artificial
  Probe
cactgtctcacttcaccactgtgag

SEQ ID NO: 349170 - DNA, 25 bp, Artificial
  Probe
aactcagctgggaagttatttaaca

SEQ ID NO: 349171 - DNA, 25 bp, Artificial
  Probe
tgtggaaggccactccggacataca

SEQ ID NO: 349172 - DNA, 25 bp, Artificial
  Probe
tgtttcttctcgaccagaagccaag

SEQ ID NO: 349173 - DNA, 25 bp, Artificial
  Probe
cctgaggctccctgaagaaactcag

SEQ ID NO: 349174 - DNA, 25 bp, Artificial
  Probe
gtctctcttggctgtctactggact

SEQ ID NO: 349175 - DNA, 25 bp, Artificial
  Probe
actcagctgggaagttatttaacag

SEQ ID NO: 349176 - DNA, 25 bp, Artificial
  Probe
aggccactccggacatacaaagctt

SEQ ID NO: 349177 - DNA, 25 bp, Artificial
  Probe
cataaactggttctattctgttttg

SEQ ID NO: 349178 - DNA, 25 bp, Artificial
  Probe
ccacagtgaactgcagaaaagtgcc

SEQ ID NO: 349179 - DNA, 25 bp, Artificial
  Probe
tcaccactgtgagaagacctctcca

SEQ ID NO: 349180 - DNA, 25 bp, Artificial
  Probe
aagtgataacgctgacctcttcatg

SEQ ID NO: 349181 - DNA, 25 bp, Artificial
  Probe
cgaccagaagccaagagaaatgttt

SEQ ID NO: 349182 - DNA, 25 bp, Artificial
  Probe
gaaagcaggtgctgtctctcttggc

SEQ ID NO: 349183 - DNA, 25 bp, Artificial
  Probe
cagaaaagtgcctccataactcagc

SEQ ID NO: 349184 - DNA, 25 bp, Artificial
  Probe
aagtctatagagacttcggccctcc

SEQ ID NO: 349185 - DNA, 25 bp, Artificial
  Probe
ttatctgtacccacagtgaactgca

SEQ ID NO: 349186 - DNA, 25 bp, Artificial
  Probe
gatatgaactgagacccatctttga

SEQ ID NO: 349187 - DNA, 25 bp, Artificial
  Probe
ctcagagcccccaaagaagagagag

SEQ ID NO: 349188 - DNA, 25 bp, Artificial
  Probe
tttttgggaatgtggaaggccactc

SEQ ID NO: 349189 - DNA, 25 bp, Artificial
  Probe
cacaggacctagtacagtgctacat

SEQ ID NO: 349190 - DNA, 25 bp, Artificial
  Probe
gtcatgctaatgttgtttatatcac

SEQ ID NO: 349191 - DNA, 25 bp, Artificial
  Probe
gtttatatcactcctttttgtgaag

SEQ ID NO: 349192 - DNA, 25 bp, Artificial
  Probe
acaggacctagtacagtgctacatc

SEQ ID NO: 349193 - DNA, 25 bp, Artificial
  Probe
taccaaaatatgtgactatgtcatg

SEQ ID NO: 349194 - DNA, 25 bp, Artificial
  Probe
aagcacaggacctagtacagtgcta

SEQ ID NO: 349195 - DNA, 25 bp, Artificial
  Probe
tgtgctggtttgaatgcatgctcta

SEQ ID NO: 349196 - DNA, 25 bp, Artificial
  Probe
ctcctttttgtgaagataaatgcat

SEQ ID NO: 349197 - DNA, 25 bp, Artificial
  Probe
aggacctagtacagtgctacatcac

SEQ ID NO: 349198 - DNA, 25 bp, Artificial
  Probe
gacctagtacagtgctacatcactg

SEQ ID NO: 349199 - DNA, 25 bp, Artificial
  Probe
agtaagcacaggacctagtacagtg

SEQ ID NO: 349200 - DNA, 25 bp, Artificial
  Probe
ggacctagtacagtgctacatcact

SEQ ID NO: 349201 - DNA, 25 bp, Artificial
  Probe
gcatgctctatggagtaagcacagg

SEQ ID NO: 349202 - DNA, 25 bp, Artificial
  Probe
tcactcctttttgtgaagataaatg

SEQ ID NO: 349203 - DNA, 25 bp, Artificial
  Probe
tagtacagtgctacatcactgatct

SEQ ID NO: 349204 - DNA, 25 bp, Artificial
  Probe
atctgtgctggtttgaatgcatgct

SEQ ID NO: 349205 - DNA, 25 bp, Artificial
  Probe
tatctgtgctggtttgaatgcatgc

SEQ ID NO: 349206 - DNA, 25 bp, Artificial
  Probe
tctgtgctggtttgaatgcatgctc

SEQ ID NO: 349207 - DNA, 25 bp, Artificial
  Probe
atgcatgctctatggagtaagcaca

SEQ ID NO: 349208 - DNA, 25 bp, Artificial
  Probe
catgctctatggagtaagcacagga

SEQ ID NO: 349209 - DNA, 25 bp, Artificial
  Probe
tgctctatggagtaagcacaggacc

SEQ ID NO: 349210 - DNA, 25 bp, Artificial
  Probe
ggagtaagcacaggacctagtacag

SEQ ID NO: 349211 - DNA, 25 bp, Artificial
  Probe
ctgtgctggtttgaatgcatgctct

SEQ ID NO: 349212 - DNA, 25 bp, Artificial
  Probe
atgctctatggagtaagcacaggac

SEQ ID NO: 349213 - DNA, 25 bp, Artificial
  Probe
agcacaggacctagtacagtgctac

SEQ ID NO: 349214 - DNA, 25 bp, Artificial
  Probe
actcctttttgtgaagataaatgca

SEQ ID NO: 349215 - DNA, 25 bp, Artificial
  Probe
aatgcatgctctatggagtaagcac

SEQ ID NO: 349216 - DNA, 25 bp, Artificial
  Probe
caggacctagtacagtgctacatca

SEQ ID NO: 349217 - DNA, 25 bp, Artificial
  Probe
acctagtacagtgctacatcactga

SEQ ID NO: 349218 - DNA, 25 bp, Artificial
  Probe
taagcacaggacctagtacagtgct

SEQ ID NO: 349219 - DNA, 25 bp, Artificial
  Probe
tgcatgctctatggagtaagcacag

SEQ ID NO: 349220 - DNA, 25 bp, Artificial
  Probe
gagtaagcacaggacctagtacagt

SEQ ID NO: 349221 - DNA, 25 bp, Artificial
  Probe
gcacaggacctagtacagtgctaca

SEQ ID NO: 349222 - DNA, 25 bp, Artificial
  Probe
tgaatgcatgctctatggagtaagc

SEQ ID NO: 349223 - DNA, 25 bp, Artificial
  Probe
ctctatggagtaagcacaggaccta

SEQ ID NO: 349224 - DNA, 25 bp, Artificial
  Probe
cactcctttttgtgaagataaatgc

SEQ ID NO: 349225 - DNA, 25 bp, Artificial
  Probe
cctagtacagtgctacatcactgat

SEQ ID NO: 349226 - DNA, 25 bp, Artificial
  Probe
agtacagtgctacatcactgatctt

SEQ ID NO: 349227 - DNA, 25 bp, Artificial
  Probe
ctagtacagtgctacatcactgatc

SEQ ID NO: 349228 - DNA, 25 bp, Artificial
  Probe
gaatgcatgctctatggagtaagca

SEQ ID NO: 349229 - DNA, 25 bp, Artificial
  Probe
gtaagcacaggacctagtacagtgc

SEQ ID NO: 349230 - DNA, 25 bp, Artificial
  Probe
gtacagtgctacatcactgatcttt

SEQ ID NO: 349231 - DNA, 25 bp, Artificial
  Probe
ttcagaacaaacagtcctggccaca

SEQ ID NO: 349232 - DNA, 25 bp, Artificial
  Probe
aactggagatccaagcttgggtgag

SEQ ID NO: 349233 - DNA, 25 bp, Artificial
  Probe
ctggcttcaaactggagatccaagc

SEQ ID NO: 349234 - DNA, 25 bp, Artificial
  Probe
agcaaccttctcaggggcccaggaa

SEQ ID NO: 349235 - DNA, 25 bp, Artificial
  Probe
aggaaccccaagcacagactgtaga

SEQ ID NO: 349236 - DNA, 25 bp, Artificial
  Probe
cagaacaaacagtcctggccacagt

SEQ ID NO: 349237 - DNA, 25 bp, Artificial
  Probe
gcttcaaactggagatccaagcttg

SEQ ID NO: 349238 - DNA, 25 bp, Artificial
  Probe
gtagaaaccgagactgggttcagaa

SEQ ID NO: 349239 - DNA, 25 bp, Artificial
  Probe
ctgtagaaaccgagactgggttcag

SEQ ID NO: 349240 - DNA, 25 bp, Artificial
  Probe
ctcccctacagacgatgagaagatc

SEQ ID NO: 349241 - DNA, 25 bp, Artificial
  Probe
attgacatggggtctatgtgcagcc

SEQ ID NO: 349242 - DNA, 25 bp, Artificial
  Probe
ccaagcacagactgtagaaaccgag

SEQ ID NO: 349243 - DNA, 25 bp, Artificial
  Probe
ccgagactgggttcagaacaaacag

SEQ ID NO: 349244 - DNA, 25 bp, Artificial
  Probe
tcaaactggagatccaagcttgggt

SEQ ID NO: 349245 - DNA, 25 bp, Artificial
  Probe
atggggtctatgtgcagcccaggct

SEQ ID NO: 349246 - DNA, 25 bp, Artificial
  Probe
caagcacagactgtagaaaccgaga

SEQ ID NO: 349247 - DNA, 25 bp, Artificial
  Probe
cctggccacagtgactgacgagagc

SEQ ID NO: 349248 - DNA, 25 bp, Artificial
  Probe
ggccacagtgactgacgagagctga

SEQ ID NO: 349249 - DNA, 25 bp, Artificial
  Probe
ttgacatggggtctatgtgcagccc

SEQ ID NO: 349250 - DNA, 25 bp, Artificial
  Probe
gctggcttcaaactggagatccaag

SEQ ID NO: 349251 - DNA, 25 bp, Artificial
  Probe
tgaggtcgactctagaggatcgatc

SEQ ID NO: 349252 - DNA, 25 bp, Artificial
  Probe
tagaaaccgagactgggttcagaac

SEQ ID NO: 349253 - DNA, 25 bp, Artificial
  Probe
cacagactgtagaaaccgagactgg

SEQ ID NO: 349254 - DNA, 25 bp, Artificial
  Probe
accgagactgggttcagaacaaaca

SEQ ID NO: 349255 - DNA, 25 bp, Artificial
  Probe
gtgaggtcgactctagaggatcgat

SEQ ID NO: 349256 - DNA, 25 bp, Artificial
  Probe
caggaaccccaagcacagactgtag

SEQ ID NO: 349257 - DNA, 25 bp, Artificial
  Probe
cccaagcacagactgtagaaaccga

SEQ ID NO: 349258 - DNA, 25 bp, Artificial
  Probe
acatggggtctatgtgcagcccagg

SEQ ID NO: 349259 - DNA, 25 bp, Artificial
  Probe
gtcctggccacagtgactgacgaga

SEQ ID NO: 349260 - DNA, 25 bp, Artificial
  Probe
cccctacagacgatgagaagatcct

SEQ ID NO: 349261 - DNA, 25 bp, Artificial
  Probe
agcacagactgtagaaaccgagact

SEQ ID NO: 349262 - DNA, 25 bp, Artificial
  Probe
aaactggagatccaagcttgggtga

SEQ ID NO: 349263 - DNA, 25 bp, Artificial
  Probe
tggcttcaaactggagatccaagct

SEQ ID NO: 349264 - DNA, 25 bp, Artificial
  Probe
agtgactgacgagagctgacgagcc

SEQ ID NO: 349265 - DNA, 25 bp, Artificial
  Probe
ttcaaactggagatccaagcttggg

SEQ ID NO: 349266 - DNA, 25 bp, Artificial
  Probe
cacagtgactgacgagagctgacga

SEQ ID NO: 349267 - DNA, 25 bp, Artificial
  Probe
acagtcctggccacagtgactgacg

SEQ ID NO: 349268 - DNA, 25 bp, Artificial
  Probe
actgacgagagctgacgagccccct

SEQ ID NO: 349269 - DNA, 25 bp, Artificial
  Probe
gaacaaacagtcctggccacagtga

SEQ ID NO: 349270 - DNA, 25 bp, Artificial
  Probe
ggttcagaacaaacagtcctggcca

SEQ ID NO: 349271 - DNA, 25 bp, Artificial
  Probe
gtgactgacgagagctgacgagccc

SEQ ID NO: 349272 - DNA, 25 bp, Artificial
  Probe
actctagaggatcgatccccgggcg

SEQ ID NO: 349273 - DNA, 25 bp, Artificial
  Probe
ggaaccccaagcacagactgtagaa

SEQ ID NO: 349274 - DNA, 25 bp, Artificial
  Probe
cagtgactgacgagagctgacgagc

SEQ ID NO: 349275 - DNA, 25 bp, Artificial
  Probe
cagtcctggccacagtgactgacga

SEQ ID NO: 349276 - DNA, 25 bp, Artificial
  Probe
gactctagaggatcgatccccgggc

SEQ ID NO: 349277 - DNA, 25 bp, Artificial
  Probe
gaagccaaaattctcaagcaatatg

SEQ ID NO: 349278 - DNA, 25 bp, Artificial
  Probe
gggactctgtcctcagtcaccctga

SEQ ID NO: 349279 - DNA, 25 bp, Artificial
  Probe
acccctgttgctgttaaaacgtgca

SEQ ID NO: 349280 - DNA, 25 bp, Artificial
  Probe
gtatcggatgtcagccccacagaac

SEQ ID NO: 349281 - DNA, 25 bp, Artificial
  Probe
tcggcatcctgctctgggagacttt

SEQ ID NO: 349282 - DNA, 25 bp, Artificial
  Probe
acctgcgggactctgtcctcagtca

SEQ ID NO: 349283 - DNA, 25 bp, Artificial
  Probe
ggtatcggatgtcagccccacagaa

SEQ ID NO: 349284 - DNA, 25 bp, Artificial
  Probe
atagtcctacccagggccgtattag

SEQ ID NO: 349285 - DNA, 25 bp, Artificial
  Probe
tgaaaaccgccctaagttcagtgac

SEQ ID NO: 349286 - DNA, 25 bp, Artificial
  Probe
tcctttctgaggaagaggaaggacg

SEQ ID NO: 349287 - DNA, 25 bp, Artificial
  Probe
tacaagcctgaaaaccgccctaagt

SEQ ID NO: 349288 - DNA, 25 bp, Artificial
  Probe
tctcaatcatgaagatgtttcattg

SEQ ID NO: 349289 - DNA, 25 bp, Artificial
  Probe
tcctattccaaaggataagaaatgg

SEQ ID NO: 349290 - DNA, 25 bp, Artificial
  Probe
cagttggtgaggttttccttggacg

SEQ ID NO: 349291 - DNA, 25 bp, Artificial
  Probe
cgatttgagggcaccggcttttcaa

SEQ ID NO: 349292 - DNA, 25 bp, Artificial
  Probe
agactttcagcctgggagtctgtcc

SEQ ID NO: 349293 - DNA, 25 bp, Artificial
  Probe
tttggtgaggtgtacaagggcacac

SEQ ID NO: 349294 - DNA, 25 bp, Artificial
  Probe
ataatctatatcgatttgagggcac

SEQ ID NO: 349295 - DNA, 25 bp, Artificial
  Probe
tgacaaaccagcaagcacgggaaca

SEQ ID NO: 349296 - DNA, 25 bp, Artificial
  Probe
gcactttatcatacagtttgttgat

SEQ ID NO: 349297 - DNA, 25 bp, Artificial
  Probe
ggagatacagctctgaaagtgacgt

SEQ ID NO: 349298 - DNA, 25 bp, Artificial
  Probe
cctttctgaggaagaggaaggacga

SEQ ID NO: 349299 - DNA, 25 bp, Artificial
  Probe
caagggcacactgaaggataaaacc

SEQ ID NO: 349300 - DNA, 25 bp, Artificial
  Probe
caggaagccaaaattctcaagcaat

SEQ ID NO: 349301 - DNA, 25 bp, Artificial
  Probe
agatacagctctgaaagtgacgtgt

SEQ ID NO: 349302 - DNA, 25 bp, Artificial
  Probe
gtgctgggattacaagcctgaaaac

SEQ ID NO: 349303 - DNA, 25 bp, Artificial
  Probe
tggacagcaccagaagcactgaatt

SEQ ID NO: 349304 - DNA, 25 bp, Artificial
  Probe
gcaagtcatcaccaagaagtcgggg

SEQ ID NO: 349305 - DNA, 25 bp, Artificial
  Probe
tggagtgtattcatcttctggctta

SEQ ID NO: 349306 - DNA, 25 bp, Artificial
  Probe
cctgctctgggagactttcagcctg

SEQ ID NO: 349307 - DNA, 25 bp, Artificial
  Probe
ttcagcctgggagtctgtccgtacc

SEQ ID NO: 349308 - DNA, 25 bp, Artificial
  Probe
ccagaagcactgaattatgggagat

SEQ ID NO: 349309 - DNA, 25 bp, Artificial
  Probe
ccttactgcaaccatctttgaaggt

SEQ ID NO: 349310 - DNA, 25 bp, Artificial
  Probe
gtgtacaagggcacactgaaggata

SEQ ID NO: 349311 - DNA, 25 bp, Artificial
  Probe
aaaccagcaagcacgggaacaagtg

SEQ ID NO: 349312 - DNA, 25 bp, Artificial
  Probe
ggcaagaactgcattcacagggacc

SEQ ID NO: 349313 - DNA, 25 bp, Artificial
  Probe
tacaaagcaagtcatcaccaagaag

SEQ ID NO: 349314 - DNA, 25 bp, Artificial
  Probe
gggtggttctgctgaatcctattcc

SEQ ID NO: 349315 - DNA, 25 bp, Artificial
  Probe
gggttctcaatcatgaagatgtttc

SEQ ID NO: 349316 - DNA, 25 bp, Artificial
  Probe
gttcagtgaccttcacaaagagctc

SEQ ID NO: 349317 - DNA, 25 bp, Artificial
  Probe
cccaatattgtcaaacttataggcg

SEQ ID NO: 349318 - DNA, 25 bp, Artificial
  Probe
ggcaccggcttttcaaatatccctc

SEQ ID NO: 349319 - DNA, 25 bp, Artificial
  Probe
gattttctgtcctttctgaggaaga

SEQ ID NO: 349320 - DNA, 25 bp, Artificial
  Probe
caaccatctttgaaggttatgtttt

SEQ ID NO: 349321 - DNA, 25 bp, Artificial
  Probe
agacctgcctcaggaactaaaaata

SEQ ID NO: 349322 - DNA, 25 bp, Artificial
  Probe
ttctggcttaaagcagattcccatt

SEQ ID NO: 349323 - DNA, 25 bp, Artificial
  Probe
cagagctcagcacagtggagtcggt

SEQ ID NO: 349324 - DNA, 25 bp, Artificial
  Probe
ctttgacaacccagtctaccagaag

SEQ ID NO: 349325 - DNA, 25 bp, Artificial
  Probe
agtccaaggtgacatggctggcaga

SEQ ID NO: 349326 - DNA, 25 bp, Artificial
  Probe
ttgtctggggacagaaaaggctact

SEQ ID NO: 349327 - DNA, 25 bp, Artificial
  Probe
gcacctctaggcagcctggggatac

SEQ ID NO: 349328 - DNA, 25 bp, Artificial
  Probe
gcctgtctgccctgggtcctgtttt

SEQ ID NO: 349329 - DNA, 25 bp, Artificial
  Probe
tgcactggtccttccacctcagtgg

SEQ ID NO: 349330 - DNA, 25 bp, Artificial
  Probe
gggataccccagagctcagcacagt

SEQ ID NO: 349331 - DNA, 25 bp, Artificial
  Probe
tggggataccccagagctcagcaca

SEQ ID NO: 349332 - DNA, 25 bp, Artificial
  Probe
cagaaaaggctactggccatgctcc

SEQ ID NO: 349333 - DNA, 25 bp, Artificial
  Probe
taccagaagaccacggaggacgaga

SEQ ID NO: 349334 - DNA, 25 bp, Artificial
  Probe
accacggaggacgagatccacattt

SEQ ID NO: 349335 - DNA, 25 bp, Artificial
  Probe
ccacccttaggcaggaaggacgctt

SEQ ID NO: 349336 - DNA, 25 bp, Artificial
  Probe
gagatccacatttgccgcagccagg

SEQ ID NO: 349337 - DNA, 25 bp, Artificial
  Probe
gtctgccctgggtcctgttttatat

SEQ ID NO: 349338 - DNA, 25 bp, Artificial
  Probe
aggaaggacgctttctcacacctcc

SEQ ID NO: 349339 - DNA, 25 bp, Artificial
  Probe
gtcttcggagccatcctcctgtgga

SEQ ID NO: 349340 - DNA, 25 bp, Artificial
  Probe
cactggtggccctccttgtcttcgg

SEQ ID NO: 349341 - DNA, 25 bp, Artificial
  Probe
ccattgcactggtggccctccttgt

SEQ ID NO: 349342 - DNA, 25 bp, Artificial
  Probe
actggcggctgaggaacattaacag

SEQ ID NO: 349343 - DNA, 25 bp, Artificial
  Probe
ccgcagccaggatggctatacctac

SEQ ID NO: 349344 - DNA, 25 bp, Artificial
  Probe
cagtggagtcggtgacagtgtcctc

SEQ ID NO: 349345 - DNA, 25 bp, Artificial
  Probe
tggccctccttgtcttcggagccat

SEQ ID NO: 349346 - DNA, 25 bp, Artificial
  Probe
aggggagccatctctttccgggatc

SEQ ID NO: 349347 - DNA, 25 bp, Artificial
  Probe
tcagcacagtggagtcggtgacagt

SEQ ID NO: 349348 - DNA, 25 bp, Artificial
  Probe
gagccatctctttccgggatccgct

SEQ ID NO: 349349 - DNA, 25 bp, Artificial
  Probe
tttgccgcagccaggatggctatac

SEQ ID NO: 349350 - DNA, 25 bp, Artificial
  Probe
ccgctgccacccttaggcaggaagg

SEQ ID NO: 349351 - DNA, 25 bp, Artificial
  Probe
cagtgtcctcccaagtccaaggtga

SEQ ID NO: 349352 - DNA, 25 bp, Artificial
  Probe
tcctcctgtggaggaactggcggct

SEQ ID NO: 349353 - DNA, 25 bp, Artificial
  Probe
ccttaggcaggaaggacgctttctc

SEQ ID NO: 349354 - DNA, 25 bp, Artificial
  Probe
gaggacgagatccacatttgccgca

SEQ ID NO: 349355 - DNA, 25 bp, Artificial
  Probe
ttgctcaaagcaagataagagcaaa

SEQ ID NO: 349356 - DNA, 25 bp, Artificial
  Probe
accccagagctcagcacagtggagt

SEQ ID NO: 349357 - DNA, 25 bp, Artificial
  Probe
accagcacctctaggcagcctgggg

SEQ ID NO: 349358 - DNA, 25 bp, Artificial
  Probe
aggctactggccatgctccagatgg

SEQ ID NO: 349359 - DNA, 25 bp, Artificial
  Probe
ctacccctcgagacagatggtcagc

SEQ ID NO: 349360 - DNA, 25 bp, Artificial
  Probe
attgtctggggacagaaaaggctac

SEQ ID NO: 349361 - DNA, 25 bp, Artificial
  Probe
gtgacagtgtcctcccaagtccaag

SEQ ID NO: 349362 - DNA, 25 bp, Artificial
  Probe
ggaactggcggctgaggaacattaa

SEQ ID NO: 349363 - DNA, 25 bp, Artificial
  Probe
agctcagcggcctgtctgccctggg

SEQ ID NO: 349364 - DNA, 25 bp, Artificial
  Probe
tggggccaagctcagcggcctgtct

SEQ ID NO: 349365 - DNA, 25 bp, Artificial
  Probe
tggggttcttgtccatcttcctccc

SEQ ID NO: 349366 - DNA, 25 bp, Artificial
  Probe
tgtggggttcttgtccatcttcctc

SEQ ID NO: 349367 - DNA, 25 bp, Artificial
  Probe
cctcgagacagatggtcagcctgga

SEQ ID NO: 349368 - DNA, 25 bp, Artificial
  Probe
cacatttgccgcagccaggatggct

SEQ ID NO: 349369 - DNA, 25 bp, Artificial
  Probe
cgtccactggagatcctaaggcagc

SEQ ID NO: 349370 - DNA, 25 bp, Artificial
  Probe
ggtcccacgtccactggagatccta

SEQ ID NO: 349371 - DNA, 25 bp, Artificial
  Probe
gcagcatgcctcccaagaagcctga

SEQ ID NO: 349372 - DNA, 25 bp, Artificial
  Probe
ctggagatcctaaggcagcatgcct

SEQ ID NO: 349373 - DNA, 25 bp, Artificial
  Probe
ccactggagatcctaaggcagcatg

SEQ ID NO: 349374 - DNA, 25 bp, Artificial
  Probe
ttttaggtcccacgtccactggaga

SEQ ID NO: 349375 - DNA, 25 bp, Artificial
  Probe
actggagatcctaaggcagcatgcc

SEQ ID NO: 349376 - DNA, 25 bp, Artificial
  Probe
agatcctaaggcagcatgcctccca

SEQ ID NO: 349377 - DNA, 25 bp, Artificial
  Probe
cctaaggcagcatgcctcccaagaa

SEQ ID NO: 349378 - DNA, 25 bp, Artificial
  Probe
ggagatcctaaggcagcatgcctcc

SEQ ID NO: 349379 - DNA, 25 bp, Artificial
  Probe
agcatgcctcccaagaagcctgagc

SEQ ID NO: 349380 - DNA, 25 bp, Artificial
  Probe
tccactggagatcctaaggcagcat

SEQ ID NO: 349381 - DNA, 25 bp, Artificial
  Probe
tcctaaggcagcatgcctcccaaga

SEQ ID NO: 349382 - DNA, 25 bp, Artificial
  Probe
cagcatgcctcccaagaagcctgag

SEQ ID NO: 349383 - DNA, 25 bp, Artificial
  Probe
aaggcagcatgcctcccaagaagcc

SEQ ID NO: 349384 - DNA, 25 bp, Artificial
  Probe
tttttaggtcccacgtccactggag

SEQ ID NO: 349385 - DNA, 25 bp, Artificial
  Probe
cccacgtccactggagatcctaagg

SEQ ID NO: 349386 - DNA, 25 bp, Artificial
  Probe
ttaggtcccacgtccactggagatc

SEQ ID NO: 349387 - DNA, 25 bp, Artificial
  Probe
gatcctaaggcagcatgcctcccaa

SEQ ID NO: 349388 - DNA, 25 bp, Artificial
  Probe
aggcagcatgcctcccaagaagcct

SEQ ID NO: 349389 - DNA, 25 bp, Artificial
  Probe
tcccacgtccactggagatcctaag

SEQ ID NO: 349390 - DNA, 25 bp, Artificial
  Probe
aggtcccacgtccactggagatcct

SEQ ID NO: 349391 - DNA, 25 bp, Artificial
  Probe
acgtccactggagatcctaaggcag

SEQ ID NO: 349392 - DNA, 25 bp, Artificial
  Probe
taaggcagcatgcctcccaagaagc

SEQ ID NO: 349393 - DNA, 25 bp, Artificial
  Probe
cactggagatcctaaggcagcatgc

SEQ ID NO: 349394 - DNA, 25 bp, Artificial
  Probe
atcctaaggcagcatgcctcccaag

SEQ ID NO: 349395 - DNA, 25 bp, Artificial
  Probe
taggtcccacgtccactggagatcc

SEQ ID NO: 349396 - DNA, 25 bp, Artificial
  Probe
gagatcctaaggcagcatgcctccc

SEQ ID NO: 349397 - DNA, 25 bp, Artificial
  Probe
tttaggtcccacgtccactggagat

SEQ ID NO: 349398 - DNA, 25 bp, Artificial
  Probe
gcatgcctcccaagaagcctgagcc

SEQ ID NO: 349399 - DNA, 25 bp, Artificial
  Probe
tggagatcctaaggcagcatgcctc

SEQ ID NO: 349400 - DNA, 25 bp, Artificial
  Probe
ctaaggcagcatgcctcccaagaag

SEQ ID NO: 349401 - DNA, 25 bp, Artificial
  Probe
gtccactggagatcctaaggcagca

SEQ ID NO: 349402 - DNA, 25 bp, Artificial
  Probe
cacgtccactggagatcctaaggca

SEQ ID NO: 349403 - DNA, 25 bp, Artificial
  Probe
ccacgtccactggagatcctaaggc

SEQ ID NO: 349404 - DNA, 25 bp, Artificial
  Probe
gtcccacgtccactggagatcctaa

SEQ ID NO: 349405 - DNA, 25 bp, Artificial
  Probe
ggcagcatgcctcccaagaagcctg

SEQ ID NO: 349406 - DNA, 25 bp, Artificial
  Probe
tcaacataactctcctcgaaaggag

SEQ ID NO: 349407 - DNA, 25 bp, Artificial
  Probe
gtcaacctttggtgcctttcaacat

SEQ ID NO: 349408 - DNA, 25 bp, Artificial
  Probe
tcagggtccttcctgctcctaactg

SEQ ID NO: 349409 - DNA, 25 bp, Artificial
  Probe
caccaggcacgaaccagcagctgta

SEQ ID NO: 349410 - DNA, 25 bp, Artificial
  Probe
gaaagcaatgcttcagcttctacag

SEQ ID NO: 349411 - DNA, 25 bp, Artificial
  Probe
agctcgccagccagcctgaggtaag

SEQ ID NO: 349412 - DNA, 25 bp, Artificial
  Probe
accttatgttagtatgttgccttta

SEQ ID NO: 349413 - DNA, 25 bp, Artificial
  Probe
gagcccaacaatgctatgcaaggca

SEQ ID NO: 349414 - DNA, 25 bp, Artificial
  Probe
agcaagacaccctttcacctgtgtg

SEQ ID NO: 349415 - DNA, 25 bp, Artificial
  Probe
tgctcagcaatagttctttgggggt

SEQ ID NO: 349416 - DNA, 25 bp, Artificial
  Probe
gtcctagcaggacagctctttgtag

SEQ ID NO: 349417 - DNA, 25 bp, Artificial
  Probe
gacttccctggtcacagctagcgtc

SEQ ID NO: 349418 - DNA, 25 bp, Artificial
  Probe
caaactctgaggagacgaagagagg

SEQ ID NO: 349419 - DNA, 25 bp, Artificial
  Probe
agaagaagttcctgaagaggcggct

SEQ ID NO: 349420 - DNA, 25 bp, Artificial
  Probe
tcaatcttaaagaaagctcgccagc

SEQ ID NO: 349421 - DNA, 25 bp, Artificial
  Probe
ccctgcacaatgaccctttagctgt

SEQ ID NO: 349422 - DNA, 25 bp, Artificial
  Probe
gcagagcaaaccaacgctcagttgc

SEQ ID NO: 349423 - DNA, 25 bp, Artificial
  Probe
ccatcagaggtagtgggacagaaaa

SEQ ID NO: 349424 - DNA, 25 bp, Artificial
  Probe
gcaagggttcaacctcacttttagc

SEQ ID NO: 349425 - DNA, 25 bp, Artificial
  Probe
gaagcagcaaacttcctcagcaacc

SEQ ID NO: 349426 - DNA, 25 bp, Artificial
  Probe
ctttcacctgtgtccgcttcaggac

SEQ ID NO: 349427 - DNA, 25 bp, Artificial
  Probe
ggtcctttcacatgtttgcaatatt

SEQ ID NO: 349428 - DNA, 25 bp, Artificial
  Probe
agtactccatcctgcaaacatttgg

SEQ ID NO: 349429 - DNA, 25 bp, Artificial
  Probe
tcctaactgccatttctttgtcagg

SEQ ID NO: 349430 - DNA, 25 bp, Artificial
  Probe
tttttgcaacctaattttagcaagg

SEQ ID NO: 349431 - DNA, 25 bp, Artificial
  Probe
gggtgagctcaactttctttggcag

SEQ ID NO: 349432 - DNA, 25 bp, Artificial
  Probe
ctgagcagagtgacagcagagagaa

SEQ ID NO: 349433 - DNA, 25 bp, Artificial
  Probe
ggaagtgctcagcaatagttctttg

SEQ ID NO: 349434 - DNA, 25 bp, Artificial
  Probe
gacagctctttgtaggcataaattt

SEQ ID NO: 349435 - DNA, 25 bp, Artificial
  Probe
accattacatgcacgttgttagtga

SEQ ID NO: 349436 - DNA, 25 bp, Artificial
  Probe
cttttaaggctggatgaggctcagc

SEQ ID NO: 349437 - DNA, 25 bp, Artificial
  Probe
cctgtgtgccccagcaaaacatcat

SEQ ID NO: 349438 - DNA, 25 bp, Artificial
  Probe
accacccatcagaggtagtgggaca

SEQ ID NO: 349439 - DNA, 25 bp, Artificial
  Probe
aggtaaggctgtggaagcagcaaac

SEQ ID NO: 349440 - DNA, 25 bp, Artificial
  Probe
gctcaactttctttggcagcataac

SEQ ID NO: 349441 - DNA, 25 bp, Artificial
  Probe
gacagatccctctgatcatccagta

SEQ ID NO: 349442 - DNA, 25 bp, Artificial
  Probe
gaagttcctgaagaggcggctttta

SEQ ID NO: 349443 - DNA, 25 bp, Artificial
  Probe
cctgcaaacatttgggcaggaaatg

SEQ ID NO: 349444 - DNA, 25 bp, Artificial
  Probe
cattacatgcacgttgttagtgaag

SEQ ID NO: 349445 - DNA, 25 bp, Artificial
  Probe
tggagagtcattctacttcagcagt

SEQ ID NO: 349446 - DNA, 25 bp, Artificial
  Probe
aacaccaaataagactcagaagttg

SEQ ID NO: 349447 - DNA, 25 bp, Artificial
  Probe
ctctgcctggagtagtgctagaggt

SEQ ID NO: 349448 - DNA, 25 bp, Artificial
  Probe
gaggctcagcggaagcttgccaaat

SEQ ID NO: 349449 - DNA, 25 bp, Artificial
  Probe
attgggagacagatccctctgatca

SEQ ID NO: 349450 - DNA, 25 bp, Artificial
  Probe
tactaccaggagtgcggaaggaaca

SEQ ID NO: 349451 - DNA, 25 bp, Artificial
  Probe
cagcaacctcacaagtagttcttag

SEQ ID NO: 349452 - DNA, 25 bp, Artificial
  Probe
cgttttggaggcttgaccaaggtct

SEQ ID NO: 349453 - DNA, 25 bp, Artificial
  Probe
agcgagacccaaagacatattcaca

SEQ ID NO: 349454 - DNA, 25 bp, Artificial
  Probe
ggaggcttgaccaaggtctgatagc

SEQ ID NO: 349455 - DNA, 25 bp, Artificial
  Probe
gagccctggtttgaacacgttttgg

SEQ ID NO: 349456 - DNA, 25 bp, Artificial
  Probe
gtctgatagcgagacccaaagacat

SEQ ID NO: 349457 - DNA, 25 bp, Artificial
  Probe
gcgagacccaaagacatattcacac

SEQ ID NO: 349458 - DNA, 25 bp, Artificial
  Probe
ttttggaggcttgaccaaggtctga

SEQ ID NO: 349459 - DNA, 25 bp, Artificial
  Probe
tggagccctggtttgaacacgtttt

SEQ ID NO: 349460 - DNA, 25 bp, Artificial
  Probe
tgcaactaatgactcttcatttggc

SEQ ID NO: 349461 - DNA, 25 bp, Artificial
  Probe
ctggtttgaacacgttttggaggct

SEQ ID NO: 349462 - DNA, 25 bp, Artificial
  Probe
tacacagtctggagccctggtttga

SEQ ID NO: 349463 - DNA, 25 bp, Artificial
  Probe
tgaccaaggtctgatagcgagaccc

SEQ ID NO: 349464 - DNA, 25 bp, Artificial
  Probe
ctacacagtctggagccctggtttg

SEQ ID NO: 349465 - DNA, 25 bp, Artificial
  Probe
cttgaccaaggtctgatagcgagac

SEQ ID NO: 349466 - DNA, 25 bp, Artificial
  Probe
aggcttgaccaaggtctgatagcga

SEQ ID NO: 349467 - DNA, 25 bp, Artificial
  Probe
gaacacgttttggaggcttgaccaa

SEQ ID NO: 349468 - DNA, 25 bp, Artificial
  Probe
tttgaacacgttttggaggcttgac

SEQ ID NO: 349469 - DNA, 25 bp, Artificial
  Probe
tctggagccctggtttgaacacgtt

SEQ ID NO: 349470 - DNA, 25 bp, Artificial
  Probe
atgcaactaatgactcttcatttgg

SEQ ID NO: 349471 - DNA, 25 bp, Artificial
  Probe
ggcttgaccaaggtctgatagcgag

SEQ ID NO: 349472 - DNA, 25 bp, Artificial
  Probe
atagcgagacccaaagacatattca

SEQ ID NO: 349473 - DNA, 25 bp, Artificial
  Probe
gcttgaccaaggtctgatagcgaga

SEQ ID NO: 349474 - DNA, 25 bp, Artificial
  Probe
tctgatagcgagacccaaagacata

SEQ ID NO: 349475 - DNA, 25 bp, Artificial
  Probe
gaccaaggtctgatagcgagaccca

SEQ ID NO: 349476 - DNA, 25 bp, Artificial
  Probe
gtctggagccctggtttgaacacgt

SEQ ID NO: 349477 - DNA, 25 bp, Artificial
  Probe
ggagccctggtttgaacacgttttg

SEQ ID NO: 349478 - DNA, 25 bp, Artificial
  Probe
tagcgagacccaaagacatattcac

SEQ ID NO: 349479 - DNA, 25 bp, Artificial
  Probe
gcaactaatgactcttcatttggca

SEQ ID NO: 349480 - DNA, 25 bp, Artificial
  Probe
tggaggcttgaccaaggtctgatag

SEQ ID NO: 349481 - DNA, 25 bp, Artificial
  Probe
tcttcatttggcaataaggtcggta

SEQ ID NO: 349482 - DNA, 25 bp, Artificial
  Probe
gttttggaggcttgaccaaggtctg

SEQ ID NO: 349483 - DNA, 25 bp, Artificial
  Probe
ctggagccctggtttgaacacgttt

SEQ ID NO: 349484 - DNA, 25 bp, Artificial
  Probe
gcacttccatgtcctaacttatgag

SEQ ID NO: 349485 - DNA, 25 bp, Artificial
  Probe
agtctggagccctggtttgaacacg

SEQ ID NO: 349486 - DNA, 25 bp, Artificial
  Probe
tttggaggcttgaccaaggtctgat

SEQ ID NO: 349487 - DNA, 25 bp, Artificial
  Probe
gccctggtttgaacacgttttggag

SEQ ID NO: 349488 - DNA, 25 bp, Artificial
  Probe
accaaggtctgatagcgagacccaa

SEQ ID NO: 349489 - DNA, 25 bp, Artificial
  Probe
atgactcttcatttggcaataaggt

SEQ ID NO: 349490 - DNA, 25 bp, Artificial
  Probe
taatgactcttcatttggcaataag

SEQ ID NO: 349491 - DNA, 25 bp, Artificial
  Probe
aatgactcttcatttggcaataagg

SEQ ID NO: 349492 - DNA, 25 bp, Artificial
  Probe
ttgaacacgttttggaggcttgacc

SEQ ID NO: 349493 - DNA, 25 bp, Artificial
  Probe
ggtctgatagcgagacccaaagaca

SEQ ID NO: 349494 - DNA, 25 bp, Artificial
  Probe
ttcttttatagagaagctgcaccgt

SEQ ID NO: 349495 - DNA, 25 bp, Artificial
  Probe
aacacgttttggaggcttgaccaag

SEQ ID NO: 349496 - DNA, 25 bp, Artificial
  Probe
tgaacacgttttggaggcttgacca

SEQ ID NO: 349497 - DNA, 25 bp, Artificial
  Probe
cttcatttggcaataaggtcggtag

SEQ ID NO: 349498 - DNA, 25 bp, Artificial
  Probe
tccacagcctctgctctggtggcat

SEQ ID NO: 349499 - DNA, 25 bp, Artificial
  Probe
cctctgctctggtggcataaatgct

SEQ ID NO: 349500 - DNA, 25 bp, Artificial
  Probe
atgagtcatccacagcctctgctct

SEQ ID NO: 349501 - DNA, 25 bp, Artificial
  Probe
tgctctggtggcataaatgctgttg

SEQ ID NO: 349502 - DNA, 25 bp, Artificial
  Probe
cacccaactggaaatatgagtcatc

SEQ ID NO: 349503 - DNA, 25 bp, Artificial
  Probe
acagcctctgctctggtggcataaa

SEQ ID NO: 349504 - DNA, 25 bp, Artificial
  Probe
agcctctgctctggtggcataaatg

SEQ ID NO: 349505 - DNA, 25 bp, Artificial
  Probe
cacagcctctgctctggtggcataa

SEQ ID NO: 349506 - DNA, 25 bp, Artificial
  Probe
cagcctctgctctggtggcataaat

SEQ ID NO: 349507 - DNA, 25 bp, Artificial
  Probe
atccacagcctctgctctggtggca

SEQ ID NO: 349508 - DNA, 25 bp, Artificial
  Probe
acccaactggaaatatgagtcatcc

SEQ ID NO: 349509 - DNA, 25 bp, Artificial
  Probe
gctctggtggcataaatgctgttgc

SEQ ID NO: 349510 - DNA, 25 bp, Artificial
  Probe
ctctggtggcataaatgctgttgcg

SEQ ID NO: 349511 - DNA, 25 bp, Artificial
  Probe
atatgagtcatccacagcctctgct

SEQ ID NO: 349512 - DNA, 25 bp, Artificial
  Probe
tgagtcatccacagcctctgctctg

SEQ ID NO: 349513 - DNA, 25 bp, Artificial
  Probe
gaaatatgagtcatccacagcctct

SEQ ID NO: 349514 - DNA, 25 bp, Artificial
  Probe
acacaagcaataaaatcactttggg

SEQ ID NO: 349515 - DNA, 25 bp, Artificial
  Probe
acaagcaataaaatcactttgggtt

SEQ ID NO: 349516 - DNA, 25 bp, Artificial
  Probe
caagcaataaaatcactttgggtta

SEQ ID NO: 349517 - DNA, 25 bp, Artificial
  Probe
cataaatgctgttgcgtacacaagc

SEQ ID NO: 349518 - DNA, 25 bp, Artificial
  Probe
ctgttgcgtacacaagcaataaaat

SEQ ID NO: 349519 - DNA, 25 bp, Artificial
  Probe
gttgcgtacacaagcaataaaatca

SEQ ID NO: 349520 - DNA, 25 bp, Artificial
  Probe
tatgagtcatccacagcctctgctc

SEQ ID NO: 349521 - DNA, 25 bp, Artificial
  Probe
atgctgttgcgtacacaagcaataa

SEQ ID NO: 349522 - DNA, 25 bp, Artificial
  Probe
aatgctgttgcgtacacaagcaata

SEQ ID NO: 349523 - DNA, 25 bp, Artificial
  Probe
ggcataaatgctgttgcgtacacaa

SEQ ID NO: 349524 - DNA, 25 bp, Artificial
  Probe
ccacagcctctgctctggtggcata

SEQ ID NO: 349525 - DNA, 25 bp, Artificial
  Probe
cacaagcaataaaatcactttgggt

SEQ ID NO: 349526 - DNA, 25 bp, Artificial
  Probe
tcatccacagcctctgctctggtgg

SEQ ID NO: 349527 - DNA, 25 bp, Artificial
  Probe
tggcataaatgctgttgcgtacaca

SEQ ID NO: 349528 - DNA, 25 bp, Artificial
  Probe
tgctgttgcgtacacaagcaataaa

SEQ ID NO: 349529 - DNA, 25 bp, Artificial
  Probe
aatatgagtcatccacagcctctgc

SEQ ID NO: 349530 - DNA, 25 bp, Artificial
  Probe
gctgttgcgtacacaagcaataaaa

SEQ ID NO: 349531 - DNA, 25 bp, Artificial
  Probe
tgttgcgtacacaagcaataaaatc

SEQ ID NO: 349532 - DNA, 25 bp, Artificial
  Probe
gcctctgctctggtggcataaatgc

SEQ ID NO: 349533 - DNA, 25 bp, Artificial
  Probe
gcataaatgctgttgcgtacacaag

SEQ ID NO: 349534 - DNA, 25 bp, Artificial
  Probe
ctgtccctacagagccagagcagtt

SEQ ID NO: 349535 - DNA, 25 bp, Artificial
  Probe
gcgggagccaatatccttgaagtga

SEQ ID NO: 349536 - DNA, 25 bp, Artificial
  Probe
cgggagccaatatccttgaagtgat

SEQ ID NO: 349537 - DNA, 25 bp, Artificial
  Probe
gttagcaaccagcatttctctggtg

SEQ ID NO: 349538 - DNA, 25 bp, Artificial
  Probe
aaccagcatttctctggtgcagatg

SEQ ID NO: 349539 - DNA, 25 bp, Artificial
  Probe
ctgcaattcttctgtccctacagag

SEQ ID NO: 349540 - DNA, 25 bp, Artificial
  Probe
gcaaccagcatttctctggtgcaga

SEQ ID NO: 349541 - DNA, 25 bp, Artificial
  Probe
ggttagcaaccagcatttctctggt

SEQ ID NO: 349542 - DNA, 25 bp, Artificial
  Probe
accagttgtgaaataccctagcttc

SEQ ID NO: 349543 - DNA, 25 bp, Artificial
  Probe
gaaataccctagcttctgataacgg

SEQ ID NO: 349544 - DNA, 25 bp, Artificial
  Probe
cagacaaaaggcagccttctccaac

SEQ ID NO: 349545 - DNA, 25 bp, Artificial
  Probe
cccctggttagcaaccagcatttct

SEQ ID NO: 349546 - DNA, 25 bp, Artificial
  Probe
agcatttctctggtgcagatggctc

SEQ ID NO: 349547 - DNA, 25 bp, Artificial
  Probe
tggttagcaaccagcatttctctgg

SEQ ID NO: 349548 - DNA, 25 bp, Artificial
  Probe
tacagagccagagcagttagcaccc

SEQ ID NO: 349549 - DNA, 25 bp, Artificial
  Probe
tcttctgtccctacagagccagagc

SEQ ID NO: 349550 - DNA, 25 bp, Artificial
  Probe
caaccagcatttctctggtgcagat

SEQ ID NO: 349551 - DNA, 25 bp, Artificial
  Probe
tctgtccctacagagccagagcagt

SEQ ID NO: 349552 - DNA, 25 bp, Artificial
  Probe
accctagcttctgataacggaatga

SEQ ID NO: 349553 - DNA, 25 bp, Artificial
  Probe
tgtgaaataccctagcttctgataa

SEQ ID NO: 349554 - DNA, 25 bp, Artificial
  Probe
gtgaaataccctagcttctgataac

SEQ ID NO: 349555 - DNA, 25 bp, Artificial
  Probe
agcaaccagcatttctctggtgcag

SEQ ID NO: 349556 - DNA, 25 bp, Artificial
  Probe
aataccctagcttctgataacggaa

SEQ ID NO: 349557 - DNA, 25 bp, Artificial
  Probe
gcaattcttctgtccctacagagcc

SEQ ID NO: 349558 - DNA, 25 bp, Artificial
  Probe
acagagccagagcagttagcacccc

SEQ ID NO: 349559 - DNA, 25 bp, Artificial
  Probe
ctggccttgggaacagacaaaaggc

SEQ ID NO: 349560 - DNA, 25 bp, Artificial
  Probe
taccctagcttctgataacggaatg

SEQ ID NO: 349561 - DNA, 25 bp, Artificial
  Probe
ttcttctgtccctacagagccagag

SEQ ID NO: 349562 - DNA, 25 bp, Artificial
  Probe
gcatttctctggtgcagatggctcc

SEQ ID NO: 349563 - DNA, 25 bp, Artificial
  Probe
ctagcttctgataacggaatgagtt

SEQ ID NO: 349564 - DNA, 25 bp, Artificial
  Probe
cagcatttctctggtgcagatggct

SEQ ID NO: 349565 - DNA, 25 bp, Artificial
  Probe
ctacagagccagagcagttagcacc

SEQ ID NO: 349566 - DNA, 25 bp, Artificial
  Probe
atttctctggtgcagatggctcctg

SEQ ID NO: 349567 - DNA, 25 bp, Artificial
  Probe
cctacagagccagagcagttagcac

SEQ ID NO: 349568 - DNA, 25 bp, Artificial
  Probe
gggagccaatatccttgaagtgatg

SEQ ID NO: 349569 - DNA, 25 bp, Artificial
  Probe
ttagcaaccagcatttctctggtgc

SEQ ID NO: 349570 - DNA, 25 bp, Artificial
  Probe
cctagcttctgataacggaatgagt

SEQ ID NO: 349571 - DNA, 25 bp, Artificial
  Probe
ccctacagagccagagcagttagca

SEQ ID NO: 349572 - DNA, 25 bp, Artificial
  Probe
gctggccttgggaacagacaaaagg

SEQ ID NO: 349573 - DNA, 25 bp, Artificial
  Probe
gctcctacagtgacacaggagagtg

SEQ ID NO: 349574 - DNA, 25 bp, Artificial
  Probe
tcccctggttagcaaccagcatttc

SEQ ID NO: 349575 - DNA, 25 bp, Artificial
  Probe
ctggttagcaaccagcatttctctg

SEQ ID NO: 349576 - DNA, 25 bp, Artificial
  Probe
ctcccctggttagcaaccagcattt

SEQ ID NO: 349577 - DNA, 25 bp, Artificial
  Probe
tgcaattcttctgtccctacagagc

SEQ ID NO: 349578 - DNA, 25 bp, Artificial
  Probe
catttctctggtgcagatggctcct

SEQ ID NO: 349579 - DNA, 25 bp, Artificial
  Probe
ccagcatttctctggtgcagatggc

SEQ ID NO: 349580 - DNA, 25 bp, Artificial
  Probe
ccacccgattgctgccaagggcagg

SEQ ID NO: 349581 - DNA, 25 bp, Artificial
  Probe
gcagtggctctcacaaaaccgcatc

SEQ ID NO: 349582 - DNA, 25 bp, Artificial
  Probe
ctgcagtggctctcacaaaaccgca

SEQ ID NO: 349583 - DNA, 25 bp, Artificial
  Probe
acacacacggctgaaccgagtggcc

SEQ ID NO: 349584 - DNA, 25 bp, Artificial
  Probe
tgcatcacccttgtaccctgcagtg

SEQ ID NO: 349585 - DNA, 25 bp, Artificial
  Probe
gggcctcaggtcaccctgaaccagt

SEQ ID NO: 349586 - DNA, 25 bp, Artificial
  Probe
ggctacgatgcatcacccttgtacc

SEQ ID NO: 349587 - DNA, 25 bp, Artificial
  Probe
cctgttgctgtgtcctggtccttct

SEQ ID NO: 349588 - DNA, 25 bp, Artificial
  Probe
cggctgaaccgagtggccctgctct

SEQ ID NO: 349589 - DNA, 25 bp, Artificial
  Probe
tgactcttgggctacgatgcatcac

SEQ ID NO: 349590 - DNA, 25 bp, Artificial
  Probe
ccgattgctgccaagggcaggttgc

SEQ ID NO: 349591 - DNA, 25 bp, Artificial
  Probe
attcggacacacacggctgaaccga

SEQ ID NO: 349592 - DNA, 25 bp, Artificial
  Probe
aggtcaccctgaaccagtcccttgg

SEQ ID NO: 349593 - DNA, 25 bp, Artificial
  Probe
tgaaccagtcccttggccacttaag

SEQ ID NO: 349594 - DNA, 25 bp, Artificial
  Probe
gcctcttgtcctgttgctgtgtcct

SEQ ID NO: 349595 - DNA, 25 bp, Artificial
  Probe
gacacacacggctgaaccgagtggc

SEQ ID NO: 349596 - DNA, 25 bp, Artificial
  Probe
gcggtgcatggctgttgctcctgtt

SEQ ID NO: 349597 - DNA, 25 bp, Artificial
  Probe
cttgtaccctgcagtggctctcaca

SEQ ID NO: 349598 - DNA, 25 bp, Artificial
  Probe
cggtgcatggctgttgctcctgttg

SEQ ID NO: 349599 - DNA, 25 bp, Artificial
  Probe
gtcctgttgctgtgtcctggtcctt

SEQ ID NO: 349600 - DNA, 25 bp, Artificial
  Probe
tgggcctcaggtcaccctgaaccag

SEQ ID NO: 349601 - DNA, 25 bp, Artificial
  Probe
ctgctctgcctcttgtcctgttgct

SEQ ID NO: 349602 - DNA, 25 bp, Artificial
  Probe
gtcctggtccttcttcctgctctgg

SEQ ID NO: 349603 - DNA, 25 bp, Artificial
  Probe
taaattcggacacacacggctgaac

SEQ ID NO: 349604 - DNA, 25 bp, Artificial
  Probe
tgtcctggtccttcttcctgctctg

SEQ ID NO: 349605 - DNA, 25 bp, Artificial
  Probe
acggctgaaccgagtggccctgctc

SEQ ID NO: 349606 - DNA, 25 bp, Artificial
  Probe
tgtaccctgcagtggctctcacaaa

SEQ ID NO: 349607 - DNA, 25 bp, Artificial
  Probe
gaaccagtcccttggccacttaagc

SEQ ID NO: 349608 - DNA, 25 bp, Artificial
  Probe
gttgctgtgtcctggtccttcttcc

SEQ ID NO: 349609 - DNA, 25 bp, Artificial
  Probe
tggtccttcttcctgctctgggctc

SEQ ID NO: 349610 - DNA, 25 bp, Artificial
  Probe
ttttctccttgactcttgggctacg

SEQ ID NO: 349611 - DNA, 25 bp, Artificial
  Probe
tggcgctgggcctcaggtcaccctg

SEQ ID NO: 349612 - DNA, 25 bp, Artificial
  Probe
ggctgaaccgagtggccctgctctg

SEQ ID NO: 349613 - DNA, 25 bp, Artificial
  Probe
ccctgggttttctccttgactcttg

SEQ ID NO: 349614 - DNA, 25 bp, Artificial
  Probe
gggttttctccttgactcttgggct

SEQ ID NO: 349615 - DNA, 25 bp, Artificial
  Probe
caccctctttttatgatggtgtgtt

SEQ ID NO: 349616 - DNA, 25 bp, Artificial
  Probe
gcgctgggcctcaggtcaccctgaa

SEQ ID NO: 349617 - DNA, 25 bp, Artificial
  Probe
gttttctccttgactcttgggctac

SEQ ID NO: 349618 - DNA, 25 bp, Artificial
  Probe
gatgcatcacccttgtaccctgcag

SEQ ID NO: 349619 - DNA, 25 bp, Artificial
  Probe
agtggctctcacaaaaccgcatcct

SEQ ID NO: 349620 - DNA, 25 bp, Artificial
  Probe
gctctgcctcttgtcctgttgctgt

SEQ ID NO: 349621 - DNA, 25 bp, Artificial
  Probe
ttgtcctgttgctgtgtcctggtcc

SEQ ID NO: 349622 - DNA, 25 bp, Artificial
  Probe
acacacggctgaaccgagtggccct

SEQ ID NO: 349623 - DNA, 25 bp, Artificial
  Probe
tgggctacgatgcatcacccttgta

SEQ ID NO: 349624 - DNA, 25 bp, Artificial
  Probe
ggtccttcttcctgctctgggctct

SEQ ID NO: 349625 - DNA, 25 bp, Artificial
  Probe
ttcttcctgctctgggctctctcaa

SEQ ID NO: 349626 - DNA, 25 bp, Artificial
  Probe
tggatgtccctttccaagtggaatt

SEQ ID NO: 349627 - DNA, 25 bp, Artificial
  Probe
ggaattcccagcaccaaagaatgaa

SEQ ID NO: 349628 - DNA, 25 bp, Artificial
  Probe
gcagtggaccccaagtcacgtcagc

SEQ ID NO: 349629 - DNA, 25 bp, Artificial
  Probe
gtccctttccaagtggaattcccag

SEQ ID NO: 349630 - DNA, 25 bp, Artificial
  Probe
atgtgattaatggagccctggagtc

SEQ ID NO: 349631 - DNA, 25 bp, Artificial
  Probe
tgtcttccagtagtcgtgagcagtg

SEQ ID NO: 349632 - DNA, 25 bp, Artificial
  Probe
tggctaaacccgttggggtagatgt

SEQ ID NO: 349633 - DNA, 25 bp, Artificial
  Probe
tggaccccaagtcacgtcagcgtgg

SEQ ID NO: 349634 - DNA, 25 bp, Artificial
  Probe
agtcgtgagcagtggaccccaagtc

SEQ ID NO: 349635 - DNA, 25 bp, Artificial
  Probe
ggaacgtgcctgtggctaaacccgt

SEQ ID NO: 349636 - DNA, 25 bp, Artificial
  Probe
tgtgattaatggagccctggagtca

SEQ ID NO: 349637 - DNA, 25 bp, Artificial
  Probe
acctagggaacgtgcctgtggctaa

SEQ ID NO: 349638 - DNA, 25 bp, Artificial
  Probe
agtggaattcccagcaccaaagaat

SEQ ID NO: 349639 - DNA, 25 bp, Artificial
  Probe
tccaagtggaattcccagcaccaaa

SEQ ID NO: 349640 - DNA, 25 bp, Artificial
  Probe
ttaatggagccctggagtcagtcct

SEQ ID NO: 349641 - DNA, 25 bp, Artificial
  Probe
agccctggagtcagtcctgtcttcc

SEQ ID NO: 349642 - DNA, 25 bp, Artificial
  Probe
agtctattacctagggaacgtgcct

SEQ ID NO: 349643 - DNA, 25 bp, Artificial
  Probe
tcgtgagcagtggaccccaagtcac

SEQ ID NO: 349644 - DNA, 25 bp, Artificial
  Probe
tttcaagtctattacctagggaacg

SEQ ID NO: 349645 - DNA, 25 bp, Artificial
  Probe
tgcctgtggctaaacccgttggggt

SEQ ID NO: 349646 - DNA, 25 bp, Artificial
  Probe
tgtggatgtccctttccaagtggaa

SEQ ID NO: 349647 - DNA, 25 bp, Artificial
  Probe
cagtagtcgtgagcagtggacccca

SEQ ID NO: 349648 - DNA, 25 bp, Artificial
  Probe
cgtgagcagtggaccccaagtcacg

SEQ ID NO: 349649 - DNA, 25 bp, Artificial
  Probe
actggtgcagaagtttcaagtctat

SEQ ID NO: 349650 - DNA, 25 bp, Artificial
  Probe
agtcagtcctgtcttccagtagtcg

SEQ ID NO: 349651 - DNA, 25 bp, Artificial
  Probe
attacctagggaacgtgcctgtggc

SEQ ID NO: 349652 - DNA, 25 bp, Artificial
  Probe
gtggaattcccagcaccaaagaatg

SEQ ID NO: 349653 - DNA, 25 bp, Artificial
  Probe
gggaacgtgcctgtggctaaacccg

SEQ ID NO: 349654 - DNA, 25 bp, Artificial
  Probe
attcccagcaccaaagaatgaactg

SEQ ID NO: 349655 - DNA, 25 bp, Artificial
  Probe
tggagccctggagtcagtcctgtct

SEQ ID NO: 349656 - DNA, 25 bp, Artificial
  Probe
tattacctagggaacgtgcctgtgg

SEQ ID NO: 349657 - DNA, 25 bp, Artificial
  Probe
ccctttccaagtggaattcccagca

SEQ ID NO: 349658 - DNA, 25 bp, Artificial
  Probe
agcaccaaagaatgaactggtgcag

SEQ ID NO: 349659 - DNA, 25 bp, Artificial
  Probe
gaattcccagcaccaaagaatgaac

SEQ ID NO: 349660 - DNA, 25 bp, Artificial
  Probe
tggagtcagtcctgtcttccagtag

SEQ ID NO: 349661 - DNA, 25 bp, Artificial
  Probe
gtcttccagtagtcgtgagcagtgg

SEQ ID NO: 349662 - DNA, 25 bp, Artificial
  Probe
gtcctgtcttccagtagtcgtgagc

SEQ ID NO: 349663 - DNA, 25 bp, Artificial
  Probe
caagtctattacctagggaacgtgc

SEQ ID NO: 349664 - DNA, 25 bp, Artificial
  Probe
cagtggaccccaagtcacgtcagcg

SEQ ID NO: 349665 - DNA, 25 bp, Artificial
  Probe
cgtgcctgtggctaaacccgttggg

SEQ ID NO: 349666 - DNA, 25 bp, Artificial
  Probe
cagcaccaaagaatgaactggtgca

SEQ ID NO: 349667 - DNA, 25 bp, Artificial
  Probe
cagtcctgtcttccagtagtcgtga

SEQ ID NO: 349668 - DNA, 25 bp, Artificial
  Probe
tgtccctttccaagtggaattccca

SEQ ID NO: 349669 - DNA, 25 bp, Artificial
  Probe
gagtcagtcctgtcttccagtagtc

SEQ ID NO: 349670 - DNA, 25 bp, Artificial
  Probe
ggagccctggagtcagtcctgtctt

SEQ ID NO: 349671 - DNA, 25 bp, Artificial
  Probe
aacttgtggatgtccctttccaagt

SEQ ID NO: 349672 - DNA, 25 bp, Artificial
  Probe
tccctgaaagctgctctgaaaaaag

SEQ ID NO: 349673 - DNA, 25 bp, Artificial
  Probe
gcctcagttacaggtttggctgggt

SEQ ID NO: 349674 - DNA, 25 bp, Artificial
  Probe
gacatttcagacagacagagacaag

SEQ ID NO: 349675 - DNA, 25 bp, Artificial
  Probe
tctcagcatgctctttactgaaatg

SEQ ID NO: 349676 - DNA, 25 bp, Artificial
  Probe
cacctacaatgtgaacactcagcag

SEQ ID NO: 349677 - DNA, 25 bp, Artificial
  Probe
aatccagaggcctcagttacaggtt

SEQ ID NO: 349678 - DNA, 25 bp, Artificial
  Probe
aaaccatataggaaggcaagcttct

SEQ ID NO: 349679 - DNA, 25 bp, Artificial
  Probe
agcagacattacagacatttcagac

SEQ ID NO: 349680 - DNA, 25 bp, Artificial
  Probe
tggctgggtgtgttagtattcacct

SEQ ID NO: 349681 - DNA, 25 bp, Artificial
  Probe
ttcagacagacagagacaagaggaa

SEQ ID NO: 349682 - DNA, 25 bp, Artificial
  Probe
ttggctgggtgtgttagtattcacc

SEQ ID NO: 349683 - DNA, 25 bp, Artificial
  Probe
ctctttctccctgaaagctgctctg

SEQ ID NO: 349684 - DNA, 25 bp, Artificial
  Probe
aatggactctacctgcccaagtcac

SEQ ID NO: 349685 - DNA, 25 bp, Artificial
  Probe
tgtgttagtattcacctacaatgtg

SEQ ID NO: 349686 - DNA, 25 bp, Artificial
  Probe
tgcacaagcagatttgtgtctggaa

SEQ ID NO: 349687 - DNA, 25 bp, Artificial
  Probe
tacagacatttcagacagacagaga

SEQ ID NO: 349688 - DNA, 25 bp, Artificial
  Probe
cacaagcagatttgtgtctggaaag

SEQ ID NO: 349689 - DNA, 25 bp, Artificial
  Probe
tcccctgcacaagcagatttgtgtc

SEQ ID NO: 349690 - DNA, 25 bp, Artificial
  Probe
ctcagttacaggtttggctgggtgt

SEQ ID NO: 349691 - DNA, 25 bp, Artificial
  Probe
gacattacagacatttcagacagac

SEQ ID NO: 349692 - DNA, 25 bp, Artificial
  Probe
tcagcagacattacagacatttcag

SEQ ID NO: 349693 - DNA, 25 bp, Artificial
  Probe
gctctttactgaaatggactctacc

SEQ ID NO: 349694 - DNA, 25 bp, Artificial
  Probe
gttagtattcacctacaatgtgaac

SEQ ID NO: 349695 - DNA, 25 bp, Artificial
  Probe
tcttcccctgcacaagcagatttgt

SEQ ID NO: 349696 - DNA, 25 bp, Artificial
  Probe
tctttactgaaatggactctacctg

SEQ ID NO: 349697 - DNA, 25 bp, Artificial
  Probe
tactgaaatggactctacctgccca

SEQ ID NO: 349698 - DNA, 25 bp, Artificial
  Probe
gaaggcaagcttctgatctcttcct

SEQ ID NO: 349699 - DNA, 25 bp, Artificial
  Probe
aaagctaaatccagaggcctcagtt

SEQ ID NO: 349700 - DNA, 25 bp, Artificial
  Probe
ctttctccctgaaagctgctctgaa

SEQ ID NO: 349701 - DNA, 25 bp, Artificial
  Probe
agctaaatccagaggcctcagttac

SEQ ID NO: 349702 - DNA, 25 bp, Artificial
  Probe
ctgcacaagcagatttgtgtctgga

SEQ ID NO: 349703 - DNA, 25 bp, Artificial
  Probe
attcaaaaccatataggaaggcaag

SEQ ID NO: 349704 - DNA, 25 bp, Artificial
  Probe
cattacagacatttcagacagacag

SEQ ID NO: 349705 - DNA, 25 bp, Artificial
  Probe
tttcagacagacagagacaagagga

SEQ ID NO: 349706 - DNA, 25 bp, Artificial
  Probe
catttcagacagacagagacaagag

SEQ ID NO: 349707 - DNA, 25 bp, Artificial
  Probe
ctcagcatgctctttactgaaatgg

SEQ ID NO: 349708 - DNA, 25 bp, Artificial
  Probe
ttcaaaaccatataggaaggcaagc

SEQ ID NO: 349709 - DNA, 25 bp, Artificial
  Probe
cagaggcctcagttacaggtttggc

SEQ ID NO: 349710 - DNA, 25 bp, Artificial
  Probe
ccctgcacaagcagatttgtgtctg

SEQ ID NO: 349711 - DNA, 25 bp, Artificial
  Probe
caattcaaaaccatataggaaggca

SEQ ID NO: 349712 - DNA, 25 bp, Artificial
  Probe
gaacactcagcagacattacagaca

SEQ ID NO: 349713 - DNA, 25 bp, Artificial
  Probe
caagcagatttgtgtctggaaagct

SEQ ID NO: 349714 - DNA, 25 bp, Artificial
  Probe
ctacaatgtgaacactcagcagaca

SEQ ID NO: 349715 - DNA, 25 bp, Artificial
  Probe
ggcaagcttctgatctcttcctcct

SEQ ID NO: 349716 - DNA, 25 bp, Artificial
  Probe
atccagaggcctcagttacaggttt

SEQ ID NO: 349717 - DNA, 25 bp, Artificial
  Probe
aggcctcagttacaggtttggctgg

SEQ ID NO: 349718 - DNA, 25 bp, Artificial
  Probe
tttagcttggcactggccgtcgttt

SEQ ID NO: 349719 - DNA, 25 bp, Artificial
  Probe
ggcggccgcaagcttattcccttta

SEQ ID NO: 349720 - DNA, 25 bp, Artificial
  Probe
caaccaactcagttgggcagacata

SEQ ID NO: 349721 - DNA, 25 bp, Artificial
  Probe
cttgttggcaaccaactcagttggg

SEQ ID NO: 349722 - DNA, 25 bp, Artificial
  Probe
gatggccactatgttgacgtggtca

SEQ ID NO: 349723 - DNA, 25 bp, Artificial
  Probe
ggcactggccgtcgttttacaacgt

SEQ ID NO: 349724 - DNA, 25 bp, Artificial
  Probe
tgttggcaaccaactcagttgggca

SEQ ID NO: 349725 - DNA, 25 bp, Artificial
  Probe
aggcatttcttgttggcaaccaact

SEQ ID NO: 349726 - DNA, 25 bp, Artificial
  Probe
gcaaccaactcagttgggcagacat

SEQ ID NO: 349727 - DNA, 25 bp, Artificial
  Probe
gttggcaaccaactcagttgggcag

SEQ ID NO: 349728 - DNA, 25 bp, Artificial
  Probe
ttcttgttggcaaccaactcagttg

SEQ ID NO: 349729 - DNA, 25 bp, Artificial
  Probe
tcttgttggcaaccaactcagttgg

SEQ ID NO: 349730 - DNA, 25 bp, Artificial
  Probe
ttagcttggcactggccgtcgtttt

SEQ ID NO: 349731 - DNA, 25 bp, Artificial
  Probe
gccgcaagcttattccctttagtga

SEQ ID NO: 349732 - DNA, 25 bp, Artificial
  Probe
actcagttgggcagacatacagcta

SEQ ID NO: 349733 - DNA, 25 bp, Artificial
  Probe
cggccgcaagcttattccctttagt

SEQ ID NO: 349734 - DNA, 25 bp, Artificial
  Probe
atggccactatgttgacgtggtcag

SEQ ID NO: 349735 - DNA, 25 bp, Artificial
  Probe
tttcttgttggcaaccaactcagtt

SEQ ID NO: 349736 - DNA, 25 bp, Artificial
  Probe
ggccgcaagcttattccctttagtg

SEQ ID NO: 349737 - DNA, 25 bp, Artificial
  Probe
ttgttggcaaccaactcagttgggc

SEQ ID NO: 349738 - DNA, 25 bp, Artificial
  Probe
ttttagcttggcactggccgtcgtt

SEQ ID NO: 349739 - DNA, 25 bp, Artificial
  Probe
tggccactatgttgacgtggtcagg

SEQ ID NO: 349740 - DNA, 25 bp, Artificial
  Probe
tggcaaccaactcagttgggcagac

SEQ ID NO: 349741 - DNA, 25 bp, Artificial
  Probe
gcggccgcaagcttattccctttag

SEQ ID NO: 349742 - DNA, 25 bp, Artificial
  Probe
ggcaaccaactcagttgggcagaca

SEQ ID NO: 349743 - DNA, 25 bp, Artificial
  Probe
ccgcaagcttattccctttagtgag

SEQ ID NO: 349744 - DNA, 25 bp, Artificial
  Probe
aaccaactcagttgggcagacatac

SEQ ID NO: 349745 - DNA, 25 bp, Artificial
  Probe
ggcatttcttgttggcaaccaactc

SEQ ID NO: 349746 - DNA, 25 bp, Artificial
  Probe
tggcactggccgtcgttttacaacg

SEQ ID NO: 349747 - DNA, 25 bp, Artificial
  Probe
cctgtcaatcaatgctgtatttacg

SEQ ID NO: 349748 - DNA, 25 bp, Artificial
  Probe
ggttcccttgaccactgaacaaatt

SEQ ID NO: 349749 - DNA, 25 bp, Artificial
  Probe
gaccactgaacaaattcccagaagt

SEQ ID NO: 349750 - DNA, 25 bp, Artificial
  Probe
gtgacgtcacttctcttaaacgcca

SEQ ID NO: 349751 - DNA, 25 bp, Artificial
  Probe
cttttaaacttacagctgtacagag

SEQ ID NO: 349752 - DNA, 25 bp, Artificial
  Probe
ccagaagtccgctcttccattgttc

SEQ ID NO: 349753 - DNA, 25 bp, Artificial
  Probe
acatctgatctaaaggcaaggtgac

SEQ ID NO: 349754 - DNA, 25 bp, Artificial
  Probe
tggtgttgtccttgggttcccttga

SEQ ID NO: 349755 - DNA, 25 bp, Artificial
  Probe
ctggctggtgttgtccttgggttcc

SEQ ID NO: 349756 - DNA, 25 bp, Artificial
  Probe
tttaaacttacagctgtacagagtt

SEQ ID NO: 349757 - DNA, 25 bp, Artificial
  Probe
tgacacgagtttctacctgtcaatc

SEQ ID NO: 349758 - DNA, 25 bp, Artificial
  Probe
tgatattaacatctgatctaaaggc

SEQ ID NO: 349759 - DNA, 25 bp, Artificial
  Probe
catctgatctaaaggcaaggtgacg

SEQ ID NO: 349760 - DNA, 25 bp, Artificial
  Probe
gaagtccgctcttccattgttcctt

SEQ ID NO: 349761 - DNA, 25 bp, Artificial
  Probe
acgagtttctacctgtcaatcaatg

SEQ ID NO: 349762 - DNA, 25 bp, Artificial
  Probe
ttgtccttgggttcccttgaccact

SEQ ID NO: 349763 - DNA, 25 bp, Artificial
  Probe
gacacgagtttctacctgtcaatca

SEQ ID NO: 349764 - DNA, 25 bp, Artificial
  Probe
tattaacatctgatctaaaggcaag

SEQ ID NO: 349765 - DNA, 25 bp, Artificial
  Probe
cagctgtacagagtttcaattaata

SEQ ID NO: 349766 - DNA, 25 bp, Artificial
  Probe
cactgaacaaattcccagaagtccg

SEQ ID NO: 349767 - DNA, 25 bp, Artificial
  Probe
gatattaacatctgatctaaaggca

SEQ ID NO: 349768 - DNA, 25 bp, Artificial
  Probe
ctattcctagacaaataggtgatat

SEQ ID NO: 349769 - DNA, 25 bp, Artificial
  Probe
aacttacagctgtacagagtttcaa

SEQ ID NO: 349770 - DNA, 25 bp, Artificial
  Probe
attaacatctgatctaaaggcaagg

SEQ ID NO: 349771 - DNA, 25 bp, Artificial
  Probe
tgaccactgaacaaattcccagaag

SEQ ID NO: 349772 - DNA, 25 bp, Artificial
  Probe
aaccatgcatctagagtggcctggc

SEQ ID NO: 349773 - DNA, 25 bp, Artificial
  Probe
acagttccactgagcgggcctattc

SEQ ID NO: 349774 - DNA, 25 bp, Artificial
  Probe
gacgtcacttctcttaaacgccaag

SEQ ID NO: 349775 - DNA, 25 bp, Artificial
  Probe
atgcatctagagtggcctggctggt

SEQ ID NO: 349776 - DNA, 25 bp, Artificial
  Probe
ttgggttcccttgaccactgaacaa

SEQ ID NO: 349777 - DNA, 25 bp, Artificial
  Probe
atctaaaggcaaggtgacgtcactt

SEQ ID NO: 349778 - DNA, 25 bp, Artificial
  Probe
actccactgagttggcataaaaccc

SEQ ID NO: 349779 - DNA, 25 bp, Artificial
  Probe
tctttaatctgacagttccactgag

SEQ ID NO: 349780 - DNA, 25 bp, Artificial
  Probe
agttggcataaaacccacagactat

SEQ ID NO: 349781 - DNA, 25 bp, Artificial
  Probe
ggcataaaacccacagactattgac

SEQ ID NO: 349782 - DNA, 25 bp, Artificial
  Probe
ccatgcatctagagtggcctggctg

SEQ ID NO: 349783 - DNA, 25 bp, Artificial
  Probe
gaacaaattcccagaagtccgctct

SEQ ID NO: 349784 - DNA, 25 bp, Artificial
  Probe
cttgggttcccttgaccactgaaca

SEQ ID NO: 349785 - DNA, 25 bp, Artificial
  Probe
atataagtatcactccactgagttg

SEQ ID NO: 349786 - DNA, 25 bp, Artificial
  Probe
gtttctacctgtcaatcaatgctgt

SEQ ID NO: 349787 - DNA, 25 bp, Artificial
  Probe
atcactccactgagttggcataaaa

SEQ ID NO: 349788 - DNA, 25 bp, Artificial
  Probe
aggcaaggtgacgtcacttctctta

SEQ ID NO: 349789 - DNA, 25 bp, Artificial
  Probe
aaacccacagactattgacacgagt

SEQ ID NO: 349790 - DNA, 25 bp, Artificial
  Probe
actgagcgggcctattcctagacaa

SEQ ID NO: 349791 - DNA, 25 bp, Artificial
  Probe
gcaaggtgacgtcacttctcttaaa

SEQ ID NO: 349792 - DNA, 25 bp, Artificial
  Probe
tattgacacgagtttctacctgtca

SEQ ID NO: 349793 - DNA, 25 bp, Artificial
  Probe
cagccagcccgctgcaatgagaaga

SEQ ID NO: 349794 - DNA, 25 bp, Artificial
  Probe
cccaccgtggatactgcatgatgtg

SEQ ID NO: 349795 - DNA, 25 bp, Artificial
  Probe
tctttctttctcccttctcaaccct

SEQ ID NO: 349796 - DNA, 25 bp, Artificial
  Probe
cagattgcaatggactcagttgttt

SEQ ID NO: 349797 - DNA, 25 bp, Artificial
  Probe
tacccaccgtggatactgcatgatg

SEQ ID NO: 349798 - DNA, 25 bp, Artificial
  Probe
gtgcctgccagacctggggcttgca

SEQ ID NO: 349799 - DNA, 25 bp, Artificial
  Probe
ccatggttttgaactcttcctgccc

SEQ ID NO: 349800 - DNA, 25 bp, Artificial
  Probe
gtacccaccgtggatactgcatgat

SEQ ID NO: 349801 - DNA, 25 bp, Artificial
  Probe
tgcctctgctgtgaattaacttgtt

SEQ ID NO: 349802 - DNA, 25 bp, Artificial
  Probe
gcctctgctgtgaattaacttgttc

SEQ ID NO: 349803 - DNA, 25 bp, Artificial
  Probe
ggtacccaccgtggatactgcatga

SEQ ID NO: 349804 - DNA, 25 bp, Artificial
  Probe
agcacagattgcaatggactcagtt

SEQ ID NO: 349805 - DNA, 25 bp, Artificial
  Probe
ccggtgcctgccagacctggggctt

SEQ ID NO: 349806 - DNA, 25 bp, Artificial
  Probe
cggtacccaccgtggatactgcatg

SEQ ID NO: 349807 - DNA, 25 bp, Artificial
  Probe
ttgttctgtgtattaaactgggccg

SEQ ID NO: 349808 - DNA, 25 bp, Artificial
  Probe
tcctttattgcctgcctctgctgtg

SEQ ID NO: 349809 - DNA, 25 bp, Artificial
  Probe
cctctgctgtgaattaacttgttct

SEQ ID NO: 349810 - DNA, 25 bp, Artificial
  Probe
cgtttctcgtggttgtgtgtgtttg

SEQ ID NO: 349811 - DNA, 25 bp, Artificial
  Probe
gccaggtgggcatggtgcccacaca

SEQ ID NO: 349812 - DNA, 25 bp, Artificial
  Probe
gttctgtgtattaaactgggccgga

SEQ ID NO: 349813 - DNA, 25 bp, Artificial
  Probe
ccccccatcgctagccattttgggg

SEQ ID NO: 349814 - DNA, 25 bp, Artificial
  Probe
gccaccaagtctcctttattgcctg

SEQ ID NO: 349815 - DNA, 25 bp, Artificial
  Probe
gcctgcctctgctgtgaattaactt

SEQ ID NO: 349816 - DNA, 25 bp, Artificial
  Probe
ttattgcctgcctctgctgtgaatt

SEQ ID NO: 349817 - DNA, 25 bp, Artificial
  Probe
ctctgctgtgaattaacttgttctg

SEQ ID NO: 349818 - DNA, 25 bp, Artificial
  Probe
ctgcctctgctgtgaattaacttgt

SEQ ID NO: 349819 - DNA, 25 bp, Artificial
  Probe
agaagcacagattgcaatggactca

SEQ ID NO: 349820 - DNA, 25 bp, Artificial
  Probe
agccagcccgctgcaatgagaagaa

SEQ ID NO: 349821 - DNA, 25 bp, Artificial
  Probe
gaagcacagattgcaatggactcag

SEQ ID NO: 349822 - DNA, 25 bp, Artificial
  Probe
cccttgccaccaagtctcctttatt

SEQ ID NO: 349823 - DNA, 25 bp, Artificial
  Probe
cttgttctgtgtattaaactgggcc

SEQ ID NO: 349824 - DNA, 25 bp, Artificial
  Probe
tgcctgcctctgctgtgaattaact

SEQ ID NO: 349825 - DNA, 25 bp, Artificial
  Probe
acagattgcaatggactcagttgtt

SEQ ID NO: 349826 - DNA, 25 bp, Artificial
  Probe
acccaccgtggatactgcatgatgt

SEQ ID NO: 349827 - DNA, 25 bp, Artificial
  Probe
cctgcctctgctgtgaattaacttg

SEQ ID NO: 349828 - DNA, 25 bp, Artificial
  Probe
tgttctgtgtattaaactgggccgg

SEQ ID NO: 349829 - DNA, 25 bp, Artificial
  Probe
acttgttctgtgtattaaactgggc

SEQ ID NO: 349830 - DNA, 25 bp, Artificial
  Probe
agtctcctttattgcctgcctctgc

SEQ ID NO: 349831 - DNA, 25 bp, Artificial
  Probe
ccaggtgggcatggtgcccacacac

SEQ ID NO: 349832 - DNA, 25 bp, Artificial
  Probe
attgcctgcctctgctgtgaattaa

SEQ ID NO: 349833 - DNA, 25 bp, Artificial
  Probe
gcagccagcccgctgcaatgagaag

SEQ ID NO: 349834 - DNA, 25 bp, Artificial
  Probe
ttgcctgcctctgctgtgaattaac

SEQ ID NO: 349835 - DNA, 25 bp, Artificial
  Probe
aagtctcctttattgcctgcctctg

SEQ ID NO: 349836 - DNA, 25 bp, Artificial
  Probe
ccaccgtggatactgcatgatgtga

SEQ ID NO: 349837 - DNA, 25 bp, Artificial
  Probe
tgcctgccagacctggggcttgcag

SEQ ID NO: 349838 - DNA, 25 bp, Artificial
  Probe
tattgcctgcctctgctgtgaatta

SEQ ID NO: 349839 - DNA, 25 bp, Artificial
  Probe
aggtcactccgcaccagatttacac

SEQ ID NO: 349840 - DNA, 25 bp, Artificial
  Probe
atcgacgagtttgaggccatgtaga

SEQ ID NO: 349841 - DNA, 25 bp, Artificial
  Probe
gaggacccacaatgacatcatccac

SEQ ID NO: 349842 - DNA, 25 bp, Artificial
  Probe
ttcctgtcagttcttcactgagagc

SEQ ID NO: 349843 - DNA, 25 bp, Artificial
  Probe
catgtagaggccaggccgggaccaa

SEQ ID NO: 349844 - DNA, 25 bp, Artificial
  Probe
tcagtttgtcttccttccttgagcc

SEQ ID NO: 349845 - DNA, 25 bp, Artificial
  Probe
catcatccacaatgagaacatgcgg

SEQ ID NO: 349846 - DNA, 25 bp, Artificial
  Probe
agtataagacgctgcggcagatcag

SEQ ID NO: 349847 - DNA, 25 bp, Artificial
  Probe
gcgtgcagcggcagccgttgactct

SEQ ID NO: 349848 - DNA, 25 bp, Artificial
  Probe
aatagtatcacatagtgccaaacag

SEQ ID NO: 349849 - DNA, 25 bp, Artificial
  Probe
gagcccatgggctacagtgccgagc

SEQ ID NO: 349850 - DNA, 25 bp, Artificial
  Probe
tccacaatgagaacatgcggcaagg

SEQ ID NO: 349851 - DNA, 25 bp, Artificial
  Probe
tcgacgagtttgaggccatgtagag

SEQ ID NO: 349852 - DNA, 25 bp, Artificial
  Probe
cccaggcccgggatgagaataagag

SEQ ID NO: 349853 - DNA, 25 bp, Artificial
  Probe
agaacatgcggcaaggccgggacaa

SEQ ID NO: 349854 - DNA, 25 bp, Artificial
  Probe
gactgtcctttttggttgtgatgtc

SEQ ID NO: 349855 - DNA, 25 bp, Artificial
  Probe
gatttttatgacagttgccgaatca

SEQ ID NO: 349856 - DNA, 25 bp, Artificial
  Probe
agggcacctcacagcaggcaggtgt

SEQ ID NO: 349857 - DNA, 25 bp, Artificial
  Probe
agctctccagcgagggcatcctgga

SEQ ID NO: 349858 - DNA, 25 bp, Artificial
  Probe
tccttgagccggactgtcctttttg

SEQ ID NO: 349859 - DNA, 25 bp, Artificial
  Probe
aacaggccagatttttatgacagtt

SEQ ID NO: 349860 - DNA, 25 bp, Artificial
  Probe
ccgcccgtgtacgagcccgtgaatt

SEQ ID NO: 349861 - DNA, 25 bp, Artificial
  Probe
gtcactcttggctctttagtactct

SEQ ID NO: 349862 - DNA, 25 bp, Artificial
  Probe
ggcaaggccgggacaagtataagac

SEQ ID NO: 349863 - DNA, 25 bp, Artificial
  Probe
aagcagcgcatcgacgagtttgagg

SEQ ID NO: 349864 - DNA, 25 bp, Artificial
  Probe
cccgaagggactcaggcctgtttat

SEQ ID NO: 349865 - DNA, 25 bp, Artificial
  Probe
gttcttcactgagagcagtcagact

SEQ ID NO: 349866 - DNA, 25 bp, Artificial
  Probe
ttgttggactgatacacctaatgat

SEQ ID NO: 349867 - DNA, 25 bp, Artificial
  Probe
gctgcacctggtgatgacggctccc

SEQ ID NO: 349868 - DNA, 25 bp, Artificial
  Probe
tcattgttggactgatacacctaat

SEQ ID NO: 349869 - DNA, 25 bp, Artificial
  Probe
ccgtgaattaccacgtgcaggaggg

SEQ ID NO: 349870 - DNA, 25 bp, Artificial
  Probe
agggctggcccgaatgacgcgattc

SEQ ID NO: 349871 - DNA, 25 bp, Artificial
  Probe
gctctttagtactctataagtctag

SEQ ID NO: 349872 - DNA, 25 bp, Artificial
  Probe
accgtaacgaggagaagcggatcac

SEQ ID NO: 349873 - DNA, 25 bp, Artificial
  Probe
tcttccttccttgagccggactgtc

SEQ ID NO: 349874 - DNA, 25 bp, Artificial
  Probe
gcagcgcatcgacgagtttgaggcc

SEQ ID NO: 349875 - DNA, 25 bp, Artificial
  Probe
gcaaggccgggacaagtataagacg

SEQ ID NO: 349876 - DNA, 25 bp, Artificial
  Probe
taataatagcactgtggctcacaca

SEQ ID NO: 349877 - DNA, 25 bp, Artificial
  Probe
atgagttgtcccaggcccgggatga

SEQ ID NO: 349878 - DNA, 25 bp, Artificial
  Probe
ctcacacacgggtgccatactttct

SEQ ID NO: 349879 - DNA, 25 bp, Artificial
  Probe
ataagaggacccacaatgacatcat

SEQ ID NO: 349880 - DNA, 25 bp, Artificial
  Probe
acaacttgttcctgttttcagtttg

SEQ ID NO: 349881 - DNA, 25 bp, Artificial
  Probe
tttgaggccatgtagaggccaggcc

SEQ ID NO: 349882 - DNA, 25 bp, Artificial
  Probe
gacagttgccgaatcacttcccgtt

SEQ ID NO: 349883 - DNA, 25 bp, Artificial
  Probe
ctggcccgaatgacgcgattcagtg

SEQ ID NO: 349884 - DNA, 25 bp, Artificial
  Probe
ttttgtgcatgtaaaacgcacactt

SEQ ID NO: 349885 - DNA, 25 bp, Artificial
  Probe
agctcctgccagctatccagaaagc

SEQ ID NO: 349886 - DNA, 25 bp, Artificial
  Probe
gatttctcctctacctttgtcatgg

SEQ ID NO: 349887 - DNA, 25 bp, Artificial
  Probe
gtgcttcctctcctggatttctcct

SEQ ID NO: 349888 - DNA, 25 bp, Artificial
  Probe
tcgtatggccagatgggagccctgt

SEQ ID NO: 349889 - DNA, 25 bp, Artificial
  Probe
cgctaagctgaccattccattccgt

SEQ ID NO: 349890 - DNA, 25 bp, Artificial
  Probe
ctgtgggttatagcaactggaatcc

SEQ ID NO: 349891 - DNA, 25 bp, Artificial
  Probe
tacctttgtcatggaaacaaccagg

SEQ ID NO: 349892 - DNA, 25 bp, Artificial
  Probe
tgacctggaaggacggctagtcagc

SEQ ID NO: 349893 - DNA, 25 bp, Artificial
  Probe
ccaggccttgaggatgcccctgtca

SEQ ID NO: 349894 - DNA, 25 bp, Artificial
  Probe
tgtgactgaggctaggattatgtcc

SEQ ID NO: 349895 - DNA, 25 bp, Artificial
  Probe
gtctccaggatctcaacatggaggg

SEQ ID NO: 349896 - DNA, 25 bp, Artificial
  Probe
tcccaaactgaagtggctggtggag

SEQ ID NO: 349897 - DNA, 25 bp, Artificial
  Probe
ttagcctctgtgacgccaacaggac

SEQ ID NO: 349898 - DNA, 25 bp, Artificial
  Probe
ggatttctcctctacctttgtcatg

SEQ ID NO: 349899 - DNA, 25 bp, Artificial
  Probe
tggaatgacgccttctgccgcagct

SEQ ID NO: 349900 - DNA, 25 bp, Artificial
  Probe
tctggccagtggaatgacgccttct

SEQ ID NO: 349901 - DNA, 25 bp, Artificial
  Probe
gccttctgccgcagctacctggatg

SEQ ID NO: 349902 - DNA, 25 bp, Artificial
  Probe
tggaggccagctcctgccagctatc

SEQ ID NO: 349903 - DNA, 25 bp, Artificial
  Probe
aaggagcaggacttcctgatgcaac

SEQ ID NO: 349904 - DNA, 25 bp, Artificial
  Probe
agcaactggaatccaggggagccca

SEQ ID NO: 349905 - DNA, 25 bp, Artificial
  Probe
acaaccaggccttgaggatgcccct

SEQ ID NO: 349906 - DNA, 25 bp, Artificial
  Probe
cagctacctggatgcctgggtgtgt

SEQ ID NO: 349907 - DNA, 25 bp, Artificial
  Probe
ggaatccaggggagcccaacaatgg

SEQ ID NO: 349908 - DNA, 25 bp, Artificial
  Probe
atgcccctgtcaaggcccgattgct

SEQ ID NO: 349909 - DNA, 25 bp, Artificial
  Probe
ggatctggccagtggaatgacgcct

SEQ ID NO: 349910 - DNA, 25 bp, Artificial
  Probe
agctggcaacctgtgacctatccgc

SEQ ID NO: 349911 - DNA, 25 bp, Artificial
  Probe
cctcccaaactgaagtggctggtgg

SEQ ID NO: 349912 - DNA, 25 bp, Artificial
  Probe
ccttagcctctgtgacgccaacagg

SEQ ID NO: 349913 - DNA, 25 bp, Artificial
  Probe
cagctcctgccagctatccagaaag

SEQ ID NO: 349914 - DNA, 25 bp, Artificial
  Probe
cctgatgcaacatatcaacaagaag

SEQ ID NO: 349915 - DNA, 25 bp, Artificial
  Probe
catggaaacaaccaggccttgagga

SEQ ID NO: 349916 - DNA, 25 bp, Artificial
  Probe
aggagtcctggattggtctccagga

SEQ ID NO: 349917 - DNA, 25 bp, Artificial
  Probe
gttatagcaactggaatccagggga

SEQ ID NO: 349918 - DNA, 25 bp, Artificial
  Probe
atgggagccctgtgggttatagcaa

SEQ ID NO: 349919 - DNA, 25 bp, Artificial
  Probe
gttcgtatggccagatgggagccct

SEQ ID NO: 349920 - DNA, 25 bp, Artificial
  Probe
gaatgacgccttctgccgcagctac

SEQ ID NO: 349921 - DNA, 25 bp, Artificial
  Probe
tgtcaaggcccgattgctctctgtg

SEQ ID NO: 349922 - DNA, 25 bp, Artificial
  Probe
agaatgaaccctgactaagttctgt

SEQ ID NO: 349923 - DNA, 25 bp, Artificial
  Probe
tgtgtgagcagctggcaacctgtga

SEQ ID NO: 349924 - DNA, 25 bp, Artificial
  Probe
acagccagaaggagcaggacttcct

SEQ ID NO: 349925 - DNA, 25 bp, Artificial
  Probe
agaaggagcaggacttcctgatgca

SEQ ID NO: 349926 - DNA, 25 bp, Artificial
  Probe
cccccaagaatgaaccctgactaag

SEQ ID NO: 349927 - DNA, 25 bp, Artificial
  Probe
tcctggattggtctccaggatctca

SEQ ID NO: 349928 - DNA, 25 bp, Artificial
  Probe
ggacttcctgatgcaacatatcaac

SEQ ID NO: 349929 - DNA, 25 bp, Artificial
  Probe
tgactgaggctaggattatgtccct

SEQ ID NO: 349930 - DNA, 25 bp, Artificial
  Probe
tgaggatgcccctgtcaaggcccga

SEQ ID NO: 349931 - DNA, 25 bp, Artificial
  Probe
cagacctcagtgatgtgagcactgt

SEQ ID NO: 349932 - DNA, 25 bp, Artificial
  Probe
ctcatgatgcatgtttctgtatgtt

SEQ ID NO: 349933 - DNA, 25 bp, Artificial
  Probe
tgcccaaagacatccagttggctcg

SEQ ID NO: 349934 - DNA, 25 bp, Artificial
  Probe
agcactgtggctcaggagtgacaag

SEQ ID NO: 349935 - DNA, 25 bp, Artificial
  Probe
acgccaagagagtcaccatcatgcc

SEQ ID NO: 349936 - DNA, 25 bp, Artificial
  Probe
gcccaaagacatccagttggctcgc

SEQ ID NO: 349937 - DNA, 25 bp, Artificial
  Probe
gccaagagagtcaccatcatgccca

SEQ ID NO: 349938 - DNA, 25 bp, Artificial
  Probe
gagagtcaccatcatgcccaaagac

SEQ ID NO: 349939 - DNA, 25 bp, Artificial
  Probe
acctcagtgatgtgagcactgtggc

SEQ ID NO: 349940 - DNA, 25 bp, Artificial
  Probe
tctgtgtgccatccacgccaagaga

SEQ ID NO: 349941 - DNA, 25 bp, Artificial
  Probe
agacctcagtgatgtgagcactgtg

SEQ ID NO: 349942 - DNA, 25 bp, Artificial
  Probe
atgcccaaagacatccagttggctc

SEQ ID NO: 349943 - DNA, 25 bp, Artificial
  Probe
tcagtgatgtgagcactgtggctca

SEQ ID NO: 349944 - DNA, 25 bp, Artificial
  Probe
ccatcggtgcccttcaggaggctag

SEQ ID NO: 349945 - DNA, 25 bp, Artificial
  Probe
cttcaggaggctagcgaggcatacc

SEQ ID NO: 349946 - DNA, 25 bp, Artificial
  Probe
aatctgtgtgccatccacgccaaga

SEQ ID NO: 349947 - DNA, 25 bp, Artificial
  Probe
actgtggctcaggagtgacaagttg

SEQ ID NO: 349948 - DNA, 25 bp, Artificial
  Probe
cagtgatgtgagcactgtggctcag

SEQ ID NO: 349949 - DNA, 25 bp, Artificial
  Probe
catgcccaaagacatccagttggct

SEQ ID NO: 349950 - DNA, 25 bp, Artificial
  Probe
cacagacctcagtgatgtgagcact

SEQ ID NO: 349951 - DNA, 25 bp, Artificial
  Probe
ccaaagacatccagttggctcgccg

SEQ ID NO: 349952 - DNA, 25 bp, Artificial
  Probe
tccacgccaagagagtcaccatcat

SEQ ID NO: 349953 - DNA, 25 bp, Artificial
  Probe
aagacatccagttggctcgccggat

SEQ ID NO: 349954 - DNA, 25 bp, Artificial
  Probe
gagtcaccatcatgcccaaagacat

SEQ ID NO: 349955 - DNA, 25 bp, Artificial
  Probe
atcggtgcccttcaggaggctagcg

SEQ ID NO: 349956 - DNA, 25 bp, Artificial
  Probe
caaagacatccagttggctcgccgg

SEQ ID NO: 349957 - DNA, 25 bp, Artificial
  Probe
ccttcaggaggctagcgaggcatac

SEQ ID NO: 349958 - DNA, 25 bp, Artificial
  Probe
tcggtgcccttcaggaggctagcga

SEQ ID NO: 349959 - DNA, 25 bp, Artificial
  Probe
atccacgccaagagagtcaccatca

SEQ ID NO: 349960 - DNA, 25 bp, Artificial
  Probe
catcatgcccaaagacatccagttg

SEQ ID NO: 349961 - DNA, 25 bp, Artificial
  Probe
cttttgcaataaaactggttatgac

SEQ ID NO: 349962 - DNA, 25 bp, Artificial
  Probe
caagagagtcaccatcatgcccaaa

SEQ ID NO: 349963 - DNA, 25 bp, Artificial
  Probe
gctacccttccagaggttggtgagg

SEQ ID NO: 349964 - DNA, 25 bp, Artificial
  Probe
ctgtgtgccatccacgccaagagag

SEQ ID NO: 349965 - DNA, 25 bp, Artificial
  Probe
gagcactgtggctcaggagtgacaa

SEQ ID NO: 349966 - DNA, 25 bp, Artificial
  Probe
ccacgccaagagagtcaccatcatg

SEQ ID NO: 349967 - DNA, 25 bp, Artificial
  Probe
gcactgtggctcaggagtgacaagt

SEQ ID NO: 349968 - DNA, 25 bp, Artificial
  Probe
atctgtgtgccatccacgccaagag

SEQ ID NO: 349969 - DNA, 25 bp, Artificial
  Probe
aagagagtcaccatcatgcccaaag

SEQ ID NO: 349970 - DNA, 25 bp, Artificial
  Probe
ctcagtgatgtgagcactgtggctc

SEQ ID NO: 349971 - DNA, 25 bp, Artificial
  Probe
atcatgcccaaagacatccagttgg

SEQ ID NO: 349972 - DNA, 25 bp, Artificial
  Probe
acagacctcagtgatgtgagcactg

SEQ ID NO: 349973 - DNA, 25 bp, Artificial
  Probe
gacctcagtgatgtgagcactgtgg

SEQ ID NO: 349974 - DNA, 25 bp, Artificial
  Probe
catccagttggctcgccggatacgg

SEQ ID NO: 349975 - DNA, 25 bp, Artificial
  Probe
tgtgtgccatccacgccaagagagt

SEQ ID NO: 349976 - DNA, 25 bp, Artificial
  Probe
catcggtgcccttcaggaggctagc

SEQ ID NO: 349977 - DNA, 25 bp, Artificial
  Probe
catgttgcatgttaagtcggtattc

SEQ ID NO: 349978 - DNA, 25 bp, Artificial
  Probe
cgccggaaccgtgtggctctaaagg

SEQ ID NO: 349979 - DNA, 25 bp, Artificial
  Probe
gagctcatgttgcatgttaagtcgg

SEQ ID NO: 349980 - DNA, 25 bp, Artificial
  Probe
gcggcatacagtgactatgattcca

SEQ ID NO: 349981 - DNA, 25 bp, Artificial
  Probe
ctctaaagggcaacatcgaaacaaa

SEQ ID NO: 349982 - DNA, 25 bp, Artificial
  Probe
tacagtgactatgattccaggggat

SEQ ID NO: 349983 - DNA, 25 bp, Artificial
  Probe
ccaacgtcatccactgtaagagtct

SEQ ID NO: 349984 - DNA, 25 bp, Artificial
  Probe
tcatccactgtaagagtctgccagg

SEQ ID NO: 349985 - DNA, 25 bp, Artificial
  Probe
gtgacccggcacaaggacatagaca

SEQ ID NO: 349986 - DNA, 25 bp, Artificial
  Probe
gtgcatgtaagctccaacgctgatg

SEQ ID NO: 349987 - DNA, 25 bp, Artificial
  Probe
gtccctgcgcattgctgaatatgct

SEQ ID NO: 349988 - DNA, 25 bp, Artificial
  Probe
aaaggcaatattcaagccagctctc

SEQ ID NO: 349989 - DNA, 25 bp, Artificial
  Probe
tggtgacccggcacaaggacataga

SEQ ID NO: 349990 - DNA, 25 bp, Artificial
  Probe
ctcatgttgcatgttaagtcggtat

SEQ ID NO: 349991 - DNA, 25 bp, Artificial
  Probe
ttcgtaccagcctagacctctatgc

SEQ ID NO: 349992 - DNA, 25 bp, Artificial
  Probe
atgttaagtcggtattcaggcatgc

SEQ ID NO: 349993 - DNA, 25 bp, Artificial
  Probe
gctggcagtgctgcaaaggcaatat

SEQ ID NO: 349994 - DNA, 25 bp, Artificial
  Probe
gcagtgctgcaaaggcaatattcaa

SEQ ID NO: 349995 - DNA, 25 bp, Artificial
  Probe
gctcatgttgcatgttaagtcggta

SEQ ID NO: 349996 - DNA, 25 bp, Artificial
  Probe
ggagctcatgttgcatgttaagtcg

SEQ ID NO: 349997 - DNA, 25 bp, Artificial
  Probe
atacagtgactatgattccagggga

SEQ ID NO: 349998 - DNA, 25 bp, Artificial
  Probe
agtccctgcgcattgctgaatatgc

SEQ ID NO: 349999 - DNA, 25 bp, Artificial
  Probe
gtaccagcctagacctctatgccaa

SEQ ID NO: 350000 - DNA, 25 bp, Artificial
  Probe
tgggcggcatacagtgactatgatt

SEQ ID NO: 350001 - DNA, 25 bp, Artificial
  Probe
ggtgacccggcacaaggacatagac

SEQ ID NO: 350002 - DNA, 25 bp, Artificial
  Probe
gtgtggctctaaagggcaacatcga

SEQ ID NO: 350003 - DNA, 25 bp, Artificial
  Probe
gcctagacctctatgccaacgtcat

SEQ ID NO: 350004 - DNA, 25 bp, Artificial
  Probe
ggcccggagctcatgttgcatgtta

SEQ ID NO: 350005 - DNA, 25 bp, Artificial
  Probe
ctggcagtgctgcaaaggcaatatt

SEQ ID NO: 350006 - DNA, 25 bp, Artificial
  Probe
taagtcggtattcaggcatgcatgt

SEQ ID NO: 350007 - DNA, 25 bp, Artificial
  Probe
ccgccggaaccgtgtggctctaaag

SEQ ID NO: 350008 - DNA, 25 bp, Artificial
  Probe
ccttgggaggttctggctgcccatg

SEQ ID NO: 350009 - DNA, 25 bp, Artificial
  Probe
ggaacaacatccttcgtaccagcct

SEQ ID NO: 350010 - DNA, 25 bp, Artificial
  Probe
cttgggaggttctggctgcccatga

SEQ ID NO: 350011 - DNA, 25 bp, Artificial
  Probe
agcctagacctctatgccaacgtca

SEQ ID NO: 350012 - DNA, 25 bp, Artificial
  Probe
ctgctggcagtgctgcaaaggcaat

SEQ ID NO: 350013 - DNA, 25 bp, Artificial
  Probe
gaaccgtgtggctctaaagggcaac

SEQ ID NO: 350014 - DNA, 25 bp, Artificial
  Probe
tgacccggcacaaggacatagacat

SEQ ID NO: 350015 - DNA, 25 bp, Artificial
  Probe
ttgcatgttaagtcggtattcaggc

SEQ ID NO: 350016 - DNA, 25 bp, Artificial
  Probe
tgcatgtaagctccaacgctgatga

SEQ ID NO: 350017 - DNA, 25 bp, Artificial
  Probe
ggcggcatacagtgactatgattcc

SEQ ID NO: 350018 - DNA, 25 bp, Artificial
  Probe
tgctggcagtgctgcaaaggcaata

SEQ ID NO: 350019 - DNA, 25 bp, Artificial
  Probe
aggcaatattcaagccagctctcct

SEQ ID NO: 350020 - DNA, 25 bp, Artificial
  Probe
aagtccctgcgcattgctgaatatg

SEQ ID NO: 350021 - DNA, 25 bp, Artificial
  Probe
ctatgccaacgtcatccactgtaag

SEQ ID NO: 350022 - DNA, 25 bp, Artificial
  Probe
gctctaaagggcaacatcgaaacaa

SEQ ID NO: 350023 - DNA, 25 bp, Artificial
  Probe
ctagttcccaggagcgccaaaacaa

SEQ ID NO: 350024 - DNA, 25 bp, Artificial
  Probe
ggtccaatcagaaaagcctatacac

SEQ ID NO: 350025 - DNA, 25 bp, Artificial
  Probe
gcaagcagggcctgtttcctaacaa

SEQ ID NO: 350026 - DNA, 25 bp, Artificial
  Probe
ggcctgtttcctaacaactatgtca

SEQ ID NO: 350027 - DNA, 25 bp, Artificial
  Probe
gatttcctcaaggtcccggaccagg

SEQ ID NO: 350028 - DNA, 25 bp, Artificial
  Probe
tccgtaaatgatcctaaaaggtagt

SEQ ID NO: 350029 - DNA, 25 bp, Artificial
  Probe
ccttccaagcccatgggagccaggg

SEQ ID NO: 350030 - DNA, 25 bp, Artificial
  Probe
aaagcctatacacctctatggcccg

SEQ ID NO: 350031 - DNA, 25 bp, Artificial
  Probe
tggacttggtgtgaacaggcactca

SEQ ID NO: 350032 - DNA, 25 bp, Artificial
  Probe
acaactatgtcaccaagatctgagg

SEQ ID NO: 350033 - DNA, 25 bp, Artificial
  Probe
cagaaaagcctatacacctctatgg

SEQ ID NO: 350034 - DNA, 25 bp, Artificial
  Probe
gatccacaatgagcaactgctactc

SEQ ID NO: 350035 - DNA, 25 bp, Artificial
  Probe
agactacgaggcaagcagggcctgt

SEQ ID NO: 350036 - DNA, 25 bp, Artificial
  Probe
acagcaggtggtgactatgacaagt

SEQ ID NO: 350037 - DNA, 25 bp, Artificial
  Probe
tccccatggaagacgcagaaaagct

SEQ ID NO: 350038 - DNA, 25 bp, Artificial
  Probe
aaggagtttcactccgtaaatgatc

SEQ ID NO: 350039 - DNA, 25 bp, Artificial
  Probe
ggacagcaggtggtgactatgacaa

SEQ ID NO: 350040 - DNA, 25 bp, Artificial
  Probe
ggtgctgctggagtccgaagacaaa

SEQ ID NO: 350041 - DNA, 25 bp, Artificial
  Probe
ctcaccaagcccaggggacagcagg

SEQ ID NO: 350042 - DNA, 25 bp, Artificial
  Probe
caccaagatctgaggcgcccagaaa

SEQ ID NO: 350043 - DNA, 25 bp, Artificial
  Probe
cagcaggcggcagaccaaagcctca

SEQ ID NO: 350044 - DNA, 25 bp, Artificial
  Probe
tgctgggtgtctatcccgcagcctc

SEQ ID NO: 350045 - DNA, 25 bp, Artificial
  Probe
tgagcaactgctactccaaggtctg

SEQ ID NO: 350046 - DNA, 25 bp, Artificial
  Probe
tctgaagctattctggtaccttccc

SEQ ID NO: 350047 - DNA, 25 bp, Artificial
  Probe
gaacaaggagtttcactccgtaaat

SEQ ID NO: 350048 - DNA, 25 bp, Artificial
  Probe
tcagcccaagcctaagcctcaggtg

SEQ ID NO: 350049 - DNA, 25 bp, Artificial
  Probe
tgccaatgacgtcatcgatattatt

SEQ ID NO: 350050 - DNA, 25 bp, Artificial
  Probe
gtccgaagacaaacgaccagccggc

SEQ ID NO: 350051 - DNA, 25 bp, Artificial
  Probe
aatgccaagggcaggccgtccttcc

SEQ ID NO: 350052 - DNA, 25 bp, Artificial
  Probe
ctgctgggtgtctatcccgcagcct

SEQ ID NO: 350053 - DNA, 25 bp, Artificial
  Probe
gctggacttggtgtgaacaggcact

SEQ ID NO: 350054 - DNA, 25 bp, Artificial
  Probe
caaggtcccggaccagggtgctgct

SEQ ID NO: 350055 - DNA, 25 bp, Artificial
  Probe
tcactccgtaaatgatcctaaaagg

SEQ ID NO: 350056 - DNA, 25 bp, Artificial
  Probe
tattaaggaagatccttctggctgg

SEQ ID NO: 350057 - DNA, 25 bp, Artificial
  Probe
aaaggtagtctagttcccaggagcg

SEQ ID NO: 350058 - DNA, 25 bp, Artificial
  Probe
tctgaggcgcccagaaattgtcatg

SEQ ID NO: 350059 - DNA, 25 bp, Artificial
  Probe
aaatctggtgaaagcagcaggggct

SEQ ID NO: 350060 - DNA, 25 bp, Artificial
  Probe
ccttgccaaggcaacagtccacagg

SEQ ID NO: 350061 - DNA, 25 bp, Artificial
  Probe
tgatcctaaaaggtagtctagttcc

SEQ ID NO: 350062 - DNA, 25 bp, Artificial
  Probe
agcaggcggcagaccaaagcctcag

SEQ ID NO: 350063 - DNA, 25 bp, Artificial
  Probe
ctacgaggcaagcagggcctgtttc

SEQ ID NO: 350064 - DNA, 25 bp, Artificial
  Probe
cttccccatggaagacgcagaaaag

SEQ ID NO: 350065 - DNA, 25 bp, Artificial
  Probe
tgctggagtccgaagacaaacgacc

SEQ ID NO: 350066 - DNA, 25 bp, Artificial
  Probe
tggggactccccttctgatccacaa

SEQ ID NO: 350067 - DNA, 25 bp, Artificial
  Probe
ccttctgatccacaatgagcaactg

SEQ ID NO: 350068 - DNA, 25 bp, Artificial
  Probe
atgcaggcagaggagctccagacgt

SEQ ID NO: 350069 - DNA, 25 bp, Artificial
  Probe
tcttggtgatattcgccattgagat

SEQ ID NO: 350070 - DNA, 25 bp, Artificial
  Probe
gagctgtacaagagtcacagtgcat

SEQ ID NO: 350071 - DNA, 25 bp, Artificial
  Probe
ccacgcaagtccagcttgtaccatg

SEQ ID NO: 350072 - DNA, 25 bp, Artificial
  Probe
attgttcttcggattcctcttggtg

SEQ ID NO: 350073 - DNA, 25 bp, Artificial
  Probe
cagcttgtaccatgccggtcaaagg

SEQ ID NO: 350074 - DNA, 25 bp, Artificial
  Probe
ggctcgccggcatcgcagtgcttgc

SEQ ID NO: 350075 - DNA, 25 bp, Artificial
  Probe
atgctgggattgttcttcggattcc

SEQ ID NO: 350076 - DNA, 25 bp, Artificial
  Probe
ggctgcggttcgactctcagaccaa

SEQ ID NO: 350077 - DNA, 25 bp, Artificial
  Probe
gctgctgtggagctgtacaagagtc

SEQ ID NO: 350078 - DNA, 25 bp, Artificial
  Probe
atggctgcggttcgactctcagacc

SEQ ID NO: 350079 - DNA, 25 bp, Artificial
  Probe
gtgatattcgccattgagatcgccg

SEQ ID NO: 350080 - DNA, 25 bp, Artificial
  Probe
ctggggccctcatgatgctagttgg

SEQ ID NO: 350081 - DNA, 25 bp, Artificial
  Probe
tctgattggagctggggccctcatg

SEQ ID NO: 350082 - DNA, 25 bp, Artificial
  Probe
gcatcttcgagcaagaaactaatca

SEQ ID NO: 350083 - DNA, 25 bp, Artificial
  Probe
cgccggcatcgcagtgcttgccatt

SEQ ID NO: 350084 - DNA, 25 bp, Artificial
  Probe
gtaccatgccggtcaaaggaggtag

SEQ ID NO: 350085 - DNA, 25 bp, Artificial
  Probe
ctatggctgcggttcgactctcaga

SEQ ID NO: 350086 - DNA, 25 bp, Artificial
  Probe
gcagtgcttgccattggactatggc

SEQ ID NO: 350087 - DNA, 25 bp, Artificial
  Probe
aacttcatcttctggctcgccggca

SEQ ID NO: 350088 - DNA, 25 bp, Artificial
  Probe
ctacacaggagtgtacattctgatt

SEQ ID NO: 350089 - DNA, 25 bp, Artificial
  Probe
gatttaacttcatcttctggctcgc

SEQ ID NO: 350090 - DNA, 25 bp, Artificial
  Probe
gccattggactatggctgcggttcg

SEQ ID NO: 350091 - DNA, 25 bp, Artificial
  Probe
tggctcgccggcatcgcagtgcttg

SEQ ID NO: 350092 - DNA, 25 bp, Artificial
  Probe
tgtcccacgcaagtccagcttgtac

SEQ ID NO: 350093 - DNA, 25 bp, Artificial
  Probe
ctagttggtttcctgggctgctgtg

SEQ ID NO: 350094 - DNA, 25 bp, Artificial
  Probe
tgtacattctgattggagctggggc

SEQ ID NO: 350095 - DNA, 25 bp, Artificial
  Probe
gtgcatgctgggattgttcttcgga

SEQ ID NO: 350096 - DNA, 25 bp, Artificial
  Probe
atgccggtcaaaggaggtagcaagt

SEQ ID NO: 350097 - DNA, 25 bp, Artificial
  Probe
tcgccgcagccgtctggggctatac

SEQ ID NO: 350098 - DNA, 25 bp, Artificial
  Probe
cggattcctcttggtgatattcgcc

SEQ ID NO: 350099 - DNA, 25 bp, Artificial
  Probe
tgtacaagagtcacagtgcatgctg

SEQ ID NO: 350100 - DNA, 25 bp, Artificial
  Probe
catcgcagtgcttgccattggacta

SEQ ID NO: 350101 - DNA, 25 bp, Artificial
  Probe
tcgccattgagatcgccgcagccgt

SEQ ID NO: 350102 - DNA, 25 bp, Artificial
  Probe
tggatttaacttcatcttctggctc

SEQ ID NO: 350103 - DNA, 25 bp, Artificial
  Probe
gttcttcggattcctcttggtgata

SEQ ID NO: 350104 - DNA, 25 bp, Artificial
  Probe
tttaacttcatcttctggctcgccg

SEQ ID NO: 350105 - DNA, 25 bp, Artificial
  Probe
aatcattccagcttctacacaggag

SEQ ID NO: 350106 - DNA, 25 bp, Artificial
  Probe
ctttggatttaacttcatcttctgg

SEQ ID NO: 350107 - DNA, 25 bp, Artificial
  Probe
acaagagtcacagtgcatgctggga

SEQ ID NO: 350108 - DNA, 25 bp, Artificial
  Probe
tgggattgttcttcggattcctctt

SEQ ID NO: 350109 - DNA, 25 bp, Artificial
  Probe
cacagtgcatgctgggattgttctt

SEQ ID NO: 350110 - DNA, 25 bp, Artificial
  Probe
gctgtggagctgtacaagagtcaca

SEQ ID NO: 350111 - DNA, 25 bp, Artificial
  Probe
acacaggagtgtacattctgattgg

SEQ ID NO: 350112 - DNA, 25 bp, Artificial
  Probe
gagctggggccctcatgatgctagt

SEQ ID NO: 350113 - DNA, 25 bp, Artificial
  Probe
ttggactatggctgcggttcgactc

SEQ ID NO: 350114 - DNA, 25 bp, Artificial
  Probe
agtgcttgccattggactatggctg

SEQ ID NO: 350115 - DNA, 25 bp, Artificial
  Probe
gtatactttgagttgtaccaagcac

SEQ ID NO: 350116 - DNA, 25 bp, Artificial
  Probe
taaagagctagcagtaatggcctgg

SEQ ID NO: 350117 - DNA, 25 bp, Artificial
  Probe
cttcagagccccaaactcaggagtt

SEQ ID NO: 350118 - DNA, 25 bp, Artificial
  Probe
ataagctatatgctacaacctggac

SEQ ID NO: 350119 - DNA, 25 bp, Artificial
  Probe
ttcctgacacagatggccctcctat

SEQ ID NO: 350120 - DNA, 25 bp, Artificial
  Probe
agctagcagtaatggcctgggccaa

SEQ ID NO: 350121 - DNA, 25 bp, Artificial
  Probe
gcataacaaacaccagcctataggc

SEQ ID NO: 350122 - DNA, 25 bp, Artificial
  Probe
ctgtgaaccggatagggcatgagaa

SEQ ID NO: 350123 - DNA, 25 bp, Artificial
  Probe
gcatgagaatccacagaagaacctg

SEQ ID NO: 350124 - DNA, 25 bp, Artificial
  Probe
tcccagatacaataccttgcgcttg

SEQ ID NO: 350125 - DNA, 25 bp, Artificial
  Probe
tcaatacatgactaacagcctgctg

SEQ ID NO: 350126 - DNA, 25 bp, Artificial
  Probe
ctttgaactgagagtatgcgtatgc

SEQ ID NO: 350127 - DNA, 25 bp, Artificial
  Probe
ctattgcctgacatgtgtgatagaa

SEQ ID NO: 350128 - DNA, 25 bp, Artificial
  Probe
actttggtggacagctcggcctgtg

SEQ ID NO: 350129 - DNA, 25 bp, Artificial
  Probe
cagttaaagggcatagctggacact

SEQ ID NO: 350130 - DNA, 25 bp, Artificial
  Probe
tggcccagagcctggggatcatgtt

SEQ ID NO: 350131 - DNA, 25 bp, Artificial
  Probe
gacactcctgccaaatggtattccc

SEQ ID NO: 350132 - DNA, 25 bp, Artificial
  Probe
tagcctgtggctcaagcacatgatc

SEQ ID NO: 350133 - DNA, 25 bp, Artificial
  Probe
cttatgagctaaagagctagcagta

SEQ ID NO: 350134 - DNA, 25 bp, Artificial
  Probe
taaccctgacttagcctgtggctca

SEQ ID NO: 350135 - DNA, 25 bp, Artificial
  Probe
tcagtcgtctgtgtcattgaaatca

SEQ ID NO: 350136 - DNA, 25 bp, Artificial
  Probe
cagttgaccaatgagttgtaagaca

SEQ ID NO: 350137 - DNA, 25 bp, Artificial
  Probe
agagccttttcatcccagctcacag

SEQ ID NO: 350138 - DNA, 25 bp, Artificial
  Probe
acaatcatggtttgaggaggctctc

SEQ ID NO: 350139 - DNA, 25 bp, Artificial
  Probe
catggagagcccagccaacagtatt

SEQ ID NO: 350140 - DNA, 25 bp, Artificial
  Probe
gaagaaattagcaccatccttggat

SEQ ID NO: 350141 - DNA, 25 bp, Artificial
  Probe
acgctaaccctgacttagcctgtgg

SEQ ID NO: 350142 - DNA, 25 bp, Artificial
  Probe
ctgtgtcattgaaatcattgaagtc

SEQ ID NO: 350143 - DNA, 25 bp, Artificial
  Probe
gatgacctgcccacttttacctctg

SEQ ID NO: 350144 - DNA, 25 bp, Artificial
  Probe
gaatcatgcttcagagccccaaact

SEQ ID NO: 350145 - DNA, 25 bp, Artificial
  Probe
cacagaagaacctgatgggacctgc

SEQ ID NO: 350146 - DNA, 25 bp, Artificial
  Probe
ggtattcccacaatctcagctcaag

SEQ ID NO: 350147 - DNA, 25 bp, Artificial
  Probe
cacaggatcctgagagagaatcatg

SEQ ID NO: 350148 - DNA, 25 bp, Artificial
  Probe
cagctcaagtggtatactttgagtt

SEQ ID NO: 350149 - DNA, 25 bp, Artificial
  Probe
atcccagctcacagacactcagttg

SEQ ID NO: 350150 - DNA, 25 bp, Artificial
  Probe
gccgtcagtggcacaaagccaagga

SEQ ID NO: 350151 - DNA, 25 bp, Artificial
  Probe
cctccagccggcaaggccaggataa

SEQ ID NO: 350152 - DNA, 25 bp, Artificial
  Probe
tactctagggcataacaaacaccag

SEQ ID NO: 350153 - DNA, 25 bp, Artificial
  Probe
atggcctgggccaacagtgggctct

SEQ ID NO: 350154 - DNA, 25 bp, Artificial
  Probe
caaactcaggagtttacccacgcta

SEQ ID NO: 350155 - DNA, 25 bp, Artificial
  Probe
ggtagcaaggccagccagctattgc

SEQ ID NO: 350156 - DNA, 25 bp, Artificial
  Probe
agcacatgatcttgggtagcaaggc

SEQ ID NO: 350157 - DNA, 25 bp, Artificial
  Probe
tgcccacttttacctctgctatgcg

SEQ ID NO: 350158 - DNA, 25 bp, Artificial
  Probe
ttttacctctgctatgcgcctgcct

SEQ ID NO: 350159 - DNA, 25 bp, Artificial
  Probe
gtcagtggcacaaagccaaggattg

SEQ ID NO: 350160 - DNA, 25 bp, Artificial
  Probe
gagagaatcatgcttcagagcccca

SEQ ID NO: 350161 - DNA, 25 bp, Artificial
  Probe
cacagagtcggtgaaggaatatgac

SEQ ID NO: 350162 - DNA, 25 bp, Artificial
  Probe
caacaagtgtctgctgaaggtggct

SEQ ID NO: 350163 - DNA, 25 bp, Artificial
  Probe
ctccatctccagactggaccagtgg

SEQ ID NO: 350164 - DNA, 25 bp, Artificial
  Probe
ctgccttctcggattcccgggaatg

SEQ ID NO: 350165 - DNA, 25 bp, Artificial
  Probe
gtagagaaggccattgcccactacg

SEQ ID NO: 350166 - DNA, 25 bp, Artificial
  Probe
cttgctgttcagaagtatgaggagc

SEQ ID NO: 350167 - DNA, 25 bp, Artificial
  Probe
actactacaaaggagaagagtccaa

SEQ ID NO: 350168 - DNA, 25 bp, Artificial
  Probe
ttccacccatctgtctgtcacagag

SEQ ID NO: 350169 - DNA, 25 bp, Artificial
  Probe
agaagagtccaacagctcagccaac

SEQ ID NO: 350170 - DNA, 25 bp, Artificial
  Probe
gccttctcggattcccgggaatgca

SEQ ID NO: 350171 - DNA, 25 bp, Artificial
  Probe
cgcacagctggagcagtaccagaag

SEQ ID NO: 350172 - DNA, 25 bp, Artificial
  Probe
ttgctgagatctatgagacagaact

SEQ ID NO: 350173 - DNA, 25 bp, Artificial
  Probe
acctgctttgtggacgccggcaacg

SEQ ID NO: 350174 - DNA, 25 bp, Artificial
  Probe
agtatgaggagctgttccctgcctt

SEQ ID NO: 350175 - DNA, 25 bp, Artificial
  Probe
tcgacatgctgaacgccaagcttgc

SEQ ID NO: 350176 - DNA, 25 bp, Artificial
  Probe
gaacgccaagcttgctgttcagaag

SEQ ID NO: 350177 - DNA, 25 bp, Artificial
  Probe
agcaccacatctccattgctgagat

SEQ ID NO: 350178 - DNA, 25 bp, Artificial
  Probe
aaagctgctggaagcccatgaggaa

SEQ ID NO: 350179 - DNA, 25 bp, Artificial
  Probe
cgctttcaagaaagctgacccccaa

SEQ ID NO: 350180 - DNA, 25 bp, Artificial
  Probe
actacttcttcaaggcggccctttg

SEQ ID NO: 350181 - DNA, 25 bp, Artificial
  Probe
gaatgtggacagctacacagagtcg

SEQ ID NO: 350182 - DNA, 25 bp, Artificial
  Probe
ttgagatctatacagacatgggcag

SEQ ID NO: 350183 - DNA, 25 bp, Artificial
  Probe
gtggacgccggcaacgctttcaaga

SEQ ID NO: 350184 - DNA, 25 bp, Artificial
  Probe
caccatgcttctacgaatcaagaag

SEQ ID NO: 350185 - DNA, 25 bp, Artificial
  Probe
attcagggtgatgaggaagacctgc

SEQ ID NO: 350186 - DNA, 25 bp, Artificial
  Probe
tcacagaggtggagccaacacctcc

SEQ ID NO: 350187 - DNA, 25 bp, Artificial
  Probe
ctccaccaggagtctgaaggagtgg

SEQ ID NO: 350188 - DNA, 25 bp, Artificial
  Probe
agcccatgaggaacagaatgtggac

SEQ ID NO: 350189 - DNA, 25 bp, Artificial
  Probe
cccgggaatgcaagctgatgaaaaa

SEQ ID NO: 350190 - DNA, 25 bp, Artificial
  Probe
agctgacccccaagaggccattaac

SEQ ID NO: 350191 - DNA, 25 bp, Artificial
  Probe
tcaaggcggccctttgccacttctg

SEQ ID NO: 350192 - DNA, 25 bp, Artificial
  Probe
cggattcccgggaatgcaagctgat

SEQ ID NO: 350193 - DNA, 25 bp, Artificial
  Probe
agggcaccaggcaagctctcctgga

SEQ ID NO: 350194 - DNA, 25 bp, Artificial
  Probe
ctgtctgatgagagcaattgagatc

SEQ ID NO: 350195 - DNA, 25 bp, Artificial
  Probe
aaggcggccctttgccacttctgca

SEQ ID NO: 350196 - DNA, 25 bp, Artificial
  Probe
cagacatgggcagattcacaatcgc

SEQ ID NO: 350197 - DNA, 25 bp, Artificial
  Probe
gcagattcacaatcgcagccaagca

SEQ ID NO: 350198 - DNA, 25 bp, Artificial
  Probe
cctttgccacttctgcatcgacatg

SEQ ID NO: 350199 - DNA, 25 bp, Artificial
  Probe
tgctggaagcccatgaggaacagaa

SEQ ID NO: 350200 - DNA, 25 bp, Artificial
  Probe
aaggaatatgactccatctccagac

SEQ ID NO: 350201 - DNA, 25 bp, Artificial
  Probe
cagccaacaagtgtctgctgaaggt

SEQ ID NO: 350202 - DNA, 25 bp, Artificial
  Probe
ctatcgacatctatgagcaggtggg

SEQ ID NO: 350203 - DNA, 25 bp, Artificial
  Probe
atgaggaagacctgcgctaggcctc

SEQ ID NO: 350204 - DNA, 25 bp, Artificial
  Probe
ggagctgttccctgccttctcggat

SEQ ID NO: 350205 - DNA, 25 bp, Artificial
  Probe
ctcctcaagtacagcgccaaagact

SEQ ID NO: 350206 - DNA, 25 bp, Artificial
  Probe
gtccaacagctcagccaacaagtgt

SEQ ID NO: 350207 - DNA, 25 bp, Artificial
  Probe
taatgcattgtctgcccagccagca

SEQ ID NO: 350208 - DNA, 25 bp, Artificial
  Probe
ataatgcattgtctgcccagccagc

SEQ ID NO: 350209 - DNA, 25 bp, Artificial
  Probe
tgggttctcggactattgaaggagc

SEQ ID NO: 350210 - DNA, 25 bp, Artificial
  Probe
gagactgttctgttccttgtgtaat

SEQ ID NO: 350211 - DNA, 25 bp, Artificial
  Probe
gactgttctgttccttgtgtaattg

SEQ ID NO: 350212 - DNA, 25 bp, Artificial
  Probe
tctgcccagccagcaaaggcaatgc

SEQ ID NO: 350213 - DNA, 25 bp, Artificial
  Probe
ggagcctaaccatctggcatctcca

SEQ ID NO: 350214 - DNA, 25 bp, Artificial
  Probe
ggcaatgctgaatcgtcccaccagc

SEQ ID NO: 350215 - DNA, 25 bp, Artificial
  Probe
agccaggcagggtcacagcagactg

SEQ ID NO: 350216 - DNA, 25 bp, Artificial
  Probe
cccaaagacacaggaaataatgcat

SEQ ID NO: 350217 - DNA, 25 bp, Artificial
  Probe
tctggcatctccatggcctctgcaa

SEQ ID NO: 350218 - DNA, 25 bp, Artificial
  Probe
aaaggcaatgctgaatcgtcccacc

SEQ ID NO: 350219 - DNA, 25 bp, Artificial
  Probe
taagtccctttctgcccactgggct

SEQ ID NO: 350220 - DNA, 25 bp, Artificial
  Probe
gaaacatcggccacacatgtgcagg

SEQ ID NO: 350221 - DNA, 25 bp, Artificial
  Probe
ccaggcagggtcacagcagactgga

SEQ ID NO: 350222 - DNA, 25 bp, Artificial
  Probe
taaccatctggcatctccatggcct

SEQ ID NO: 350223 - DNA, 25 bp, Artificial
  Probe
cgggacattgggttctcggactatt

SEQ ID NO: 350224 - DNA, 25 bp, Artificial
  Probe
tcggccacacatgtgcaggctgggt

SEQ ID NO: 350225 - DNA, 25 bp, Artificial
  Probe
ggtataagtccctttctgcccactg

SEQ ID NO: 350226 - DNA, 25 bp, Artificial
  Probe
ctgccgggacattgggttctcggac

SEQ ID NO: 350227 - DNA, 25 bp, Artificial
  Probe
ccagcaaaggcaatgctgaatcgtc

SEQ ID NO: 350228 - DNA, 25 bp, Artificial
  Probe
cattgtctgcccagccagcaaaggc

SEQ ID NO: 350229 - DNA, 25 bp, Artificial
  Probe
tctcggactattgaaggagcctaac

SEQ ID NO: 350230 - DNA, 25 bp, Artificial
  Probe
tgtctttgtgtgtcaccggggcaac

SEQ ID NO: 350231 - DNA, 25 bp, Artificial
  Probe
atctggcatctccatggcctctgca

SEQ ID NO: 350232 - DNA, 25 bp, Artificial
  Probe
tgcccagccagcaaaggcaatgctg

SEQ ID NO: 350233 - DNA, 25 bp, Artificial
  Probe
tgaagacctatgtgggtataagtcc

SEQ ID NO: 350234 - DNA, 25 bp, Artificial
  Probe
cttgcttgaagacctatgtgggtat

SEQ ID NO: 350235 - DNA, 25 bp, Artificial
  Probe
agcctaaccatctggcatctccatg

SEQ ID NO: 350236 - DNA, 25 bp, Artificial
  Probe
accttcaaatcctgccgggacattg

SEQ ID NO: 350237 - DNA, 25 bp, Artificial
  Probe
cccccaaagacacaggaaataatgc

SEQ ID NO: 350238 - DNA, 25 bp, Artificial
  Probe
attgaaggagcctaaccatctggca

SEQ ID NO: 350239 - DNA, 25 bp, Artificial
  Probe
gccagcaaaggcaatgctgaatcgt

SEQ ID NO: 350240 - DNA, 25 bp, Artificial
  Probe
gagagactgttctgttccttgtgta

SEQ ID NO: 350241 - DNA, 25 bp, Artificial
  Probe
tcctgccgggacattgggttctcgg

SEQ ID NO: 350242 - DNA, 25 bp, Artificial
  Probe
agcaccttcaaatcctgccgggaca

SEQ ID NO: 350243 - DNA, 25 bp, Artificial
  Probe
cagcagactggaaacatcggccaca

SEQ ID NO: 350244 - DNA, 25 bp, Artificial
  Probe
tgggcttatgataccccaaatgctg

SEQ ID NO: 350245 - DNA, 25 bp, Artificial
  Probe
aatcctgccgggacattgggttctc

SEQ ID NO: 350246 - DNA, 25 bp, Artificial
  Probe
aggcaatgctgaatcgtcccaccag

SEQ ID NO: 350247 - DNA, 25 bp, Artificial
  Probe
cccagccagcaaaggcaatgctgaa

SEQ ID NO: 350248 - DNA, 25 bp, Artificial
  Probe
tgcccactgggcttatgatacccca

SEQ ID NO: 350249 - DNA, 25 bp, Artificial
  Probe
aacatcggccacacatgtgcaggct

SEQ ID NO: 350250 - DNA, 25 bp, Artificial
  Probe
caaaggcaatgctgaatcgtcccac

SEQ ID NO: 350251 - DNA, 25 bp, Artificial
  Probe
gacattgggttctcggactattgaa

SEQ ID NO: 350252 - DNA, 25 bp, Artificial
  Probe
aggcagggtcacagcagactggaaa

SEQ ID NO: 350253 - DNA, 25 bp, Artificial
  Probe
ggaaacatcttcaccctttaccagg

SEQ ID NO: 350254 - DNA, 25 bp, Artificial
  Probe
tcaccacgtgcaggtcacacacagt

SEQ ID NO: 350255 - DNA, 25 bp, Artificial
  Probe
aaggccagccctctgcgtttgtcct

SEQ ID NO: 350256 - DNA, 25 bp, Artificial
  Probe
accctggtgccctataccctggtgt

SEQ ID NO: 350257 - DNA, 25 bp, Artificial
  Probe
ccgtggcccctgtgcctgttcggtg

SEQ ID NO: 350258 - DNA, 25 bp, Artificial
  Probe
gggtggtccccaaggtcgctgccac

SEQ ID NO: 350259 - DNA, 25 bp, Artificial
  Probe
ccggacttctctggaaaaccgcctg

SEQ ID NO: 350260 - DNA, 25 bp, Artificial
  Probe
cagagaccagtgtgtttacttgtaa

SEQ ID NO: 350261 - DNA, 25 bp, Artificial
  Probe
tgggggcttctgtgtgcctgttaat

SEQ ID NO: 350262 - DNA, 25 bp, Artificial
  Probe
ttgggaagatcctgagcgagaaact

SEQ ID NO: 350263 - DNA, 25 bp, Artificial
  Probe
tgggtggtccccaaggtcgctgcca

SEQ ID NO: 350264 - DNA, 25 bp, Artificial
  Probe
cacctcagaggagcagctcctggag

SEQ ID NO: 350265 - DNA, 25 bp, Artificial
  Probe
gtgtcccagagaagcctggcaccag

SEQ ID NO: 350266 - DNA, 25 bp, Artificial
  Probe
ccttttacattttgatgtgtcaaag

SEQ ID NO: 350267 - DNA, 25 bp, Artificial
  Probe
ctgcagtaggacaggagggacatct

SEQ ID NO: 350268 - DNA, 25 bp, Artificial
  Probe
acaggggccagttggaccccagcag

SEQ ID NO: 350269 - DNA, 25 bp, Artificial
  Probe
tgctcagctgtgtccgccaggccat

SEQ ID NO: 350270 - DNA, 25 bp, Artificial
  Probe
tcagtgggtctgtgccccgtggccc

SEQ ID NO: 350271 - DNA, 25 bp, Artificial
  Probe
tccttggcacatgaggccggctctc

SEQ ID NO: 350272 - DNA, 25 bp, Artificial
  Probe
acttgtaaataaagcctctgggtgg

SEQ ID NO: 350273 - DNA, 25 bp, Artificial
  Probe
catcgccgacgagcagaagaaggtg

SEQ ID NO: 350274 - DNA, 25 bp, Artificial
  Probe
tcctccaagggtttaagaagtgcct

SEQ ID NO: 350275 - DNA, 25 bp, Artificial
  Probe
accccagcaggatggagggctccag

SEQ ID NO: 350276 - DNA, 25 bp, Artificial
  Probe
agaagctcaagaagggcctacagcg

SEQ ID NO: 350277 - DNA, 25 bp, Artificial
  Probe
tggacggagcagagcccccgatgat

SEQ ID NO: 350278 - DNA, 25 bp, Artificial
  Probe
ggccctcttggcacagctgtgggct

SEQ ID NO: 350279 - DNA, 25 bp, Artificial
  Probe
cctggcagagtacttgagccaggag

SEQ ID NO: 350280 - DNA, 25 bp, Artificial
  Probe
gcttctgggccgagagctgcctcac

SEQ ID NO: 350281 - DNA, 25 bp, Artificial
  Probe
ctggagcgacctggacggcctgctc

SEQ ID NO: 350282 - DNA, 25 bp, Artificial
  Probe
atgcagtcctgttcctcagcccagg

SEQ ID NO: 350283 - DNA, 25 bp, Artificial
  Probe
tggagacggtactttcagtgggtct

SEQ ID NO: 350284 - DNA, 25 bp, Artificial
  Probe
aggccatcgccgacgagcagaagaa

SEQ ID NO: 350285 - DNA, 25 bp, Artificial
  Probe
tctgtcaacgagaagatggcaaaga

SEQ ID NO: 350286 - DNA, 25 bp, Artificial
  Probe
accaaaagcacagaggcagcgggtg

SEQ ID NO: 350287 - DNA, 25 bp, Artificial
  Probe
atcgtcatccacgtctctgtcaacg

SEQ ID NO: 350288 - DNA, 25 bp, Artificial
  Probe
atggaaaagaacacccatgccctcc

SEQ ID NO: 350289 - DNA, 25 bp, Artificial
  Probe
cttgcccggggcagaggcataagcc

SEQ ID NO: 350290 - DNA, 25 bp, Artificial
  Probe
ggatggacatcttccccatcgtcat

SEQ ID NO: 350291 - DNA, 25 bp, Artificial
  Probe
ggtgacccgccatgctgtggagtcc

SEQ ID NO: 350292 - DNA, 25 bp, Artificial
  Probe
tgtgtcaaaggcttttggagtgacc

SEQ ID NO: 350293 - DNA, 25 bp, Artificial
  Probe
gaccgggcgccctgtctatacagca

SEQ ID NO: 350294 - DNA, 25 bp, Artificial
  Probe
ggcccgattcaaatctatgggggct

SEQ ID NO: 350295 - DNA, 25 bp, Artificial
  Probe
atgccctcctggacgtccagctgga

SEQ ID NO: 350296 - DNA, 25 bp, Artificial
  Probe
ctgtgctcctcgtgcccagggcggt

SEQ ID NO: 350297 - DNA, 25 bp, Artificial
  Probe
tataccctggtgtggccccatcgac

SEQ ID NO: 350298 - DNA, 25 bp, Artificial
  Probe
atcctgagcgagaaactgtgcctcc

SEQ ID NO: 350299 - DNA, 25 bp, Artificial
  Probe
cgaccctctgctgatgggcataccg

SEQ ID NO: 350300 - DNA, 25 bp, Artificial
  Probe
atgcccggagcgaccctctgctgat

SEQ ID NO: 350301 - DNA, 25 bp, Artificial
  Probe
gtcatactgtgaggagcatgcccgg

SEQ ID NO: 350302 - DNA, 25 bp, Artificial
  Probe
aaagcatctgcagacctgatgtcat

SEQ ID NO: 350303 - DNA, 25 bp, Artificial
  Probe
tgggcataccgacctcagaaaaccc

SEQ ID NO: 350304 - DNA, 25 bp, Artificial
  Probe
aagcatctgcagacctgatgtcata

SEQ ID NO: 350305 - DNA, 25 bp, Artificial
  Probe
gagcgaccctctgctgatgggcata

SEQ ID NO: 350306 - DNA, 25 bp, Artificial
  Probe
gctgatgggcataccgacctcagaa

SEQ ID NO: 350307 - DNA, 25 bp, Artificial
  Probe
cctgatgtcatactgtgaggagcat

SEQ ID NO: 350308 - DNA, 25 bp, Artificial
  Probe
agcctccatcgaaagaataaaggtc

SEQ ID NO: 350309 - DNA, 25 bp, Artificial
  Probe
gcccaagctaggagaactgtgcagc

SEQ ID NO: 350310 - DNA, 25 bp, Artificial
  Probe
cccaagctaggagaactgtgcagca

SEQ ID NO: 350311 - DNA, 25 bp, Artificial
  Probe
agcccaagctaggagaactgtgcag

SEQ ID NO: 350312 - DNA, 25 bp, Artificial
  Probe
caaagcatctgcagacctgatgtca

SEQ ID NO: 350313 - DNA, 25 bp, Artificial
  Probe
agcatctgcagacctgatgtcatac

SEQ ID NO: 350314 - DNA, 25 bp, Artificial
  Probe
gattggaagcctccatcgaaagaat

SEQ ID NO: 350315 - DNA, 25 bp, Artificial
  Probe
ggagaactgtgcagcagctgagatt

SEQ ID NO: 350316 - DNA, 25 bp, Artificial
  Probe
tgtgcagcagctgagattggaagcc

SEQ ID NO: 350317 - DNA, 25 bp, Artificial
  Probe
ctgatgtcatactgtgaggagcatg

SEQ ID NO: 350318 - DNA, 25 bp, Artificial
  Probe
tgcagcagctgagattggaagcctc

SEQ ID NO: 350319 - DNA, 25 bp, Artificial
  Probe
ttggaagcctccatcgaaagaataa

SEQ ID NO: 350320 - DNA, 25 bp, Artificial
  Probe
cagcccaagctaggagaactgtgca

SEQ ID NO: 350321 - DNA, 25 bp, Artificial
  Probe
ctccatcgaaagaataaaggtctcc

SEQ ID NO: 350322 - DNA, 25 bp, Artificial
  Probe
agattggaagcctccatcgaaagaa

SEQ ID NO: 350323 - DNA, 25 bp, Artificial
  Probe
cctccatcgaaagaataaaggtctc

SEQ ID NO: 350324 - DNA, 25 bp, Artificial
  Probe
gggcataccgacctcagaaaaccca

SEQ ID NO: 350325 - DNA, 25 bp, Artificial
  Probe
agaactgtgcagcagctgagattgg

SEQ ID NO: 350326 - DNA, 25 bp, Artificial
  Probe
atgggcataccgacctcagaaaacc

SEQ ID NO: 350327 - DNA, 25 bp, Artificial
  Probe
gcacagcccaagctaggagaactgt

SEQ ID NO: 350328 - DNA, 25 bp, Artificial
  Probe
ctgctgatgggcataccgacctcag

SEQ ID NO: 350329 - DNA, 25 bp, Artificial
  Probe
atactgtgaggagcatgcccggagc

SEQ ID NO: 350330 - DNA, 25 bp, Artificial
  Probe
agacctgatgtcatactgtgaggag

SEQ ID NO: 350331 - DNA, 25 bp, Artificial
  Probe
agcgaccctctgctgatgggcatac

SEQ ID NO: 350332 - DNA, 25 bp, Artificial
  Probe
ccggagcgaccctctgctgatgggc

SEQ ID NO: 350333 - DNA, 25 bp, Artificial
  Probe
gaccctctgctgatgggcataccga

SEQ ID NO: 350334 - DNA, 25 bp, Artificial
  Probe
gcctccatcgaaagaataaaggtct

SEQ ID NO: 350335 - DNA, 25 bp, Artificial
  Probe
aactgtgcagcagctgagattggaa

SEQ ID NO: 350336 - DNA, 25 bp, Artificial
  Probe
atgtcatactgtgaggagcatgccc

SEQ ID NO: 350337 - DNA, 25 bp, Artificial
  Probe
attggaagcctccatcgaaagaata

SEQ ID NO: 350338 - DNA, 25 bp, Artificial
  Probe
tcatactgtgaggagcatgcccgga

SEQ ID NO: 350339 - DNA, 25 bp, Artificial
  Probe
gcagcagctgagattggaagcctcc

SEQ ID NO: 350340 - DNA, 25 bp, Artificial
  Probe
actgtgcagcagctgagattggaag

SEQ ID NO: 350341 - DNA, 25 bp, Artificial
  Probe
acagcccaagctaggagaactgtgc

SEQ ID NO: 350342 - DNA, 25 bp, Artificial
  Probe
ggaagcctccatcgaaagaataaag

SEQ ID NO: 350343 - DNA, 25 bp, Artificial
  Probe
accctctgctgatgggcataccgac

SEQ ID NO: 350344 - DNA, 25 bp, Artificial
  Probe
cggagcgaccctctgctgatgggca

SEQ ID NO: 350345 - DNA, 25 bp, Artificial
  Probe
tgccagtgatgtccccttttgcata

SEQ ID NO: 350346 - DNA, 25 bp, Artificial
  Probe
cacacaccacagtgcagtgccagtg

SEQ ID NO: 350347 - DNA, 25 bp, Artificial
  Probe
ccccacaaagtgtcgagcgcctcgg

SEQ ID NO: 350348 - DNA, 25 bp, Artificial
  Probe
acagtgcagtgccagtgatgtcccc

SEQ ID NO: 350349 - DNA, 25 bp, Artificial
  Probe
tgtccccttttgcatatttagtggt

SEQ ID NO: 350350 - DNA, 25 bp, Artificial
  Probe
cacagtgcagtgccagtgatgtccc

SEQ ID NO: 350351 - DNA, 25 bp, Artificial
  Probe
gcagtgccagtgatgtccccttttg

SEQ ID NO: 350352 - DNA, 25 bp, Artificial
  Probe
ccagtgatgtccccttttgcatatt

SEQ ID NO: 350353 - DNA, 25 bp, Artificial
  Probe
agtgccagtgatgtccccttttgca

SEQ ID NO: 350354 - DNA, 25 bp, Artificial
  Probe
agtgtcgagcgcctcgggaaacttg

SEQ ID NO: 350355 - DNA, 25 bp, Artificial
  Probe
tgcagtgccagtgatgtcccctttt

SEQ ID NO: 350356 - DNA, 25 bp, Artificial
  Probe
gtgccagtgatgtccccttttgcat

SEQ ID NO: 350357 - DNA, 25 bp, Artificial
  Probe
aagtgtcgagcgcctcgggaaactt

SEQ ID NO: 350358 - DNA, 25 bp, Artificial
  Probe
cacaaagtgtcgagcgcctcgggaa

SEQ ID NO: 350359 - DNA, 25 bp, Artificial
  Probe
accacagtgcagtgccagtgatgtc

SEQ ID NO: 350360 - DNA, 25 bp, Artificial
  Probe
tctgccccacaaagtgtcgagcgcc

SEQ ID NO: 350361 - DNA, 25 bp, Artificial
  Probe
acaccacagtgcagtgccagtgatg

SEQ ID NO: 350362 - DNA, 25 bp, Artificial
  Probe
cagtgcagtgccagtgatgtcccct

SEQ ID NO: 350363 - DNA, 25 bp, Artificial
  Probe
acaaagtgtcgagcgcctcgggaaa

SEQ ID NO: 350364 - DNA, 25 bp, Artificial
  Probe
cacaccacagtgcagtgccagtgat

SEQ ID NO: 350365 - DNA, 25 bp, Artificial
  Probe
gccagtgatgtccccttttgcatat

SEQ ID NO: 350366 - DNA, 25 bp, Artificial
  Probe
acacaccacagtgcagtgccagtga

SEQ ID NO: 350367 - DNA, 25 bp, Artificial
  Probe
acacacaccacagtgcagtgccagt

SEQ ID NO: 350368 - DNA, 25 bp, Artificial
  Probe
gtgcagtgccagtgatgtccccttt

SEQ ID NO: 350369 - DNA, 25 bp, Artificial
  Probe
gtgatgtccccttttgcatatttag

SEQ ID NO: 350370 - DNA, 25 bp, Artificial
  Probe
caaagtgtcgagcgcctcgggaaac

SEQ ID NO: 350371 - DNA, 25 bp, Artificial
  Probe
agtgatgtccccttttgcatattta

SEQ ID NO: 350372 - DNA, 25 bp, Artificial
  Probe
atgtccccttttgcatatttagtgg

SEQ ID NO: 350373 - DNA, 25 bp, Artificial
  Probe
tgccccacaaagtgtcgagcgcctc

SEQ ID NO: 350374 - DNA, 25 bp, Artificial
  Probe
ctctgccccacaaagtgtcgagcgc

SEQ ID NO: 350375 - DNA, 25 bp, Artificial
  Probe
cagtgatgtccccttttgcatattt

SEQ ID NO: 350376 - DNA, 25 bp, Artificial
  Probe
actctgccccacaaagtgtcgagcg

SEQ ID NO: 350377 - DNA, 25 bp, Artificial
  Probe
ctgccccacaaagtgtcgagcgcct

SEQ ID NO: 350378 - DNA, 25 bp, Artificial
  Probe
aaagtgtcgagcgcctcgggaaact

SEQ ID NO: 350379 - DNA, 25 bp, Artificial
  Probe
ccacagtgcagtgccagtgatgtcc

SEQ ID NO: 350380 - DNA, 25 bp, Artificial
  Probe
tgatgtccccttttgcatatttagt

SEQ ID NO: 350381 - DNA, 25 bp, Artificial
  Probe
gatgtccccttttgcatatttagtg

SEQ ID NO: 350382 - DNA, 25 bp, Artificial
  Probe
caccacagtgcagtgccagtgatgt

SEQ ID NO: 350383 - DNA, 25 bp, Artificial
  Probe
agtgcagtgccagtgatgtcccctt

SEQ ID NO: 350384 - DNA, 25 bp, Artificial
  Probe
cagtgccagtgatgtccccttttgc

SEQ ID NO: 350385 - DNA, 25 bp, Artificial
  Probe
cccacaaagtgtcgagcgcctcggg

SEQ ID NO: 350386 - DNA, 25 bp, Artificial
  Probe
gccccacaaagtgtcgagcgcctcg

SEQ ID NO: 350387 - DNA, 25 bp, Artificial
  Probe
ccacaaagtgtcgagcgcctcggga

SEQ ID NO: 350388 - DNA, 25 bp, Artificial
  Probe
acacacacacaccacagtgcagtgc

SEQ ID NO: 350389 - DNA, 25 bp, Artificial
  Probe
acacacacaccacagtgcagtgcca

SEQ ID NO: 350390 - DNA, 25 bp, Artificial
  Probe
actgaactctaaggaaggttattca

SEQ ID NO: 350391 - DNA, 25 bp, Artificial
  Probe
gaaggcttgatttcaaccctgagtt

SEQ ID NO: 350392 - DNA, 25 bp, Artificial
  Probe
gtcactggacaatggctgacacact

SEQ ID NO: 350393 - DNA, 25 bp, Artificial
  Probe
agaaggaccctccaactacactgaa

SEQ ID NO: 350394 - DNA, 25 bp, Artificial
  Probe
ctaccagttgactgtgattataaag

SEQ ID NO: 350395 - DNA, 25 bp, Artificial
  Probe
catgtattgtgtctcttgtgcattg

SEQ ID NO: 350396 - DNA, 25 bp, Artificial
  Probe
ggcttgatttcaaccctgagttcat

SEQ ID NO: 350397 - DNA, 25 bp, Artificial
  Probe
tgggatgaggctttgcctcactttg

SEQ ID NO: 350398 - DNA, 25 bp, Artificial
  Probe
aagacagctcttgctttccttgact

SEQ ID NO: 350399 - DNA, 25 bp, Artificial
  Probe
ttgacaatgtggacatctcaagaca

SEQ ID NO: 350400 - DNA, 25 bp, Artificial
  Probe
ttgggcaggctggatgatgacattc

SEQ ID NO: 350401 - DNA, 25 bp, Artificial
  Probe
ctgaaactgccctaagcgagaagca

SEQ ID NO: 350402 - DNA, 25 bp, Artificial
  Probe
ctggacaatggctgacacacttgtc

SEQ ID NO: 350403 - DNA, 25 bp, Artificial
  Probe
gaaactgccctaagcgagaagcagg

SEQ ID NO: 350404 - DNA, 25 bp, Artificial
  Probe
aaggttattcagatctcaagactgg

SEQ ID NO: 350405 - DNA, 25 bp, Artificial
  Probe
agctcttgctttccttgactttgta

SEQ ID NO: 350406 - DNA, 25 bp, Artificial
  Probe
atgacattcagttgacaatgtggac

SEQ ID NO: 350407 - DNA, 25 bp, Artificial
  Probe
cttgtctgaagactggaaatgtttc

SEQ ID NO: 350408 - DNA, 25 bp, Artificial
  Probe
ctcactttgggcaggctggatgatg

SEQ ID NO: 350409 - DNA, 25 bp, Artificial
  Probe
agatcctaccagactctctatggga

SEQ ID NO: 350410 - DNA, 25 bp, Artificial
  Probe
tttgcctcactttgggcaggctgga

SEQ ID NO: 350411 - DNA, 25 bp, Artificial
  Probe
ctgccctaagcgagaagcaggctaa

SEQ ID NO: 350412 - DNA, 25 bp, Artificial
  Probe
ttctgaaggcttgatttcaaccctg

SEQ ID NO: 350413 - DNA, 25 bp, Artificial
  Probe
ccagactctctatgggatgaggctt

SEQ ID NO: 350414 - DNA, 25 bp, Artificial
  Probe
aaactgaccctgctaccagttgact

SEQ ID NO: 350415 - DNA, 25 bp, Artificial
  Probe
ccctaagcgagaagcaggctaagaa

SEQ ID NO: 350416 - DNA, 25 bp, Artificial
  Probe
ttcagttgacaatgtggacatctca

SEQ ID NO: 350417 - DNA, 25 bp, Artificial
  Probe
gacattcagttgacaatgtggacat

SEQ ID NO: 350418 - DNA, 25 bp, Artificial
  Probe
gaaggggttgtctctcttgtggatc

SEQ ID NO: 350419 - DNA, 25 bp, Artificial
  Probe
atgggatgaggctttgcctcacttt

SEQ ID NO: 350420 - DNA, 25 bp, Artificial
  Probe
atcgataaagaccagcaacctccag

SEQ ID NO: 350421 - DNA, 25 bp, Artificial
  Probe
caacagccaacagctgcacagcaga

SEQ ID NO: 350422 - DNA, 25 bp, Artificial
  Probe
aagccaacagccaacagctgcacag

SEQ ID NO: 350423 - DNA, 25 bp, Artificial
  Probe
attcatgtattgtgtctcttgtgca

SEQ ID NO: 350424 - DNA, 25 bp, Artificial
  Probe
actctctatgggatgaggctttgcc

SEQ ID NO: 350425 - DNA, 25 bp, Artificial
  Probe
ctctatgggatgaggctttgcctca

SEQ ID NO: 350426 - DNA, 25 bp, Artificial
  Probe
cagatctcaagactggttaaccccc

SEQ ID NO: 350427 - DNA, 25 bp, Artificial
  Probe
tgaggctttgcctcactttgggcag

SEQ ID NO: 350428 - DNA, 25 bp, Artificial
  Probe
aacagctgcacagcagagagatggg

SEQ ID NO: 350429 - DNA, 25 bp, Artificial
  Probe
gtttctgaaggcttgatttcaaccc

SEQ ID NO: 350430 - DNA, 25 bp, Artificial
  Probe
tgtctgaagactggaaatgtttctc

SEQ ID NO: 350431 - DNA, 25 bp, Artificial
  Probe
ccaactacactgaactctaaggaag

SEQ ID NO: 350432 - DNA, 25 bp, Artificial
  Probe
cttgtggatcttctccagaagaaga

SEQ ID NO: 350433 - DNA, 25 bp, Artificial
  Probe
tataaagaagccaacagccaacagc

SEQ ID NO: 350434 - DNA, 25 bp, Artificial
  Probe
ctttgtttctgaaggcttgatttca

SEQ ID NO: 350435 - DNA, 25 bp, Artificial
  Probe
ctttgggcaggctggatgatgacat

SEQ ID NO: 350436 - DNA, 25 bp, Artificial
  Probe
aggtcatccactataaaagcagaac

SEQ ID NO: 350437 - DNA, 25 bp, Artificial
  Probe
ccggcctataaagcacttggcaggg

SEQ ID NO: 350438 - DNA, 25 bp, Artificial
  Probe
agggagcctggctgaacactcactg

SEQ ID NO: 350439 - DNA, 25 bp, Artificial
  Probe
gagcctggctgaacactcactgact

SEQ ID NO: 350440 - DNA, 25 bp, Artificial
  Probe
gcctataaagcacttggcagggagc

SEQ ID NO: 350441 - DNA, 25 bp, Artificial
  Probe
aacactcactgactgaagaacctgg

SEQ ID NO: 350442 - DNA, 25 bp, Artificial
  Probe
cagccaaggtcatccactataaaag

SEQ ID NO: 350443 - DNA, 25 bp, Artificial
  Probe
ctataaagcacttggcagggagcct

SEQ ID NO: 350444 - DNA, 25 bp, Artificial
  Probe
tggccggcctataaagcacttggca

SEQ ID NO: 350445 - DNA, 25 bp, Artificial
  Probe
gctgaacactcactgactgaagaac

SEQ ID NO: 350446 - DNA, 25 bp, Artificial
  Probe
gaacaatagtctgcaagctattgaa

SEQ ID NO: 350447 - DNA, 25 bp, Artificial
  Probe
actcactgactgaagaacctggagc

SEQ ID NO: 350448 - DNA, 25 bp, Artificial
  Probe
gccaaggtcatccactataaaagca

SEQ ID NO: 350449 - DNA, 25 bp, Artificial
  Probe
ccaaggtcatccactataaaagcag

SEQ ID NO: 350450 - DNA, 25 bp, Artificial
  Probe
agccaaggtcatccactataaaagc

SEQ ID NO: 350451 - DNA, 25 bp, Artificial
  Probe
aaggtcatccactataaaagcagaa

SEQ ID NO: 350452 - DNA, 25 bp, Artificial
  Probe
cacttggcagggagcctggctgaac

SEQ ID NO: 350453 - DNA, 25 bp, Artificial
  Probe
agcctggctgaacactcactgactg

SEQ ID NO: 350454 - DNA, 25 bp, Artificial
  Probe
ctgaacactcactgactgaagaacc

SEQ ID NO: 350455 - DNA, 25 bp, Artificial
  Probe
ggctgaacactcactgactgaagaa

SEQ ID NO: 350456 - DNA, 25 bp, Artificial
  Probe
cctggctgaacactcactgactgaa

SEQ ID NO: 350457 - DNA, 25 bp, Artificial
  Probe
caatagtctgcaagctattgaaatg

SEQ ID NO: 350458 - DNA, 25 bp, Artificial
  Probe
caaggtcatccactataaaagcaga

SEQ ID NO: 350459 - DNA, 25 bp, Artificial
  Probe
ctggccggcctataaagcacttggc

SEQ ID NO: 350460 - DNA, 25 bp, Artificial
  Probe
agaacaatagtctgcaagctattga

SEQ ID NO: 350461 - DNA, 25 bp, Artificial
  Probe
ggtcatccactataaaagcagaaca

SEQ ID NO: 350462 - DNA, 25 bp, Artificial
  Probe
ggccggcctataaagcacttggcag

SEQ ID NO: 350463 - DNA, 25 bp, Artificial
  Probe
aacaatagtctgcaagctattgaaa

SEQ ID NO: 350464 - DNA, 25 bp, Artificial
  Probe
tccactataaaagcagaacaatagt

SEQ ID NO: 350465 - DNA, 25 bp, Artificial
  Probe
atgggatggaagctggccggcctat

SEQ ID NO: 350466 - DNA, 25 bp, Artificial
  Probe
gccggcctataaagcacttggcagg

SEQ ID NO: 350467 - DNA, 25 bp, Artificial
  Probe
gaacactcactgactgaagaacctg

SEQ ID NO: 350468 - DNA, 25 bp, Artificial
  Probe
ctggctgaacactcactgactgaag

SEQ ID NO: 350469 - DNA, 25 bp, Artificial
  Probe
aaagcacttggcagggagcctggct

SEQ ID NO: 350470 - DNA, 25 bp, Artificial
  Probe
acactcactgactgaagaacctgga

SEQ ID NO: 350471 - DNA, 25 bp, Artificial
  Probe
ggagcctggctgaacactcactgac

SEQ ID NO: 350472 - DNA, 25 bp, Artificial
  Probe
gggagcctggctgaacactcactga

SEQ ID NO: 350473 - DNA, 25 bp, Artificial
  Probe
gcctggctgaacactcactgactga

SEQ ID NO: 350474 - DNA, 25 bp, Artificial
  Probe
tgaacactcactgactgaagaacct

SEQ ID NO: 350475 - DNA, 25 bp, Artificial
  Probe
tggctgaacactcactgactgaaga

SEQ ID NO: 350476 - DNA, 25 bp, Artificial
  Probe
ggcctataaagcacttggcagggag

SEQ ID NO: 350477 - DNA, 25 bp, Artificial
  Probe
agctggccggcctataaagcacttg

SEQ ID NO: 350478 - DNA, 25 bp, Artificial
  Probe
tggcagggagcctggctgaacactc

SEQ ID NO: 350479 - DNA, 25 bp, Artificial
  Probe
cctataaagcacttggcagggagcc

SEQ ID NO: 350480 - DNA, 25 bp, Artificial
  Probe
cggcctataaagcacttggcaggga

SEQ ID NO: 350481 - DNA, 25 bp, Artificial
  Probe
gctggccggcctataaagcacttgg

SEQ ID NO: 350482 - DNA, 25 bp, Artificial
  Probe
ctgtaatggtctcatgttatctgtt

SEQ ID NO: 350483 - DNA, 25 bp, Artificial
  Probe
gtttctttacatttcccagcgcaga

SEQ ID NO: 350484 - DNA, 25 bp, Artificial
  Probe
ttgcttttgcaaacccagacatcag

SEQ ID NO: 350485 - DNA, 25 bp, Artificial
  Probe
aagaggaacccaagaacgacgtcat

SEQ ID NO: 350486 - DNA, 25 bp, Artificial
  Probe
tcagaactcctcaatgaagctaatg

SEQ ID NO: 350487 - DNA, 25 bp, Artificial
  Probe
taagtttgcttgtattagctgtgcc

SEQ ID NO: 350488 - DNA, 25 bp, Artificial
  Probe
tgtcttgtagcttttagcaagtagc

SEQ ID NO: 350489 - DNA, 25 bp, Artificial
  Probe
gtgccttcattattttgctatgtaa

SEQ ID NO: 350490 - DNA, 25 bp, Artificial
  Probe
gcgtcacacgttgaaatccattcat

SEQ ID NO: 350491 - DNA, 25 bp, Artificial
  Probe
agcaattctgtaaagcatgtgtatc

SEQ ID NO: 350492 - DNA, 25 bp, Artificial
  Probe
ccaggctctggagaagaagtacaat

SEQ ID NO: 350493 - DNA, 25 bp, Artificial
  Probe
caaccccagctcagaaataggaagg

SEQ ID NO: 350494 - DNA, 25 bp, Artificial
  Probe
cagcatttactgtttatgtggctag

SEQ ID NO: 350495 - DNA, 25 bp, Artificial
  Probe
aatattgtcaacacgtgttcatctg

SEQ ID NO: 350496 - DNA, 25 bp, Artificial
  Probe
cccagctcagaaataggaaggattt

SEQ ID NO: 350497 - DNA, 25 bp, Artificial
  Probe
cgtaaagttgtttaccactgtggtg

SEQ ID NO: 350498 - DNA, 25 bp, Artificial
  Probe
taaaggcctttagcttctttgtggg

SEQ ID NO: 350499 - DNA, 25 bp, Artificial
  Probe
agctaagacagaactcttctcaatg

SEQ ID NO: 350500 - DNA, 25 bp, Artificial
  Probe
aactatctgtgaatcaatgttctgt

SEQ ID NO: 350501 - DNA, 25 bp, Artificial
  Probe
atccaggaactcaccggagagatgg

SEQ ID NO: 350502 - DNA, 25 bp, Artificial
  Probe
aattaaagtgcgtcacacgttgaaa

SEQ ID NO: 350503 - DNA, 25 bp, Artificial
  Probe
tcaaaaagctgcagaagcgctgcga

SEQ ID NO: 350504 - DNA, 25 bp, Artificial
  Probe
gggtcccgactctgccgagaagtga

SEQ ID NO: 350505 - DNA, 25 bp, Artificial
  Probe
agctgtgaaaaccatcagaactcct

SEQ ID NO: 350506 - DNA, 25 bp, Artificial
  Probe
ctgccatttcaagttgtgaaaaatg

SEQ ID NO: 350507 - DNA, 25 bp, Artificial
  Probe
aaactgccatttcaagttgtgaaaa

SEQ ID NO: 350508 - DNA, 25 bp, Artificial
  Probe
tttacatttcccagcgcagaggaag

SEQ ID NO: 350509 - DNA, 25 bp, Artificial
  Probe
aagacttttgcttttgcaaacccag

SEQ ID NO: 350510 - DNA, 25 bp, Artificial
  Probe
ctgcgataagatcgaggcgaaattt

SEQ ID NO: 350511 - DNA, 25 bp, Artificial
  Probe
aggaaggctggactgacagcattta

SEQ ID NO: 350512 - DNA, 25 bp, Artificial
  Probe
ctgacagacttgagactgatgaaag

SEQ ID NO: 350513 - DNA, 25 bp, Artificial
  Probe
ctatctgtgaatcaatgttctgtaa

SEQ ID NO: 350514 - DNA, 25 bp, Artificial
  Probe
ctgcagaagcgctgcgataagatcg

SEQ ID NO: 350515 - DNA, 25 bp, Artificial
  Probe
actccagaggagacaaggcatggag

SEQ ID NO: 350516 - DNA, 25 bp, Artificial
  Probe
gacgtcatctttaagacttttgctt

SEQ ID NO: 350517 - DNA, 25 bp, Artificial
  Probe
cctagtttgactttgtgaagtcttt

SEQ ID NO: 350518 - DNA, 25 bp, Artificial
  Probe
gacaaggaattccaggctctggaga

SEQ ID NO: 350519 - DNA, 25 bp, Artificial
  Probe
ctactcgccaagatccaggaactca

SEQ ID NO: 350520 - DNA, 25 bp, Artificial
  Probe
aatgtaaaggcctttagcttctttg

SEQ ID NO: 350521 - DNA, 25 bp, Artificial
  Probe
gcgcccaagcccaaaaatgacttta

SEQ ID NO: 350522 - DNA, 25 bp, Artificial
  Probe
cagacatcagctttacactccagag

SEQ ID NO: 350523 - DNA, 25 bp, Artificial
  Probe
cccagcgcagaggaagaggaaccca

SEQ ID NO: 350524 - DNA, 25 bp, Artificial
  Probe
gaaccaacccaagtgtgtatcccca

SEQ ID NO: 350525 - DNA, 25 bp, Artificial
  Probe
tatacttgaagaaccaacccaagtg

SEQ ID NO: 350526 - DNA, 25 bp, Artificial
  Probe
tttagcaagtagctgtgaaaaccat

SEQ ID NO: 350527 - DNA, 25 bp, Artificial
  Probe
cctcaatgaagctaatgtttggaaa

SEQ ID NO: 350528 - DNA, 25 bp, Artificial
  Probe
cgccaccatcacagatgagtgacca

SEQ ID NO: 350529 - DNA, 25 bp, Artificial
  Probe
ggcttctgggaaaggtaggacccat

SEQ ID NO: 350530 - DNA, 25 bp, Artificial
  Probe
gtgatagatgccatctgtcctgggt

SEQ ID NO: 350531 - DNA, 25 bp, Artificial
  Probe
ggctgcacaccctgggcaaagcact

SEQ ID NO: 350532 - DNA, 25 bp, Artificial
  Probe
ctaggctggactgtggaattagcat

SEQ ID NO: 350533 - DNA, 25 bp, Artificial
  Probe
atcacagatgagtgaccaagagggg

SEQ ID NO: 350534 - DNA, 25 bp, Artificial
  Probe
tgctcatacgtaaagtgacaatcag

SEQ ID NO: 350535 - DNA, 25 bp, Artificial
  Probe
gtcccacaggagttcccctggctga

SEQ ID NO: 350536 - DNA, 25 bp, Artificial
  Probe
cacagccaggcttccagcactgagt

SEQ ID NO: 350537 - DNA, 25 bp, Artificial
  Probe
ggggctgtcaacacctcggtacatg

SEQ ID NO: 350538 - DNA, 25 bp, Artificial
  Probe
ttgaatggcaaactcgatgcctccg

SEQ ID NO: 350539 - DNA, 25 bp, Artificial
  Probe
aaagcttttacttcacgacttgccg

SEQ ID NO: 350540 - DNA, 25 bp, Artificial
  Probe
gacccataacttaagacatgcacag

SEQ ID NO: 350541 - DNA, 25 bp, Artificial
  Probe
ccactccacctgcaagtgatagatg

SEQ ID NO: 350542 - DNA, 25 bp, Artificial
  Probe
catcgcaccagactgtacctctggg

SEQ ID NO: 350543 - DNA, 25 bp, Artificial
  Probe
aggaaagtggcagctgactgccact

SEQ ID NO: 350544 - DNA, 25 bp, Artificial
  Probe
ttccctgctacagatctgctctgct

SEQ ID NO: 350545 - DNA, 25 bp, Artificial
  Probe
tgaatggcaaactcgatgcctccgc

SEQ ID NO: 350546 - DNA, 25 bp, Artificial
  Probe
agcatctccgcctgtggagaccgag

SEQ ID NO: 350547 - DNA, 25 bp, Artificial
  Probe
agagcagaggctgcacaccctgggc

SEQ ID NO: 350548 - DNA, 25 bp, Artificial
  Probe
ggtactgcaccgtccctggagatcc

SEQ ID NO: 350549 - DNA, 25 bp, Artificial
  Probe
aattagcatgtacatggaaatccca

SEQ ID NO: 350550 - DNA, 25 bp, Artificial
  Probe
gccactcagaccacgtggcgctttt

SEQ ID NO: 350551 - DNA, 25 bp, Artificial
  Probe
tacctctggggcacccagaacaagc

SEQ ID NO: 350552 - DNA, 25 bp, Artificial
  Probe
atcccacggtctcagagctggacga

SEQ ID NO: 350553 - DNA, 25 bp, Artificial
  Probe
tggagaccgagtacccccgtgctca

SEQ ID NO: 350554 - DNA, 25 bp, Artificial
  Probe
aaagtgacaatcagaaccaggtaca

SEQ ID NO: 350555 - DNA, 25 bp, Artificial
  Probe
gtacccccgtgctcatacgtaaagt

SEQ ID NO: 350556 - DNA, 25 bp, Artificial
  Probe
cctgggtgtctgatcagacccgcca

SEQ ID NO: 350557 - DNA, 25 bp, Artificial
  Probe
accagctaagttgaatggcaaactc

SEQ ID NO: 350558 - DNA, 25 bp, Artificial
  Probe
ccgttctaagtgtacttgtttgaat

SEQ ID NO: 350559 - DNA, 25 bp, Artificial
  Probe
cctcccaggtcagtctggggcacaa

SEQ ID NO: 350560 - DNA, 25 bp, Artificial
  Probe
tcagagatggtccaaaggagagcag

SEQ ID NO: 350561 - DNA, 25 bp, Artificial
  Probe
tacttcacgacttgccgtagcctgt

SEQ ID NO: 350562 - DNA, 25 bp, Artificial
  Probe
ggtgatcttaaaaccacccaactgc

SEQ ID NO: 350563 - DNA, 25 bp, Artificial
  Probe
cttggcaatggcttctgggaaaggt

SEQ ID NO: 350564 - DNA, 25 bp, Artificial
  Probe
aatcccagtccttgaccatggcttc

SEQ ID NO: 350565 - DNA, 25 bp, Artificial
  Probe
gtctgtactcaagtacaaaagcttt

SEQ ID NO: 350566 - DNA, 25 bp, Artificial
  Probe
cagagctggacgaggctaaatagaa

SEQ ID NO: 350567 - DNA, 25 bp, Artificial
  Probe
atgcctatggcctttcccttgcctg

SEQ ID NO: 350568 - DNA, 25 bp, Artificial
  Probe
aggccccagcatgcagatggcctgc

SEQ ID NO: 350569 - DNA, 25 bp, Artificial
  Probe
tacgatccaaagcaagccatgccct

SEQ ID NO: 350570 - DNA, 25 bp, Artificial
  Probe
aggtaggacccataacttaagacat

SEQ ID NO: 350571 - DNA, 25 bp, Artificial
  Probe
tatgcctcactgctggggccgcgca

SEQ ID NO: 350572 - DNA, 25 bp, Artificial
  Probe
tgtccccactgtctgatccagtgct

SEQ ID NO: 350573 - DNA, 25 bp, Artificial
  Probe
cctgggcaaagcactgcccagtttt

SEQ ID NO: 350574 - DNA, 25 bp, Artificial
  Probe
cggcgtggtgaccatcgaggaattc

SEQ ID NO: 350575 - DNA, 25 bp, Artificial
  Probe
attcatcgagtcttgtcaacaggac

SEQ ID NO: 350576 - DNA, 25 bp, Artificial
  Probe
caggaacaaggacggcgtggtgacc

SEQ ID NO: 350577 - DNA, 25 bp, Artificial
  Probe
gtggtgaccatcgaggaattcatcg

SEQ ID NO: 350578 - DNA, 25 bp, Artificial
  Probe
gccccaagagaacacgtggagagct

SEQ ID NO: 350579 - DNA, 25 bp, Artificial
  Probe
cccaagagaacacgtggagagcttc

SEQ ID NO: 350580 - DNA, 25 bp, Artificial
  Probe
gaggccccaagagaacacgtggaga

SEQ ID NO: 350581 - DNA, 25 bp, Artificial
  Probe
cgtggtgaccatcgaggaattcatc

SEQ ID NO: 350582 - DNA, 25 bp, Artificial
  Probe
aggaacaaggacggcgtggtgacca

SEQ ID NO: 350583 - DNA, 25 bp, Artificial
  Probe
aggccccaagagaacacgtggagag

SEQ ID NO: 350584 - DNA, 25 bp, Artificial
  Probe
aggaggccccaagagaacacgtgga

SEQ ID NO: 350585 - DNA, 25 bp, Artificial
  Probe
acggcgtggtgaccatcgaggaatt

SEQ ID NO: 350586 - DNA, 25 bp, Artificial
  Probe
aaggacggcgtggtgaccatcgagg

SEQ ID NO: 350587 - DNA, 25 bp, Artificial
  Probe
accatcgaggaattcatcgagtctt

SEQ ID NO: 350588 - DNA, 25 bp, Artificial
  Probe
aggaattcatcgagtcttgtcaaca

SEQ ID NO: 350589 - DNA, 25 bp, Artificial
  Probe
gacggcgtggtgaccatcgaggaat

SEQ ID NO: 350590 - DNA, 25 bp, Artificial
  Probe
ggcgtggtgaccatcgaggaattca

SEQ ID NO: 350591 - DNA, 25 bp, Artificial
  Probe
gaggaattcatcgagtcttgtcaac

SEQ ID NO: 350592 - DNA, 25 bp, Artificial
  Probe
ggaattcatcgagtcttgtcaacag

SEQ ID NO: 350593 - DNA, 25 bp, Artificial
  Probe
gtgaccatcgaggaattcatcgagt

SEQ ID NO: 350594 - DNA, 25 bp, Artificial
  Probe
caaggacggcgtggtgaccatcgag

SEQ ID NO: 350595 - DNA, 25 bp, Artificial
  Probe
tgccctccgggaggaggccccaaga

SEQ ID NO: 350596 - DNA, 25 bp, Artificial
  Probe
gaggaggccccaagagaacacgtgg

SEQ ID NO: 350597 - DNA, 25 bp, Artificial
  Probe
ggccccaagagaacacgtggagagc

SEQ ID NO: 350598 - DNA, 25 bp, Artificial
  Probe
gaacaaggacggcgtggtgaccatc

SEQ ID NO: 350599 - DNA, 25 bp, Artificial
  Probe
catcgagtcttgtcaacaggacgag

SEQ ID NO: 350600 - DNA, 25 bp, Artificial
  Probe
ggtgaccatcgaggaattcatcgag

SEQ ID NO: 350601 - DNA, 25 bp, Artificial
  Probe
aggacggcgtggtgaccatcgagga

SEQ ID NO: 350602 - DNA, 25 bp, Artificial
  Probe
tcatcgagtcttgtcaacaggacga

SEQ ID NO: 350603 - DNA, 25 bp, Artificial
  Probe
gccctccgggaggaggccccaagag

SEQ ID NO: 350604 - DNA, 25 bp, Artificial
  Probe
gcgtggtgaccatcgaggaattcat

SEQ ID NO: 350605 - DNA, 25 bp, Artificial
  Probe
ccaagagaacacgtggagagcttct

SEQ ID NO: 350606 - DNA, 25 bp, Artificial
  Probe
ccatcgaggaattcatcgagtcttg

SEQ ID NO: 350607 - DNA, 25 bp, Artificial
  Probe
ctgccctccgggaggaggccccaag

SEQ ID NO: 350608 - DNA, 25 bp, Artificial
  Probe
tccgggaggaggccccaagagaaca

SEQ ID NO: 350609 - DNA, 25 bp, Artificial
  Probe
ttcatcgagtcttgtcaacaggacg

SEQ ID NO: 350610 - DNA, 25 bp, Artificial
  Probe
gggaggaggccccaagagaacacgt

SEQ ID NO: 350611 - DNA, 25 bp, Artificial
  Probe
aacaaggacggcgtggtgaccatcg

SEQ ID NO: 350612 - DNA, 25 bp, Artificial
  Probe
catcgaggaattcatcgagtcttgt

SEQ ID NO: 350613 - DNA, 25 bp, Artificial
  Probe
ggaggccccaagagaacacgtggag

SEQ ID NO: 350614 - DNA, 25 bp, Artificial
  Probe
ccccaagagaacacgtggagagctt

SEQ ID NO: 350615 - DNA, 25 bp, Artificial
  Probe
gaccatcgaggaattcatcgagtct

SEQ ID NO: 350616 - DNA, 25 bp, Artificial
  Probe
aattcatcgagtcttgtcaacagga

SEQ ID NO: 350617 - DNA, 25 bp, Artificial
  Probe
tggtgaccatcgaggaattcatcga

SEQ ID NO: 350618 - DNA, 25 bp, Artificial
  Probe
acaaggacggcgtggtgaccatcga

SEQ ID NO: 350619 - DNA, 25 bp, Artificial
  Probe
gaattcatcgagtcttgtcaacagg

SEQ ID NO: 350620 - DNA, 25 bp, Artificial
  Probe
ctgaggatgagtctaccccggaaaa

SEQ ID NO: 350621 - DNA, 25 bp, Artificial
  Probe
gcagcgcttcccagttctgagctga

SEQ ID NO: 350622 - DNA, 25 bp, Artificial
  Probe
ccagttctgagctgagaggagccag

SEQ ID NO: 350623 - DNA, 25 bp, Artificial
  Probe
gggcctctggagaagcgaaccctgc

SEQ ID NO: 350624 - DNA, 25 bp, Artificial
  Probe
gtccccacggcctaagaggcagaat

SEQ ID NO: 350625 - DNA, 25 bp, Artificial
  Probe
cagcgcttcccagttctgagctgag

SEQ ID NO: 350626 - DNA, 25 bp, Artificial
  Probe
ctgagctgagaggagccagctcgcc

SEQ ID NO: 350627 - DNA, 25 bp, Artificial
  Probe
tctccctcgtgtctatccaggctgg

SEQ ID NO: 350628 - DNA, 25 bp, Artificial
  Probe
actgagaaaatcttccgccaaatgg

SEQ ID NO: 350629 - DNA, 25 bp, Artificial
  Probe
aagcgacccatcgatcgtgcgcctg

SEQ ID NO: 350630 - DNA, 25 bp, Artificial
  Probe
gttctgagctgagaggagccagctc

SEQ ID NO: 350631 - DNA, 25 bp, Artificial
  Probe
ctctgagcgtgacctcgcgtggccg

SEQ ID NO: 350632 - DNA, 25 bp, Artificial
  Probe
tgcgcctgctgcaatgcgatcccag

SEQ ID NO: 350633 - DNA, 25 bp, Artificial
  Probe
tggccgcctggagcagaagctcatg

SEQ ID NO: 350634 - DNA, 25 bp, Artificial
  Probe
aagctgtcactggaggagttcatcc

SEQ ID NO: 350635 - DNA, 25 bp, Artificial
  Probe
gggccaaaagcgacccatcgatcgt

SEQ ID NO: 350636 - DNA, 25 bp, Artificial
  Probe
ccacggcctaagaggcagaatctcc

SEQ ID NO: 350637 - DNA, 25 bp, Artificial
  Probe
atccgcggggccaaaagcgacccat

SEQ ID NO: 350638 - DNA, 25 bp, Artificial
  Probe
tctgagcgtgacctcgcgtggccgc

SEQ ID NO: 350639 - DNA, 25 bp, Artificial
  Probe
gcgcttcccagttctgagctgagag

SEQ ID NO: 350640 - DNA, 25 bp, Artificial
  Probe
cccgactggcatcctcaacgtggat

SEQ ID NO: 350641 - DNA, 25 bp, Artificial
  Probe
gctaagcaaggcagccgttagtccc

SEQ ID NO: 350642 - DNA, 25 bp, Artificial
  Probe
ccgactggcatcctcaacgtggatg

SEQ ID NO: 350643 - DNA, 25 bp, Artificial
  Probe
gcaaggcagccgttagtccccacgg

SEQ ID NO: 350644 - DNA, 25 bp, Artificial
  Probe
gaggatgagtctaccccggaaaaga

SEQ ID NO: 350645 - DNA, 25 bp, Artificial
  Probe
gtctaccccggaaaagaggactgag

SEQ ID NO: 350646 - DNA, 25 bp, Artificial
  Probe
tcccagttctgagctgagaggagcc

SEQ ID NO: 350647 - DNA, 25 bp, Artificial
  Probe
acggcaagctgtcactggaggagtt

SEQ ID NO: 350648 - DNA, 25 bp, Artificial
  Probe
cttcttgggtggtcctcagcctgga

SEQ ID NO: 350649 - DNA, 25 bp, Artificial
  Probe
tcgtgcgcctgctgcaatgcgatcc

SEQ ID NO: 350650 - DNA, 25 bp, Artificial
  Probe
agctgtcactggaggagttcatccg

SEQ ID NO: 350651 - DNA, 25 bp, Artificial
  Probe
ctcaacgtggatgagttcaagaaga

SEQ ID NO: 350652 - DNA, 25 bp, Artificial
  Probe
gtccttcttgggtggtcctcagcct

SEQ ID NO: 350653 - DNA, 25 bp, Artificial
  Probe
ctgagaaaatcttccgccaaatgga

SEQ ID NO: 350654 - DNA, 25 bp, Artificial
  Probe
ggcctctggagaagcgaaccctgca

SEQ ID NO: 350655 - DNA, 25 bp, Artificial
  Probe
taagaggcagaatctcccttagtgg

SEQ ID NO: 350656 - DNA, 25 bp, Artificial
  Probe
gtgcgcctgctgcaatgcgatccca

SEQ ID NO: 350657 - DNA, 25 bp, Artificial
  Probe
tgtcactggaggagttcatccgcgg

SEQ ID NO: 350658 - DNA, 25 bp, Artificial
  Probe
tctaccccggaaaagaggactgaga

SEQ ID NO: 350659 - DNA, 25 bp, Artificial
  Probe
ctccctcgtgtctatccaggctggg

SEQ ID NO: 350660 - DNA, 25 bp, Artificial
  Probe
ccccacggcctaagaggcagaatct

SEQ ID NO: 350661 - DNA, 25 bp, Artificial
  Probe
agttctgagctgagaggagccagct

SEQ ID NO: 350662 - DNA, 25 bp, Artificial
  Probe
aaagcgacccatcgatcgtgcgcct

SEQ ID NO: 350663 - DNA, 25 bp, Artificial
  Probe
gcttcccagttctgagctgagagga

SEQ ID NO: 350664 - DNA, 25 bp, Artificial
  Probe
tctggagaagcgaaccctgcaagga

SEQ ID NO: 350665 - DNA, 25 bp, Artificial
  Probe
ccttcttgggtggtcctcagcctgg

SEQ ID NO: 350666 - DNA, 25 bp, Artificial
  Probe
ggcctacagccctgggtcagcagag

SEQ ID NO: 350667 - DNA, 25 bp, Artificial
  Probe
aggcctgtcctcatcttacctgtac

SEQ ID NO: 350668 - DNA, 25 bp, Artificial
  Probe
tctcctgctatggtgctttccccat

SEQ ID NO: 350669 - DNA, 25 bp, Artificial
  Probe
tgtagggaccaagtggttctccacc

SEQ ID NO: 350670 - DNA, 25 bp, Artificial
  Probe
agctaagtcacaaaagtaggcaaga

SEQ ID NO: 350671 - DNA, 25 bp, Artificial
  Probe
tgggtcagcagagtatgagttccca

SEQ ID NO: 350672 - DNA, 25 bp, Artificial
  Probe
agctggcttctcagcctagcctttg

SEQ ID NO: 350673 - DNA, 25 bp, Artificial
  Probe
gtatgagttcccagactttccagaa

SEQ ID NO: 350674 - DNA, 25 bp, Artificial
  Probe
tagtcctagtccagacgaacctaac

SEQ ID NO: 350675 - DNA, 25 bp, Artificial
  Probe
ccacattagacagaaggtctcctgc

SEQ ID NO: 350676 - DNA, 25 bp, Artificial
  Probe
agcctgggcagatgatgagagccca

SEQ ID NO: 350677 - DNA, 25 bp, Artificial
  Probe
tacagccctgggtcagcagagtatg

SEQ ID NO: 350678 - DNA, 25 bp, Artificial
  Probe
caggcctgtcctcatcttacctgta

SEQ ID NO: 350679 - DNA, 25 bp, Artificial
  Probe
gcaagctaaatctgggggcttccca

SEQ ID NO: 350680 - DNA, 25 bp, Artificial
  Probe
tagggattcaatatcctggggcttc

SEQ ID NO: 350681 - DNA, 25 bp, Artificial
  Probe
ttagtgtgtcctagggtgaccaggc

SEQ ID NO: 350682 - DNA, 25 bp, Artificial
  Probe
agactcccttctcagagaacacgct

SEQ ID NO: 350683 - DNA, 25 bp, Artificial
  Probe
tgaggacacccctggtgtagggacc

SEQ ID NO: 350684 - DNA, 25 bp, Artificial
  Probe
agtccagatccctgagctaagtcac

SEQ ID NO: 350685 - DNA, 25 bp, Artificial
  Probe
agtaggcaagctaaatctgggggct

SEQ ID NO: 350686 - DNA, 25 bp, Artificial
  Probe
ctcagcctagcctttgagggccctg

SEQ ID NO: 350687 - DNA, 25 bp, Artificial
  Probe
tgatgagagcccagctgggctgtca

SEQ ID NO: 350688 - DNA, 25 bp, Artificial
  Probe
tcatcttacctgtaccctgggggct

SEQ ID NO: 350689 - DNA, 25 bp, Artificial
  Probe
cagctgggctgtcactgcaggttcc

SEQ ID NO: 350690 - DNA, 25 bp, Artificial
  Probe
tgagagcccagctgggctgtcactg

SEQ ID NO: 350691 - DNA, 25 bp, Artificial
  Probe
gcccagctgggctgtcactgcaggt

SEQ ID NO: 350692 - DNA, 25 bp, Artificial
  Probe
ttctcagagaacacgctctgtccat

SEQ ID NO: 350693 - DNA, 25 bp, Artificial
  Probe
gggtgaccaggctgtagtcctagtc

SEQ ID NO: 350694 - DNA, 25 bp, Artificial
  Probe
cctagggtgaccaggctgtagtcct

SEQ ID NO: 350695 - DNA, 25 bp, Artificial
  Probe
tgtgtcctagggtgaccaggctgta

SEQ ID NO: 350696 - DNA, 25 bp, Artificial
  Probe
gaccaggctgtagtcctagtccaga

SEQ ID NO: 350697 - DNA, 25 bp, Artificial
  Probe
agtgctgaggacacccctggtgtag

SEQ ID NO: 350698 - DNA, 25 bp, Artificial
  Probe
ctctagaaaccacattagacagaag

SEQ ID NO: 350699 - DNA, 25 bp, Artificial
  Probe
agagaacacgctctgtccatgtccc

SEQ ID NO: 350700 - DNA, 25 bp, Artificial
  Probe
agtggttctccaccttctagtccca

SEQ ID NO: 350701 - DNA, 25 bp, Artificial
  Probe
aaagcctgggcagatgatgagagcc

SEQ ID NO: 350702 - DNA, 25 bp, Artificial
  Probe
agcctagcctttgagggccctgtgg

SEQ ID NO: 350703 - DNA, 25 bp, Artificial
  Probe
cagctggcttctcagcctagccttt

SEQ ID NO: 350704 - DNA, 25 bp, Artificial
  Probe
cacccctggtgtagggaccaagtgg

SEQ ID NO: 350705 - DNA, 25 bp, Artificial
  Probe
atatcctggggcttcagtagtccag

SEQ ID NO: 350706 - DNA, 25 bp, Artificial
  Probe
ccttctcaactgatacctagtgctg

SEQ ID NO: 350707 - DNA, 25 bp, Artificial
  Probe
tgtcctcatcttacctgtaccctgg

SEQ ID NO: 350708 - DNA, 25 bp, Artificial
  Probe
caagactcccttctcagagaacacg

SEQ ID NO: 350709 - DNA, 25 bp, Artificial
  Probe
ttagacagaaggtctcctgctatgg

SEQ ID NO: 350710 - DNA, 25 bp, Artificial
  Probe
gattcaatatcctggggcttcagta

SEQ ID NO: 350711 - DNA, 25 bp, Artificial
  Probe
tcccttctcagagaacacgctctgt

SEQ ID NO: 350712 - DNA, 25 bp, Artificial
  Probe
catcatggggagcatgatgccccca

SEQ ID NO: 350713 - DNA, 25 bp, Artificial
  Probe
ctgctgctggaggaagataacaagt

SEQ ID NO: 350714 - DNA, 25 bp, Artificial
  Probe
agataacaagttctgtgctgactgc

SEQ ID NO: 350715 - DNA, 25 bp, Artificial
  Probe
aggcaagaaacagctctccaaggac

SEQ ID NO: 350716 - DNA, 25 bp, Artificial
  Probe
cccacgcgtccgagcggttcttggg

SEQ ID NO: 350717 - DNA, 25 bp, Artificial
  Probe
gttctgtccctgaaaacctgaacct

SEQ ID NO: 350718 - DNA, 25 bp, Artificial
  Probe
cagattcagtgcatgcaagagatgg

SEQ ID NO: 350719 - DNA, 25 bp, Artificial
  Probe
agccggggagcaagtcagaagaaac

SEQ ID NO: 350720 - DNA, 25 bp, Artificial
  Probe
tgcaggcttccatggcgggcatgcc

SEQ ID NO: 350721 - DNA, 25 bp, Artificial
  Probe
gcatgcaggcttccatggcgggcat

SEQ ID NO: 350722 - DNA, 25 bp, Artificial
  Probe
atatccagggtaaaatcagtgaacc

SEQ ID NO: 350723 - DNA, 25 bp, Artificial
  Probe
caggagcctctggaatggtcacccc

SEQ ID NO: 350724 - DNA, 25 bp, Artificial
  Probe
aaagcaaaccgactctatgaagcct

SEQ ID NO: 350725 - DNA, 25 bp, Artificial
  Probe
agaagacgcacagctacctcggaaa

SEQ ID NO: 350726 - DNA, 25 bp, Artificial
  Probe
ctgggatgaacttctacggagccaa

SEQ ID NO: 350727 - DNA, 25 bp, Artificial
  Probe
aaatggccaggcagccaatcagact

SEQ ID NO: 350728 - DNA, 25 bp, Artificial
  Probe
gaaacagctctccaaggactccatc

SEQ ID NO: 350729 - DNA, 25 bp, Artificial
  Probe
ggcaccctggccatgacaggcaagt

SEQ ID NO: 350730 - DNA, 25 bp, Artificial
  Probe
tccaaggactccatcctgtcactgt

SEQ ID NO: 350731 - DNA, 25 bp, Artificial
  Probe
aggaagtgagcctgctccagagaaa

SEQ ID NO: 350732 - DNA, 25 bp, Artificial
  Probe
gatcttttggcctctgttccatccc

SEQ ID NO: 350733 - DNA, 25 bp, Artificial
  Probe
tccctggggttacaccacctaacag

SEQ ID NO: 350734 - DNA, 25 bp, Artificial
  Probe
gtaaaatcagtgaacctcgaccagt

SEQ ID NO: 350735 - DNA, 25 bp, Artificial
  Probe
gggtgcatatatccagggtaaaatc

SEQ ID NO: 350736 - DNA, 25 bp, Artificial
  Probe
acctatttccagagccggggagcaa

SEQ ID NO: 350737 - DNA, 25 bp, Artificial
  Probe
tcagatggcatatcccacagcgtac

SEQ ID NO: 350738 - DNA, 25 bp, Artificial
  Probe
cttcttcagtttccagaaaggctgt

SEQ ID NO: 350739 - DNA, 25 bp, Artificial
  Probe
agatggaacccgttgtctttgagaa

SEQ ID NO: 350740 - DNA, 25 bp, Artificial
  Probe
cctcctggaacatcggcgtgtttat

SEQ ID NO: 350741 - DNA, 25 bp, Artificial
  Probe
tcagatgacccagcagatggctggg

SEQ ID NO: 350742 - DNA, 25 bp, Artificial
  Probe
tatggatcccagacgcctcaaatgc

SEQ ID NO: 350743 - DNA, 25 bp, Artificial
  Probe
atccgcagcccctgtcatggacttg

SEQ ID NO: 350744 - DNA, 25 bp, Artificial
  Probe
accagtcggcatggtagctcaccca

SEQ ID NO: 350745 - DNA, 25 bp, Artificial
  Probe
ctggaatccacaggaatctgggggt

SEQ ID NO: 350746 - DNA, 25 bp, Artificial
  Probe
tgaaaacctgaacctatttccagag

SEQ ID NO: 350747 - DNA, 25 bp, Artificial
  Probe
catgacaggcaagtcggtgaaggac

SEQ ID NO: 350748 - DNA, 25 bp, Artificial
  Probe
acgcacagctacctcggaaaagctc

SEQ ID NO: 350749 - DNA, 25 bp, Artificial
  Probe
gcctcaaatgcctgcccaagcaatg

SEQ ID NO: 350750 - DNA, 25 bp, Artificial
  Probe
tgctccagagaaaaagatggaaccc

SEQ ID NO: 350751 - DNA, 25 bp, Artificial
  Probe
acggcatgatgagctatggacagtc

SEQ ID NO: 350752 - DNA, 25 bp, Artificial
  Probe
acgtggatcggtaccaggcggtcct

SEQ ID NO: 350753 - DNA, 25 bp, Artificial
  Probe
cccagctgttgaaggatttattcga

SEQ ID NO: 350754 - DNA, 25 bp, Artificial
  Probe
catcaatgtccttaggaaagagaag

SEQ ID NO: 350755 - DNA, 25 bp, Artificial
  Probe
atatatggaccgaagtctggacatc

SEQ ID NO: 350756 - DNA, 25 bp, Artificial
  Probe
atgccgagcgggatgatgaccactc

SEQ ID NO: 350757 - DNA, 25 bp, Artificial
  Probe
tggaacccgttgtctttgagaaagt

SEQ ID NO: 350758 - DNA, 25 bp, Artificial
  Probe
agcccgaattggatatctttaagat

SEQ ID NO: 350759 - DNA, 25 bp, Artificial
  Probe
cttgaactcccgacctcaggtgatc

SEQ ID NO: 350760 - DNA, 25 bp, Artificial
  Probe
agtccagatgaagacacaaggtggg

SEQ ID NO: 350761 - DNA, 25 bp, Artificial
  Probe
gactactgtcattagcatgtaaaac

SEQ ID NO: 350762 - DNA, 25 bp, Artificial
  Probe
cccacctaggcctctcaaagtgttg

SEQ ID NO: 350763 - DNA, 25 bp, Artificial
  Probe
cctatcatatagtaagcagaagagt

SEQ ID NO: 350764 - DNA, 25 bp, Artificial
  Probe
gctctcagttcaaatccgatcagtc

SEQ ID NO: 350765 - DNA, 25 bp, Artificial
  Probe
ccactcaaaagcagggcagaagagg

SEQ ID NO: 350766 - DNA, 25 bp, Artificial
  Probe
ttagggtctctaattgcaaagtgac

SEQ ID NO: 350767 - DNA, 25 bp, Artificial
  Probe
gcaaatctactcagcctaagccaag

SEQ ID NO: 350768 - DNA, 25 bp, Artificial
  Probe
ttgaactcccgacctcaggtgatcc

SEQ ID NO: 350769 - DNA, 25 bp, Artificial
  Probe
ataatgtataacttgcacccaggga

SEQ ID NO: 350770 - DNA, 25 bp, Artificial
  Probe
ggttaaatcaactagcttctgctaa

SEQ ID NO: 350771 - DNA, 25 bp, Artificial
  Probe
gtggggcttcaaatccagctctcca

SEQ ID NO: 350772 - DNA, 25 bp, Artificial
  Probe
caggccattcctatcatatagtaag

SEQ ID NO: 350773 - DNA, 25 bp, Artificial
  Probe
ccatcccatgtgcaagagctctcag

SEQ ID NO: 350774 - DNA, 25 bp, Artificial
  Probe
atctactcagcctaagccaagccag

SEQ ID NO: 350775 - DNA, 25 bp, Artificial
  Probe
tccagctctccaaatagggtcccat

SEQ ID NO: 350776 - DNA, 25 bp, Artificial
  Probe
ctctgtgtctgagaaagtatcttag

SEQ ID NO: 350777 - DNA, 25 bp, Artificial
  Probe
caagctaaggcacaccactcaaaag

SEQ ID NO: 350778 - DNA, 25 bp, Artificial
  Probe
gctaactccagagatctataaagca

SEQ ID NO: 350779 - DNA, 25 bp, Artificial
  Probe
gtgttatatccctaaccaagaagaa

SEQ ID NO: 350780 - DNA, 25 bp, Artificial
  Probe
tggttaaatcaactagcttctgcta

SEQ ID NO: 350781 - DNA, 25 bp, Artificial
  Probe
cagcagcagccacacaaaaactaag

SEQ ID NO: 350782 - DNA, 25 bp, Artificial
  Probe
gacagagtttcactcttgttgccca

SEQ ID NO: 350783 - DNA, 25 bp, Artificial
  Probe
cccacttggagaagaatggggttag

SEQ ID NO: 350784 - DNA, 25 bp, Artificial
  Probe
ttgcacccagggaatgggggtctat

SEQ ID NO: 350785 - DNA, 25 bp, Artificial
  Probe
tcagacaaaatcctgtcagtcccag

SEQ ID NO: 350786 - DNA, 25 bp, Artificial
  Probe
caaagtgactgtacaataggacgaa

SEQ ID NO: 350787 - DNA, 25 bp, Artificial
  Probe
agtaaaagactactgtcattagcat

SEQ ID NO: 350788 - DNA, 25 bp, Artificial
  Probe
aaagtatcttagttgttggctgctc

SEQ ID NO: 350789 - DNA, 25 bp, Artificial
  Probe
gggtctatgagacaaccccacttgg

SEQ ID NO: 350790 - DNA, 25 bp, Artificial
  Probe
cattaaagagctaactccagagatc

SEQ ID NO: 350791 - DNA, 25 bp, Artificial
  Probe
tgtaagtgttatatccctaaccaag

SEQ ID NO: 350792 - DNA, 25 bp, Artificial
  Probe
cgcaacctctgcttcctggcttaaa

SEQ ID NO: 350793 - DNA, 25 bp, Artificial
  Probe
taggacgaaagttgcctctgtgtct

SEQ ID NO: 350794 - DNA, 25 bp, Artificial
  Probe
tatacatgaccgaattggatatctt

SEQ ID NO: 350795 - DNA, 25 bp, Artificial
  Probe
ccagcccgaattggatatctttaag

SEQ ID NO: 350796 - DNA, 25 bp, Artificial
  Probe
gcagccacacaaaaactaagacctg

SEQ ID NO: 350797 - DNA, 25 bp, Artificial
  Probe
ttcctggcttaaagtgattctcctg

SEQ ID NO: 350798 - DNA, 25 bp, Artificial
  Probe
agacaaaatcctgtcagtcccagcc

SEQ ID NO: 350799 - DNA, 25 bp, Artificial
  Probe
aatggcacgatctcggctcaccgca

SEQ ID NO: 350800 - DNA, 25 bp, Artificial
  Probe
tacatgaccgaattggatatctttg

SEQ ID NO: 350801 - DNA, 25 bp, Artificial
  Probe
cgtgtgtaagccacagtgcccagcc

SEQ ID NO: 350802 - DNA, 25 bp, Artificial
  Probe
gaacatcccatattggaaagcctca

SEQ ID NO: 350803 - DNA, 25 bp, Artificial
  Probe
cctgcttatttggtgtggttaaatc

SEQ ID NO: 350804 - DNA, 25 bp, Artificial
  Probe
gaggccttggtgaaaccaggagatc

SEQ ID NO: 350805 - DNA, 25 bp, Artificial
  Probe
caagccaacagagtaaagtggaagg

SEQ ID NO: 350806 - DNA, 25 bp, Artificial
  Probe
ggaactttgatgatgcctttgctgg

SEQ ID NO: 350807 - DNA, 25 bp, Artificial
  Probe
taacagcatctcagggaatgtccat

SEQ ID NO: 350808 - DNA, 25 bp, Artificial
  Probe
tccagcactaaagtaatggaacttt

SEQ ID NO: 350809 - DNA, 25 bp, Artificial
  Probe
tgatagcccgagtgacatcggtgga

SEQ ID NO: 350810 - DNA, 25 bp, Artificial
  Probe
agcccttgacccttgagtcctggct

SEQ ID NO: 350811 - DNA, 25 bp, Artificial
  Probe
atgcggaagctgttcagcttgagcc

SEQ ID NO: 350812 - DNA, 25 bp, Artificial
  Probe
tgaggaagtcaccttccacctctac

SEQ ID NO: 350813 - DNA, 25 bp, Artificial
  Probe
gcaaaaagggactcctgccactcag

SEQ ID NO: 350814 - DNA, 25 bp, Artificial
  Probe
gaaggagacccatcctcacctcatt

SEQ ID NO: 350815 - DNA, 25 bp, Artificial
  Probe
actgcatggacaggtgctgagccag

SEQ ID NO: 350816 - DNA, 25 bp, Artificial
  Probe
ggtggagctgcatcacatagttctg

SEQ ID NO: 350817 - DNA, 25 bp, Artificial
  Probe
aagatctacaagagcaagccaacag

SEQ ID NO: 350818 - DNA, 25 bp, Artificial
  Probe
gccagtcctgggaccggaagtgcaa

SEQ ID NO: 350819 - DNA, 25 bp, Artificial
  Probe
tgctcctggagaagccagccagggt

SEQ ID NO: 350820 - DNA, 25 bp, Artificial
  Probe
aggttgtcttggacaaactgcatgg

SEQ ID NO: 350821 - DNA, 25 bp, Artificial
  Probe
ggaggccacgtggattcttggcttt

SEQ ID NO: 350822 - DNA, 25 bp, Artificial
  Probe
acctctacctgatcccaagtgactg

SEQ ID NO: 350823 - DNA, 25 bp, Artificial
  Probe
caagtggcccactttaaagaggagg

SEQ ID NO: 350824 - DNA, 25 bp, Artificial
  Probe
atcaggctgcaagtgaaagacaaga

SEQ ID NO: 350825 - DNA, 25 bp, Artificial
  Probe
ggacatggaaccatttgcctctggc

SEQ ID NO: 350826 - DNA, 25 bp, Artificial
  Probe
tccggatcccatccaggcgcaaaga

SEQ ID NO: 350827 - DNA, 25 bp, Artificial
  Probe
gatctcatgcctgcaactactctga

SEQ ID NO: 350828 - DNA, 25 bp, Artificial
  Probe
atccaggcgcaaagaggaataggag

SEQ ID NO: 350829 - DNA, 25 bp, Artificial
  Probe
tgcatagccgtaccttcacctctgg

SEQ ID NO: 350830 - DNA, 25 bp, Artificial
  Probe
gcctccatcctgaggaagtcacctt

SEQ ID NO: 350831 - DNA, 25 bp, Artificial
  Probe
aaaggagtatcactgctcttttaga

SEQ ID NO: 350832 - DNA, 25 bp, Artificial
  Probe
ggtggccacagcagccaagcctaga

SEQ ID NO: 350833 - DNA, 25 bp, Artificial
  Probe
aatgatccataatgccctgcgcttc

SEQ ID NO: 350834 - DNA, 25 bp, Artificial
  Probe
aactctgggagaagggcagcaaaaa

SEQ ID NO: 350835 - DNA, 25 bp, Artificial
  Probe
attatgtgtccatgccagggatgcc

SEQ ID NO: 350836 - DNA, 25 bp, Artificial
  Probe
gggccccagtccaggtggcctaaca

SEQ ID NO: 350837 - DNA, 25 bp, Artificial
  Probe
tcctcacctcattatggaactctgg

SEQ ID NO: 350838 - DNA, 25 bp, Artificial
  Probe
cttggctttgtacaggaagatctac

SEQ ID NO: 350839 - DNA, 25 bp, Artificial
  Probe
gagccccaaaattggggttcagcgt

SEQ ID NO: 350840 - DNA, 25 bp, Artificial
  Probe
tgtcacagggtgagccccaaaattg

SEQ ID NO: 350841 - DNA, 25 bp, Artificial
  Probe
cattcccgtcacctctgtggtgttg

SEQ ID NO: 350842 - DNA, 25 bp, Artificial
  Probe
ccccttgggagtcctcctgaaaatg

SEQ ID NO: 350843 - DNA, 25 bp, Artificial
  Probe
ttcacctctggatgccccgcagttg

SEQ ID NO: 350844 - DNA, 25 bp, Artificial
  Probe
tgctggctgagaacacgaggcccag

SEQ ID NO: 350845 - DNA, 25 bp, Artificial
  Probe
gggatgctcctggagaagccagcca

SEQ ID NO: 350846 - DNA, 25 bp, Artificial
  Probe
agtatgaacaccagcccttgaccct

SEQ ID NO: 350847 - DNA, 25 bp, Artificial
  Probe
tgcaaagatggactctaccaagccc

SEQ ID NO: 350848 - DNA, 25 bp, Artificial
  Probe
catagttctggaaaaccccagcttt

SEQ ID NO: 350849 - DNA, 25 bp, Artificial
  Probe
ctctgtggtgttgctttaccaccgc

SEQ ID NO: 350850 - DNA, 25 bp, Artificial
  Probe
ctgctcagactggactgtttatata

SEQ ID NO: 350851 - DNA, 25 bp, Artificial
  Probe
tacacgagttgatgatgctaaggca

SEQ ID NO: 350852 - DNA, 25 bp, Artificial
  Probe
ttggctatggccacaatggatataa

SEQ ID NO: 350853 - DNA, 25 bp, Artificial
  Probe
gccaacttccttgatgttggtggag

SEQ ID NO: 350854 - DNA, 25 bp, Artificial
  Probe
gagaatgtaatcaccacataggcac

SEQ ID NO: 350855 - DNA, 25 bp, Artificial
  Probe
aagggtgcaggctattctggtcaac

SEQ ID NO: 350856 - DNA, 25 bp, Artificial
  Probe
ttgcagacagtggtcttaaaattct

SEQ ID NO: 350857 - DNA, 25 bp, Artificial
  Probe
ttttctgaagtatgacgcaactatg

SEQ ID NO: 350858 - DNA, 25 bp, Artificial
  Probe
aaacccaatggtagaagatgctgat

SEQ ID NO: 350859 - DNA, 25 bp, Artificial
  Probe
tgatgctaaggcactaattgcagac

SEQ ID NO: 350860 - DNA, 25 bp, Artificial
  Probe
ctcgacgggaacataggatgtctag

SEQ ID NO: 350861 - DNA, 25 bp, Artificial
  Probe
tgacgcaactatggtagaaataaac

SEQ ID NO: 350862 - DNA, 25 bp, Artificial
  Probe
gaatgtaatcaccacataggcacac

SEQ ID NO: 350863 - DNA, 25 bp, Artificial
  Probe
gtggaggcgccacagtccatcaagt

SEQ ID NO: 350864 - DNA, 25 bp, Artificial
  Probe
agaagatctttgctcttcaggactg

SEQ ID NO: 350865 - DNA, 25 bp, Artificial
  Probe
atcgccagaagaagatctttgctct

SEQ ID NO: 350866 - DNA, 25 bp, Artificial
  Probe
aaagctacacggagggactccagcc

SEQ ID NO: 350867 - DNA, 25 bp, Artificial
  Probe
tgattcaaattcagcctatcgccag

SEQ ID NO: 350868 - DNA, 25 bp, Artificial
  Probe
cttaaaattcttgcttgcgatgatt

SEQ ID NO: 350869 - DNA, 25 bp, Artificial
  Probe
ctagtaaatggtgctggcttggcta

SEQ ID NO: 350870 - DNA, 25 bp, Artificial
  Probe
caacatctttggaggaatcatgaga

SEQ ID NO: 350871 - DNA, 25 bp, Artificial
  Probe
tcacttcagataaaagggtgcaggc

SEQ ID NO: 350872 - DNA, 25 bp, Artificial
  Probe
gtctcgtttcttgcagccatctttc

SEQ ID NO: 350873 - DNA, 25 bp, Artificial
  Probe
tggctatggccacaatggatataat

SEQ ID NO: 350874 - DNA, 25 bp, Artificial
  Probe
ggacaaagacgcagctgatgcagat

SEQ ID NO: 350875 - DNA, 25 bp, Artificial
  Probe
gaatacctgttgtggtacggttaca

SEQ ID NO: 350876 - DNA, 25 bp, Artificial
  Probe
ttattatactgtggtctctcctagt

SEQ ID NO: 350877 - DNA, 25 bp, Artificial
  Probe
tctagtaaatggtgctggcttggct

SEQ ID NO: 350878 - DNA, 25 bp, Artificial
  Probe
tttgctcttcaggactggagccagg

SEQ ID NO: 350879 - DNA, 25 bp, Artificial
  Probe
cgcagctgatgcagatattaactat

SEQ ID NO: 350880 - DNA, 25 bp, Artificial
  Probe
gcagccatctttcttgcttcctctg

SEQ ID NO: 350881 - DNA, 25 bp, Artificial
  Probe
ccaatatgagcaaaaccttggtgaa

SEQ ID NO: 350882 - DNA, 25 bp, Artificial
  Probe
gtccatcaagtaacagaagcattta

SEQ ID NO: 350883 - DNA, 25 bp, Artificial
  Probe
aagatctttgctcttcaggactgga

SEQ ID NO: 350884 - DNA, 25 bp, Artificial
  Probe
ttgtggtacggttacaaggtacacg

SEQ ID NO: 350885 - DNA, 25 bp, Artificial
  Probe
ggtctctcctagtgtccctttcttt

SEQ ID NO: 350886 - DNA, 25 bp, Artificial
  Probe
ttattgcacaaggaatagtcatggc

SEQ ID NO: 350887 - DNA, 25 bp, Artificial
  Probe
aaccttggtgaatggcttcgggtat

SEQ ID NO: 350888 - DNA, 25 bp, Artificial
  Probe
taaactgatcacttcagataaaagg

SEQ ID NO: 350889 - DNA, 25 bp, Artificial
  Probe
taaacccaatggtagaagatgctga

SEQ ID NO: 350890 - DNA, 25 bp, Artificial
  Probe
tcttcaggactggagccaggaggac

SEQ ID NO: 350891 - DNA, 25 bp, Artificial
  Probe
atattaactatattggcctcgacgg

SEQ ID NO: 350892 - DNA, 25 bp, Artificial
  Probe
ctgatgtaaacttacagtggtctcg

SEQ ID NO: 350893 - DNA, 25 bp, Artificial
  Probe
tggtcttaaaattcttgcttgcgat

SEQ ID NO: 350894 - DNA, 25 bp, Artificial
  Probe
ataataaagctacacggagggactc

SEQ ID NO: 350895 - DNA, 25 bp, Artificial
  Probe
cataggcacacatacctttgaaagc

SEQ ID NO: 350896 - DNA, 25 bp, Artificial
  Probe
gcattgtaacgttagacgaatttct

SEQ ID NO: 350897 - DNA, 25 bp, Artificial
  Probe
gcacgtggacgtcttcttccagaaa

SEQ ID NO: 350898 - DNA, 25 bp, Artificial
  Probe
aatgccctgatctgcccttgttcca

SEQ ID NO: 350899 - DNA, 25 bp, Artificial
  Probe
gaacggtccatgaaaaactgaggtg

SEQ ID NO: 350900 - DNA, 25 bp, Artificial
  Probe
tcctgtcaggaggatgacaacatca

SEQ ID NO: 350901 - DNA, 25 bp, Artificial
  Probe
agccatctatgacatgatggggaaa

SEQ ID NO: 350902 - DNA, 25 bp, Artificial
  Probe
gctcagtctctgattgccaactctt

SEQ ID NO: 350903 - DNA, 25 bp, Artificial
  Probe
ggcattgtaacgttagacgaatttc

SEQ ID NO: 350904 - DNA, 25 bp, Artificial
  Probe
gacagaaataccttttacactttgg

SEQ ID NO: 350905 - DNA, 25 bp, Artificial
  Probe
acgttagacgaatttctcgagtcct

SEQ ID NO: 350906 - DNA, 25 bp, Artificial
  Probe
ttttacactttggaagaattctctg

SEQ ID NO: 350907 - DNA, 25 bp, Artificial
  Probe
tgctgaagactttctacaaaacctg

SEQ ID NO: 350908 - DNA, 25 bp, Artificial
  Probe
gaattctctgctgaagactttctac

SEQ ID NO: 350909 - DNA, 25 bp, Artificial
  Probe
ccagtggtgtggttaacgaagagac

SEQ ID NO: 350910 - DNA, 25 bp, Artificial
  Probe
acgctcagtttttccctcatggaga

SEQ ID NO: 350911 - DNA, 25 bp, Artificial
  Probe
ggacgtcttcttccagaaaatggat

SEQ ID NO: 350912 - DNA, 25 bp, Artificial
  Probe
agagacattcaagcagatctacgct

SEQ ID NO: 350913 - DNA, 25 bp, Artificial
  Probe
tggagatgccagcacatacgcacat

SEQ ID NO: 350914 - DNA, 25 bp, Artificial
  Probe
tttccctcatggagatgccagcaca

SEQ ID NO: 350915 - DNA, 25 bp, Artificial
  Probe
actggccatcctgctctcagagaca

SEQ ID NO: 350916 - DNA, 25 bp, Artificial
  Probe
acccagacaggctctgtaaagttcg

SEQ ID NO: 350917 - DNA, 25 bp, Artificial
  Probe
aggacactggccatcctgctctcag

SEQ ID NO: 350918 - DNA, 25 bp, Artificial
  Probe
catggtttgccatcggcctgaggga

SEQ ID NO: 350919 - DNA, 25 bp, Artificial
  Probe
caccgcgtggctcagtctctgattg

SEQ ID NO: 350920 - DNA, 25 bp, Artificial
  Probe
atagtgaaagccatctatgacatga

SEQ ID NO: 350921 - DNA, 25 bp, Artificial
  Probe
ccagttttacacatcaactctcggg

SEQ ID NO: 350922 - DNA, 25 bp, Artificial
  Probe
gaggacactcccaggcagcacgtgg

SEQ ID NO: 350923 - DNA, 25 bp, Artificial
  Probe
cactttggaagaattctctgctgaa

SEQ ID NO: 350924 - DNA, 25 bp, Artificial
  Probe
gattcaaaaacgagtgccccagtgg

SEQ ID NO: 350925 - DNA, 25 bp, Artificial
  Probe
gatctgcccttgttccagttttaca

SEQ ID NO: 350926 - DNA, 25 bp, Artificial
  Probe
tcctcctcttgagagggacgagctg

SEQ ID NO: 350927 - DNA, 25 bp, Artificial
  Probe
ccctcatggagatgccagcacatac

SEQ ID NO: 350928 - DNA, 25 bp, Artificial
  Probe
gtcttcttccagaaaatggataaaa

SEQ ID NO: 350929 - DNA, 25 bp, Artificial
  Probe
tccatgaaaaactgaggtggacgtt

SEQ ID NO: 350930 - DNA, 25 bp, Artificial
  Probe
gcagatctacgctcagtttttccct

SEQ ID NO: 350931 - DNA, 25 bp, Artificial
  Probe
caccaagagagaactgcaggtcctt

SEQ ID NO: 350932 - DNA, 25 bp, Artificial
  Probe
gatgacaacatcatgaggtctctac

SEQ ID NO: 350933 - DNA, 25 bp, Artificial
  Probe
gagacactgacaaacacctcaatgc

SEQ ID NO: 350934 - DNA, 25 bp, Artificial
  Probe
tggggaaatacacctatcctgtgct

SEQ ID NO: 350935 - DNA, 25 bp, Artificial
  Probe
tgcaggtcctttaccggggattcaa

SEQ ID NO: 350936 - DNA, 25 bp, Artificial
  Probe
gactggagcagcttgaggcacagac

SEQ ID NO: 350937 - DNA, 25 bp, Artificial
  Probe
ttactgagaggaacggtccatgaaa

SEQ ID NO: 350938 - DNA, 25 bp, Artificial
  Probe
ttctacaaaacctggcaccgcgtgg

SEQ ID NO: 350939 - DNA, 25 bp, Artificial
  Probe
gatgccagcacatacgcacattacc

SEQ ID NO: 350940 - DNA, 25 bp, Artificial
  Probe
caactctcgggacagaaataccttt

SEQ ID NO: 350941 - DNA, 25 bp, Artificial
  Probe
ctcaatgccctgatctgcccttgtt

SEQ ID NO: 350942 - DNA, 25 bp, Artificial
  Probe
taagaacatttattctctcatggtg

SEQ ID NO: 350943 - DNA, 25 bp, Artificial
  Probe
agatgctataaaactagctgaaggc

SEQ ID NO: 350944 - DNA, 25 bp, Artificial
  Probe
ttctttgaacatttgcccaattgtg

SEQ ID NO: 350945 - DNA, 25 bp, Artificial
  Probe
gaatttctacctgatccagcattag

SEQ ID NO: 350946 - DNA, 25 bp, Artificial
  Probe
cagcctgttgaaacatttggaggag

SEQ ID NO: 350947 - DNA, 25 bp, Artificial
  Probe
aggcctgaaaaacctgaagaagatg

SEQ ID NO: 350948 - DNA, 25 bp, Artificial
  Probe
gctttctttcaaggtaaaagcttat

SEQ ID NO: 350949 - DNA, 25 bp, Artificial
  Probe
gaggaggtcccacaactcgtcaagc

SEQ ID NO: 350950 - DNA, 25 bp, Artificial
  Probe
atgatctcagtgttattacaggtgc

SEQ ID NO: 350951 - DNA, 25 bp, Artificial
  Probe
tgatggatggcttgccttcatgggt

SEQ ID NO: 350952 - DNA, 25 bp, Artificial
  Probe
ctgcaagaagctaggcttgttgggt

SEQ ID NO: 350953 - DNA, 25 bp, Artificial
  Probe
tctcatggtggaagccagtcccctc

SEQ ID NO: 350954 - DNA, 25 bp, Artificial
  Probe
gagctatggcttcatgggaaaaggc

SEQ ID NO: 350955 - DNA, 25 bp, Artificial
  Probe
ggaaaatattcagctctgccacaag

SEQ ID NO: 350956 - DNA, 25 bp, Artificial
  Probe
gaaccctctgaaaaacttccagcag

SEQ ID NO: 350957 - DNA, 25 bp, Artificial
  Probe
aaagcttatatatcaactcagggaa

SEQ ID NO: 350958 - DNA, 25 bp, Artificial
  Probe
agcaagatatcacatatctggggaa

SEQ ID NO: 350959 - DNA, 25 bp, Artificial
  Probe
ctggtgtggctggaagcctcagttt

SEQ ID NO: 350960 - DNA, 25 bp, Artificial
  Probe
caactcgtcaagcttgggttgaaaa

SEQ ID NO: 350961 - DNA, 25 bp, Artificial
  Probe
cctgagccaagaatttgaagctttc

SEQ ID NO: 350962 - DNA, 25 bp, Artificial
  Probe
tacaggtgcttttaaactagtaact

SEQ ID NO: 350963 - DNA, 25 bp, Artificial
  Probe
gattacatagtcaagtctctgtcaa

SEQ ID NO: 350964 - DNA, 25 bp, Artificial
  Probe
ccgcactgatgctgccctggggctg

SEQ ID NO: 350965 - DNA, 25 bp, Artificial
  Probe
gaaattcaattagtctcctgctgct

SEQ ID NO: 350966 - DNA, 25 bp, Artificial
  Probe
acccacttgtctgacattggagagg

SEQ ID NO: 350967 - DNA, 25 bp, Artificial
  Probe
cagcagttgaatttggcgggaaatc

SEQ ID NO: 350968 - DNA, 25 bp, Artificial
  Probe
tggagactcacagatacagagatta

SEQ ID NO: 350969 - DNA, 25 bp, Artificial
  Probe
cctcaggctgcaaataaagagatgt

SEQ ID NO: 350970 - DNA, 25 bp, Artificial
  Probe
gtgtttatttcatttgacccacttg

SEQ ID NO: 350971 - DNA, 25 bp, Artificial
  Probe
tgaagctttctttcaaggtaaaagc

SEQ ID NO: 350972 - DNA, 25 bp, Artificial
  Probe
ccttcatgggtgtatttgagaatct

SEQ ID NO: 350973 - DNA, 25 bp, Artificial
  Probe
ctgccacaagcctcaggctgcaaat

SEQ ID NO: 350974 - DNA, 25 bp, Artificial
  Probe
ggaacatccccgattacttatttga

SEQ ID NO: 350975 - DNA, 25 bp, Artificial
  Probe
gaaccttacaaagctcataatggat

SEQ ID NO: 350976 - DNA, 25 bp, Artificial
  Probe
gtcctcagcacctgtaagaacattt

SEQ ID NO: 350977 - DNA, 25 bp, Artificial
  Probe
ctgtgacgtgcaaggcagcctgagc

SEQ ID NO: 350978 - DNA, 25 bp, Artificial
  Probe
caagatatcacatatctggggaaaa

SEQ ID NO: 350979 - DNA, 25 bp, Artificial
  Probe
cttcattaaactggacttttatggg

SEQ ID NO: 350980 - DNA, 25 bp, Artificial
  Probe
cctcaccatagaagatgagaggcac

SEQ ID NO: 350981 - DNA, 25 bp, Artificial
  Probe
gtaacttgaagaaccttacaaagct

SEQ ID NO: 350982 - DNA, 25 bp, Artificial
  Probe
aaactggagactcacagatacagag

SEQ ID NO: 350983 - DNA, 25 bp, Artificial
  Probe
tggaggtcacactccgggatttcag

SEQ ID NO: 350984 - DNA, 25 bp, Artificial
  Probe
tggaaatgaagctcttcatgaactg

SEQ ID NO: 350985 - DNA, 25 bp, Artificial
  Probe
agaatcaacggctgccgggtggtct

SEQ ID NO: 350986 - DNA, 25 bp, Artificial
  Probe
ctgagcattcttgatttatcagaaa

SEQ ID NO: 350987 - DNA, 25 bp, Artificial
  Probe
tgtctgcaaatgcagtgaaaatcct

SEQ ID NO: 350988 - DNA, 25 bp, Artificial
  Probe
cctttgcagctctgcaccaggagca

SEQ ID NO: 350989 - DNA, 25 bp, Artificial
  Probe
ttgttaagcggcactcattttgcgg

SEQ ID NO: 350990 - DNA, 25 bp, Artificial
  Probe
gccctcaggaagatgcagaaaggat

SEQ ID NO: 350991 - DNA, 25 bp, Artificial
  Probe
accgggagaacaccacgggcagcga

SEQ ID NO: 350992 - DNA, 25 bp, Artificial
  Probe
gctggacaggagcagcccctacatc

SEQ ID NO: 350993 - DNA, 25 bp, Artificial
  Probe
tcagacaaaggctgccttgccggcg

SEQ ID NO: 350994 - DNA, 25 bp, Artificial
  Probe
gcagcagctggagacgctcgtcctg

SEQ ID NO: 350995 - DNA, 25 bp, Artificial
  Probe
aacgaggaatctggtgccctgaaag

SEQ ID NO: 350996 - DNA, 25 bp, Artificial
  Probe
aacacagctgcgtaaataaacagca

SEQ ID NO: 350997 - DNA, 25 bp, Artificial
  Probe
catgcacacgccatctgtgtaactt

SEQ ID NO: 350998 - DNA, 25 bp, Artificial
  Probe
ggaagctggacaggagcagccccta

SEQ ID NO: 350999 - DNA, 25 bp, Artificial
  Probe
gtaaataaacagcacgggtgacccg

SEQ ID NO: 351000 - DNA, 25 bp, Artificial
  Probe
ttggggccgtttgttaagcggcact

SEQ ID NO: 351001 - DNA, 25 bp, Artificial
  Probe
ttaagaaaacacagctgcgtaaata

SEQ ID NO: 351002 - DNA, 25 bp, Artificial
  Probe
caggttttgcggaacccccatgacg

SEQ ID NO: 351003 - DNA, 25 bp, Artificial
  Probe
ggccgtttgttaagcggcactcatt

SEQ ID NO: 351004 - DNA, 25 bp, Artificial
  Probe
ctacgtaaggactccaagatgtaca

SEQ ID NO: 351005 - DNA, 25 bp, Artificial
  Probe
caccaggagcaggttttgcggaacc

SEQ ID NO: 351006 - DNA, 25 bp, Artificial
  Probe
cgagccgtcgctgacttggcctgga

SEQ ID NO: 351007 - DNA, 25 bp, Artificial
  Probe
gctgcagctgcaggtgttccagtgt

SEQ ID NO: 351008 - DNA, 25 bp, Artificial
  Probe
gctggagacgctcgtcctgagctcc

SEQ ID NO: 351009 - DNA, 25 bp, Artificial
  Probe
ggctcacccaggaggtcccaggagc

SEQ ID NO: 351010 - DNA, 25 bp, Artificial
  Probe
gtgttccagtgtgaggcgcagctac

SEQ ID NO: 351011 - DNA, 25 bp, Artificial
  Probe
atacatgcatgcactgtattagtgt

SEQ ID NO: 351012 - DNA, 25 bp, Artificial
  Probe
gcagtgcctggcactacgtaaggac

SEQ ID NO: 351013 - DNA, 25 bp, Artificial
  Probe
ggaacccccatgacgcaggcctgag

SEQ ID NO: 351014 - DNA, 25 bp, Artificial
  Probe
cgaggaatctggtgccctgaaaggc

SEQ ID NO: 351015 - DNA, 25 bp, Artificial
  Probe
gcctggaacgaggaatctggtgccc

SEQ ID NO: 351016 - DNA, 25 bp, Artificial
  Probe
ggggagcccgaaacagccctttgca

SEQ ID NO: 351017 - DNA, 25 bp, Artificial
  Probe
catgcatgcactgtattagtgttaa

SEQ ID NO: 351018 - DNA, 25 bp, Artificial
  Probe
cggcactcattttgcggaggccatg

SEQ ID NO: 351019 - DNA, 25 bp, Artificial
  Probe
tgttccagtgtgaggcgcagctact

SEQ ID NO: 351020 - DNA, 25 bp, Artificial
  Probe
aggcccagccggactgccgggcatt

SEQ ID NO: 351021 - DNA, 25 bp, Artificial
  Probe
aggagaaggccctgctccaggcccg

SEQ ID NO: 351022 - DNA, 25 bp, Artificial
  Probe
gctgacttggcctggaacgaggaat

SEQ ID NO: 351023 - DNA, 25 bp, Artificial
  Probe
acacagctgcgtaaataaacagcac

SEQ ID NO: 351024 - DNA, 25 bp, Artificial
  Probe
cctgagctccgacctggaagatggc

SEQ ID NO: 351025 - DNA, 25 bp, Artificial
  Probe
gatctgttctgtttcaccatgtaac

SEQ ID NO: 351026 - DNA, 25 bp, Artificial
  Probe
gcgcgccctcaggaagatgcagaaa

SEQ ID NO: 351027 - DNA, 25 bp, Artificial
  Probe
aatctggtgccctgaaaggcccagc

SEQ ID NO: 351028 - DNA, 25 bp, Artificial
  Probe
cagcagctggagacgctcgtcctga

SEQ ID NO: 351029 - DNA, 25 bp, Artificial
  Probe
cgggagaacaccacgggcagcgaca

SEQ ID NO: 351030 - DNA, 25 bp, Artificial
  Probe
ggagcccgaaacagccctttgcagc

SEQ ID NO: 351031 - DNA, 25 bp, Artificial
  Probe
tggtgccctgaaaggcccagccgga

SEQ ID NO: 351032 - DNA, 25 bp, Artificial
  Probe
gacactgagggctcctagccgcagc

SEQ ID NO: 351033 - DNA, 25 bp, Artificial
  Probe
ctgagggctcctagccgcagcagcg

SEQ ID NO: 351034 - DNA, 25 bp, Artificial
  Probe
gtagttagtagctgtcagcttactt

SEQ ID NO: 351035 - DNA, 25 bp, Artificial
  Probe
tcccaggtgttgagatatgtcaaaa

SEQ ID NO: 351036 - DNA, 25 bp, Artificial
  Probe
agctgctgatgttcagaaagttgct

SEQ ID NO: 351037 - DNA, 25 bp, Artificial
  Probe
ttgatttcagcctaaatggccactc

SEQ ID NO: 351038 - DNA, 25 bp, Artificial
  Probe
agagacacaggcagaaacagattgt

SEQ ID NO: 351039 - DNA, 25 bp, Artificial
  Probe
attgtgtgtcttttccttcctggcc

SEQ ID NO: 351040 - DNA, 25 bp, Artificial
  Probe
gtcaaaagccacttaagaagcccta

SEQ ID NO: 351041 - DNA, 25 bp, Artificial
  Probe
actgcctcataacaaacacacgagg

SEQ ID NO: 351042 - DNA, 25 bp, Artificial
  Probe
cttctgatccacaagcaggagtcag

SEQ ID NO: 351043 - DNA, 25 bp, Artificial
  Probe
gcagtgttcttgaacctcttcttca

SEQ ID NO: 351044 - DNA, 25 bp, Artificial
  Probe
agatatgtcaaaagccacttaagaa

SEQ ID NO: 351045 - DNA, 25 bp, Artificial
  Probe
tgggggtccttatcttcactcatat

SEQ ID NO: 351046 - DNA, 25 bp, Artificial
  Probe
atggtagcttctgttcatagggtgc

SEQ ID NO: 351047 - DNA, 25 bp, Artificial
  Probe
cccgtttcctaatgcatacacagag

SEQ ID NO: 351048 - DNA, 25 bp, Artificial
  Probe
gcacaagaaccaggacactttcctt

SEQ ID NO: 351049 - DNA, 25 bp, Artificial
  Probe
gtcacttgcacaaggactacactat

SEQ ID NO: 351050 - DNA, 25 bp, Artificial
  Probe
tctccatggaattgttcaaacagtg

SEQ ID NO: 351051 - DNA, 25 bp, Artificial
  Probe
catggcactggagtagttagtagct

SEQ ID NO: 351052 - DNA, 25 bp, Artificial
  Probe
tttgtttactatcgtcaaaggctaa

SEQ ID NO: 351053 - DNA, 25 bp, Artificial
  Probe
tgtggacttttgtaacctcaaagtt

SEQ ID NO: 351054 - DNA, 25 bp, Artificial
  Probe
tatcacggacaaacacagatatatg

SEQ ID NO: 351055 - DNA, 25 bp, Artificial
  Probe
gcctcataacaaacacacgaggcca

SEQ ID NO: 351056 - DNA, 25 bp, Artificial
  Probe
gcctgtctcactcctgtctgtcaaa

SEQ ID NO: 351057 - DNA, 25 bp, Artificial
  Probe
ggggtccttatcttcactcatatcc

SEQ ID NO: 351058 - DNA, 25 bp, Artificial
  Probe
tcaatgggctctttctttctgcttc

SEQ ID NO: 351059 - DNA, 25 bp, Artificial
  Probe
cgactcgatggaggaagtacaaagt

SEQ ID NO: 351060 - DNA, 25 bp, Artificial
  Probe
atatttgttgactggatacagcttc

SEQ ID NO: 351061 - DNA, 25 bp, Artificial
  Probe
tgtctgtcaaaactttttctgcagt

SEQ ID NO: 351062 - DNA, 25 bp, Artificial
  Probe
agtacaaagttttgaccagaccttg

SEQ ID NO: 351063 - DNA, 25 bp, Artificial
  Probe
gtaaaaaatctccatggaattgttc

SEQ ID NO: 351064 - DNA, 25 bp, Artificial
  Probe
atctttcccaaatagtccaactggg

SEQ ID NO: 351065 - DNA, 25 bp, Artificial
  Probe
agcctaaagttttatcttgacactg

SEQ ID NO: 351066 - DNA, 25 bp, Artificial
  Probe
aaactttttctgcagttgtcttagt

SEQ ID NO: 351067 - DNA, 25 bp, Artificial
  Probe
aaacgactcgatggaggaagtacaa

SEQ ID NO: 351068 - DNA, 25 bp, Artificial
  Probe
taacccaaatgtatttgccttgaag

SEQ ID NO: 351069 - DNA, 25 bp, Artificial
  Probe
tttgccttgaagtgagggtacttgc

SEQ ID NO: 351070 - DNA, 25 bp, Artificial
  Probe
caggcatggcactggagtagttagt

SEQ ID NO: 351071 - DNA, 25 bp, Artificial
  Probe
gcttcttaactttgcttgagataat

SEQ ID NO: 351072 - DNA, 25 bp, Artificial
  Probe
ctacagtgatctcttcctgtgtggg

SEQ ID NO: 351073 - DNA, 25 bp, Artificial
  Probe
cccaaatgtatttgccttgaagtga

SEQ ID NO: 351074 - DNA, 25 bp, Artificial
  Probe
cattctattgctgtgaagaagtact

SEQ ID NO: 351075 - DNA, 25 bp, Artificial
  Probe
gtgtgtcttttccttcctggcctcc

SEQ ID NO: 351076 - DNA, 25 bp, Artificial
  Probe
cagcttcctaggaattggtatgtaa

SEQ ID NO: 351077 - DNA, 25 bp, Artificial
  Probe
atcgtcaaaggctaagacaataata

SEQ ID NO: 351078 - DNA, 25 bp, Artificial
  Probe
tagctgctgatgttcagaaagttgc

SEQ ID NO: 351079 - DNA, 25 bp, Artificial
  Probe
cggacaaacacagatatatgtaaca

SEQ ID NO: 351080 - DNA, 25 bp, Artificial
  Probe
aagctgtgagcaaacagaggaggcc

SEQ ID NO: 351081 - DNA, 25 bp, Artificial
  Probe
tacctcgtgaagaggggaagtctct

SEQ ID NO: 351082 - DNA, 25 bp, Artificial
  Probe
cttgcgagctgttgtagttacagta

SEQ ID NO: 351083 - DNA, 25 bp, Artificial
  Probe
gccagcagagcatgttggacacccc

SEQ ID NO: 351084 - DNA, 25 bp, Artificial
  Probe
tgttgaaagtcaaccagacgttaaa

SEQ ID NO: 351085 - DNA, 25 bp, Artificial
  Probe
cccgctacaattctgcagaaaaaga

SEQ ID NO: 351086 - DNA, 25 bp, Artificial
  Probe
tcagtgtcttaaaggggcctgcgca

SEQ ID NO: 351087 - DNA, 25 bp, Artificial
  Probe
agcactttcccatgtattgatactg

SEQ ID NO: 351088 - DNA, 25 bp, Artificial
  Probe
ctcaacgatgaagtggcagagagtt

SEQ ID NO: 351089 - DNA, 25 bp, Artificial
  Probe
cctctagaaggctgagtaccatggg

SEQ ID NO: 351090 - DNA, 25 bp, Artificial
  Probe
tgtgggatttgactcctccaaggtt

SEQ ID NO: 351091 - DNA, 25 bp, Artificial
  Probe
cactcagggcttctcctctgctagg

SEQ ID NO: 351092 - DNA, 25 bp, Artificial
  Probe
tctgctggcaaagatagagaatgcc

SEQ ID NO: 351093 - DNA, 25 bp, Artificial
  Probe
gcatttatggcttatccagaatcag

SEQ ID NO: 351094 - DNA, 25 bp, Artificial
  Probe
tgtggccctggcatccaaatggctg

SEQ ID NO: 351095 - DNA, 25 bp, Artificial
  Probe
ggtgatactactagatcacttgtcc

SEQ ID NO: 351096 - DNA, 25 bp, Artificial
  Probe
acagtaaatacactgtgaagagact

SEQ ID NO: 351097 - DNA, 25 bp, Artificial
  Probe
gatgtggcacaaagttggtgccaag

SEQ ID NO: 351098 - DNA, 25 bp, Artificial
  Probe
gggaagtctcttcctgcctcccaag

SEQ ID NO: 351099 - DNA, 25 bp, Artificial
  Probe
taaacgggcgccaagactcagggga

SEQ ID NO: 351100 - DNA, 25 bp, Artificial
  Probe
caaccagacgttaaagcatttatgg

SEQ ID NO: 351101 - DNA, 25 bp, Artificial
  Probe
caagcttcttgaataaaacgtgttt

SEQ ID NO: 351102 - DNA, 25 bp, Artificial
  Probe
catgggctacagtgtctggccttgg

SEQ ID NO: 351103 - DNA, 25 bp, Artificial
  Probe
gactcctccaaggttttgtggaaag

SEQ ID NO: 351104 - DNA, 25 bp, Artificial
  Probe
acagctggagacaccggagtatgtg

SEQ ID NO: 351105 - DNA, 25 bp, Artificial
  Probe
gtgtcttgcgagctgttgtagttac

SEQ ID NO: 351106 - DNA, 25 bp, Artificial
  Probe
tagggcatggcttgcccctgtggcc

SEQ ID NO: 351107 - DNA, 25 bp, Artificial
  Probe
cgctcttttcattgaagagttgagg

SEQ ID NO: 351108 - DNA, 25 bp, Artificial
  Probe
ctaagtacccgctacaattctgcag

SEQ ID NO: 351109 - DNA, 25 bp, Artificial
  Probe
aaagctgtgagcaaacagaggaggc

SEQ ID NO: 351110 - DNA, 25 bp, Artificial
  Probe
gatgccttcaaaatgctgcttccac

SEQ ID NO: 351111 - DNA, 25 bp, Artificial
  Probe
cataacagagatttgcctaaatgga

SEQ ID NO: 351112 - DNA, 25 bp, Artificial
  Probe
cctgataaaaccagaggaggccaaa

SEQ ID NO: 351113 - DNA, 25 bp, Artificial
  Probe
aaaggatgcaccacgggcttttaat

SEQ ID NO: 351114 - DNA, 25 bp, Artificial
  Probe
aacgggcgccaagactcaggggatc

SEQ ID NO: 351115 - DNA, 25 bp, Artificial
  Probe
tatctgtttctgagaggatgctttc

SEQ ID NO: 351116 - DNA, 25 bp, Artificial
  Probe
atacactgtgaagagactttattgc

SEQ ID NO: 351117 - DNA, 25 bp, Artificial
  Probe
aggaaaggatgcaccacgggctttt

SEQ ID NO: 351118 - DNA, 25 bp, Artificial
  Probe
cgcaggcgggactatcaggagtcca

SEQ ID NO: 351119 - DNA, 25 bp, Artificial
  Probe
aactgggccagcagagcatgttgga

SEQ ID NO: 351120 - DNA, 25 bp, Artificial
  Probe
tctggtcggcaaactccctaagtac

SEQ ID NO: 351121 - DNA, 25 bp, Artificial
  Probe
agggcttctcctctgctaggctacc

SEQ ID NO: 351122 - DNA, 25 bp, Artificial
  Probe
ccaagcagctgaagggtgactaaac

SEQ ID NO: 351123 - DNA, 25 bp, Artificial
  Probe
tcattccaacacctgccatagggac

SEQ ID NO: 351124 - DNA, 25 bp, Artificial
  Probe
tagagaatgccctcagctcttagct

SEQ ID NO: 351125 - DNA, 25 bp, Artificial
  Probe
attttaatcctggagtctcactgtc

SEQ ID NO: 351126 - DNA, 25 bp, Artificial
  Probe
gggaacgtcgattctggagagacta

SEQ ID NO: 351127 - DNA, 25 bp, Artificial
  Probe
tcaacggccagaaccagcattatca

SEQ ID NO: 351128 - DNA, 25 bp, Artificial
  Probe
cactgacctaagcaagaatcaggcc

SEQ ID NO: 351129 - DNA, 25 bp, Artificial
  Probe
tgacctaagcaagaatcaggccatg

SEQ ID NO: 351130 - DNA, 25 bp, Artificial
  Probe
gaaagacagcacttctggggaatgt

SEQ ID NO: 351131 - DNA, 25 bp, Artificial
  Probe
ccctggcactgacctaagcaagaat

SEQ ID NO: 351132 - DNA, 25 bp, Artificial
  Probe
gagaaagacagcacttctggggaat

SEQ ID NO: 351133 - DNA, 25 bp, Artificial
  Probe
gcacttctggggaatgtggaacgtt

SEQ ID NO: 351134 - DNA, 25 bp, Artificial
  Probe
agataaagaccatcaacggccagaa

SEQ ID NO: 351135 - DNA, 25 bp, Artificial
  Probe
ctggcactgacctaagcaagaatca

SEQ ID NO: 351136 - DNA, 25 bp, Artificial
  Probe
cgtcgattctggagagactagagtg

SEQ ID NO: 351137 - DNA, 25 bp, Artificial
  Probe
gcgtccggcggttacaagctaagac

SEQ ID NO: 351138 - DNA, 25 bp, Artificial
  Probe
acggccagaaccagcattatcaggt

SEQ ID NO: 351139 - DNA, 25 bp, Artificial
  Probe
cggttacaagctaagacatgttttc

SEQ ID NO: 351140 - DNA, 25 bp, Artificial
  Probe
ggagtctggcctttcgtctcaaagt

SEQ ID NO: 351141 - DNA, 25 bp, Artificial
  Probe
ccggcggttacaagctaagacatgt

SEQ ID NO: 351142 - DNA, 25 bp, Artificial
  Probe
tggcctttcgtctcaaagtaatgat

SEQ ID NO: 351143 - DNA, 25 bp, Artificial
  Probe
cacttctggggaatgtggaacgttg

SEQ ID NO: 351144 - DNA, 25 bp, Artificial
  Probe
aagacagcacttctggggaatgtgg

SEQ ID NO: 351145 - DNA, 25 bp, Artificial
  Probe
catgttttcccatcttcgcaagcgt

SEQ ID NO: 351146 - DNA, 25 bp, Artificial
  Probe
gttttcccatcttcgcaagcgtttt

SEQ ID NO: 351147 - DNA, 25 bp, Artificial
  Probe
caacggccagaaccagcattatcag

SEQ ID NO: 351148 - DNA, 25 bp, Artificial
  Probe
tccggcggttacaagctaagacatg

SEQ ID NO: 351149 - DNA, 25 bp, Artificial
  Probe
cgcgtccggcggttacaagctaaga

SEQ ID NO: 351150 - DNA, 25 bp, Artificial
  Probe
tcccatcttcgcaagcgttttggga

SEQ ID NO: 351151 - DNA, 25 bp, Artificial
  Probe
ctgacctaagcaagaatcaggccat

SEQ ID NO: 351152 - DNA, 25 bp, Artificial
  Probe
acatgttttcccatcttcgcaagcg

SEQ ID NO: 351153 - DNA, 25 bp, Artificial
  Probe
agacagcacttctggggaatgtgga

SEQ ID NO: 351154 - DNA, 25 bp, Artificial
  Probe
gagtctggcctttcgtctcaaagta

SEQ ID NO: 351155 - DNA, 25 bp, Artificial
  Probe
taaagaccatcaacggccagaacca

SEQ ID NO: 351156 - DNA, 25 bp, Artificial
  Probe
ggcactgacctaagcaagaatcagg

SEQ ID NO: 351157 - DNA, 25 bp, Artificial
  Probe
agtgaaggagtctggcctttcgtct

SEQ ID NO: 351158 - DNA, 25 bp, Artificial
  Probe
gttacaagctaagacatgttttccc

SEQ ID NO: 351159 - DNA, 25 bp, Artificial
  Probe
catcaacggccagaaccagcattat

SEQ ID NO: 351160 - DNA, 25 bp, Artificial
  Probe
ctttcgtctcaaagtaatgatggag

SEQ ID NO: 351161 - DNA, 25 bp, Artificial
  Probe
cctttcgtctcaaagtaatgatgga

SEQ ID NO: 351162 - DNA, 25 bp, Artificial
  Probe
gcctttcgtctcaaagtaatgatgg

SEQ ID NO: 351163 - DNA, 25 bp, Artificial
  Probe
cctggcactgacctaagcaagaatc

SEQ ID NO: 351164 - DNA, 25 bp, Artificial
  Probe
ggaacgtcgattctggagagactag

SEQ ID NO: 351165 - DNA, 25 bp, Artificial
  Probe
aacgtcgattctggagagactagag

SEQ ID NO: 351166 - DNA, 25 bp, Artificial
  Probe
gctaagacatgttttcccatcttcg

SEQ ID NO: 351167 - DNA, 25 bp, Artificial
  Probe
ccatcaacggccagaaccagcatta

SEQ ID NO: 351168 - DNA, 25 bp, Artificial
  Probe
cccatcttcgcaagcgttttgggag

SEQ ID NO: 351169 - DNA, 25 bp, Artificial
  Probe
gtctggcctttcgtctcaaagtaat

SEQ ID NO: 351170 - DNA, 25 bp, Artificial
  Probe
aggagtctggcctttcgtctcaaag

SEQ ID NO: 351171 - DNA, 25 bp, Artificial
  Probe
tgttttcccatcttcgcaagcgttt

SEQ ID NO: 351172 - DNA, 25 bp, Artificial
  Probe
tagaacttgaaccagttttgagaac

SEQ ID NO: 351173 - DNA, 25 bp, Artificial
  Probe
tggatccagagcaaaagggaagaca

SEQ ID NO: 351174 - DNA, 25 bp, Artificial
  Probe
gtgtaaattacctgcacaatatgac

SEQ ID NO: 351175 - DNA, 25 bp, Artificial
  Probe
cctgccagctcctcaagacaatgat

SEQ ID NO: 351176 - DNA, 25 bp, Artificial
  Probe
ccactctcaactgcaggaaactcag

SEQ ID NO: 351177 - DNA, 25 bp, Artificial
  Probe
catgccaaatggatcattaaatgaa

SEQ ID NO: 351178 - DNA, 25 bp, Artificial
  Probe
gtcttcagccttacccggaaatact

SEQ ID NO: 351179 - DNA, 25 bp, Artificial
  Probe
ataacaaacaaatgggtcttcagcc

SEQ ID NO: 351180 - DNA, 25 bp, Artificial
  Probe
tctagaaaagctcaagactgttatt

SEQ ID NO: 351181 - DNA, 25 bp, Artificial
  Probe
acttcatcatgacttgaagactcag

SEQ ID NO: 351182 - DNA, 25 bp, Artificial
  Probe
aagttacagagtgtttcaagtgcca

SEQ ID NO: 351183 - DNA, 25 bp, Artificial
  Probe
tctctctaatagaaagtggatgggc

SEQ ID NO: 351184 - DNA, 25 bp, Artificial
  Probe
cattgtgaaccaaatgacagaagcc

SEQ ID NO: 351185 - DNA, 25 bp, Artificial
  Probe
gaactcctacataggaaaactgaat

SEQ ID NO: 351186 - DNA, 25 bp, Artificial
  Probe
atgccacctgaaaactatgaacctg

SEQ ID NO: 351187 - DNA, 25 bp, Artificial
  Probe
tgaaacttcaaggtccctgccagct

SEQ ID NO: 351188 - DNA, 25 bp, Artificial
  Probe
cttgaagctgttattcagctaaaga

SEQ ID NO: 351189 - DNA, 25 bp, Artificial
  Probe
aacttttcttgaagctgttattcag

SEQ ID NO: 351190 - DNA, 25 bp, Artificial
  Probe
tccagggacttgatcatgaaagagg

SEQ ID NO: 351191 - DNA, 25 bp, Artificial
  Probe
tggaattatctctgaacatacctgt

SEQ ID NO: 351192 - DNA, 25 bp, Artificial
  Probe
gaaatacttgtggtttctagatcac

SEQ ID NO: 351193 - DNA, 25 bp, Artificial
  Probe
ctatgaacttgttagtaccaagcct

SEQ ID NO: 351194 - DNA, 25 bp, Artificial
  Probe
atgggcacaaaatccagatgaaaga

SEQ ID NO: 351195 - DNA, 25 bp, Artificial
  Probe
tagttactgaatacatgccaaatgg

SEQ ID NO: 351196 - DNA, 25 bp, Artificial
  Probe
gactcagaatatcttattggacaat

SEQ ID NO: 351197 - DNA, 25 bp, Artificial
  Probe
aatgaactcctacataggaaaactg

SEQ ID NO: 351198 - DNA, 25 bp, Artificial
  Probe
gtgatcacaagaccactccatgctc

SEQ ID NO: 351199 - DNA, 25 bp, Artificial
  Probe
tgacatccaaggagaagaatttgcc

SEQ ID NO: 351200 - DNA, 25 bp, Artificial
  Probe
ggacctcaaaagtcagacaattact

SEQ ID NO: 351201 - DNA, 25 bp, Artificial
  Probe
tattttatgaagctgcatcactgtc

SEQ ID NO: 351202 - DNA, 25 bp, Artificial
  Probe
atgtatagtgtgtcacaaggacatc

SEQ ID NO: 351203 - DNA, 25 bp, Artificial
  Probe
tcaaagtggcgcatgatgtccctct

SEQ ID NO: 351204 - DNA, 25 bp, Artificial
  Probe
catcgacctgttattaatgaagaaa

SEQ ID NO: 351205 - DNA, 25 bp, Artificial
  Probe
caatcctttgcagataatgtatagt

SEQ ID NO: 351206 - DNA, 25 bp, Artificial
  Probe
gccagctcctcaagacaatgatttt

SEQ ID NO: 351207 - DNA, 25 bp, Artificial
  Probe
tatatagctatgcagttatcacatg

SEQ ID NO: 351208 - DNA, 25 bp, Artificial
  Probe
tactagacactactgacatccaagg

SEQ ID NO: 351209 - DNA, 25 bp, Artificial
  Probe
cttgaaccagttttgagaacatttg

SEQ ID NO: 351210 - DNA, 25 bp, Artificial
  Probe
tcacctatgtgacaagaagaaaatg

SEQ ID NO: 351211 - DNA, 25 bp, Artificial
  Probe
ttttatctagaaaagctcaagactg

SEQ ID NO: 351212 - DNA, 25 bp, Artificial
  Probe
ggccagtatcaagcacgatatatat

SEQ ID NO: 351213 - DNA, 25 bp, Artificial
  Probe
aaactgaatatcctgatgttgcttg

SEQ ID NO: 351214 - DNA, 25 bp, Artificial
  Probe
gcacaaaatccagatgaaagaccat

SEQ ID NO: 351215 - DNA, 25 bp, Artificial
  Probe
gtttgccatatgatatacctcaccg

SEQ ID NO: 351216 - DNA, 25 bp, Artificial
  Probe
tgcaccagaaggagggacaattatc

SEQ ID NO: 351217 - DNA, 25 bp, Artificial
  Probe
attcttccaattttgggaatttgca

SEQ ID NO: 351218 - DNA, 25 bp, Artificial
  Probe
aggtttgcacactcaagttctcatg

SEQ ID NO: 351219 - DNA, 25 bp, Artificial
  Probe
ggcgggcacacacaggaccgtgcct

SEQ ID NO: 351220 - DNA, 25 bp, Artificial
  Probe
gttccctggcccatggtcacctgtg

SEQ ID NO: 351221 - DNA, 25 bp, Artificial
  Probe
atgtacggcccgtggatgattaacg

SEQ ID NO: 351222 - DNA, 25 bp, Artificial
  Probe
ccctcgtgtctcctcacatgggtgt

SEQ ID NO: 351223 - DNA, 25 bp, Artificial
  Probe
ttctccttaaacactcgccctggag

SEQ ID NO: 351224 - DNA, 25 bp, Artificial
  Probe
ctcaagttctcatgggcaggctcag

SEQ ID NO: 351225 - DNA, 25 bp, Artificial
  Probe
aggacctgggcctgttctgctccta

SEQ ID NO: 351226 - DNA, 25 bp, Artificial
  Probe
tctccttaaacactcgccctggagt

SEQ ID NO: 351227 - DNA, 25 bp, Artificial
  Probe
tttcatgtgggcactaacacgtgtg

SEQ ID NO: 351228 - DNA, 25 bp, Artificial
  Probe
ccctgtttcatgtgggcactaacac

SEQ ID NO: 351229 - DNA, 25 bp, Artificial
  Probe
tggagcattaaacacttttgtcata

SEQ ID NO: 351230 - DNA, 25 bp, Artificial
  Probe
ctggggtctccacattcccactagt

SEQ ID NO: 351231 - DNA, 25 bp, Artificial
  Probe
tggactggggtgttccctggcccat

SEQ ID NO: 351232 - DNA, 25 bp, Artificial
  Probe
acgggcctttttcacttagaagctg

SEQ ID NO: 351233 - DNA, 25 bp, Artificial
  Probe
tgcgcaggtttgcacactcaagttc

SEQ ID NO: 351234 - DNA, 25 bp, Artificial
  Probe
tcatgagaatgtacggcccgtggat

SEQ ID NO: 351235 - DNA, 25 bp, Artificial
  Probe
ggcaggctcaggtctgtcccgctgc

SEQ ID NO: 351236 - DNA, 25 bp, Artificial
  Probe
ttcctggcgggcacacacaggaccg

SEQ ID NO: 351237 - DNA, 25 bp, Artificial
  Probe
cattcccactagtgggtcttatgtg

SEQ ID NO: 351238 - DNA, 25 bp, Artificial
  Probe
gggtcttatgtgtgtctgtgtcttc

SEQ ID NO: 351239 - DNA, 25 bp, Artificial
  Probe
ctaggagacctgagcccgttaccgc

SEQ ID NO: 351240 - DNA, 25 bp, Artificial
  Probe
tctctcctgtgtaaatgtcacgccc

SEQ ID NO: 351241 - DNA, 25 bp, Artificial
  Probe
agctcgcgctcctcgtggattcagc

SEQ ID NO: 351242 - DNA, 25 bp, Artificial
  Probe
tttcacttagaagctgcacattatg

SEQ ID NO: 351243 - DNA, 25 bp, Artificial
  Probe
tgcacattatggagcattaaacact

SEQ ID NO: 351244 - DNA, 25 bp, Artificial
  Probe
cgtgtgcgttcctggcgggcacaca

SEQ ID NO: 351245 - DNA, 25 bp, Artificial
  Probe
agggcggctgctctgtcatgagaat

SEQ ID NO: 351246 - DNA, 25 bp, Artificial
  Probe
tgccctgggcacgaggtctcctgag

SEQ ID NO: 351247 - DNA, 25 bp, Artificial
  Probe
ttctcacacctgtgcgcaggtttgc

SEQ ID NO: 351248 - DNA, 25 bp, Artificial
  Probe
cacccctgtttcatgtgggcactaa

SEQ ID NO: 351249 - DNA, 25 bp, Artificial
  Probe
ctcctgaggacctgggcctgttctg

SEQ ID NO: 351250 - DNA, 25 bp, Artificial
  Probe
gggtctccacattcccactagtggg

SEQ ID NO: 351251 - DNA, 25 bp, Artificial
  Probe
catggactggggtgttccctggccc

SEQ ID NO: 351252 - DNA, 25 bp, Artificial
  Probe
gtgtctgtgtcttctccttaaacac

SEQ ID NO: 351253 - DNA, 25 bp, Artificial
  Probe
ccatgcatggactggggtgttccct

SEQ ID NO: 351254 - DNA, 25 bp, Artificial
  Probe
actcgccctggagtctgttctcaca

SEQ ID NO: 351255 - DNA, 25 bp, Artificial
  Probe
gcccgtggatgattaacgggccttt

SEQ ID NO: 351256 - DNA, 25 bp, Artificial
  Probe
atgtgtgtctgtgtcttctccttaa

SEQ ID NO: 351257 - DNA, 25 bp, Artificial
  Probe
acacctgtgcgcaggtttgcacact

SEQ ID NO: 351258 - DNA, 25 bp, Artificial
  Probe
aacactcgccctggagtctgttctc

SEQ ID NO: 351259 - DNA, 25 bp, Artificial
  Probe
cactagtgggtcttatgtgtgtctg

SEQ ID NO: 351260 - DNA, 25 bp, Artificial
  Probe
tggggtgttccctggcccatggtca

SEQ ID NO: 351261 - DNA, 25 bp, Artificial
  Probe
gcctttttcacttagaagctgcaca

SEQ ID NO: 351262 - DNA, 25 bp, Artificial
  Probe
gacctgagcccgttaccgcgtgact

SEQ ID NO: 351263 - DNA, 25 bp, Artificial
  Probe
gttctcatgggcaggctcaggtctg

SEQ ID NO: 351264 - DNA, 25 bp, Artificial
  Probe
cagtcctggggacacactcaccata

SEQ ID NO: 351265 - DNA, 25 bp, Artificial
  Probe
agagccagagcagcagttgaatgta

SEQ ID NO: 351266 - DNA, 25 bp, Artificial
  Probe
gggcatcctatgaggcaggcaccct

SEQ ID NO: 351267 - DNA, 25 bp, Artificial
  Probe
acagccaggtgactaccagtcctgg

SEQ ID NO: 351268 - DNA, 25 bp, Artificial
  Probe
tcctggggacacactcaccataaac

SEQ ID NO: 351269 - DNA, 25 bp, Artificial
  Probe
accaggctatgatttctcttgcatt

SEQ ID NO: 351270 - DNA, 25 bp, Artificial
  Probe
ccctgctggccttagcagggagaca

SEQ ID NO: 351271 - DNA, 25 bp, Artificial
  Probe
ctggggacacactcaccataaacac

SEQ ID NO: 351272 - DNA, 25 bp, Artificial
  Probe
gccagagcagcagttgaatgtaatg

SEQ ID NO: 351273 - DNA, 25 bp, Artificial
  Probe
gcagtttggccctgctggccttagc

SEQ ID NO: 351274 - DNA, 25 bp, Artificial
  Probe
taatgctggggacaggcatgctgcc

SEQ ID NO: 351275 - DNA, 25 bp, Artificial
  Probe
cctgctggccttagcagggagacag

SEQ ID NO: 351276 - DNA, 25 bp, Artificial
  Probe
agtcctggggacacactcaccataa

SEQ ID NO: 351277 - DNA, 25 bp, Artificial
  Probe
gcaaagaacgccaagccggaggccc

SEQ ID NO: 351278 - DNA, 25 bp, Artificial
  Probe
cggacagccaggtgactaccagtcc

SEQ ID NO: 351279 - DNA, 25 bp, Artificial
  Probe
agtttggccctgctggccttagcag

SEQ ID NO: 351280 - DNA, 25 bp, Artificial
  Probe
ggacagccaggtgactaccagtcct

SEQ ID NO: 351281 - DNA, 25 bp, Artificial
  Probe
tccccaggcaggacagatcggggaa

SEQ ID NO: 351282 - DNA, 25 bp, Artificial
  Probe
acccggacagccaggtgactaccag

SEQ ID NO: 351283 - DNA, 25 bp, Artificial
  Probe
gtcctggggacacactcaccataaa

SEQ ID NO: 351284 - DNA, 25 bp, Artificial
  Probe
catccccaggcaggacagatcgggg

SEQ ID NO: 351285 - DNA, 25 bp, Artificial
  Probe
agccaggtgactaccagtcctgggg

SEQ ID NO: 351286 - DNA, 25 bp, Artificial
  Probe
caaagaacgccaagccggaggcccg

SEQ ID NO: 351287 - DNA, 25 bp, Artificial
  Probe
atccccaggcaggacagatcgggga

SEQ ID NO: 351288 - DNA, 25 bp, Artificial
  Probe
accataaacacatccccaggcagga

SEQ ID NO: 351289 - DNA, 25 bp, Artificial
  Probe
cccggacagccaggtgactaccagt

SEQ ID NO: 351290 - DNA, 25 bp, Artificial
  Probe
tctcgagagccagagcagcagttga

SEQ ID NO: 351291 - DNA, 25 bp, Artificial
  Probe
aggtgactaccagtcctggggacac

SEQ ID NO: 351292 - DNA, 25 bp, Artificial
  Probe
ctccgcgttgtcaaggacaagatcg

SEQ ID NO: 351293 - DNA, 25 bp, Artificial
  Probe
gccaggtgactaccagtcctgggga

SEQ ID NO: 351294 - DNA, 25 bp, Artificial
  Probe
ttgtcaaggacaagatcggcgagga

SEQ ID NO: 351295 - DNA, 25 bp, Artificial
  Probe
gagccagagcagcagttgaatgtaa

SEQ ID NO: 351296 - DNA, 25 bp, Artificial
  Probe
ggtgactaccagtcctggggacaca

SEQ ID NO: 351297 - DNA, 25 bp, Artificial
  Probe
gagagccagagcagcagttgaatgt

SEQ ID NO: 351298 - DNA, 25 bp, Artificial
  Probe
taccaggctatgatttctcttgcat

SEQ ID NO: 351299 - DNA, 25 bp, Artificial
  Probe
gactaccagtcctggggacacactc

SEQ ID NO: 351300 - DNA, 25 bp, Artificial
  Probe
gtgactaccagtcctggggacacac

SEQ ID NO: 351301 - DNA, 25 bp, Artificial
  Probe
cgttgtcaaggacaagatcggcgag

SEQ ID NO: 351302 - DNA, 25 bp, Artificial
  Probe
aggctatgatttctcttgcattaaa

SEQ ID NO: 351303 - DNA, 25 bp, Artificial
  Probe
tgtgtaccaggctatgatttctctt

SEQ ID NO: 351304 - DNA, 25 bp, Artificial
  Probe
gtaccaggctatgatttctcttgca

SEQ ID NO: 351305 - DNA, 25 bp, Artificial
  Probe
cggggcatcctatgaggcaggcacc

SEQ ID NO: 351306 - DNA, 25 bp, Artificial
  Probe
ggggacacactcaccataaacacat

SEQ ID NO: 351307 - DNA, 25 bp, Artificial
  Probe
gtttggccctgctggccttagcagg

SEQ ID NO: 351308 - DNA, 25 bp, Artificial
  Probe
acatccccaggcaggacagatcggg

SEQ ID NO: 351309 - DNA, 25 bp, Artificial
  Probe
gtgtaccaggctatgatttctcttg

SEQ ID NO: 351310 - DNA, 25 bp, Artificial
  Probe
agctcttcagtttcacaccagcctg

SEQ ID NO: 351311 - DNA, 25 bp, Artificial
  Probe
acctggagacctacggcgccgagct

SEQ ID NO: 351312 - DNA, 25 bp, Artificial
  Probe
atggacgccttggacctcaccgaca

SEQ ID NO: 351313 - DNA, 25 bp, Artificial
  Probe
ttatagaccagcaccgggctgcgct

SEQ ID NO: 351314 - DNA, 25 bp, Artificial
  Probe
gccttggacctcaccgacaagctgg

SEQ ID NO: 351315 - DNA, 25 bp, Artificial
  Probe
tcgcgagggtcacaaacgttgagtg

SEQ ID NO: 351316 - DNA, 25 bp, Artificial
  Probe
ttatcgcgagggtcacaaacgttga

SEQ ID NO: 351317 - DNA, 25 bp, Artificial
  Probe
cacaatatacgaaaagccagcttga

SEQ ID NO: 351318 - DNA, 25 bp, Artificial
  Probe
gagctgaggctccttcccagcaaca

SEQ ID NO: 351319 - DNA, 25 bp, Artificial
  Probe
ccgacaagctggtcagcttctacct

SEQ ID NO: 351320 - DNA, 25 bp, Artificial
  Probe
acctcaccgacaagctggtcagctt

SEQ ID NO: 351321 - DNA, 25 bp, Artificial
  Probe
ctacctggagacctacggcgccgag

SEQ ID NO: 351322 - DNA, 25 bp, Artificial
  Probe
tctgtacgggaaggtcctgacggat

SEQ ID NO: 351323 - DNA, 25 bp, Artificial
  Probe
agtcggcagccaagccaggcctgca

SEQ ID NO: 351324 - DNA, 25 bp, Artificial
  Probe
ccaagccaggcctgcactttataga

SEQ ID NO: 351325 - DNA, 25 bp, Artificial
  Probe
tcacaccagcctggaactggacctg

SEQ ID NO: 351326 - DNA, 25 bp, Artificial
  Probe
acgtgctgcgcgacatgggcctgca

SEQ ID NO: 351327 - DNA, 25 bp, Artificial
  Probe
tggacctcaccgacaagctggtcag

SEQ ID NO: 351328 - DNA, 25 bp, Artificial
  Probe
caatatacgaaaagccagcttgaaa

SEQ ID NO: 351329 - DNA, 25 bp, Artificial
  Probe
ggacctgcaaggacttgctcctcca

SEQ ID NO: 351330 - DNA, 25 bp, Artificial
  Probe
gagctcaccgctaacgtgctgcgcg

SEQ ID NO: 351331 - DNA, 25 bp, Artificial
  Probe
cagtttcacaccagcctggaactgg

SEQ ID NO: 351332 - DNA, 25 bp, Artificial
  Probe
ctcaccgacaagctggtcagcttct

SEQ ID NO: 351333 - DNA, 25 bp, Artificial
  Probe
caccgacaagctggtcagcttctac

SEQ ID NO: 351334 - DNA, 25 bp, Artificial
  Probe
ctccaggccctaagggagtcccagt

SEQ ID NO: 351335 - DNA, 25 bp, Artificial
  Probe
ggacgccttggacctcaccgacaag

SEQ ID NO: 351336 - DNA, 25 bp, Artificial
  Probe
cgagggtcacaaacgttgagtggct

SEQ ID NO: 351337 - DNA, 25 bp, Artificial
  Probe
tggtcagcttctacctggagaccta

SEQ ID NO: 351338 - DNA, 25 bp, Artificial
  Probe
ggcagccaagccaggcctgcacttt

SEQ ID NO: 351339 - DNA, 25 bp, Artificial
  Probe
cacaaacgttgagtggctgctggat

SEQ ID NO: 351340 - DNA, 25 bp, Artificial
  Probe
tcctgacggatgagcagtaccaggc

SEQ ID NO: 351341 - DNA, 25 bp, Artificial
  Probe
ccgctaacgtgctgcgcgacatggg

SEQ ID NO: 351342 - DNA, 25 bp, Artificial
  Probe
ttcacaccagcctggaactggacct

SEQ ID NO: 351343 - DNA, 25 bp, Artificial
  Probe
aggtcctgacggatgagcagtacca

SEQ ID NO: 351344 - DNA, 25 bp, Artificial
  Probe
tgctgtccatggacgccttggacct

SEQ ID NO: 351345 - DNA, 25 bp, Artificial
  Probe
gcgcttatcgcgagggtcacaaacg

SEQ ID NO: 351346 - DNA, 25 bp, Artificial
  Probe
ctctgtacgggaaggtcctgacgga

SEQ ID NO: 351347 - DNA, 25 bp, Artificial
  Probe
ggagctgaggctccttcccagcaac

SEQ ID NO: 351348 - DNA, 25 bp, Artificial
  Probe
aaggacttgctcctccaggccctaa

SEQ ID NO: 351349 - DNA, 25 bp, Artificial
  Probe
ggagtcccagtcctacctggtggag

SEQ ID NO: 351350 - DNA, 25 bp, Artificial
  Probe
acacaatatacgaaaagccagcttg

SEQ ID NO: 351351 - DNA, 25 bp, Artificial
  Probe
taagggagtcccagtcctacctggt

SEQ ID NO: 351352 - DNA, 25 bp, Artificial
  Probe
agctcaccgctaacgtgctgcgcga

SEQ ID NO: 351353 - DNA, 25 bp, Artificial
  Probe
tcaccgctaacgtgctgcgcgacat

SEQ ID NO: 351354 - DNA, 25 bp, Artificial
  Probe
tggacctgcaaggacttgctcctcc

SEQ ID NO: 351355 - DNA, 25 bp, Artificial
  Probe
gatgcggaagctcttcagtttcaca

SEQ ID NO: 351356 - DNA, 25 bp, Artificial
  Probe
tgaattaggaccagcgcaatgaatg

SEQ ID NO: 351357 - DNA, 25 bp, Artificial
  Probe
attctcagtagttccgatatgtacc

SEQ ID NO: 351358 - DNA, 25 bp, Artificial
  Probe
ccgtgcctggcctcatttgagtatt

SEQ ID NO: 351359 - DNA, 25 bp, Artificial
  Probe
tgagttgtcatttgccagacaagtg

SEQ ID NO: 351360 - DNA, 25 bp, Artificial
  Probe
atttggctttctgtgaactgaggtc

SEQ ID NO: 351361 - DNA, 25 bp, Artificial
  Probe
catttgccagacaagtggagatttt

SEQ ID NO: 351362 - DNA, 25 bp, Artificial
  Probe
gtggtattcggatctatcctgtgtg

SEQ ID NO: 351363 - DNA, 25 bp, Artificial
  Probe
catccttgtattctcagtagttccg

SEQ ID NO: 351364 - DNA, 25 bp, Artificial
  Probe
ttctgtgaactgaggtcttaatatc

SEQ ID NO: 351365 - DNA, 25 bp, Artificial
  Probe
cgcaatgaatgctcaagttggggtt

SEQ ID NO: 351366 - DNA, 25 bp, Artificial
  Probe
cgatatgtaccctcgacatgtgaat

SEQ ID NO: 351367 - DNA, 25 bp, Artificial
  Probe
gtctttgtcagataattccactgta

SEQ ID NO: 351368 - DNA, 25 bp, Artificial
  Probe
tgtgaattaggaccagcgcaatgaa

SEQ ID NO: 351369 - DNA, 25 bp, Artificial
  Probe
tcagtagttccgatatgtaccctcg

SEQ ID NO: 351370 - DNA, 25 bp, Artificial
  Probe
cactgtacatgttattcagtgtttg

SEQ ID NO: 351371 - DNA, 25 bp, Artificial
  Probe
gagatttttgcagctcatccttgta

SEQ ID NO: 351372 - DNA, 25 bp, Artificial
  Probe
agctccattctcagggcgtttgaat

SEQ ID NO: 351373 - DNA, 25 bp, Artificial
  Probe
gctcatccttgtattctcagtagtt

SEQ ID NO: 351374 - DNA, 25 bp, Artificial
  Probe
gatggtctcgatctcctgacctcat

SEQ ID NO: 351375 - DNA, 25 bp, Artificial
  Probe
atgtctcttttaaagtctttgtcag

SEQ ID NO: 351376 - DNA, 25 bp, Artificial
  Probe
tgccagacaagtggagatttttgca

SEQ ID NO: 351377 - DNA, 25 bp, Artificial
  Probe
agtctttgtcagataattccactgt

SEQ ID NO: 351378 - DNA, 25 bp, Artificial
  Probe
attccactgtacatgttattcagtg

SEQ ID NO: 351379 - DNA, 25 bp, Artificial
  Probe
ttgcagctcatccttgtattctcag

SEQ ID NO: 351380 - DNA, 25 bp, Artificial
  Probe
cagcgcaatgaatgctcaagttggg

SEQ ID NO: 351381 - DNA, 25 bp, Artificial
  Probe
cctgtgtgtgcctatgagattgggt

SEQ ID NO: 351382 - DNA, 25 bp, Artificial
  Probe
ttggccaggatggtctcgatctcct

SEQ ID NO: 351383 - DNA, 25 bp, Artificial
  Probe
aagtctttgcagtggtattcggatc

SEQ ID NO: 351384 - DNA, 25 bp, Artificial
  Probe
agccaccgtgcctggcctcatttga

SEQ ID NO: 351385 - DNA, 25 bp, Artificial
  Probe
acatgttattcagtgtttggtgtcc

SEQ ID NO: 351386 - DNA, 25 bp, Artificial
  Probe
tctgtgaactgaggtcttaatatca

SEQ ID NO: 351387 - DNA, 25 bp, Artificial
  Probe
gatttttgcagctcatccttgtatt

SEQ ID NO: 351388 - DNA, 25 bp, Artificial
  Probe
taggaccagcgcaatgaatgctcaa

SEQ ID NO: 351389 - DNA, 25 bp, Artificial
  Probe
gtctcttttaaagtctttgtcagat

SEQ ID NO: 351390 - DNA, 25 bp, Artificial
  Probe
attgggtgcagtgtatcctgttagc

SEQ ID NO: 351391 - DNA, 25 bp, Artificial
  Probe
gcctggcctcatttgagtattttta

SEQ ID NO: 351392 - DNA, 25 bp, Artificial
  Probe
ttgcagtggtattcggatctatcct

SEQ ID NO: 351393 - DNA, 25 bp, Artificial
  Probe
ttgtcatttgccagacaagtggaga

SEQ ID NO: 351394 - DNA, 25 bp, Artificial
  Probe
ctttctgtgaactgaggtcttaata

SEQ ID NO: 351395 - DNA, 25 bp, Artificial
  Probe
gtcagataattccactgtacatgtt

SEQ ID NO: 351396 - DNA, 25 bp, Artificial
  Probe
ttgtcagataattccactgtacatg

SEQ ID NO: 351397 - DNA, 25 bp, Artificial
  Probe
ttgccagacaagtggagatttttgc

SEQ ID NO: 351398 - DNA, 25 bp, Artificial
  Probe
ctatcctgtgtgtgcctatgagatt

SEQ ID NO: 351399 - DNA, 25 bp, Artificial
  Probe
gtctcgatctcctgacctcatgatc

SEQ ID NO: 351400 - DNA, 25 bp, Artificial
  Probe
cctcgacatgtgaatgttatcttat

SEQ ID NO: 351401 - DNA, 25 bp, Artificial
  Probe
gttccgatatgtaccctcgacatgt

SEQ ID NO: 351402 - DNA, 25 bp, Artificial
  Probe
caattctaactgtccgagtctgaga

SEQ ID NO: 351403 - DNA, 25 bp, Artificial
  Probe
aggcagacatactggtactatttgg

SEQ ID NO: 351404 - DNA, 25 bp, Artificial
  Probe
gtctgagaaacaaacccaagattct

SEQ ID NO: 351405 - DNA, 25 bp, Artificial
  Probe
atgtcccacggcatcctggaaggaa

SEQ ID NO: 351406 - DNA, 25 bp, Artificial
  Probe
atagtataacaaaggcccatgtgga

SEQ ID NO: 351407 - DNA, 25 bp, Artificial
  Probe
ttaatgaagtttgctggccgtccag

SEQ ID NO: 351408 - DNA, 25 bp, Artificial
  Probe
taacaaaggcccatgtggagacaga

SEQ ID NO: 351409 - DNA, 25 bp, Artificial
  Probe
tgctgagactgacattttgaacatg

SEQ ID NO: 351410 - DNA, 25 bp, Artificial
  Probe
acggcatcctggaaggaatctgtgg

SEQ ID NO: 351411 - DNA, 25 bp, Artificial
  Probe
tacagctcaggaaatggagacagaa

SEQ ID NO: 351412 - DNA, 25 bp, Artificial
  Probe
tgtccgagtctgagaaacaaaccca

SEQ ID NO: 351413 - DNA, 25 bp, Artificial
  Probe
gcaagcctgcagaggcagacatact

SEQ ID NO: 351414 - DNA, 25 bp, Artificial
  Probe
gcctgcagaggcagacatactggta

SEQ ID NO: 351415 - DNA, 25 bp, Artificial
  Probe
accccacataacatttcttggaagg

SEQ ID NO: 351416 - DNA, 25 bp, Artificial
  Probe
gtttgctggccgtccagagcaccag

SEQ ID NO: 351417 - DNA, 25 bp, Artificial
  Probe
tctaactgtccgagtctgagaaaca

SEQ ID NO: 351418 - DNA, 25 bp, Artificial
  Probe
tgcagaggcagacatactggtacta

SEQ ID NO: 351419 - DNA, 25 bp, Artificial
  Probe
aatgaagtttgctggccgtccagag

SEQ ID NO: 351420 - DNA, 25 bp, Artificial
  Probe
cagatgttcttcatgatgacactat

SEQ ID NO: 351421 - DNA, 25 bp, Artificial
  Probe
aaagggatagccactgctgatacag

SEQ ID NO: 351422 - DNA, 25 bp, Artificial
  Probe
tcaaaatcttggatactcagtggtg

SEQ ID NO: 351423 - DNA, 25 bp, Artificial
  Probe
caacaattctaactgtccgagtctg

SEQ ID NO: 351424 - DNA, 25 bp, Artificial
  Probe
gtactatttgggtatccacaagcaa

SEQ ID NO: 351425 - DNA, 25 bp, Artificial
  Probe
agtcctccgacagcacattcctggt

SEQ ID NO: 351426 - DNA, 25 bp, Artificial
  Probe
gagacagatttcattgctttcaaat

SEQ ID NO: 351427 - DNA, 25 bp, Artificial
  Probe
ctccgacagcacattcctggtcttt

SEQ ID NO: 351428 - DNA, 25 bp, Artificial
  Probe
atccacaagcaaagggatagccact

SEQ ID NO: 351429 - DNA, 25 bp, Artificial
  Probe
aaagccagatgttcttcatgatgac

SEQ ID NO: 351430 - DNA, 25 bp, Artificial
  Probe
ggcccatgtggagacagatttcatt

SEQ ID NO: 351431 - DNA, 25 bp, Artificial
  Probe
atcatgcaagcctgcagaggcagac

SEQ ID NO: 351432 - DNA, 25 bp, Artificial
  Probe
ggcaagagtggctctctcttcattt

SEQ ID NO: 351433 - DNA, 25 bp, Artificial
  Probe
ctggtctttatgtcccacggcatcc

SEQ ID NO: 351434 - DNA, 25 bp, Artificial
  Probe
taaaggaaaaccttacagctcagga

SEQ ID NO: 351435 - DNA, 25 bp, Artificial
  Probe
cactgctgatacagatgaggaatgt

SEQ ID NO: 351436 - DNA, 25 bp, Artificial
  Probe
ttgctggccgtccagagcaccagtc

SEQ ID NO: 351437 - DNA, 25 bp, Artificial
  Probe
tactggtactatttgggtatccaca

SEQ ID NO: 351438 - DNA, 25 bp, Artificial
  Probe
tctcatcatgcaagcctgcagaggc

SEQ ID NO: 351439 - DNA, 25 bp, Artificial
  Probe
cataacatttcttggaaggtaggca

SEQ ID NO: 351440 - DNA, 25 bp, Artificial
  Probe
tgaaagaactacttcaaaatcttgg

SEQ ID NO: 351441 - DNA, 25 bp, Artificial
  Probe
caagattctcatcatgcaagcctgc

SEQ ID NO: 351442 - DNA, 25 bp, Artificial
  Probe
agtctgagaaacaaacccaagattc

SEQ ID NO: 351443 - DNA, 25 bp, Artificial
  Probe
tactcagtggtgataaaggaaaacc

SEQ ID NO: 351444 - DNA, 25 bp, Artificial
  Probe
acttcaaaatcttggatactcagtg

SEQ ID NO: 351445 - DNA, 25 bp, Artificial
  Probe
tgatgctgagactgacattttgaac

SEQ ID NO: 351446 - DNA, 25 bp, Artificial
  Probe
tctttatgtcccacggcatcctgga

SEQ ID NO: 351447 - DNA, 25 bp, Artificial
  Probe
gaaagaactacttcaaaatcttgga

SEQ ID NO: 351448 - DNA, 25 bp, Artificial
  Probe
caaggttgtggcttccaagtctttg

SEQ ID NO: 351449 - DNA, 25 bp, Artificial
  Probe
gttccaagtgcatggcctccaaact

SEQ ID NO: 351450 - DNA, 25 bp, Artificial
  Probe
gctcttctttctcttggccatcacg

SEQ ID NO: 351451 - DNA, 25 bp, Artificial
  Probe
ttcctgggcctttgccatttaccct

SEQ ID NO: 351452 - DNA, 25 bp, Artificial
  Probe
caatgcatcatgatcagcttggatc

SEQ ID NO: 351453 - DNA, 25 bp, Artificial
  Probe
ttcttctaagtctccggtagtttca

SEQ ID NO: 351454 - DNA, 25 bp, Artificial
  Probe
gtgagtttcgccactgcaagatggg

SEQ ID NO: 351455 - DNA, 25 bp, Artificial
  Probe
caagaactagccagatttcatactg

SEQ ID NO: 351456 - DNA, 25 bp, Artificial
  Probe
cgatatctatgtactgtgaagaact

SEQ ID NO: 351457 - DNA, 25 bp, Artificial
  Probe
gatttcatactgtgttcccgatatc

SEQ ID NO: 351458 - DNA, 25 bp, Artificial
  Probe
cctgctttttatctatagaatgagc

SEQ ID NO: 351459 - DNA, 25 bp, Artificial
  Probe
aaactgcttctatgccaagctcacg

SEQ ID NO: 351460 - DNA, 25 bp, Artificial
  Probe
attgttcttgtaccaatgcatcatg

SEQ ID NO: 351461 - DNA, 25 bp, Artificial
  Probe
cctgcatagtgttaatggtgttcca

SEQ ID NO: 351462 - DNA, 25 bp, Artificial
  Probe
ccctgctttttatctatagaatgag

SEQ ID NO: 351463 - DNA, 25 bp, Artificial
  Probe
gtcctgcatagtgttaatggtgttc

SEQ ID NO: 351464 - DNA, 25 bp, Artificial
  Probe
atcatgatcagcttggatcagctac

SEQ ID NO: 351465 - DNA, 25 bp, Artificial
  Probe
gactgtatcccaatccagccatcag

SEQ ID NO: 351466 - DNA, 25 bp, Artificial
  Probe
ggactgtatcccaatccagccatca

SEQ ID NO: 351467 - DNA, 25 bp, Artificial
  Probe
aagtgcatggcctccaaactgcttc

SEQ ID NO: 351468 - DNA, 25 bp, Artificial
  Probe
gacattccaagctgtcaccaactga

SEQ ID NO: 351469 - DNA, 25 bp, Artificial
  Probe
agtgttttctgtcaccacattgttc

SEQ ID NO: 351470 - DNA, 25 bp, Artificial
  Probe
catcagcccaacaggacattccaag

SEQ ID NO: 351471 - DNA, 25 bp, Artificial
  Probe
tagctgtcttcctgggcctttgcca

SEQ ID NO: 351472 - DNA, 25 bp, Artificial
  Probe
acgatgtcctgcatagtgttaatgg

SEQ ID NO: 351473 - DNA, 25 bp, Artificial
  Probe
atgcatcatgatcagcttggatcag

SEQ ID NO: 351474 - DNA, 25 bp, Artificial
  Probe
gatgggactgtatcccaatccagcc

SEQ ID NO: 351475 - DNA, 25 bp, Artificial
  Probe
aggagtgttttctgtcaccacattg

SEQ ID NO: 351476 - DNA, 25 bp, Artificial
  Probe
gccactgcaagatgggactgtatcc

SEQ ID NO: 351477 - DNA, 25 bp, Artificial
  Probe
ggcctttgccatttaccctgctttt

SEQ ID NO: 351478 - DNA, 25 bp, Artificial
  Probe
agaactgtgagtttcgccactgcaa

SEQ ID NO: 351479 - DNA, 25 bp, Artificial
  Probe
gtcaccaactgatcctagctgtctt

SEQ ID NO: 351480 - DNA, 25 bp, Artificial
  Probe
gttaatggtgttccaagtgcatggc

SEQ ID NO: 351481 - DNA, 25 bp, Artificial
  Probe
gaaagcttgacatatccttaccaag

SEQ ID NO: 351482 - DNA, 25 bp, Artificial
  Probe
ggcttccaagtctttgctcttcttt

SEQ ID NO: 351483 - DNA, 25 bp, Artificial
  Probe
actgtgttcccgatatctatgtact

SEQ ID NO: 351484 - DNA, 25 bp, Artificial
  Probe
tctttgcatggcttggttcctgtct

SEQ ID NO: 351485 - DNA, 25 bp, Artificial
  Probe
aagatgggactgtatcccaatccag

SEQ ID NO: 351486 - DNA, 25 bp, Artificial
  Probe
gaactgtgagtttcgccactgcaag

SEQ ID NO: 351487 - DNA, 25 bp, Artificial
  Probe
ccaagctgtcaccaactgatcctag

SEQ ID NO: 351488 - DNA, 25 bp, Artificial
  Probe
taagtctccggtagtttcaaggttg

SEQ ID NO: 351489 - DNA, 25 bp, Artificial
  Probe
ccatcacgatgtcctgcatagtgtt

SEQ ID NO: 351490 - DNA, 25 bp, Artificial
  Probe
tttctcttggccatcacgatgtcct

SEQ ID NO: 351491 - DNA, 25 bp, Artificial
  Probe
gttcctgtctgtgatcttctaggtt

SEQ ID NO: 351492 - DNA, 25 bp, Artificial
  Probe
cgtgctgtagtttgtactgcttttc

SEQ ID NO: 351493 - DNA, 25 bp, Artificial
  Probe
gcctccaaactgcttctatgccaag

SEQ ID NO: 351494 - DNA, 25 bp, Artificial
  Probe
gatgtacctgaacttcacatagaat

SEQ ID NO: 351495 - DNA, 25 bp, Artificial
  Probe
tcctgaagaaggtgctgagagctca

SEQ ID NO: 351496 - DNA, 25 bp, Artificial
  Probe
ccaaagattcatggaggagattctt

SEQ ID NO: 351497 - DNA, 25 bp, Artificial
  Probe
caatcagcaatatgatcagattgtc

SEQ ID NO: 351498 - DNA, 25 bp, Artificial
  Probe
aatatgatcagattgtccagatgac

SEQ ID NO: 351499 - DNA, 25 bp, Artificial
  Probe
ctgcagcatctaaagggatgttttg

SEQ ID NO: 351500 - DNA, 25 bp, Artificial
  Probe
tggaagataccatatacctgatgga

SEQ ID NO: 351501 - DNA, 25 bp, Artificial
  Probe
tggcagctaaagttctgcagcatct

SEQ ID NO: 351502 - DNA, 25 bp, Artificial
  Probe
cagtgactgaggacatctttaattc

SEQ ID NO: 351503 - DNA, 25 bp, Artificial
  Probe
agtttggatgggtgtctcaactggc

SEQ ID NO: 351504 - DNA, 25 bp, Artificial
  Probe
tgtatccaatcagcaatatgatcag

SEQ ID NO: 351505 - DNA, 25 bp, Artificial
  Probe
ttcaccgtccagaatcctcctgaag

SEQ ID NO: 351506 - DNA, 25 bp, Artificial
  Probe
gggtgtctcaactggcaagccataa

SEQ ID NO: 351507 - DNA, 25 bp, Artificial
  Probe
cagttccaaagattcatggaggaga

SEQ ID NO: 351508 - DNA, 25 bp, Artificial
  Probe
tagaattccttgaggccctgaaatt

SEQ ID NO: 351509 - DNA, 25 bp, Artificial
  Probe
tccttgaggccctgaaattagtcaa

SEQ ID NO: 351510 - DNA, 25 bp, Artificial
  Probe
catatacctgatggagaaaatgcaa

SEQ ID NO: 351511 - DNA, 25 bp, Artificial
  Probe
gacatctttaattcaacaaaggcag

SEQ ID NO: 351512 - DNA, 25 bp, Artificial
  Probe
aactggcaagccataacccagtgac

SEQ ID NO: 351513 - DNA, 25 bp, Artificial
  Probe
tgaacttcacatagaattccttgag

SEQ ID NO: 351514 - DNA, 25 bp, Artificial
  Probe
ggccctgaaattagtcaatgtatcc

SEQ ID NO: 351515 - DNA, 25 bp, Artificial
  Probe
tctcaactggcaagccataacccag

SEQ ID NO: 351516 - DNA, 25 bp, Artificial
  Probe
tgaagaatgccctgatgtacctgaa

SEQ ID NO: 351517 - DNA, 25 bp, Artificial
  Probe
aagccataacccagtgactgaggac

SEQ ID NO: 351518 - DNA, 25 bp, Artificial
  Probe
tggcaagccataacccagtgactga

SEQ ID NO: 351519 - DNA, 25 bp, Artificial
  Probe
aggacatctttaattcaacaaaggc

SEQ ID NO: 351520 - DNA, 25 bp, Artificial
  Probe
ttactacatggcagctaaagttctg

SEQ ID NO: 351521 - DNA, 25 bp, Artificial
  Probe
agctcaaatgttatttactacatgg

SEQ ID NO: 351522 - DNA, 25 bp, Artificial
  Probe
aattacctatctgaagaatgccctg

SEQ ID NO: 351523 - DNA, 25 bp, Artificial
  Probe
caaatgttatttactacatggcagc

SEQ ID NO: 351524 - DNA, 25 bp, Artificial
  Probe
attatggtagactcaagcagcattc

SEQ ID NO: 351525 - DNA, 25 bp, Artificial
  Probe
gacttcagagatgttacctgagcaa

SEQ ID NO: 351526 - DNA, 25 bp, Artificial
  Probe
ccagatgacccagtatcatttggaa

SEQ ID NO: 351527 - DNA, 25 bp, Artificial
  Probe
gtctcaactggcaagccataaccca

SEQ ID NO: 351528 - DNA, 25 bp, Artificial
  Probe
ttcaacaaaggcagttccaaagatt

SEQ ID NO: 351529 - DNA, 25 bp, Artificial
  Probe
attgtccagatgacccagtatcatt

SEQ ID NO: 351530 - DNA, 25 bp, Artificial
  Probe
gggtcatagctgtttcctgaagggc

SEQ ID NO: 351531 - DNA, 25 bp, Artificial
  Probe
gactcaagcagcattctgccttcct

SEQ ID NO: 351532 - DNA, 25 bp, Artificial
  Probe
ctatctgaagaatgccctgatgtac

SEQ ID NO: 351533 - DNA, 25 bp, Artificial
  Probe
ttatttactacatggcagctaaagt

SEQ ID NO: 351534 - DNA, 25 bp, Artificial
  Probe
cccagtatcatttggaagataccat

SEQ ID NO: 351535 - DNA, 25 bp, Artificial
  Probe
gtcaatgtatccaatcagcaatatg

SEQ ID NO: 351536 - DNA, 25 bp, Artificial
  Probe
caagagcagtttggatgggtgtctc

SEQ ID NO: 351537 - DNA, 25 bp, Artificial
  Probe
gaggagattcttccaagcaggatga

SEQ ID NO: 351538 - DNA, 25 bp, Artificial
  Probe
gtcacaattacctatctgaagaatg

SEQ ID NO: 351539 - DNA, 25 bp, Artificial
  Probe
cttccaagcaggatgaaattatggt

SEQ ID NO: 351540 - DNA, 25 bp, Artificial
  Probe
taccgaccctgtatcaaccagactg

SEQ ID NO: 351541 - DNA, 25 bp, Artificial
  Probe
tgtatcaaccagactgtatcagggg

SEQ ID NO: 351542 - DNA, 25 bp, Artificial
  Probe
tggcagagctttgtttaggctctat

SEQ ID NO: 351543 - DNA, 25 bp, Artificial
  Probe
aagacacctgtttgaagcaaggctg

SEQ ID NO: 351544 - DNA, 25 bp, Artificial
  Probe
cgtctttttgagacgcctttggcgg

SEQ ID NO: 351545 - DNA, 25 bp, Artificial
  Probe
taaagtcaccctgtgcgtttagatg

SEQ ID NO: 351546 - DNA, 25 bp, Artificial
  Probe
ttgaagcaaggctgtctctaaagtc

SEQ ID NO: 351547 - DNA, 25 bp, Artificial
  Probe
ctgtttgaagcaaggctgtctctaa

SEQ ID NO: 351548 - DNA, 25 bp, Artificial
  Probe
gtctctaaagtcaccctgtgcgttt

SEQ ID NO: 351549 - DNA, 25 bp, Artificial
  Probe
tgccctggtccaactgttggcagag

SEQ ID NO: 351550 - DNA, 25 bp, Artificial
  Probe
caactgttggcagagctttgtttag

SEQ ID NO: 351551 - DNA, 25 bp, Artificial
  Probe
gtgccctggtccaactgttggcaga

SEQ ID NO: 351552 - DNA, 25 bp, Artificial
  Probe
cactggttgactttccctgtttcct

SEQ ID NO: 351553 - DNA, 25 bp, Artificial
  Probe
ccctgtatcaaccagactgtatcag

SEQ ID NO: 351554 - DNA, 25 bp, Artificial
  Probe
gggaaggaccacttcatcagaaggt

SEQ ID NO: 351555 - DNA, 25 bp, Artificial
  Probe
tggtccaactgttggcagagctttg

SEQ ID NO: 351556 - DNA, 25 bp, Artificial
  Probe
cttcatcagaaggtgaaaaggttct

SEQ ID NO: 351557 - DNA, 25 bp, Artificial
  Probe
ctttggcgggaaggaccacttcatc

SEQ ID NO: 351558 - DNA, 25 bp, Artificial
  Probe
aggtgccctggtccaactgttggca

SEQ ID NO: 351559 - DNA, 25 bp, Artificial
  Probe
gcctttggcgggaaggaccacttca

SEQ ID NO: 351560 - DNA, 25 bp, Artificial
  Probe
ccaactgttggcagagctttgttta

SEQ ID NO: 351561 - DNA, 25 bp, Artificial
  Probe
gctgtgacccgatttctggagctac

SEQ ID NO: 351562 - DNA, 25 bp, Artificial
  Probe
gttctttcttgtaagagactaccac

SEQ ID NO: 351563 - DNA, 25 bp, Artificial
  Probe
tcaccctgtgcgtttagatgtgcca

SEQ ID NO: 351564 - DNA, 25 bp, Artificial
  Probe
aacaggtcgtctttttgagacgcct

SEQ ID NO: 351565 - DNA, 25 bp, Artificial
  Probe
actaccactggttgactttccctgt

SEQ ID NO: 351566 - DNA, 25 bp, Artificial
  Probe
caggaggtgccctggtccaactgtt

SEQ ID NO: 351567 - DNA, 25 bp, Artificial
  Probe
gaccctgtatcaaccagactgtatc

SEQ ID NO: 351568 - DNA, 25 bp, Artificial
  Probe
tttagatgtgccaggaggtgccctg

SEQ ID NO: 351569 - DNA, 25 bp, Artificial
  Probe
caggtcgtctttttgagacgccttt

SEQ ID NO: 351570 - DNA, 25 bp, Artificial
  Probe
gaagtgaagacacctgtttgaagca

SEQ ID NO: 351571 - DNA, 25 bp, Artificial
  Probe
aggaggtgccctggtccaactgttg

SEQ ID NO: 351572 - DNA, 25 bp, Artificial
  Probe
aaagtcaccctgtgcgtttagatgt

SEQ ID NO: 351573 - DNA, 25 bp, Artificial
  Probe
acaacaggtcgtctttttgagacgc

SEQ ID NO: 351574 - DNA, 25 bp, Artificial
  Probe
tctttcttgtaagagactaccactg

SEQ ID NO: 351575 - DNA, 25 bp, Artificial
  Probe
gaggtgccctggtccaactgttggc

SEQ ID NO: 351576 - DNA, 25 bp, Artificial
  Probe
ccagactgtatcaggggagaagtga

SEQ ID NO: 351577 - DNA, 25 bp, Artificial
  Probe
tatcaaccagactgtatcaggggag

SEQ ID NO: 351578 - DNA, 25 bp, Artificial
  Probe
acagcggctgtgacccgatttctgg

SEQ ID NO: 351579 - DNA, 25 bp, Artificial
  Probe
ccctggtccaactgttggcagagct

SEQ ID NO: 351580 - DNA, 25 bp, Artificial
  Probe
tgacccgatttctggagctacaaca

SEQ ID NO: 351581 - DNA, 25 bp, Artificial
  Probe
gcagagctttgtttaggctctatgg

SEQ ID NO: 351582 - DNA, 25 bp, Artificial
  Probe
actgttggcagagctttgtttaggc

SEQ ID NO: 351583 - DNA, 25 bp, Artificial
  Probe
cctgtgcgtttagatgtgccaggag

SEQ ID NO: 351584 - DNA, 25 bp, Artificial
  Probe
ggctgtgacccgatttctggagcta

SEQ ID NO: 351585 - DNA, 25 bp, Artificial
  Probe
caacaacaggtcgtctttttgagac

SEQ ID NO: 351586 - DNA, 25 bp, Artificial
  Probe
cggttagctcttgttctttggtagt

SEQ ID NO: 351587 - DNA, 25 bp, Artificial
  Probe
gcttcaacagcagtgactaactctc

SEQ ID NO: 351588 - DNA, 25 bp, Artificial
  Probe
ataacctgtcaatccactgtgaagg

SEQ ID NO: 351589 - DNA, 25 bp, Artificial
  Probe
ttcattaaagccaatacttggttgc

SEQ ID NO: 351590 - DNA, 25 bp, Artificial
  Probe
aatccactgtgaaggatggcttccc

SEQ ID NO: 351591 - DNA, 25 bp, Artificial
  Probe
agttttcattaaagccaatacttgg

SEQ ID NO: 351592 - DNA, 25 bp, Artificial
  Probe
atcgatccgatgagtctccatggta

SEQ ID NO: 351593 - DNA, 25 bp, Artificial
  Probe
acgtcggcaggtccaggcaagatga

SEQ ID NO: 351594 - DNA, 25 bp, Artificial
  Probe
cgggagtattacctcttctgtatct

SEQ ID NO: 351595 - DNA, 25 bp, Artificial
  Probe
tggctggccgggagtattacctctt

SEQ ID NO: 351596 - DNA, 25 bp, Artificial
  Probe
caagcaccctgcttatcgatccgat

SEQ ID NO: 351597 - DNA, 25 bp, Artificial
  Probe
ctgctttgcggttagctcttgttct

SEQ ID NO: 351598 - DNA, 25 bp, Artificial
  Probe
gaaggtctgcgcagaaacttagctc

SEQ ID NO: 351599 - DNA, 25 bp, Artificial
  Probe
gctgctttgcggttagctcttgttc

SEQ ID NO: 351600 - DNA, 25 bp, Artificial
  Probe
tggccgggagtattacctcttctgt

SEQ ID NO: 351601 - DNA, 25 bp, Artificial
  Probe
tgcggttagctcttgttctttggta

SEQ ID NO: 351602 - DNA, 25 bp, Artificial
  Probe
tgtcaatccactgtgaaggatggct

SEQ ID NO: 351603 - DNA, 25 bp, Artificial
  Probe
tctgtatctaagtgcctcctgagtc

SEQ ID NO: 351604 - DNA, 25 bp, Artificial
  Probe
tctgcccaacgcttcaacagcagtg

SEQ ID NO: 351605 - DNA, 25 bp, Artificial
  Probe
cccagaatcttctggctggccggga

SEQ ID NO: 351606 - DNA, 25 bp, Artificial
  Probe
gctctgactggctgctgctttgcgg

SEQ ID NO: 351607 - DNA, 25 bp, Artificial
  Probe
gtattacctcttctgtatctaagtg

SEQ ID NO: 351608 - DNA, 25 bp, Artificial
  Probe
tggctgctgctttgcggttagctct

SEQ ID NO: 351609 - DNA, 25 bp, Artificial
  Probe
ctaactctccatggtccagagacgg

SEQ ID NO: 351610 - DNA, 25 bp, Artificial
  Probe
tatctaagtgcctcctgagtcccaa

SEQ ID NO: 351611 - DNA, 25 bp, Artificial
  Probe
tccatggtccagagacggcctgagg

SEQ ID NO: 351612 - DNA, 25 bp, Artificial
  Probe
cctgagggaaggtctgcgcagaaac

SEQ ID NO: 351613 - DNA, 25 bp, Artificial
  Probe
aaacttagctctgactggctgctgc

SEQ ID NO: 351614 - DNA, 25 bp, Artificial
  Probe
gattagtgtccatggctgtttgctg

SEQ ID NO: 351615 - DNA, 25 bp, Artificial
  Probe
tgagggaaggtctgcgcagaaactt

SEQ ID NO: 351616 - DNA, 25 bp, Artificial
  Probe
ctcttctgtatctaagtgcctcctg

SEQ ID NO: 351617 - DNA, 25 bp, Artificial
  Probe
taagtgcctcctgagtcccaagcac

SEQ ID NO: 351618 - DNA, 25 bp, Artificial
  Probe
gatgtcagataacctgtcaatccac

SEQ ID NO: 351619 - DNA, 25 bp, Artificial
  Probe
agtgtccatggctgtttgctgttgg

SEQ ID NO: 351620 - DNA, 25 bp, Artificial
  Probe
gtgaaggatggcttcccagaatctt

SEQ ID NO: 351621 - DNA, 25 bp, Artificial
  Probe
caacagcagtgactaactctccatg

SEQ ID NO: 351622 - DNA, 25 bp, Artificial
  Probe
tctttggtagttttcattaaagcca

SEQ ID NO: 351623 - DNA, 25 bp, Artificial
  Probe
atgcttgaggatgtcagataacctg

SEQ ID NO: 351624 - DNA, 25 bp, Artificial
  Probe
ggatggcttcccagaatcttctggc

SEQ ID NO: 351625 - DNA, 25 bp, Artificial
  Probe
ggatgcttgaggatgtcagataacc

SEQ ID NO: 351626 - DNA, 25 bp, Artificial
  Probe
tgaaggatggcttcccagaatcttc

SEQ ID NO: 351627 - DNA, 25 bp, Artificial
  Probe
tgttggattacgtcggcaggtccag

SEQ ID NO: 351628 - DNA, 25 bp, Artificial
  Probe
gattacgtcggcaggtccaggcaag

SEQ ID NO: 351629 - DNA, 25 bp, Artificial
  Probe
cttatcgatccgatgagtctccatg

SEQ ID NO: 351630 - DNA, 25 bp, Artificial
  Probe
tgagtcccaagcaccctgcttatcg

SEQ ID NO: 351631 - DNA, 25 bp, Artificial
  Probe
gtgactaactctccatggtccagag

SEQ ID NO: 351632 - DNA, 25 bp, Artificial
  Probe
ctgcttcctaagtggtattaaagtc

SEQ ID NO: 351633 - DNA, 25 bp, Artificial
  Probe
cgctctgtgttcctgctggggtagt

SEQ ID NO: 351634 - DNA, 25 bp, Artificial
  Probe
accgcacgctctgtgttcctgctgg

SEQ ID NO: 351635 - DNA, 25 bp, Artificial
  Probe
tcgtatctgtctgacaatagtcatt

SEQ ID NO: 351636 - DNA, 25 bp, Artificial
  Probe
gcctctgcttcctaagtggtattaa

SEQ ID NO: 351637 - DNA, 25 bp, Artificial
  Probe
aatcctaagacttgagatgacaagt

SEQ ID NO: 351638 - DNA, 25 bp, Artificial
  Probe
aatcgtatctgtctgacaatagtca

SEQ ID NO: 351639 - DNA, 25 bp, Artificial
  Probe
cgtatctgtctgacaatagtcattt

SEQ ID NO: 351640 - DNA, 25 bp, Artificial
  Probe
tctgcttcctaagtggtattaaagt

SEQ ID NO: 351641 - DNA, 25 bp, Artificial
  Probe
tttttgggacaacctgtgtagcctt

SEQ ID NO: 351642 - DNA, 25 bp, Artificial
  Probe
tatggctggctcaccgcacgctctg

SEQ ID NO: 351643 - DNA, 25 bp, Artificial
  Probe
cctgctggggtagtttgttcatgta

SEQ ID NO: 351644 - DNA, 25 bp, Artificial
  Probe
gcacgctctgtgttcctgctggggt

SEQ ID NO: 351645 - DNA, 25 bp, Artificial
  Probe
ttcctaagtggtattaaagtcatgc

SEQ ID NO: 351646 - DNA, 25 bp, Artificial
  Probe
ttattcattttgtatggctggctca

SEQ ID NO: 351647 - DNA, 25 bp, Artificial
  Probe
tcctgctggggtagtttgttcatgt

SEQ ID NO: 351648 - DNA, 25 bp, Artificial
  Probe
ctctgcttcctaagtggtattaaag

SEQ ID NO: 351649 - DNA, 25 bp, Artificial
  Probe
ctaaaatcctaagacttgagatgac

SEQ ID NO: 351650 - DNA, 25 bp, Artificial
  Probe
tataatcgtatctgtctgacaatag

SEQ ID NO: 351651 - DNA, 25 bp, Artificial
  Probe
tcctaagacttgagatgacaagttg

SEQ ID NO: 351652 - DNA, 25 bp, Artificial
  Probe
tctgtgttcctgctggggtagtttg

SEQ ID NO: 351653 - DNA, 25 bp, Artificial
  Probe
gaagctaaaatcctaagacttgaga

SEQ ID NO: 351654 - DNA, 25 bp, Artificial
  Probe
ttttgggacaacctgtgtagccttg

SEQ ID NO: 351655 - DNA, 25 bp, Artificial
  Probe
gctaaaatcctaagacttgagatga

SEQ ID NO: 351656 - DNA, 25 bp, Artificial
  Probe
tgtatggctggctcaccgcacgctc

SEQ ID NO: 351657 - DNA, 25 bp, Artificial
  Probe
gtatctgtctgacaatagtcattta

SEQ ID NO: 351658 - DNA, 25 bp, Artificial
  Probe
cttcctaagtggtattaaagtcatg

SEQ ID NO: 351659 - DNA, 25 bp, Artificial
  Probe
acagaagctaaaatcctaagacttg

SEQ ID NO: 351660 - DNA, 25 bp, Artificial
  Probe
attttgtatggctggctcaccgcac

SEQ ID NO: 351661 - DNA, 25 bp, Artificial
  Probe
ctgtgttcctgctggggtagtttgt

SEQ ID NO: 351662 - DNA, 25 bp, Artificial
  Probe
gctctgtgttcctgctggggtagtt

SEQ ID NO: 351663 - DNA, 25 bp, Artificial
  Probe
acgctctgtgttcctgctggggtag

SEQ ID NO: 351664 - DNA, 25 bp, Artificial
  Probe
attcattttgtatggctggctcacc

SEQ ID NO: 351665 - DNA, 25 bp, Artificial
  Probe
catttattcattttgtatggctggc

SEQ ID NO: 351666 - DNA, 25 bp, Artificial
  Probe
gtatggctggctcaccgcacgctct

SEQ ID NO: 351667 - DNA, 25 bp, Artificial
  Probe
ttcctgctggggtagtttgttcatg

SEQ ID NO: 351668 - DNA, 25 bp, Artificial
  Probe
cgcacgctctgtgttcctgctgggg

SEQ ID NO: 351669 - DNA, 25 bp, Artificial
  Probe
ccgcacgctctgtgttcctgctggg

SEQ ID NO: 351670 - DNA, 25 bp, Artificial
  Probe
ccacagtagttaacccccatgcaga

SEQ ID NO: 351671 - DNA, 25 bp, Artificial
  Probe
aaatcctaagacttgagatgacaag

SEQ ID NO: 351672 - DNA, 25 bp, Artificial
  Probe
tattcattttgtatggctggctcac

SEQ ID NO: 351673 - DNA, 25 bp, Artificial
  Probe
tgacattttgacagaagctaaaatc

SEQ ID NO: 351674 - DNA, 25 bp, Artificial
  Probe
aagctaaaatcctaagacttgagat

SEQ ID NO: 351675 - DNA, 25 bp, Artificial
  Probe
gcttcctaagtggtattaaagtcat

SEQ ID NO: 351676 - DNA, 25 bp, Artificial
  Probe
ttttttgggacaacctgtgtagcct

SEQ ID NO: 351677 - DNA, 25 bp, Artificial
  Probe
taatcgtatctgtctgacaatagtc

SEQ ID NO: 351678 - DNA, 25 bp, Artificial
  Probe
gctggaggccatacggaaaggcatt

SEQ ID NO: 351679 - DNA, 25 bp, Artificial
  Probe
aggcattcggccatcatcacctgtc

SEQ ID NO: 351680 - DNA, 25 bp, Artificial
  Probe
acccgtgatcagtgacgcgaggagt

SEQ ID NO: 351681 - DNA, 25 bp, Artificial
  Probe
tcagattgcccctggtgtccttcac

SEQ ID NO: 351682 - DNA, 25 bp, Artificial
  Probe
tggtccccatgctccattaatgcct

SEQ ID NO: 351683 - DNA, 25 bp, Artificial
  Probe
tcccacaaggtgaagtgcaggggct

SEQ ID NO: 351684 - DNA, 25 bp, Artificial
  Probe
ctcccacaaggtgaagtgcaggggc

SEQ ID NO: 351685 - DNA, 25 bp, Artificial
  Probe
cccgtgatcagtgacgcgaggagtg

SEQ ID NO: 351686 - DNA, 25 bp, Artificial
  Probe
cctacccgtgatcagtgacgcgagg

SEQ ID NO: 351687 - DNA, 25 bp, Artificial
  Probe
ctacccgtgatcagtgacgcgagga

SEQ ID NO: 351688 - DNA, 25 bp, Artificial
  Probe
cagattgcccctggtgtccttcacc

SEQ ID NO: 351689 - DNA, 25 bp, Artificial
  Probe
ccaccctacccgtgatcagtgacgc

SEQ ID NO: 351690 - DNA, 25 bp, Artificial
  Probe
ggcattcggccatcatcacctgtca

SEQ ID NO: 351691 - DNA, 25 bp, Artificial
  Probe
gctgctggaggccatacggaaaggc

SEQ ID NO: 351692 - DNA, 25 bp, Artificial
  Probe
gtgtgagactgtacccgttcatcca

SEQ ID NO: 351693 - DNA, 25 bp, Artificial
  Probe
actcccacaaggtgaagtgcagggg

SEQ ID NO: 351694 - DNA, 25 bp, Artificial
  Probe
tcgctcctcctctagtacagccctc

SEQ ID NO: 351695 - DNA, 25 bp, Artificial
  Probe
atacggaaaggcattcagcttcgca

SEQ ID NO: 351696 - DNA, 25 bp, Artificial
  Probe
gaggccatacggaaaggcattcagc

SEQ ID NO: 351697 - DNA, 25 bp, Artificial
  Probe
gtcacggtcgcagctcttgcgcatc

SEQ ID NO: 351698 - DNA, 25 bp, Artificial
  Probe
gtgtgtgagactgtacccgttcatc

SEQ ID NO: 351699 - DNA, 25 bp, Artificial
  Probe
agccaaagcgccatccttccaccct

SEQ ID NO: 351700 - DNA, 25 bp, Artificial
  Probe
tgcctcctccaggcattcggccatc

SEQ ID NO: 351701 - DNA, 25 bp, Artificial
  Probe
gccccagtgtgtgagactgtacccg

SEQ ID NO: 351702 - DNA, 25 bp, Artificial
  Probe
ccccagtgtgtgagactgtacccgt

SEQ ID NO: 351703 - DNA, 25 bp, Artificial
  Probe
ttcggccatcatcacctgtcacggt

SEQ ID NO: 351704 - DNA, 25 bp, Artificial
  Probe
aagtgcaggggctgcctccgccccc

SEQ ID NO: 351705 - DNA, 25 bp, Artificial
  Probe
aggccatacggaaaggcattcagct

SEQ ID NO: 351706 - DNA, 25 bp, Artificial
  Probe
tacccgtgatcagtgacgcgaggag

SEQ ID NO: 351707 - DNA, 25 bp, Artificial
  Probe
tggtgtccttcacccagctcctcct

SEQ ID NO: 351708 - DNA, 25 bp, Artificial
  Probe
attcggccatcatcacctgtcacgg

SEQ ID NO: 351709 - DNA, 25 bp, Artificial
  Probe
cctctgggctccacccaactccatc

SEQ ID NO: 351710 - DNA, 25 bp, Artificial
  Probe
ccccaccttcacaagtcctgcctgc

SEQ ID NO: 351711 - DNA, 25 bp, Artificial
  Probe
cctggtccccatgctccattaatgc

SEQ ID NO: 351712 - DNA, 25 bp, Artificial
  Probe
tgtcacggtcgcagctcttgcgcat

SEQ ID NO: 351713 - DNA, 25 bp, Artificial
  Probe
tgtgagactgtacccgttcatccac

SEQ ID NO: 351714 - DNA, 25 bp, Artificial
  Probe
tgctggaggccatacggaaaggcat

SEQ ID NO: 351715 - DNA, 25 bp, Artificial
  Probe
atcatcacctgtcacggtcgcagct

SEQ ID NO: 351716 - DNA, 25 bp, Artificial
  Probe
ccattaatgcctccgtccccacctt

SEQ ID NO: 351717 - DNA, 25 bp, Artificial
  Probe
cactcccacaaggtgaagtgcaggg

SEQ ID NO: 351718 - DNA, 25 bp, Artificial
  Probe
tgtgtgagactgtacccgttcatcc

SEQ ID NO: 351719 - DNA, 25 bp, Artificial
  Probe
agtgtgtgagactgtacccgttcat

SEQ ID NO: 351720 - DNA, 25 bp, Artificial
  Probe
cgccccagtgtgtgagactgtaccc

SEQ ID NO: 351721 - DNA, 25 bp, Artificial
  Probe
tctagtacagccctctcccccggta

SEQ ID NO: 351722 - DNA, 25 bp, Artificial
  Probe
ctgctggaggccatacggaaaggca

SEQ ID NO: 351723 - DNA, 25 bp, Artificial
  Probe
cggaaaggcattcagcttcgcaaag

SEQ ID NO: 351724 - DNA, 25 bp, Artificial
  Probe
ctttatacataagcaagagaagcgt

SEQ ID NO: 351725 - DNA, 25 bp, Artificial
  Probe
tacaaactttcacaggcagctgttc

SEQ ID NO: 351726 - DNA, 25 bp, Artificial
  Probe
gaagcgtctgtttacaaactttcac

SEQ ID NO: 351727 - DNA, 25 bp, Artificial
  Probe
agacagtggtccacaggaaggccca

SEQ ID NO: 351728 - DNA, 25 bp, Artificial
  Probe
gaccccgtgaaaggaatgacagcag

SEQ ID NO: 351729 - DNA, 25 bp, Artificial
  Probe
atcctctaagatatatggtgtatgc

SEQ ID NO: 351730 - DNA, 25 bp, Artificial
  Probe
cccatatatgtgtgcatacaaactg

SEQ ID NO: 351731 - DNA, 25 bp, Artificial
  Probe
gccctttctgcactttttgcaagac

SEQ ID NO: 351732 - DNA, 25 bp, Artificial
  Probe
acagcagatgactagcgctaccgcc

SEQ ID NO: 351733 - DNA, 25 bp, Artificial
  Probe
aactttatacataagcaagagaagc

SEQ ID NO: 351734 - DNA, 25 bp, Artificial
  Probe
aaggaccccgtgaaaggaatgacag

SEQ ID NO: 351735 - DNA, 25 bp, Artificial
  Probe
tggtgtatgctgctgtatttacagc

SEQ ID NO: 351736 - DNA, 25 bp, Artificial
  Probe
cctttctgcactttttgcaagacag

SEQ ID NO: 351737 - DNA, 25 bp, Artificial
  Probe
ctgatcctctaagatatatggtgta

SEQ ID NO: 351738 - DNA, 25 bp, Artificial
  Probe
tgtgtgtgcgggagcctgatcctct

SEQ ID NO: 351739 - DNA, 25 bp, Artificial
  Probe
ggcagctgttctgttggcttgataa

SEQ ID NO: 351740 - DNA, 25 bp, Artificial
  Probe
caaactggttactgtcaagttcaag

SEQ ID NO: 351741 - DNA, 25 bp, Artificial
  Probe
agcgtctgtttacaaactttcacag

SEQ ID NO: 351742 - DNA, 25 bp, Artificial
  Probe
tcctctaagatatatggtgtatgct

SEQ ID NO: 351743 - DNA, 25 bp, Artificial
  Probe
tttcacaggcagctgttctgttggc

SEQ ID NO: 351744 - DNA, 25 bp, Artificial
  Probe
tgagacaaaaggaccccgtgaaagg

SEQ ID NO: 351745 - DNA, 25 bp, Artificial
  Probe
actgcccatatatgtgtgcatacaa

SEQ ID NO: 351746 - DNA, 25 bp, Artificial
  Probe
acagtggtccacaggaaggcccagc

SEQ ID NO: 351747 - DNA, 25 bp, Artificial
  Probe
gtgtatgctgctgtatttacagctc

SEQ ID NO: 351748 - DNA, 25 bp, Artificial
  Probe
cagctgttctgttggcttgataaat

SEQ ID NO: 351749 - DNA, 25 bp, Artificial
  Probe
gtatgctgctgtatttacagctcat

SEQ ID NO: 351750 - DNA, 25 bp, Artificial
  Probe
tacaaactggttactgtcaagttca

SEQ ID NO: 351751 - DNA, 25 bp, Artificial
  Probe
gttgatctgactatggatgacattc

SEQ ID NO: 351752 - DNA, 25 bp, Artificial
  Probe
aatgacagcagatgactagcgctac

SEQ ID NO: 351753 - DNA, 25 bp, Artificial
  Probe
tgtgcgggagcctgatcctctaaga

SEQ ID NO: 351754 - DNA, 25 bp, Artificial
  Probe
tgtgcatacaaactggttactgtca

SEQ ID NO: 351755 - DNA, 25 bp, Artificial
  Probe
atatgtgtgcatacaaactggttac

SEQ ID NO: 351756 - DNA, 25 bp, Artificial
  Probe
cacaggcagctgttctgttggcttg

SEQ ID NO: 351757 - DNA, 25 bp, Artificial
  Probe
atgagacaaaaggaccccgtgaaag

SEQ ID NO: 351758 - DNA, 25 bp, Artificial
  Probe
aggactgcccatatatgtgtgcata

SEQ ID NO: 351759 - DNA, 25 bp, Artificial
  Probe
agaagcgtctgtttacaaactttca

SEQ ID NO: 351760 - DNA, 25 bp, Artificial
  Probe
agagaagcgtctgtttacaaacttt

SEQ ID NO: 351761 - DNA, 25 bp, Artificial
  Probe
acaggcagctgttctgttggcttga

SEQ ID NO: 351762 - DNA, 25 bp, Artificial
  Probe
gatgactagcgctaccgccctttct

SEQ ID NO: 351763 - DNA, 25 bp, Artificial
  Probe
ccgccctttctgcactttttgcaag

SEQ ID NO: 351764 - DNA, 25 bp, Artificial
  Probe
atgactagcgctaccgccctttctg

SEQ ID NO: 351765 - DNA, 25 bp, Artificial
  Probe
ttataaagcctgtgtgtgcgggagc

SEQ ID NO: 351766 - DNA, 25 bp, Artificial
  Probe
tggtccacaggaaggcccagcagct

SEQ ID NO: 351767 - DNA, 25 bp, Artificial
  Probe
tataaagcctgtgtgtgcgggagcc

SEQ ID NO: 351768 - DNA, 25 bp, Artificial
  Probe
actttcacaggcagctgttctgttg

SEQ ID NO: 351769 - DNA, 25 bp, Artificial
  Probe
tgcatacaaactggttactgtcaag

SEQ ID NO: 351770 - DNA, 25 bp, Artificial
  Probe
tctggagcatgtggagaggttcttc

SEQ ID NO: 351771 - DNA, 25 bp, Artificial
  Probe
gttgggctctccatcctgcttcgag

SEQ ID NO: 351772 - DNA, 25 bp, Artificial
  Probe
agggaccgtccatgagaagctcaag

SEQ ID NO: 351773 - DNA, 25 bp, Artificial
  Probe
ttgtggttgggctctccatcctgct

SEQ ID NO: 351774 - DNA, 25 bp, Artificial
  Probe
acaggagaagcctctatgagaaaca

SEQ ID NO: 351775 - DNA, 25 bp, Artificial
  Probe
atttctggagacttgtcagaaggac

SEQ ID NO: 351776 - DNA, 25 bp, Artificial
  Probe
cgagggaccgtccatgagaagctca

SEQ ID NO: 351777 - DNA, 25 bp, Artificial
  Probe
tcaacccagagaagcctcaatcctg

SEQ ID NO: 351778 - DNA, 25 bp, Artificial
  Probe
gggccttcaatctctacgacatcaa

SEQ ID NO: 351779 - DNA, 25 bp, Artificial
  Probe
gacgcacctctggagcatgtggaga

SEQ ID NO: 351780 - DNA, 25 bp, Artificial
  Probe
gagatgctggccatcatgaagtcca

SEQ ID NO: 351781 - DNA, 25 bp, Artificial
  Probe
acgcacctctggagcatgtggagag

SEQ ID NO: 351782 - DNA, 25 bp, Artificial
  Probe
cctgacaggagaagcctctatgaga

SEQ ID NO: 351783 - DNA, 25 bp, Artificial
  Probe
ggtggccatgggttctcaacccaga

SEQ ID NO: 351784 - DNA, 25 bp, Artificial
  Probe
ctctacgacatcaacaaggacggtt

SEQ ID NO: 351785 - DNA, 25 bp, Artificial
  Probe
cacctctggagcatgtggagaggtt

SEQ ID NO: 351786 - DNA, 25 bp, Artificial
  Probe
catcctgcttcgagggaccgtccat

SEQ ID NO: 351787 - DNA, 25 bp, Artificial
  Probe
ggctctccatcctgcttcgagggac

SEQ ID NO: 351788 - DNA, 25 bp, Artificial
  Probe
gggaccgtccatgagaagctcaagt

SEQ ID NO: 351789 - DNA, 25 bp, Artificial
  Probe
tctctacgacatcaacaaggacggt

SEQ ID NO: 351790 - DNA, 25 bp, Artificial
  Probe
tctacgacatgatgggccgccacac

SEQ ID NO: 351791 - DNA, 25 bp, Artificial
  Probe
ctgcttcgagggaccgtccatgaga

SEQ ID NO: 351792 - DNA, 25 bp, Artificial
  Probe
gttctcaacccagagaagcctcaat

SEQ ID NO: 351793 - DNA, 25 bp, Artificial
  Probe
acatcaacaaggacggttacatcac

SEQ ID NO: 351794 - DNA, 25 bp, Artificial
  Probe
aggacgcacctctggagcatgtgga

SEQ ID NO: 351795 - DNA, 25 bp, Artificial
  Probe
tggttgggctctccatcctgcttcg

SEQ ID NO: 351796 - DNA, 25 bp, Artificial
  Probe
accgtccatgagaagctcaagtggg

SEQ ID NO: 351797 - DNA, 25 bp, Artificial
  Probe
tctccatcctgcttcgagggaccgt

SEQ ID NO: 351798 - DNA, 25 bp, Artificial
  Probe
ttcgagggaccgtccatgagaagct

SEQ ID NO: 351799 - DNA, 25 bp, Artificial
  Probe
ccgtccatgagaagctcaagtgggc

SEQ ID NO: 351800 - DNA, 25 bp, Artificial
  Probe
catgggttctcaacccagagaagcc

SEQ ID NO: 351801 - DNA, 25 bp, Artificial
  Probe
ggttctcaacccagagaagcctcaa

SEQ ID NO: 351802 - DNA, 25 bp, Artificial
  Probe
cctgggtggccatgggttctcaacc

SEQ ID NO: 351803 - DNA, 25 bp, Artificial
  Probe
gccatcatgaagtccatctacgaca

SEQ ID NO: 351804 - DNA, 25 bp, Artificial
  Probe
cccagagaagcctcaatcctgacag

SEQ ID NO: 351805 - DNA, 25 bp, Artificial
  Probe
gtccatgagaagctcaagtgggcct

SEQ ID NO: 351806 - DNA, 25 bp, Artificial
  Probe
catgaagtccatctacgacatgatg

SEQ ID NO: 351807 - DNA, 25 bp, Artificial
  Probe
catcatgaagtccatctacgacatg

SEQ ID NO: 351808 - DNA, 25 bp, Artificial
  Probe
gtggccatgggttctcaacccagag

SEQ ID NO: 351809 - DNA, 25 bp, Artificial
  Probe
aagtgggccttcaatctctacgaca

SEQ ID NO: 351810 - DNA, 25 bp, Artificial
  Probe
caacaaggacggttacatcaccaaa

SEQ ID NO: 351811 - DNA, 25 bp, Artificial
  Probe
ccctgggtggccatgggttctcaac

SEQ ID NO: 351812 - DNA, 25 bp, Artificial
  Probe
gtccatctacgacatgatgggccgc

SEQ ID NO: 351813 - DNA, 25 bp, Artificial
  Probe
ggccatgggttctcaacccagagaa

SEQ ID NO: 351814 - DNA, 25 bp, Artificial
  Probe
ctggagacttgtcagaaggacgaga

SEQ ID NO: 351815 - DNA, 25 bp, Artificial
  Probe
ggactttgtggttgggctctccatc

SEQ ID NO: 351816 - DNA, 25 bp, Artificial
  Probe
ccagtagcaggtggatggatgccat

SEQ ID NO: 351817 - DNA, 25 bp, Artificial
  Probe
atttgcatttaaatcagtgatcctg

SEQ ID NO: 351818 - DNA, 25 bp, Artificial
  Probe
aaccagaaggtaaccctgagtatga

SEQ ID NO: 351819 - DNA, 25 bp, Artificial
  Probe
ccaagagcacaactcccattaagag

SEQ ID NO: 351820 - DNA, 25 bp, Artificial
  Probe
catttaaatcagtgatcctgatctg

SEQ ID NO: 351821 - DNA, 25 bp, Artificial
  Probe
tgccatggcgactggaagaccattc

SEQ ID NO: 351822 - DNA, 25 bp, Artificial
  Probe
gaagaccattccaaccttgaagcgt

SEQ ID NO: 351823 - DNA, 25 bp, Artificial
  Probe
cacttattgctgaaaccaagagcac

SEQ ID NO: 351824 - DNA, 25 bp, Artificial
  Probe
agcgttactgcgatagcatatccta

SEQ ID NO: 351825 - DNA, 25 bp, Artificial
  Probe
agactttggaagcattcacgtttct

SEQ ID NO: 351826 - DNA, 25 bp, Artificial
  Probe
gatctctgtgctgtaaactaaaaca

SEQ ID NO: 351827 - DNA, 25 bp, Artificial
  Probe
atggcgactggaagaccattccaac

SEQ ID NO: 351828 - DNA, 25 bp, Artificial
  Probe
caagagcacaactcccattaagaga

SEQ ID NO: 351829 - DNA, 25 bp, Artificial
  Probe
gctgaaaccaagagcacaactccca

SEQ ID NO: 351830 - DNA, 25 bp, Artificial
  Probe
agaccattccaaccttgaagcgtta

SEQ ID NO: 351831 - DNA, 25 bp, Artificial
  Probe
tggaagaccattccaaccttgaagc

SEQ ID NO: 351832 - DNA, 25 bp, Artificial
  Probe
caaattgtgcatttttctggggcca

SEQ ID NO: 351833 - DNA, 25 bp, Artificial
  Probe
attgctgaaaccaagagcacaactc

SEQ ID NO: 351834 - DNA, 25 bp, Artificial
  Probe
ctcagaacttcaaaagggcaagatc

SEQ ID NO: 351835 - DNA, 25 bp, Artificial
  Probe
ttggaagcattcacgtttcttcctt

SEQ ID NO: 351836 - DNA, 25 bp, Artificial
  Probe
gttactgcgatagcatatcctatcc

SEQ ID NO: 351837 - DNA, 25 bp, Artificial
  Probe
aaggatctctgtgctgtaaactaaa

SEQ ID NO: 351838 - DNA, 25 bp, Artificial
  Probe
tcatttgtagcaagactttggaagc

SEQ ID NO: 351839 - DNA, 25 bp, Artificial
  Probe
gagagacacaccttcttactagttc

SEQ ID NO: 351840 - DNA, 25 bp, Artificial
  Probe
tgagagagacacaccttcttactag

SEQ ID NO: 351841 - DNA, 25 bp, Artificial
  Probe
agcacaactcccattaagagaagga

SEQ ID NO: 351842 - DNA, 25 bp, Artificial
  Probe
tcccctcagaacttcaaaagggcaa

SEQ ID NO: 351843 - DNA, 25 bp, Artificial
  Probe
tgtagcaagactttggaagcattca

SEQ ID NO: 351844 - DNA, 25 bp, Artificial
  Probe
ttaaccagaaggtaaccctgagtat

SEQ ID NO: 351845 - DNA, 25 bp, Artificial
  Probe
ttgtagcaagactttggaagcattc

SEQ ID NO: 351846 - DNA, 25 bp, Artificial
  Probe
ctcccattaagagaaggatctctgt

SEQ ID NO: 351847 - DNA, 25 bp, Artificial
  Probe
ttccaaccttgaagcgttactgcga

SEQ ID NO: 351848 - DNA, 25 bp, Artificial
  Probe
taaccagaaggtaaccctgagtatg

SEQ ID NO: 351849 - DNA, 25 bp, Artificial
  Probe
atttaaatcagtgatcctgatctgt

SEQ ID NO: 351850 - DNA, 25 bp, Artificial
  Probe
ctggggccattgtctttggtttatt

SEQ ID NO: 351851 - DNA, 25 bp, Artificial
  Probe
gcgactggaagaccattccaacctt

SEQ ID NO: 351852 - DNA, 25 bp, Artificial
  Probe
ccattccaaccttgaagcgttactg

SEQ ID NO: 351853 - DNA, 25 bp, Artificial
  Probe
actttggaagcattcacgtttcttc

SEQ ID NO: 351854 - DNA, 25 bp, Artificial
  Probe
agagaaggatctctgtgctgtaaac

SEQ ID NO: 351855 - DNA, 25 bp, Artificial
  Probe
tgtgcatttttctggggccattgtc

SEQ ID NO: 351856 - DNA, 25 bp, Artificial
  Probe
aaccttgaagcgttactgcgatagc

SEQ ID NO: 351857 - DNA, 25 bp, Artificial
  Probe
gatgccatggcgactggaagaccat

SEQ ID NO: 351858 - DNA, 25 bp, Artificial
  Probe
cttcacttattgctgaaaccaagag

SEQ ID NO: 351859 - DNA, 25 bp, Artificial
  Probe
ttgaagcgttactgcgatagcatat

SEQ ID NO: 351860 - DNA, 25 bp, Artificial
  Probe
cagaacttcaaaagggcaagatctt

SEQ ID NO: 351861 - DNA, 25 bp, Artificial
  Probe
catttgtagcaagactttggaagca

SEQ ID NO: 351862 - DNA, 25 bp, Artificial
  Probe
catacccaggtttggttcctctcgg

SEQ ID NO: 351863 - DNA, 25 bp, Artificial
  Probe
ctgggactccttcctcaagatctgg

SEQ ID NO: 351864 - DNA, 25 bp, Artificial
  Probe
tcctgggactccttcctcaagatct

SEQ ID NO: 351865 - DNA, 25 bp, Artificial
  Probe
cagggccttgggtcctgctcccata

SEQ ID NO: 351866 - DNA, 25 bp, Artificial
  Probe
ccccactgtggagataaaagtcggg

SEQ ID NO: 351867 - DNA, 25 bp, Artificial
  Probe
ggctcctgggactccttcctcaaga

SEQ ID NO: 351868 - DNA, 25 bp, Artificial
  Probe
tggctacaggctcctgggactcctt

SEQ ID NO: 351869 - DNA, 25 bp, Artificial
  Probe
ggactccttcctcaagatctggaac

SEQ ID NO: 351870 - DNA, 25 bp, Artificial
  Probe
gtggctacaggctcctgggactcct

SEQ ID NO: 351871 - DNA, 25 bp, Artificial
  Probe
tgggactccttcctcaagatctgga

SEQ ID NO: 351872 - DNA, 25 bp, Artificial
  Probe
cctccctgggctacagggccttggg

SEQ ID NO: 351873 - DNA, 25 bp, Artificial
  Probe
tccctgggctacagggccttgggtc

SEQ ID NO: 351874 - DNA, 25 bp, Artificial
  Probe
gactccttcctcaagatctggaact

SEQ ID NO: 351875 - DNA, 25 bp, Artificial
  Probe
gctacagggccttgggtcctgctcc

SEQ ID NO: 351876 - DNA, 25 bp, Artificial
  Probe
ccatacccaggtttggttcctctcg

SEQ ID NO: 351877 - DNA, 25 bp, Artificial
  Probe
tgtgagctgccttggggtcacagat

SEQ ID NO: 351878 - DNA, 25 bp, Artificial
  Probe
ggctacagggccttgggtcctgctc

SEQ ID NO: 351879 - DNA, 25 bp, Artificial
  Probe
ggctacaggctcctgggactccttc

SEQ ID NO: 351880 - DNA, 25 bp, Artificial
  Probe
ctccctgggctacagggccttgggt

SEQ ID NO: 351881 - DNA, 25 bp, Artificial
  Probe
gctcctgggactccttcctcaagat

SEQ ID NO: 351882 - DNA, 25 bp, Artificial
  Probe
aggctcctgggactccttcctcaag

SEQ ID NO: 351883 - DNA, 25 bp, Artificial
  Probe
gctcccatacccaggtttggttcct

SEQ ID NO: 351884 - DNA, 25 bp, Artificial
  Probe
aaccgtgtgagctgccttggggtca

SEQ ID NO: 351885 - DNA, 25 bp, Artificial
  Probe
agggccttgggtcctgctcccatac

SEQ ID NO: 351886 - DNA, 25 bp, Artificial
  Probe
gggactccttcctcaagatctggaa

SEQ ID NO: 351887 - DNA, 25 bp, Artificial
  Probe
cctgggactccttcctcaagatctg

SEQ ID NO: 351888 - DNA, 25 bp, Artificial
  Probe
tcccatacccaggtttggttcctct

SEQ ID NO: 351889 - DNA, 25 bp, Artificial
  Probe
ggacccagtggctgttcacgcattc

SEQ ID NO: 351890 - DNA, 25 bp, Artificial
  Probe
acattagaaaccagtagacactggc

SEQ ID NO: 351891 - DNA, 25 bp, Artificial
  Probe
gcattctttggcacactaggaagtt

SEQ ID NO: 351892 - DNA, 25 bp, Artificial
  Probe
accttgctgttaattttgcattctg

SEQ ID NO: 351893 - DNA, 25 bp, Artificial
  Probe
atagggtacacactgaagaaatgtc

SEQ ID NO: 351894 - DNA, 25 bp, Artificial
  Probe
tagaaaccagtagacactggcatgc

SEQ ID NO: 351895 - DNA, 25 bp, Artificial
  Probe
aagactcttgcctggtgttctctgt

SEQ ID NO: 351896 - DNA, 25 bp, Artificial
  Probe
tcactttgacatagggtacacactg

SEQ ID NO: 351897 - DNA, 25 bp, Artificial
  Probe
ccatttgaaccatcggaccttgctg

SEQ ID NO: 351898 - DNA, 25 bp, Artificial
  Probe
aaacctgacttgtccctgcatttga

SEQ ID NO: 351899 - DNA, 25 bp, Artificial
  Probe
tttgaagactcttgcctggtgttct

SEQ ID NO: 351900 - DNA, 25 bp, Artificial
  Probe
cttcacgattaggagggctgatagg

SEQ ID NO: 351901 - DNA, 25 bp, Artificial
  Probe
ttaagtagatgctcattttcagtcc

SEQ ID NO: 351902 - DNA, 25 bp, Artificial
  Probe
tctgtaacaggacgaaacagtgtct

SEQ ID NO: 351903 - DNA, 25 bp, Artificial
  Probe
cactggcatgcaatttttggtattt

SEQ ID NO: 351904 - DNA, 25 bp, Artificial
  Probe
tcacgcattctttggcacactagga

SEQ ID NO: 351905 - DNA, 25 bp, Artificial
  Probe
agaggttcagccatttgaaccatcg

SEQ ID NO: 351906 - DNA, 25 bp, Artificial
  Probe
tgagggacccagtggctgttcacgc

SEQ ID NO: 351907 - DNA, 25 bp, Artificial
  Probe
tggtgttctctgtaacaggacgaaa

SEQ ID NO: 351908 - DNA, 25 bp, Artificial
  Probe
tttgacatagggtacacactgaaga

SEQ ID NO: 351909 - DNA, 25 bp, Artificial
  Probe
gaaacagtgtctcacctttgacgtt

SEQ ID NO: 351910 - DNA, 25 bp, Artificial
  Probe
ctttggcacactaggaagttaagta

SEQ ID NO: 351911 - DNA, 25 bp, Artificial
  Probe
gttctctgtaacaggacgaaacagt

SEQ ID NO: 351912 - DNA, 25 bp, Artificial
  Probe
tgacttgtccctgcatttgaagact

SEQ ID NO: 351913 - DNA, 25 bp, Artificial
  Probe
tgattctgagggacccagtggctgt

SEQ ID NO: 351914 - DNA, 25 bp, Artificial
  Probe
ctgttaattttgcattctgaagcga

SEQ ID NO: 351915 - DNA, 25 bp, Artificial
  Probe
ggctgttcacgcattctttggcaca

SEQ ID NO: 351916 - DNA, 25 bp, Artificial
  Probe
ttgaaccatcggaccttgctgttaa

SEQ ID NO: 351917 - DNA, 25 bp, Artificial
  Probe
agaagtctgacaaaaacctgacttg

SEQ ID NO: 351918 - DNA, 25 bp, Artificial
  Probe
gctgttaattttgcattctgaagcg

SEQ ID NO: 351919 - DNA, 25 bp, Artificial
  Probe
ttttaagaggttcagccatttgaac

SEQ ID NO: 351920 - DNA, 25 bp, Artificial
  Probe
tctgagggacccagtggctgttcac

SEQ ID NO: 351921 - DNA, 25 bp, Artificial
  Probe
cagtggctgttcacgcattctttgg

SEQ ID NO: 351922 - DNA, 25 bp, Artificial
  Probe
accagtagacactggcatgcaattt

SEQ ID NO: 351923 - DNA, 25 bp, Artificial
  Probe
tttaagaggttcagccatttgaacc

SEQ ID NO: 351924 - DNA, 25 bp, Artificial
  Probe
tatacacatgtacgatgactttatg

SEQ ID NO: 351925 - DNA, 25 bp, Artificial
  Probe
aaattcactttgacatagggtacac

SEQ ID NO: 351926 - DNA, 25 bp, Artificial
  Probe
ggacgaaacagtgtctcacctttga

SEQ ID NO: 351927 - DNA, 25 bp, Artificial
  Probe
ttgacatagggtacacactgaagaa

SEQ ID NO: 351928 - DNA, 25 bp, Artificial
  Probe
ttcaactggcacaaatatatgattg

SEQ ID NO: 351929 - DNA, 25 bp, Artificial
  Probe
gtagacactggcatgcaatttttgg

SEQ ID NO: 351930 - DNA, 25 bp, Artificial
  Probe
gacaaaaacctgacttgtccctgca

SEQ ID NO: 351931 - DNA, 25 bp, Artificial
  Probe
ttcagtcctttgaggggacaggtga

SEQ ID NO: 351932 - DNA, 25 bp, Artificial
  Probe
ttacattagaaaccagtagacactg

SEQ ID NO: 351933 - DNA, 25 bp, Artificial
  Probe
caactggcacaaatatatgattgat

SEQ ID NO: 351934 - DNA, 25 bp, Artificial
  Probe
cacctttgacgtttttgagaaatgt

SEQ ID NO: 351935 - DNA, 25 bp, Artificial
  Probe
tgacatttgacaagaacgagaacat

SEQ ID NO: 351936 - DNA, 25 bp, Artificial
  Probe
tgcttatgccccatcaggatgtgcc

SEQ ID NO: 351937 - DNA, 25 bp, Artificial
  Probe
aggagcacgcggtcaccatgccttg

SEQ ID NO: 351938 - DNA, 25 bp, Artificial
  Probe
gacagccagcggtgatggcacttgc

SEQ ID NO: 351939 - DNA, 25 bp, Artificial
  Probe
ggcgtgtgcttatgccccatcagga

SEQ ID NO: 351940 - DNA, 25 bp, Artificial
  Probe
ccttcactactaacaaggagcacgc

SEQ ID NO: 351941 - DNA, 25 bp, Artificial
  Probe
cgagaacatggctgccaagaagaag

SEQ ID NO: 351942 - DNA, 25 bp, Artificial
  Probe
aagacaagcggaggatcgtgagctc

SEQ ID NO: 351943 - DNA, 25 bp, Artificial
  Probe
gcagagcttccatggccatggggct

SEQ ID NO: 351944 - DNA, 25 bp, Artificial
  Probe
ccagaaggaccctcaaaggacacgg

SEQ ID NO: 351945 - DNA, 25 bp, Artificial
  Probe
gaggatcgtgagctcctcacaggat

SEQ ID NO: 351946 - DNA, 25 bp, Artificial
  Probe
gcttccatggccatggggctgacgt

SEQ ID NO: 351947 - DNA, 25 bp, Artificial
  Probe
gctatgcacaccaactacctgtctg

SEQ ID NO: 351948 - DNA, 25 bp, Artificial
  Probe
gagcacgcggtcaccatgccttgca

SEQ ID NO: 351949 - DNA, 25 bp, Artificial
  Probe
tcaggatgtgccattgcttgtggtg

SEQ ID NO: 351950 - DNA, 25 bp, Artificial
  Probe
ttggtgcaaagacaagcggaggatc

SEQ ID NO: 351951 - DNA, 25 bp, Artificial
  Probe
tgattgtctgggattccttcactac

SEQ ID NO: 351952 - DNA, 25 bp, Artificial
  Probe
agcggtgatggcacttgcgccctgt

SEQ ID NO: 351953 - DNA, 25 bp, Artificial
  Probe
ccgagagcctcaagggcaagctaga

SEQ ID NO: 351954 - DNA, 25 bp, Artificial
  Probe
ctaacaaggagcacgcggtcaccat

SEQ ID NO: 351955 - DNA, 25 bp, Artificial
  Probe
cacttgcgccctgtgggatgtggaa

SEQ ID NO: 351956 - DNA, 25 bp, Artificial
  Probe
ataagtgttccgtgtacccactgac

SEQ ID NO: 351957 - DNA, 25 bp, Artificial
  Probe
gcgaagctgcatgacgtggagcttc

SEQ ID NO: 351958 - DNA, 25 bp, Artificial
  Probe
caagcggaggatcgtgagctcctca

SEQ ID NO: 351959 - DNA, 25 bp, Artificial
  Probe
tgagctcctcacaggatgggaaggt

SEQ ID NO: 351960 - DNA, 25 bp, Artificial
  Probe
tgcatggattggtgcaaagacaagc

SEQ ID NO: 351961 - DNA, 25 bp, Artificial
  Probe
actaacaaggagcacgcggtcacca

SEQ ID NO: 351962 - DNA, 25 bp, Artificial
  Probe
ggtcaccatgccttgcacctgggtg

SEQ ID NO: 351963 - DNA, 25 bp, Artificial
  Probe
atggctgccaagaagaagtctgtcg

SEQ ID NO: 351964 - DNA, 25 bp, Artificial
  Probe
acgtggagcttcaccaggtggccga

SEQ ID NO: 351965 - DNA, 25 bp, Artificial
  Probe
aggccctgggccagtttgtcatgaa

SEQ ID NO: 351966 - DNA, 25 bp, Artificial
  Probe
ctcctcacaggatgggaaggtgatt

SEQ ID NO: 351967 - DNA, 25 bp, Artificial
  Probe
tgcatgacgtggagcttcaccaggt

SEQ ID NO: 351968 - DNA, 25 bp, Artificial
  Probe
gacacgggaacaaagtcctgtgcat

SEQ ID NO: 351969 - DNA, 25 bp, Artificial
  Probe
gaagtctgtcgctatgcacaccaac

SEQ ID NO: 351970 - DNA, 25 bp, Artificial
  Probe
cagaaggaccctcaaaggacacggg

SEQ ID NO: 351971 - DNA, 25 bp, Artificial
  Probe
ccatgccttgcacctgggtgatggc

SEQ ID NO: 351972 - DNA, 25 bp, Artificial
  Probe
ccattgcttgtggtggtctggataa

SEQ ID NO: 351973 - DNA, 25 bp, Artificial
  Probe
ctgcagcttcaccaactcagacatg

SEQ ID NO: 351974 - DNA, 25 bp, Artificial
  Probe
acttgcgccctgtgggatgtggaaa

SEQ ID NO: 351975 - DNA, 25 bp, Artificial
  Probe
ggtgatggcgtgtgcttatgcccca

SEQ ID NO: 351976 - DNA, 25 bp, Artificial
  Probe
gaagaccagaaggaccctcaaagga

SEQ ID NO: 351977 - DNA, 25 bp, Artificial
  Probe
aaagtggacagctgttgcagagctt

SEQ ID NO: 351978 - DNA, 25 bp, Artificial
  Probe
agaagaagtctgtcgctatgcacac

SEQ ID NO: 351979 - DNA, 25 bp, Artificial
  Probe
atcctgacagccagcggtgatggca

SEQ ID NO: 351980 - DNA, 25 bp, Artificial
  Probe
aaagtcctgtgcatggattggtgca

SEQ ID NO: 351981 - DNA, 25 bp, Artificial
  Probe
gtccaaggcagctgcagacttgatg

SEQ ID NO: 351982 - DNA, 25 bp, Artificial
  Probe
cacatgccaaggaagatcccctgct

SEQ ID NO: 351983 - DNA, 25 bp, Artificial
  Probe
caaggcagctgcagacttgatggcc

SEQ ID NO: 351984 - DNA, 25 bp, Artificial
  Probe
aggcagctgcagacttgatggccta

SEQ ID NO: 351985 - DNA, 25 bp, Artificial
  Probe
gtgtccaaggcagctgcagacttga

SEQ ID NO: 351986 - DNA, 25 bp, Artificial
  Probe
agctgcagacttgatggcctactgt

SEQ ID NO: 351987 - DNA, 25 bp, Artificial
  Probe
gacttgatggcctactgtgaggcac

SEQ ID NO: 351988 - DNA, 25 bp, Artificial
  Probe
tccaaggcagctgcagacttgatgg

SEQ ID NO: 351989 - DNA, 25 bp, Artificial
  Probe
tgtccaaggcagctgcagacttgat

SEQ ID NO: 351990 - DNA, 25 bp, Artificial
  Probe
gctgcagacttgatggcctactgtg

SEQ ID NO: 351991 - DNA, 25 bp, Artificial
  Probe
ctgcagacttgatggcctactgtga

SEQ ID NO: 351992 - DNA, 25 bp, Artificial
  Probe
catgccaaggaagatcccctgctga

SEQ ID NO: 351993 - DNA, 25 bp, Artificial
  Probe
atgccaaggaagatcccctgctgac

SEQ ID NO: 351994 - DNA, 25 bp, Artificial
  Probe
tgccaaggaagatcccctgctgacc

SEQ ID NO: 351995 - DNA, 25 bp, Artificial
  Probe
taaaggtgtccaaggcagctgcaga

SEQ ID NO: 351996 - DNA, 25 bp, Artificial
  Probe
gcacatgccaaggaagatcccctgc

SEQ ID NO: 351997 - DNA, 25 bp, Artificial
  Probe
aaggcagctgcagacttgatggcct

SEQ ID NO: 351998 - DNA, 25 bp, Artificial
  Probe
ctactgtgaggcacatgccaaggaa

SEQ ID NO: 351999 - DNA, 25 bp, Artificial
  Probe
ctgtgaggcacatgccaaggaagat

SEQ ID NO: 352000 - DNA, 25 bp, Artificial
  Probe
aggaagatcccctgctgaccccagt

SEQ ID NO: 352001 - DNA, 25 bp, Artificial
  Probe
ggcagctgcagacttgatggcctac

SEQ ID NO: 352002 - DNA, 25 bp, Artificial
  Probe
cttgatggcctactgtgaggcacat

SEQ ID NO: 352003 - DNA, 25 bp, Artificial
  Probe
ccaaggcagctgcagacttgatggc

SEQ ID NO: 352004 - DNA, 25 bp, Artificial
  Probe
gataaaggtgtccaaggcagctgca

SEQ ID NO: 352005 - DNA, 25 bp, Artificial
  Probe
acttgatggcctactgtgaggcaca

SEQ ID NO: 352006 - DNA, 25 bp, Artificial
  Probe
acatgccaaggaagatcccctgctg

SEQ ID NO: 352007 - DNA, 25 bp, Artificial
  Probe
gcagctgcagacttgatggcctact

SEQ ID NO: 352008 - DNA, 25 bp, Artificial
  Probe
tactgtgaggcacatgccaaggaag

SEQ ID NO: 352009 - DNA, 25 bp, Artificial
  Probe
cagctgcagacttgatggcctactg

SEQ ID NO: 352010 - DNA, 25 bp, Artificial
  Probe
ttgatggcctactgtgaggcacatg

SEQ ID NO: 352011 - DNA, 25 bp, Artificial
  Probe
aggcacatgccaaggaagatcccct

SEQ ID NO: 352012 - DNA, 25 bp, Artificial
  Probe
gaggcacatgccaaggaagatcccc

SEQ ID NO: 352013 - DNA, 25 bp, Artificial
  Probe
ggcacatgccaaggaagatcccctg

SEQ ID NO: 352014 - DNA, 25 bp, Artificial
  Probe
ggtgtccaaggcagctgcagacttg

SEQ ID NO: 352015 - DNA, 25 bp, Artificial
  Probe
actgtgaggcacatgccaaggaaga

SEQ ID NO: 352016 - DNA, 25 bp, Artificial
  Probe
tgaggccagcttgtgccggataaag

SEQ ID NO: 352017 - DNA, 25 bp, Artificial
  Probe
gtccaaggcagcagcagacctgatg

SEQ ID NO: 352018 - DNA, 25 bp, Artificial
  Probe
agcactatgagtattggccaagcac

SEQ ID NO: 352019 - DNA, 25 bp, Artificial
  Probe
gattgaggccagcttgtgccggata

SEQ ID NO: 352020 - DNA, 25 bp, Artificial
  Probe
ctgatgacttactgtgatgcccacg

SEQ ID NO: 352021 - DNA, 25 bp, Artificial
  Probe
tgatgcccacgcttgtgaggatccc

SEQ ID NO: 352022 - DNA, 25 bp, Artificial
  Probe
gcagcagacctgatgacttactgtg

SEQ ID NO: 352023 - DNA, 25 bp, Artificial
  Probe
gccaagcacgcaagatggtggaaca

SEQ ID NO: 352024 - DNA, 25 bp, Artificial
  Probe
attgaggccagcttgtgccggataa

SEQ ID NO: 352025 - DNA, 25 bp, Artificial
  Probe
agcagcagacctgatgacttactgt

SEQ ID NO: 352026 - DNA, 25 bp, Artificial
  Probe
tccaaggcagcagcagacctgatga

SEQ ID NO: 352027 - DNA, 25 bp, Artificial
  Probe
agtattggccaagcacgcaagatgg

SEQ ID NO: 352028 - DNA, 25 bp, Artificial
  Probe
cagcttaagattgaggccagcttgt

SEQ ID NO: 352029 - DNA, 25 bp, Artificial
  Probe
cacgcttgtgaggatcccctcatca

SEQ ID NO: 352030 - DNA, 25 bp, Artificial
  Probe
taaaggtgtccaaggcagcagcaga

SEQ ID NO: 352031 - DNA, 25 bp, Artificial
  Probe
agcacgcaagatggtggaacagctt

SEQ ID NO: 352032 - DNA, 25 bp, Artificial
  Probe
cttgtgccggataaaggtgtccaag

SEQ ID NO: 352033 - DNA, 25 bp, Artificial
  Probe
gatgcccacgcttgtgaggatcccc

SEQ ID NO: 352034 - DNA, 25 bp, Artificial
  Probe
gtgaggatcccctcatcactcctgt

SEQ ID NO: 352035 - DNA, 25 bp, Artificial
  Probe
aagattgaggccagcttgtgccgga

SEQ ID NO: 352036 - DNA, 25 bp, Artificial
  Probe
atgcccacgcttgtgaggatcccct

SEQ ID NO: 352037 - DNA, 25 bp, Artificial
  Probe
tgatgacttactgtgatgcccacgc

SEQ ID NO: 352038 - DNA, 25 bp, Artificial
  Probe
gacctgatgacttactgtgatgccc

SEQ ID NO: 352039 - DNA, 25 bp, Artificial
  Probe
agcagacctgatgacttactgtgat

SEQ ID NO: 352040 - DNA, 25 bp, Artificial
  Probe
cactatgagtattggccaagcacgc

SEQ ID NO: 352041 - DNA, 25 bp, Artificial
  Probe
gcttgtgccggataaaggtgtccaa

SEQ ID NO: 352042 - DNA, 25 bp, Artificial
  Probe
cctgatgacttactgtgatgcccac

SEQ ID NO: 352043 - DNA, 25 bp, Artificial
  Probe
cgcttgtgaggatcccctcatcact

SEQ ID NO: 352044 - DNA, 25 bp, Artificial
  Probe
aaggcagcagcagacctgatgactt

SEQ ID NO: 352045 - DNA, 25 bp, Artificial
  Probe
ggccaagcacgcaagatggtggaac

SEQ ID NO: 352046 - DNA, 25 bp, Artificial
  Probe
ggcagcagcagacctgatgacttac

SEQ ID NO: 352047 - DNA, 25 bp, Artificial
  Probe
caagcacgcaagatggtggaacagc

SEQ ID NO: 352048 - DNA, 25 bp, Artificial
  Probe
tattggccaagcacgcaagatggtg

SEQ ID NO: 352049 - DNA, 25 bp, Artificial
  Probe
agcttgtgccggataaaggtgtcca

SEQ ID NO: 352050 - DNA, 25 bp, Artificial
  Probe
cagcagcagacctgatgacttactg

SEQ ID NO: 352051 - DNA, 25 bp, Artificial
  Probe
ccaaggcagcagcagacctgatgac

SEQ ID NO: 352052 - DNA, 25 bp, Artificial
  Probe
agacctgatgacttactgtgatgcc

SEQ ID NO: 352053 - DNA, 25 bp, Artificial
  Probe
gataaaggtgtccaaggcagcagca

SEQ ID NO: 352054 - DNA, 25 bp, Artificial
  Probe
gcagacctgatgacttactgtgatg

SEQ ID NO: 352055 - DNA, 25 bp, Artificial
  Probe
gatgacttactgtgatgcccacgct

SEQ ID NO: 352056 - DNA, 25 bp, Artificial
  Probe
ccaagcacgcaagatggtggaacag

SEQ ID NO: 352057 - DNA, 25 bp, Artificial
  Probe
gacttactgtgatgcccacgcttgt

SEQ ID NO: 352058 - DNA, 25 bp, Artificial
  Probe
ggtgtccaaggcagcagcagacctg

SEQ ID NO: 352059 - DNA, 25 bp, Artificial
  Probe
actgtgatgcccacgcttgtgagga

SEQ ID NO: 352060 - DNA, 25 bp, Artificial
  Probe
ttgaggccagcttgtgccggataaa

SEQ ID NO: 352061 - DNA, 25 bp, Artificial
  Probe
tgagtattggccaagcacgcaagat

SEQ ID NO: 352062 - DNA, 25 bp, Artificial
  Probe
ggggcctgcccaaggtccaggacca

SEQ ID NO: 352063 - DNA, 25 bp, Artificial
  Probe
aggcagagacctcacagccagcgtc

SEQ ID NO: 352064 - DNA, 25 bp, Artificial
  Probe
cattggccacttacctgacaccggg

SEQ ID NO: 352065 - DNA, 25 bp, Artificial
  Probe
tcccggtgaagcaatgtttgctggc

SEQ ID NO: 352066 - DNA, 25 bp, Artificial
  Probe
tcacagccagcgtccacagagacag

SEQ ID NO: 352067 - DNA, 25 bp, Artificial
  Probe
gggctgattgtcacccctgggagtt

SEQ ID NO: 352068 - DNA, 25 bp, Artificial
  Probe
tgcggtcacagaagccccttctacg

SEQ ID NO: 352069 - DNA, 25 bp, Artificial
  Probe
cccaggagtcaggttgtagaaagtc

SEQ ID NO: 352070 - DNA, 25 bp, Artificial
  Probe
agggacctcggacctcatcccggtg

SEQ ID NO: 352071 - DNA, 25 bp, Artificial
  Probe
cttccttgtgtgcacggtggtgctg

SEQ ID NO: 352072 - DNA, 25 bp, Artificial
  Probe
catctcatccttgcttcccgagggg

SEQ ID NO: 352073 - DNA, 25 bp, Artificial
  Probe
tgccatcttccttgggccttccatt

SEQ ID NO: 352074 - DNA, 25 bp, Artificial
  Probe
gagtctgccatcttccttgggcctt

SEQ ID NO: 352075 - DNA, 25 bp, Artificial
  Probe
tccacagaggctaatgagtctgcca

SEQ ID NO: 352076 - DNA, 25 bp, Artificial
  Probe
agcaatgtttgctggccattctcat

SEQ ID NO: 352077 - DNA, 25 bp, Artificial
  Probe
ttccttgggccttccattggccact

SEQ ID NO: 352078 - DNA, 25 bp, Artificial
  Probe
tgaagcaatgtttgctggccattct

SEQ ID NO: 352079 - DNA, 25 bp, Artificial
  Probe
acccagcttcccaggagtcaggttg

SEQ ID NO: 352080 - DNA, 25 bp, Artificial
  Probe
aaagggctgattgtcacccctggga

SEQ ID NO: 352081 - DNA, 25 bp, Artificial
  Probe
tgggccttccattggccacttacct

SEQ ID NO: 352082 - DNA, 25 bp, Artificial
  Probe
cggaggcagagacctcacagccagc

SEQ ID NO: 352083 - DNA, 25 bp, Artificial
  Probe
tgcatctcatccttgcttcccgagg

SEQ ID NO: 352084 - DNA, 25 bp, Artificial
  Probe
ccctgtccacagaggctaatgagtc

SEQ ID NO: 352085 - DNA, 25 bp, Artificial
  Probe
acctcatcccggtgaagcaatgttt

SEQ ID NO: 352086 - DNA, 25 bp, Artificial
  Probe
tccaggaccagaagacagaacgcag

SEQ ID NO: 352087 - DNA, 25 bp, Artificial
  Probe
cccacagagatgatctgcatctcat

SEQ ID NO: 352088 - DNA, 25 bp, Artificial
  Probe
cacttacctgacaccgggctgaaga

SEQ ID NO: 352089 - DNA, 25 bp, Artificial
  Probe
acagagacagagaccacccagcttc

SEQ ID NO: 352090 - DNA, 25 bp, Artificial
  Probe
ccagaagacagaacgcagtggggac

SEQ ID NO: 352091 - DNA, 25 bp, Artificial
  Probe
gatgatctgcatctcatccttgctt

SEQ ID NO: 352092 - DNA, 25 bp, Artificial
  Probe
ctgacaccgggctgaagaaagggct

SEQ ID NO: 352093 - DNA, 25 bp, Artificial
  Probe
tgctggccattctcatcttagcctc

SEQ ID NO: 352094 - DNA, 25 bp, Artificial
  Probe
tgtttgctggccattctcatcttag

SEQ ID NO: 352095 - DNA, 25 bp, Artificial
  Probe
gcacatgtacccagtgcggaactac

SEQ ID NO: 352096 - DNA, 25 bp, Artificial
  Probe
gaggcagagacctcacagccagcac

SEQ ID NO: 352097 - DNA, 25 bp, Artificial
  Probe
ctggccaccatcttccttgtgtgca

SEQ ID NO: 352098 - DNA, 25 bp, Artificial
  Probe
gattgtcacccctgggagttctctg

SEQ ID NO: 352099 - DNA, 25 bp, Artificial
  Probe
aacatctgcggtcacagaagcccct

SEQ ID NO: 352100 - DNA, 25 bp, Artificial
  Probe
ccatggagaccctgtccacagaggc

SEQ ID NO: 352101 - DNA, 25 bp, Artificial
  Probe
cagagatgatctgcatctcatcctt

SEQ ID NO: 352102 - DNA, 25 bp, Artificial
  Probe
acatgtacccagtgcggaactactc

SEQ ID NO: 352103 - DNA, 25 bp, Artificial
  Probe
gtccacagagacagagaccacccag

SEQ ID NO: 352104 - DNA, 25 bp, Artificial
  Probe
cccgtaagacgcacatgtacccagt

SEQ ID NO: 352105 - DNA, 25 bp, Artificial
  Probe
atttacaacatctgcggtcacagaa

SEQ ID NO: 352106 - DNA, 25 bp, Artificial
  Probe
aaagtctatttacaacatctgcggt

SEQ ID NO: 352107 - DNA, 25 bp, Artificial
  Probe
caccgggctgaagaaagggctgatt

SEQ ID NO: 352108 - DNA, 25 bp, Artificial
  Probe
ccagctatgtgtgaagaggaagaca

SEQ ID NO: 352109 - DNA, 25 bp, Artificial
  Probe
ggaggcgccgctgaaccctaaggcc

SEQ ID NO: 352110 - DNA, 25 bp, Artificial
  Probe
gagatctcaccgactacctcatgaa

SEQ ID NO: 352111 - DNA, 25 bp, Artificial
  Probe
atggcgtgactcacaacgtgcctat

SEQ ID NO: 352112 - DNA, 25 bp, Artificial
  Probe
cgctctggactttgaaaatgagatg

SEQ ID NO: 352113 - DNA, 25 bp, Artificial
  Probe
gaccctgaagtatccgatagaacac

SEQ ID NO: 352114 - DNA, 25 bp, Artificial
  Probe
cttcaatgtccctgccatgtatgtg

SEQ ID NO: 352115 - DNA, 25 bp, Artificial
  Probe
aactgggacgacatggaaaagatct

SEQ ID NO: 352116 - DNA, 25 bp, Artificial
  Probe
tagaacacggcatcatcaccaactg

SEQ ID NO: 352117 - DNA, 25 bp, Artificial
  Probe
catcgtgggacgtcccagacaccag

SEQ ID NO: 352118 - DNA, 25 bp, Artificial
  Probe
gggggcactaccatgtacccaggca

SEQ ID NO: 352119 - DNA, 25 bp, Artificial
  Probe
ccttgctaacggaggcgccgctgaa

SEQ ID NO: 352120 - DNA, 25 bp, Artificial
  Probe
attatgtttgagaccttcaatgtcc

SEQ ID NO: 352121 - DNA, 25 bp, Artificial
  Probe
aggaagacagcacagctctggtgtg

SEQ ID NO: 352122 - DNA, 25 bp, Artificial
  Probe
atccatcgtgggacgtcccagacac

SEQ ID NO: 352123 - DNA, 25 bp, Artificial
  Probe
catgcgtctggacttggctggccga

SEQ ID NO: 352124 - DNA, 25 bp, Artificial
  Probe
tccgaccttgctaacggaggcgccg

SEQ ID NO: 352125 - DNA, 25 bp, Artificial
  Probe
ccagggctgttttcccatccatcgt

SEQ ID NO: 352126 - DNA, 25 bp, Artificial
  Probe
ctctggtgtgtgacaatggctccgg

SEQ ID NO: 352127 - DNA, 25 bp, Artificial
  Probe
cttggctggccgagatctcaccgac

SEQ ID NO: 352128 - DNA, 25 bp, Artificial
  Probe
tcccagcaccatgaagatcaagatt

SEQ ID NO: 352129 - DNA, 25 bp, Artificial
  Probe
tctggacttggctggccgagatctc

SEQ ID NO: 352130 - DNA, 25 bp, Artificial
  Probe
tggcaccactccttctataacgagc

SEQ ID NO: 352131 - DNA, 25 bp, Artificial
  Probe
cccagaggagcatccgaccttgcta

SEQ ID NO: 352132 - DNA, 25 bp, Artificial
  Probe
cctgactgagcgtggctattccttc

SEQ ID NO: 352133 - DNA, 25 bp, Artificial
  Probe
aatgagatggccactgctgcttcct

SEQ ID NO: 352134 - DNA, 25 bp, Artificial
  Probe
gatctcaccgactacctcatgaaga

SEQ ID NO: 352135 - DNA, 25 bp, Artificial
  Probe
agagagggatcctgaccctgaagta

SEQ ID NO: 352136 - DNA, 25 bp, Artificial
  Probe
ggagaagctgtgctatgtcgctctg

SEQ ID NO: 352137 - DNA, 25 bp, Artificial
  Probe
tgtgacaatggctccgggctctgta

SEQ ID NO: 352138 - DNA, 25 bp, Artificial
  Probe
tgggacgtcccagacaccagggagt

SEQ ID NO: 352139 - DNA, 25 bp, Artificial
  Probe
ctccgggctctgtaaggcgggcttt

SEQ ID NO: 352140 - DNA, 25 bp, Artificial
  Probe
aactggtattgtgctggactctgga

SEQ ID NO: 352141 - DNA, 25 bp, Artificial
  Probe
ggctggccgagatctcaccgactac

SEQ ID NO: 352142 - DNA, 25 bp, Artificial
  Probe
tgacatcaaggagaagctgtgctat

SEQ ID NO: 352143 - DNA, 25 bp, Artificial
  Probe
tgctgcttcctcttcttccctggag

SEQ ID NO: 352144 - DNA, 25 bp, Artificial
  Probe
cgggctttgctggtgatgatgctcc

SEQ ID NO: 352145 - DNA, 25 bp, Artificial
  Probe
gatgatgctcccagggctgttttcc

SEQ ID NO: 352146 - DNA, 25 bp, Artificial
  Probe
gcgtggccccagaggagcatccgac

SEQ ID NO: 352147 - DNA, 25 bp, Artificial
  Probe
aggcgccgctgaaccctaaggccaa

SEQ ID NO: 352148 - DNA, 25 bp, Artificial
  Probe
taccatgtacccaggcattgctgac

SEQ ID NO: 352149 - DNA, 25 bp, Artificial
  Probe
ttttcccatccatcgtgggacgtcc

SEQ ID NO: 352150 - DNA, 25 bp, Artificial
  Probe
gaagtatccgatagaacacggcatc

SEQ ID NO: 352151 - DNA, 25 bp, Artificial
  Probe
atggccactgctgcttcctcttctt

SEQ ID NO: 352152 - DNA, 25 bp, Artificial
  Probe
gtcccagacaccagggagtgatggt

SEQ ID NO: 352153 - DNA, 25 bp, Artificial
  Probe
atccgatagaacacggcatcatcac

SEQ ID NO: 352154 - DNA, 25 bp, Artificial
  Probe
atcaacaggtggtggtggctcacac

SEQ ID NO: 352155 - DNA, 25 bp, Artificial
  Probe
ctctgaatttgaggcctaacctgtc

SEQ ID NO: 352156 - DNA, 25 bp, Artificial
  Probe
agaggcggaggcggaggtctctgaa

SEQ ID NO: 352157 - DNA, 25 bp, Artificial
  Probe
tctctgaatttgaggcctaacctgt

SEQ ID NO: 352158 - DNA, 25 bp, Artificial
  Probe
ggaggtctctgaatttgaggcctaa

SEQ ID NO: 352159 - DNA, 25 bp, Artificial
  Probe
aggtctctgaatttgaggcctaacc

SEQ ID NO: 352160 - DNA, 25 bp, Artificial
  Probe
gaggtctctgaatttgaggcctaac

SEQ ID NO: 352161 - DNA, 25 bp, Artificial
  Probe
ggcggaggcggaggtctctgaattt

SEQ ID NO: 352162 - DNA, 25 bp, Artificial
  Probe
gcggaggtctctgaatttgaggcct

SEQ ID NO: 352163 - DNA, 25 bp, Artificial
  Probe
atacagagaaaccgtgcctcaatcg

SEQ ID NO: 352164 - DNA, 25 bp, Artificial
  Probe
gaaaccgtgcctcaatcgaaaacaa

SEQ ID NO: 352165 - DNA, 25 bp, Artificial
  Probe
gagaaaccgtgcctcaatcgaaaac

SEQ ID NO: 352166 - DNA, 25 bp, Artificial
  Probe
gtctctgaatttgaggcctaacctg

SEQ ID NO: 352167 - DNA, 25 bp, Artificial
  Probe
cggaggtctctgaatttgaggccta

SEQ ID NO: 352168 - DNA, 25 bp, Artificial
  Probe
agcacccagaggcggaggcggaggt

SEQ ID NO: 352169 - DNA, 25 bp, Artificial
  Probe
agaaaccgtgcctcaatcgaaaaca

SEQ ID NO: 352170 - DNA, 25 bp, Artificial
  Probe
caacaggtggtggtggctcacacct

SEQ ID NO: 352171 - DNA, 25 bp, Artificial
  Probe
tcaacaggtggtggtggctcacacc

SEQ ID NO: 352172 - DNA, 25 bp, Artificial
  Probe
gcggaggcggaggtctctgaatttg

SEQ ID NO: 352173 - DNA, 25 bp, Artificial
  Probe
ggtctctgaatttgaggcctaacct

SEQ ID NO: 352174 - DNA, 25 bp, Artificial
  Probe
gcacccagaggcggaggcggaggtc

SEQ ID NO: 352175 - DNA, 25 bp, Artificial
  Probe
ccagaggcggaggcggaggtctctg

SEQ ID NO: 352176 - DNA, 25 bp, Artificial
  Probe
cacccagaggcggaggcggaggtct

SEQ ID NO: 352177 - DNA, 25 bp, Artificial
  Probe
cggaggcggaggtctctgaatttga

SEQ ID NO: 352178 - DNA, 25 bp, Artificial
  Probe
aggcggaggcggaggtctctgaatt

SEQ ID NO: 352179 - DNA, 25 bp, Artificial
  Probe
tcaggaacggttcaggacagtcact

SEQ ID NO: 352180 - DNA, 25 bp, Artificial
  Probe
aaatctgctagtggtggctgctgct

SEQ ID NO: 352181 - DNA, 25 bp, Artificial
  Probe
tggcatcattgtggtgtatgacgtc

SEQ ID NO: 352182 - DNA, 25 bp, Artificial
  Probe
ggaatcctacgctaatgtgaaacag

SEQ ID NO: 352183 - DNA, 25 bp, Artificial
  Probe
catcattgtggtgtatgacgtcact

SEQ ID NO: 352184 - DNA, 25 bp, Artificial
  Probe
atcctacgctaatgtgaaacagtgg

SEQ ID NO: 352185 - DNA, 25 bp, Artificial
  Probe
ttcaagattcgaaccattgaactgg

SEQ ID NO: 352186 - DNA, 25 bp, Artificial
  Probe
tacgccagtgagaatgtcaataaac

SEQ ID NO: 352187 - DNA, 25 bp, Artificial
  Probe
gtcaataaactgctggtaggcaaca

SEQ ID NO: 352188 - DNA, 25 bp, Artificial
  Probe
tcattgtggtgtatgacgtcactga

SEQ ID NO: 352189 - DNA, 25 bp, Artificial
  Probe
ctgtgaaatctgctagtggtggctg

SEQ ID NO: 352190 - DNA, 25 bp, Artificial
  Probe
ggtgaacggcccaacctgaagatcg

SEQ ID NO: 352191 - DNA, 25 bp, Artificial
  Probe
caataaactgctggtaggcaacaag

SEQ ID NO: 352192 - DNA, 25 bp, Artificial
  Probe
caacctgaagatcgacagcactcct

SEQ ID NO: 352193 - DNA, 25 bp, Artificial
  Probe
tgctcatggcatcattgtggtgtat

SEQ ID NO: 352194 - DNA, 25 bp, Artificial
  Probe
tatcggggtgctcatggcatcattg

SEQ ID NO: 352195 - DNA, 25 bp, Artificial
  Probe
gaatcctacgctaatgtgaaacagt

SEQ ID NO: 352196 - DNA, 25 bp, Artificial
  Probe
gcactcctgtgaaatctgctagtgg

SEQ ID NO: 352197 - DNA, 25 bp, Artificial
  Probe
tcgacagcactcctgtgaaatctgc

SEQ ID NO: 352198 - DNA, 25 bp, Artificial
  Probe
ggtgctcatggcatcattgtggtgt

SEQ ID NO: 352199 - DNA, 25 bp, Artificial
  Probe
tcactgaccaggaatcctacgctaa

SEQ ID NO: 352200 - DNA, 25 bp, Artificial
  Probe
ctactatcggggtgctcatggcatc

SEQ ID NO: 352201 - DNA, 25 bp, Artificial
  Probe
cattgtggtgtatgacgtcactgac

SEQ ID NO: 352202 - DNA, 25 bp, Artificial
  Probe
accaggaatcctacgctaatgtgaa

SEQ ID NO: 352203 - DNA, 25 bp, Artificial
  Probe
ccattgaactggatggcaaaaccat

SEQ ID NO: 352204 - DNA, 25 bp, Artificial
  Probe
cggcccaacctgaagatcgacagca

SEQ ID NO: 352205 - DNA, 25 bp, Artificial
  Probe
gaaatctgctagtggtggctgctgc

SEQ ID NO: 352206 - DNA, 25 bp, Artificial
  Probe
caagattcgaaccattgaactggat

SEQ ID NO: 352207 - DNA, 25 bp, Artificial
  Probe
agattcgaaccattgaactggatgg

SEQ ID NO: 352208 - DNA, 25 bp, Artificial
  Probe
ttccagctactatcggggtgctcat

SEQ ID NO: 352209 - DNA, 25 bp, Artificial
  Probe
tgtggtgtatgacgtcactgaccag

SEQ ID NO: 352210 - DNA, 25 bp, Artificial
  Probe
gaaccattgaactggatggcaaaac

SEQ ID NO: 352211 - DNA, 25 bp, Artificial
  Probe
ggacttcaagattcgaaccattgaa

SEQ ID NO: 352212 - DNA, 25 bp, Artificial
  Probe
acagtcacttccagctactatcggg

SEQ ID NO: 352213 - DNA, 25 bp, Artificial
  Probe
atgacgtcactgaccaggaatccta

SEQ ID NO: 352214 - DNA, 25 bp, Artificial
  Probe
gatggcaaaaccatcaaactacaga

SEQ ID NO: 352215 - DNA, 25 bp, Artificial
  Probe
tgtgaaatctgctagtggtggctgc

SEQ ID NO: 352216 - DNA, 25 bp, Artificial
  Probe
gacgtcactgaccaggaatcctacg

SEQ ID NO: 352217 - DNA, 25 bp, Artificial
  Probe
tgaagatcgacagcactcctgtgaa

SEQ ID NO: 352218 - DNA, 25 bp, Artificial
  Probe
ttcaggacagtcacttccagctact

SEQ ID NO: 352219 - DNA, 25 bp, Artificial
  Probe
atcggggtgctcatggcatcattgt

SEQ ID NO: 352220 - DNA, 25 bp, Artificial
  Probe
atctgctagtggtggctgctgctag

SEQ ID NO: 352221 - DNA, 25 bp, Artificial
  Probe
tcatggcatcattgtggtgtatgac

SEQ ID NO: 352222 - DNA, 25 bp, Artificial
  Probe
attcgaaccattgaactggatggca

SEQ ID NO: 352223 - DNA, 25 bp, Artificial
  Probe
gcccaacctgaagatcgacagcact

SEQ ID NO: 352224 - DNA, 25 bp, Artificial
  Probe
gaatgtcaataaactgctggtaggc

SEQ ID NO: 352225 - DNA, 25 bp, Artificial
  Probe
ctctttcatcaaggtgtagaaatta

SEQ ID NO: 352226 - DNA, 25 bp, Artificial
  Probe
agaaattatctcattgtctagacgc

SEQ ID NO: 352227 - DNA, 25 bp, Artificial
  Probe
gctactgtgtgtattgagccacatt

SEQ ID NO: 352228 - DNA, 25 bp, Artificial
  Probe
actgtgtgtattgagccacattgta

SEQ ID NO: 352229 - DNA, 25 bp, Artificial
  Probe
ccacattgtatattattctgctgcc

SEQ ID NO: 352230 - DNA, 25 bp, Artificial
  Probe
attctgctgccgatgacgtcattaa

SEQ ID NO: 352231 - DNA, 25 bp, Artificial
  Probe
catccataaagaagtacatattact

SEQ ID NO: 352232 - DNA, 25 bp, Artificial
  Probe
cccgctactgtgtgtattgagccac

SEQ ID NO: 352233 - DNA, 25 bp, Artificial
  Probe
gccgatgacgtcattaaaggtgatt

SEQ ID NO: 352234 - DNA, 25 bp, Artificial
  Probe
catattactctttcatcaaggtgta

SEQ ID NO: 352235 - DNA, 25 bp, Artificial
  Probe
ccgatgacgtcattaaaggtgattc

SEQ ID NO: 352236 - DNA, 25 bp, Artificial
  Probe
ttactctttcatcaaggtgtagaaa

SEQ ID NO: 352237 - DNA, 25 bp, Artificial
  Probe
tttcatcaaggtgtagaaattatct

SEQ ID NO: 352238 - DNA, 25 bp, Artificial
  Probe
tccccgctactgtgtgtattgagcc

SEQ ID NO: 352239 - DNA, 25 bp, Artificial
  Probe
ctttcatcaaggtgtagaaattatc

SEQ ID NO: 352240 - DNA, 25 bp, Artificial
  Probe
aaagcatccataaagaagtacatat

SEQ ID NO: 352241 - DNA, 25 bp, Artificial
  Probe
ctgctgccgatgacgtcattaaagg

SEQ ID NO: 352242 - DNA, 25 bp, Artificial
  Probe
atattactctttcatcaaggtgtag

SEQ ID NO: 352243 - DNA, 25 bp, Artificial
  Probe
cgatgacgtcattaaaggtgattca

SEQ ID NO: 352244 - DNA, 25 bp, Artificial
  Probe
cattgtatattattctgctgccgat

SEQ ID NO: 352245 - DNA, 25 bp, Artificial
  Probe
gaaattatctcattgtctagacgct

SEQ ID NO: 352246 - DNA, 25 bp, Artificial
  Probe
ctgccgatgacgtcattaaaggtga

SEQ ID NO: 352247 - DNA, 25 bp, Artificial
  Probe
tgtgtgtattgagccacattgtata

SEQ ID NO: 352248 - DNA, 25 bp, Artificial
  Probe
agaagtacatattactctttcatca

SEQ ID NO: 352249 - DNA, 25 bp, Artificial
  Probe
ttctgctgccgatgacgtcattaaa

SEQ ID NO: 352250 - DNA, 25 bp, Artificial
  Probe
tgccgatgacgtcattaaaggtgat

SEQ ID NO: 352251 - DNA, 25 bp, Artificial
  Probe
tactgtgtgtattgagccacattgt

SEQ ID NO: 352252 - DNA, 25 bp, Artificial
  Probe
tgctgccgatgacgtcattaaaggt

SEQ ID NO: 352253 - DNA, 25 bp, Artificial
  Probe
tgtctagacgctccccgctactgtg

SEQ ID NO: 352254 - DNA, 25 bp, Artificial
  Probe
ccccgctactgtgtgtattgagcca

SEQ ID NO: 352255 - DNA, 25 bp, Artificial
  Probe
gtattgagccacattgtatattatt

SEQ ID NO: 352256 - DNA, 25 bp, Artificial
  Probe
tctttcatcaaggtgtagaaattat

SEQ ID NO: 352257 - DNA, 25 bp, Artificial
  Probe
cgctactgtgtgtattgagccacat

SEQ ID NO: 352258 - DNA, 25 bp, Artificial
  Probe
attactctttcatcaaggtgtagaa

SEQ ID NO: 352259 - DNA, 25 bp, Artificial
  Probe
tactctttcatcaaggtgtagaaat

SEQ ID NO: 352260 - DNA, 25 bp, Artificial
  Probe
atctcattgtctagacgctccccgc

SEQ ID NO: 352261 - DNA, 25 bp, Artificial
  Probe
atattattctgctgccgatgacgtc

SEQ ID NO: 352262 - DNA, 25 bp, Artificial
  Probe
gctgccgatgacgtcattaaaggtg

SEQ ID NO: 352263 - DNA, 25 bp, Artificial
  Probe
tagaaattatctcattgtctagacg

SEQ ID NO: 352264 - DNA, 25 bp, Artificial
  Probe
cgctccccgctactgtgtgtattga

SEQ ID NO: 352265 - DNA, 25 bp, Artificial
  Probe
actctttcatcaaggtgtagaaatt

SEQ ID NO: 352266 - DNA, 25 bp, Artificial
  Probe
tctgctgccgatgacgtcattaaag

SEQ ID NO: 352267 - DNA, 25 bp, Artificial
  Probe
ccgctactgtgtgtattgagccaca

SEQ ID NO: 352268 - DNA, 25 bp, Artificial
  Probe
ctccccgctactgtgtgtattgagc

SEQ ID NO: 352269 - DNA, 25 bp, Artificial
  Probe
tattactctttcatcaaggtgtaga

SEQ ID NO: 352270 - DNA, 25 bp, Artificial
  Probe
ctactgtgtgtattgagccacattg

SEQ ID NO: 352271 - DNA, 25 bp, Artificial
  Probe
ttcgccctatagtgagatcgatcca

SEQ ID NO: 352272 - DNA, 25 bp, Artificial
  Probe
tggcgtacccactaacccctgcaga

SEQ ID NO: 352273 - DNA, 25 bp, Artificial
  Probe
tccactgggcgccgattaaaacgtc

SEQ ID NO: 352274 - DNA, 25 bp, Artificial
  Probe
cgccctatagtgagatcgatccaat

SEQ ID NO: 352275 - DNA, 25 bp, Artificial
  Probe
gccacaataggacgacctttacaaa

SEQ ID NO: 352276 - DNA, 25 bp, Artificial
  Probe
gggaaggcaccgacgcaaatagcaa

SEQ ID NO: 352277 - DNA, 25 bp, Artificial
  Probe
gcgccgattaaaacgtccgcgacgg

SEQ ID NO: 352278 - DNA, 25 bp, Artificial
  Probe
tcgccctatagtgagatcgatccaa

SEQ ID NO: 352279 - DNA, 25 bp, Artificial
  Probe
gatcgatccaattccactgggcgcc

SEQ ID NO: 352280 - DNA, 25 bp, Artificial
  Probe
gacgcaaatagcaagccacaatagg

SEQ ID NO: 352281 - DNA, 25 bp, Artificial
  Probe
accgacgcaaatagcaagccacaat

SEQ ID NO: 352282 - DNA, 25 bp, Artificial
  Probe
aatagcaagccacaataggacgacc

SEQ ID NO: 352283 - DNA, 25 bp, Artificial
  Probe
tgagatcgatccaattccactgggc

SEQ ID NO: 352284 - DNA, 25 bp, Artificial
  Probe
catacccttcgcagcgggtacagga

SEQ ID NO: 352285 - DNA, 25 bp, Artificial
  Probe
ccacaataggacgacctttacaaag

SEQ ID NO: 352286 - DNA, 25 bp, Artificial
  Probe
tagcaagccacaataggacgacctt

SEQ ID NO: 352287 - DNA, 25 bp, Artificial
  Probe
tgggcgccgattaaaacgtccgcga

SEQ ID NO: 352288 - DNA, 25 bp, Artificial
  Probe
atagcaagccacaataggacgacct

SEQ ID NO: 352289 - DNA, 25 bp, Artificial
  Probe
ctgggcgccgattaaaacgtccgcg

SEQ ID NO: 352290 - DNA, 25 bp, Artificial
  Probe
acgcctccacagaggcgcgaaggga

SEQ ID NO: 352291 - DNA, 25 bp, Artificial
  Probe
gatccaattccactgggcgccgatt

SEQ ID NO: 352292 - DNA, 25 bp, Artificial
  Probe
cactgggcgccgattaaaacgtccg

SEQ ID NO: 352293 - DNA, 25 bp, Artificial
  Probe
gtgagatcgatccaattccactggg

SEQ ID NO: 352294 - DNA, 25 bp, Artificial
  Probe
agatcgatccaattccactgggcgc

SEQ ID NO: 352295 - DNA, 25 bp, Artificial
  Probe
acgcaaatagcaagccacaatagga

SEQ ID NO: 352296 - DNA, 25 bp, Artificial
  Probe
aagccacaataggacgacctttaca

SEQ ID NO: 352297 - DNA, 25 bp, Artificial
  Probe
caccgacgcaaatagcaagccacaa

SEQ ID NO: 352298 - DNA, 25 bp, Artificial
  Probe
ggcgccgattaaaacgtccgcgacg

SEQ ID NO: 352299 - DNA, 25 bp, Artificial
  Probe
ggcaccgacgcaaatagcaagccac

SEQ ID NO: 352300 - DNA, 25 bp, Artificial
  Probe
gagatcgatccaattccactgggcg

SEQ ID NO: 352301 - DNA, 25 bp, Artificial
  Probe
atccaattccactgggcgccgatta

SEQ ID NO: 352302 - DNA, 25 bp, Artificial
  Probe
ccgacgcaaatagcaagccacaata

SEQ ID NO: 352303 - DNA, 25 bp, Artificial
  Probe
agccacaataggacgacctttacaa

SEQ ID NO: 352304 - DNA, 25 bp, Artificial
  Probe
agcaagccacaataggacgaccttt

SEQ ID NO: 352305 - DNA, 25 bp, Artificial
  Probe
tcgatccaattccactgggcgccga

SEQ ID NO: 352306 - DNA, 25 bp, Artificial
  Probe
cctggcgtacccactaacccctgca

SEQ ID NO: 352307 - DNA, 25 bp, Artificial
  Probe
cgatccaattccactgggcgccgat

SEQ ID NO: 352308 - DNA, 25 bp, Artificial
  Probe
gcaccgacgcaaatagcaagccaca

SEQ ID NO: 352309 - DNA, 25 bp, Artificial
  Probe
cgacgcaaatagcaagccacaatag

SEQ ID NO: 352310 - DNA, 25 bp, Artificial
  Probe
atcgatccaattccactgggcgccg

SEQ ID NO: 352311 - DNA, 25 bp, Artificial
  Probe
cgacgcctccacagaggcgcgaagg

SEQ ID NO: 352312 - DNA, 25 bp, Artificial
  Probe
gcaagccacaataggacgaccttta

SEQ ID NO: 352313 - DNA, 25 bp, Artificial
  Probe
aaggcaccgacgcaaatagcaagcc

SEQ ID NO: 352314 - DNA, 25 bp, Artificial
  Probe
cgcaaatagcaagccacaataggac

SEQ ID NO: 352315 - DNA, 25 bp, Artificial
  Probe
aggcaccgacgcaaatagcaagcca

SEQ ID NO: 352316 - DNA, 25 bp, Artificial
  Probe
caagccacaataggacgacctttac

SEQ ID NO: 352317 - DNA, 25 bp, Artificial
  Probe
cctcagaaaattccacatacaccaa

SEQ ID NO: 352318 - DNA, 25 bp, Artificial
  Probe
accctctttacttgcctaccctcag

SEQ ID NO: 352319 - DNA, 25 bp, Artificial
  Probe
acttaaatcttagcattggtaaaat

SEQ ID NO: 352320 - DNA, 25 bp, Artificial
  Probe
taacttaaatcttagcattggtaaa

SEQ ID NO: 352321 - DNA, 25 bp, Artificial
  Probe
ctctttacttgcctaccctcagaaa

SEQ ID NO: 352322 - DNA, 25 bp, Artificial
  Probe
acttgcctaccctcagaaaattcca

SEQ ID NO: 352323 - DNA, 25 bp, Artificial
  Probe
attttaacttaaatcttagcattgg

SEQ ID NO: 352324 - DNA, 25 bp, Artificial
  Probe
ttaaaaggcttctccattctagtag

SEQ ID NO: 352325 - DNA, 25 bp, Artificial
  Probe
taattcttaaaaggcttctccattc

SEQ ID NO: 352326 - DNA, 25 bp, Artificial
  Probe
gcttctccattctagtagaccacaa

SEQ ID NO: 352327 - DNA, 25 bp, Artificial
  Probe
gctacttaattcttaaaaggcttct

SEQ ID NO: 352328 - DNA, 25 bp, Artificial
  Probe
ttacttgcctaccctcagaaaattc

SEQ ID NO: 352329 - DNA, 25 bp, Artificial
  Probe
cctgaaacttcaatgccaaacccca

SEQ ID NO: 352330 - DNA, 25 bp, Artificial
  Probe
aggcttctccattctagtagaccac

SEQ ID NO: 352331 - DNA, 25 bp, Artificial
  Probe
cttaaaaggcttctccattctagta

SEQ ID NO: 352332 - DNA, 25 bp, Artificial
  Probe
tcccgacacaaaatctttcctccta

SEQ ID NO: 352333 - DNA, 25 bp, Artificial
  Probe
ctttacttgcctaccctcagaaaat

SEQ ID NO: 352334 - DNA, 25 bp, Artificial
  Probe
gacacaaaatctttcctcctaacta

SEQ ID NO: 352335 - DNA, 25 bp, Artificial
  Probe
aaggcttctccattctagtagacca

SEQ ID NO: 352336 - DNA, 25 bp, Artificial
  Probe
cattctagtagaccacaaaatttta

SEQ ID NO: 352337 - DNA, 25 bp, Artificial
  Probe
acacctgaaacttcaatgccaaacc

SEQ ID NO: 352338 - DNA, 25 bp, Artificial
  Probe
cctacacctgaaacttcaatgccaa

SEQ ID NO: 352339 - DNA, 25 bp, Artificial
  Probe
ttctccattctagtagaccacaaaa

SEQ ID NO: 352340 - DNA, 25 bp, Artificial
  Probe
tgcctaccctcagaaaattccacat

SEQ ID NO: 352341 - DNA, 25 bp, Artificial
  Probe
tataaatactgaaaaatctgtcaac

SEQ ID NO: 352342 - DNA, 25 bp, Artificial
  Probe
tccattctagtagaccacaaaattt

SEQ ID NO: 352343 - DNA, 25 bp, Artificial
  Probe
aaaggcttctccattctagtagacc

SEQ ID NO: 352344 - DNA, 25 bp, Artificial
  Probe
aaaaggcttctccattctagtagac

SEQ ID NO: 352345 - DNA, 25 bp, Artificial
  Probe
taaatcttagcattggtaaaatttc

SEQ ID NO: 352346 - DNA, 25 bp, Artificial
  Probe
aatactgaaaaatctgtcaacaaac

SEQ ID NO: 352347 - DNA, 25 bp, Artificial
  Probe
atcttagcattggtaaaatttcccg

SEQ ID NO: 352348 - DNA, 25 bp, Artificial
  Probe
ttcccgacacaaaatctttcctcct

SEQ ID NO: 352349 - DNA, 25 bp, Artificial
  Probe
ttaacttaaatcttagcattggtaa

SEQ ID NO: 352350 - DNA, 25 bp, Artificial
  Probe
ttcttaaaaggcttctccattctag

SEQ ID NO: 352351 - DNA, 25 bp, Artificial
  Probe
ccctctttacttgcctaccctcaga

SEQ ID NO: 352352 - DNA, 25 bp, Artificial
  Probe
ccccctacacctgaaacttcaatgc

SEQ ID NO: 352353 - DNA, 25 bp, Artificial
  Probe
ggcttctccattctagtagaccaca

SEQ ID NO: 352354 - DNA, 25 bp, Artificial
  Probe
aattttaacttaaatcttagcattg

SEQ ID NO: 352355 - DNA, 25 bp, Artificial
  Probe
cacctgaaacttcaatgccaaaccc

SEQ ID NO: 352356 - DNA, 25 bp, Artificial
  Probe
cttaattcttaaaaggcttctccat

SEQ ID NO: 352357 - DNA, 25 bp, Artificial
  Probe
cccctacacctgaaacttcaatgcc

SEQ ID NO: 352358 - DNA, 25 bp, Artificial
  Probe
taccctcagaaaattccacatacac

SEQ ID NO: 352359 - DNA, 25 bp, Artificial
  Probe
ttaaatcttagcattggtaaaattt

SEQ ID NO: 352360 - DNA, 25 bp, Artificial
  Probe
ctacacctgaaacttcaatgccaaa

SEQ ID NO: 352361 - DNA, 25 bp, Artificial
  Probe
taaaaggcttctccattctagtaga

SEQ ID NO: 352362 - DNA, 25 bp, Artificial
  Probe
tctagtagaccacaaaattttaact

SEQ ID NO: 352363 - DNA, 25 bp, Artificial
  Probe
tgactttatcacagaagggcagcat

SEQ ID NO: 352364 - DNA, 25 bp, Artificial
  Probe
gcaatagagcccagctatttttcat

SEQ ID NO: 352365 - DNA, 25 bp, Artificial
  Probe
atgtagatgacttttggccctgtcc

SEQ ID NO: 352366 - DNA, 25 bp, Artificial
  Probe
ccagccctggcctggaatcaggaga

SEQ ID NO: 352367 - DNA, 25 bp, Artificial
  Probe
ctttatcacagaagggcagcattat

SEQ ID NO: 352368 - DNA, 25 bp, Artificial
  Probe
gacttttggccctgtccctgacttg

SEQ ID NO: 352369 - DNA, 25 bp, Artificial
  Probe
ttttcatggccctacttgagccagg

SEQ ID NO: 352370 - DNA, 25 bp, Artificial
  Probe
cccagggttcccatgtagatgactt

SEQ ID NO: 352371 - DNA, 25 bp, Artificial
  Probe
atctctgtgttctttgctcctgtag

SEQ ID NO: 352372 - DNA, 25 bp, Artificial
  Probe
aaccctctgactttatcacagaagg

SEQ ID NO: 352373 - DNA, 25 bp, Artificial
  Probe
gaaacatgcaatagagcccagctat

SEQ ID NO: 352374 - DNA, 25 bp, Artificial
  Probe
cactgctgtccctgcagatgttcca

SEQ ID NO: 352375 - DNA, 25 bp, Artificial
  Probe
cactctgggccatagtgtggcgctg

SEQ ID NO: 352376 - DNA, 25 bp, Artificial
  Probe
tctggagcttctcttctagcccctg

SEQ ID NO: 352377 - DNA, 25 bp, Artificial
  Probe
cctctgactttatcacagaagggca

SEQ ID NO: 352378 - DNA, 25 bp, Artificial
  Probe
cttttggccctgtccctgacttgct

SEQ ID NO: 352379 - DNA, 25 bp, Artificial
  Probe
aagggcagcattatctctgtgttct

SEQ ID NO: 352380 - DNA, 25 bp, Artificial
  Probe
atccattaggccagcaacgcttgta

SEQ ID NO: 352381 - DNA, 25 bp, Artificial
  Probe
agctatttttcatggccctacttga

SEQ ID NO: 352382 - DNA, 25 bp, Artificial
  Probe
tggccctacttgagccaggggtgaa

SEQ ID NO: 352383 - DNA, 25 bp, Artificial
  Probe
cagccctggcctggaatcaggagac

SEQ ID NO: 352384 - DNA, 25 bp, Artificial
  Probe
gcattatctctgtgttctttgctcc

SEQ ID NO: 352385 - DNA, 25 bp, Artificial
  Probe
ggccagcaacgcttgtagtgctcac

SEQ ID NO: 352386 - DNA, 25 bp, Artificial
  Probe
tggaaaccctctgactttatcacag

SEQ ID NO: 352387 - DNA, 25 bp, Artificial
  Probe
attaggccagcaacgcttgtagtgc

SEQ ID NO: 352388 - DNA, 25 bp, Artificial
  Probe
gcccagctatttttcatggccctac

SEQ ID NO: 352389 - DNA, 25 bp, Artificial
  Probe
tagtgctcactctgggccatagtgt

SEQ ID NO: 352390 - DNA, 25 bp, Artificial
  Probe
tggagcttctcttctagcccctgtc

SEQ ID NO: 352391 - DNA, 25 bp, Artificial
  Probe
gattggaaaccctctgactttatca

SEQ ID NO: 352392 - DNA, 25 bp, Artificial
  Probe
atcctatccattaggccagcaacgc

SEQ ID NO: 352393 - DNA, 25 bp, Artificial
  Probe
cccatgtagatgacttttggccctg

SEQ ID NO: 352394 - DNA, 25 bp, Artificial
  Probe
tgtccctgacttgctttcccaacag

SEQ ID NO: 352395 - DNA, 25 bp, Artificial
  Probe
tgtgttctttgctcctgtagaaagt

SEQ ID NO: 352396 - DNA, 25 bp, Artificial
  Probe
tatcctatccattaggccagcaacg

SEQ ID NO: 352397 - DNA, 25 bp, Artificial
  Probe
ccggtacccaattcgcccgatagtg

SEQ ID NO: 352398 - DNA, 25 bp, Artificial
  Probe
tgctcctgtagaaagttttccagag

SEQ ID NO: 352399 - DNA, 25 bp, Artificial
  Probe
ttaatgcctctgaaacatgcaatag

SEQ ID NO: 352400 - DNA, 25 bp, Artificial
  Probe
gggcagcattatctctgtgttcttt

SEQ ID NO: 352401 - DNA, 25 bp, Artificial
  Probe
aacatgcaatagagcccagctattt

SEQ ID NO: 352402 - DNA, 25 bp, Artificial
  Probe
ggaaaccctctgactttatcacaga

SEQ ID NO: 352403 - DNA, 25 bp, Artificial
  Probe
ctctgaaacatgcaatagagcccag

SEQ ID NO: 352404 - DNA, 25 bp, Artificial
  Probe
gctgtccctgcagatgttccactct

SEQ ID NO: 352405 - DNA, 25 bp, Artificial
  Probe
tcactctgggccatagtgtggcgct

SEQ ID NO: 352406 - DNA, 25 bp, Artificial
  Probe
atcctctggagcttctcttctagcc

SEQ ID NO: 352407 - DNA, 25 bp, Artificial
  Probe
cagctatttttcatggccctacttg

SEQ ID NO: 352408 - DNA, 25 bp, Artificial
  Probe
gtagatgacttttggccctgtccct

SEQ ID NO: 352409 - DNA, 25 bp, Artificial
  Probe
cacccatggagccagcatctcagaa

SEQ ID NO: 352410 - DNA, 25 bp, Artificial
  Probe
agagtcacccatggagccagcatct

SEQ ID NO: 352411 - DNA, 25 bp, Artificial
  Probe
acaccatatcaacaccacctatctt

SEQ ID NO: 352412 - DNA, 25 bp, Artificial
  Probe
acttaaacacctgggaggtgcattc

SEQ ID NO: 352413 - DNA, 25 bp, Artificial
  Probe
ccagcatctcagaaaggcacaatgc

SEQ ID NO: 352414 - DNA, 25 bp, Artificial
  Probe
ccacaccatatcaacaccacctatc

SEQ ID NO: 352415 - DNA, 25 bp, Artificial
  Probe
ccacttaaacacctgggaggtgcat

SEQ ID NO: 352416 - DNA, 25 bp, Artificial
  Probe
gccagcatctcagaaaggcacaatg

SEQ ID NO: 352417 - DNA, 25 bp, Artificial
  Probe
agtcacccatggagccagcatctca

SEQ ID NO: 352418 - DNA, 25 bp, Artificial
  Probe
gagtcacccatggagccagcatctc

SEQ ID NO: 352419 - DNA, 25 bp, Artificial
  Probe
aaaggcacaatgcagccccctcata

SEQ ID NO: 352420 - DNA, 25 bp, Artificial
  Probe
tcttcccacttaaacacctgggagg

SEQ ID NO: 352421 - DNA, 25 bp, Artificial
  Probe
agcatctcagaaaggcacaatgcag

SEQ ID NO: 352422 - DNA, 25 bp, Artificial
  Probe
ccccacaccatatcaacaccaccta

SEQ ID NO: 352423 - DNA, 25 bp, Artificial
  Probe
ccatggagccagcatctcagaaagg

SEQ ID NO: 352424 - DNA, 25 bp, Artificial
  Probe
caccatatcaacaccacctatcttc

SEQ ID NO: 352425 - DNA, 25 bp, Artificial
  Probe
tcacccatggagccagcatctcaga

SEQ ID NO: 352426 - DNA, 25 bp, Artificial
  Probe
gcatctcagaaaggcacaatgcagc

SEQ ID NO: 352427 - DNA, 25 bp, Artificial
  Probe
catggagccagcatctcagaaaggc

SEQ ID NO: 352428 - DNA, 25 bp, Artificial
  Probe
agccagcatctcagaaaggcacaat

SEQ ID NO: 352429 - DNA, 25 bp, Artificial
  Probe
ggagccagcatctcagaaaggcaca

SEQ ID NO: 352430 - DNA, 25 bp, Artificial
  Probe
aaacacctgggaggtgcattctccc

SEQ ID NO: 352431 - DNA, 25 bp, Artificial
  Probe
ggaggtgcattctcccccaccccac

SEQ ID NO: 352432 - DNA, 25 bp, Artificial
  Probe
acctatcttcccacttaaacacctg

SEQ ID NO: 352433 - DNA, 25 bp, Artificial
  Probe
tggagccagcatctcagaaaggcac

SEQ ID NO: 352434 - DNA, 25 bp, Artificial
  Probe
cccacaccatatcaacaccacctat

SEQ ID NO: 352435 - DNA, 25 bp, Artificial
  Probe
acccatggagccagcatctcagaaa

SEQ ID NO: 352436 - DNA, 25 bp, Artificial
  Probe
ccatatcaacaccacctatcttccc

SEQ ID NO: 352437 - DNA, 25 bp, Artificial
  Probe
cagcatctcagaaaggcacaatgca

SEQ ID NO: 352438 - DNA, 25 bp, Artificial
  Probe
ctatcttcccacttaaacacctggg

SEQ ID NO: 352439 - DNA, 25 bp, Artificial
  Probe
tctcagaaaggcacaatgcagcccc

SEQ ID NO: 352440 - DNA, 25 bp, Artificial
  Probe
atctcagaaaggcacaatgcagccc

SEQ ID NO: 352441 - DNA, 25 bp, Artificial
  Probe
ttcccacttaaacacctgggaggtg

SEQ ID NO: 352442 - DNA, 25 bp, Artificial
  Probe
ggcacaatgcagccccctcatagcc

SEQ ID NO: 352443 - DNA, 25 bp, Artificial
  Probe
ctcagaaaggcacaatgcagccccc

SEQ ID NO: 352444 - DNA, 25 bp, Artificial
  Probe
cccatggagccagcatctcagaaag

SEQ ID NO: 352445 - DNA, 25 bp, Artificial
  Probe
atcttcccacttaaacacctgggag

SEQ ID NO: 352446 - DNA, 25 bp, Artificial
  Probe
acctgggaggtgcattctcccccac

SEQ ID NO: 352447 - DNA, 25 bp, Artificial
  Probe
aacacctgggaggtgcattctcccc

SEQ ID NO: 352448 - DNA, 25 bp, Artificial
  Probe
gagccagcatctcagaaaggcacaa

SEQ ID NO: 352449 - DNA, 25 bp, Artificial
  Probe
cccacttaaacacctgggaggtgca

SEQ ID NO: 352450 - DNA, 25 bp, Artificial
  Probe
atggagccagcatctcagaaaggca

SEQ ID NO: 352451 - DNA, 25 bp, Artificial
  Probe
aggcacaatgcagccccctcatagc

SEQ ID NO: 352452 - DNA, 25 bp, Artificial
  Probe
taaacacctgggaggtgcattctcc

SEQ ID NO: 352453 - DNA, 25 bp, Artificial
  Probe
gaaaggcacaatgcagccccctcat

SEQ ID NO: 352454 - DNA, 25 bp, Artificial
  Probe
gaggtgcattctcccccaccccacg

SEQ ID NO: 352455 - DNA, 25 bp, Artificial
  Probe
tcaggcaggcacttaaaagatattt

SEQ ID NO: 352456 - DNA, 25 bp, Artificial
  Probe
cacggctctgaggttcaggcaggca

SEQ ID NO: 352457 - DNA, 25 bp, Artificial
  Probe
gttcaggcaggcacttaaaagatat

SEQ ID NO: 352458 - DNA, 25 bp, Artificial
  Probe
ttctctcacggctctgaggttcagg

SEQ ID NO: 352459 - DNA, 25 bp, Artificial
  Probe
tgacctacagctcacaacaactacc

SEQ ID NO: 352460 - DNA, 25 bp, Artificial
  Probe
agatatttctgacctacagctcaca

SEQ ID NO: 352461 - DNA, 25 bp, Artificial
  Probe
agtctttgtggtcagtgggaaagag

SEQ ID NO: 352462 - DNA, 25 bp, Artificial
  Probe
tttctctcacggctctgaggttcag

SEQ ID NO: 352463 - DNA, 25 bp, Artificial
  Probe
tttgtggtcagtgggaaagagacca

SEQ ID NO: 352464 - DNA, 25 bp, Artificial
  Probe
gaggttcaggcaggcacttaaaaga

SEQ ID NO: 352465 - DNA, 25 bp, Artificial
  Probe
tatttctgacctacagctcacaaca

SEQ ID NO: 352466 - DNA, 25 bp, Artificial
  Probe
ggctctgaggttcaggcaggcactt

SEQ ID NO: 352467 - DNA, 25 bp, Artificial
  Probe
tctttgtggtcagtgggaaagagac

SEQ ID NO: 352468 - DNA, 25 bp, Artificial
  Probe
cggctctgaggttcaggcaggcact

SEQ ID NO: 352469 - DNA, 25 bp, Artificial
  Probe
ggggtatttctctcacggctctgag

SEQ ID NO: 352470 - DNA, 25 bp, Artificial
  Probe
tttctgacctacagctcacaacaac

SEQ ID NO: 352471 - DNA, 25 bp, Artificial
  Probe
ctgaggttcaggcaggcacttaaaa

SEQ ID NO: 352472 - DNA, 25 bp, Artificial
  Probe
ggttcaggcaggcacttaaaagata

SEQ ID NO: 352473 - DNA, 25 bp, Artificial
  Probe
tcacggctctgaggttcaggcaggc

SEQ ID NO: 352474 - DNA, 25 bp, Artificial
  Probe
tctgaggttcaggcaggcacttaaa

SEQ ID NO: 352475 - DNA, 25 bp, Artificial
  Probe
gggggtatttctctcacggctctga

SEQ ID NO: 352476 - DNA, 25 bp, Artificial
  Probe
tctgacctacagctcacaacaacta

SEQ ID NO: 352477 - DNA, 25 bp, Artificial
  Probe
ttgtggtcagtgggaaagagaccaa

SEQ ID NO: 352478 - DNA, 25 bp, Artificial
  Probe
acggctctgaggttcaggcaggcac

SEQ ID NO: 352479 - DNA, 25 bp, Artificial
  Probe
tgaggttcaggcaggcacttaaaag

SEQ ID NO: 352480 - DNA, 25 bp, Artificial
  Probe
gtatttctctcacggctctgaggtt

SEQ ID NO: 352481 - DNA, 25 bp, Artificial
  Probe
caggccagtctgggggtgaggaaaa

SEQ ID NO: 352482 - DNA, 25 bp, Artificial
  Probe
ctttgtggtcagtgggaaagagacc

SEQ ID NO: 352483 - DNA, 25 bp, Artificial
  Probe
ctctgaggttcaggcaggcacttaa

SEQ ID NO: 352484 - DNA, 25 bp, Artificial
  Probe
ggtatttctctcacggctctgaggt

SEQ ID NO: 352485 - DNA, 25 bp, Artificial
  Probe
gtctttgtggtcagtgggaaagaga

SEQ ID NO: 352486 - DNA, 25 bp, Artificial
  Probe
aagggggtatttctctcacggctct

SEQ ID NO: 352487 - DNA, 25 bp, Artificial
  Probe
aggttcaggcaggcacttaaaagat

SEQ ID NO: 352488 - DNA, 25 bp, Artificial
  Probe
atttctgacctacagctcacaacaa

SEQ ID NO: 352489 - DNA, 25 bp, Artificial
  Probe
ttcaggcaggcacttaaaagatatt

SEQ ID NO: 352490 - DNA, 25 bp, Artificial
  Probe
gggtatttctctcacggctctgagg

SEQ ID NO: 352491 - DNA, 25 bp, Artificial
  Probe
ggccagtctgggggtgaggaaaagg

SEQ ID NO: 352492 - DNA, 25 bp, Artificial
  Probe
gatatttctgacctacagctcacaa

SEQ ID NO: 352493 - DNA, 25 bp, Artificial
  Probe
gccagtctgggggtgaggaaaaggg

SEQ ID NO: 352494 - DNA, 25 bp, Artificial
  Probe
aaagatatttctgacctacagctca

SEQ ID NO: 352495 - DNA, 25 bp, Artificial
  Probe
tctctcacggctctgaggttcaggc

SEQ ID NO: 352496 - DNA, 25 bp, Artificial
  Probe
gctctgaggttcaggcaggcactta

SEQ ID NO: 352497 - DNA, 25 bp, Artificial
  Probe
tatttctctcacggctctgaggttc

SEQ ID NO: 352498 - DNA, 25 bp, Artificial
  Probe
ctcacggctctgaggttcaggcagg

SEQ ID NO: 352499 - DNA, 25 bp, Artificial
  Probe
aaaagatatttctgacctacagctc

SEQ ID NO: 352500 - DNA, 25 bp, Artificial
  Probe
agggggtatttctctcacggctctg

SEQ ID NO: 352501 - DNA, 25 bp, Artificial
  Probe
gagctcatctgcagggcttccaggg

SEQ ID NO: 352502 - DNA, 25 bp, Artificial
  Probe
atcaacactttgaaccaggtcacag

SEQ ID NO: 352503 - DNA, 25 bp, Artificial
  Probe
tccgtgcttgaagaacaagtctggg

SEQ ID NO: 352504 - DNA, 25 bp, Artificial
  Probe
actgaggaaactctgtagaggtgtc

SEQ ID NO: 352505 - DNA, 25 bp, Artificial
  Probe
cggtatccacggatgtaacgacagc

SEQ ID NO: 352506 - DNA, 25 bp, Artificial
  Probe
cactgactgtagagagctattgatg

SEQ ID NO: 352507 - DNA, 25 bp, Artificial
  Probe
ccagacgtccttacggcaacaagga

SEQ ID NO: 352508 - DNA, 25 bp, Artificial
  Probe
cgcaaattttacttcccacgtgatg

SEQ ID NO: 352509 - DNA, 25 bp, Artificial
  Probe
ttccagggtgcttcgcaaattttac

SEQ ID NO: 352510 - DNA, 25 bp, Artificial
  Probe
ccctctgagagagatcatcaacact

SEQ ID NO: 352511 - DNA, 25 bp, Artificial
  Probe
ttacttcccacgtgatgtacctccg

SEQ ID NO: 352512 - DNA, 25 bp, Artificial
  Probe
tttctcatatgtaccgggaacggta

SEQ ID NO: 352513 - DNA, 25 bp, Artificial
  Probe
ggaacaccacggagaacgagctcat

SEQ ID NO: 352514 - DNA, 25 bp, Artificial
  Probe
gggttctcggtgaactgaggaaact

SEQ ID NO: 352515 - DNA, 25 bp, Artificial
  Probe
gggactccatgcaccgagatgtttg

SEQ ID NO: 352516 - DNA, 25 bp, Artificial
  Probe
taacgacagccctctgagagagatc

SEQ ID NO: 352517 - DNA, 25 bp, Artificial
  Probe
gctgtcaccctgttctgctttctca

SEQ ID NO: 352518 - DNA, 25 bp, Artificial
  Probe
ggatgtaacgacagccctctgagag

SEQ ID NO: 352519 - DNA, 25 bp, Artificial
  Probe
tatgtaccgggaacggtatccacgg

SEQ ID NO: 352520 - DNA, 25 bp, Artificial
  Probe
gaaccaggtcacagaaaaagggact

SEQ ID NO: 352521 - DNA, 25 bp, Artificial
  Probe
cttgaagaacaagtctggggttctc

SEQ ID NO: 352522 - DNA, 25 bp, Artificial
  Probe
ttctcggtgaactgaggaaactctg

SEQ ID NO: 352523 - DNA, 25 bp, Artificial
  Probe
taccgggaacggtatccacggatgt

SEQ ID NO: 352524 - DNA, 25 bp, Artificial
  Probe
ctgtagagagctattgatgggtctc

SEQ ID NO: 352525 - DNA, 25 bp, Artificial
  Probe
aggaaactctgtagaggtgtcagcg

SEQ ID NO: 352526 - DNA, 25 bp, Artificial
  Probe
ttgaagaacaagtctggggttctcg

SEQ ID NO: 352527 - DNA, 25 bp, Artificial
  Probe
acgtgatgtacctccgtgcttgaag

SEQ ID NO: 352528 - DNA, 25 bp, Artificial
  Probe
agagagatcatcaacactttgaacc

SEQ ID NO: 352529 - DNA, 25 bp, Artificial
  Probe
aagtctggggttctcggtgaactga

SEQ ID NO: 352530 - DNA, 25 bp, Artificial
  Probe
gcaaattttacttcccacgtgatgt

SEQ ID NO: 352531 - DNA, 25 bp, Artificial
  Probe
gatcatcaacactttgaaccaggtc

SEQ ID NO: 352532 - DNA, 25 bp, Artificial
  Probe
gtccttacggcaacaaggaacacca

SEQ ID NO: 352533 - DNA, 25 bp, Artificial
  Probe
acaagtctggggttctcggtgaact

SEQ ID NO: 352534 - DNA, 25 bp, Artificial
  Probe
aggtgtcagcggtctgaactcactg

SEQ ID NO: 352535 - DNA, 25 bp, Artificial
  Probe
ttgctgtcaccctgttctgctttct

SEQ ID NO: 352536 - DNA, 25 bp, Artificial
  Probe
gggcttccagggtgcttcgcaaatt

SEQ ID NO: 352537 - DNA, 25 bp, Artificial
  Probe
ggaacggtatccacggatgtaacga

SEQ ID NO: 352538 - DNA, 25 bp, Artificial
  Probe
tgtagaggtgtcagcggtctgaact

SEQ ID NO: 352539 - DNA, 25 bp, Artificial
  Probe
ggtgcttcgcaaattttacttccca

SEQ ID NO: 352540 - DNA, 25 bp, Artificial
  Probe
ctgttctgctttctcatatgtaccg

SEQ ID NO: 352541 - DNA, 25 bp, Artificial
  Probe
catctgcagggcttccagggtgctt

SEQ ID NO: 352542 - DNA, 25 bp, Artificial
  Probe
tgcagggcttccagggtgcttcgca

SEQ ID NO: 352543 - DNA, 25 bp, Artificial
  Probe
ctccatgcaccgagatgtttgtacc

SEQ ID NO: 352544 - DNA, 25 bp, Artificial
  Probe
aaagggactccatgcaccgagatgt

SEQ ID NO: 352545 - DNA, 25 bp, Artificial
  Probe
atatgtaccgggaacggtatccacg

SEQ ID NO: 352546 - DNA, 25 bp, Artificial
  Probe
acaaggaacaccacggagaacgagc

SEQ ID NO: 352547 - DNA, 25 bp, Artificial
  Probe
tcatggagaaacttcggggcctgga

SEQ ID NO: 352548 - DNA, 25 bp, Artificial
  Probe
aacttcggggcctggaatcacagcc

SEQ ID NO: 352549 - DNA, 25 bp, Artificial
  Probe
ttaaggctcccgagaacacccattg

SEQ ID NO: 352550 - DNA, 25 bp, Artificial
  Probe
cctgagactgggacaccatttccat

SEQ ID NO: 352551 - DNA, 25 bp, Artificial
  Probe
gaattgaagccctgtgggccacact

SEQ ID NO: 352552 - DNA, 25 bp, Artificial
  Probe
tgtctgttaggcatcatcctgagac

SEQ ID NO: 352553 - DNA, 25 bp, Artificial
  Probe
aggaatggccacagcggcaaagagc

SEQ ID NO: 352554 - DNA, 25 bp, Artificial
  Probe
attgaagccctgtgggccacactca

SEQ ID NO: 352555 - DNA, 25 bp, Artificial
  Probe
cccagtccccagtattctgtgagca

SEQ ID NO: 352556 - DNA, 25 bp, Artificial
  Probe
acatgaacagggacagctacacatt

SEQ ID NO: 352557 - DNA, 25 bp, Artificial
  Probe
atctacatgaacagggacagctaca

SEQ ID NO: 352558 - DNA, 25 bp, Artificial
  Probe
gaatattaaggctcccgagaacacc

SEQ ID NO: 352559 - DNA, 25 bp, Artificial
  Probe
aaatgtcccagcagacttcccaatg

SEQ ID NO: 352560 - DNA, 25 bp, Artificial
  Probe
gaaacaatcaaatgtcccagcagac

SEQ ID NO: 352561 - DNA, 25 bp, Artificial
  Probe
aatgtgtctgttaggcatcatcctg

SEQ ID NO: 352562 - DNA, 25 bp, Artificial
  Probe
tgaggttacagtaccgagaactgag

SEQ ID NO: 352563 - DNA, 25 bp, Artificial
  Probe
tcacttggtaaaggtactctatgag

SEQ ID NO: 352564 - DNA, 25 bp, Artificial
  Probe
agcagacttcccaatgtgtctgtta

SEQ ID NO: 352565 - DNA, 25 bp, Artificial
  Probe
ggacaccatttccattcaatgagca

SEQ ID NO: 352566 - DNA, 25 bp, Artificial
  Probe
tgagcagtggccatgaggtcatcag

SEQ ID NO: 352567 - DNA, 25 bp, Artificial
  Probe
tcgagacttgcttgaatattaaggc

SEQ ID NO: 352568 - DNA, 25 bp, Artificial
  Probe
gccatgaggtcatcagagaattgaa

SEQ ID NO: 352569 - DNA, 25 bp, Artificial
  Probe
tcccagcagacttcccaatgtgtct

SEQ ID NO: 352570 - DNA, 25 bp, Artificial
  Probe
ttggggcacctgctgttcatggaga

SEQ ID NO: 352571 - DNA, 25 bp, Artificial
  Probe
tgtgggccacactcaggaccccagt

SEQ ID NO: 352572 - DNA, 25 bp, Artificial
  Probe
cccattgagcagtggccatgaggtc

SEQ ID NO: 352573 - DNA, 25 bp, Artificial
  Probe
tctgtgagcactgaagtaccctgcc

SEQ ID NO: 352574 - DNA, 25 bp, Artificial
  Probe
gacttgcttgaatattaaggctccc

SEQ ID NO: 352575 - DNA, 25 bp, Artificial
  Probe
gctcccgagaacacccattgagcag

SEQ ID NO: 352576 - DNA, 25 bp, Artificial
  Probe
gccctgatggccatgatatgagaga

SEQ ID NO: 352577 - DNA, 25 bp, Artificial
  Probe
aaggtactctatgaggttacagtac

SEQ ID NO: 352578 - DNA, 25 bp, Artificial
  Probe
cctgactccttagtgattctggaat

SEQ ID NO: 352579 - DNA, 25 bp, Artificial
  Probe
gcctggaatcacagccagtgatcta

SEQ ID NO: 352580 - DNA, 25 bp, Artificial
  Probe
tcatcctgagactgggacaccattt

SEQ ID NO: 352581 - DNA, 25 bp, Artificial
  Probe
ggccacagcggcaaagagcctgact

SEQ ID NO: 352582 - DNA, 25 bp, Artificial
  Probe
gaattagacagtttctcacttggta

SEQ ID NO: 352583 - DNA, 25 bp, Artificial
  Probe
ggaatcacagccagtgatctacatg

SEQ ID NO: 352584 - DNA, 25 bp, Artificial
  Probe
cctgatggccatgatatgagagaag

SEQ ID NO: 352585 - DNA, 25 bp, Artificial
  Probe
acagcggcaaagagcctgactcctt

SEQ ID NO: 352586 - DNA, 25 bp, Artificial
  Probe
caaagagcctgactccttagtgatt

SEQ ID NO: 352587 - DNA, 25 bp, Artificial
  Probe
cggcaaagagcctgactccttagtg

SEQ ID NO: 352588 - DNA, 25 bp, Artificial
  Probe
gttacagtaccgagaactgagttgt

SEQ ID NO: 352589 - DNA, 25 bp, Artificial
  Probe
cagtaccgagaactgagttgtgaga

SEQ ID NO: 352590 - DNA, 25 bp, Artificial
  Probe
ggacagctacacattcagtcgagac

SEQ ID NO: 352591 - DNA, 25 bp, Artificial
  Probe
ctccttagtgattctggaataattt

SEQ ID NO: 352592 - DNA, 25 bp, Artificial
  Probe
tttccattcaatgagcactgactag

SEQ ID NO: 352593 - DNA, 25 bp, Artificial
  Probe
aaagtagccatgtcgaaggagcagt

SEQ ID NO: 352594 - DNA, 25 bp, Artificial
  Probe
acttgcaacttatccccaacaggtg

SEQ ID NO: 352595 - DNA, 25 bp, Artificial
  Probe
ccacaatgttggtcttagtaaatgt

SEQ ID NO: 352596 - DNA, 25 bp, Artificial
  Probe
aatccatagagctgcctatggacaa

SEQ ID NO: 352597 - DNA, 25 bp, Artificial
  Probe
ggaaagtatccagacgaggtggtca

SEQ ID NO: 352598 - DNA, 25 bp, Artificial
  Probe
ctgtttcattacctttaaggaagag

SEQ ID NO: 352599 - DNA, 25 bp, Artificial
  Probe
cattgatcctaaaagggccaaagcc

SEQ ID NO: 352600 - DNA, 25 bp, Artificial
  Probe
aataccacaatgttggtcttagtaa

SEQ ID NO: 352601 - DNA, 25 bp, Artificial
  Probe
tgaagattcatttgaagtggctcct

SEQ ID NO: 352602 - DNA, 25 bp, Artificial
  Probe
acaacaagaccaataagaggcgtgg

SEQ ID NO: 352603 - DNA, 25 bp, Artificial
  Probe
tgccacctgctaatagcagttcaaa

SEQ ID NO: 352604 - DNA, 25 bp, Artificial
  Probe
tgggttctgtttcattacctttaag

SEQ ID NO: 352605 - DNA, 25 bp, Artificial
  Probe
gaagaaataccacaatgttggtctt

SEQ ID NO: 352606 - DNA, 25 bp, Artificial
  Probe
attcatttgaagtggctcctgccac

SEQ ID NO: 352607 - DNA, 25 bp, Artificial
  Probe
gattcatttgaagtggctcctgcca

SEQ ID NO: 352608 - DNA, 25 bp, Artificial
  Probe
ttgaatccatagagctgcctatgga

SEQ ID NO: 352609 - DNA, 25 bp, Artificial
  Probe
gaaataccacaatgttggtcttagt

SEQ ID NO: 352610 - DNA, 25 bp, Artificial
  Probe
ccagacgaggtggtcatcaaaatag

SEQ ID NO: 352611 - DNA, 25 bp, Artificial
  Probe
tttttctatcaagttcccgaatgga

SEQ ID NO: 352612 - DNA, 25 bp, Artificial
  Probe
ccatgtcgaaggagcagtatcagca

SEQ ID NO: 352613 - DNA, 25 bp, Artificial
  Probe
agattcatttgaagtggctcctgcc

SEQ ID NO: 352614 - DNA, 25 bp, Artificial
  Probe
attgatcctaaaagggccaaagcca

SEQ ID NO: 352615 - DNA, 25 bp, Artificial
  Probe
ttctgtttcattacctttaaggaag

SEQ ID NO: 352616 - DNA, 25 bp, Artificial
  Probe
ccaacaggtggtgaagcagtatttt

SEQ ID NO: 352617 - DNA, 25 bp, Artificial
  Probe
agcagtatcagcagcagcagcagtg

SEQ ID NO: 352618 - DNA, 25 bp, Artificial
  Probe
tgaagtggctcctgccacctgctaa

SEQ ID NO: 352619 - DNA, 25 bp, Artificial
  Probe
tatcagcagcagcagcagtggggat

SEQ ID NO: 352620 - DNA, 25 bp, Artificial
  Probe
catagagctgcctatggacaacaag

SEQ ID NO: 352621 - DNA, 25 bp, Artificial
  Probe
aagtatccagacgaggtggtcatca

SEQ ID NO: 352622 - DNA, 25 bp, Artificial
  Probe
gcgtgggttctgtttcattaccttt

SEQ ID NO: 352623 - DNA, 25 bp, Artificial
  Probe
tttctatcaagttcccgaatggaag

SEQ ID NO: 352624 - DNA, 25 bp, Artificial
  Probe
cagtatcagcagcagcagcagtggg

SEQ ID NO: 352625 - DNA, 25 bp, Artificial
  Probe
tcctgccacctgctaatagcagttc

SEQ ID NO: 352626 - DNA, 25 bp, Artificial
  Probe
gcctatggacaacaagaccaataag

SEQ ID NO: 352627 - DNA, 25 bp, Artificial
  Probe
cagcagcagcagcagtggggatcta

SEQ ID NO: 352628 - DNA, 25 bp, Artificial
  Probe
caacttatccccaacaggtggtgaa

SEQ ID NO: 352629 - DNA, 25 bp, Artificial
  Probe
gtcattgatcctaaaagggccaaag

SEQ ID NO: 352630 - DNA, 25 bp, Artificial
  Probe
atcaagttcccgaatggaagtatga

SEQ ID NO: 352631 - DNA, 25 bp, Artificial
  Probe
atttgaagtggctcctgccacctgc

SEQ ID NO: 352632 - DNA, 25 bp, Artificial
  Probe
gtatccagacgaggtggtcatcaaa

SEQ ID NO: 352633 - DNA, 25 bp, Artificial
  Probe
gccacctgctaatagcagttcaaac

SEQ ID NO: 352634 - DNA, 25 bp, Artificial
  Probe
agaagaaataccacaatgttggtct

SEQ ID NO: 352635 - DNA, 25 bp, Artificial
  Probe
ctcctgccacctgctaatagcagtt

SEQ ID NO: 352636 - DNA, 25 bp, Artificial
  Probe
aggagcagtatcagcagcagcagca

SEQ ID NO: 352637 - DNA, 25 bp, Artificial
  Probe
gcagtattttccaatttgaagattc

SEQ ID NO: 352638 - DNA, 25 bp, Artificial
  Probe
aggttgaatccatagagctgcctat

SEQ ID NO: 352639 - DNA, 25 bp, Artificial
  Probe
ttctatacaacacaaaaaaacttcg

SEQ ID NO: 352640 - DNA, 25 bp, Artificial
  Probe
gtccccattgcgcctatagtgagcg

SEQ ID NO: 352641 - DNA, 25 bp, Artificial
  Probe
tacacgtcggactgggaaaccctgg

SEQ ID NO: 352642 - DNA, 25 bp, Artificial
  Probe
tgagcggatacaatcactggccgcc

SEQ ID NO: 352643 - DNA, 25 bp, Artificial
  Probe
tggccgccgtttacacgtcggactg

SEQ ID NO: 352644 - DNA, 25 bp, Artificial
  Probe
atcactggccgccgtttacacgtcg

SEQ ID NO: 352645 - DNA, 25 bp, Artificial
  Probe
cccattgcgcctatagtgagcggat

SEQ ID NO: 352646 - DNA, 25 bp, Artificial
  Probe
cggtccccattgcgcctatagtgag

SEQ ID NO: 352647 - DNA, 25 bp, Artificial
  Probe
tattatttggatgtggagatgggcc

SEQ ID NO: 352648 - DNA, 25 bp, Artificial
  Probe
tccccattgcgcctatagtgagcgg

SEQ ID NO: 352649 - DNA, 25 bp, Artificial
  Probe
tacaatcactggccgccgtttacac

SEQ ID NO: 352650 - DNA, 25 bp, Artificial
  Probe
ttgcgcctatagtgagcggatacaa

SEQ ID NO: 352651 - DNA, 25 bp, Artificial
  Probe
ttacacgtcggactgggaaaccctg

SEQ ID NO: 352652 - DNA, 25 bp, Artificial
  Probe
attgcgcctatagtgagcggataca

SEQ ID NO: 352653 - DNA, 25 bp, Artificial
  Probe
tgcgcctatagtgagcggatacaat

SEQ ID NO: 352654 - DNA, 25 bp, Artificial
  Probe
tctatacaacacaaaaaaacttcga

SEQ ID NO: 352655 - DNA, 25 bp, Artificial
  Probe
attatttggatgtggagatgggccg

SEQ ID NO: 352656 - DNA, 25 bp, Artificial
  Probe
cattgcgcctatagtgagcggatac

SEQ ID NO: 352657 - DNA, 25 bp, Artificial
  Probe
ctggccgccgtttacacgtcggact

SEQ ID NO: 352658 - DNA, 25 bp, Artificial
  Probe
ccattgcgcctatagtgagcggata

SEQ ID NO: 352659 - DNA, 25 bp, Artificial
  Probe
gcggatacaatcactggccgccgtt

SEQ ID NO: 352660 - DNA, 25 bp, Artificial
  Probe
cactggccgccgtttacacgtcgga

SEQ ID NO: 352661 - DNA, 25 bp, Artificial
  Probe
ctatacaacacaaaaaaacttcgag

SEQ ID NO: 352662 - DNA, 25 bp, Artificial
  Probe
ggcggcgccggtccccattgcgcct

SEQ ID NO: 352663 - DNA, 25 bp, Artificial
  Probe
tcactggccgccgtttacacgtcgg

SEQ ID NO: 352664 - DNA, 25 bp, Artificial
  Probe
ccccattgcgcctatagtgagcgga

SEQ ID NO: 352665 - DNA, 25 bp, Artificial
  Probe
ggtccccattgcgcctatagtgagc

SEQ ID NO: 352666 - DNA, 25 bp, Artificial
  Probe
gccggtccccattgcgcctatagtg

SEQ ID NO: 352667 - DNA, 25 bp, Artificial
  Probe
gcgcctatagtgagcggatacaatc

SEQ ID NO: 352668 - DNA, 25 bp, Artificial
  Probe
cggatacaatcactggccgccgttt

SEQ ID NO: 352669 - DNA, 25 bp, Artificial
  Probe
caatcactggccgccgtttacacgt

SEQ ID NO: 352670 - DNA, 25 bp, Artificial
  Probe
gccgccgtttacacgtcggactggg

SEQ ID NO: 352671 - DNA, 25 bp, Artificial
  Probe
acttcgaggcggcgccggtccccat

SEQ ID NO: 352672 - DNA, 25 bp, Artificial
  Probe
ggatacaatcactggccgccgttta

SEQ ID NO: 352673 - DNA, 25 bp, Artificial
  Probe
cttcgaggcggcgccggtccccatt

SEQ ID NO: 352674 - DNA, 25 bp, Artificial
  Probe
ggccgccgtttacacgtcggactgg

SEQ ID NO: 352675 - DNA, 25 bp, Artificial
  Probe
actattatttggatgtggagatggg

SEQ ID NO: 352676 - DNA, 25 bp, Artificial
  Probe
ccggtccccattgcgcctatagtga

SEQ ID NO: 352677 - DNA, 25 bp, Artificial
  Probe
tacaacacaaaaaaacttcgaggcg

SEQ ID NO: 352678 - DNA, 25 bp, Artificial
  Probe
cctatagtgagcggatacaatcact

SEQ ID NO: 352679 - DNA, 25 bp, Artificial
  Probe
cacgtcggactgggaaaccctggcg

SEQ ID NO: 352680 - DNA, 25 bp, Artificial
  Probe
cgcctatagtgagcggatacaatca

SEQ ID NO: 352681 - DNA, 25 bp, Artificial
  Probe
tatacaacacaaaaaaacttcgagg

SEQ ID NO: 352682 - DNA, 25 bp, Artificial
  Probe
agcggatacaatcactggccgccgt

SEQ ID NO: 352683 - DNA, 25 bp, Artificial
  Probe
gatacaatcactggccgccgtttac

SEQ ID NO: 352684 - DNA, 25 bp, Artificial
  Probe
acaatcactggccgccgtttacacg

SEQ ID NO: 352685 - DNA, 25 bp, Artificial
  Probe
aggaagcagctacactcaggtccct

SEQ ID NO: 352686 - DNA, 25 bp, Artificial
  Probe
ctatggaagatttcagcttgccgtt

SEQ ID NO: 352687 - DNA, 25 bp, Artificial
  Probe
tcaatgggggccagtggacctctca

SEQ ID NO: 352688 - DNA, 25 bp, Artificial
  Probe
actgttgctcgctcctcgcagcatt

SEQ ID NO: 352689 - DNA, 25 bp, Artificial
  Probe
ctgtcacaggagaccacagcagggg

SEQ ID NO: 352690 - DNA, 25 bp, Artificial
  Probe
gcctgggtcttgtaatatctctagg

SEQ ID NO: 352691 - DNA, 25 bp, Artificial
  Probe
gaagatttcagcttgccgttttggt

SEQ ID NO: 352692 - DNA, 25 bp, Artificial
  Probe
gtaatatctctaggaatggtgacac

SEQ ID NO: 352693 - DNA, 25 bp, Artificial
  Probe
ggtcagttctagatcaatgggggcc

SEQ ID NO: 352694 - DNA, 25 bp, Artificial
  Probe
agttctcatgcctgggtcttgtaat

SEQ ID NO: 352695 - DNA, 25 bp, Artificial
  Probe
ccaactggattatttgaaggacacg

SEQ ID NO: 352696 - DNA, 25 bp, Artificial
  Probe
tgctttgggtcatgcgccttcctta

SEQ ID NO: 352697 - DNA, 25 bp, Artificial
  Probe
tagctgcccggctttgaaagttatc

SEQ ID NO: 352698 - DNA, 25 bp, Artificial
  Probe
ccatcttagtgacatttttggaaat

SEQ ID NO: 352699 - DNA, 25 bp, Artificial
  Probe
ttcagcttgccgttttggtgctctc

SEQ ID NO: 352700 - DNA, 25 bp, Artificial
  Probe
tgcccggctttgaaagttatccaca

SEQ ID NO: 352701 - DNA, 25 bp, Artificial
  Probe
actgaccttccctcaagactgagtt

SEQ ID NO: 352702 - DNA, 25 bp, Artificial
  Probe
agagaaaatactacccaactggatt

SEQ ID NO: 352703 - DNA, 25 bp, Artificial
  Probe
tttgactgaccttccctcaagactg

SEQ ID NO: 352704 - DNA, 25 bp, Artificial
  Probe
agttctagatcaatgggggccagtg

SEQ ID NO: 352705 - DNA, 25 bp, Artificial
  Probe
tggtgacaccaatagaataggaagc

SEQ ID NO: 352706 - DNA, 25 bp, Artificial
  Probe
ccacagctaaatttggatggaatta

SEQ ID NO: 352707 - DNA, 25 bp, Artificial
  Probe
ggaagatttcagcttgccgttttgg

SEQ ID NO: 352708 - DNA, 25 bp, Artificial
  Probe
aatgagatgcacatttctttgactg

SEQ ID NO: 352709 - DNA, 25 bp, Artificial
  Probe
ccaatcatgcccatcagtcacgtga

SEQ ID NO: 352710 - DNA, 25 bp, Artificial
  Probe
tagagaaaatactacccaactggat

SEQ ID NO: 352711 - DNA, 25 bp, Artificial
  Probe
gatgcacatttctttgactgacctt

SEQ ID NO: 352712 - DNA, 25 bp, Artificial
  Probe
cacagtacaggcatcctggaccaaa

SEQ ID NO: 352713 - DNA, 25 bp, Artificial
  Probe
gtagagctattagctgcccggcttt

SEQ ID NO: 352714 - DNA, 25 bp, Artificial
  Probe
actctggactatggaagatttcagc

SEQ ID NO: 352715 - DNA, 25 bp, Artificial
  Probe
ctttgctttgggtcatgcgccttcc

SEQ ID NO: 352716 - DNA, 25 bp, Artificial
  Probe
agagctattagctgcccggctttga

SEQ ID NO: 352717 - DNA, 25 bp, Artificial
  Probe
ctggctggtagagctattagctgcc

SEQ ID NO: 352718 - DNA, 25 bp, Artificial
  Probe
tcagtcacgtgaatgagatgcacat

SEQ ID NO: 352719 - DNA, 25 bp, Artificial
  Probe
gtgacaccaatagaataggaagcag

SEQ ID NO: 352720 - DNA, 25 bp, Artificial
  Probe
tgaaagttatccacagctaaatttg

SEQ ID NO: 352721 - DNA, 25 bp, Artificial
  Probe
tactacccaactggattatttgaag

SEQ ID NO: 352722 - DNA, 25 bp, Artificial
  Probe
atttgaaggacacgagggtcagttc

SEQ ID NO: 352723 - DNA, 25 bp, Artificial
  Probe
ccagcttctggctggtagagctatt

SEQ ID NO: 352724 - DNA, 25 bp, Artificial
  Probe
ctctctccagcttctggctggtaga

SEQ ID NO: 352725 - DNA, 25 bp, Artificial
  Probe
cactcaggtcccttctttagagtcc

SEQ ID NO: 352726 - DNA, 25 bp, Artificial
  Probe
ctcgctcctcgcagcattcgaggtt

SEQ ID NO: 352727 - DNA, 25 bp, Artificial
  Probe
acgagggtcagttctagatcaatgg

SEQ ID NO: 352728 - DNA, 25 bp, Artificial
  Probe
tctctaggaatggtgacaccaatag

SEQ ID NO: 352729 - DNA, 25 bp, Artificial
  Probe
gggtcatgcgccttccttagcttct

SEQ ID NO: 352730 - DNA, 25 bp, Artificial
  Probe
ggggtctacagtagacctcaccacc

SEQ ID NO: 352731 - DNA, 25 bp, Artificial
  Probe
caaccgtaattttgtgtaagaggca

SEQ ID NO: 352732 - DNA, 25 bp, Artificial
  Probe
acattcctcctatttcagaggttcg

SEQ ID NO: 352733 - DNA, 25 bp, Artificial
  Probe
cagatctcacaaggtctttaaaacg

SEQ ID NO: 352734 - DNA, 25 bp, Artificial
  Probe
ttaaatgccgccatttgaagtcccc

SEQ ID NO: 352735 - DNA, 25 bp, Artificial
  Probe
ggctgagagcccacctactgtattc

SEQ ID NO: 352736 - DNA, 25 bp, Artificial
  Probe
cttagttatcagagttcagctacca

SEQ ID NO: 352737 - DNA, 25 bp, Artificial
  Probe
tctcaaatgagacaaactggaagct

SEQ ID NO: 352738 - DNA, 25 bp, Artificial
  Probe
agcttctgacaagaagaggccttga

SEQ ID NO: 352739 - DNA, 25 bp, Artificial
  Probe
tcaaccgtaattttgtgtaagaggc

SEQ ID NO: 352740 - DNA, 25 bp, Artificial
  Probe
agtacagcccgcaacaacgttacag

SEQ ID NO: 352741 - DNA, 25 bp, Artificial
  Probe
atccttaggtgtgctgagtacagcc

SEQ ID NO: 352742 - DNA, 25 bp, Artificial
  Probe
tgtgctgagtacagcccgcaacaac

SEQ ID NO: 352743 - DNA, 25 bp, Artificial
  Probe
aacgttacagcctgtctcaaatgag

SEQ ID NO: 352744 - DNA, 25 bp, Artificial
  Probe
tgcttagttatcagagttcagctac

SEQ ID NO: 352745 - DNA, 25 bp, Artificial
  Probe
ggtgtgctgagtacagcccgcaaca

SEQ ID NO: 352746 - DNA, 25 bp, Artificial
  Probe
tctgacaagaagaggccttgattaa

SEQ ID NO: 352747 - DNA, 25 bp, Artificial
  Probe
cacctactgtattcatccttaggtg

SEQ ID NO: 352748 - DNA, 25 bp, Artificial
  Probe
acagcctgtctcaaatgagacaaac

SEQ ID NO: 352749 - DNA, 25 bp, Artificial
  Probe
gcaggcctcccatgaaactccagaa

SEQ ID NO: 352750 - DNA, 25 bp, Artificial
  Probe
aaactggaagcttctcgtgttagct

SEQ ID NO: 352751 - DNA, 25 bp, Artificial
  Probe
aaatgccgccatttgaagtcccccg

SEQ ID NO: 352752 - DNA, 25 bp, Artificial
  Probe
cgcaacaacgttacagcctgtctca

SEQ ID NO: 352753 - DNA, 25 bp, Artificial
  Probe
tctcacaaggtctttaaaacgttgg

SEQ ID NO: 352754 - DNA, 25 bp, Artificial
  Probe
ctatttaatgttcaagctagctgtg

SEQ ID NO: 352755 - DNA, 25 bp, Artificial
  Probe
gagagcccacctactgtattcatcc

SEQ ID NO: 352756 - DNA, 25 bp, Artificial
  Probe
gctgtggctgagagcccacctactg

SEQ ID NO: 352757 - DNA, 25 bp, Artificial
  Probe
aaacctgggctgtggctgagagccc

SEQ ID NO: 352758 - DNA, 25 bp, Artificial
  Probe
gacaaactggaagcttctcgtgtta

SEQ ID NO: 352759 - DNA, 25 bp, Artificial
  Probe
agcccgcaacaacgttacagcctgt

SEQ ID NO: 352760 - DNA, 25 bp, Artificial
  Probe
acttattgctgatgttcagaaattc

SEQ ID NO: 352761 - DNA, 25 bp, Artificial
  Probe
ctgggctgtggctgagagcccacct

SEQ ID NO: 352762 - DNA, 25 bp, Artificial
  Probe
agttcagctaccagcatctcccggg

SEQ ID NO: 352763 - DNA, 25 bp, Artificial
  Probe
gtataaccagatctcacaaggtctt

SEQ ID NO: 352764 - DNA, 25 bp, Artificial
  Probe
tggtgtataaccagatctcacaagg

SEQ ID NO: 352765 - DNA, 25 bp, Artificial
  Probe
tgtgcttagttatcagagttcagct

SEQ ID NO: 352766 - DNA, 25 bp, Artificial
  Probe
tctcgtgttagcttctgacaagaag

SEQ ID NO: 352767 - DNA, 25 bp, Artificial
  Probe
gcaacaacgttacagcctgtctcaa

SEQ ID NO: 352768 - DNA, 25 bp, Artificial
  Probe
cctatttcagaggttcggtttgtga

SEQ ID NO: 352769 - DNA, 25 bp, Artificial
  Probe
gttcaagctagctgtgtcctttttt

SEQ ID NO: 352770 - DNA, 25 bp, Artificial
  Probe
gtacagcccgcaacaacgttacagc

SEQ ID NO: 352771 - DNA, 25 bp, Artificial
  Probe
tattgctgatgttcagaaattcgac

SEQ ID NO: 352772 - DNA, 25 bp, Artificial
  Probe
agagttcagctaccagcatctcccg

SEQ ID NO: 352773 - DNA, 25 bp, Artificial
  Probe
aggcctcccatgaaactccagaagc

SEQ ID NO: 352774 - DNA, 25 bp, Artificial
  Probe
ggctgtggctgagagcccacctact

SEQ ID NO: 352775 - DNA, 25 bp, Artificial
  Probe
ctgtctcaaatgagacaaactggaa

SEQ ID NO: 352776 - DNA, 25 bp, Artificial
  Probe
tattcatccttaggtgtgctgagta

SEQ ID NO: 352777 - DNA, 25 bp, Artificial
  Probe
aggacgcctctgaaaacaaccagaa

SEQ ID NO: 352778 - DNA, 25 bp, Artificial
  Probe
acccacaacgggaggacgcctctga

SEQ ID NO: 352779 - DNA, 25 bp, Artificial
  Probe
caaacaccaccaaagaacaaagaca

SEQ ID NO: 352780 - DNA, 25 bp, Artificial
  Probe
cacaacaaaaaacaccagggggcag

SEQ ID NO: 352781 - DNA, 25 bp, Artificial
  Probe
ggaggcataaccaagaccgaataca

SEQ ID NO: 352782 - DNA, 25 bp, Artificial
  Probe
agacacccacaacgggaggacgcct

SEQ ID NO: 352783 - DNA, 25 bp, Artificial
  Probe
aggcataaccaagaccgaatacaga

SEQ ID NO: 352784 - DNA, 25 bp, Artificial
  Probe
acacaaagaacaccaaacagcacaa

SEQ ID NO: 352785 - DNA, 25 bp, Artificial
  Probe
ccgaatacagacagaaacagagaca

SEQ ID NO: 352786 - DNA, 25 bp, Artificial
  Probe
aacaccaaacagcacaaacactaaa

SEQ ID NO: 352787 - DNA, 25 bp, Artificial
  Probe
gcagaacaaaaccacaaggaggcat

SEQ ID NO: 352788 - DNA, 25 bp, Artificial
  Probe
aaccacaaggaggcataaccaagac

SEQ ID NO: 352789 - DNA, 25 bp, Artificial
  Probe
caagaccgaatacagacagaaacag

SEQ ID NO: 352790 - DNA, 25 bp, Artificial
  Probe
agaacaaaaccacaaggaggcataa

SEQ ID NO: 352791 - DNA, 25 bp, Artificial
  Probe
cacaaaacacaacaaaaaacaccag

SEQ ID NO: 352792 - DNA, 25 bp, Artificial
  Probe
aaacagcacaaacactaaaagaaca

SEQ ID NO: 352793 - DNA, 25 bp, Artificial
  Probe
taaaagaacacacaaaacacaacaa

SEQ ID NO: 352794 - DNA, 25 bp, Artificial
  Probe
taaccaagaccgaatacagacagaa

SEQ ID NO: 352795 - DNA, 25 bp, Artificial
  Probe
ggacgcctctgaaaacaaccagaac

SEQ ID NO: 352796 - DNA, 25 bp, Artificial
  Probe
cagaaacagagacacaacccaaaca

SEQ ID NO: 352797 - DNA, 25 bp, Artificial
  Probe
gcctctgaaaacaaccagaacccag

SEQ ID NO: 352798 - DNA, 25 bp, Artificial
  Probe
caaagacacccacaacgggaggacg

SEQ ID NO: 352799 - DNA, 25 bp, Artificial
  Probe
accacaaggaggcataaccaagacc

SEQ ID NO: 352800 - DNA, 25 bp, Artificial
  Probe
gcacaaacactaaaagaacacacaa

SEQ ID NO: 352801 - DNA, 25 bp, Artificial
  Probe
gacgcctctgaaaacaaccagaacc

SEQ ID NO: 352802 - DNA, 25 bp, Artificial
  Probe
ggaggacgcctctgaaaacaaccag

SEQ ID NO: 352803 - DNA, 25 bp, Artificial
  Probe
caacgggaggacgcctctgaaaaca

SEQ ID NO: 352804 - DNA, 25 bp, Artificial
  Probe
gggcagaacaaaaccacaaggaggc

SEQ ID NO: 352805 - DNA, 25 bp, Artificial
  Probe
cgcctctgaaaacaaccagaaccca

SEQ ID NO: 352806 - DNA, 25 bp, Artificial
  Probe
ccacaacgggaggacgcctctgaaa

SEQ ID NO: 352807 - DNA, 25 bp, Artificial
  Probe
cacaacgggaggacgcctctgaaaa

SEQ ID NO: 352808 - DNA, 25 bp, Artificial
  Probe
caccaccaaagaacaaagacaccca

SEQ ID NO: 352809 - DNA, 25 bp, Artificial
  Probe
agagacacaacccaaacaccaccaa

SEQ ID NO: 352810 - DNA, 25 bp, Artificial
  Probe
cccacaacgggaggacgcctctgaa

SEQ ID NO: 352811 - DNA, 25 bp, Artificial
  Probe
gaggcataaccaagaccgaatacag

SEQ ID NO: 352812 - DNA, 25 bp, Artificial
  Probe
gaggacgcctctgaaaacaaccaga

SEQ ID NO: 352813 - DNA, 25 bp, Artificial
  Probe
caaagaacaccaaacagcacaaaca

SEQ ID NO: 352814 - DNA, 25 bp, Artificial
  Probe
acaacacaaagaacaccaaacagca

SEQ ID NO: 352815 - DNA, 25 bp, Artificial
  Probe
cacaaacactaaaagaacacacaaa

SEQ ID NO: 352816 - DNA, 25 bp, Artificial
  Probe
gggaggacgcctctgaaaacaacca

SEQ ID NO: 352817 - DNA, 25 bp, Artificial
  Probe
gaacaaagacacccacaacgggagg

SEQ ID NO: 352818 - DNA, 25 bp, Artificial
  Probe
ggcagaacaaaaccacaaggaggca

SEQ ID NO: 352819 - DNA, 25 bp, Artificial
  Probe
cacccacaacgggaggacgcctctg

SEQ ID NO: 352820 - DNA, 25 bp, Artificial
  Probe
ggcataaccaagaccgaatacagac

SEQ ID NO: 352821 - DNA, 25 bp, Artificial
  Probe
ctaaaagaacacacaaaacacaaca

SEQ ID NO: 352822 - DNA, 25 bp, Artificial
  Probe
gcataaccaagaccgaatacagaca

SEQ ID NO: 352823 - DNA, 25 bp, Artificial
  Probe
cctcctggcagttcttcatgtctga

SEQ ID NO: 352824 - DNA, 25 bp, Artificial
  Probe
agcaccattatcaaggagggcatcg

SEQ ID NO: 352825 - DNA, 25 bp, Artificial
  Probe
aagcctgtggcctcggaggaaacac

SEQ ID NO: 352826 - DNA, 25 bp, Artificial
  Probe
tctacctggggaagagagactatat

SEQ ID NO: 352827 - DNA, 25 bp, Artificial
  Probe
taggagagctcacatccagtgaagt

SEQ ID NO: 352828 - DNA, 25 bp, Artificial
  Probe
ccaataacacggagaaggttgtgaa

SEQ ID NO: 352829 - DNA, 25 bp, Artificial
  Probe
ctaccctgctcagtgatgttgcagc

SEQ ID NO: 352830 - DNA, 25 bp, Artificial
  Probe
tccctgtgaccgtgactgtgaccaa

SEQ ID NO: 352831 - DNA, 25 bp, Artificial
  Probe
gtctccctcagcaaagagatatatt

SEQ ID NO: 352832 - DNA, 25 bp, Artificial
  Probe
gacctgtatttctctcgggtccagg

SEQ ID NO: 352833 - DNA, 25 bp, Artificial
  Probe
gcctcggaggaaacacaggaaaaag

SEQ ID NO: 352834 - DNA, 25 bp, Artificial
  Probe
cccaagggacagacaacatggcagc

SEQ ID NO: 352835 - DNA, 25 bp, Artificial
  Probe
tcctgagctcgtgaaggggaagaaa

SEQ ID NO: 352836 - DNA, 25 bp, Artificial
  Probe
caagacgctggtgctggtgcccctc

SEQ ID NO: 352837 - DNA, 25 bp, Artificial
  Probe
aagaggacaagatccccaagaagag

SEQ ID NO: 352838 - DNA, 25 bp, Artificial
  Probe
aggagagctcacatccagtgaagtg

SEQ ID NO: 352839 - DNA, 25 bp, Artificial
  Probe
ttactgatccggaaggtgcagcatg

SEQ ID NO: 352840 - DNA, 25 bp, Artificial
  Probe
aaatcccatgtcatcttcaagaagg

SEQ ID NO: 352841 - DNA, 25 bp, Artificial
  Probe
gggcatcctggtgtcataccatatc

SEQ ID NO: 352842 - DNA, 25 bp, Artificial
  Probe
ttcaagaaggtctcccgggacaagt

SEQ ID NO: 352843 - DNA, 25 bp, Artificial
  Probe
ggagataacacgtacccatttctgc

SEQ ID NO: 352844 - DNA, 25 bp, Artificial
  Probe
ggttaaagcatttgccacagacatc

SEQ ID NO: 352845 - DNA, 25 bp, Artificial
  Probe
gtctcccgggacaagtcggtgacca

SEQ ID NO: 352846 - DNA, 25 bp, Artificial
  Probe
agactatatagatcacgtcagccaa

SEQ ID NO: 352847 - DNA, 25 bp, Artificial
  Probe
gtgaagaccaataaatcccatgtca

SEQ ID NO: 352848 - DNA, 25 bp, Artificial
  Probe
agtgcagccaaacagcactttgacc

SEQ ID NO: 352849 - DNA, 25 bp, Artificial
  Probe
tcagtctccctcagcaaagagatat

SEQ ID NO: 352850 - DNA, 25 bp, Artificial
  Probe
agccctgtgctgaagcctcctggca

SEQ ID NO: 352851 - DNA, 25 bp, Artificial
  Probe
cctgttggggccatgagtgccccaa

SEQ ID NO: 352852 - DNA, 25 bp, Artificial
  Probe
atcctgagctcgtgaaggggaagaa

SEQ ID NO: 352853 - DNA, 25 bp, Artificial
  Probe
ctgaccttccgcagggacctgtatt

SEQ ID NO: 352854 - DNA, 25 bp, Artificial
  Probe
agctctgtgcggttactgatccgga

SEQ ID NO: 352855 - DNA, 25 bp, Artificial
  Probe
ctccacaagatgtagggaagagctg

SEQ ID NO: 352856 - DNA, 25 bp, Artificial
  Probe
atccggaaggtgcagcatgccccac

SEQ ID NO: 352857 - DNA, 25 bp, Artificial
  Probe
gagataacacgtacccatttctgct

SEQ ID NO: 352858 - DNA, 25 bp, Artificial
  Probe
ggcatcgatcggaccgtcatgggca

SEQ ID NO: 352859 - DNA, 25 bp, Artificial
  Probe
ccaagtagagcctgtagatggtgtt

SEQ ID NO: 352860 - DNA, 25 bp, Artificial
  Probe
cagtgatgttgcagccagctccaca

SEQ ID NO: 352861 - DNA, 25 bp, Artificial
  Probe
tacctaccctgctcagtgatgttgc

SEQ ID NO: 352862 - DNA, 25 bp, Artificial
  Probe
gaaactgcttgtagtcctggttgcc

SEQ ID NO: 352863 - DNA, 25 bp, Artificial
  Probe
gaacaaatagccaatgtggttctct

SEQ ID NO: 352864 - DNA, 25 bp, Artificial
  Probe
ctatggccaagaggacattgatgtg

SEQ ID NO: 352865 - DNA, 25 bp, Artificial
  Probe
aacatggcagcctgtgtgaagacca

SEQ ID NO: 352866 - DNA, 25 bp, Artificial
  Probe
attggtggatcctgagctcgtgaag

SEQ ID NO: 352867 - DNA, 25 bp, Artificial
  Probe
tgttgtattggtggatcctgagctc

SEQ ID NO: 352868 - DNA, 25 bp, Artificial
  Probe
acattgatgtgattggcctgacctt

SEQ ID NO: 352869 - DNA, 25 bp, Artificial
  Probe
tgtggccattgtttctgaccctggg

SEQ ID NO: 352870 - DNA, 25 bp, Artificial
  Probe
tgctgctgcttcagcgctgagaaat

SEQ ID NO: 352871 - DNA, 25 bp, Artificial
  Probe
actgcatgaactgacattaagaagt

SEQ ID NO: 352872 - DNA, 25 bp, Artificial
  Probe
gtccagtacgaattgcctttaacaa

SEQ ID NO: 352873 - DNA, 25 bp, Artificial
  Probe
cttcagcgctgagaaattgtaattg

SEQ ID NO: 352874 - DNA, 25 bp, Artificial
  Probe
aatgacaagcccatagtgtcttaga

SEQ ID NO: 352875 - DNA, 25 bp, Artificial
  Probe
gattatcgctctgttagcttttgta

SEQ ID NO: 352876 - DNA, 25 bp, Artificial
  Probe
caagcccatagtgtcttagattagt

SEQ ID NO: 352877 - DNA, 25 bp, Artificial
  Probe
agtccagtacgaattgcctttaaca

SEQ ID NO: 352878 - DNA, 25 bp, Artificial
  Probe
tgaccctgggtcctcttgctgctgc

SEQ ID NO: 352879 - DNA, 25 bp, Artificial
  Probe
gtagatcaaataattccccaaggaa

SEQ ID NO: 352880 - DNA, 25 bp, Artificial
  Probe
tctgaccctgggtcctcttgctgct

SEQ ID NO: 352881 - DNA, 25 bp, Artificial
  Probe
aatactgcatgaactgacattaaga

SEQ ID NO: 352882 - DNA, 25 bp, Artificial
  Probe
accctgggtcctcttgctgctgctt

SEQ ID NO: 352883 - DNA, 25 bp, Artificial
  Probe
ctctgttagcttttgtatatgaatc

SEQ ID NO: 352884 - DNA, 25 bp, Artificial
  Probe
tcctcttgctgctgcttcagcgctg

SEQ ID NO: 352885 - DNA, 25 bp, Artificial
  Probe
atcgctctgttagcttttgtatatg

SEQ ID NO: 352886 - DNA, 25 bp, Artificial
  Probe
agcaacaaggccttggtctttggtg

SEQ ID NO: 352887 - DNA, 25 bp, Artificial
  Probe
cttaaagcaacaaggccttggtctt

SEQ ID NO: 352888 - DNA, 25 bp, Artificial
  Probe
gtcctcttgctgctgcttcagcgct

SEQ ID NO: 352889 - DNA, 25 bp, Artificial
  Probe
tggattatcgctctgttagcttttg

SEQ ID NO: 352890 - DNA, 25 bp, Artificial
  Probe
ccttaaagcaacaaggccttggtct

SEQ ID NO: 352891 - DNA, 25 bp, Artificial
  Probe
tttaagtccagtacgaattgccttt

SEQ ID NO: 352892 - DNA, 25 bp, Artificial
  Probe
ccatagtgtcttagattagtagatc

SEQ ID NO: 352893 - DNA, 25 bp, Artificial
  Probe
gacaagcccatagtgtcttagatta

SEQ ID NO: 352894 - DNA, 25 bp, Artificial
  Probe
tattctgtggccattgtttctgacc

SEQ ID NO: 352895 - DNA, 25 bp, Artificial
  Probe
aatttaatgacaagcccatagtgtc

SEQ ID NO: 352896 - DNA, 25 bp, Artificial
  Probe
caacaaggccttggtctttggtggt

SEQ ID NO: 352897 - DNA, 25 bp, Artificial
  Probe
gcaacaaggccttggtctttggtgg

SEQ ID NO: 352898 - DNA, 25 bp, Artificial
  Probe
ggtggtattctgtggccattgtttc

SEQ ID NO: 352899 - DNA, 25 bp, Artificial
  Probe
taagtccagtacgaattgcctttaa

SEQ ID NO: 352900 - DNA, 25 bp, Artificial
  Probe
ctgcttcagcgctgagaaattgtaa

SEQ ID NO: 352901 - DNA, 25 bp, Artificial
  Probe
cctcttgctgctgcttcagcgctga

SEQ ID NO: 352902 - DNA, 25 bp, Artificial
  Probe
ttctgtggccattgtttctgaccct

SEQ ID NO: 352903 - DNA, 25 bp, Artificial
  Probe
ccattgtttctgaccctgggtcctc

SEQ ID NO: 352904 - DNA, 25 bp, Artificial
  Probe
gggtcctcttgctgctgcttcagcg

SEQ ID NO: 352905 - DNA, 25 bp, Artificial
  Probe
tgtttctgaccctgggtcctcttgc

SEQ ID NO: 352906 - DNA, 25 bp, Artificial
  Probe
acatttaagtccagtacgaattgcc

SEQ ID NO: 352907 - DNA, 25 bp, Artificial
  Probe
aagcccatagtgtcttagattagta

SEQ ID NO: 352908 - DNA, 25 bp, Artificial
  Probe
tactgcatgaactgacattaagaag

SEQ ID NO: 352909 - DNA, 25 bp, Artificial
  Probe
ggccattgtttctgaccctgggtcc

SEQ ID NO: 352910 - DNA, 25 bp, Artificial
  Probe
tggccattgtttctgaccctgggtc

SEQ ID NO: 352911 - DNA, 25 bp, Artificial
  Probe
tcgctctgttagcttttgtatatga

SEQ ID NO: 352912 - DNA, 25 bp, Artificial
  Probe
cgctctgttagcttttgtatatgaa

SEQ ID NO: 352913 - DNA, 25 bp, Artificial
  Probe
cctgggtcctcttgctgctgcttca

SEQ ID NO: 352914 - DNA, 25 bp, Artificial
  Probe
ggattatcgctctgttagcttttgt

SEQ ID NO: 352915 - DNA, 25 bp, Artificial
  Probe
attcctaaggaccaattcagaactg

SEQ ID NO: 352916 - DNA, 25 bp, Artificial
  Probe
cacttgctattgtggcccgttttca

SEQ ID NO: 352917 - DNA, 25 bp, Artificial
  Probe
aaactcaagagaatccccaataggg

SEQ ID NO: 352918 - DNA, 25 bp, Artificial
  Probe
caacatgggattgtcaccatagagt

SEQ ID NO: 352919 - DNA, 25 bp, Artificial
  Probe
tccctcatgagagaagaggcaaacc

SEQ ID NO: 352920 - DNA, 25 bp, Artificial
  Probe
ttttggacaaaactcaagagaatcc

SEQ ID NO: 352921 - DNA, 25 bp, Artificial
  Probe
cattctcttgtgagccggtgactgg

SEQ ID NO: 352922 - DNA, 25 bp, Artificial
  Probe
ggagagaccatcttcacatctacca

SEQ ID NO: 352923 - DNA, 25 bp, Artificial
  Probe
tgtcaccatagagttagttggtact

SEQ ID NO: 352924 - DNA, 25 bp, Artificial
  Probe
cctgcttgagtgtttctatgtgtgg

SEQ ID NO: 352925 - DNA, 25 bp, Artificial
  Probe
cagctatgcataggacagaaagata

SEQ ID NO: 352926 - DNA, 25 bp, Artificial
  Probe
aagctgatgccctagaaagatccta

SEQ ID NO: 352927 - DNA, 25 bp, Artificial
  Probe
catgggattgtcaccatagagttag

SEQ ID NO: 352928 - DNA, 25 bp, Artificial
  Probe
gaattagctccgtgttttggacaaa

SEQ ID NO: 352929 - DNA, 25 bp, Artificial
  Probe
gtgagcctgctacctaacaccgctt

SEQ ID NO: 352930 - DNA, 25 bp, Artificial
  Probe
catcatctcccgacttgagttgtac

SEQ ID NO: 352931 - DNA, 25 bp, Artificial
  Probe
cagcaaactttcagacctagaacag

SEQ ID NO: 352932 - DNA, 25 bp, Artificial
  Probe
ggaacaccttaaataccagacactg

SEQ ID NO: 352933 - DNA, 25 bp, Artificial
  Probe
actccgtagtgatattgtaacaata

SEQ ID NO: 352934 - DNA, 25 bp, Artificial
  Probe
ggcaacatcctgaagggagagacca

SEQ ID NO: 352935 - DNA, 25 bp, Artificial
  Probe
ttctgtttcactttgtgtagtgaac

SEQ ID NO: 352936 - DNA, 25 bp, Artificial
  Probe
taagggatcaagtcctaccaaagag

SEQ ID NO: 352937 - DNA, 25 bp, Artificial
  Probe
gtagtgaaccccatggtagttttct

SEQ ID NO: 352938 - DNA, 25 bp, Artificial
  Probe
ccaatagggctggtggtagacttta

SEQ ID NO: 352939 - DNA, 25 bp, Artificial
  Probe
ggaatgctaagcatggcctcgtgct

SEQ ID NO: 352940 - DNA, 25 bp, Artificial
  Probe
gggagaacacacagcattttgtcaa

SEQ ID NO: 352941 - DNA, 25 bp, Artificial
  Probe
caacattaaaaccacagatgatagg

SEQ ID NO: 352942 - DNA, 25 bp, Artificial
  Probe
gccataaggcttgtgacccgcgagc

SEQ ID NO: 352943 - DNA, 25 bp, Artificial
  Probe
gatccatcctctgataagccacatg

SEQ ID NO: 352944 - DNA, 25 bp, Artificial
  Probe
gtcaccatagagttagttggtacta

SEQ ID NO: 352945 - DNA, 25 bp, Artificial
  Probe
tcttctcccacttgctattgtggcc

SEQ ID NO: 352946 - DNA, 25 bp, Artificial
  Probe
aatgttggggtgttttcttctgcca

SEQ ID NO: 352947 - DNA, 25 bp, Artificial
  Probe
tttcagacctagaacagacacacag

SEQ ID NO: 352948 - DNA, 25 bp, Artificial
  Probe
ccaggtcacagagaatggcaacatc

SEQ ID NO: 352949 - DNA, 25 bp, Artificial
  Probe
gggagagaccatcttcacatctacc

SEQ ID NO: 352950 - DNA, 25 bp, Artificial
  Probe
tcctaccaaagagaaggaacacctt

SEQ ID NO: 352951 - DNA, 25 bp, Artificial
  Probe
gatgaacagcacgtttccaacatta

SEQ ID NO: 352952 - DNA, 25 bp, Artificial
  Probe
gcacaaacagttctcattcctaagg

SEQ ID NO: 352953 - DNA, 25 bp, Artificial
  Probe
cgaggacgcagctccgagctgccga

SEQ ID NO: 352954 - DNA, 25 bp, Artificial
  Probe
cagagaatggcaacatcctgaaggg

SEQ ID NO: 352955 - DNA, 25 bp, Artificial
  Probe
acaaggagcaaatccttccctatgg

SEQ ID NO: 352956 - DNA, 25 bp, Artificial
  Probe
caacacaaaagctaacccctggttg

SEQ ID NO: 352957 - DNA, 25 bp, Artificial
  Probe
gttggtactatatcattctcttgtg

SEQ ID NO: 352958 - DNA, 25 bp, Artificial
  Probe
tgaccaagatccatcctctgataag

SEQ ID NO: 352959 - DNA, 25 bp, Artificial
  Probe
cacacaggacaaggagcaaatcctt

SEQ ID NO: 352960 - DNA, 25 bp, Artificial
  Probe
ctcttactgcactgcccaacatgtg

SEQ ID NO: 352961 - DNA, 25 bp, Artificial
  Probe
atcgttgcttcagacactcggttga

SEQ ID NO: 352962 - DNA, 25 bp, Artificial
  Probe
tcgccttatgccttcaacggaggta

SEQ ID NO: 352963 - DNA, 25 bp, Artificial
  Probe
gcgtttctcgccttatgccttcaac

SEQ ID NO: 352964 - DNA, 25 bp, Artificial
  Probe
cgccttatgccttcaacggaggtac

SEQ ID NO: 352965 - DNA, 25 bp, Artificial
  Probe
tttccatcgttgcttcagacactcg

SEQ ID NO: 352966 - DNA, 25 bp, Artificial
  Probe
aagatttttccatcgttgcttcaga

SEQ ID NO: 352967 - DNA, 25 bp, Artificial
  Probe
gttccaggggatacagtgtcctctt

SEQ ID NO: 352968 - DNA, 25 bp, Artificial
  Probe
atgtccccctgactctggacagagc

SEQ ID NO: 352969 - DNA, 25 bp, Artificial
  Probe
aggcacgtgcacatgcccacataca

SEQ ID NO: 352970 - DNA, 25 bp, Artificial
  Probe
gagaagatttttccatcgttgcttc

SEQ ID NO: 352971 - DNA, 25 bp, Artificial
  Probe
ggccctgtgcagatgcgtttctcgc

SEQ ID NO: 352972 - DNA, 25 bp, Artificial
  Probe
cccctgactctggacagagccatga

SEQ ID NO: 352973 - DNA, 25 bp, Artificial
  Probe
gccttatgccttcaacggaggtact

SEQ ID NO: 352974 - DNA, 25 bp, Artificial
  Probe
ccttatgccttcaacggaggtactg

SEQ ID NO: 352975 - DNA, 25 bp, Artificial
  Probe
gatttttccatcgttgcttcagaca

SEQ ID NO: 352976 - DNA, 25 bp, Artificial
  Probe
ccggccctgtgcagatgcgtttctc

SEQ ID NO: 352977 - DNA, 25 bp, Artificial
  Probe
gtgcagatgcgtttctcgccttatg

SEQ ID NO: 352978 - DNA, 25 bp, Artificial
  Probe
tccgccggccctgtgcagatgcgtt

SEQ ID NO: 352979 - DNA, 25 bp, Artificial
  Probe
gtgcacatgcccacatacaagtata

SEQ ID NO: 352980 - DNA, 25 bp, Artificial
  Probe
ccgtgtacagctttgacccagtagg

SEQ ID NO: 352981 - DNA, 25 bp, Artificial
  Probe
aacaggcacgtgcacatgcccacat

SEQ ID NO: 352982 - DNA, 25 bp, Artificial
  Probe
ctgactctggacagagccatgaggc

SEQ ID NO: 352983 - DNA, 25 bp, Artificial
  Probe
ttgcttcagacactcggttgagtga

SEQ ID NO: 352984 - DNA, 25 bp, Artificial
  Probe
tttctcgccttatgccttcaacgga

SEQ ID NO: 352985 - DNA, 25 bp, Artificial
  Probe
cagatgcgtttctcgccttatgcct

SEQ ID NO: 352986 - DNA, 25 bp, Artificial
  Probe
ccgccggccctgtgcagatgcgttt

SEQ ID NO: 352987 - DNA, 25 bp, Artificial
  Probe
gttgcttcagacactcggttgagtg

SEQ ID NO: 352988 - DNA, 25 bp, Artificial
  Probe
tgtgaagaatttctcccttgggggt

SEQ ID NO: 352989 - DNA, 25 bp, Artificial
  Probe
acaggcacgtgcacatgcccacata

SEQ ID NO: 352990 - DNA, 25 bp, Artificial
  Probe
ggcacgtgcacatgcccacatacaa

SEQ ID NO: 352991 - DNA, 25 bp, Artificial
  Probe
cttatgccttcaacggaggtactgt

SEQ ID NO: 352992 - DNA, 25 bp, Artificial
  Probe
gccggccctgtgcagatgcgtttct

SEQ ID NO: 352993 - DNA, 25 bp, Artificial
  Probe
cgttgcttcagacactcggttgagt

SEQ ID NO: 352994 - DNA, 25 bp, Artificial
  Probe
tgccttcaacggaggtactgtattg

SEQ ID NO: 352995 - DNA, 25 bp, Artificial
  Probe
agttccaggggatacagtgtcctct

SEQ ID NO: 352996 - DNA, 25 bp, Artificial
  Probe
gccttcaacggaggtactgtattgg

SEQ ID NO: 352997 - DNA, 25 bp, Artificial
  Probe
tgactctggacagagccatgaggct

SEQ ID NO: 352998 - DNA, 25 bp, Artificial
  Probe
gtttctcgccttatgccttcaacgg

SEQ ID NO: 352999 - DNA, 25 bp, Artificial
  Probe
tgcttcagacactcggttgagtgaa

SEQ ID NO: 353000 - DNA, 25 bp, Artificial
  Probe
tccatcgttgcttcagacactcggt

SEQ ID NO: 353001 - DNA, 25 bp, Artificial
  Probe
gcacatgcccacatacaagtatatg

SEQ ID NO: 353002 - DNA, 25 bp, Artificial
  Probe
gccctgtgcagatgcgtttctcgcc

SEQ ID NO: 353003 - DNA, 25 bp, Artificial
  Probe
tgtgcagatgcgtttctcgccttat

SEQ ID NO: 353004 - DNA, 25 bp, Artificial
  Probe
gcagatgcgtttctcgccttatgcc

SEQ ID NO: 353005 - DNA, 25 bp, Artificial
  Probe
ttgtgaagaatttctcccttggggg

SEQ ID NO: 353006 - DNA, 25 bp, Artificial
  Probe
ttccatcgttgcttcagacactcgg

SEQ ID NO: 353007 - DNA, 25 bp, Artificial
  Probe
cacaagccccgaaatggcgaaaaat

SEQ ID NO: 353008 - DNA, 25 bp, Artificial
  Probe
aatataccccagataagggttggag

SEQ ID NO: 353009 - DNA, 25 bp, Artificial
  Probe
agaatataccccagataagggttgg

SEQ ID NO: 353010 - DNA, 25 bp, Artificial
  Probe
tagagtcattttttaacccacaagc

SEQ ID NO: 353011 - DNA, 25 bp, Artificial
  Probe
ccacagctcaaaggccgaaaaaccg

SEQ ID NO: 353012 - DNA, 25 bp, Artificial
  Probe
aatggcgaaaaatccctctatataa

SEQ ID NO: 353013 - DNA, 25 bp, Artificial
  Probe
ctccacagctcaaaggccgaaaaac

SEQ ID NO: 353014 - DNA, 25 bp, Artificial
  Probe
gcctccacagctcaaaggccgaaaa

SEQ ID NO: 353015 - DNA, 25 bp, Artificial
  Probe
cacttaatacaaaaatacaaactcg

SEQ ID NO: 353016 - DNA, 25 bp, Artificial
  Probe
ttccaaaagtttgcgcaaccttgat

SEQ ID NO: 353017 - DNA, 25 bp, Artificial
  Probe
gaatataccccagataagggttgga

SEQ ID NO: 353018 - DNA, 25 bp, Artificial
  Probe
aagaatataccccagataagggttg

SEQ ID NO: 353019 - DNA, 25 bp, Artificial
  Probe
gaggtggcctccacagctcaaaggc

SEQ ID NO: 353020 - DNA, 25 bp, Artificial
  Probe
cgcaaccttgatggccaaatggaca

SEQ ID NO: 353021 - DNA, 25 bp, Artificial
  Probe
taaagaggtggcctccacagctcaa

SEQ ID NO: 353022 - DNA, 25 bp, Artificial
  Probe
taaaaaagaatataccccagataag

SEQ ID NO: 353023 - DNA, 25 bp, Artificial
  Probe
caaattcacttaatacaaaaataca

SEQ ID NO: 353024 - DNA, 25 bp, Artificial
  Probe
atccctctatataataaaaaagaat

SEQ ID NO: 353025 - DNA, 25 bp, Artificial
  Probe
ggtggcctccacagctcaaaggccg

SEQ ID NO: 353026 - DNA, 25 bp, Artificial
  Probe
ggccctctttataaagaggtggcct

SEQ ID NO: 353027 - DNA, 25 bp, Artificial
  Probe
accttgatggccaaatggacatttg

SEQ ID NO: 353028 - DNA, 25 bp, Artificial
  Probe
cctccacagctcaaaggccgaaaaa

SEQ ID NO: 353029 - DNA, 25 bp, Artificial
  Probe
aaccttgatggccaaatggacattt

SEQ ID NO: 353030 - DNA, 25 bp, Artificial
  Probe
ccttgatggccaaatggacatttga

SEQ ID NO: 353031 - DNA, 25 bp, Artificial
  Probe
gcgcaaccttgatggccaaatggac

SEQ ID NO: 353032 - DNA, 25 bp, Artificial
  Probe
ttataaagaggtggcctccacagct

SEQ ID NO: 353033 - DNA, 25 bp, Artificial
  Probe
cctctttataaagaggtggcctcca

SEQ ID NO: 353034 - DNA, 25 bp, Artificial
  Probe
tccacagctcaaaggccgaaaaacc

SEQ ID NO: 353035 - DNA, 25 bp, Artificial
  Probe
gcgaaaaatccctctatataataaa

SEQ ID NO: 353036 - DNA, 25 bp, Artificial
  Probe
tgcgcaaccttgatggccaaatgga

SEQ ID NO: 353037 - DNA, 25 bp, Artificial
  Probe
gtggcctccacagctcaaaggccga

SEQ ID NO: 353038 - DNA, 25 bp, Artificial
  Probe
cttgatggccaaatggacatttgaa

SEQ ID NO: 353039 - DNA, 25 bp, Artificial
  Probe
ttgatggccaaatggacatttgaaa

SEQ ID NO: 353040 - DNA, 25 bp, Artificial
  Probe
aggtggcctccacagctcaaaggcc

SEQ ID NO: 353041 - DNA, 25 bp, Artificial
  Probe
ggcctccacagctcaaaggccgaaa

SEQ ID NO: 353042 - DNA, 25 bp, Artificial
  Probe
tggcctccacagctcaaaggccgaa

SEQ ID NO: 353043 - DNA, 25 bp, Artificial
  Probe
atataccccagataagggttggagg

SEQ ID NO: 353044 - DNA, 25 bp, Artificial
  Probe
cacagctcaaaggccgaaaaaccgg

SEQ ID NO: 353045 - DNA, 25 bp, Artificial
  Probe
aagaggtggcctccacagctcaaag

SEQ ID NO: 353046 - DNA, 25 bp, Artificial
  Probe
cagctcaaaggccgaaaaaccggct

SEQ ID NO: 353047 - DNA, 25 bp, Artificial
  Probe
ttcacttaatacaaaaatacaaact

SEQ ID NO: 353048 - DNA, 25 bp, Artificial
  Probe
ccctctatataataaaaaagaatat

SEQ ID NO: 353049 - DNA, 25 bp, Artificial
  Probe
taacccacaagccccgaaatggcga

SEQ ID NO: 353050 - DNA, 25 bp, Artificial
  Probe
atggccaaatggacatttgaaagcg

SEQ ID NO: 353051 - DNA, 25 bp, Artificial
  Probe
tataccccagataagggttggaggg

SEQ ID NO: 353052 - DNA, 25 bp, Artificial
  Probe
gccctctttataaagaggtggcctc

SEQ ID NO: 353053 - DNA, 25 bp, Artificial
  Probe
gcaaaactcaaacataattgtatcc

SEQ ID NO: 353054 - DNA, 25 bp, Artificial
  Probe
tttttctctgtagagagctttaatg

SEQ ID NO: 353055 - DNA, 25 bp, Artificial
  Probe
tctttttctctgtagagagctttaa

SEQ ID NO: 353056 - DNA, 25 bp, Artificial
  Probe
gacatgtttattctgctaaggaatc

SEQ ID NO: 353057 - DNA, 25 bp, Artificial
  Probe
tgtttattctgctaaggaatctttc

SEQ ID NO: 353058 - DNA, 25 bp, Artificial
  Probe
tcaaacataattgtatccagcagaa

SEQ ID NO: 353059 - DNA, 25 bp, Artificial
  Probe
ccattcccgcccaagtgagaatgta

SEQ ID NO: 353060 - DNA, 25 bp, Artificial
  Probe
ctctgtagagagctttaatgacatg

SEQ ID NO: 353061 - DNA, 25 bp, Artificial
  Probe
tgctaaggaatctttcagcaaaact

SEQ ID NO: 353062 - DNA, 25 bp, Artificial
  Probe
atctttcagcaaaactcaaacataa

SEQ ID NO: 353063 - DNA, 25 bp, Artificial
  Probe
acataattgtatccagcagaaggat

SEQ ID NO: 353064 - DNA, 25 bp, Artificial
  Probe
atgacatgtttattctgctaaggaa

SEQ ID NO: 353065 - DNA, 25 bp, Artificial
  Probe
ctttttctctgtagagagctttaat

SEQ ID NO: 353066 - DNA, 25 bp, Artificial
  Probe
ttaatgacatgtttattctgctaag

SEQ ID NO: 353067 - DNA, 25 bp, Artificial
  Probe
aaaactcaaacataattgtatccag

SEQ ID NO: 353068 - DNA, 25 bp, Artificial
  Probe
tctctgtagagagctttaatgacat

SEQ ID NO: 353069 - DNA, 25 bp, Artificial
  Probe
ttcccgcccaagtgagaatgtacaa

SEQ ID NO: 353070 - DNA, 25 bp, Artificial
  Probe
cagcaaaactcaaacataattgtat

SEQ ID NO: 353071 - DNA, 25 bp, Artificial
  Probe
atgtttattctgctaaggaatcttt

SEQ ID NO: 353072 - DNA, 25 bp, Artificial
  Probe
cataattgtatccagcagaaggatc

SEQ ID NO: 353073 - DNA, 25 bp, Artificial
  Probe
ctttcagcaaaactcaaacataatt

SEQ ID NO: 353074 - DNA, 25 bp, Artificial
  Probe
tctgctaaggaatctttcagcaaaa

SEQ ID NO: 353075 - DNA, 25 bp, Artificial
  Probe
acatgtttattctgctaaggaatct

SEQ ID NO: 353076 - DNA, 25 bp, Artificial
  Probe
catgtttattctgctaaggaatctt

SEQ ID NO: 353077 - DNA, 25 bp, Artificial
  Probe
aactcaaacataattgtatccagca

SEQ ID NO: 353078 - DNA, 25 bp, Artificial
  Probe
ggaatctttcagcaaaactcaaaca

SEQ ID NO: 353079 - DNA, 25 bp, Artificial
  Probe
ctcaaacataattgtatccagcaga

SEQ ID NO: 353080 - DNA, 25 bp, Artificial
  Probe
ttcagcaaaactcaaacataattgt

SEQ ID NO: 353081 - DNA, 25 bp, Artificial
  Probe
aggaatctttcagcaaaactcaaac

SEQ ID NO: 353082 - DNA, 25 bp, Artificial
  Probe
aatgacatgtttattctgctaagga

SEQ ID NO: 353083 - DNA, 25 bp, Artificial
  Probe
tattctgctaaggaatctttcagca

SEQ ID NO: 353084 - DNA, 25 bp, Artificial
  Probe
gaatctttcagcaaaactcaaacat

SEQ ID NO: 353085 - DNA, 25 bp, Artificial
  Probe
caaacataattgtatccagcagaag

SEQ ID NO: 353086 - DNA, 25 bp, Artificial
  Probe
aacataattgtatccagcagaagga

SEQ ID NO: 353087 - DNA, 25 bp, Artificial
  Probe
ttctgctaaggaatctttcagcaaa

SEQ ID NO: 353088 - DNA, 25 bp, Artificial
  Probe
tttattctgctaaggaatctttcag

SEQ ID NO: 353089 - DNA, 25 bp, Artificial
  Probe
aaacataattgtatccagcagaagg

SEQ ID NO: 353090 - DNA, 25 bp, Artificial
  Probe
ttctctgtagagagctttaatgaca

SEQ ID NO: 353091 - DNA, 25 bp, Artificial
  Probe
tgacatgtttattctgctaaggaat

SEQ ID NO: 353092 - DNA, 25 bp, Artificial
  Probe
attctgctaaggaatctttcagcaa

SEQ ID NO: 353093 - DNA, 25 bp, Artificial
  Probe
ttattctgctaaggaatctttcagc

SEQ ID NO: 353094 - DNA, 25 bp, Artificial
  Probe
ttttctctgtagagagctttaatga

SEQ ID NO: 353095 - DNA, 25 bp, Artificial
  Probe
ctaaggaatctttcagcaaaactca

SEQ ID NO: 353096 - DNA, 25 bp, Artificial
  Probe
gtttattctgctaaggaatctttca

SEQ ID NO: 353097 - DNA, 25 bp, Artificial
  Probe
tttctctgtagagagctttaatgac

SEQ ID NO: 353098 - DNA, 25 bp, Artificial
  Probe
ctgctaaggaatctttcagcaaaac

SEQ ID NO: 353099 - DNA, 25 bp, Artificial
  Probe
ggtctctagcctatctcatctgaac

SEQ ID NO: 353100 - DNA, 25 bp, Artificial
  Probe
ggaaaacttccctgtggatgcactc

SEQ ID NO: 353101 - DNA, 25 bp, Artificial
  Probe
caagcttaggcatggcacaattttg

SEQ ID NO: 353102 - DNA, 25 bp, Artificial
  Probe
gccctctggccctataggttcagtc

SEQ ID NO: 353103 - DNA, 25 bp, Artificial
  Probe
ttctggtagttcaaatgggttctca

SEQ ID NO: 353104 - DNA, 25 bp, Artificial
  Probe
ggggcctgctctatgcttccacggc

SEQ ID NO: 353105 - DNA, 25 bp, Artificial
  Probe
tctttaaccagagaaggacaaagaa

SEQ ID NO: 353106 - DNA, 25 bp, Artificial
  Probe
tcatgtttagaccaaggaaaagtac

SEQ ID NO: 353107 - DNA, 25 bp, Artificial
  Probe
agttcaaatgggttctcaagcttag

SEQ ID NO: 353108 - DNA, 25 bp, Artificial
  Probe
cacggccctgaactctgaagccgga

SEQ ID NO: 353109 - DNA, 25 bp, Artificial
  Probe
tggctcggactatggcgccatgtct

SEQ ID NO: 353110 - DNA, 25 bp, Artificial
  Probe
caaagagagcttgcttgtaaatacc

SEQ ID NO: 353111 - DNA, 25 bp, Artificial
  Probe
gaacttgtagctgtaaaatgctgtc

SEQ ID NO: 353112 - DNA, 25 bp, Artificial
  Probe
gcctatctcatctgaactcctctgg

SEQ ID NO: 353113 - DNA, 25 bp, Artificial
  Probe
tccaggctggcctttcagaaaattg

SEQ ID NO: 353114 - DNA, 25 bp, Artificial
  Probe
taggttcagtccaggctggcctttc

SEQ ID NO: 353115 - DNA, 25 bp, Artificial
  Probe
cagcaaagagagcttgcttgtaaat

SEQ ID NO: 353116 - DNA, 25 bp, Artificial
  Probe
agaccaaactgctggacttcttctt

SEQ ID NO: 353117 - DNA, 25 bp, Artificial
  Probe
ccctgacacaaaggaagtgtcccct

SEQ ID NO: 353118 - DNA, 25 bp, Artificial
  Probe
aaagtacacaaagaccaaactgctg

SEQ ID NO: 353119 - DNA, 25 bp, Artificial
  Probe
atggcacaattttggggcctgctct

SEQ ID NO: 353120 - DNA, 25 bp, Artificial
  Probe
ccaggtgccctctggccctataggt

SEQ ID NO: 353121 - DNA, 25 bp, Artificial
  Probe
tctgaactcctctggctcggactat

SEQ ID NO: 353122 - DNA, 25 bp, Artificial
  Probe
tgctctatgcttccacggccctgaa

SEQ ID NO: 353123 - DNA, 25 bp, Artificial
  Probe
tctttctggtagttcaaatgggttc

SEQ ID NO: 353124 - DNA, 25 bp, Artificial
  Probe
tttacgaattctttaaccagagaag

SEQ ID NO: 353125 - DNA, 25 bp, Artificial
  Probe
ttcagtccaggctggcctttcagaa

SEQ ID NO: 353126 - DNA, 25 bp, Artificial
  Probe
tctgaagccggaaaacttccctgtg

SEQ ID NO: 353127 - DNA, 25 bp, Artificial
  Probe
gttctcaagcttaggcatggcacaa

SEQ ID NO: 353128 - DNA, 25 bp, Artificial
  Probe
ctggcctttcagaaaattgttttag

SEQ ID NO: 353129 - DNA, 25 bp, Artificial
  Probe
agcttgcttgtaaataccaggattt

SEQ ID NO: 353130 - DNA, 25 bp, Artificial
  Probe
gacaagcctgtgtatattactccac

SEQ ID NO: 353131 - DNA, 25 bp, Artificial
  Probe
agccggaaaacttccctgtggatgc

SEQ ID NO: 353132 - DNA, 25 bp, Artificial
  Probe
aactcctctggctcggactatggcg

SEQ ID NO: 353133 - DNA, 25 bp, Artificial
  Probe
atgcactctgccagcaaagagagct

SEQ ID NO: 353134 - DNA, 25 bp, Artificial
  Probe
ctctgaagccggaaaacttccctgt

SEQ ID NO: 353135 - DNA, 25 bp, Artificial
  Probe
cctctggctcggactatggcgccat

SEQ ID NO: 353136 - DNA, 25 bp, Artificial
  Probe
cccacttgtccctgacacaaaggaa

SEQ ID NO: 353137 - DNA, 25 bp, Artificial
  Probe
ctgccagcaaagagagcttgcttgt

SEQ ID NO: 353138 - DNA, 25 bp, Artificial
  Probe
tttttctcatgtttagaccaaggaa

SEQ ID NO: 353139 - DNA, 25 bp, Artificial
  Probe
gcttgcttgtaaataccaggatttt

SEQ ID NO: 353140 - DNA, 25 bp, Artificial
  Probe
cttgctttatggtcggacctggtga

SEQ ID NO: 353141 - DNA, 25 bp, Artificial
  Probe
gactatggcgccatgtcttgctcta

SEQ ID NO: 353142 - DNA, 25 bp, Artificial
  Probe
cctgaactctgaagccggaaaactt

SEQ ID NO: 353143 - DNA, 25 bp, Artificial
  Probe
ctttatggtcggacctggtgagatg

SEQ ID NO: 353144 - DNA, 25 bp, Artificial
  Probe
aattttggggcctgctctatgcttc

SEQ ID NO: 353145 - DNA, 25 bp, Artificial
  Probe
ctcccaggtggcaatcgggcgacga

SEQ ID NO: 353146 - DNA, 25 bp, Artificial
  Probe
gcctggaacgctgtgctgcttcggt

SEQ ID NO: 353147 - DNA, 25 bp, Artificial
  Probe
aagcacaattttaaggctgtcatcc

SEQ ID NO: 353148 - DNA, 25 bp, Artificial
  Probe
aggcagccctacagcacctctttaa

SEQ ID NO: 353149 - DNA, 25 bp, Artificial
  Probe
ctctttaagaagcacaattttaagg

SEQ ID NO: 353150 - DNA, 25 bp, Artificial
  Probe
tccccagagccttgtggaggccagg

SEQ ID NO: 353151 - DNA, 25 bp, Artificial
  Probe
agccttgaagaagctgaaggagcag

SEQ ID NO: 353152 - DNA, 25 bp, Artificial
  Probe
ccacggaccagaaaagagcagctac

SEQ ID NO: 353153 - DNA, 25 bp, Artificial
  Probe
tcaggcactaacttatacagctaag

SEQ ID NO: 353154 - DNA, 25 bp, Artificial
  Probe
catccactttgctgggctcaaggct

SEQ ID NO: 353155 - DNA, 25 bp, Artificial
  Probe
tacaacctgggcacgggcacaggct

SEQ ID NO: 353156 - DNA, 25 bp, Artificial
  Probe
ctgacaggccgctctgtggagtttg

SEQ ID NO: 353157 - DNA, 25 bp, Artificial
  Probe
tgtggcgctggcagaagcagaaccc

SEQ ID NO: 353158 - DNA, 25 bp, Artificial
  Probe
acatcttggaccaggcagccctaca

SEQ ID NO: 353159 - DNA, 25 bp, Artificial
  Probe
ctaagattgagctttccaaagtatt

SEQ ID NO: 353160 - DNA, 25 bp, Artificial
  Probe
agatcctcagggtatccccaacaac

SEQ ID NO: 353161 - DNA, 25 bp, Artificial
  Probe
gagatggacatcttggaccaggcag

SEQ ID NO: 353162 - DNA, 25 bp, Artificial
  Probe
gggctgtaccaaaccctacggcaag

SEQ ID NO: 353163 - DNA, 25 bp, Artificial
  Probe
tgtaccaaaccctacggcaagtcca

SEQ ID NO: 353164 - DNA, 25 bp, Artificial
  Probe
cgctctgcgcgcatcggcgaagatc

SEQ ID NO: 353165 - DNA, 25 bp, Artificial
  Probe
gtggtcatcgacaacttccacaatt

SEQ ID NO: 353166 - DNA, 25 bp, Artificial
  Probe
ttggtgatgactacgctacggagga

SEQ ID NO: 353167 - DNA, 25 bp, Artificial
  Probe
gtggatctggccaagggccatatag

SEQ ID NO: 353168 - DNA, 25 bp, Artificial
  Probe
tgacaggccgctctgtggagtttga

SEQ ID NO: 353169 - DNA, 25 bp, Artificial
  Probe
attcatgtggtggatctggccaagg

SEQ ID NO: 353170 - DNA, 25 bp, Artificial
  Probe
ctggcagaagcagaacccttcaggc

SEQ ID NO: 353171 - DNA, 25 bp, Artificial
  Probe
ttcggtacttcatccccataggcgc

SEQ ID NO: 353172 - DNA, 25 bp, Artificial
  Probe
aaggcctcagggaagaagatcccgt

SEQ ID NO: 353173 - DNA, 25 bp, Artificial
  Probe
atccaggacctgtgccgggcagaca

SEQ ID NO: 353174 - DNA, 25 bp, Artificial
  Probe
gggctactcgcctgtggtcatcgac

SEQ ID NO: 353175 - DNA, 25 bp, Artificial
  Probe
tggagaagactccatgcctgagagc

SEQ ID NO: 353176 - DNA, 25 bp, Artificial
  Probe
attacattcatgtggtggatctggc

SEQ ID NO: 353177 - DNA, 25 bp, Artificial
  Probe
ccacacagtgttggagctgctggag

SEQ ID NO: 353178 - DNA, 25 bp, Artificial
  Probe
ccctacggcaagtccaagttcttca

SEQ ID NO: 353179 - DNA, 25 bp, Artificial
  Probe
ggaaacccgtacctgcctctggacg

SEQ ID NO: 353180 - DNA, 25 bp, Artificial
  Probe
acgggcacaggctattcggtcctgc

SEQ ID NO: 353181 - DNA, 25 bp, Artificial
  Probe
atgggaaacccgtacctgcctctgg

SEQ ID NO: 353182 - DNA, 25 bp, Artificial
  Probe
tgcctgagagcctgcgccgggtcca

SEQ ID NO: 353183 - DNA, 25 bp, Artificial
  Probe
ctcatgccctatgtctcccaggtgg

SEQ ID NO: 353184 - DNA, 25 bp, Artificial
  Probe
ttcttcattgaagagatgatccagg

SEQ ID NO: 353185 - DNA, 25 bp, Artificial
  Probe
ctattttccccagagtccagcagct

SEQ ID NO: 353186 - DNA, 25 bp, Artificial
  Probe
caatcgggcgacgagaggccctgaa

SEQ ID NO: 353187 - DNA, 25 bp, Artificial
  Probe
gagcagtgtggttgccggatctaca

SEQ ID NO: 353188 - DNA, 25 bp, Artificial
  Probe
tccaagccatggagaaggcctcagg

SEQ ID NO: 353189 - DNA, 25 bp, Artificial
  Probe
aagagatgatccaggacctgtgccg

SEQ ID NO: 353190 - DNA, 25 bp, Artificial
  Probe
gccctacagcacctctttaagaagc

SEQ ID NO: 353191 - DNA, 25 bp, Artificial
  Probe
tcagattatgccatgattgtctctc

SEQ ID NO: 353192 - DNA, 25 bp, Artificial
  Probe
ggggatgccacaccaggcttcctgc

SEQ ID NO: 353193 - DNA, 25 bp, Artificial
  Probe
gacggtactcaatggctctcttgct

SEQ ID NO: 353194 - DNA, 25 bp, Artificial
  Probe
tcctagcccttttagatagacggta

SEQ ID NO: 353195 - DNA, 25 bp, Artificial
  Probe
gagccttacttttcagtgtaactaa

SEQ ID NO: 353196 - DNA, 25 bp, Artificial
  Probe
ctggagcagcccaattttggagaaa

SEQ ID NO: 353197 - DNA, 25 bp, Artificial
  Probe
ttctacagggttgacttttcttatg

SEQ ID NO: 353198 - DNA, 25 bp, Artificial
  Probe
aactcttggtccaggtggatgcaga

SEQ ID NO: 353199 - DNA, 25 bp, Artificial
  Probe
acaggctgagccttacttttcagtg

SEQ ID NO: 353200 - DNA, 25 bp, Artificial
  Probe
ctgtgcctggagcagcccaattttg

SEQ ID NO: 353201 - DNA, 25 bp, Artificial
  Probe
cagggttgacttttcttatgttcta

SEQ ID NO: 353202 - DNA, 25 bp, Artificial
  Probe
gactttgaactcttggtccaggtgg

SEQ ID NO: 353203 - DNA, 25 bp, Artificial
  Probe
ccttgcagtgagagtgagagccagc

SEQ ID NO: 353204 - DNA, 25 bp, Artificial
  Probe
tgaatcagattatgccatgattgtc

SEQ ID NO: 353205 - DNA, 25 bp, Artificial
  Probe
attgtctctctgtgcctggagcagc

SEQ ID NO: 353206 - DNA, 25 bp, Artificial
  Probe
agccacaggctgagccttacttttc

SEQ ID NO: 353207 - DNA, 25 bp, Artificial
  Probe
gtactcaatggctctcttgctgggg

SEQ ID NO: 353208 - DNA, 25 bp, Artificial
  Probe
ggtcgctggagaagccttctgcagt

SEQ ID NO: 353209 - DNA, 25 bp, Artificial
  Probe
acatctccttgcagtgagagtgaga

SEQ ID NO: 353210 - DNA, 25 bp, Artificial
  Probe
ctgagccttacttttcagtgtaact

SEQ ID NO: 353211 - DNA, 25 bp, Artificial
  Probe
tatcggggtcgctggagaagccttc

SEQ ID NO: 353212 - DNA, 25 bp, Artificial
  Probe
ctagcccttttagatagacggtact

SEQ ID NO: 353213 - DNA, 25 bp, Artificial
  Probe
gggatgccacaccaggcttcctgct

SEQ ID NO: 353214 - DNA, 25 bp, Artificial
  Probe
ccagccacaggctgagccttacttt

SEQ ID NO: 353215 - DNA, 25 bp, Artificial
  Probe
cagtttactccaggaaaacggatgt

SEQ ID NO: 353216 - DNA, 25 bp, Artificial
  Probe
tcccacttctatttctacagggttg

SEQ ID NO: 353217 - DNA, 25 bp, Artificial
  Probe
ctctctgtgcctggagcagcccaat

SEQ ID NO: 353218 - DNA, 25 bp, Artificial
  Probe
gaaggatcacatacccaacttgagc

SEQ ID NO: 353219 - DNA, 25 bp, Artificial
  Probe
agagtgagagccagccacaggctga

SEQ ID NO: 353220 - DNA, 25 bp, Artificial
  Probe
ctcttggtccaggtggatgcagaag

SEQ ID NO: 353221 - DNA, 25 bp, Artificial
  Probe
cagtgtgtatccaaggatgactttg

SEQ ID NO: 353222 - DNA, 25 bp, Artificial
  Probe
gtttactccaggaaaacggatgtat

SEQ ID NO: 353223 - DNA, 25 bp, Artificial
  Probe
cttctatttctacagggttgacttt

SEQ ID NO: 353224 - DNA, 25 bp, Artificial
  Probe
tagatagacggtactcaatggctct

SEQ ID NO: 353225 - DNA, 25 bp, Artificial
  Probe
cccttttagatagacggtactcaat

SEQ ID NO: 353226 - DNA, 25 bp, Artificial
  Probe
ggagcagcccaattttggagaaaaa

SEQ ID NO: 353227 - DNA, 25 bp, Artificial
  Probe
tgaactcttggtccaggtggatgca

SEQ ID NO: 353228 - DNA, 25 bp, Artificial
  Probe
aggttattcaggtatcggggtcgct

SEQ ID NO: 353229 - DNA, 25 bp, Artificial
  Probe
gtccaggtggatgcagaaggatcac

SEQ ID NO: 353230 - DNA, 25 bp, Artificial
  Probe
ttctcctagcccttttagatagacg

SEQ ID NO: 353231 - DNA, 25 bp, Artificial
  Probe
atcggggtcgctggagaagccttct

SEQ ID NO: 353232 - DNA, 25 bp, Artificial
  Probe
gctggagaagccttctgcagtttac

SEQ ID NO: 353233 - DNA, 25 bp, Artificial
  Probe
ggggacatctccttgcagtgagagt

SEQ ID NO: 353234 - DNA, 25 bp, Artificial
  Probe
cagaaggatcacatacccaacttga

SEQ ID NO: 353235 - DNA, 25 bp, Artificial
  Probe
atctccttgcagtgagagtgagagc

SEQ ID NO: 353236 - DNA, 25 bp, Artificial
  Probe
tgtgcctggagcagcccaattttgg

SEQ ID NO: 353237 - DNA, 25 bp, Artificial
  Probe
ctgctactacaccgtgtttgacaga

SEQ ID NO: 353238 - DNA, 25 bp, Artificial
  Probe
tttattggctgctactacaccgtgt

SEQ ID NO: 353239 - DNA, 25 bp, Artificial
  Probe
ttggctgctactacaccgtgtttga

SEQ ID NO: 353240 - DNA, 25 bp, Artificial
  Probe
tattggctgctactacaccgtgttt

SEQ ID NO: 353241 - DNA, 25 bp, Artificial
  Probe
gctactacaccgtgtttgacagaga

SEQ ID NO: 353242 - DNA, 25 bp, Artificial
  Probe
attggctgctactacaccgtgtttg

SEQ ID NO: 353243 - DNA, 25 bp, Artificial
  Probe
ggctgctactacaccgtgtttgaca

SEQ ID NO: 353244 - DNA, 25 bp, Artificial
  Probe
actacaccgtgtttgacagagaata

SEQ ID NO: 353245 - DNA, 25 bp, Artificial
  Probe
tgtctttattggctgctactacacc

SEQ ID NO: 353246 - DNA, 25 bp, Artificial
  Probe
gatgtctttattggctgctactaca

SEQ ID NO: 353247 - DNA, 25 bp, Artificial
  Probe
ttattggctgctactacaccgtgtt

SEQ ID NO: 353248 - DNA, 25 bp, Artificial
  Probe
tctttattggctgctactacaccgt

SEQ ID NO: 353249 - DNA, 25 bp, Artificial
  Probe
ctactacaccgtgtttgacagagaa

SEQ ID NO: 353250 - DNA, 25 bp, Artificial
  Probe
ctttattggctgctactacaccgtg

SEQ ID NO: 353251 - DNA, 25 bp, Artificial
  Probe
gtctttattggctgctactacaccg

SEQ ID NO: 353252 - DNA, 25 bp, Artificial
  Probe
actgtcagggaactggatcagagtc

SEQ ID NO: 353253 - DNA, 25 bp, Artificial
  Probe
ctgtcagggaactggatcagagtcc

SEQ ID NO: 353254 - DNA, 25 bp, Artificial
  Probe
gctgctactacaccgtgtttgacag

SEQ ID NO: 353255 - DNA, 25 bp, Artificial
  Probe
ctacaccgtgtttgacagagaatac

SEQ ID NO: 353256 - DNA, 25 bp, Artificial
  Probe
atgtctttattggctgctactacac

SEQ ID NO: 353257 - DNA, 25 bp, Artificial
  Probe
tgtcagggaactggatcagagtcca

SEQ ID NO: 353258 - DNA, 25 bp, Artificial
  Probe
tacaccgtgtttgacagagaataca

SEQ ID NO: 353259 - DNA, 25 bp, Artificial
  Probe
tggctgctactacaccgtgtttgac

SEQ ID NO: 353260 - DNA, 25 bp, Artificial
  Probe
tactacaccgtgtttgacagagaat

SEQ ID NO: 353261 - DNA, 25 bp, Artificial
  Probe
tgctactacaccgtgtttgacagag

SEQ ID NO: 353262 - DNA, 25 bp, Artificial
  Probe
gcacattgtgcctaagcatttttcg

SEQ ID NO: 353263 - DNA, 25 bp, Artificial
  Probe
ctggcaaggggcggcctggtactgg

SEQ ID NO: 353264 - DNA, 25 bp, Artificial
  Probe
tagcaagaacgaggccttccgtgtc

SEQ ID NO: 353265 - DNA, 25 bp, Artificial
  Probe
agcacattgtgcctaagcatttttc

SEQ ID NO: 353266 - DNA, 25 bp, Artificial
  Probe
ccacagcacattgtgcctaagcatt

SEQ ID NO: 353267 - DNA, 25 bp, Artificial
  Probe
agccacagcacattgtgcctaagca

SEQ ID NO: 353268 - DNA, 25 bp, Artificial
  Probe
tagttcagagccacagcacattgtg

SEQ ID NO: 353269 - DNA, 25 bp, Artificial
  Probe
ttgtgcctaagcatttttcgttttt

SEQ ID NO: 353270 - DNA, 25 bp, Artificial
  Probe
ttttccgtatgttttgtaagcaaca

SEQ ID NO: 353271 - DNA, 25 bp, Artificial
  Probe
cacagcacattgtgcctaagcattt

SEQ ID NO: 353272 - DNA, 25 bp, Artificial
  Probe
tgtgcctaagcatttttcgtttttt

SEQ ID NO: 353273 - DNA, 25 bp, Artificial
  Probe
caagaacgaggccttccgtgtcttt

SEQ ID NO: 353274 - DNA, 25 bp, Artificial
  Probe
cattgtgcctaagcatttttcgttt

SEQ ID NO: 353275 - DNA, 25 bp, Artificial
  Probe
cagagccacagcacattgtgcctaa

SEQ ID NO: 353276 - DNA, 25 bp, Artificial
  Probe
gttcagagccacagcacattgtgcc

SEQ ID NO: 353277 - DNA, 25 bp, Artificial
  Probe
cacattgtgcctaagcatttttcgt

SEQ ID NO: 353278 - DNA, 25 bp, Artificial
  Probe
tcttttccgtatgttttgtaagcaa

SEQ ID NO: 353279 - DNA, 25 bp, Artificial
  Probe
ttcagagccacagcacattgtgcct

SEQ ID NO: 353280 - DNA, 25 bp, Artificial
  Probe
cagcacattgtgcctaagcattttt

SEQ ID NO: 353281 - DNA, 25 bp, Artificial
  Probe
ttagcaagaacgaggccttccgtgt

SEQ ID NO: 353282 - DNA, 25 bp, Artificial
  Probe
ttcttttccgtatgttttgtaagca

SEQ ID NO: 353283 - DNA, 25 bp, Artificial
  Probe
ggcaaggggcggcctggtactggct

SEQ ID NO: 353284 - DNA, 25 bp, Artificial
  Probe
ttccgtatgttttgtaagcaacaaa

SEQ ID NO: 353285 - DNA, 25 bp, Artificial
  Probe
gcaaggggcggcctggtactggctt

SEQ ID NO: 353286 - DNA, 25 bp, Artificial
  Probe
agagccacagcacattgtgcctaag

SEQ ID NO: 353287 - DNA, 25 bp, Artificial
  Probe
agcaagaacgaggccttccgtgtct

SEQ ID NO: 353288 - DNA, 25 bp, Artificial
  Probe
gccacagcacattgtgcctaagcat

SEQ ID NO: 353289 - DNA, 25 bp, Artificial
  Probe
agttcagagccacagcacattgtgc

SEQ ID NO: 353290 - DNA, 25 bp, Artificial
  Probe
gcaagaacgaggccttccgtgtctt

SEQ ID NO: 353291 - DNA, 25 bp, Artificial
  Probe
gagccacagcacattgtgcctaagc

SEQ ID NO: 353292 - DNA, 25 bp, Artificial
  Probe
acattgtgcctaagcatttttcgtt

SEQ ID NO: 353293 - DNA, 25 bp, Artificial
  Probe
tcagagccacagcacattgtgccta

SEQ ID NO: 353294 - DNA, 25 bp, Artificial
  Probe
tttccgtatgttttgtaagcaacaa

SEQ ID NO: 353295 - DNA, 25 bp, Artificial
  Probe
tggcaaggggcggcctggtactggc

SEQ ID NO: 353296 - DNA, 25 bp, Artificial
  Probe
attgtgcctaagcatttttcgtttt

SEQ ID NO: 353297 - DNA, 25 bp, Artificial
  Probe
acagcacattgtgcctaagcatttt

SEQ ID NO: 353298 - DNA, 25 bp, Artificial
  Probe
atgcaagattccagtatgcgaaaaa

SEQ ID NO: 353299 - DNA, 25 bp, Artificial
  Probe
ctgatggtgcaatgacctttcaata

SEQ ID NO: 353300 - DNA, 25 bp, Artificial
  Probe
tgaaaacgtggctgcttcaaggatc

SEQ ID NO: 353301 - DNA, 25 bp, Artificial
  Probe
tcactctccctggtgtcgggcatga

SEQ ID NO: 353302 - DNA, 25 bp, Artificial
  Probe
cactctccctggtgtcgggcatgac

SEQ ID NO: 353303 - DNA, 25 bp, Artificial
  Probe
ccttcccaccagaagcatgcaatga

SEQ ID NO: 353304 - DNA, 25 bp, Artificial
  Probe
atggtgcaatgacctttcaatagga

SEQ ID NO: 353305 - DNA, 25 bp, Artificial
  Probe
gcaatgacctttcaataggaaaaac

SEQ ID NO: 353306 - DNA, 25 bp, Artificial
  Probe
atgacctttcaataggaaaaactga

SEQ ID NO: 353307 - DNA, 25 bp, Artificial
  Probe
agacttgcgacaatgcaaaccatca

SEQ ID NO: 353308 - DNA, 25 bp, Artificial
  Probe
gcgacaatgcaaaccatcattgaaa

SEQ ID NO: 353309 - DNA, 25 bp, Artificial
  Probe
cggatttcactctccctggtgtcgg

SEQ ID NO: 353310 - DNA, 25 bp, Artificial
  Probe
tttcactctccctggtgtcgggcat

SEQ ID NO: 353311 - DNA, 25 bp, Artificial
  Probe
tgagccggatttcactctccctggt

SEQ ID NO: 353312 - DNA, 25 bp, Artificial
  Probe
tgagacttgcgacaatgcaaaccat

SEQ ID NO: 353313 - DNA, 25 bp, Artificial
  Probe
ccggatttcactctccctggtgtcg

SEQ ID NO: 353314 - DNA, 25 bp, Artificial
  Probe
cgaatattgctgatggtgcaatgac

SEQ ID NO: 353315 - DNA, 25 bp, Artificial
  Probe
ctggtgtcgggcatgacacgaatat

SEQ ID NO: 353316 - DNA, 25 bp, Artificial
  Probe
ggtgtcgggcatgacacgaatattg

SEQ ID NO: 353317 - DNA, 25 bp, Artificial
  Probe
ctctccctggtgtcgggcatgacac

SEQ ID NO: 353318 - DNA, 25 bp, Artificial
  Probe
gcatgacacgaatattgctgatggt

SEQ ID NO: 353319 - DNA, 25 bp, Artificial
  Probe
atattgctgatggtgcaatgacctt

SEQ ID NO: 353320 - DNA, 25 bp, Artificial
  Probe
tgacctttcaataggaaaaactgat

SEQ ID NO: 353321 - DNA, 25 bp, Artificial
  Probe
catgcaagattccagtatgcgaaaa

SEQ ID NO: 353322 - DNA, 25 bp, Artificial
  Probe
tcactgaaaacgtggctgcttcaag

SEQ ID NO: 353323 - DNA, 25 bp, Artificial
  Probe
accagaagcatgcaatgagaggaaa

SEQ ID NO: 353324 - DNA, 25 bp, Artificial
  Probe
ttttttccttcagtgccttatggaa

SEQ ID NO: 353325 - DNA, 25 bp, Artificial
  Probe
tttttccttcagtgccttatggaac

SEQ ID NO: 353326 - DNA, 25 bp, Artificial
  Probe
gccggatttcactctccctggtgtc

SEQ ID NO: 353327 - DNA, 25 bp, Artificial
  Probe
cacgaatattgctgatggtgcaatg

SEQ ID NO: 353328 - DNA, 25 bp, Artificial
  Probe
tggtgcaatgacctttcaataggaa

SEQ ID NO: 353329 - DNA, 25 bp, Artificial
  Probe
atggacatgcaagattccagtatgc

SEQ ID NO: 353330 - DNA, 25 bp, Artificial
  Probe
gacacgaatattgctgatggtgcaa

SEQ ID NO: 353331 - DNA, 25 bp, Artificial
  Probe
gacttgcgacaatgcaaaccatcat

SEQ ID NO: 353332 - DNA, 25 bp, Artificial
  Probe
aaatcactgaaaacgtggctgcttc

SEQ ID NO: 353333 - DNA, 25 bp, Artificial
  Probe
ttcccaccagaagcatgcaatgaga

SEQ ID NO: 353334 - DNA, 25 bp, Artificial
  Probe
attgctgatggtgcaatgacctttc

SEQ ID NO: 353335 - DNA, 25 bp, Artificial
  Probe
aatgacctttcaataggaaaaactg

SEQ ID NO: 353336 - DNA, 25 bp, Artificial
  Probe
ttgctgatggtgcaatgacctttca

SEQ ID NO: 353337 - DNA, 25 bp, Artificial
  Probe
gagacttgcgacaatgcaaaccatc

SEQ ID NO: 353338 - DNA, 25 bp, Artificial
  Probe
aggaaatcactgaaaacgtggctgc

SEQ ID NO: 353339 - DNA, 25 bp, Artificial
  Probe
tggacatgcaagattccagtatgcg

SEQ ID NO: 353340 - DNA, 25 bp, Artificial
  Probe
tgtcgggcatgacacgaatattgct

SEQ ID NO: 353341 - DNA, 25 bp, Artificial
  Probe
tcccaccagaagcatgcaatgagag

SEQ ID NO: 353342 - DNA, 25 bp, Artificial
  Probe
cttgcgacaatgcaaaccatcattg

SEQ ID NO: 353343 - DNA, 25 bp, Artificial
  Probe
atgacacgaatattgctgatggtgc

SEQ ID NO: 353344 - DNA, 25 bp, Artificial
  Probe
atggagatcgccacctacaggaaac

SEQ ID NO: 353345 - DNA, 25 bp, Artificial
  Probe
tgtctgtgagcaccagccacactag

SEQ ID NO: 353346 - DNA, 25 bp, Artificial
  Probe
gctggccctggacatggagatcgcc

SEQ ID NO: 353347 - DNA, 25 bp, Artificial
  Probe
ctaccaggagctgatgaacaccaag

SEQ ID NO: 353348 - DNA, 25 bp, Artificial
  Probe
atgaacaccaagctggccctggaca

SEQ ID NO: 353349 - DNA, 25 bp, Artificial
  Probe
ctgatgaacaccaagctggccctgg

SEQ ID NO: 353350 - DNA, 25 bp, Artificial
  Probe
ccggaggcagctatggtggttcctc

SEQ ID NO: 353351 - DNA, 25 bp, Artificial
  Probe
tgagcaccagccacactagcatgag

SEQ ID NO: 353352 - DNA, 25 bp, Artificial
  Probe
actaccaggagctgatgaacaccaa

SEQ ID NO: 353353 - DNA, 25 bp, Artificial
  Probe
cacctacaggaaacttctggaagga

SEQ ID NO: 353354 - DNA, 25 bp, Artificial
  Probe
ggttgctgcgtgactaccaggagct

SEQ ID NO: 353355 - DNA, 25 bp, Artificial
  Probe
ccaagctggccctggacatggagat

SEQ ID NO: 353356 - DNA, 25 bp, Artificial
  Probe
gagatcgccacctacaggaaacttc

SEQ ID NO: 353357 - DNA, 25 bp, Artificial
  Probe
ccagccacactagcatgagcggaac

SEQ ID NO: 353358 - DNA, 25 bp, Artificial
  Probe
tgaacaccaagctggccctggacat

SEQ ID NO: 353359 - DNA, 25 bp, Artificial
  Probe
atcaggatgtctggagaatgcaccc

SEQ ID NO: 353360 - DNA, 25 bp, Artificial
  Probe
tctgtgagcaccagccacactagca

SEQ ID NO: 353361 - DNA, 25 bp, Artificial
  Probe
ccaacgtgagcgtgtctgtgagcac

SEQ ID NO: 353362 - DNA, 25 bp, Artificial
  Probe
tcgccacctacaggaaacttctgga

SEQ ID NO: 353363 - DNA, 25 bp, Artificial
  Probe
caagctggccctggacatggagatc

SEQ ID NO: 353364 - DNA, 25 bp, Artificial
  Probe
agatcaggatgtctggagaatgcac

SEQ ID NO: 353365 - DNA, 25 bp, Artificial
  Probe
cacactagcatgagcggaacgagca

SEQ ID NO: 353366 - DNA, 25 bp, Artificial
  Probe
accagccacactagcatgagcggaa

SEQ ID NO: 353367 - DNA, 25 bp, Artificial
  Probe
tggagatcgccacctacaggaaact

SEQ ID NO: 353368 - DNA, 25 bp, Artificial
  Probe
gtgagcgtgtctgtgagcaccagcc

SEQ ID NO: 353369 - DNA, 25 bp, Artificial
  Probe
tgcgtgactaccaggagctgatgaa

SEQ ID NO: 353370 - DNA, 25 bp, Artificial
  Probe
cctacaggaaacttctggaaggaga

SEQ ID NO: 353371 - DNA, 25 bp, Artificial
  Probe
ctacaggaaacttctggaaggagag

SEQ ID NO: 353372 - DNA, 25 bp, Artificial
  Probe
ccacactagcatgagcggaacgagc

SEQ ID NO: 353373 - DNA, 25 bp, Artificial
  Probe
agcgtgtctgtgagcaccagccaca

SEQ ID NO: 353374 - DNA, 25 bp, Artificial
  Probe
agccacactagcatgagcggaacga

SEQ ID NO: 353375 - DNA, 25 bp, Artificial
  Probe
gctgcgtgactaccaggagctgatg

SEQ ID NO: 353376 - DNA, 25 bp, Artificial
  Probe
ccacctacaggaaacttctggaagg

SEQ ID NO: 353377 - DNA, 25 bp, Artificial
  Probe
aacgtgagcgtgtctgtgagcacca

SEQ ID NO: 353378 - DNA, 25 bp, Artificial
  Probe
cctggacatggagatcgccacctac

SEQ ID NO: 353379 - DNA, 25 bp, Artificial
  Probe
agcaccagccacactagcatgagcg

SEQ ID NO: 353380 - DNA, 25 bp, Artificial
  Probe
tagcatgagcggaacgagcagccga

SEQ ID NO: 353381 - DNA, 25 bp, Artificial
  Probe
tgatgaacaccaagctggccctgga

SEQ ID NO: 353382 - DNA, 25 bp, Artificial
  Probe
ctccggaggcagctatggtggttcc

SEQ ID NO: 353383 - DNA, 25 bp, Artificial
  Probe
gcgtgactaccaggagctgatgaac

SEQ ID NO: 353384 - DNA, 25 bp, Artificial
  Probe
gtgactaccaggagctgatgaacac

SEQ ID NO: 353385 - DNA, 25 bp, Artificial
  Probe
gcaccagccacactagcatgagcgg

SEQ ID NO: 353386 - DNA, 25 bp, Artificial
  Probe
agctgatgaacaccaagctggccct

SEQ ID NO: 353387 - DNA, 25 bp, Artificial
  Probe
agatcgccacctacaggaaacttct

SEQ ID NO: 353388 - DNA, 25 bp, Artificial
  Probe
ttgctgcgtgactaccaggagctga

SEQ ID NO: 353389 - DNA, 25 bp, Artificial
  Probe
gagcgtgtctgtgagcaccagccac

SEQ ID NO: 353390 - DNA, 25 bp, Artificial
  Probe
aacgggtgaccaaaccagccttcag

SEQ ID NO: 353391 - DNA, 25 bp, Artificial
  Probe
cttgtggtgtgaccatgttcattat

SEQ ID NO: 353392 - DNA, 25 bp, Artificial
  Probe
accaaaccagccttcagagcgtttt

SEQ ID NO: 353393 - DNA, 25 bp, Artificial
  Probe
gaaacaatgtccaacaataaaccgg

SEQ ID NO: 353394 - DNA, 25 bp, Artificial
  Probe
ctgccaatgggaacgctcaaaatga

SEQ ID NO: 353395 - DNA, 25 bp, Artificial
  Probe
aaaccagccttcagagcgttttctg

SEQ ID NO: 353396 - DNA, 25 bp, Artificial
  Probe
tcctacttcagactttacttgtggt

SEQ ID NO: 353397 - DNA, 25 bp, Artificial
  Probe
tggtgtgaccatgttcattatactc

SEQ ID NO: 353398 - DNA, 25 bp, Artificial
  Probe
tccgagatcaccaccaaggacttga

SEQ ID NO: 353399 - DNA, 25 bp, Artificial
  Probe
gtgtgaccatgttcattatactctc

SEQ ID NO: 353400 - DNA, 25 bp, Artificial
  Probe
agcgttttctgtcctacttcagact

SEQ ID NO: 353401 - DNA, 25 bp, Artificial
  Probe
caatgggaacgctcaaaatgaggaa

SEQ ID NO: 353402 - DNA, 25 bp, Artificial
  Probe
tttttgtgtatgtacctagctgtac

SEQ ID NO: 353403 - DNA, 25 bp, Artificial
  Probe
gcgttttctgtcctacttcagactt

SEQ ID NO: 353404 - DNA, 25 bp, Artificial
  Probe
tgtgtatgtacctagctgtactata

SEQ ID NO: 353405 - DNA, 25 bp, Artificial
  Probe
gtatgtacctagctgtactataagt

SEQ ID NO: 353406 - DNA, 25 bp, Artificial
  Probe
accagccttcagagcgttttctgtc

SEQ ID NO: 353407 - DNA, 25 bp, Artificial
  Probe
gcagtggacaccagctccgagatca

SEQ ID NO: 353408 - DNA, 25 bp, Artificial
  Probe
gttcattatactctcaaaggagaaa

SEQ ID NO: 353409 - DNA, 25 bp, Artificial
  Probe
tacctagctgtactataagtagttg

SEQ ID NO: 353410 - DNA, 25 bp, Artificial
  Probe
cgggtgaccaaaccagccttcagag

SEQ ID NO: 353411 - DNA, 25 bp, Artificial
  Probe
taacgggtgaccaaaccagccttca

SEQ ID NO: 353412 - DNA, 25 bp, Artificial
  Probe
cctgccaatgggaacgctcaaaatg

SEQ ID NO: 353413 - DNA, 25 bp, Artificial
  Probe
cggcagtggacaccagctccgagat

SEQ ID NO: 353414 - DNA, 25 bp, Artificial
  Probe
gccttcagagcgttttctgtcctac

SEQ ID NO: 353415 - DNA, 25 bp, Artificial
  Probe
acgggtgaccaaaccagccttcaga

SEQ ID NO: 353416 - DNA, 25 bp, Artificial
  Probe
cctacttcagactttacttgtggtg

SEQ ID NO: 353417 - DNA, 25 bp, Artificial
  Probe
cttcagactttacttgtggtgtgac

SEQ ID NO: 353418 - DNA, 25 bp, Artificial
  Probe
ttgtgtatgtacctagctgtactat

SEQ ID NO: 353419 - DNA, 25 bp, Artificial
  Probe
atgtacctagctgtactataagtag

SEQ ID NO: 353420 - DNA, 25 bp, Artificial
  Probe
cagtggacaccagctccgagatcac

SEQ ID NO: 353421 - DNA, 25 bp, Artificial
  Probe
tgtggtgtgaccatgttcattatac

SEQ ID NO: 353422 - DNA, 25 bp, Artificial
  Probe
tgtacctagctgtactataagtagt

SEQ ID NO: 353423 - DNA, 25 bp, Artificial
  Probe
acgcggcagtggacaccagctccga

SEQ ID NO: 353424 - DNA, 25 bp, Artificial
  Probe
tcagactttacttgtggtgtgacca

SEQ ID NO: 353425 - DNA, 25 bp, Artificial
  Probe
ttttgtgtatgtacctagctgtact

SEQ ID NO: 353426 - DNA, 25 bp, Artificial
  Probe
tgtcctacttcagactttacttgtg

SEQ ID NO: 353427 - DNA, 25 bp, Artificial
  Probe
aatgataacgggtgaccaaaccagc

SEQ ID NO: 353428 - DNA, 25 bp, Artificial
  Probe
catgttcattatactctcaaaggag

SEQ ID NO: 353429 - DNA, 25 bp, Artificial
  Probe
ggaaaagctaaccttacgcaccgtg

SEQ ID NO: 353430 - DNA, 25 bp, Artificial
  Probe
gacgcggcagtggacaccagctccg

SEQ ID NO: 353431 - DNA, 25 bp, Artificial
  Probe
agctccgagatcaccaccaaggact

SEQ ID NO: 353432 - DNA, 25 bp, Artificial
  Probe
gtggacaccagctccgagatcacca

SEQ ID NO: 353433 - DNA, 25 bp, Artificial
  Probe
cttcagagcgttttctgtcctactt

SEQ ID NO: 353434 - DNA, 25 bp, Artificial
  Probe
acttcagactttacttgtggtgtga

SEQ ID NO: 353435 - DNA, 25 bp, Artificial
  Probe
actttacttgtggtgtgaccatgtt

SEQ ID NO: 353436 - DNA, 25 bp, Artificial
  Probe
aggcatttcttcgaaaactgtagga

SEQ ID NO: 353437 - DNA, 25 bp, Artificial
  Probe
tgctaacgatacctatttgatgtgt

SEQ ID NO: 353438 - DNA, 25 bp, Artificial
  Probe
cacaggcatttcttcgaaaactgta

SEQ ID NO: 353439 - DNA, 25 bp, Artificial
  Probe
ttcttcgaaaactgtaggaactcaa

SEQ ID NO: 353440 - DNA, 25 bp, Artificial
  Probe
ttctatagggccaaggaaagtctaa

SEQ ID NO: 353441 - DNA, 25 bp, Artificial
  Probe
tttcttcgaaaactgtaggaactca

SEQ ID NO: 353442 - DNA, 25 bp, Artificial
  Probe
acatagatgccatggaaggcttcta

SEQ ID NO: 353443 - DNA, 25 bp, Artificial
  Probe
tgccatggaaggcttctatagggcc

SEQ ID NO: 353444 - DNA, 25 bp, Artificial
  Probe
ggaagacacaggcatttcttcgaaa

SEQ ID NO: 353445 - DNA, 25 bp, Artificial
  Probe
caggcatttcttcgaaaactgtagg

SEQ ID NO: 353446 - DNA, 25 bp, Artificial
  Probe
gacacaggcatttcttcgaaaactg

SEQ ID NO: 353447 - DNA, 25 bp, Artificial
  Probe
ccatggaaggcttctatagggccaa

SEQ ID NO: 353448 - DNA, 25 bp, Artificial
  Probe
cttctatagggccaaggaaagtcta

SEQ ID NO: 353449 - DNA, 25 bp, Artificial
  Probe
aactgtaggaactcaatcaagaaac

SEQ ID NO: 353450 - DNA, 25 bp, Artificial
  Probe
aagtctaaagctgggaaagagttct

SEQ ID NO: 353451 - DNA, 25 bp, Artificial
  Probe
actgtaggaactcaatcaagaaaca

SEQ ID NO: 353452 - DNA, 25 bp, Artificial
  Probe
aactcaatcaagaaacatagatgcc

SEQ ID NO: 353453 - DNA, 25 bp, Artificial
  Probe
atgctaacgatacctatttgatgtg

SEQ ID NO: 353454 - DNA, 25 bp, Artificial
  Probe
acaggcatttcttcgaaaactgtag

SEQ ID NO: 353455 - DNA, 25 bp, Artificial
  Probe
tcttcgaaaactgtaggaactcaat

SEQ ID NO: 353456 - DNA, 25 bp, Artificial
  Probe
aagacacaggcatttcttcgaaaac

SEQ ID NO: 353457 - DNA, 25 bp, Artificial
  Probe
gaagacacaggcatttcttcgaaaa

SEQ ID NO: 353458 - DNA, 25 bp, Artificial
  Probe
agatgccatggaaggcttctatagg

SEQ ID NO: 353459 - DNA, 25 bp, Artificial
  Probe
aacatagatgccatggaaggcttct

SEQ ID NO: 353460 - DNA, 25 bp, Artificial
  Probe
ggacagttgatacctggcatcaggt

SEQ ID NO: 353461 - DNA, 25 bp, Artificial
  Probe
tagatgccatggaaggcttctatag

SEQ ID NO: 353462 - DNA, 25 bp, Artificial
  Probe
acacaggcatttcttcgaaaactgt

SEQ ID NO: 353463 - DNA, 25 bp, Artificial
  Probe
ggcatttcttcgaaaactgtaggaa

SEQ ID NO: 353464 - DNA, 25 bp, Artificial
  Probe
gctaacgatacctatttgatgtgtt

SEQ ID NO: 353465 - DNA, 25 bp, Artificial
  Probe
catttcttcgaaaactgtaggaact

SEQ ID NO: 353466 - DNA, 25 bp, Artificial
  Probe
taacgatacctatttgatgtgtttg

SEQ ID NO: 353467 - DNA, 25 bp, Artificial
  Probe
gcatttcttcgaaaactgtaggaac

SEQ ID NO: 353468 - DNA, 25 bp, Artificial
  Probe
ggaactcaatcaagaaacatagatg

SEQ ID NO: 353469 - DNA, 25 bp, Artificial
  Probe
gacagttgatacctggcatcaggtt

SEQ ID NO: 353470 - DNA, 25 bp, Artificial
  Probe
gccatggaaggcttctatagggcca

SEQ ID NO: 353471 - DNA, 25 bp, Artificial
  Probe
atggaaggcttctatagggccaagg

SEQ ID NO: 353472 - DNA, 25 bp, Artificial
  Probe
tctatagggccaaggaaagtctaaa

SEQ ID NO: 353473 - DNA, 25 bp, Artificial
  Probe
ctaacgatacctatttgatgtgttt

SEQ ID NO: 353474 - DNA, 25 bp, Artificial
  Probe
tatgctaacgatacctatttgatgt

SEQ ID NO: 353475 - DNA, 25 bp, Artificial
  Probe
aaggcttctatagggccaaggaaag

SEQ ID NO: 353476 - DNA, 25 bp, Artificial
  Probe
tgatgtgtttgtggaagagaggaag

SEQ ID NO: 353477 - DNA, 25 bp, Artificial
  Probe
gaactcaatcaagaaacatagatgc

SEQ ID NO: 353478 - DNA, 25 bp, Artificial
  Probe
catggaaggcttctatagggccaag

SEQ ID NO: 353479 - DNA, 25 bp, Artificial
  Probe
ggaaggcttctatagggccaaggaa

SEQ ID NO: 353480 - DNA, 25 bp, Artificial
  Probe
agacacaggcatttcttcgaaaact

SEQ ID NO: 353481 - DNA, 25 bp, Artificial
  Probe
ttatgctaacgatacctatttgatg

SEQ ID NO: 353482 - DNA, 25 bp, Artificial
  Probe
ggaatattgtactttgggtgtataa

SEQ ID NO: 353483 - DNA, 25 bp, Artificial
  Probe
attttgatttcttattatgtctttt

SEQ ID NO: 353484 - DNA, 25 bp, Artificial
  Probe
tataactcctttggagatgctaata

SEQ ID NO: 353485 - DNA, 25 bp, Artificial
  Probe
ataactcctttggagatgctaataa

SEQ ID NO: 353486 - DNA, 25 bp, Artificial
  Probe
tttgcacattatatacatagtgcct

SEQ ID NO: 353487 - DNA, 25 bp, Artificial
  Probe
aattgcaatataatgctcttatagt

SEQ ID NO: 353488 - DNA, 25 bp, Artificial
  Probe
gtataactcctttggagatgctaat

SEQ ID NO: 353489 - DNA, 25 bp, Artificial
  Probe
gggtgtataactcctttggagatgc

SEQ ID NO: 353490 - DNA, 25 bp, Artificial
  Probe
tgcacattatatacatagtgcctgt

SEQ ID NO: 353491 - DNA, 25 bp, Artificial
  Probe
tgttctgtattgagtattgataaac

SEQ ID NO: 353492 - DNA, 25 bp, Artificial
  Probe
tgtactttgggtgtataactccttt

SEQ ID NO: 353493 - DNA, 25 bp, Artificial
  Probe
ttacacccaatttttttagcaattg

SEQ ID NO: 353494 - DNA, 25 bp, Artificial
  Probe
ttgcacattatatacatagtgcctg

SEQ ID NO: 353495 - DNA, 25 bp, Artificial
  Probe
aatattttgatttcttattatgtct

SEQ ID NO: 353496 - DNA, 25 bp, Artificial
  Probe
acatagtgcctgtaaaactcattag

SEQ ID NO: 353497 - DNA, 25 bp, Artificial
  Probe
atgctcttatagtttgtcaatattt

SEQ ID NO: 353498 - DNA, 25 bp, Artificial
  Probe
tttaattgcctttaggtaggagaag

SEQ ID NO: 353499 - DNA, 25 bp, Artificial
  Probe
atatatttgacagtttcttaaaaca

SEQ ID NO: 353500 - DNA, 25 bp, Artificial
  Probe
attgtactttgggtgtataactcct

SEQ ID NO: 353501 - DNA, 25 bp, Artificial
  Probe
ttgatgtatctttgggttaatgttg

SEQ ID NO: 353502 - DNA, 25 bp, Artificial
  Probe
tatctttgggttaatgttgataagt

SEQ ID NO: 353503 - DNA, 25 bp, Artificial
  Probe
tatgtctttttcttgggctttgatg

SEQ ID NO: 353504 - DNA, 25 bp, Artificial
  Probe
tagtgcctgtaaaactcattagtaa

SEQ ID NO: 353505 - DNA, 25 bp, Artificial
  Probe
ctggttcatctgtgttctgtattga

SEQ ID NO: 353506 - DNA, 25 bp, Artificial
  Probe
tacatagtgcctgtaaaactcatta

SEQ ID NO: 353507 - DNA, 25 bp, Artificial
  Probe
tatttgacagtttcttaaaacacca

SEQ ID NO: 353508 - DNA, 25 bp, Artificial
  Probe
tgtataactcctttggagatgctaa

SEQ ID NO: 353509 - DNA, 25 bp, Artificial
  Probe
ttgtactttgggtgtataactcctt

SEQ ID NO: 353510 - DNA, 25 bp, Artificial
  Probe
tcctttggagatgctaataataaat

SEQ ID NO: 353511 - DNA, 25 bp, Artificial
  Probe
gaatttgtctggttcatctgtgttc

SEQ ID NO: 353512 - DNA, 25 bp, Artificial
  Probe
agtgcctgtaaaactcattagtaat

SEQ ID NO: 353513 - DNA, 25 bp, Artificial
  Probe
gtgcctgtaaaactcattagtaatt

SEQ ID NO: 353514 - DNA, 25 bp, Artificial
  Probe
cttattatgtctttttcttgggctt

SEQ ID NO: 353515 - DNA, 25 bp, Artificial
  Probe
taactcctttggagatgctaataat

SEQ ID NO: 353516 - DNA, 25 bp, Artificial
  Probe
ttgggtgtataactcctttggagat

SEQ ID NO: 353517 - DNA, 25 bp, Artificial
  Probe
tcttatagtttgtcaatattttgat

SEQ ID NO: 353518 - DNA, 25 bp, Artificial
  Probe
aatcccagaaaacctttgcaaacat

SEQ ID NO: 353519 - DNA, 25 bp, Artificial
  Probe
tttttcttgggctttgatgtatctt

SEQ ID NO: 353520 - DNA, 25 bp, Artificial
  Probe
ggtgtataactcctttggagatgct

SEQ ID NO: 353521 - DNA, 25 bp, Artificial
  Probe
catagtgcctgtaaaactcattagt

SEQ ID NO: 353522 - DNA, 25 bp, Artificial
  Probe
aatgatagataacccaggtaaacct

SEQ ID NO: 353523 - DNA, 25 bp, Artificial
  Probe
cctttgcaaacatttgcacattata

SEQ ID NO: 353524 - DNA, 25 bp, Artificial
  Probe
atagtgcctgtaaaactcattagta

SEQ ID NO: 353525 - DNA, 25 bp, Artificial
  Probe
gtgtataactcctttggagatgcta

SEQ ID NO: 353526 - DNA, 25 bp, Artificial
  Probe
ctgtaaaactcattagtaattttgg

SEQ ID NO: 353527 - DNA, 25 bp, Artificial
  Probe
aactcctttggagatgctaataata

SEQ ID NO: 353528 - DNA, 25 bp, Artificial
  Probe
accttgtccccgattatctaccagg

SEQ ID NO: 353529 - DNA, 25 bp, Artificial
  Probe
aagcacacaggcagctggcctccag

SEQ ID NO: 353530 - DNA, 25 bp, Artificial
  Probe
agtacaacccgctaaggccaggtgt

SEQ ID NO: 353531 - DNA, 25 bp, Artificial
  Probe
agtctgcctgtgcacaccattctgc

SEQ ID NO: 353532 - DNA, 25 bp, Artificial
  Probe
ggcagctggcctccagcatggcatg

SEQ ID NO: 353533 - DNA, 25 bp, Artificial
  Probe
ctgtagcctccagtgccagcacagt

SEQ ID NO: 353534 - DNA, 25 bp, Artificial
  Probe
ggtgcaccggcaagcttgaatggcc

SEQ ID NO: 353535 - DNA, 25 bp, Artificial
  Probe
taccaatggcacaggggctatgaat

SEQ ID NO: 353536 - DNA, 25 bp, Artificial
  Probe
cttgaatgtggcagccaagcccgag

SEQ ID NO: 353537 - DNA, 25 bp, Artificial
  Probe
cagggcctgcccaacacaaggctgg

SEQ ID NO: 353538 - DNA, 25 bp, Artificial
  Probe
ccaatgggcacctgggtcggagctt

SEQ ID NO: 353539 - DNA, 25 bp, Artificial
  Probe
ggcatggtgcccagccagtacaacc

SEQ ID NO: 353540 - DNA, 25 bp, Artificial
  Probe
ccacctgggcatcagccacttgaat

SEQ ID NO: 353541 - DNA, 25 bp, Artificial
  Probe
agccacctgccaggtatgcctgaca

SEQ ID NO: 353542 - DNA, 25 bp, Artificial
  Probe
ctcagcagccaatgggcacctgggt

SEQ ID NO: 353543 - DNA, 25 bp, Artificial
  Probe
cttgaatggccagtgtgagtggctt

SEQ ID NO: 353544 - DNA, 25 bp, Artificial
  Probe
cattctgccccaggaaagccaggct

SEQ ID NO: 353545 - DNA, 25 bp, Artificial
  Probe
acagctactcatcctcacctgtgga

SEQ ID NO: 353546 - DNA, 25 bp, Artificial
  Probe
tgggccccagcagtctgcctgtgca

SEQ ID NO: 353547 - DNA, 25 bp, Artificial
  Probe
cagcagtctgcctgtgcacaccatt

SEQ ID NO: 353548 - DNA, 25 bp, Artificial
  Probe
catcgcagccacacctcagtgtgag

SEQ ID NO: 353549 - DNA, 25 bp, Artificial
  Probe
agcatggcatgatgggcccgataca

SEQ ID NO: 353550 - DNA, 25 bp, Artificial
  Probe
cacctgggtcggagcttcctgagcg

SEQ ID NO: 353551 - DNA, 25 bp, Artificial
  Probe
atgggcccgatacacagcagcctct

SEQ ID NO: 353552 - DNA, 25 bp, Artificial
  Probe
tgtgcacaccattctgccccaggaa

SEQ ID NO: 353553 - DNA, 25 bp, Artificial
  Probe
cttccccggctccagaatggcatgg

SEQ ID NO: 353554 - DNA, 25 bp, Artificial
  Probe
agccaagcccgagatggcagctctg

SEQ ID NO: 353555 - DNA, 25 bp, Artificial
  Probe
gcagccacagaacttacaaatccag

SEQ ID NO: 353556 - DNA, 25 bp, Artificial
  Probe
aaagccaggctctgccgacatcact

SEQ ID NO: 353557 - DNA, 25 bp, Artificial
  Probe
gggctatgaatttcaccgtgggtgc

SEQ ID NO: 353558 - DNA, 25 bp, Artificial
  Probe
tctgccccaggaaagccaggctctg

SEQ ID NO: 353559 - DNA, 25 bp, Artificial
  Probe
cgattatctaccagggcctgcccaa

SEQ ID NO: 353560 - DNA, 25 bp, Artificial
  Probe
aggcagacgtacagccgctgggccc

SEQ ID NO: 353561 - DNA, 25 bp, Artificial
  Probe
tgaatttcaccgtgggtgcaccggc

SEQ ID NO: 353562 - DNA, 25 bp, Artificial
  Probe
gtgactccgggcacactaagcacac

SEQ ID NO: 353563 - DNA, 25 bp, Artificial
  Probe
gctgggccccagcagtctgcctgtg

SEQ ID NO: 353564 - DNA, 25 bp, Artificial
  Probe
cggcaagcttgaatggccagtgtga

SEQ ID NO: 353565 - DNA, 25 bp, Artificial
  Probe
ggaaagccaggctctgccgacatca

SEQ ID NO: 353566 - DNA, 25 bp, Artificial
  Probe
atgatgggcccgatacacagcagcc

SEQ ID NO: 353567 - DNA, 25 bp, Artificial
  Probe
ggtgcagacccagcaggtgcagcca

SEQ ID NO: 353568 - DNA, 25 bp, Artificial
  Probe
agggcctgcccaacacaaggctggc

SEQ ID NO: 353569 - DNA, 25 bp, Artificial
  Probe
ccacctggtgcagacccagcaggtg

SEQ ID NO: 353570 - DNA, 25 bp, Artificial
  Probe
gtgcacaccattctgccccaggaaa

SEQ ID NO: 353571 - DNA, 25 bp, Artificial
  Probe
gggagcccagccaggcagacgtaca

SEQ ID NO: 353572 - DNA, 25 bp, Artificial
  Probe
agtgtgagtggcttccccggctcca

SEQ ID NO: 353573 - DNA, 25 bp, Artificial
  Probe
tgtagcctccagtgccagcacagtg

SEQ ID NO: 353574 - DNA, 25 bp, Artificial
  Probe
gtcctggagagaagggcgaatacac

SEQ ID NO: 353575 - DNA, 25 bp, Artificial
  Probe
ggatctactctgattcccatgaaca

SEQ ID NO: 353576 - DNA, 25 bp, Artificial
  Probe
attcctgtccactggaattttcaag

SEQ ID NO: 353577 - DNA, 25 bp, Artificial
  Probe
ggaaaaaccaccagagacaggaagc

SEQ ID NO: 353578 - DNA, 25 bp, Artificial
  Probe
atcacttcgatttcataacaggaag

SEQ ID NO: 353579 - DNA, 25 bp, Artificial
  Probe
gggctatttcacaattcagacctac

SEQ ID NO: 353580 - DNA, 25 bp, Artificial
  Probe
cttaacagcaacatggtgggaaaaa

SEQ ID NO: 353581 - DNA, 25 bp, Artificial
  Probe
gcccaatcgcctgctgcggatatgg

SEQ ID NO: 353582 - DNA, 25 bp, Artificial
  Probe
ttctatgcctcaaggggaagatgat

SEQ ID NO: 353583 - DNA, 25 bp, Artificial
  Probe
ctttgaagactgcagaactgggtcc

SEQ ID NO: 353584 - DNA, 25 bp, Artificial
  Probe
gttgatcccataaacatggagtaca

SEQ ID NO: 353585 - DNA, 25 bp, Artificial
  Probe
tgctgtacctgctagaacatccctg

SEQ ID NO: 353586 - DNA, 25 bp, Artificial
  Probe
taaggtttcttacgtgacagcaatg

SEQ ID NO: 353587 - DNA, 25 bp, Artificial
  Probe
cttttttgacctgagcagacggatg

SEQ ID NO: 353588 - DNA, 25 bp, Artificial
  Probe
tgccaaaatcgactcctactccagg

SEQ ID NO: 353589 - DNA, 25 bp, Artificial
  Probe
agcttttgccttgttcaatctggtt

SEQ ID NO: 353590 - DNA, 25 bp, Artificial
  Probe
cctaagtactggagattgtatcagt

SEQ ID NO: 353591 - DNA, 25 bp, Artificial
  Probe
acagttgttctttcctgggtgtctt

SEQ ID NO: 353592 - DNA, 25 bp, Artificial
  Probe
tggaaaaagccctcagtggaagtgg

SEQ ID NO: 353593 - DNA, 25 bp, Artificial
  Probe
gcactcatggagtatggaaccttgc

SEQ ID NO: 353594 - DNA, 25 bp, Artificial
  Probe
ggcttagtccaatataatcacttcg

SEQ ID NO: 353595 - DNA, 25 bp, Artificial
  Probe
acagcttttgccttgttcaatctgg

SEQ ID NO: 353596 - DNA, 25 bp, Artificial
  Probe
cttcaggaactcaaggaaatctgat

SEQ ID NO: 353597 - DNA, 25 bp, Artificial
  Probe
caccagagacaggaagctgaaaagc

SEQ ID NO: 353598 - DNA, 25 bp, Artificial
  Probe
gaaatctctcacacaatctccggag

SEQ ID NO: 353599 - DNA, 25 bp, Artificial
  Probe
ttacctaaggtttcttacgtgacag

SEQ ID NO: 353600 - DNA, 25 bp, Artificial
  Probe
caagctatggataccctaaaaatga

SEQ ID NO: 353601 - DNA, 25 bp, Artificial
  Probe
ggttctctacactctgagattaaca

SEQ ID NO: 353602 - DNA, 25 bp, Artificial
  Probe
tgacaaccctcagtacaatcgctag

SEQ ID NO: 353603 - DNA, 25 bp, Artificial
  Probe
aatctgatgcgcactggataacaac

SEQ ID NO: 353604 - DNA, 25 bp, Artificial
  Probe
acccacagtaattgaaactgatgtt

SEQ ID NO: 353605 - DNA, 25 bp, Artificial
  Probe
tacattccgtgcattctaacagttg

SEQ ID NO: 353606 - DNA, 25 bp, Artificial
  Probe
gcactggataacaacgcccaatcgc

SEQ ID NO: 353607 - DNA, 25 bp, Artificial
  Probe
tgaacaacatttctatgcctcaagg

SEQ ID NO: 353608 - DNA, 25 bp, Artificial
  Probe
accagtgcttggagggcaaagactg

SEQ ID NO: 353609 - DNA, 25 bp, Artificial
  Probe
ttatggttaccagtgcttggagggc

SEQ ID NO: 353610 - DNA, 25 bp, Artificial
  Probe
atgaaagtctaccagttaaaatctg

SEQ ID NO: 353611 - DNA, 25 bp, Artificial
  Probe
tgacacgttcttcaggaactcaagg

SEQ ID NO: 353612 - DNA, 25 bp, Artificial
  Probe
gccaaaatcgactcctactccagga

SEQ ID NO: 353613 - DNA, 25 bp, Artificial
  Probe
ttcatttttgtgtttgcagcactca

SEQ ID NO: 353614 - DNA, 25 bp, Artificial
  Probe
ggaagggttctctacactctgagat

SEQ ID NO: 353615 - DNA, 25 bp, Artificial
  Probe
gacaaccctcagtacaatcgctaga

SEQ ID NO: 353616 - DNA, 25 bp, Artificial
  Probe
ggcaaagactgtgctacctttttct

SEQ ID NO: 353617 - DNA, 25 bp, Artificial
  Probe
gcaaaacttcggtatccccaggtct

SEQ ID NO: 353618 - DNA, 25 bp, Artificial
  Probe
cttcgatttcataacaggaagttag

SEQ ID NO: 353619 - DNA, 25 bp, Artificial
  Probe
ctacggttttgactatgacaaccct

SEQ ID NO: 353620 - DNA, 25 bp, Artificial
  Probe
gttactgagagtgtttgccaaatac

SEQ ID NO: 353621 - DNA, 25 bp, Artificial
  Probe
cagttcctaagaaggcttctgtgga

SEQ ID NO: 353622 - DNA, 25 bp, Artificial
  Probe
agtccttaagccagggtgtgagaga

SEQ ID NO: 353623 - DNA, 25 bp, Artificial
  Probe
acacactagagtatagagtgctctg

SEQ ID NO: 353624 - DNA, 25 bp, Artificial
  Probe
cctatgacctgaaaaaggtatctgt

SEQ ID NO: 353625 - DNA, 25 bp, Artificial
  Probe
gatccagttcctaagaaggcttctg

SEQ ID NO: 353626 - DNA, 25 bp, Artificial
  Probe
tctggttactgagagtgtttgccaa

SEQ ID NO: 353627 - DNA, 25 bp, Artificial
  Probe
ccctgcacaggcacacactagagta

SEQ ID NO: 353628 - DNA, 25 bp, Artificial
  Probe
gtcttccctgtgagcaagggctgac

SEQ ID NO: 353629 - DNA, 25 bp, Artificial
  Probe
caatctctggttactgagagtgttt

SEQ ID NO: 353630 - DNA, 25 bp, Artificial
  Probe
agagaactctccagatcttgccctg

SEQ ID NO: 353631 - DNA, 25 bp, Artificial
  Probe
tgcacaggcacacactagagtatag

SEQ ID NO: 353632 - DNA, 25 bp, Artificial
  Probe
caggcacacactagagtatagagtg

SEQ ID NO: 353633 - DNA, 25 bp, Artificial
  Probe
ggtcttccctgtgagcaagggctga

SEQ ID NO: 353634 - DNA, 25 bp, Artificial
  Probe
tagagctcagacaactgcaccagaa

SEQ ID NO: 353635 - DNA, 25 bp, Artificial
  Probe
gtttgccaaatacaatgacagccaa

SEQ ID NO: 353636 - DNA, 25 bp, Artificial
  Probe
tccctgtgagcaagggctgacttcc

SEQ ID NO: 353637 - DNA, 25 bp, Artificial
  Probe
agagccctgcacaggcacacactag

SEQ ID NO: 353638 - DNA, 25 bp, Artificial
  Probe
agtgtttgccaaatacaatgacagc

SEQ ID NO: 353639 - DNA, 25 bp, Artificial
  Probe
aactctcggtcttccctgtgagcaa

SEQ ID NO: 353640 - DNA, 25 bp, Artificial
  Probe
tcttgccctgagagccctgcacagg

SEQ ID NO: 353641 - DNA, 25 bp, Artificial
  Probe
ttactgagagtgtttgccaaataca

SEQ ID NO: 353642 - DNA, 25 bp, Artificial
  Probe
cctaagaaggcttctgtggagtgtg

SEQ ID NO: 353643 - DNA, 25 bp, Artificial
  Probe
tgacttcctatgacctgaaaaaggt

SEQ ID NO: 353644 - DNA, 25 bp, Artificial
  Probe
agcacaggcaatctctggttactga

SEQ ID NO: 353645 - DNA, 25 bp, Artificial
  Probe
tcctaagaaggcttctgtggagtgt

SEQ ID NO: 353646 - DNA, 25 bp, Artificial
  Probe
agggctgacttcctatgacctgaaa

SEQ ID NO: 353647 - DNA, 25 bp, Artificial
  Probe
actctccagatcttgccctgagagc

SEQ ID NO: 353648 - DNA, 25 bp, Artificial
  Probe
tgagcaagggctgacttcctatgac

SEQ ID NO: 353649 - DNA, 25 bp, Artificial
  Probe
gatagcacaggcaatctctggttac

SEQ ID NO: 353650 - DNA, 25 bp, Artificial
  Probe
taagccagggtgtgagagaactctc

SEQ ID NO: 353651 - DNA, 25 bp, Artificial
  Probe
agtgctctgaaaactggagttctaa

SEQ ID NO: 353652 - DNA, 25 bp, Artificial
  Probe
cttctgtggagtgtggctgtgaact

SEQ ID NO: 353653 - DNA, 25 bp, Artificial
  Probe
gcacaggcaatctctggttactgag

SEQ ID NO: 353654 - DNA, 25 bp, Artificial
  Probe
atctctggttactgagagtgtttgc

SEQ ID NO: 353655 - DNA, 25 bp, Artificial
  Probe
cagatcttgccctgagagccctgca

SEQ ID NO: 353656 - DNA, 25 bp, Artificial
  Probe
tagagtgctctgaaaactggagttc

SEQ ID NO: 353657 - DNA, 25 bp, Artificial
  Probe
ggggctgtggctagatccagttcct

SEQ ID NO: 353658 - DNA, 25 bp, Artificial
  Probe
agggagaccctttgccttcccatct

SEQ ID NO: 353659 - DNA, 25 bp, Artificial
  Probe
cttaagccagggtgtgagagaactc

SEQ ID NO: 353660 - DNA, 25 bp, Artificial
  Probe
ggctagatccagttcctaagaaggc

SEQ ID NO: 353661 - DNA, 25 bp, Artificial
  Probe
tgtgagagaactctccagatcttgc

SEQ ID NO: 353662 - DNA, 25 bp, Artificial
  Probe
caactctcggtcttccctgtgagca

SEQ ID NO: 353663 - DNA, 25 bp, Artificial
  Probe
gttttagagctcagacaactgcacc

SEQ ID NO: 353664 - DNA, 25 bp, Artificial
  Probe
tactgagagtgtttgccaaatacaa

SEQ ID NO: 353665 - DNA, 25 bp, Artificial
  Probe
tgagagccctgcacaggcacacact

SEQ ID NO: 353666 - DNA, 25 bp, Artificial
  Probe
tcttttttgtgcgccaacaagtcct

SEQ ID NO: 353667 - DNA, 25 bp, Artificial
  Probe
ggcactctgggtctctgcttttttt

SEQ ID NO: 353668 - DNA, 25 bp, Artificial
  Probe
gtttgttgacttgtgtgaaaagacc

SEQ ID NO: 353669 - DNA, 25 bp, Artificial
  Probe
ctctgggtctctgctttttttacaa

SEQ ID NO: 353670 - DNA, 25 bp, Artificial
  Probe
tagtggcactctgggtctctgcttt

SEQ ID NO: 353671 - DNA, 25 bp, Artificial
  Probe
aattaatcttttttgtgcgccaaca

SEQ ID NO: 353672 - DNA, 25 bp, Artificial
  Probe
cactctgggtctctgctttttttac

SEQ ID NO: 353673 - DNA, 25 bp, Artificial
  Probe
ttgtgtgaaaagacccctgagggtt

SEQ ID NO: 353674 - DNA, 25 bp, Artificial
  Probe
tggcactctgggtctctgctttttt

SEQ ID NO: 353675 - DNA, 25 bp, Artificial
  Probe
cttgtgtgaaaagacccctgagggt

SEQ ID NO: 353676 - DNA, 25 bp, Artificial
  Probe
tttgtgcgccaacaagtcctttttt

SEQ ID NO: 353677 - DNA, 25 bp, Artificial
  Probe
ttgtgcgccaacaagtccttttttt

SEQ ID NO: 353678 - DNA, 25 bp, Artificial
  Probe
ttttgtgcgccaacaagtccttttt

SEQ ID NO: 353679 - DNA, 25 bp, Artificial
  Probe
tacaaaccgtttgttgacttgtgtg

SEQ ID NO: 353680 - DNA, 25 bp, Artificial
  Probe
taagtagtggcactctgggtctctg

SEQ ID NO: 353681 - DNA, 25 bp, Artificial
  Probe
ttaatcttttttgtgcgccaacaag

SEQ ID NO: 353682 - DNA, 25 bp, Artificial
  Probe
tttttgtgcgccaacaagtcctttt

SEQ ID NO: 353683 - DNA, 25 bp, Artificial
  Probe
tgcgccaacaagtcctttttttctt

SEQ ID NO: 353684 - DNA, 25 bp, Artificial
  Probe
tgagggttatctcccccctctaaat

SEQ ID NO: 353685 - DNA, 25 bp, Artificial
  Probe
tttaagtagtggcactctgggtctc

SEQ ID NO: 353686 - DNA, 25 bp, Artificial
  Probe
tgtgaaaagacccctgagggttatc

SEQ ID NO: 353687 - DNA, 25 bp, Artificial
  Probe
acaaaccgtttgttgacttgtgtga

SEQ ID NO: 353688 - DNA, 25 bp, Artificial
  Probe
gtgaaaagacccctgagggttatct

SEQ ID NO: 353689 - DNA, 25 bp, Artificial
  Probe
taaaattaatcttttttgtgcgcca

SEQ ID NO: 353690 - DNA, 25 bp, Artificial
  Probe
tttgttgacttgtgtgaaaagaccc

SEQ ID NO: 353691 - DNA, 25 bp, Artificial
  Probe
ttacaaaccgtttgttgacttgtgt

SEQ ID NO: 353692 - DNA, 25 bp, Artificial
  Probe
caaaccgtttgttgacttgtgtgaa

SEQ ID NO: 353693 - DNA, 25 bp, Artificial
  Probe
ttgttgacttgtgtgaaaagacccc

SEQ ID NO: 353694 - DNA, 25 bp, Artificial
  Probe
ttaagtagtggcactctgggtctct

SEQ ID NO: 353695 - DNA, 25 bp, Artificial
  Probe
agtagtggcactctgggtctctgct

SEQ ID NO: 353696 - DNA, 25 bp, Artificial
  Probe
gtagtggcactctgggtctctgctt

SEQ ID NO: 353697 - DNA, 25 bp, Artificial
  Probe
accgtttgttgacttgtgtgaaaag

SEQ ID NO: 353698 - DNA, 25 bp, Artificial
  Probe
gtggcactctgggtctctgcttttt

SEQ ID NO: 353699 - DNA, 25 bp, Artificial
  Probe
cttttttgtgcgccaacaagtcctt

SEQ ID NO: 353700 - DNA, 25 bp, Artificial
  Probe
tactaaaattaatcttttttgtgcg

SEQ ID NO: 353701 - DNA, 25 bp, Artificial
  Probe
agtggcactctgggtctctgctttt

SEQ ID NO: 353702 - DNA, 25 bp, Artificial
  Probe
tgttgacttgtgtgaaaagacccct

SEQ ID NO: 353703 - DNA, 25 bp, Artificial
  Probe
aagtagtggcactctgggtctctgc

SEQ ID NO: 353704 - DNA, 25 bp, Artificial
  Probe
tgtgtgaaaagacccctgagggtta

SEQ ID NO: 353705 - DNA, 25 bp, Artificial
  Probe
attttaagtagtggcactctgggtc

SEQ ID NO: 353706 - DNA, 25 bp, Artificial
  Probe
tctgggtctctgctttttttacaaa

SEQ ID NO: 353707 - DNA, 25 bp, Artificial
  Probe
aatcttttttgtgcgccaacaagtc

SEQ ID NO: 353708 - DNA, 25 bp, Artificial
  Probe
tgaaaagacccctgagggttatctc

SEQ ID NO: 353709 - DNA, 25 bp, Artificial
  Probe
ttttttgtgcgccaacaagtccttt

SEQ ID NO: 353710 - DNA, 25 bp, Artificial
  Probe
tttacaaaccgtttgttgacttgtg

SEQ ID NO: 353711 - DNA, 25 bp, Artificial
  Probe
gcactctgggtctctgcttttttta

SEQ ID NO: 353712 - DNA, 25 bp, Artificial
  Probe
gtctgaggacaacgtggccaaagtc

SEQ ID NO: 353713 - DNA, 25 bp, Artificial
  Probe
ggcccacctttctgcagcttcgaga

SEQ ID NO: 353714 - DNA, 25 bp, Artificial
  Probe
atgtgctggtgtctgaggacaacgt

SEQ ID NO: 353715 - DNA, 25 bp, Artificial
  Probe
ctcaaattctcactagacgtctgtg

SEQ ID NO: 353716 - DNA, 25 bp, Artificial
  Probe
cctgaagccttgagagagaagaaat

SEQ ID NO: 353717 - DNA, 25 bp, Artificial
  Probe
taacaattttgtgcaccgggacttg

SEQ ID NO: 353718 - DNA, 25 bp, Artificial
  Probe
acccgcagtctatgatgttatgaag

SEQ ID NO: 353719 - DNA, 25 bp, Artificial
  Probe
tggcacctggatgctgccacgcggc

SEQ ID NO: 353720 - DNA, 25 bp, Artificial
  Probe
agaagaaattttccaccaagtctga

SEQ ID NO: 353721 - DNA, 25 bp, Artificial
  Probe
agacgtctgtgaagccatggagtac

SEQ ID NO: 353722 - DNA, 25 bp, Artificial
  Probe
cttctctgggaaatctattccttcg

SEQ ID NO: 353723 - DNA, 25 bp, Artificial
  Probe
gtttcggaatccttctctgggaaat

SEQ ID NO: 353724 - DNA, 25 bp, Artificial
  Probe
tctgatgtgtggagtttcggaatcc

SEQ ID NO: 353725 - DNA, 25 bp, Artificial
  Probe
agcactcaggacacaggcaaactgc

SEQ ID NO: 353726 - DNA, 25 bp, Artificial
  Probe
ggagactgtctcctcaaattctcac

SEQ ID NO: 353727 - DNA, 25 bp, Artificial
  Probe
acacaggcaaactgccagtcaagtg

SEQ ID NO: 353728 - DNA, 25 bp, Artificial
  Probe
tgactttggcctcactaaggaagct

SEQ ID NO: 353729 - DNA, 25 bp, Artificial
  Probe
tagtccagctactgggtgtgattgt

SEQ ID NO: 353730 - DNA, 25 bp, Artificial
  Probe
atgttatgaagaactgctggcacct

SEQ ID NO: 353731 - DNA, 25 bp, Artificial
  Probe
agtttggtggactatcttcgatcac

SEQ ID NO: 353732 - DNA, 25 bp, Artificial
  Probe
cctgaaggacgtcgtccctcgggtg

SEQ ID NO: 353733 - DNA, 25 bp, Artificial
  Probe
ggaatccttctctgggaaatctatt

SEQ ID NO: 353734 - DNA, 25 bp, Artificial
  Probe
aaatctattccttcgggcgagtgcc

SEQ ID NO: 353735 - DNA, 25 bp, Artificial
  Probe
cgcagcttcggcacagcaacctagt

SEQ ID NO: 353736 - DNA, 25 bp, Artificial
  Probe
ggacagctcctgaagccttgagaga

SEQ ID NO: 353737 - DNA, 25 bp, Artificial
  Probe
ggtaacaattttgtgcaccgggact

SEQ ID NO: 353738 - DNA, 25 bp, Artificial
  Probe
cctagtccagctactgggtgtgatt

SEQ ID NO: 353739 - DNA, 25 bp, Artificial
  Probe
gctataagatggacgctccggatgg

SEQ ID NO: 353740 - DNA, 25 bp, Artificial
  Probe
cacccgcagtctatgatgttatgaa

SEQ ID NO: 353741 - DNA, 25 bp, Artificial
  Probe
agcctctgtcatgacgcagcttcgg

SEQ ID NO: 353742 - DNA, 25 bp, Artificial
  Probe
ggtgtctgaggacaacgtggccaaa

SEQ ID NO: 353743 - DNA, 25 bp, Artificial
  Probe
ctgtcatgacgcagcttcggcacag

SEQ ID NO: 353744 - DNA, 25 bp, Artificial
  Probe
ggtgctaggcggagactgtctcctc

SEQ ID NO: 353745 - DNA, 25 bp, Artificial
  Probe
attttccaccaagtctgatgtgtgg

SEQ ID NO: 353746 - DNA, 25 bp, Artificial
  Probe
gccttacccaagaattcccctgaag

SEQ ID NO: 353747 - DNA, 25 bp, Artificial
  Probe
catgacgcagcttcggcacagcaac

SEQ ID NO: 353748 - DNA, 25 bp, Artificial
  Probe
taagatggacgctccggatggctgc

SEQ ID NO: 353749 - DNA, 25 bp, Artificial
  Probe
gaagcttccagcactcaggacacag

SEQ ID NO: 353750 - DNA, 25 bp, Artificial
  Probe
agtgccttacccaagaattcccctg

SEQ ID NO: 353751 - DNA, 25 bp, Artificial
  Probe
ctggctgaagcctctgtcatgacgc

SEQ ID NO: 353752 - DNA, 25 bp, Artificial
  Probe
ctctacatcgtcacagagtacatgg

SEQ ID NO: 353753 - DNA, 25 bp, Artificial
  Probe
cgtcacagagtacatggccaagggg

SEQ ID NO: 353754 - DNA, 25 bp, Artificial
  Probe
caagaattcccctgaaggacgtcgt

SEQ ID NO: 353755 - DNA, 25 bp, Artificial
  Probe
ggtgggctctacatcgtcacagagt

SEQ ID NO: 353756 - DNA, 25 bp, Artificial
  Probe
atcacgtggtcgttcggtgctaggc

SEQ ID NO: 353757 - DNA, 25 bp, Artificial
  Probe
ttccttcgggcgagtgccttaccca

SEQ ID NO: 353758 - DNA, 25 bp, Artificial
  Probe
attttgaacctttgatgtgcaaagc

SEQ ID NO: 353759 - DNA, 25 bp, Artificial
  Probe
tgctgccatttctggctcatggtgt

SEQ ID NO: 353760 - DNA, 25 bp, Artificial
  Probe
tggtgaaaccagaaccatatctcac

SEQ ID NO: 353761 - DNA, 25 bp, Artificial
  Probe
ggagtcaccagcttcattcctaaat

SEQ ID NO: 353762 - DNA, 25 bp, Artificial
  Probe
ctggccaacggatgaccgagagatg

SEQ ID NO: 353763 - DNA, 25 bp, Artificial
  Probe
atattaatgccagcttagttgacat

SEQ ID NO: 353764 - DNA, 25 bp, Artificial
  Probe
agggcccacttcctaacacgtgctg

SEQ ID NO: 353765 - DNA, 25 bp, Artificial
  Probe
agcaaaagaccagagcagttgtcat

SEQ ID NO: 353766 - DNA, 25 bp, Artificial
  Probe
ggttccagatactgtggaagagagc

SEQ ID NO: 353767 - DNA, 25 bp, Artificial
  Probe
ccagatactgtggaagagagcagtg

SEQ ID NO: 353768 - DNA, 25 bp, Artificial
  Probe
ccagcttagttgacatagaagaggc

SEQ ID NO: 353769 - DNA, 25 bp, Artificial
  Probe
ggtgaaaccagaaccatatctcact

SEQ ID NO: 353770 - DNA, 25 bp, Artificial
  Probe
cctttgatgtgcaaagcaagacctg

SEQ ID NO: 353771 - DNA, 25 bp, Artificial
  Probe
tacatggccataatagaaggagcaa

SEQ ID NO: 353772 - DNA, 25 bp, Artificial
  Probe
ctccggaaactaaagtgaggcttgc

SEQ ID NO: 353773 - DNA, 25 bp, Artificial
  Probe
cagtgagagtattctccggaaacgc

SEQ ID NO: 353774 - DNA, 25 bp, Artificial
  Probe
agaagttacatcttaacacagggcc

SEQ ID NO: 353775 - DNA, 25 bp, Artificial
  Probe
tgagactattctgcagctataaatt

SEQ ID NO: 353776 - DNA, 25 bp, Artificial
  Probe
taaatgtgcacagtactggccaacg

SEQ ID NO: 353777 - DNA, 25 bp, Artificial
  Probe
caagttgtctgtttacaaagtaagc

SEQ ID NO: 353778 - DNA, 25 bp, Artificial
  Probe
gatccattgcagtgcaggcatcggg

SEQ ID NO: 353779 - DNA, 25 bp, Artificial
  Probe
acctaaatgttcatgacttgagact

SEQ ID NO: 353780 - DNA, 25 bp, Artificial
  Probe
aaagtgaggcttgctaaccctgtag

SEQ ID NO: 353781 - DNA, 25 bp, Artificial
  Probe
aaaccgaactgtagagaaagaatcg

SEQ ID NO: 353782 - DNA, 25 bp, Artificial
  Probe
gaagacttgcaaaccctttaatttg

SEQ ID NO: 353783 - DNA, 25 bp, Artificial
  Probe
agagactactttgtattgtactgcc

SEQ ID NO: 353784 - DNA, 25 bp, Artificial
  Probe
tatacagaacagaacaatgactgag

SEQ ID NO: 353785 - DNA, 25 bp, Artificial
  Probe
catggtgtggcagcaaaagaccaga

SEQ ID NO: 353786 - DNA, 25 bp, Artificial
  Probe
ccactccggaaactaaagtgaggct

SEQ ID NO: 353787 - DNA, 25 bp, Artificial
  Probe
tcgaatgggactcattcagactccg

SEQ ID NO: 353788 - DNA, 25 bp, Artificial
  Probe
aggcatcgggcgttctggcaccttc

SEQ ID NO: 353789 - DNA, 25 bp, Artificial
  Probe
caaagtaagctttacatccagggga

SEQ ID NO: 353790 - DNA, 25 bp, Artificial
  Probe
tggctcatggtgtggcagcaaaaga

SEQ ID NO: 353791 - DNA, 25 bp, Artificial
  Probe
gtattctccggaaacgcattcgaga

SEQ ID NO: 353792 - DNA, 25 bp, Artificial
  Probe
caggattcagcgtgaagctcttatc

SEQ ID NO: 353793 - DNA, 25 bp, Artificial
  Probe
ctcttatctgaagatgtgaaatcat

SEQ ID NO: 353794 - DNA, 25 bp, Artificial
  Probe
cattataccacctggccagattttg

SEQ ID NO: 353795 - DNA, 25 bp, Artificial
  Probe
acagtactggccaacggatgaccga

SEQ ID NO: 353796 - DNA, 25 bp, Artificial
  Probe
ttagagaatctggttctttgaaccc

SEQ ID NO: 353797 - DNA, 25 bp, Artificial
  Probe
ctgtctcgttctgatggagaaagga

SEQ ID NO: 353798 - DNA, 25 bp, Artificial
  Probe
caagtttccagaaaacagaaatcga

SEQ ID NO: 353799 - DNA, 25 bp, Artificial
  Probe
acttgagactattctgcagctataa

SEQ ID NO: 353800 - DNA, 25 bp, Artificial
  Probe
tgtaagcccatatgatcacagtcgt

SEQ ID NO: 353801 - DNA, 25 bp, Artificial
  Probe
gttacatcttaacacagggcccact

SEQ ID NO: 353802 - DNA, 25 bp, Artificial
  Probe
cgtgttaaactgcagagtgctgaaa

SEQ ID NO: 353803 - DNA, 25 bp, Artificial
  Probe
ccaagattgacagacacctaaatgt

SEQ ID NO: 353804 - DNA, 25 bp, Artificial
  Probe
tacattagcattccacggttcaggg

SEQ ID NO: 353805 - DNA, 25 bp, Artificial
  Probe
gtggtagagccctgaagcatctgca

SEQ ID NO: 353806 - DNA, 25 bp, Artificial
  Probe
tttttcacaatcatgtactgggaaa

SEQ ID NO: 353807 - DNA, 25 bp, Artificial
  Probe
gtactttgtggtagagccctgaagc

SEQ ID NO: 353808 - DNA, 25 bp, Artificial
  Probe
actagaaccaaagtagatggactgt

SEQ ID NO: 353809 - DNA, 25 bp, Artificial
  Probe
ctttttcacaatcatgtactgggaa

SEQ ID NO: 353810 - DNA, 25 bp, Artificial
  Probe
ccacggaacagcagaatgtgattct

SEQ ID NO: 353811 - DNA, 25 bp, Artificial
  Probe
tctctcgggcagactggctggacat

SEQ ID NO: 353812 - DNA, 25 bp, Artificial
  Probe
tttaaaccacggaacagcagaatgt

SEQ ID NO: 353813 - DNA, 25 bp, Artificial
  Probe
agcatgctgtttgtaaaccaaaacc

SEQ ID NO: 353814 - DNA, 25 bp, Artificial
  Probe
cctacattagcattccacggttcag

SEQ ID NO: 353815 - DNA, 25 bp, Artificial
  Probe
ctgaagcatctgcagtagccttcat

SEQ ID NO: 353816 - DNA, 25 bp, Artificial
  Probe
cgtctctcgggcagactggctggac

SEQ ID NO: 353817 - DNA, 25 bp, Artificial
  Probe
gaggtgagcatgctgtttgtaaacc

SEQ ID NO: 353818 - DNA, 25 bp, Artificial
  Probe
tccacaaacagaagggccctgactc

SEQ ID NO: 353819 - DNA, 25 bp, Artificial
  Probe
ttccttactagaaccaaagtagatg

SEQ ID NO: 353820 - DNA, 25 bp, Artificial
  Probe
cttactagaaccaaagtagatggac

SEQ ID NO: 353821 - DNA, 25 bp, Artificial
  Probe
atggactgtactttgtggtagagcc

SEQ ID NO: 353822 - DNA, 25 bp, Artificial
  Probe
gtccacaaacagaagggccctgact

SEQ ID NO: 353823 - DNA, 25 bp, Artificial
  Probe
agaatgtgattctgcgtctctcggg

SEQ ID NO: 353824 - DNA, 25 bp, Artificial
  Probe
ccctgaagcatctgcagtagccttc

SEQ ID NO: 353825 - DNA, 25 bp, Artificial
  Probe
tgagcatgctgtttgtaaaccaaaa

SEQ ID NO: 353826 - DNA, 25 bp, Artificial
  Probe
agcatctgcagtagccttcatttaa

SEQ ID NO: 353827 - DNA, 25 bp, Artificial
  Probe
gactggctggacatgtacgttacca

SEQ ID NO: 353828 - DNA, 25 bp, Artificial
  Probe
tgtgattctgcgtctctcgggcaga

SEQ ID NO: 353829 - DNA, 25 bp, Artificial
  Probe
ctggctggacatgtacgttaccatc

SEQ ID NO: 353830 - DNA, 25 bp, Artificial
  Probe
aaccacggaacagcagaatgtgatt

SEQ ID NO: 353831 - DNA, 25 bp, Artificial
  Probe
tctcgggcagactggctggacatgt

SEQ ID NO: 353832 - DNA, 25 bp, Artificial
  Probe
cttcatttaaaccacggaacagcag

SEQ ID NO: 353833 - DNA, 25 bp, Artificial
  Probe
ggactgtactttgtggtagagccct

SEQ ID NO: 353834 - DNA, 25 bp, Artificial
  Probe
gtctttttcacaatcatgtactggg

SEQ ID NO: 353835 - DNA, 25 bp, Artificial
  Probe
cagtagccttcatttaaaccacgga

SEQ ID NO: 353836 - DNA, 25 bp, Artificial
  Probe
gtgattctgcgtctctcgggcagac

SEQ ID NO: 353837 - DNA, 25 bp, Artificial
  Probe
gccttcatttaaaccacggaacagc

SEQ ID NO: 353838 - DNA, 25 bp, Artificial
  Probe
cagaatgtgattctgcgtctctcgg

SEQ ID NO: 353839 - DNA, 25 bp, Artificial
  Probe
tctttttcacaatcatgtactggga

SEQ ID NO: 353840 - DNA, 25 bp, Artificial
  Probe
actttgtggtagagccctgaagcat

SEQ ID NO: 353841 - DNA, 25 bp, Artificial
  Probe
attctgcgtctctcgggcagactgg

SEQ ID NO: 353842 - DNA, 25 bp, Artificial
  Probe
tgcagtagccttcatttaaaccacg

SEQ ID NO: 353843 - DNA, 25 bp, Artificial
  Probe
gcatgctgtttgtaaaccaaaacca

SEQ ID NO: 353844 - DNA, 25 bp, Artificial
  Probe
gaattccttactagaaccaaagtag

SEQ ID NO: 353845 - DNA, 25 bp, Artificial
  Probe
ggcagactggctggacatgtacgtt

SEQ ID NO: 353846 - DNA, 25 bp, Artificial
  Probe
agccttcatttaaaccacggaacag

SEQ ID NO: 353847 - DNA, 25 bp, Artificial
  Probe
ttcatttaaaccacggaacagcaga

SEQ ID NO: 353848 - DNA, 25 bp, Artificial
  Probe
aagcagaagtccacaaacagaaggg

SEQ ID NO: 353849 - DNA, 25 bp, Artificial
  Probe
gagccctgaagcatctgcagtagcc

SEQ ID NO: 353850 - DNA, 25 bp, Artificial
  Probe
tcgctccagaatcttgccctaagca

SEQ ID NO: 353851 - DNA, 25 bp, Artificial
  Probe
cattgtcctgggtgtccgggtccta

SEQ ID NO: 353852 - DNA, 25 bp, Artificial
  Probe
attgtcctgggtgtccgggtcctat

SEQ ID NO: 353853 - DNA, 25 bp, Artificial
  Probe
ttgtcctgggtgtccgggtcctatt

SEQ ID NO: 353854 - DNA, 25 bp, Artificial
  Probe
tcctcattgtcctgggtgtccgggt

SEQ ID NO: 353855 - DNA, 25 bp, Artificial
  Probe
gcgaactccagtgttcgctccagaa

SEQ ID NO: 353856 - DNA, 25 bp, Artificial
  Probe
ccagtgttcgctccagaatcttgcc

SEQ ID NO: 353857 - DNA, 25 bp, Artificial
  Probe
tccccaaaggagaacaggataccat

SEQ ID NO: 353858 - DNA, 25 bp, Artificial
  Probe
ttcgctccagaatcttgccctaagc

SEQ ID NO: 353859 - DNA, 25 bp, Artificial
  Probe
gaatcttgccctaagcaaccgacgc

SEQ ID NO: 353860 - DNA, 25 bp, Artificial
  Probe
tccagtgttcgctccagaatcttgc

SEQ ID NO: 353861 - DNA, 25 bp, Artificial
  Probe
agaatcttgccctaagcaaccgacg

SEQ ID NO: 353862 - DNA, 25 bp, Artificial
  Probe
tgtccgggtcctattccccaagcga

SEQ ID NO: 353863 - DNA, 25 bp, Artificial
  Probe
gtgtccgggtcctattccccaagcg

SEQ ID NO: 353864 - DNA, 25 bp, Artificial
  Probe
tcaacttcctggtaaggttgaattt

SEQ ID NO: 353865 - DNA, 25 bp, Artificial
  Probe
ggacaggatgccatgccatagggaa

SEQ ID NO: 353866 - DNA, 25 bp, Artificial
  Probe
caggactccccaaaggagaacagga

SEQ ID NO: 353867 - DNA, 25 bp, Artificial
  Probe
gaactccagtgttcgctccagaatc

SEQ ID NO: 353868 - DNA, 25 bp, Artificial
  Probe
gactccccaaaggagaacaggatac

SEQ ID NO: 353869 - DNA, 25 bp, Artificial
  Probe
acatcaacttcctggtaaggttgaa

SEQ ID NO: 353870 - DNA, 25 bp, Artificial
  Probe
agtgttcgctccagaatcttgccct

SEQ ID NO: 353871 - DNA, 25 bp, Artificial
  Probe
caacttcctggtaaggttgaatttg

SEQ ID NO: 353872 - DNA, 25 bp, Artificial
  Probe
tgttcgctccagaatcttgccctaa

SEQ ID NO: 353873 - DNA, 25 bp, Artificial
  Probe
atgccatgccatagggaagacagga

SEQ ID NO: 353874 - DNA, 25 bp, Artificial
  Probe
gcgacatcaacttcctggtaaggtt

SEQ ID NO: 353875 - DNA, 25 bp, Artificial
  Probe
ctccccaaaggagaacaggatacca

SEQ ID NO: 353876 - DNA, 25 bp, Artificial
  Probe
cgctccagaatcttgccctaagcaa

SEQ ID NO: 353877 - DNA, 25 bp, Artificial
  Probe
gttcctcattgtcctgggtgtccgg

SEQ ID NO: 353878 - DNA, 25 bp, Artificial
  Probe
gacaggatgccatgccatagggaag

SEQ ID NO: 353879 - DNA, 25 bp, Artificial
  Probe
cagtgttcgctccagaatcttgccc

SEQ ID NO: 353880 - DNA, 25 bp, Artificial
  Probe
gacatcaacttcctggtaaggttga

SEQ ID NO: 353881 - DNA, 25 bp, Artificial
  Probe
cctaagcaaccgacgccagggagga

SEQ ID NO: 353882 - DNA, 25 bp, Artificial
  Probe
gttcgctccagaatcttgccctaag

SEQ ID NO: 353883 - DNA, 25 bp, Artificial
  Probe
cgacatcaacttcctggtaaggttg

SEQ ID NO: 353884 - DNA, 25 bp, Artificial
  Probe
acaggactccccaaaggagaacagg

SEQ ID NO: 353885 - DNA, 25 bp, Artificial
  Probe
ggatgccatgccatagggaagacag

SEQ ID NO: 353886 - DNA, 25 bp, Artificial
  Probe
cgaactccagtgttcgctccagaat

SEQ ID NO: 353887 - DNA, 25 bp, Artificial
  Probe
ttcctcattgtcctgggtgtccggg

SEQ ID NO: 353888 - DNA, 25 bp, Artificial
  Probe
gatgccatgccatagggaagacagg

SEQ ID NO: 353889 - DNA, 25 bp, Artificial
  Probe
cgcgaactccagtgttcgctccaga

SEQ ID NO: 353890 - DNA, 25 bp, Artificial
  Probe
gtgttcgctccagaatcttgcccta

SEQ ID NO: 353891 - DNA, 25 bp, Artificial
  Probe
aggactccccaaaggagaacaggat

SEQ ID NO: 353892 - DNA, 25 bp, Artificial
  Probe
gctccagaatcttgccctaagcaac

SEQ ID NO: 353893 - DNA, 25 bp, Artificial
  Probe
ttgccctaagcaaccgacgccaggg

SEQ ID NO: 353894 - DNA, 25 bp, Artificial
  Probe
cgagccgcgaactccagtgttcgct

SEQ ID NO: 353895 - DNA, 25 bp, Artificial
  Probe
ggactccccaaaggagaacaggata

SEQ ID NO: 353896 - DNA, 25 bp, Artificial
  Probe
ggattccatccgaatgggccggtac

SEQ ID NO: 353897 - DNA, 25 bp, Artificial
  Probe
agccttagggccacagctacagtca

SEQ ID NO: 353898 - DNA, 25 bp, Artificial
  Probe
tagactgctggcacaaggaccgtgc

SEQ ID NO: 353899 - DNA, 25 bp, Artificial
  Probe
ccctcatgggccaccagaagaaaat

SEQ ID NO: 353900 - DNA, 25 bp, Artificial
  Probe
attccatccgaatgggccggtaccg

SEQ ID NO: 353901 - DNA, 25 bp, Artificial
  Probe
aaatccttggaagcatccagacaat

SEQ ID NO: 353902 - DNA, 25 bp, Artificial
  Probe
cccgagagccttagggccacagcta

SEQ ID NO: 353903 - DNA, 25 bp, Artificial
  Probe
gccggtaccgggaccactttgcagc

SEQ ID NO: 353904 - DNA, 25 bp, Artificial
  Probe
gtgctggcctatggtgaacggccct

SEQ ID NO: 353905 - DNA, 25 bp, Artificial
  Probe
ttgacctccgagcaggcggaaatgg

SEQ ID NO: 353906 - DNA, 25 bp, Artificial
  Probe
gaggccattgccttccgcactttct

SEQ ID NO: 353907 - DNA, 25 bp, Artificial
  Probe
tagggccacagctacagtcagcagg

SEQ ID NO: 353908 - DNA, 25 bp, Artificial
  Probe
taccgggaccactttgcagcgggcg

SEQ ID NO: 353909 - DNA, 25 bp, Artificial
  Probe
cggccctactggaacatgaccaatc

SEQ ID NO: 353910 - DNA, 25 bp, Artificial
  Probe
ggcatggtgcttcacatgaacgccc

SEQ ID NO: 353911 - DNA, 25 bp, Artificial
  Probe
ccaggatgttcgtgccctcggcatc

SEQ ID NO: 353912 - DNA, 25 bp, Artificial
  Probe
ctttgacctccgagcaggcggaaat

SEQ ID NO: 353913 - DNA, 25 bp, Artificial
  Probe
agctacagtcagcaggtgcccagcc

SEQ ID NO: 353914 - DNA, 25 bp, Artificial
  Probe
gctgctttgacctccgagcaggcgg

SEQ ID NO: 353915 - DNA, 25 bp, Artificial
  Probe
ggtgcttcacatgaacgcccaggat

SEQ ID NO: 353916 - DNA, 25 bp, Artificial
  Probe
aacggggacctcactgtgggagatt

SEQ ID NO: 353917 - DNA, 25 bp, Artificial
  Probe
ggtgaacggccctactggaacatga

SEQ ID NO: 353918 - DNA, 25 bp, Artificial
  Probe
catcagctctgtggaagagggttat

SEQ ID NO: 353919 - DNA, 25 bp, Artificial
  Probe
gaccaatcaggatgtcatcagctct

SEQ ID NO: 353920 - DNA, 25 bp, Artificial
  Probe
tctcacgtcgtgagcgttctggagg

SEQ ID NO: 353921 - DNA, 25 bp, Artificial
  Probe
caccagaagaaaatccttggaagca

SEQ ID NO: 353922 - DNA, 25 bp, Artificial
  Probe
tgagcgttctggaggccctggtcca

SEQ ID NO: 353923 - DNA, 25 bp, Artificial
  Probe
acgtcgtgagcgttctggaggccct

SEQ ID NO: 353924 - DNA, 25 bp, Artificial
  Probe
tcctcccttggcatggtgcttcaca

SEQ ID NO: 353925 - DNA, 25 bp, Artificial
  Probe
tgcttcacatgaacgcccaggatgt

SEQ ID NO: 353926 - DNA, 25 bp, Artificial
  Probe
tgggccaccagaagaaaatccttgg

SEQ ID NO: 353927 - DNA, 25 bp, Artificial
  Probe
caatgaggtcccagctgagctgcac

SEQ ID NO: 353928 - DNA, 25 bp, Artificial
  Probe
ccaccagaagaaaatccttggaagc

SEQ ID NO: 353929 - DNA, 25 bp, Artificial
  Probe
cagacaatgaggtcccagctgagct

SEQ ID NO: 353930 - DNA, 25 bp, Artificial
  Probe
cctgcctttgccaggagctgctttg

SEQ ID NO: 353931 - DNA, 25 bp, Artificial
  Probe
actgctggcacaaggaccgtgccca

SEQ ID NO: 353932 - DNA, 25 bp, Artificial
  Probe
cctcactgtgggagattggctggat

SEQ ID NO: 353933 - DNA, 25 bp, Artificial
  Probe
acatgaacgcccaggatgttcgtgc

SEQ ID NO: 353934 - DNA, 25 bp, Artificial
  Probe
ttataggcttccagcgcccatgggc

SEQ ID NO: 353935 - DNA, 25 bp, Artificial
  Probe
gagattggctggattccatccgaat

SEQ ID NO: 353936 - DNA, 25 bp, Artificial
  Probe
ggcctatggtgaacggccctactgg

SEQ ID NO: 353937 - DNA, 25 bp, Artificial
  Probe
ggtcccagctgagctgcactcaggg

SEQ ID NO: 353938 - DNA, 25 bp, Artificial
  Probe
agggttataggcttccagcgcccat

SEQ ID NO: 353939 - DNA, 25 bp, Artificial
  Probe
ctcgcttctctcacgtcgtgagcgt

SEQ ID NO: 353940 - DNA, 25 bp, Artificial
  Probe
ggctggattccatccgaatgggccg

SEQ ID NO: 353941 - DNA, 25 bp, Artificial
  Probe
cagctgagctgcactcaggggccac

SEQ ID NO: 353942 - DNA, 25 bp, Artificial
  Probe
tattaagtgtttctgatgcaaaacc

SEQ ID NO: 353943 - DNA, 25 bp, Artificial
  Probe
ccttctgcagaatgattctgacaat

SEQ ID NO: 353944 - DNA, 25 bp, Artificial
  Probe
tgaaccccttggaaaagcacaattt

SEQ ID NO: 353945 - DNA, 25 bp, Artificial
  Probe
tacagtgggacttgaaccccttgga

SEQ ID NO: 353946 - DNA, 25 bp, Artificial
  Probe
caaccagtactgtttttctatagag

SEQ ID NO: 353947 - DNA, 25 bp, Artificial
  Probe
cctttctctgtggtttcagggtgtg

SEQ ID NO: 353948 - DNA, 25 bp, Artificial
  Probe
tcgttggtgcggtcagtggactcta

SEQ ID NO: 353949 - DNA, 25 bp, Artificial
  Probe
taaacattaggctctcgtaaagcta

SEQ ID NO: 353950 - DNA, 25 bp, Artificial
  Probe
tctcagtgggactgacaaaacgttt

SEQ ID NO: 353951 - DNA, 25 bp, Artificial
  Probe
tcagccactttagtaaaggttatta

SEQ ID NO: 353952 - DNA, 25 bp, Artificial
  Probe
aagacatgaggtacccaatttagta

SEQ ID NO: 353953 - DNA, 25 bp, Artificial
  Probe
atttcattggtacctttctctgtgg

SEQ ID NO: 353954 - DNA, 25 bp, Artificial
  Probe
tttactaagcccattactcagggaa

SEQ ID NO: 353955 - DNA, 25 bp, Artificial
  Probe
taatcatagggctttctgtgcctta

SEQ ID NO: 353956 - DNA, 25 bp, Artificial
  Probe
ccagtactgtttttctatagaggtt

SEQ ID NO: 353957 - DNA, 25 bp, Artificial
  Probe
ttcctgcttacaaggggaaacattg

SEQ ID NO: 353958 - DNA, 25 bp, Artificial
  Probe
gggtactttgcttcagtcatgtttt

SEQ ID NO: 353959 - DNA, 25 bp, Artificial
  Probe
cttcatctattcaaatcgaggactg

SEQ ID NO: 353960 - DNA, 25 bp, Artificial
  Probe
aaagcacaatttcgtaagcgcaaaa

SEQ ID NO: 353961 - DNA, 25 bp, Artificial
  Probe
tagggctttctgtgccttaacttca

SEQ ID NO: 353962 - DNA, 25 bp, Artificial
  Probe
cgcaaaacagttatgcactactgac

SEQ ID NO: 353963 - DNA, 25 bp, Artificial
  Probe
gacttgaaccccttggaaaagcaca

SEQ ID NO: 353964 - DNA, 25 bp, Artificial
  Probe
cttgtcctgaaatgtaatcataggg

SEQ ID NO: 353965 - DNA, 25 bp, Artificial
  Probe
gacaggtatatacttcgcctttctt

SEQ ID NO: 353966 - DNA, 25 bp, Artificial
  Probe
tcccgtttacatttcatgaagaaag

SEQ ID NO: 353967 - DNA, 25 bp, Artificial
  Probe
tgcaaaacccaaagcggcagcgtta

SEQ ID NO: 353968 - DNA, 25 bp, Artificial
  Probe
ttttaagaagttctacagtgaagcc

SEQ ID NO: 353969 - DNA, 25 bp, Artificial
  Probe
gactgtaatgtatgcgctctaccca

SEQ ID NO: 353970 - DNA, 25 bp, Artificial
  Probe
tgggcctgagggtactttgcttcag

SEQ ID NO: 353971 - DNA, 25 bp, Artificial
  Probe
gcgcacacagccttctgcagaatga

SEQ ID NO: 353972 - DNA, 25 bp, Artificial
  Probe
gaaacacggcgcacacagccttctg

SEQ ID NO: 353973 - DNA, 25 bp, Artificial
  Probe
ccacgtgtttacattagccaatcag

SEQ ID NO: 353974 - DNA, 25 bp, Artificial
  Probe
ggcagcgttaattcccgtttacatt

SEQ ID NO: 353975 - DNA, 25 bp, Artificial
  Probe
gcggcagcgttaattcccgtttaca

SEQ ID NO: 353976 - DNA, 25 bp, Artificial
  Probe
ggactctaatctcttatttcattgg

SEQ ID NO: 353977 - DNA, 25 bp, Artificial
  Probe
atggaacttgtcctgaaatgtaatc

SEQ ID NO: 353978 - DNA, 25 bp, Artificial
  Probe
ctaagttgtgcgtgtgtcggcgcat

SEQ ID NO: 353979 - DNA, 25 bp, Artificial
  Probe
gtttctaagttgtgcgtgtgtcggc

SEQ ID NO: 353980 - DNA, 25 bp, Artificial
  Probe
gaaagacctactatgctttaattgt

SEQ ID NO: 353981 - DNA, 25 bp, Artificial
  Probe
cattactcagggaagcacatggggg

SEQ ID NO: 353982 - DNA, 25 bp, Artificial
  Probe
agagcccctaagagcctgcgatcgc

SEQ ID NO: 353983 - DNA, 25 bp, Artificial
  Probe
gagttttggcctggtctatgttggc

SEQ ID NO: 353984 - DNA, 25 bp, Artificial
  Probe
gtttacatttcatgaagaaagacct

SEQ ID NO: 353985 - DNA, 25 bp, Artificial
  Probe
aacctgcgaaacacggcgcacacag

SEQ ID NO: 353986 - DNA, 25 bp, Artificial
  Probe
tatactcggtttcgttcaatatttg

SEQ ID NO: 353987 - DNA, 25 bp, Artificial
  Probe
tacccaatttagtatggaacttgtc

SEQ ID NO: 353988 - DNA, 25 bp, Artificial
  Probe
caagcttctgggacagcctgggctc

SEQ ID NO: 353989 - DNA, 25 bp, Artificial
  Probe
ccgggctcagactggagatggcata

SEQ ID NO: 353990 - DNA, 25 bp, Artificial
  Probe
gggtcatgacattccaggacctccc

SEQ ID NO: 353991 - DNA, 25 bp, Artificial
  Probe
gccaacctgggcaagcttctgggac

SEQ ID NO: 353992 - DNA, 25 bp, Artificial
  Probe
catagggacagctgtgctctgtgag

SEQ ID NO: 353993 - DNA, 25 bp, Artificial
  Probe
cataggtggttgtcccaggaatcct

SEQ ID NO: 353994 - DNA, 25 bp, Artificial
  Probe
aggctgccccatgcaccatgtgtct

SEQ ID NO: 353995 - DNA, 25 bp, Artificial
  Probe
accagaactgtcaccaggattccca

SEQ ID NO: 353996 - DNA, 25 bp, Artificial
  Probe
gcaccatgtgtctcccacggactgg

SEQ ID NO: 353997 - DNA, 25 bp, Artificial
  Probe
tcaggagctttgtgccaacctgggc

SEQ ID NO: 353998 - DNA, 25 bp, Artificial
  Probe
accagccctgccactgggttggaca

SEQ ID NO: 353999 - DNA, 25 bp, Artificial
  Probe
aaaggctgccccatgcaccatgtgt

SEQ ID NO: 354000 - DNA, 25 bp, Artificial
  Probe
gacaggatggcattgtccttgaaga

SEQ ID NO: 354001 - DNA, 25 bp, Artificial
  Probe
tctgtgagggctaccgggctcagac

SEQ ID NO: 354002 - DNA, 25 bp, Artificial
  Probe
agctgagcacgtccagggagcagac

SEQ ID NO: 354003 - DNA, 25 bp, Artificial
  Probe
cattgtccttgaagatgtccccagc

SEQ ID NO: 354004 - DNA, 25 bp, Artificial
  Probe
atgcaccatgtgtctcccacggact

SEQ ID NO: 354005 - DNA, 25 bp, Artificial
  Probe
tttgtgccaacctgggcaagcttct

SEQ ID NO: 354006 - DNA, 25 bp, Artificial
  Probe
cagagctgagcacgtccagggagca

SEQ ID NO: 354007 - DNA, 25 bp, Artificial
  Probe
agaactgtcaccaggattcccacca

SEQ ID NO: 354008 - DNA, 25 bp, Artificial
  Probe
agcgggtcatgacattccaggacct

SEQ ID NO: 354009 - DNA, 25 bp, Artificial
  Probe
tgctcctcttcctgggccagcttgg

SEQ ID NO: 354010 - DNA, 25 bp, Artificial
  Probe
gcacgtccagggagcagacaaagag

SEQ ID NO: 354011 - DNA, 25 bp, Artificial
  Probe
cagccctgccactgggttggacagg

SEQ ID NO: 354012 - DNA, 25 bp, Artificial
  Probe
ctccggccagttggaaggcagagct

SEQ ID NO: 354013 - DNA, 25 bp, Artificial
  Probe
ggtggttgtcccaggaatcctgtgc

SEQ ID NO: 354014 - DNA, 25 bp, Artificial
  Probe
ctccccatagggacagctgtgctct

SEQ ID NO: 354015 - DNA, 25 bp, Artificial
  Probe
atggcataggtggttgtcccaggaa

SEQ ID NO: 354016 - DNA, 25 bp, Artificial
  Probe
ccactgggttggacaggatggcatt

SEQ ID NO: 354017 - DNA, 25 bp, Artificial
  Probe
gcatcaacggcaccttcaggagctt

SEQ ID NO: 354018 - DNA, 25 bp, Artificial
  Probe
caggaatcctgtgcaggacttgtgg

SEQ ID NO: 354019 - DNA, 25 bp, Artificial
  Probe
ccaatctctcgctgtaggacatcat

SEQ ID NO: 354020 - DNA, 25 bp, Artificial
  Probe
catgtgtctcccacggactggaagt

SEQ ID NO: 354021 - DNA, 25 bp, Artificial
  Probe
agcttctgggacagcctgggctctg

SEQ ID NO: 354022 - DNA, 25 bp, Artificial
  Probe
ataagcaaaggctgccccatgcacc

SEQ ID NO: 354023 - DNA, 25 bp, Artificial
  Probe
ctaccgggctcagactggagatggc

SEQ ID NO: 354024 - DNA, 25 bp, Artificial
  Probe
gagctttgtgccaacctgggcaagc

SEQ ID NO: 354025 - DNA, 25 bp, Artificial
  Probe
ttccctccggccagttggaaggcag

SEQ ID NO: 354026 - DNA, 25 bp, Artificial
  Probe
ctctgtgagggctaccgggctcaga

SEQ ID NO: 354027 - DNA, 25 bp, Artificial
  Probe
cgtccagggagcagacaaagaggta

SEQ ID NO: 354028 - DNA, 25 bp, Artificial
  Probe
ctgggctctggcttttgctcctctt

SEQ ID NO: 354029 - DNA, 25 bp, Artificial
  Probe
ctgggcaagcttctgggacagcctg

SEQ ID NO: 354030 - DNA, 25 bp, Artificial
  Probe
taaaggaagcctagcatcaacggca

SEQ ID NO: 354031 - DNA, 25 bp, Artificial
  Probe
gacagctgtgctctgtgagggctac

SEQ ID NO: 354032 - DNA, 25 bp, Artificial
  Probe
agcctagcatcaacggcaccttcag

SEQ ID NO: 354033 - DNA, 25 bp, Artificial
  Probe
ctgagcacgtccagggagcagacaa

SEQ ID NO: 354034 - DNA, 25 bp, Artificial
  Probe
tgaacaaggacctgccagatgctat

SEQ ID NO: 354035 - DNA, 25 bp, Artificial
  Probe
ttatgttcactgtgaaaagaacact

SEQ ID NO: 354036 - DNA, 25 bp, Artificial
  Probe
ctgcttgctaggaccatgatgttga

SEQ ID NO: 354037 - DNA, 25 bp, Artificial
  Probe
tccaaggacttaggattatgttcac

SEQ ID NO: 354038 - DNA, 25 bp, Artificial
  Probe
gtcttgcatgaccactgtactactg

SEQ ID NO: 354039 - DNA, 25 bp, Artificial
  Probe
actgtactactgcttgctaggacca

SEQ ID NO: 354040 - DNA, 25 bp, Artificial
  Probe
tgatgttgaggtcttgctgcttctc

SEQ ID NO: 354041 - DNA, 25 bp, Artificial
  Probe
accatgatgttgaggtcttgctgct

SEQ ID NO: 354042 - DNA, 25 bp, Artificial
  Probe
tactgcttgctaggaccatgatgtt

SEQ ID NO: 354043 - DNA, 25 bp, Artificial
  Probe
gctatacagtgtcatggtgatgcaa

SEQ ID NO: 354044 - DNA, 25 bp, Artificial
  Probe
cttgctgcttctcgtgggtctcctg

SEQ ID NO: 354045 - DNA, 25 bp, Artificial
  Probe
tctgctgaaatacgtggaagccagg

SEQ ID NO: 354046 - DNA, 25 bp, Artificial
  Probe
tgccagatgctatacagtgtcatgg

SEQ ID NO: 354047 - DNA, 25 bp, Artificial
  Probe
gtcttgctgcttctcgtgggtctcc

SEQ ID NO: 354048 - DNA, 25 bp, Artificial
  Probe
atacagtgtcatggtgatgcaaatc

SEQ ID NO: 354049 - DNA, 25 bp, Artificial
  Probe
gcttctcgtgggtctcctgaatcaa

SEQ ID NO: 354050 - DNA, 25 bp, Artificial
  Probe
ctgaaatacgtggaagccaggcact

SEQ ID NO: 354051 - DNA, 25 bp, Artificial
  Probe
ttctcgtgggtctcctgaatcaaaa

SEQ ID NO: 354052 - DNA, 25 bp, Artificial
  Probe
tctctgctgaaatacgtggaagcca

SEQ ID NO: 354053 - DNA, 25 bp, Artificial
  Probe
tatccaaggacttaggattatgttc

SEQ ID NO: 354054 - DNA, 25 bp, Artificial
  Probe
attttctcagcaaatatgatctgag

SEQ ID NO: 354055 - DNA, 25 bp, Artificial
  Probe
cgtcactgaacaaggacctgccaga

SEQ ID NO: 354056 - DNA, 25 bp, Artificial
  Probe
tgaaatacgtggaagccaggcactc

SEQ ID NO: 354057 - DNA, 25 bp, Artificial
  Probe
gatatttctcaatttttgccgaccg

SEQ ID NO: 354058 - DNA, 25 bp, Artificial
  Probe
cagatgctatacagtgtcatggtga

SEQ ID NO: 354059 - DNA, 25 bp, Artificial
  Probe
caaggacctgccagatgctatacag

SEQ ID NO: 354060 - DNA, 25 bp, Artificial
  Probe
ggaccatgatgttgaggtcttgctg

SEQ ID NO: 354061 - DNA, 25 bp, Artificial
  Probe
aattacgtcactgaacaaggacctg

SEQ ID NO: 354062 - DNA, 25 bp, Artificial
  Probe
attatgttcactgtgaaaagaacac

SEQ ID NO: 354063 - DNA, 25 bp, Artificial
  Probe
cagtgtcatggtgatgcaaatcact

SEQ ID NO: 354064 - DNA, 25 bp, Artificial
  Probe
tttctcagcaaatatgatctgagat

SEQ ID NO: 354065 - DNA, 25 bp, Artificial
  Probe
gccgaccgctaaggaaagtaaccat

SEQ ID NO: 354066 - DNA, 25 bp, Artificial
  Probe
gaaatacgtggaagccaggcactcg

SEQ ID NO: 354067 - DNA, 25 bp, Artificial
  Probe
ctaggaccatgatgttgaggtcttg

SEQ ID NO: 354068 - DNA, 25 bp, Artificial
  Probe
tactactgcttgctaggaccatgat

SEQ ID NO: 354069 - DNA, 25 bp, Artificial
  Probe
tcatctctgctgaaatacgtggaag

SEQ ID NO: 354070 - DNA, 25 bp, Artificial
  Probe
tgctgcttctcgtgggtctcctgaa

SEQ ID NO: 354071 - DNA, 25 bp, Artificial
  Probe
tgccgaccgctaaggaaagtaacca

SEQ ID NO: 354072 - DNA, 25 bp, Artificial
  Probe
ctatacagtgtcatggtgatgcaaa

SEQ ID NO: 354073 - DNA, 25 bp, Artificial
  Probe
ctgaacaaggacctgccagatgcta

SEQ ID NO: 354074 - DNA, 25 bp, Artificial
  Probe
tctcagcaaatatgatctgagatag

SEQ ID NO: 354075 - DNA, 25 bp, Artificial
  Probe
tacgtggaagccaggcactcgcaca

SEQ ID NO: 354076 - DNA, 25 bp, Artificial
  Probe
cttgcatgaccactgtactactgct

SEQ ID NO: 354077 - DNA, 25 bp, Artificial
  Probe
ctcgtgggtctcctgaatcaaaaaa

SEQ ID NO: 354078 - DNA, 25 bp, Artificial
  Probe
agtcgtcttgcatgaccactgtact

SEQ ID NO: 354079 - DNA, 25 bp, Artificial
  Probe
atgctatacagtgtcatggtgatgc

SEQ ID NO: 354080 - DNA, 25 bp, Artificial
  Probe
tgcagaaggctgaattcctgtaact

SEQ ID NO: 354081 - DNA, 25 bp, Artificial
  Probe
tctagcagagtcctgagaacatgtc

SEQ ID NO: 354082 - DNA, 25 bp, Artificial
  Probe
cttgcatctgccttaactggacaga

SEQ ID NO: 354083 - DNA, 25 bp, Artificial
  Probe
ctctcaaacacgtggcttcaggaag

SEQ ID NO: 354084 - DNA, 25 bp, Artificial
  Probe
agagactgagcagcttcatcaagga

SEQ ID NO: 354085 - DNA, 25 bp, Artificial
  Probe
caaacacgtggcttcaggaagggac

SEQ ID NO: 354086 - DNA, 25 bp, Artificial
  Probe
gccctcatagctctcaaacacgtgg

SEQ ID NO: 354087 - DNA, 25 bp, Artificial
  Probe
gccccaggagccaacagatcctgaa

SEQ ID NO: 354088 - DNA, 25 bp, Artificial
  Probe
agactgagcagcttcatcaaggagc

SEQ ID NO: 354089 - DNA, 25 bp, Artificial
  Probe
gcagcttcatcaaggagcagacacc

SEQ ID NO: 354090 - DNA, 25 bp, Artificial
  Probe
gatctcacgagaactgacttttacc

SEQ ID NO: 354091 - DNA, 25 bp, Artificial
  Probe
tgggagccaagttccttacagcaga

SEQ ID NO: 354092 - DNA, 25 bp, Artificial
  Probe
gagaaaagccccaggagccaacaga

SEQ ID NO: 354093 - DNA, 25 bp, Artificial
  Probe
tccaagcagttgacaagttgcccaa

SEQ ID NO: 354094 - DNA, 25 bp, Artificial
  Probe
cctcatagctctcaaacacgtggct

SEQ ID NO: 354095 - DNA, 25 bp, Artificial
  Probe
cttttaccaggtagcctgggtgtgt

SEQ ID NO: 354096 - DNA, 25 bp, Artificial
  Probe
catctgccttaactggacagagacc

SEQ ID NO: 354097 - DNA, 25 bp, Artificial
  Probe
ttgcccaagatctcacgagaactga

SEQ ID NO: 354098 - DNA, 25 bp, Artificial
  Probe
gcttcatcaaggagcagacaccttg

SEQ ID NO: 354099 - DNA, 25 bp, Artificial
  Probe
ccaggagccaacagatcctgaagct

SEQ ID NO: 354100 - DNA, 25 bp, Artificial
  Probe
gtagcctgggtgtgtctgtctagca

SEQ ID NO: 354101 - DNA, 25 bp, Artificial
  Probe
aactggacagagaccccagctttcc

SEQ ID NO: 354102 - DNA, 25 bp, Artificial
  Probe
aaggctgaattcctgtaacttaagc

SEQ ID NO: 354103 - DNA, 25 bp, Artificial
  Probe
agcctgggtgtgtctgtctagcaga

SEQ ID NO: 354104 - DNA, 25 bp, Artificial
  Probe
ggagcagacaccttgcatctgcctt

SEQ ID NO: 354105 - DNA, 25 bp, Artificial
  Probe
taccaggtagcctgggtgtgtctgt

SEQ ID NO: 354106 - DNA, 25 bp, Artificial
  Probe
acaccttgcatctgccttaactgga

SEQ ID NO: 354107 - DNA, 25 bp, Artificial
  Probe
tgatccaggtgaggagccagcgtcc

SEQ ID NO: 354108 - DNA, 25 bp, Artificial
  Probe
tctcacgagaactgacttttaccag

SEQ ID NO: 354109 - DNA, 25 bp, Artificial
  Probe
tgccctcatagctctcaaacacgtg

SEQ ID NO: 354110 - DNA, 25 bp, Artificial
  Probe
ggctgaattcctgtaacttaagctt

SEQ ID NO: 354111 - DNA, 25 bp, Artificial
  Probe
gaggagccagcgtccaagcagttga

SEQ ID NO: 354112 - DNA, 25 bp, Artificial
  Probe
gacaagttgcccaagatctcacgag

SEQ ID NO: 354113 - DNA, 25 bp, Artificial
  Probe
gagcagcttcatcaaggagcagaca

SEQ ID NO: 354114 - DNA, 25 bp, Artificial
  Probe
ttccttacagcagagggaaggatgg

SEQ ID NO: 354115 - DNA, 25 bp, Artificial
  Probe
cctgggtgtgtctgtctagcagagt

SEQ ID NO: 354116 - DNA, 25 bp, Artificial
  Probe
gcagacaccttgcatctgccttaac

SEQ ID NO: 354117 - DNA, 25 bp, Artificial
  Probe
cagtctgaatgctgctagggaagtg

SEQ ID NO: 354118 - DNA, 25 bp, Artificial
  Probe
ttgcatctgccttaactggacagag

SEQ ID NO: 354119 - DNA, 25 bp, Artificial
  Probe
acaagttgcccaagatctcacgaga

SEQ ID NO: 354120 - DNA, 25 bp, Artificial
  Probe
ctagcagagtcctgagaacatgtct

SEQ ID NO: 354121 - DNA, 25 bp, Artificial
  Probe
agacaccttgcatctgccttaactg

SEQ ID NO: 354122 - DNA, 25 bp, Artificial
  Probe
ctcgttggggcttccccacagcata

SEQ ID NO: 354123 - DNA, 25 bp, Artificial
  Probe
atccaggtgaggagccagcgtccaa

SEQ ID NO: 354124 - DNA, 25 bp, Artificial
  Probe
ctgagcagcttcatcaaggagcaga

SEQ ID NO: 354125 - DNA, 25 bp, Artificial
  Probe
atgggtgtgcagaaggctgaattcc

SEQ ID NO: 354126 - DNA, 25 bp, Artificial
  Probe
tcagctttcaggaaaagtgggtttt

SEQ ID NO: 354127 - DNA, 25 bp, Artificial
  Probe
ggagtcatctgttgaacatctgaat

SEQ ID NO: 354128 - DNA, 25 bp, Artificial
  Probe
cttccaagtagagtgccataaataa

SEQ ID NO: 354129 - DNA, 25 bp, Artificial
  Probe
tctattcttccaagtagagtgccat

SEQ ID NO: 354130 - DNA, 25 bp, Artificial
  Probe
tttttttgtgggatggttaagcaat

SEQ ID NO: 354131 - DNA, 25 bp, Artificial
  Probe
attcttccaagtagagtgccataaa

SEQ ID NO: 354132 - DNA, 25 bp, Artificial
  Probe
acatctgaatttatctattcttcca

SEQ ID NO: 354133 - DNA, 25 bp, Artificial
  Probe
atctattcttccaagtagagtgcca

SEQ ID NO: 354134 - DNA, 25 bp, Artificial
  Probe
tttatctattcttccaagtagagtg

SEQ ID NO: 354135 - DNA, 25 bp, Artificial
  Probe
tattcttccaagtagagtgccataa

SEQ ID NO: 354136 - DNA, 25 bp, Artificial
  Probe
tcttccaagtagagtgccataaata

SEQ ID NO: 354137 - DNA, 25 bp, Artificial
  Probe
gagtcatctgttgaacatctgaatt

SEQ ID NO: 354138 - DNA, 25 bp, Artificial
  Probe
ttccaagtagagtgccataaataat

SEQ ID NO: 354139 - DNA, 25 bp, Artificial
  Probe
ttatctattcttccaagtagagtgc

SEQ ID NO: 354140 - DNA, 25 bp, Artificial
  Probe
aaataatttcagctttcaggaaaag

SEQ ID NO: 354141 - DNA, 25 bp, Artificial
  Probe
aaattttcatataattggagtcatc

SEQ ID NO: 354142 - DNA, 25 bp, Artificial
  Probe
tgaacatctgaatttatctattctt

SEQ ID NO: 354143 - DNA, 25 bp, Artificial
  Probe
catataattggagtcatctgttgaa

SEQ ID NO: 354144 - DNA, 25 bp, Artificial
  Probe
attggagtcatctgttgaacatctg

SEQ ID NO: 354145 - DNA, 25 bp, Artificial
  Probe
atctgttgaacatctgaatttatct

SEQ ID NO: 354146 - DNA, 25 bp, Artificial
  Probe
aattttcatataattggagtcatct

SEQ ID NO: 354147 - DNA, 25 bp, Artificial
  Probe
ttaaattttcatataattggagtca

SEQ ID NO: 354148 - DNA, 25 bp, Artificial
  Probe
ataattggagtcatctgttgaacat

SEQ ID NO: 354149 - DNA, 25 bp, Artificial
  Probe
ccataaataatttcagctttcagga

SEQ ID NO: 354150 - DNA, 25 bp, Artificial
  Probe
taattggagtcatctgttgaacatc

SEQ ID NO: 354151 - DNA, 25 bp, Artificial
  Probe
aatttcagctttcaggaaaagtggg

SEQ ID NO: 354152 - DNA, 25 bp, Artificial
  Probe
ctattcttccaagtagagtgccata

SEQ ID NO: 354153 - DNA, 25 bp, Artificial
  Probe
atctgaatttatctattcttccaag

SEQ ID NO: 354154 - DNA, 25 bp, Artificial
  Probe
ttcttccaagtagagtgccataaat

SEQ ID NO: 354155 - DNA, 25 bp, Artificial
  Probe
ctgttgaacatctgaatttatctat

SEQ ID NO: 354156 - DNA, 25 bp, Artificial
  Probe
aacatctgaatttatctattcttcc

SEQ ID NO: 354157 - DNA, 25 bp, Artificial
  Probe
taatttcagctttcaggaaaagtgg

SEQ ID NO: 354158 - DNA, 25 bp, Artificial
  Probe
tggagtcatctgttgaacatctgaa

SEQ ID NO: 354159 - DNA, 25 bp, Artificial
  Probe
atttatctattcttccaagtagagt

SEQ ID NO: 354160 - DNA, 25 bp, Artificial
  Probe
aattggagtcatctgttgaacatct

SEQ ID NO: 354161 - DNA, 25 bp, Artificial
  Probe
ttggagtcatctgttgaacatctga

SEQ ID NO: 354162 - DNA, 25 bp, Artificial
  Probe
ttttttgtgggatggttaagcaatt

SEQ ID NO: 354163 - DNA, 25 bp, Artificial
  Probe
tttttgtgggatggttaagcaattt

SEQ ID NO: 354164 - DNA, 25 bp, Artificial
  Probe
tcatctgttgaacatctgaatttat

SEQ ID NO: 354165 - DNA, 25 bp, Artificial
  Probe
tatctattcttccaagtagagtgcc

SEQ ID NO: 354166 - DNA, 25 bp, Artificial
  Probe
gtcatctgttgaacatctgaattta

SEQ ID NO: 354167 - DNA, 25 bp, Artificial
  Probe
ctgaatttatctattcttccaagta

SEQ ID NO: 354168 - DNA, 25 bp, Artificial
  Probe
agtcatctgttgaacatctgaattt

SEQ ID NO: 354169 - DNA, 25 bp, Artificial
  Probe
taaataatttcagctttcaggaaaa

SEQ ID NO: 354170 - DNA, 25 bp, Artificial
  Probe
atataattggagtcatctgttgaac

SEQ ID NO: 354171 - DNA, 25 bp, Artificial
  Probe
ttgaacatctgaatttatctattct

SEQ ID NO: 354172 - DNA, 25 bp, Artificial
  Probe
gacaagagtctcaaaggctgtgggt

SEQ ID NO: 354173 - DNA, 25 bp, Artificial
  Probe
tgagcggcagctaaaaagtgttcta

SEQ ID NO: 354174 - DNA, 25 bp, Artificial
  Probe
tcagaggccccgtttgttcccagag

SEQ ID NO: 354175 - DNA, 25 bp, Artificial
  Probe
gggcctgatgcaaggctgaccacac

SEQ ID NO: 354176 - DNA, 25 bp, Artificial
  Probe
taagctcacaggagtggccaccact

SEQ ID NO: 354177 - DNA, 25 bp, Artificial
  Probe
ccgtttgttcccagagcctgggcca

SEQ ID NO: 354178 - DNA, 25 bp, Artificial
  Probe
tgccaactggtgcacccctagttct

SEQ ID NO: 354179 - DNA, 25 bp, Artificial
  Probe
ggggcctgatgcaaggctgaccaca

SEQ ID NO: 354180 - DNA, 25 bp, Artificial
  Probe
gccctgtcactctagactggaaggt

SEQ ID NO: 354181 - DNA, 25 bp, Artificial
  Probe
ccctgtcactctagactggaaggta

SEQ ID NO: 354182 - DNA, 25 bp, Artificial
  Probe
cctaagctcacaggagtggccacca

SEQ ID NO: 354183 - DNA, 25 bp, Artificial
  Probe
ctgatgcaaggctgaccacaccaac

SEQ ID NO: 354184 - DNA, 25 bp, Artificial
  Probe
ttcctaagctcacaggagtggccac

SEQ ID NO: 354185 - DNA, 25 bp, Artificial
  Probe
ctgtcactctagactggaaggtatg

SEQ ID NO: 354186 - DNA, 25 bp, Artificial
  Probe
tcatcctggatcttgtactgagcgg

SEQ ID NO: 354187 - DNA, 25 bp, Artificial
  Probe
tcactctagactggaaggtatgggg

SEQ ID NO: 354188 - DNA, 25 bp, Artificial
  Probe
catcctggatcttgtactgagcggc

SEQ ID NO: 354189 - DNA, 25 bp, Artificial
  Probe
actgagcggcagctaaaaagtgttc

SEQ ID NO: 354190 - DNA, 25 bp, Artificial
  Probe
ctggatcttgtactgagcggcagct

SEQ ID NO: 354191 - DNA, 25 bp, Artificial
  Probe
cacttcagaacatgaggggtctggg

SEQ ID NO: 354192 - DNA, 25 bp, Artificial
  Probe
cgtttgttcccagagcctgggccat

SEQ ID NO: 354193 - DNA, 25 bp, Artificial
  Probe
caagagtctcaaaggctgtgggtaa

SEQ ID NO: 354194 - DNA, 25 bp, Artificial
  Probe
atgtctcaaaagacaagagtctcaa

SEQ ID NO: 354195 - DNA, 25 bp, Artificial
  Probe
cctggatcttgtactgagcggcagc

SEQ ID NO: 354196 - DNA, 25 bp, Artificial
  Probe
actatgccaactggtgcacccctag

SEQ ID NO: 354197 - DNA, 25 bp, Artificial
  Probe
cttcctaagctcacaggagtggcca

SEQ ID NO: 354198 - DNA, 25 bp, Artificial
  Probe
ctaagctcacaggagtggccaccac

SEQ ID NO: 354199 - DNA, 25 bp, Artificial
  Probe
tggatcttgtactgagcggcagcta

SEQ ID NO: 354200 - DNA, 25 bp, Artificial
  Probe
agtctcaaaggctgtgggtaagctg

SEQ ID NO: 354201 - DNA, 25 bp, Artificial
  Probe
ccagtgccctgtcactctagactgg

SEQ ID NO: 354202 - DNA, 25 bp, Artificial
  Probe
cagaggccccgtttgttcccagagc

SEQ ID NO: 354203 - DNA, 25 bp, Artificial
  Probe
tatggggcctgatgcaaggctgacc

SEQ ID NO: 354204 - DNA, 25 bp, Artificial
  Probe
tctcaaaggctgtgggtaagctgaa

SEQ ID NO: 354205 - DNA, 25 bp, Artificial
  Probe
acacttcagaacatgaggggtctgg

SEQ ID NO: 354206 - DNA, 25 bp, Artificial
  Probe
gtgccctgtcactctagactggaag

SEQ ID NO: 354207 - DNA, 25 bp, Artificial
  Probe
ctgagcggcagctaaaaagtgttct

SEQ ID NO: 354208 - DNA, 25 bp, Artificial
  Probe
gtactgagcggcagctaaaaagtgt

SEQ ID NO: 354209 - DNA, 25 bp, Artificial
  Probe
tactgagcggcagctaaaaagtgtt

SEQ ID NO: 354210 - DNA, 25 bp, Artificial
  Probe
ctctagactggaaggtatggggcct

SEQ ID NO: 354211 - DNA, 25 bp, Artificial
  Probe
actctagactggaaggtatggggcc

SEQ ID NO: 354212 - DNA, 25 bp, Artificial
  Probe
gatcttgtactgagcggcagctaaa

SEQ ID NO: 354213 - DNA, 25 bp, Artificial
  Probe
gtcactctagactggaaggtatggg

SEQ ID NO: 354214 - DNA, 25 bp, Artificial
  Probe
gtctcaaaggctgtgggtaagctga

SEQ ID NO: 354215 - DNA, 25 bp, Artificial
  Probe
gtgttctacccagtgccctgtcact

SEQ ID NO: 354216 - DNA, 25 bp, Artificial
  Probe
agtgttctacccagtgccctgtcac

SEQ ID NO: 354217 - DNA, 25 bp, Artificial
  Probe
atgccaactggtgcacccctagttc

SEQ ID NO: 354218 - DNA, 25 bp, Artificial
  Probe
ctgctgaagtcagttgaaggcacga

SEQ ID NO: 354219 - DNA, 25 bp, Artificial
  Probe
acatactatatactcttgtgtgtag

SEQ ID NO: 354220 - DNA, 25 bp, Artificial
  Probe
cttcatggattgtttcttctgacca

SEQ ID NO: 354221 - DNA, 25 bp, Artificial
  Probe
catcgttaggctatgtctcccaagt

SEQ ID NO: 354222 - DNA, 25 bp, Artificial
  Probe
agtgtcccaggagaggtatacctgg

SEQ ID NO: 354223 - DNA, 25 bp, Artificial
  Probe
gcccttctggggtcactgcttcact

SEQ ID NO: 354224 - DNA, 25 bp, Artificial
  Probe
cccaggagaggtatacctgggacct

SEQ ID NO: 354225 - DNA, 25 bp, Artificial
  Probe
gaaagatatccttgtttgcacaaga

SEQ ID NO: 354226 - DNA, 25 bp, Artificial
  Probe
actctggaacccaggcacgaatctt

SEQ ID NO: 354227 - DNA, 25 bp, Artificial
  Probe
taggaaaactctggaacccaggcac

SEQ ID NO: 354228 - DNA, 25 bp, Artificial
  Probe
catgtttttggagtgtcccaggaga

SEQ ID NO: 354229 - DNA, 25 bp, Artificial
  Probe
cttgtttgcacaagactggtggaaa

SEQ ID NO: 354230 - DNA, 25 bp, Artificial
  Probe
tctcgtccaactatgcccatgctga

SEQ ID NO: 354231 - DNA, 25 bp, Artificial
  Probe
tcttagagcggcaccaacgtgagaa

SEQ ID NO: 354232 - DNA, 25 bp, Artificial
  Probe
ctactgtacattgaagagacatata

SEQ ID NO: 354233 - DNA, 25 bp, Artificial
  Probe
ctgggtggtcccaggctgctctcac

SEQ ID NO: 354234 - DNA, 25 bp, Artificial
  Probe
gagccatctgggtctgatactctgt

SEQ ID NO: 354235 - DNA, 25 bp, Artificial
  Probe
tgcacaagactggtggaaaaatctc

SEQ ID NO: 354236 - DNA, 25 bp, Artificial
  Probe
cagcaggtggcctgctgaagtcagt

SEQ ID NO: 354237 - DNA, 25 bp, Artificial
  Probe
cctccagctgggtggtcccaggctg

SEQ ID NO: 354238 - DNA, 25 bp, Artificial
  Probe
cgattgcccttctggggtcactgct

SEQ ID NO: 354239 - DNA, 25 bp, Artificial
  Probe
tgaaggcacgattgcccttctgggg

SEQ ID NO: 354240 - DNA, 25 bp, Artificial
  Probe
gcacgattgcccttctggggtcact

SEQ ID NO: 354241 - DNA, 25 bp, Artificial
  Probe
tctcagggcccagagccatctgggt

SEQ ID NO: 354242 - DNA, 25 bp, Artificial
  Probe
caccaacgtgagaaagacagacaga

SEQ ID NO: 354243 - DNA, 25 bp, Artificial
  Probe
gtcttcatcgttaggctatgtctcc

SEQ ID NO: 354244 - DNA, 25 bp, Artificial
  Probe
tgcacgtgctactggtggtctgtct

SEQ ID NO: 354245 - DNA, 25 bp, Artificial
  Probe
tccttcatggattgtttcttctgac

SEQ ID NO: 354246 - DNA, 25 bp, Artificial
  Probe
ttggagtgtcccaggagaggtatac

SEQ ID NO: 354247 - DNA, 25 bp, Artificial
  Probe
tcccaggctgctctcacttgggggt

SEQ ID NO: 354248 - DNA, 25 bp, Artificial
  Probe
ccaactatgcccatgctgaagtcct

SEQ ID NO: 354249 - DNA, 25 bp, Artificial
  Probe
taaacacagagacctgccaagacgc

SEQ ID NO: 354250 - DNA, 25 bp, Artificial
  Probe
tcttttgctgggaaagatatccttg

SEQ ID NO: 354251 - DNA, 25 bp, Artificial
  Probe
actatgcccatgctgaagtcctcac

SEQ ID NO: 354252 - DNA, 25 bp, Artificial
  Probe
ggtggaaaaatctcccatgcaactc

SEQ ID NO: 354253 - DNA, 25 bp, Artificial
  Probe
tggtggaaaaatctcccatgcaact

SEQ ID NO: 354254 - DNA, 25 bp, Artificial
  Probe
ggaaaactctggaacccaggcacga

SEQ ID NO: 354255 - DNA, 25 bp, Artificial
  Probe
aagccagaggcttaggaaaactctg

SEQ ID NO: 354256 - DNA, 25 bp, Artificial
  Probe
ctcgtccaactatgcccatgctgaa

SEQ ID NO: 354257 - DNA, 25 bp, Artificial
  Probe
agacagaaagccagaggcttaggaa

SEQ ID NO: 354258 - DNA, 25 bp, Artificial
  Probe
tcagttgaaggcacgattgcccttc

SEQ ID NO: 354259 - DNA, 25 bp, Artificial
  Probe
gtttcttctgaccatgtttttggag

SEQ ID NO: 354260 - DNA, 25 bp, Artificial
  Probe
ttaggctatgtctcccaagtcctct

SEQ ID NO: 354261 - DNA, 25 bp, Artificial
  Probe
ccctgccagcaggtggcctgctgaa

SEQ ID NO: 354262 - DNA, 25 bp, Artificial
  Probe
cacgaatcttttgctgggaaagata

SEQ ID NO: 354263 - DNA, 25 bp, Artificial
  Probe
ctactggtggtctgtcttcatcgtt

SEQ ID NO: 354264 - DNA, 25 bp, Artificial
  Probe
taagctctatttctaaagttctggg

SEQ ID NO: 354265 - DNA, 25 bp, Artificial
  Probe
ggcctattctatcagtcaccatggc

SEQ ID NO: 354266 - DNA, 25 bp, Artificial
  Probe
tctgtgagccctcgatcccaatact

SEQ ID NO: 354267 - DNA, 25 bp, Artificial
  Probe
gtacccccagtgtaagctctatttc

SEQ ID NO: 354268 - DNA, 25 bp, Artificial
  Probe
ttatcgtctgtgagccctcgatccc

SEQ ID NO: 354269 - DNA, 25 bp, Artificial
  Probe
accatggccgctgctttccagatgg

SEQ ID NO: 354270 - DNA, 25 bp, Artificial
  Probe
tagaagccatacagtgttaacctct

SEQ ID NO: 354271 - DNA, 25 bp, Artificial
  Probe
attgtgtctgtccattatcgtctgt

SEQ ID NO: 354272 - DNA, 25 bp, Artificial
  Probe
gggactccacactggactttactct

SEQ ID NO: 354273 - DNA, 25 bp, Artificial
  Probe
ggactccacactggactttactctt

SEQ ID NO: 354274 - DNA, 25 bp, Artificial
  Probe
taaagttctgggactccacactgga

SEQ ID NO: 354275 - DNA, 25 bp, Artificial
  Probe
tttctaaagttctgggactccacac

SEQ ID NO: 354276 - DNA, 25 bp, Artificial
  Probe
tctatttctaaagttctgggactcc

SEQ ID NO: 354277 - DNA, 25 bp, Artificial
  Probe
tatcagtcaccatggccgctgcttt

SEQ ID NO: 354278 - DNA, 25 bp, Artificial
  Probe
tctgggactccacactggactttac

SEQ ID NO: 354279 - DNA, 25 bp, Artificial
  Probe
tttaaccattttttccaggctggag

SEQ ID NO: 354280 - DNA, 25 bp, Artificial
  Probe
aggtccatgggcaaacctggcctat

SEQ ID NO: 354281 - DNA, 25 bp, Artificial
  Probe
ctggcctattctatcagtcaccatg

SEQ ID NO: 354282 - DNA, 25 bp, Artificial
  Probe
ggtccatttcaaactgtataaatgg

SEQ ID NO: 354283 - DNA, 25 bp, Artificial
  Probe
aggtccatttcaaactgtataaatg

SEQ ID NO: 354284 - DNA, 25 bp, Artificial
  Probe
agttctgggactccacactggactt

SEQ ID NO: 354285 - DNA, 25 bp, Artificial
  Probe
gggtacccccagtgtaagctctatt

SEQ ID NO: 354286 - DNA, 25 bp, Artificial
  Probe
ggtacccccagtgtaagctctattt

SEQ ID NO: 354287 - DNA, 25 bp, Artificial
  Probe
tccagatggttgtggcccaatgcca

SEQ ID NO: 354288 - DNA, 25 bp, Artificial
  Probe
gtctgtgagccctcgatcccaatac

SEQ ID NO: 354289 - DNA, 25 bp, Artificial
  Probe
ctgctttccagatggttgtggccca

SEQ ID NO: 354290 - DNA, 25 bp, Artificial
  Probe
gttaagcattcaggagaaaggtcca

SEQ ID NO: 354291 - DNA, 25 bp, Artificial
  Probe
catggccgctgctttccagatggtt

SEQ ID NO: 354292 - DNA, 25 bp, Artificial
  Probe
taagcattcaggagaaaggtccatg

SEQ ID NO: 354293 - DNA, 25 bp, Artificial
  Probe
acctccctgttaagcattcaggaga

SEQ ID NO: 354294 - DNA, 25 bp, Artificial
  Probe
ctgttaagcattcaggagaaaggtc

SEQ ID NO: 354295 - DNA, 25 bp, Artificial
  Probe
ctgggtacccccagtgtaagctcta

SEQ ID NO: 354296 - DNA, 25 bp, Artificial
  Probe
tctttaaccattttttccaggctgg

SEQ ID NO: 354297 - DNA, 25 bp, Artificial
  Probe
caccatggccgctgctttccagatg

SEQ ID NO: 354298 - DNA, 25 bp, Artificial
  Probe
catgggcaaacctggcctattctat

SEQ ID NO: 354299 - DNA, 25 bp, Artificial
  Probe
cccagtgtaagctctatttctaaag

SEQ ID NO: 354300 - DNA, 25 bp, Artificial
  Probe
cctattctatcagtcaccatggccg

SEQ ID NO: 354301 - DNA, 25 bp, Artificial
  Probe
ccattatcgtctgtgagccctcgat

SEQ ID NO: 354302 - DNA, 25 bp, Artificial
  Probe
gaagccatacagtgttaacctctcc

SEQ ID NO: 354303 - DNA, 25 bp, Artificial
  Probe
gtctgtccattatcgtctgtgagcc

SEQ ID NO: 354304 - DNA, 25 bp, Artificial
  Probe
ggccgctgctttccagatggttgtg

SEQ ID NO: 354305 - DNA, 25 bp, Artificial
  Probe
cagtcagctgggtacccccagtgta

SEQ ID NO: 354306 - DNA, 25 bp, Artificial
  Probe
tccatgggcaaacctggcctattct

SEQ ID NO: 354307 - DNA, 25 bp, Artificial
  Probe
tggttgtggcccaatgccacttccc

SEQ ID NO: 354308 - DNA, 25 bp, Artificial
  Probe
gcaaacctggcctattctatcagtc

SEQ ID NO: 354309 - DNA, 25 bp, Artificial
  Probe
agtcagctgggtacccccagtgtaa

SEQ ID NO: 354310 - DNA, 25 bp, Artificial
  Probe
cccactagctagagggataaatgga

SEQ ID NO: 354311 - DNA, 25 bp, Artificial
  Probe
gctgtgcgccagactctgaacggcc

SEQ ID NO: 354312 - DNA, 25 bp, Artificial
  Probe
acgttgtggaatcctggttccaggg

SEQ ID NO: 354313 - DNA, 25 bp, Artificial
  Probe
tgtggattccacagattacaaccag

SEQ ID NO: 354314 - DNA, 25 bp, Artificial
  Probe
ggatttgtggattccacagattaca

SEQ ID NO: 354315 - DNA, 25 bp, Artificial
  Probe
tgtgcgccagactctgaacggccat

SEQ ID NO: 354316 - DNA, 25 bp, Artificial
  Probe
aatagtccattccttaccgggccat

SEQ ID NO: 354317 - DNA, 25 bp, Artificial
  Probe
aacgttgtggaatcctggttccagg

SEQ ID NO: 354318 - DNA, 25 bp, Artificial
  Probe
cagtcccactagctagagggataaa

SEQ ID NO: 354319 - DNA, 25 bp, Artificial
  Probe
tggatttgtggattccacagattac

SEQ ID NO: 354320 - DNA, 25 bp, Artificial
  Probe
gcgccagactctgaacggccatgca

SEQ ID NO: 354321 - DNA, 25 bp, Artificial
  Probe
acggccatgcaaatagtccattcct

SEQ ID NO: 354322 - DNA, 25 bp, Artificial
  Probe
gtgccagtcccactagctagaggga

SEQ ID NO: 354323 - DNA, 25 bp, Artificial
  Probe
ccattttaacgttgtggaatcctgg

SEQ ID NO: 354324 - DNA, 25 bp, Artificial
  Probe
gccagtcccactagctagagggata

SEQ ID NO: 354325 - DNA, 25 bp, Artificial
  Probe
tggattccacagattacaaccagct

SEQ ID NO: 354326 - DNA, 25 bp, Artificial
  Probe
agctgtgcgccagactctgaacggc

SEQ ID NO: 354327 - DNA, 25 bp, Artificial
  Probe
tagctgtgcgccagactctgaacgg

SEQ ID NO: 354328 - DNA, 25 bp, Artificial
  Probe
ttaacgttgtggaatcctggttcca

SEQ ID NO: 354329 - DNA, 25 bp, Artificial
  Probe
gatttgtggattccacagattacaa

SEQ ID NO: 354330 - DNA, 25 bp, Artificial
  Probe
tgcaaatagtccattccttaccggg

SEQ ID NO: 354331 - DNA, 25 bp, Artificial
  Probe
tagtccattccttaccgggccattt

SEQ ID NO: 354332 - DNA, 25 bp, Artificial
  Probe
taacgttgtggaatcctggttccag

SEQ ID NO: 354333 - DNA, 25 bp, Artificial
  Probe
ggtgccagtcccactagctagaggg

SEQ ID NO: 354334 - DNA, 25 bp, Artificial
  Probe
ggccattttaacgttgtggaatcct

SEQ ID NO: 354335 - DNA, 25 bp, Artificial
  Probe
gccagactctgaacggccatgcaaa

SEQ ID NO: 354336 - DNA, 25 bp, Artificial
  Probe
ggccatgcaaatagtccattcctta

SEQ ID NO: 354337 - DNA, 25 bp, Artificial
  Probe
atttgtggattccacagattacaac

SEQ ID NO: 354338 - DNA, 25 bp, Artificial
  Probe
ctctgaacggccatgcaaatagtcc

SEQ ID NO: 354339 - DNA, 25 bp, Artificial
  Probe
ccagtcccactagctagagggataa

SEQ ID NO: 354340 - DNA, 25 bp, Artificial
  Probe
gcaaatagtccattccttaccgggc

SEQ ID NO: 354341 - DNA, 25 bp, Artificial
  Probe
atgcaaatagtccattccttaccgg

SEQ ID NO: 354342 - DNA, 25 bp, Artificial
  Probe
gaacggccatgcaaatagtccattc

SEQ ID NO: 354343 - DNA, 25 bp, Artificial
  Probe
atagtccattccttaccgggccatt

SEQ ID NO: 354344 - DNA, 25 bp, Artificial
  Probe
cattttaacgttgtggaatcctggt

SEQ ID NO: 354345 - DNA, 25 bp, Artificial
  Probe
gtcccactagctagagggataaatg

SEQ ID NO: 354346 - DNA, 25 bp, Artificial
  Probe
tctgaacggccatgcaaatagtcca

SEQ ID NO: 354347 - DNA, 25 bp, Artificial
  Probe
agtcccactagctagagggataaat

SEQ ID NO: 354348 - DNA, 25 bp, Artificial
  Probe
tttgtggattccacagattacaacc

SEQ ID NO: 354349 - DNA, 25 bp, Artificial
  Probe
ggattccacagattacaaccagcta

SEQ ID NO: 354350 - DNA, 25 bp, Artificial
  Probe
ctgaacggccatgcaaatagtccat

SEQ ID NO: 354351 - DNA, 25 bp, Artificial
  Probe
aacggccatgcaaatagtccattcc

SEQ ID NO: 354352 - DNA, 25 bp, Artificial
  Probe
gtggattccacagattacaaccagc

SEQ ID NO: 354353 - DNA, 25 bp, Artificial
  Probe
gtgcgccagactctgaacggccatg

SEQ ID NO: 354354 - DNA, 25 bp, Artificial
  Probe
cggccatgcaaatagtccattcctt

SEQ ID NO: 354355 - DNA, 25 bp, Artificial
  Probe
tgaacggccatgcaaatagtccatt

SEQ ID NO: 354356 - DNA, 25 bp, Artificial
  Probe
atggggctgcgtaaggatacaaagc

SEQ ID NO: 354357 - DNA, 25 bp, Artificial
  Probe
caggctcaggccacccggagactga

SEQ ID NO: 354358 - DNA, 25 bp, Artificial
  Probe
tgaaaccaagtttcaggggttcttg

SEQ ID NO: 354359 - DNA, 25 bp, Artificial
  Probe
aggtcagaagccaaggaccatggag

SEQ ID NO: 354360 - DNA, 25 bp, Artificial
  Probe
cctaccctgcagaggcagggttctc

SEQ ID NO: 354361 - DNA, 25 bp, Artificial
  Probe
gtgatcttgagtcaaccttctcccc

SEQ ID NO: 354362 - DNA, 25 bp, Artificial
  Probe
gtgagaatgtgatcccccagttctc

SEQ ID NO: 354363 - DNA, 25 bp, Artificial
  Probe
caaagcggccgtgttgtacctcagg

SEQ ID NO: 354364 - DNA, 25 bp, Artificial
  Probe
gaagaacttcccagaaggcaggtga

SEQ ID NO: 354365 - DNA, 25 bp, Artificial
  Probe
tcccagaaggcaggtgaaaccaagt

SEQ ID NO: 354366 - DNA, 25 bp, Artificial
  Probe
caaatccagatgttgagaaagctgg

SEQ ID NO: 354367 - DNA, 25 bp, Artificial
  Probe
ccccctgggacctacgtgtgactgg

SEQ ID NO: 354368 - DNA, 25 bp, Artificial
  Probe
tccagctgatgtagagactaacagg

SEQ ID NO: 354369 - DNA, 25 bp, Artificial
  Probe
aaaggttgaggcttctgctcaaacc

SEQ ID NO: 354370 - DNA, 25 bp, Artificial
  Probe
caggggttcttgctgcttgggcccc

SEQ ID NO: 354371 - DNA, 25 bp, Artificial
  Probe
cttggctcctcaggagggatggtaa

SEQ ID NO: 354372 - DNA, 25 bp, Artificial
  Probe
tcccccttgagctaagctcagtttg

SEQ ID NO: 354373 - DNA, 25 bp, Artificial
  Probe
cagctactggaggtgaaggtattca

SEQ ID NO: 354374 - DNA, 25 bp, Artificial
  Probe
cagaactttgtggtgatcttgagtc

SEQ ID NO: 354375 - DNA, 25 bp, Artificial
  Probe
ccccagggctatgcagcagcctgag

SEQ ID NO: 354376 - DNA, 25 bp, Artificial
  Probe
cactgatggtttcaggaaggatctg

SEQ ID NO: 354377 - DNA, 25 bp, Artificial
  Probe
gccaaggaccatggagaatgcaagc

SEQ ID NO: 354378 - DNA, 25 bp, Artificial
  Probe
ttcctctgagaaggagctgggtcag

SEQ ID NO: 354379 - DNA, 25 bp, Artificial
  Probe
gctggatcttctattcacctcaagc

SEQ ID NO: 354380 - DNA, 25 bp, Artificial
  Probe
tcccagcagtgatggccctggaaag

SEQ ID NO: 354381 - DNA, 25 bp, Artificial
  Probe
tcctcaggagggatggtaagtcctt

SEQ ID NO: 354382 - DNA, 25 bp, Artificial
  Probe
gtgggtcagtcctcccatcctctat

SEQ ID NO: 354383 - DNA, 25 bp, Artificial
  Probe
gaaagctggatcttctattcacctc

SEQ ID NO: 354384 - DNA, 25 bp, Artificial
  Probe
ctcctggacaccaggggaagaactt

SEQ ID NO: 354385 - DNA, 25 bp, Artificial
  Probe
agttgagaagttctttgctgcttct

SEQ ID NO: 354386 - DNA, 25 bp, Artificial
  Probe
ggtaggtgagccacgtcttgcaaag

SEQ ID NO: 354387 - DNA, 25 bp, Artificial
  Probe
tattcccagggctccagctgatgta

SEQ ID NO: 354388 - DNA, 25 bp, Artificial
  Probe
gtaggtgagccacgtcttgcaaagg

SEQ ID NO: 354389 - DNA, 25 bp, Artificial
  Probe
cctcccagagatggtccttctggtc

SEQ ID NO: 354390 - DNA, 25 bp, Artificial
  Probe
aagcagtccaaccttcctggatggg

SEQ ID NO: 354391 - DNA, 25 bp, Artificial
  Probe
gtgttgtacctcaggctcagcccac

SEQ ID NO: 354392 - DNA, 25 bp, Artificial
  Probe
gaagtaagcagtccaaccttcctgg

SEQ ID NO: 354393 - DNA, 25 bp, Artificial
  Probe
gcaaacataggcatgtatggggcct

SEQ ID NO: 354394 - DNA, 25 bp, Artificial
  Probe
gcgcctcagtatcctcatcatagtg

SEQ ID NO: 354395 - DNA, 25 bp, Artificial
  Probe
gttgaggcttctgctcaaaccccca

SEQ ID NO: 354396 - DNA, 25 bp, Artificial
  Probe
caccccagaaggaggaagtttgcaa

SEQ ID NO: 354397 - DNA, 25 bp, Artificial
  Probe
aacataggcatgtatggggcctgag

SEQ ID NO: 354398 - DNA, 25 bp, Artificial
  Probe
cccaggggttcctctgagaaggagc

SEQ ID NO: 354399 - DNA, 25 bp, Artificial
  Probe
agactaacaggctgtcatggggagt

SEQ ID NO: 354400 - DNA, 25 bp, Artificial
  Probe
cacaccttgccctttaagtgagtgg

SEQ ID NO: 354401 - DNA, 25 bp, Artificial
  Probe
gggtcaggacttcattcttcccctc

SEQ ID NO: 354402 - DNA, 25 bp, Artificial
  Probe
gaaccaggtcgatagtggtatgtgc

SEQ ID NO: 354403 - DNA, 25 bp, Artificial
  Probe
actgtgtgtttggaggccagcgtct

SEQ ID NO: 354404 - DNA, 25 bp, Artificial
  Probe
taagcaccccagctgagatttgtac

SEQ ID NO: 354405 - DNA, 25 bp, Artificial
  Probe
cattctattgtggtgattcagctgt

SEQ ID NO: 354406 - DNA, 25 bp, Artificial
  Probe
attttccagaatctgataaaaggac

SEQ ID NO: 354407 - DNA, 25 bp, Artificial
  Probe
accaggtcgatagtggtatgtgctt

SEQ ID NO: 354408 - DNA, 25 bp, Artificial
  Probe
ctgagatttgtaccactttcttgta

SEQ ID NO: 354409 - DNA, 25 bp, Artificial
  Probe
ttgtaccactttcttgtaaatgttg

SEQ ID NO: 354410 - DNA, 25 bp, Artificial
  Probe
cccagctgagatttgtaccactttc

SEQ ID NO: 354411 - DNA, 25 bp, Artificial
  Probe
atttatgtgcttttggttgaaccgc

SEQ ID NO: 354412 - DNA, 25 bp, Artificial
  Probe
gagatttgtaccactttcttgtaaa

SEQ ID NO: 354413 - DNA, 25 bp, Artificial
  Probe
gatttgtaccactttcttgtaaatg

SEQ ID NO: 354414 - DNA, 25 bp, Artificial
  Probe
ctcctaaggttcatgtttgtgggat

SEQ ID NO: 354415 - DNA, 25 bp, Artificial
  Probe
atagtggtatgtgcttaagcacccc

SEQ ID NO: 354416 - DNA, 25 bp, Artificial
  Probe
tggaggccagcgtctgacgttataa

SEQ ID NO: 354417 - DNA, 25 bp, Artificial
  Probe
tcagctgttgttcttctcaaatttg

SEQ ID NO: 354418 - DNA, 25 bp, Artificial
  Probe
tagacgtagctgaccccagttgccc

SEQ ID NO: 354419 - DNA, 25 bp, Artificial
  Probe
agctgagatttgtaccactttcttg

SEQ ID NO: 354420 - DNA, 25 bp, Artificial
  Probe
gattcagctgttgttcttctcaaat

SEQ ID NO: 354421 - DNA, 25 bp, Artificial
  Probe
aaccaggtcgatagtggtatgtgct

SEQ ID NO: 354422 - DNA, 25 bp, Artificial
  Probe
tcttctcaaatttggggaaacagat

SEQ ID NO: 354423 - DNA, 25 bp, Artificial
  Probe
aatgtctcctaaggttcatgtttgt

SEQ ID NO: 354424 - DNA, 25 bp, Artificial
  Probe
ctgttgttcttctcaaatttgggga

SEQ ID NO: 354425 - DNA, 25 bp, Artificial
  Probe
gaaccgccatagacgtagctgaccc

SEQ ID NO: 354426 - DNA, 25 bp, Artificial
  Probe
cagcgtctgacgttataagaggaaa

SEQ ID NO: 354427 - DNA, 25 bp, Artificial
  Probe
tctacgtaagaaccaggtcgatagt

SEQ ID NO: 354428 - DNA, 25 bp, Artificial
  Probe
tgcttttggttgaaccgccatagac

SEQ ID NO: 354429 - DNA, 25 bp, Artificial
  Probe
gcctagccccgagcattctattgtg

SEQ ID NO: 354430 - DNA, 25 bp, Artificial
  Probe
cgccatagacgtagctgaccccagt

SEQ ID NO: 354431 - DNA, 25 bp, Artificial
  Probe
ccagttgccctctacgtaagaacca

SEQ ID NO: 354432 - DNA, 25 bp, Artificial
  Probe
aaaggatacttagcaccacagcaca

SEQ ID NO: 354433 - DNA, 25 bp, Artificial
  Probe
tgtttggaggccagcgtctgacgtt

SEQ ID NO: 354434 - DNA, 25 bp, Artificial
  Probe
gcttttggttgaaccgccatagacg

SEQ ID NO: 354435 - DNA, 25 bp, Artificial
  Probe
caaaggaaatgtctcctaaggttca

SEQ ID NO: 354436 - DNA, 25 bp, Artificial
  Probe
cttaagcaccccagctgagatttgt

SEQ ID NO: 354437 - DNA, 25 bp, Artificial
  Probe
ttccagaatctgataaaaggaccac

SEQ ID NO: 354438 - DNA, 25 bp, Artificial
  Probe
ggttgaaccgccatagacgtagctg

SEQ ID NO: 354439 - DNA, 25 bp, Artificial
  Probe
cgagcattctattgtggtgattcag

SEQ ID NO: 354440 - DNA, 25 bp, Artificial
  Probe
ggtatgtgcttaagcaccccagctg

SEQ ID NO: 354441 - DNA, 25 bp, Artificial
  Probe
acgatgactgtgtgtttggaggcca

SEQ ID NO: 354442 - DNA, 25 bp, Artificial
  Probe
atgtgcttaagcaccccagctgaga

SEQ ID NO: 354443 - DNA, 25 bp, Artificial
  Probe
cgtaagaaccaggtcgatagtggta

SEQ ID NO: 354444 - DNA, 25 bp, Artificial
  Probe
aaggatacttagcaccacagcacac

SEQ ID NO: 354445 - DNA, 25 bp, Artificial
  Probe
atacttagcaccacagcacacagcg

SEQ ID NO: 354446 - DNA, 25 bp, Artificial
  Probe
gttcttctcaaatttggggaaacag

SEQ ID NO: 354447 - DNA, 25 bp, Artificial
  Probe
tgtggtgattcagctgttgttcttc

SEQ ID NO: 354448 - DNA, 25 bp, Artificial
  Probe
acagagctcaaggagctactgacca

SEQ ID NO: 354449 - DNA, 25 bp, Artificial
  Probe
tgcaatgaattctttgagggctgcc

SEQ ID NO: 354450 - DNA, 25 bp, Artificial
  Probe
ccaggagtactgtgtcttcctgtcc

SEQ ID NO: 354451 - DNA, 25 bp, Artificial
  Probe
agctcaaggagctactgaccaggga

SEQ ID NO: 354452 - DNA, 25 bp, Artificial
  Probe
aagacagagctcaaggagctactga

SEQ ID NO: 354453 - DNA, 25 bp, Artificial
  Probe
atgaattctttgagggctgcccaga

SEQ ID NO: 354454 - DNA, 25 bp, Artificial
  Probe
tctggcttcttcatacatgtgcaca

SEQ ID NO: 354455 - DNA, 25 bp, Artificial
  Probe
aaggagctactgaccagggagctgc

SEQ ID NO: 354456 - DNA, 25 bp, Artificial
  Probe
tgaagttgacttccaggagtactgt

SEQ ID NO: 354457 - DNA, 25 bp, Artificial
  Probe
tggcttcttcatacatgtgcacagt

SEQ ID NO: 354458 - DNA, 25 bp, Artificial
  Probe
caatgaagttgacttccaggagtac

SEQ ID NO: 354459 - DNA, 25 bp, Artificial
  Probe
atgaacaacttggacagcaacaggg

SEQ ID NO: 354460 - DNA, 25 bp, Artificial
  Probe
ttcatacatgtgcacagtgctgagc

SEQ ID NO: 354461 - DNA, 25 bp, Artificial
  Probe
ttgacttccaggagtactgtgtctt

SEQ ID NO: 354462 - DNA, 25 bp, Artificial
  Probe
gagtactgtgtcttcctgtcctgca

SEQ ID NO: 354463 - DNA, 25 bp, Artificial
  Probe
gtgcaatgaattctttgagggctgc

SEQ ID NO: 354464 - DNA, 25 bp, Artificial
  Probe
aggcaacgagggtgacaagttcaag

SEQ ID NO: 354465 - DNA, 25 bp, Artificial
  Probe
ttcttcatacatgtgcacagtgctg

SEQ ID NO: 354466 - DNA, 25 bp, Artificial
  Probe
actctggcttcttcatacatgtgca

SEQ ID NO: 354467 - DNA, 25 bp, Artificial
  Probe
actgaccagggagctgcctagcttc

SEQ ID NO: 354468 - DNA, 25 bp, Artificial
  Probe
aagttgacttccaggagtactgtgt

SEQ ID NO: 354469 - DNA, 25 bp, Artificial
  Probe
cttcttcatacatgtgcacagtgct

SEQ ID NO: 354470 - DNA, 25 bp, Artificial
  Probe
aggagtactgtgtcttcctgtcctg

SEQ ID NO: 354471 - DNA, 25 bp, Artificial
  Probe
acttccaggagtactgtgtcttcct

SEQ ID NO: 354472 - DNA, 25 bp, Artificial
  Probe
caaggagctactgaccagggagctg

SEQ ID NO: 354473 - DNA, 25 bp, Artificial
  Probe
ctcaaggagctactgaccagggagc

SEQ ID NO: 354474 - DNA, 25 bp, Artificial
  Probe
ctctggcttcttcatacatgtgcac

SEQ ID NO: 354475 - DNA, 25 bp, Artificial
  Probe
tcttcatacatgtgcacagtgctga

SEQ ID NO: 354476 - DNA, 25 bp, Artificial
  Probe
gaacaagacagagctcaaggagcta

SEQ ID NO: 354477 - DNA, 25 bp, Artificial
  Probe
tgaacaagacagagctcaaggagct

SEQ ID NO: 354478 - DNA, 25 bp, Artificial
  Probe
atactcaggcaacgagggtgacaag

SEQ ID NO: 354479 - DNA, 25 bp, Artificial
  Probe
ttccaggagtactgtgtcttcctgt

SEQ ID NO: 354480 - DNA, 25 bp, Artificial
  Probe
gctcaaggagctactgaccagggag

SEQ ID NO: 354481 - DNA, 25 bp, Artificial
  Probe
gagctactgaccagggagctgccta

SEQ ID NO: 354482 - DNA, 25 bp, Artificial
  Probe
tgaccagggagctgcctagcttcct

SEQ ID NO: 354483 - DNA, 25 bp, Artificial
  Probe
acaagacagagctcaaggagctact

SEQ ID NO: 354484 - DNA, 25 bp, Artificial
  Probe
agttgacttccaggagtactgtgtc

SEQ ID NO: 354485 - DNA, 25 bp, Artificial
  Probe
gatgaacaacttggacagcaacagg

SEQ ID NO: 354486 - DNA, 25 bp, Artificial
  Probe
gcaatgaattctttgagggctgccc

SEQ ID NO: 354487 - DNA, 25 bp, Artificial
  Probe
actcaggcaacgagggtgacaagtt

SEQ ID NO: 354488 - DNA, 25 bp, Artificial
  Probe
gtactgtgtcttcctgtcctgcatt

SEQ ID NO: 354489 - DNA, 25 bp, Artificial
  Probe
cagagctcaaggagctactgaccag

SEQ ID NO: 354490 - DNA, 25 bp, Artificial
  Probe
aatactcaggcaacgagggtgacaa

SEQ ID NO: 354491 - DNA, 25 bp, Artificial
  Probe
tgatgaacaacttggacagcaacag

SEQ ID NO: 354492 - DNA, 25 bp, Artificial
  Probe
tactgaccagggagctgcctagctt

SEQ ID NO: 354493 - DNA, 25 bp, Artificial
  Probe
caatgaattctttgagggctgccca

SEQ ID NO: 354494 - DNA, 25 bp, Artificial
  Probe
gagcattatctgtatcctaaaagac

SEQ ID NO: 354495 - DNA, 25 bp, Artificial
  Probe
ctaaaagacagtagccaccgtgtac

SEQ ID NO: 354496 - DNA, 25 bp, Artificial
  Probe
agctgaattccatctgtgttcttca

SEQ ID NO: 354497 - DNA, 25 bp, Artificial
  Probe
tataaacctgtgttagcataatcag

SEQ ID NO: 354498 - DNA, 25 bp, Artificial
  Probe
tggacagctggttagccatgtaatt

SEQ ID NO: 354499 - DNA, 25 bp, Artificial
  Probe
gataataccttggactaggaaaagc

SEQ ID NO: 354500 - DNA, 25 bp, Artificial
  Probe
atctgtatcctaaaagacagtagcc

SEQ ID NO: 354501 - DNA, 25 bp, Artificial
  Probe
taaacctgtgttagcataatcagca

SEQ ID NO: 354502 - DNA, 25 bp, Artificial
  Probe
tagccatgtaatttatctggtctta

SEQ ID NO: 354503 - DNA, 25 bp, Artificial
  Probe
aattctagggctatagaaaccagcc

SEQ ID NO: 354504 - DNA, 25 bp, Artificial
  Probe
gggccttctgcttattggatgagca

SEQ ID NO: 354505 - DNA, 25 bp, Artificial
  Probe
cccatcaggtcacgtcgagaggtgg

SEQ ID NO: 354506 - DNA, 25 bp, Artificial
  Probe
ctggttagccatgtaatttatctgg

SEQ ID NO: 354507 - DNA, 25 bp, Artificial
  Probe
ccatctgtgttcttcaatttgtgat

SEQ ID NO: 354508 - DNA, 25 bp, Artificial
  Probe
tccatctgtgttcttcaatttgtga

SEQ ID NO: 354509 - DNA, 25 bp, Artificial
  Probe
agctggttagccatgtaatttatct

SEQ ID NO: 354510 - DNA, 25 bp, Artificial
  Probe
gttagcataatcagcatcgtttttt

SEQ ID NO: 354511 - DNA, 25 bp, Artificial
  Probe
agccatgtaatttatctggtcttaa

SEQ ID NO: 354512 - DNA, 25 bp, Artificial
  Probe
cttctgcttattggatgagcattat

SEQ ID NO: 354513 - DNA, 25 bp, Artificial
  Probe
atgagcattatctgtatcctaaaag

SEQ ID NO: 354514 - DNA, 25 bp, Artificial
  Probe
taccttggactaggaaaagctgaat

SEQ ID NO: 354515 - DNA, 25 bp, Artificial
  Probe
ggccttctgcttattggatgagcat

SEQ ID NO: 354516 - DNA, 25 bp, Artificial
  Probe
tgtataaacctgtgttagcataatc

SEQ ID NO: 354517 - DNA, 25 bp, Artificial
  Probe
caggtcacgtcgagaggtggttaaa

SEQ ID NO: 354518 - DNA, 25 bp, Artificial
  Probe
tgttagcataatcagcatcgttttt

SEQ ID NO: 354519 - DNA, 25 bp, Artificial
  Probe
ggggccttctgcttattggatgagc

SEQ ID NO: 354520 - DNA, 25 bp, Artificial
  Probe
taaagaaatcccatcaggtcacgtc

SEQ ID NO: 354521 - DNA, 25 bp, Artificial
  Probe
ggacagctggttagccatgtaattt

SEQ ID NO: 354522 - DNA, 25 bp, Artificial
  Probe
tcccatcaggtcacgtcgagaggtg

SEQ ID NO: 354523 - DNA, 25 bp, Artificial
  Probe
gaaatcccatcaggtcacgtcgaga

SEQ ID NO: 354524 - DNA, 25 bp, Artificial
  Probe
ttctgggttctaatgagataatacc

SEQ ID NO: 354525 - DNA, 25 bp, Artificial
  Probe
aaagctgaattccatctgtgttctt

SEQ ID NO: 354526 - DNA, 25 bp, Artificial
  Probe
gctgaattccatctgtgttcttcaa

SEQ ID NO: 354527 - DNA, 25 bp, Artificial
  Probe
acctgtgttagcataatcagcatcg

SEQ ID NO: 354528 - DNA, 25 bp, Artificial
  Probe
tgtatcctaaaagacagtagccacc

SEQ ID NO: 354529 - DNA, 25 bp, Artificial
  Probe
ggctatagaaaccagccataataat

SEQ ID NO: 354530 - DNA, 25 bp, Artificial
  Probe
tcaggtcacgtcgagaggtggttaa

SEQ ID NO: 354531 - DNA, 25 bp, Artificial
  Probe
tgagcattatctgtatcctaaaaga

SEQ ID NO: 354532 - DNA, 25 bp, Artificial
  Probe
taataccttggactaggaaaagctg

SEQ ID NO: 354533 - DNA, 25 bp, Artificial
  Probe
tcctaaaagacagtagccaccgtgt

SEQ ID NO: 354534 - DNA, 25 bp, Artificial
  Probe
aaattctagggctatagaaaccagc

SEQ ID NO: 354535 - DNA, 25 bp, Artificial
  Probe
ttatctgtatcctaaaagacagtag

SEQ ID NO: 354536 - DNA, 25 bp, Artificial
  Probe
ctgcttattggatgagcattatctg

SEQ ID NO: 354537 - DNA, 25 bp, Artificial
  Probe
aaacctgtgttagcataatcagcat

SEQ ID NO: 354538 - DNA, 25 bp, Artificial
  Probe
ttagccatgtaatttatctggtctt

SEQ ID NO: 354539 - DNA, 25 bp, Artificial
  Probe
gcattatctgtatcctaaaagacag

SEQ ID NO: 354540 - DNA, 25 bp, Artificial
  Probe
cttcactttgtgtgtccttatcatg

SEQ ID NO: 354541 - DNA, 25 bp, Artificial
  Probe
agtgcggctggcaccatgccaagat

SEQ ID NO: 354542 - DNA, 25 bp, Artificial
  Probe
attctgacagccagatgagtgcggc

SEQ ID NO: 354543 - DNA, 25 bp, Artificial
  Probe
tctgacagccagatgagtgcggctg

SEQ ID NO: 354544 - DNA, 25 bp, Artificial
  Probe
agtctaccagctagtcctgctgcct

SEQ ID NO: 354545 - DNA, 25 bp, Artificial
  Probe
taccaacagataagggtgtattctt

SEQ ID NO: 354546 - DNA, 25 bp, Artificial
  Probe
cagccagatgagtgcggctggcacc

SEQ ID NO: 354547 - DNA, 25 bp, Artificial
  Probe
ccttatcatgtagtcatctgcctag

SEQ ID NO: 354548 - DNA, 25 bp, Artificial
  Probe
accagctagtcctgctgcctgaaac

SEQ ID NO: 354549 - DNA, 25 bp, Artificial
  Probe
gtctaccagctagtcctgctgcctg

SEQ ID NO: 354550 - DNA, 25 bp, Artificial
  Probe
tgcctctccacaatgctgcttaacg

SEQ ID NO: 354551 - DNA, 25 bp, Artificial
  Probe
gctgcctgaaaccactgtctcttga

SEQ ID NO: 354552 - DNA, 25 bp, Artificial
  Probe
ctcttgagctgtcaactttcagatc

SEQ ID NO: 354553 - DNA, 25 bp, Artificial
  Probe
ttagcatccttcaaggcctatattg

SEQ ID NO: 354554 - DNA, 25 bp, Artificial
  Probe
cttgcctggctccatgcatagtagc

SEQ ID NO: 354555 - DNA, 25 bp, Artificial
  Probe
tggcaccatgccaagatgccacttc

SEQ ID NO: 354556 - DNA, 25 bp, Artificial
  Probe
ctctccacaatgctgcttaacgctg

SEQ ID NO: 354557 - DNA, 25 bp, Artificial
  Probe
catgtagtcatctgcctagctctgg

SEQ ID NO: 354558 - DNA, 25 bp, Artificial
  Probe
atgcatagtagctctcccagggggt

SEQ ID NO: 354559 - DNA, 25 bp, Artificial
  Probe
tctcctgttttgtaacaccaactgg

SEQ ID NO: 354560 - DNA, 25 bp, Artificial
  Probe
tcaaggcctatattgcatttcctag

SEQ ID NO: 354561 - DNA, 25 bp, Artificial
  Probe
caatgctgcttaacgctgtttaata

SEQ ID NO: 354562 - DNA, 25 bp, Artificial
  Probe
tgtttaataccttgcctggctccat

SEQ ID NO: 354563 - DNA, 25 bp, Artificial
  Probe
tcactttgtgtgtccttatcatgta

SEQ ID NO: 354564 - DNA, 25 bp, Artificial
  Probe
tagcatccttcaaggcctatattgc

SEQ ID NO: 354565 - DNA, 25 bp, Artificial
  Probe
gatgagtgcggctggcaccatgcca

SEQ ID NO: 354566 - DNA, 25 bp, Artificial
  Probe
agtcctgctgcctgaaaccactgtc

SEQ ID NO: 354567 - DNA, 25 bp, Artificial
  Probe
ttcaattctgacagccagatgagtg

SEQ ID NO: 354568 - DNA, 25 bp, Artificial
  Probe
acttgcttcactttgtgtgtcctta

SEQ ID NO: 354569 - DNA, 25 bp, Artificial
  Probe
agctagtcctgctgcctgaaaccac

SEQ ID NO: 354570 - DNA, 25 bp, Artificial
  Probe
tgcttcactttgtgtgtccttatca

SEQ ID NO: 354571 - DNA, 25 bp, Artificial
  Probe
aagtctcagtaccaacagataaggg

SEQ ID NO: 354572 - DNA, 25 bp, Artificial
  Probe
gtattccttttagcatccttcaagg

SEQ ID NO: 354573 - DNA, 25 bp, Artificial
  Probe
gccaagatgccacttctttctcctg

SEQ ID NO: 354574 - DNA, 25 bp, Artificial
  Probe
gtcctgctgcctgaaaccactgtct

SEQ ID NO: 354575 - DNA, 25 bp, Artificial
  Probe
ttaacgctgtttaataccttgcctg

SEQ ID NO: 354576 - DNA, 25 bp, Artificial
  Probe
tgggttcatttatcaacagtattcc

SEQ ID NO: 354577 - DNA, 25 bp, Artificial
  Probe
cagctagtcctgctgcctgaaacca

SEQ ID NO: 354578 - DNA, 25 bp, Artificial
  Probe
gggtgtgctttcaattctgacagcc

SEQ ID NO: 354579 - DNA, 25 bp, Artificial
  Probe
cggctggcaccatgccaagatgcca

SEQ ID NO: 354580 - DNA, 25 bp, Artificial
  Probe
acagccagatgagtgcggctggcac

SEQ ID NO: 354581 - DNA, 25 bp, Artificial
  Probe
gggttcatttatcaacagtattcct

SEQ ID NO: 354582 - DNA, 25 bp, Artificial
  Probe
gcaccatgccaagatgccacttctt

SEQ ID NO: 354583 - DNA, 25 bp, Artificial
  Probe
gctgcttaacgctgtttaatacctt

SEQ ID NO: 354584 - DNA, 25 bp, Artificial
  Probe
taataccttgcctggctccatgcat

SEQ ID NO: 354585 - DNA, 25 bp, Artificial
  Probe
ctgctgcctgaaaccactgtctctt

SEQ ID NO: 354586 - DNA, 25 bp, Artificial
  Probe
tgagatcgccaatgggaaatggctg

SEQ ID NO: 354587 - DNA, 25 bp, Artificial
  Probe
gaaatggctgttgtaccccatgcgg

SEQ ID NO: 354588 - DNA, 25 bp, Artificial
  Probe
tcgccaatgggaaatggctgttgta

SEQ ID NO: 354589 - DNA, 25 bp, Artificial
  Probe
tgcccactctacagctttgaccgtg

SEQ ID NO: 354590 - DNA, 25 bp, Artificial
  Probe
tctgccttcctcaacatcatgtggc

SEQ ID NO: 354591 - DNA, 25 bp, Artificial
  Probe
agccggagcctcaggagcctccaga

SEQ ID NO: 354592 - DNA, 25 bp, Artificial
  Probe
accgtgcagccgtgcttcatgtctg

SEQ ID NO: 354593 - DNA, 25 bp, Artificial
  Probe
ctttgaccgtgcagccgtgcttcat

SEQ ID NO: 354594 - DNA, 25 bp, Artificial
  Probe
acggccaagtgtgtggtattcagct

SEQ ID NO: 354595 - DNA, 25 bp, Artificial
  Probe
cggagcctcaggagcctccagagaa

SEQ ID NO: 354596 - DNA, 25 bp, Artificial
  Probe
ttcctcaacatcatgtggccccatg

SEQ ID NO: 354597 - DNA, 25 bp, Artificial
  Probe
ctgtaccagcccagcggatcttgtc

SEQ ID NO: 354598 - DNA, 25 bp, Artificial
  Probe
gtggtattcagctgcccactctaca

SEQ ID NO: 354599 - DNA, 25 bp, Artificial
  Probe
ccagcccagcggatcttgtctattt

SEQ ID NO: 354600 - DNA, 25 bp, Artificial
  Probe
gtgtgctgtaccagcccagcggatc

SEQ ID NO: 354601 - DNA, 25 bp, Artificial
  Probe
ggccccatgagatcgccaatgggaa

SEQ ID NO: 354602 - DNA, 25 bp, Artificial
  Probe
catgagatcgccaatgggaaatggc

SEQ ID NO: 354603 - DNA, 25 bp, Artificial
  Probe
ccaggcacggccaagtgtgtggtat

SEQ ID NO: 354604 - DNA, 25 bp, Artificial
  Probe
acgagggcagcaaggtcaagtacga

SEQ ID NO: 354605 - DNA, 25 bp, Artificial
  Probe
ggtctccaatcaaggccagtcactc

SEQ ID NO: 354606 - DNA, 25 bp, Artificial
  Probe
aagagaaacgtgactctggactgcc

SEQ ID NO: 354607 - DNA, 25 bp, Artificial
  Probe
cagccgtgcttcatgtctggggccg

SEQ ID NO: 354608 - DNA, 25 bp, Artificial
  Probe
aagtgtgtggtattcagctgcccac

SEQ ID NO: 354609 - DNA, 25 bp, Artificial
  Probe
tggccttagtgtgctgtaccagccc

SEQ ID NO: 354610 - DNA, 25 bp, Artificial
  Probe
agtgtcctccgctgagaagagaaac

SEQ ID NO: 354611 - DNA, 25 bp, Artificial
  Probe
tcatgtggccccatgagatcgccaa

SEQ ID NO: 354612 - DNA, 25 bp, Artificial
  Probe
aaagggatctgctccccaagaccca

SEQ ID NO: 354613 - DNA, 25 bp, Artificial
  Probe
aatggctgttgtaccccatgcgggt

SEQ ID NO: 354614 - DNA, 25 bp, Artificial
  Probe
cagcaaggtcaagtacgaggtcacg

SEQ ID NO: 354615 - DNA, 25 bp, Artificial
  Probe
cactcaatactctgggctctgcctt

SEQ ID NO: 354616 - DNA, 25 bp, Artificial
  Probe
gactgcccaggcacggccaagtgtg

SEQ ID NO: 354617 - DNA, 25 bp, Artificial
  Probe
cctcaggagcctccagagaaggtgg

SEQ ID NO: 354618 - DNA, 25 bp, Artificial
  Probe
ctccacctggatgtggacagcaggg

SEQ ID NO: 354619 - DNA, 25 bp, Artificial
  Probe
tcagctgcccactctacagctttga

SEQ ID NO: 354620 - DNA, 25 bp, Artificial
  Probe
aggtcaagtacgaggtcacggtctc

SEQ ID NO: 354621 - DNA, 25 bp, Artificial
  Probe
tggccagtgtcctccgctgagaaga

SEQ ID NO: 354622 - DNA, 25 bp, Artificial
  Probe
atcttggtggccagtgtcctccgct

SEQ ID NO: 354623 - DNA, 25 bp, Artificial
  Probe
aaggtggaacctagcacatcttggt

SEQ ID NO: 354624 - DNA, 25 bp, Artificial
  Probe
tcaaggccagtcactcaatactctg

SEQ ID NO: 354625 - DNA, 25 bp, Artificial
  Probe
gtgactctggactgcccaggcacgg

SEQ ID NO: 354626 - DNA, 25 bp, Artificial
  Probe
cctccgctgagaagagaaacgtgac

SEQ ID NO: 354627 - DNA, 25 bp, Artificial
  Probe
ctcaacatcatgtggccccatgaga

SEQ ID NO: 354628 - DNA, 25 bp, Artificial
  Probe
gaaagggatctgctccccaagaccc

SEQ ID NO: 354629 - DNA, 25 bp, Artificial
  Probe
ttcagctgcccactctacagctttg

SEQ ID NO: 354630 - DNA, 25 bp, Artificial
  Probe
cacctggatgtggacagcagggata

SEQ ID NO: 354631 - DNA, 25 bp, Artificial
  Probe
tagcacatcttggtggccagtgtcc

SEQ ID NO: 354632 - DNA, 25 bp, Artificial
  Probe
ctatgtcgtgcaggacatcgtagag

SEQ ID NO: 354633 - DNA, 25 bp, Artificial
  Probe
catggatgccccagagagcccaagc

SEQ ID NO: 354634 - DNA, 25 bp, Artificial
  Probe
gatgccccagagagcccaagctctg

SEQ ID NO: 354635 - DNA, 25 bp, Artificial
  Probe
tgcaggacatcgtagagcgtctcag

SEQ ID NO: 354636 - DNA, 25 bp, Artificial
  Probe
gcgatgtcgaatgtctcgatgacat

SEQ ID NO: 354637 - DNA, 25 bp, Artificial
  Probe
ttgacaatttcatggatgccccaga

SEQ ID NO: 354638 - DNA, 25 bp, Artificial
  Probe
gtcacagcattccatcctgcacttg

SEQ ID NO: 354639 - DNA, 25 bp, Artificial
  Probe
gaatgtctcgatgacattactgtcc

SEQ ID NO: 354640 - DNA, 25 bp, Artificial
  Probe
tgttgacaatttcatggatgcccca

SEQ ID NO: 354641 - DNA, 25 bp, Artificial
  Probe
tctgcgttcaactcacctccaggag

SEQ ID NO: 354642 - DNA, 25 bp, Artificial
  Probe
gtcccacttctttcggtattctatg

SEQ ID NO: 354643 - DNA, 25 bp, Artificial
  Probe
aggagtaatatcctacgtcagcgtt

SEQ ID NO: 354644 - DNA, 25 bp, Artificial
  Probe
tcacctccaggagtaatatcctacg

SEQ ID NO: 354645 - DNA, 25 bp, Artificial
  Probe
ccatcctgcacttgatcttgtgcag

SEQ ID NO: 354646 - DNA, 25 bp, Artificial
  Probe
caatttcatggatgccccagagagc

SEQ ID NO: 354647 - DNA, 25 bp, Artificial
  Probe
gacagtcagtcgagcgatgtcgaat

SEQ ID NO: 354648 - DNA, 25 bp, Artificial
  Probe
ccacttgttgacaatttcatggatg

SEQ ID NO: 354649 - DNA, 25 bp, Artificial
  Probe
cctacgtcagcgttgacagtcagtc

SEQ ID NO: 354650 - DNA, 25 bp, Artificial
  Probe
cagagagcccaagctctgcgttcaa

SEQ ID NO: 354651 - DNA, 25 bp, Artificial
  Probe
gtctcgatgacattactgtcccact

SEQ ID NO: 354652 - DNA, 25 bp, Artificial
  Probe
tccatcctgcacttgatcttgtgca

SEQ ID NO: 354653 - DNA, 25 bp, Artificial
  Probe
cctccaggagtaatatcctacgtca

SEQ ID NO: 354654 - DNA, 25 bp, Artificial
  Probe
ccagagagcccaagctctgcgttca

SEQ ID NO: 354655 - DNA, 25 bp, Artificial
  Probe
gatgtcgaatgtctcgatgacatta

SEQ ID NO: 354656 - DNA, 25 bp, Artificial
  Probe
gttgacagtcagtcgagcgatgtcg

SEQ ID NO: 354657 - DNA, 25 bp, Artificial
  Probe
agagcgtctcagctggtacgtcaca

SEQ ID NO: 354658 - DNA, 25 bp, Artificial
  Probe
gagcccaagctctgcgttcaactca

SEQ ID NO: 354659 - DNA, 25 bp, Artificial
  Probe
ctttcggtattctatgtcgtgcagg

SEQ ID NO: 354660 - DNA, 25 bp, Artificial
  Probe
tgcacttgatcttgtgcagagttcg

SEQ ID NO: 354661 - DNA, 25 bp, Artificial
  Probe
atatcctacgtcagcgttgacagtc

SEQ ID NO: 354662 - DNA, 25 bp, Artificial
  Probe
cgtcagcgttgacagtcagtcgagc

SEQ ID NO: 354663 - DNA, 25 bp, Artificial
  Probe
aggacatcgtagagcgtctcagctg

SEQ ID NO: 354664 - DNA, 25 bp, Artificial
  Probe
cctgcacttgatcttgtgcagagtt

SEQ ID NO: 354665 - DNA, 25 bp, Artificial
  Probe
tatgtcgtgcaggacatcgtagagc

SEQ ID NO: 354666 - DNA, 25 bp, Artificial
  Probe
catcgtagagcgtctcagctggtac

SEQ ID NO: 354667 - DNA, 25 bp, Artificial
  Probe
cgtagagcgtctcagctggtacgtc

SEQ ID NO: 354668 - DNA, 25 bp, Artificial
  Probe
attccatcctgcacttgatcttgtg

SEQ ID NO: 354669 - DNA, 25 bp, Artificial
  Probe
atcctgcacttgatcttgtgcagag

SEQ ID NO: 354670 - DNA, 25 bp, Artificial
  Probe
gtcagtcgagcgatgtcgaatgtct

SEQ ID NO: 354671 - DNA, 25 bp, Artificial
  Probe
cacttctttcggtattctatgtcgt

SEQ ID NO: 354672 - DNA, 25 bp, Artificial
  Probe
cgttcaactcacctccaggagtaat

SEQ ID NO: 354673 - DNA, 25 bp, Artificial
  Probe
cagtcgagcgatgtcgaatgtctcg

SEQ ID NO: 354674 - DNA, 25 bp, Artificial
  Probe
gtacgtcacagcattccatcctgca

SEQ ID NO: 354675 - DNA, 25 bp, Artificial
  Probe
gcattccatcctgcacttgatcttg

SEQ ID NO: 354676 - DNA, 25 bp, Artificial
  Probe
ggtattctatgtcgtgcaggacatc

SEQ ID NO: 354677 - DNA, 25 bp, Artificial
  Probe
gagcgatgtcgaatgtctcgatgac

SEQ ID NO: 354678 - DNA, 25 bp, Artificial
  Probe
tggggcgatccaggaattcaagcct

SEQ ID NO: 354679 - DNA, 25 bp, Artificial
  Probe
gaaccagttcctagacctgaactta

SEQ ID NO: 354680 - DNA, 25 bp, Artificial
  Probe
taccacttgtgatggctatagtctt

SEQ ID NO: 354681 - DNA, 25 bp, Artificial
  Probe
attcgtgtttgatgccgtgacagat

SEQ ID NO: 354682 - DNA, 25 bp, Artificial
  Probe
gaaagatctcttccaggagaaagtg

SEQ ID NO: 354683 - DNA, 25 bp, Artificial
  Probe
tgtgccaaatgaacaagacgttcta

SEQ ID NO: 354684 - DNA, 25 bp, Artificial
  Probe
tgacgcctcagttggctgaaataat

SEQ ID NO: 354685 - DNA, 25 bp, Artificial
  Probe
ctttaaagacttgaacttcagaatg

SEQ ID NO: 354686 - DNA, 25 bp, Artificial
  Probe
tctgaataccagctcaatgactctg

SEQ ID NO: 354687 - DNA, 25 bp, Artificial
  Probe
agactgtgggctcttctgagcaacc

SEQ ID NO: 354688 - DNA, 25 bp, Artificial
  Probe
agagaggaccaacaactgcttctct

SEQ ID NO: 354689 - DNA, 25 bp, Artificial
  Probe
tgacttagatagactcacagcccct

SEQ ID NO: 354690 - DNA, 25 bp, Artificial
  Probe
tgaaaaccactggtatcattgaaac

SEQ ID NO: 354691 - DNA, 25 bp, Artificial
  Probe
gaccaacaactgcttctctccatgg

SEQ ID NO: 354692 - DNA, 25 bp, Artificial
  Probe
tgtcaatccgagaagtagagaggac

SEQ ID NO: 354693 - DNA, 25 bp, Artificial
  Probe
tatattttgtgcagccctaagtgcc

SEQ ID NO: 354694 - DNA, 25 bp, Artificial
  Probe
taatcatagagtaaacctcagaatg

SEQ ID NO: 354695 - DNA, 25 bp, Artificial
  Probe
gtactacagaaactgtacaaaatga

SEQ ID NO: 354696 - DNA, 25 bp, Artificial
  Probe
tggtcatcagcctttcaattaggct

SEQ ID NO: 354697 - DNA, 25 bp, Artificial
  Probe
acattcgaagatgcagggaactaca

SEQ ID NO: 354698 - DNA, 25 bp, Artificial
  Probe
atgcagggaactacatcaagaacca

SEQ ID NO: 354699 - DNA, 25 bp, Artificial
  Probe
tcctggccattgtgaaagccatgac

SEQ ID NO: 354700 - DNA, 25 bp, Artificial
  Probe
aggaaatctattctcacatgacctg

SEQ ID NO: 354701 - DNA, 25 bp, Artificial
  Probe
tgctgatgttctaaatctgaaatct

SEQ ID NO: 354702 - DNA, 25 bp, Artificial
  Probe
cgtatatctgggtacggttttcttg

SEQ ID NO: 354703 - DNA, 25 bp, Artificial
  Probe
tgaaagcattcaaagtcatgtctgt

SEQ ID NO: 354704 - DNA, 25 bp, Artificial
  Probe
ctcttccaggagaaagtgaccaagg

SEQ ID NO: 354705 - DNA, 25 bp, Artificial
  Probe
agcatctgtaatcacaagtattttg

SEQ ID NO: 354706 - DNA, 25 bp, Artificial
  Probe
ttgctgatgttctaaatctgaaatc

SEQ ID NO: 354707 - DNA, 25 bp, Artificial
  Probe
ccccagctagattttgaaagcattc

SEQ ID NO: 354708 - DNA, 25 bp, Artificial
  Probe
agatggtgacatgacgcctcagttg

SEQ ID NO: 354709 - DNA, 25 bp, Artificial
  Probe
caatccgagaagtagagaggaccaa

SEQ ID NO: 354710 - DNA, 25 bp, Artificial
  Probe
ttgcagtccatcctggccattgtga

SEQ ID NO: 354711 - DNA, 25 bp, Artificial
  Probe
aaagtgaccaaggtgcacctcagca

SEQ ID NO: 354712 - DNA, 25 bp, Artificial
  Probe
cattcatgctactaaagttttttgg

SEQ ID NO: 354713 - DNA, 25 bp, Artificial
  Probe
actacactagggattgattatgtca

SEQ ID NO: 354714 - DNA, 25 bp, Artificial
  Probe
tacattcccgggtgaaaaccactgg

SEQ ID NO: 354715 - DNA, 25 bp, Artificial
  Probe
gcatctgtaatcacaagtattttgc

SEQ ID NO: 354716 - DNA, 25 bp, Artificial
  Probe
ctctccatggcaaacacactagaag

SEQ ID NO: 354717 - DNA, 25 bp, Artificial
  Probe
aacacactagaagatggtgacatga

SEQ ID NO: 354718 - DNA, 25 bp, Artificial
  Probe
tctgaaatctgatgtatctggtaac

SEQ ID NO: 354719 - DNA, 25 bp, Artificial
  Probe
gcacctcagcatctgtttcccagaa

SEQ ID NO: 354720 - DNA, 25 bp, Artificial
  Probe
gtatctggtaactgtcacaatatac

SEQ ID NO: 354721 - DNA, 25 bp, Artificial
  Probe
attactgtgatatcacgtatatctg

SEQ ID NO: 354722 - DNA, 25 bp, Artificial
  Probe
gaatacactggaccaaatacattcg

SEQ ID NO: 354723 - DNA, 25 bp, Artificial
  Probe
ctacgacatggtacttgtagaagat

SEQ ID NO: 354724 - DNA, 25 bp, Artificial
  Probe
actggtttcatgtccattcacagtg

SEQ ID NO: 354725 - DNA, 25 bp, Artificial
  Probe
acccagctgacatctgctagttcac

SEQ ID NO: 354726 - DNA, 25 bp, Artificial
  Probe
gctgacatctgctagttcaccctct

SEQ ID NO: 354727 - DNA, 25 bp, Artificial
  Probe
agctgagtccaggattgctctagga

SEQ ID NO: 354728 - DNA, 25 bp, Artificial
  Probe
agtgatcaaccctgtccttggcaga

SEQ ID NO: 354729 - DNA, 25 bp, Artificial
  Probe
ttcaccctctctacaagagaagaag

SEQ ID NO: 354730 - DNA, 25 bp, Artificial
  Probe
tgtccattcacagtgatcaaccctg

SEQ ID NO: 354731 - DNA, 25 bp, Artificial
  Probe
gactggtttcatgtccattcacagt

SEQ ID NO: 354732 - DNA, 25 bp, Artificial
  Probe
ggcctcttgtgtgtaaaaaagtggc

SEQ ID NO: 354733 - DNA, 25 bp, Artificial
  Probe
tcatccctgtggtgaaaatcattcc

SEQ ID NO: 354734 - DNA, 25 bp, Artificial
  Probe
gttgagctaacagtacaggaggatc

SEQ ID NO: 354735 - DNA, 25 bp, Artificial
  Probe
gcttctgccacaaggctgtgacaac

SEQ ID NO: 354736 - DNA, 25 bp, Artificial
  Probe
gtttcatgtccattcacagtgatca

SEQ ID NO: 354737 - DNA, 25 bp, Artificial
  Probe
tgtccttggcagatgaatggaatgc

SEQ ID NO: 354738 - DNA, 25 bp, Artificial
  Probe
gcccacaacatcaaagaacaggaga

SEQ ID NO: 354739 - DNA, 25 bp, Artificial
  Probe
caaccctgtccttggcagatgaatg

SEQ ID NO: 354740 - DNA, 25 bp, Artificial
  Probe
gtccattcacagtgatcaaccctgt

SEQ ID NO: 354741 - DNA, 25 bp, Artificial
  Probe
tgacaacccagctgacatctgctag

SEQ ID NO: 354742 - DNA, 25 bp, Artificial
  Probe
atggaatgcttctgccacaaggctg

SEQ ID NO: 354743 - DNA, 25 bp, Artificial
  Probe
aaggctgtgacaacccagctgacat

SEQ ID NO: 354744 - DNA, 25 bp, Artificial
  Probe
cctgtccttggcagatgaatggaat

SEQ ID NO: 354745 - DNA, 25 bp, Artificial
  Probe
ggggcccacaacatcaaagaacagg

SEQ ID NO: 354746 - DNA, 25 bp, Artificial
  Probe
ctgccacaaggctgtgacaacccag

SEQ ID NO: 354747 - DNA, 25 bp, Artificial
  Probe
tgaatggaatgcttctgccacaagg

SEQ ID NO: 354748 - DNA, 25 bp, Artificial
  Probe
aatggaatgcttctgccacaaggct

SEQ ID NO: 354749 - DNA, 25 bp, Artificial
  Probe
ttcacagtgatcaaccctgtccttg

SEQ ID NO: 354750 - DNA, 25 bp, Artificial
  Probe
cctctctacaagagaagaagaatgt

SEQ ID NO: 354751 - DNA, 25 bp, Artificial
  Probe
taggtggccttccagggaagatgaa

SEQ ID NO: 354752 - DNA, 25 bp, Artificial
  Probe
gactttgtgctgactgctgctcact

SEQ ID NO: 354753 - DNA, 25 bp, Artificial
  Probe
gcctcttgtgtgtaaaaaagtggcc

SEQ ID NO: 354754 - DNA, 25 bp, Artificial
  Probe
ttgggggcccacaacatcaaagaac

SEQ ID NO: 354755 - DNA, 25 bp, Artificial
  Probe
ctggagggcctcttgtgtgtaaaaa

SEQ ID NO: 354756 - DNA, 25 bp, Artificial
  Probe
cacaaggctgtgacaacccagctga

SEQ ID NO: 354757 - DNA, 25 bp, Artificial
  Probe
atagctgagtccaggattgctctag

SEQ ID NO: 354758 - DNA, 25 bp, Artificial
  Probe
gtgacaacccagctgacatctgcta

SEQ ID NO: 354759 - DNA, 25 bp, Artificial
  Probe
tggtttcatgtccattcacagtgat

SEQ ID NO: 354760 - DNA, 25 bp, Artificial
  Probe
ccctatagctgagtccaggattgct

SEQ ID NO: 354761 - DNA, 25 bp, Artificial
  Probe
tttgtgctgactgctgctcactgtt

SEQ ID NO: 354762 - DNA, 25 bp, Artificial
  Probe
cagctgacatctgctagttcaccct

SEQ ID NO: 354763 - DNA, 25 bp, Artificial
  Probe
tgcttctgccacaaggctgtgacaa

SEQ ID NO: 354764 - DNA, 25 bp, Artificial
  Probe
aatgcttctgccacaaggctgtgac

SEQ ID NO: 354765 - DNA, 25 bp, Artificial
  Probe
tccttggcagatgaatggaatgctt

SEQ ID NO: 354766 - DNA, 25 bp, Artificial
  Probe
tcacagtgatcaaccctgtccttgg

SEQ ID NO: 354767 - DNA, 25 bp, Artificial
  Probe
ctgtgacaacccagctgacatctgc

SEQ ID NO: 354768 - DNA, 25 bp, Artificial
  Probe
ctctggagggcctcttgtgtgtaaa

SEQ ID NO: 354769 - DNA, 25 bp, Artificial
  Probe
tgagctaacagtacaggaggatcag

SEQ ID NO: 354770 - DNA, 25 bp, Artificial
  Probe
tcgtttaccaaagaagagtttacag

SEQ ID NO: 354771 - DNA, 25 bp, Artificial
  Probe
tgtcttctcagagctactgtggagg

SEQ ID NO: 354772 - DNA, 25 bp, Artificial
  Probe
acctcagaagagttcaatgccatct

SEQ ID NO: 354773 - DNA, 25 bp, Artificial
  Probe
ctgacagacagctgtgcctgtggtg

SEQ ID NO: 354774 - DNA, 25 bp, Artificial
  Probe
ccagcgctgagtttatggaggcttg

SEQ ID NO: 354775 - DNA, 25 bp, Artificial
  Probe
tcaccacctacaggaagagcgtcat

SEQ ID NO: 354776 - DNA, 25 bp, Artificial
  Probe
ctagtctctttgctgtgatgcatga

SEQ ID NO: 354777 - DNA, 25 bp, Artificial
  Probe
cgatgagaacgagctggacgccctc

SEQ ID NO: 354778 - DNA, 25 bp, Artificial
  Probe
gtacaagaaaacttcctgctgaaat

SEQ ID NO: 354779 - DNA, 25 bp, Artificial
  Probe
ggacaggggctgcttctgcacctcc

SEQ ID NO: 354780 - DNA, 25 bp, Artificial
  Probe
ttctatgacaaggatggaagcggct

SEQ ID NO: 354781 - DNA, 25 bp, Artificial
  Probe
cactttgatgctgacggaaatgggt

SEQ ID NO: 354782 - DNA, 25 bp, Artificial
  Probe
cagagctggcgcagatcctgccaac

SEQ ID NO: 354783 - DNA, 25 bp, Artificial
  Probe
ttcacattctatgacaaggatggaa

SEQ ID NO: 354784 - DNA, 25 bp, Artificial
  Probe
taatgatataactgtcttctcagag

SEQ ID NO: 354785 - DNA, 25 bp, Artificial
  Probe
ccaagagcgacaattttggagagaa

SEQ ID NO: 354786 - DNA, 25 bp, Artificial
  Probe
gatggaagcggctacatcgatgaga

SEQ ID NO: 354787 - DNA, 25 bp, Artificial
  Probe
gtcttctcgtttaccaaagaagagt

SEQ ID NO: 354788 - DNA, 25 bp, Artificial
  Probe
aaaggttctggcatgatgtccaaga

SEQ ID NO: 354789 - DNA, 25 bp, Artificial
  Probe
gctgacctcagaagagttcaatgcc

SEQ ID NO: 354790 - DNA, 25 bp, Artificial
  Probe
gagctagaaaacttcttccaggagc

SEQ ID NO: 354791 - DNA, 25 bp, Artificial
  Probe
agatgaatatccagcagctcaccac

SEQ ID NO: 354792 - DNA, 25 bp, Artificial
  Probe
ggagtacacccaaaccatactacgc

SEQ ID NO: 354793 - DNA, 25 bp, Artificial
  Probe
tcttccaggagctggagaaggcaag

SEQ ID NO: 354794 - DNA, 25 bp, Artificial
  Probe
agggacaggggctgcttctgcacct

SEQ ID NO: 354795 - DNA, 25 bp, Artificial
  Probe
tagaaaacttcttccaggagctgga

SEQ ID NO: 354796 - DNA, 25 bp, Artificial
  Probe
cttggccgaggcagggaaactctac

SEQ ID NO: 354797 - DNA, 25 bp, Artificial
  Probe
gccctcctgaaggatctgtatgaga

SEQ ID NO: 354798 - DNA, 25 bp, Artificial
  Probe
acttcctgctgaaatttcagggtat

SEQ ID NO: 354799 - DNA, 25 bp, Artificial
  Probe
ctcctgaaggatctgtatgagaaga

SEQ ID NO: 354800 - DNA, 25 bp, Artificial
  Probe
atttcagggtatgaagctgacctca

SEQ ID NO: 354801 - DNA, 25 bp, Artificial
  Probe
gatgaatatccagcagctcaccacc

SEQ ID NO: 354802 - DNA, 25 bp, Artificial
  Probe
caacagagtgcactccttcctcttg

SEQ ID NO: 354803 - DNA, 25 bp, Artificial
  Probe
tgcacctggccgagctgactgcatc

SEQ ID NO: 354804 - DNA, 25 bp, Artificial
  Probe
atactacgcatgtttgacttaaatg

SEQ ID NO: 354805 - DNA, 25 bp, Artificial
  Probe
aatggagacggcaaattgggtctct

SEQ ID NO: 354806 - DNA, 25 bp, Artificial
  Probe
tgtccttggccgaggcagggaaact

SEQ ID NO: 354807 - DNA, 25 bp, Artificial
  Probe
gaagagaatttccttttgtgcttca

SEQ ID NO: 354808 - DNA, 25 bp, Artificial
  Probe
ctgccaaccgaagagaatttccttt

SEQ ID NO: 354809 - DNA, 25 bp, Artificial
  Probe
cgcaattccaggttctgtccaccgg

SEQ ID NO: 354810 - DNA, 25 bp, Artificial
  Probe
gccctcttcttgtgttcttgacttg

SEQ ID NO: 354811 - DNA, 25 bp, Artificial
  Probe
caaccctggcctgacagacagctgt

SEQ ID NO: 354812 - DNA, 25 bp, Artificial
  Probe
catgtttgacttaaatggagacggc

SEQ ID NO: 354813 - DNA, 25 bp, Artificial
  Probe
agtatgacacagacagaagtggcta

SEQ ID NO: 354814 - DNA, 25 bp, Artificial
  Probe
gggtcattgccctcttcttgtgttc

SEQ ID NO: 354815 - DNA, 25 bp, Artificial
  Probe
aagcaaatgagctcaagggatttct

SEQ ID NO: 354816 - DNA, 25 bp, Artificial
  Probe
ggatgaaacctttgtgttggacgac

SEQ ID NO: 354817 - DNA, 25 bp, Artificial
  Probe
atgaggatgatctcccatattatcc

SEQ ID NO: 354818 - DNA, 25 bp, Artificial
  Probe
tctcccatattatccgcgagattcg

SEQ ID NO: 354819 - DNA, 25 bp, Artificial
  Probe
accctgtgtcccttacctggggatg

SEQ ID NO: 354820 - DNA, 25 bp, Artificial
  Probe
ttcctcgaggaaggaacacccaatt

SEQ ID NO: 354821 - DNA, 25 bp, Artificial
  Probe
aaactttgcgaaattgtgatccacc

SEQ ID NO: 354822 - DNA, 25 bp, Artificial
  Probe
ccttacctggggatgtacctgaccg

SEQ ID NO: 354823 - DNA, 25 bp, Artificial
  Probe
ttctaagcagacgaaatctctgttt

SEQ ID NO: 354824 - DNA, 25 bp, Artificial
  Probe
tcagtacttagtggatgaaaccttt

SEQ ID NO: 354825 - DNA, 25 bp, Artificial
  Probe
tatccgcgagattcgccagtttcag

SEQ ID NO: 354826 - DNA, 25 bp, Artificial
  Probe
ctttgtgttggacgacgaaagtctg

SEQ ID NO: 354827 - DNA, 25 bp, Artificial
  Probe
ttctccaagatgaggatgatctccc

SEQ ID NO: 354828 - DNA, 25 bp, Artificial
  Probe
tcttccgactcaagaagacatggct

SEQ ID NO: 354829 - DNA, 25 bp, Artificial
  Probe
gtgtcccttacctggggatgtacct

SEQ ID NO: 354830 - DNA, 25 bp, Artificial
  Probe
ggccgatttaagaacctcagagaaa

SEQ ID NO: 354831 - DNA, 25 bp, Artificial
  Probe
acgacgaaagtctgtatgaggcctc

SEQ ID NO: 354832 - DNA, 25 bp, Artificial
  Probe
actcaagaagacatggctcaaagtt

SEQ ID NO: 354833 - DNA, 25 bp, Artificial
  Probe
atcagatggccgatttaagaacctc

SEQ ID NO: 354834 - DNA, 25 bp, Artificial
  Probe
cgcagcgcaatcttccgactcaaga

SEQ ID NO: 354835 - DNA, 25 bp, Artificial
  Probe
cctcagagaaactttgcgaaattgt

SEQ ID NO: 354836 - DNA, 25 bp, Artificial
  Probe
taactcagtacttagtggatgaaac

SEQ ID NO: 354837 - DNA, 25 bp, Artificial
  Probe
tggtcaacttctccaagatgaggat

SEQ ID NO: 354838 - DNA, 25 bp, Artificial
  Probe
tggagatcacttcctccatcaaccg

SEQ ID NO: 354839 - DNA, 25 bp, Artificial
  Probe
gcgagattcgccagtttcagcagac

SEQ ID NO: 354840 - DNA, 25 bp, Artificial
  Probe
catatcagtaacttgatcgcttcag

SEQ ID NO: 354841 - DNA, 25 bp, Artificial
  Probe
gccagtttcagcagactacttacaa

SEQ ID NO: 354842 - DNA, 25 bp, Artificial
  Probe
tcagcagactacttacaaaatcgag

SEQ ID NO: 354843 - DNA, 25 bp, Artificial
  Probe
aagggcaagcaccatcgagaagtgg

SEQ ID NO: 354844 - DNA, 25 bp, Artificial
  Probe
atattatccgcgagattcgccagtt

SEQ ID NO: 354845 - DNA, 25 bp, Artificial
  Probe
aaattgtgatccaccctgtgtccct

SEQ ID NO: 354846 - DNA, 25 bp, Artificial
  Probe
gcgaaattgtgatccaccctgtgtc

SEQ ID NO: 354847 - DNA, 25 bp, Artificial
  Probe
tgtgtcatcagatggccgatttaag

SEQ ID NO: 354848 - DNA, 25 bp, Artificial
  Probe
tttgccgctgcctgcacaactacaa

SEQ ID NO: 354849 - DNA, 25 bp, Artificial
  Probe
agaagacatggctcaaagtttctaa

SEQ ID NO: 354850 - DNA, 25 bp, Artificial
  Probe
cctttgtgttggacgacgaaagtct

SEQ ID NO: 354851 - DNA, 25 bp, Artificial
  Probe
tgaaacctttgtgttggacgacgaa

SEQ ID NO: 354852 - DNA, 25 bp, Artificial
  Probe
gaaactttgcgaaattgtgatccac

SEQ ID NO: 354853 - DNA, 25 bp, Artificial
  Probe
ggatgatctcccatattatccgcga

SEQ ID NO: 354854 - DNA, 25 bp, Artificial
  Probe
cccagccaaaggtaactcagtactt

SEQ ID NO: 354855 - DNA, 25 bp, Artificial
  Probe
gaggtcagtgcaagggcaagcacca

SEQ ID NO: 354856 - DNA, 25 bp, Artificial
  Probe
aacttctccaagatgaggatgatct

SEQ ID NO: 354857 - DNA, 25 bp, Artificial
  Probe
tcagatggccgatttaagaacctca

SEQ ID NO: 354858 - DNA, 25 bp, Artificial
  Probe
caaaggtaactcagtacttagtgga

SEQ ID NO: 354859 - DNA, 25 bp, Artificial
  Probe
acggcctggtcaacttctccaagat

SEQ ID NO: 354860 - DNA, 25 bp, Artificial
  Probe
cagtgcaagggcaagcaccatcgag

SEQ ID NO: 354861 - DNA, 25 bp, Artificial
  Probe
gactacttacaaaatcgagccccag

SEQ ID NO: 354862 - DNA, 25 bp, Artificial
  Probe
atcctgaaggtgagagactgtccac

SEQ ID NO: 354863 - DNA, 25 bp, Artificial
  Probe
tcctgggtgagcagatacgcccgga

SEQ ID NO: 354864 - DNA, 25 bp, Artificial
  Probe
agtgctgaccatgatccagtgacgt

SEQ ID NO: 354865 - DNA, 25 bp, Artificial
  Probe
ggtgagagactgtccacctgctgac

SEQ ID NO: 354866 - DNA, 25 bp, Artificial
  Probe
gctgcgcaagggtgagcacctcagc

SEQ ID NO: 354867 - DNA, 25 bp, Artificial
  Probe
agaagaacaatatcccgttccagat

SEQ ID NO: 354868 - DNA, 25 bp, Artificial
  Probe
catctccctggctgacgtggtagct

SEQ ID NO: 354869 - DNA, 25 bp, Artificial
  Probe
tggtgctggagctctatctggatct

SEQ ID NO: 354870 - DNA, 25 bp, Artificial
  Probe
tggaagaccagttcctccaggacaa

SEQ ID NO: 354871 - DNA, 25 bp, Artificial
  Probe
cctgcaggcccgtgctcgtgtggat

SEQ ID NO: 354872 - DNA, 25 bp, Artificial
  Probe
ctgtcgcagccctgtcgcgctattt

SEQ ID NO: 354873 - DNA, 25 bp, Artificial
  Probe
tctggatgttaacgtacaggtgctg

SEQ ID NO: 354874 - DNA, 25 bp, Artificial
  Probe
ttcgccaagaagaacaatatcccgt

SEQ ID NO: 354875 - DNA, 25 bp, Artificial
  Probe
tgatgttccccgttttcctgggtga

SEQ ID NO: 354876 - DNA, 25 bp, Artificial
  Probe
ctcagcgatgcctttgcccaggtga

SEQ ID NO: 354877 - DNA, 25 bp, Artificial
  Probe
tgctagccacccatggtcacaacta

SEQ ID NO: 354878 - DNA, 25 bp, Artificial
  Probe
agctgtctccggaccctgtggcata

SEQ ID NO: 354879 - DNA, 25 bp, Artificial
  Probe
aagacttccttgtcggaccgcacat

SEQ ID NO: 354880 - DNA, 25 bp, Artificial
  Probe
ggcccatgaggtcatcctgaaggtg

SEQ ID NO: 354881 - DNA, 25 bp, Artificial
  Probe
atcctgctctacctggcgcacaagt

SEQ ID NO: 354882 - DNA, 25 bp, Artificial
  Probe
ttgtgtgagagtgtggccatcctgc

SEQ ID NO: 354883 - DNA, 25 bp, Artificial
  Probe
ggagatgctggcagccacattggca

SEQ ID NO: 354884 - DNA, 25 bp, Artificial
  Probe
atgcatactgtggagctgcgcaagg

SEQ ID NO: 354885 - DNA, 25 bp, Artificial
  Probe
cacaagtataaggttcctgaccact

SEQ ID NO: 354886 - DNA, 25 bp, Artificial
  Probe
agtttgggcaataaaccgaggctcg

SEQ ID NO: 354887 - DNA, 25 bp, Artificial
  Probe
tgagagactgtccacctgctgaccc

SEQ ID NO: 354888 - DNA, 25 bp, Artificial
  Probe
ggtgagcacctcagcgatgcctttg

SEQ ID NO: 354889 - DNA, 25 bp, Artificial
  Probe
agccatgaaggatggtggcttcacc

SEQ ID NO: 354890 - DNA, 25 bp, Artificial
  Probe
ttttcccatgctagccacccatggt

SEQ ID NO: 354891 - DNA, 25 bp, Artificial
  Probe
tataaggttcctgaccactggtacc

SEQ ID NO: 354892 - DNA, 25 bp, Artificial
  Probe
acaggtgctggaagaccagttcctc

SEQ ID NO: 354893 - DNA, 25 bp, Artificial
  Probe
caggccactcgcattacacgactgt

SEQ ID NO: 354894 - DNA, 25 bp, Artificial
  Probe
aaggatggtggcttcaccttgtgtg

SEQ ID NO: 354895 - DNA, 25 bp, Artificial
  Probe
aatatcccgttccagatgcatactg

SEQ ID NO: 354896 - DNA, 25 bp, Artificial
  Probe
agatacgcccggagatgctggcagc

SEQ ID NO: 354897 - DNA, 25 bp, Artificial
  Probe
ctcgtgtggatgagtacctggcatg

SEQ ID NO: 354898 - DNA, 25 bp, Artificial
  Probe
gccactcgcattacacgactgtgcg

SEQ ID NO: 354899 - DNA, 25 bp, Artificial
  Probe
gtcgcagccctgtcgcgctatttat

SEQ ID NO: 354900 - DNA, 25 bp, Artificial
  Probe
gcccgtgctcgtgtggatgagtacc

SEQ ID NO: 354901 - DNA, 25 bp, Artificial
  Probe
ctgctgaccccgtcataaagcaaaa

SEQ ID NO: 354902 - DNA, 25 bp, Artificial
  Probe
gtcagaagcttcatccctgcaccag

SEQ ID NO: 354903 - DNA, 25 bp, Artificial
  Probe
cttcgccaagaagaacaatatcccg

SEQ ID NO: 354904 - DNA, 25 bp, Artificial
  Probe
tggatgagtacctggcatggcagca

SEQ ID NO: 354905 - DNA, 25 bp, Artificial
  Probe
atgcccagagtgctgaccatgatcc

SEQ ID NO: 354906 - DNA, 25 bp, Artificial
  Probe
ttggcagatctggatgttaacgtac

SEQ ID NO: 354907 - DNA, 25 bp, Artificial
  Probe
gcataaggtgatgttccccgttttc

SEQ ID NO: 354908 - DNA, 25 bp, Artificial
  Probe
ttaacctgctgatggaatccagctt

SEQ ID NO: 354909 - DNA, 25 bp, Artificial
  Probe
actaggccggaagtcagaaaccatc

SEQ ID NO: 354910 - DNA, 25 bp, Artificial
  Probe
cacttaacctgctgatggaatccag

SEQ ID NO: 354911 - DNA, 25 bp, Artificial
  Probe
taacctgctgatggaatccagcttc

SEQ ID NO: 354912 - DNA, 25 bp, Artificial
  Probe
aacctgctgatggaatccagcttca

SEQ ID NO: 354913 - DNA, 25 bp, Artificial
  Probe
cagcttcaagaacgtactctgtact

SEQ ID NO: 354914 - DNA, 25 bp, Artificial
  Probe
atccagcttcaagaacgtactctgt

SEQ ID NO: 354915 - DNA, 25 bp, Artificial
  Probe
gaacgtactctgtactaggccggaa

SEQ ID NO: 354916 - DNA, 25 bp, Artificial
  Probe
acgtactctgtactaggccggaagt

SEQ ID NO: 354917 - DNA, 25 bp, Artificial
  Probe
ttcaagaacgtactctgtactaggc

SEQ ID NO: 354918 - DNA, 25 bp, Artificial
  Probe
tcacttaacctgctgatggaatcca

SEQ ID NO: 354919 - DNA, 25 bp, Artificial
  Probe
cttaacctgctgatggaatccagct

SEQ ID NO: 354920 - DNA, 25 bp, Artificial
  Probe
atgttcacttaacctgctgatggaa

SEQ ID NO: 354921 - DNA, 25 bp, Artificial
  Probe
ctgctgatggaatccagcttcaaga

SEQ ID NO: 354922 - DNA, 25 bp, Artificial
  Probe
cgtactctgtactaggccggaagtc

SEQ ID NO: 354923 - DNA, 25 bp, Artificial
  Probe
tgctgatggaatccagcttcaagaa

SEQ ID NO: 354924 - DNA, 25 bp, Artificial
  Probe
aacgtactctgtactaggccggaag

SEQ ID NO: 354925 - DNA, 25 bp, Artificial
  Probe
tcatgttcacttaacctgctgatgg

SEQ ID NO: 354926 - DNA, 25 bp, Artificial
  Probe
cctgctgatggaatccagcttcaag

SEQ ID NO: 354927 - DNA, 25 bp, Artificial
  Probe
aatccagcttcaagaacgtactctg

SEQ ID NO: 354928 - DNA, 25 bp, Artificial
  Probe
acctgctgatggaatccagcttcaa

SEQ ID NO: 354929 - DNA, 25 bp, Artificial
  Probe
atggaatccagcttcaagaacgtac

SEQ ID NO: 354930 - DNA, 25 bp, Artificial
  Probe
aagaacgtactctgtactaggccgg

SEQ ID NO: 354931 - DNA, 25 bp, Artificial
  Probe
tgtcatgttcacttaacctgctgat

SEQ ID NO: 354932 - DNA, 25 bp, Artificial
  Probe
cttcaagaacgtactctgtactagg

SEQ ID NO: 354933 - DNA, 25 bp, Artificial
  Probe
gttcacttaacctgctgatggaatc

SEQ ID NO: 354934 - DNA, 25 bp, Artificial
  Probe
tgttcacttaacctgctgatggaat

SEQ ID NO: 354935 - DNA, 25 bp, Artificial
  Probe
tcaagaacgtactctgtactaggcc

SEQ ID NO: 354936 - DNA, 25 bp, Artificial
  Probe
caagaacgtactctgtactaggccg

SEQ ID NO: 354937 - DNA, 25 bp, Artificial
  Probe
ctgatggaatccagcttcaagaacg

SEQ ID NO: 354938 - DNA, 25 bp, Artificial
  Probe
agcttcaagaacgtactctgtacta

SEQ ID NO: 354939 - DNA, 25 bp, Artificial
  Probe
gtactctgtactaggccggaagtca

SEQ ID NO: 354940 - DNA, 25 bp, Artificial
  Probe
gcttcaagaacgtactctgtactag

SEQ ID NO: 354941 - DNA, 25 bp, Artificial
  Probe
ttcacttaacctgctgatggaatcc

SEQ ID NO: 354942 - DNA, 25 bp, Artificial
  Probe
agaacgtactctgtactaggccgga

SEQ ID NO: 354943 - DNA, 25 bp, Artificial
  Probe
tgatggaatccagcttcaagaacgt

SEQ ID NO: 354944 - DNA, 25 bp, Artificial
  Probe
gtactaggccggaagtcagaaacca

SEQ ID NO: 354945 - DNA, 25 bp, Artificial
  Probe
tactaggccggaagtcagaaaccat

SEQ ID NO: 354946 - DNA, 25 bp, Artificial
  Probe
catgttcacttaacctgctgatgga

SEQ ID NO: 354947 - DNA, 25 bp, Artificial
  Probe
gtcatgttcacttaacctgctgatg

SEQ ID NO: 354948 - DNA, 25 bp, Artificial
  Probe
tggaatccagcttcaagaacgtact

SEQ ID NO: 354949 - DNA, 25 bp, Artificial
  Probe
gatggaatccagcttcaagaacgta

SEQ ID NO: 354950 - DNA, 25 bp, Artificial
  Probe
tccagcttcaagaacgtactctgta

SEQ ID NO: 354951 - DNA, 25 bp, Artificial
  Probe
ggaatccagcttcaagaacgtactc

SEQ ID NO: 354952 - DNA, 25 bp, Artificial
  Probe
ccagcttcaagaacgtactctgtac

SEQ ID NO: 354953 - DNA, 25 bp, Artificial
  Probe
acttaacctgctgatggaatccagc

SEQ ID NO: 354954 - DNA, 25 bp, Artificial
  Probe
ctatgacaccctgaatatctcctgg

SEQ ID NO: 354955 - DNA, 25 bp, Artificial
  Probe
aatgtgttcacctgccgcgtggatc

SEQ ID NO: 354956 - DNA, 25 bp, Artificial
  Probe
gacaccctgaatatctcctggtctt

SEQ ID NO: 354957 - DNA, 25 bp, Artificial
  Probe
ctggagaccaacactaaaatcatgg

SEQ ID NO: 354958 - DNA, 25 bp, Artificial
  Probe
aaacctggcaacctatgacaccctg

SEQ ID NO: 354959 - DNA, 25 bp, Artificial
  Probe
ggcaacctatgacaccctgaatatc

SEQ ID NO: 354960 - DNA, 25 bp, Artificial
  Probe
cgcgtggatcacaggggtctcacct

SEQ ID NO: 354961 - DNA, 25 bp, Artificial
  Probe
aaagtggtgaaccactggagaccaa

SEQ ID NO: 354962 - DNA, 25 bp, Artificial
  Probe
cctacaaggtcataagcacactgac

SEQ ID NO: 354963 - DNA, 25 bp, Artificial
  Probe
tcaccaagtctgctaagctgtcctg

SEQ ID NO: 354964 - DNA, 25 bp, Artificial
  Probe
ctgaatgtgttcacctgccgcgtgg

SEQ ID NO: 354965 - DNA, 25 bp, Artificial
  Probe
atctcaaaacccaatgaggtggcca

SEQ ID NO: 354966 - DNA, 25 bp, Artificial
  Probe
agtggtgaaccactggagaccaaca

SEQ ID NO: 354967 - DNA, 25 bp, Artificial
  Probe
actggagaccaacactaaaatcatg

SEQ ID NO: 354968 - DNA, 25 bp, Artificial
  Probe
aacctacaaggtcataagcacactg

SEQ ID NO: 354969 - DNA, 25 bp, Artificial
  Probe
tcacctgccgcgtggatcacagggg

SEQ ID NO: 354970 - DNA, 25 bp, Artificial
  Probe
ctgaacctgaatgtgttcacctgcc

SEQ ID NO: 354971 - DNA, 25 bp, Artificial
  Probe
gaccaacactaaaatcatggaaagt

SEQ ID NO: 354972 - DNA, 25 bp, Artificial
  Probe
tgtcctgtctggtcacaaacctggc

SEQ ID NO: 354973 - DNA, 25 bp, Artificial
  Probe
tctgctaagctgtcctgtctggtca

SEQ ID NO: 354974 - DNA, 25 bp, Artificial
  Probe
cactgaccatcactgaaagcgactg

SEQ ID NO: 354975 - DNA, 25 bp, Artificial
  Probe
ctggtcttccaaaagtggtgaacca

SEQ ID NO: 354976 - DNA, 25 bp, Artificial
  Probe
gaccccaaacctacaaggtcataag

SEQ ID NO: 354977 - DNA, 25 bp, Artificial
  Probe
aacctgaatgtgttcacctgccgcg

SEQ ID NO: 354978 - DNA, 25 bp, Artificial
  Probe
tcttccaaaagtggtgaaccactgg

SEQ ID NO: 354979 - DNA, 25 bp, Artificial
  Probe
tatctcctggtcttccaaaagtggt

SEQ ID NO: 354980 - DNA, 25 bp, Artificial
  Probe
gtcataagcacactgaccatcactg

SEQ ID NO: 354981 - DNA, 25 bp, Artificial
  Probe
ggtctcaccttctggaagaacgtgt

SEQ ID NO: 354982 - DNA, 25 bp, Artificial
  Probe
acctggcaacctatgacaccctgaa

SEQ ID NO: 354983 - DNA, 25 bp, Artificial
  Probe
ggatcacaggggtctcaccttctgg

SEQ ID NO: 354984 - DNA, 25 bp, Artificial
  Probe
ggagaccaacactaaaatcatggaa

SEQ ID NO: 354985 - DNA, 25 bp, Artificial
  Probe
ctcaccaagtctgctaagctgtcct

SEQ ID NO: 354986 - DNA, 25 bp, Artificial
  Probe
ctgtctggtcacaaacctggcaacc

SEQ ID NO: 354987 - DNA, 25 bp, Artificial
  Probe
taagcacactgaccatcactgaaag

SEQ ID NO: 354988 - DNA, 25 bp, Artificial
  Probe
tcctggtcttccaaaagtggtgaac

SEQ ID NO: 354989 - DNA, 25 bp, Artificial
  Probe
tggtcacaaacctggcaacctatga

SEQ ID NO: 354990 - DNA, 25 bp, Artificial
  Probe
atcacaggggtctcaccttctggaa

SEQ ID NO: 354991 - DNA, 25 bp, Artificial
  Probe
acctacaaggtcataagcacactga

SEQ ID NO: 354992 - DNA, 25 bp, Artificial
  Probe
aagcacactgaccatcactgaaagc

SEQ ID NO: 354993 - DNA, 25 bp, Artificial
  Probe
gaaccactggagaccaacactaaaa

SEQ ID NO: 354994 - DNA, 25 bp, Artificial
  Probe
gtctgctaagctgtcctgtctggtc

SEQ ID NO: 354995 - DNA, 25 bp, Artificial
  Probe
tacaaggtcataagcacactgacca

SEQ ID NO: 354996 - DNA, 25 bp, Artificial
  Probe
tatgacaccctgaatatctcctggt

SEQ ID NO: 354997 - DNA, 25 bp, Artificial
  Probe
aagctgtcctgtctggtcacaaacc

SEQ ID NO: 354998 - DNA, 25 bp, Artificial
  Probe
tgaatatctcctggtcttccaaaag

SEQ ID NO: 354999 - DNA, 25 bp, Artificial
  Probe
aagtctgctaagctgtcctgtctgg

SEQ ID NO: 355000 - DNA, 25 bp, Artificial
  Probe
ctgttaaatgccatgtgttccagga

SEQ ID NO: 355001 - DNA, 25 bp, Artificial
  Probe
cagctggttgaagctttgttcacac

SEQ ID NO: 355002 - DNA, 25 bp, Artificial
  Probe
tgttaaatgccatgtgttccaggac

SEQ ID NO: 355003 - DNA, 25 bp, Artificial
  Probe
aaactgctgtgaactttgtcatgac

SEQ ID NO: 355004 - DNA, 25 bp, Artificial
  Probe
agctttgttcacaccattggagagt

SEQ ID NO: 355005 - DNA, 25 bp, Artificial
  Probe
gttaaatgccatgtgttccaggact

SEQ ID NO: 355006 - DNA, 25 bp, Artificial
  Probe
ctttgttcacaccattggagagtat

SEQ ID NO: 355007 - DNA, 25 bp, Artificial
  Probe
agtgttctaagacctctgacaccga

SEQ ID NO: 355008 - DNA, 25 bp, Artificial
  Probe
cctttaaactgctgtgaactttgtc

SEQ ID NO: 355009 - DNA, 25 bp, Artificial
  Probe
gcagctggttgaagctttgttcaca

SEQ ID NO: 355010 - DNA, 25 bp, Artificial
  Probe
ttggtaactcagtactttgtttact

SEQ ID NO: 355011 - DNA, 25 bp, Artificial
  Probe
ggcagctggttgaagctttgttcac

SEQ ID NO: 355012 - DNA, 25 bp, Artificial
  Probe
agtcagcctttaaactgctgtgaac

SEQ ID NO: 355013 - DNA, 25 bp, Artificial
  Probe
gttctaagacctctgacaccgaatc

SEQ ID NO: 355014 - DNA, 25 bp, Artificial
  Probe
ttcacaccattggagagtatgaaaa

SEQ ID NO: 355015 - DNA, 25 bp, Artificial
  Probe
ttaaatgccatgtgttccaggactt

SEQ ID NO: 355016 - DNA, 25 bp, Artificial
  Probe
cgtgtaaacctgttaaatgccatgt

SEQ ID NO: 355017 - DNA, 25 bp, Artificial
  Probe
tgtaaacctgttaaatgccatgtgt

SEQ ID NO: 355018 - DNA, 25 bp, Artificial
  Probe
aaacctgttaaatgccatgtgttcc

SEQ ID NO: 355019 - DNA, 25 bp, Artificial
  Probe
tccgtgtaaacctgttaaatgccat

SEQ ID NO: 355020 - DNA, 25 bp, Artificial
  Probe
tctaagacctctgacaccgaatccg

SEQ ID NO: 355021 - DNA, 25 bp, Artificial
  Probe
gtgttctaagacctctgacaccgaa

SEQ ID NO: 355022 - DNA, 25 bp, Artificial
  Probe
cctctgacaccgaatccgtgtaaac

SEQ ID NO: 355023 - DNA, 25 bp, Artificial
  Probe
ataagtgttctaagacctctgacac

SEQ ID NO: 355024 - DNA, 25 bp, Artificial
  Probe
aagacctctgacaccgaatccgtgt

SEQ ID NO: 355025 - DNA, 25 bp, Artificial
  Probe
cacaccattggagagtatgaaaata

SEQ ID NO: 355026 - DNA, 25 bp, Artificial
  Probe
gaatccgtgtaaacctgttaaatgc

SEQ ID NO: 355027 - DNA, 25 bp, Artificial
  Probe
aagtgttctaagacctctgacaccg

SEQ ID NO: 355028 - DNA, 25 bp, Artificial
  Probe
tctgacaccgaatccgtgtaaacct

SEQ ID NO: 355029 - DNA, 25 bp, Artificial
  Probe
actgctgtgaactttgtcatgactt

SEQ ID NO: 355030 - DNA, 25 bp, Artificial
  Probe
ctaagacctctgacaccgaatccgt

SEQ ID NO: 355031 - DNA, 25 bp, Artificial
  Probe
gtcagcctttaaactgctgtgaact

SEQ ID NO: 355032 - DNA, 25 bp, Artificial
  Probe
aggcagctggttgaagctttgttca

SEQ ID NO: 355033 - DNA, 25 bp, Artificial
  Probe
gctgtgaactttgtcatgacttgaa

SEQ ID NO: 355034 - DNA, 25 bp, Artificial
  Probe
aaatgccatgtgttccaggacttag

SEQ ID NO: 355035 - DNA, 25 bp, Artificial
  Probe
agcctttaaactgctgtgaactttg

SEQ ID NO: 355036 - DNA, 25 bp, Artificial
  Probe
gtaaacctgttaaatgccatgtgtt

SEQ ID NO: 355037 - DNA, 25 bp, Artificial
  Probe
gttgaagctttgttcacaccattgg

SEQ ID NO: 355038 - DNA, 25 bp, Artificial
  Probe
ttgaagctttgttcacaccattgga

SEQ ID NO: 355039 - DNA, 25 bp, Artificial
  Probe
cgaatccgtgtaaacctgttaaatg

SEQ ID NO: 355040 - DNA, 25 bp, Artificial
  Probe
atccgtgtaaacctgttaaatgcca

SEQ ID NO: 355041 - DNA, 25 bp, Artificial
  Probe
atgccatgtgttccaggacttagag

SEQ ID NO: 355042 - DNA, 25 bp, Artificial
  Probe
tggtaactcagtactttgtttacta

SEQ ID NO: 355043 - DNA, 25 bp, Artificial
  Probe
taagacctctgacaccgaatccgtg

SEQ ID NO: 355044 - DNA, 25 bp, Artificial
  Probe
catgtgttccaggacttagagtgtg

SEQ ID NO: 355045 - DNA, 25 bp, Artificial
  Probe
gttcacaccattggagagtatgaaa

SEQ ID NO: 355046 - DNA, 25 bp, Artificial
  Probe
tactagcatatattcccacagggtg

SEQ ID NO: 355047 - DNA, 25 bp, Artificial
  Probe
ctcttcctgaattgaagtgcctggc

SEQ ID NO: 355048 - DNA, 25 bp, Artificial
  Probe
gttcagatgcccttactagcatata

SEQ ID NO: 355049 - DNA, 25 bp, Artificial
  Probe
tctccagttcagatgcccttactag

SEQ ID NO: 355050 - DNA, 25 bp, Artificial
  Probe
tgtagttggtctccagttcagatgc

SEQ ID NO: 355051 - DNA, 25 bp, Artificial
  Probe
tctgtagttggtctccagttcagat

SEQ ID NO: 355052 - DNA, 25 bp, Artificial
  Probe
tagttggtctccagttcagatgccc

SEQ ID NO: 355053 - DNA, 25 bp, Artificial
  Probe
ggtctccagttcagatgcccttact

SEQ ID NO: 355054 - DNA, 25 bp, Artificial
  Probe
gcctggcccactgtcacaaattaac

SEQ ID NO: 355055 - DNA, 25 bp, Artificial
  Probe
cttcctgaattgaagtgcctggccc

SEQ ID NO: 355056 - DNA, 25 bp, Artificial
  Probe
ctctcttcctgaattgaagtgcctg

SEQ ID NO: 355057 - DNA, 25 bp, Artificial
  Probe
gtctccagttcagatgcccttacta

SEQ ID NO: 355058 - DNA, 25 bp, Artificial
  Probe
atgtgtgtctgtagttggtctccag

SEQ ID NO: 355059 - DNA, 25 bp, Artificial
  Probe
tcttcctgaattgaagtgcctggcc

SEQ ID NO: 355060 - DNA, 25 bp, Artificial
  Probe
gtagttggtctccagttcagatgcc

SEQ ID NO: 355061 - DNA, 25 bp, Artificial
  Probe
gtgtctgtagttggtctccagttca

SEQ ID NO: 355062 - DNA, 25 bp, Artificial
  Probe
ctgtagttggtctccagttcagatg

SEQ ID NO: 355063 - DNA, 25 bp, Artificial
  Probe
agtgcctggcccactgtcacaaatt

SEQ ID NO: 355064 - DNA, 25 bp, Artificial
  Probe
gtgtgtctgtagttggtctccagtt

SEQ ID NO: 355065 - DNA, 25 bp, Artificial
  Probe
gtatgtgtgtctgtagttggtctcc

SEQ ID NO: 355066 - DNA, 25 bp, Artificial
  Probe
actagcatatattcccacagggtgt

SEQ ID NO: 355067 - DNA, 25 bp, Artificial
  Probe
gtctgtagttggtctccagttcaga

SEQ ID NO: 355068 - DNA, 25 bp, Artificial
  Probe
ttcctgaattgaagtgcctggccca

SEQ ID NO: 355069 - DNA, 25 bp, Artificial
  Probe
cctctcttcctgaattgaagtgcct

SEQ ID NO: 355070 - DNA, 25 bp, Artificial
  Probe
aagcctctcttcctgaattgaagtg

SEQ ID NO: 355071 - DNA, 25 bp, Artificial
  Probe
tctcttcctgaattgaagtgcctgg

SEQ ID NO: 355072 - DNA, 25 bp, Artificial
  Probe
tcctgaattgaagtgcctggcccac

SEQ ID NO: 355073 - DNA, 25 bp, Artificial
  Probe
ctccagttcagatgcccttactagc

SEQ ID NO: 355074 - DNA, 25 bp, Artificial
  Probe
gttggtctccagttcagatgccctt

SEQ ID NO: 355075 - DNA, 25 bp, Artificial
  Probe
ttactagcatatattcccacagggt

SEQ ID NO: 355076 - DNA, 25 bp, Artificial
  Probe
tggtctccagttcagatgcccttac

SEQ ID NO: 355077 - DNA, 25 bp, Artificial
  Probe
tgtctgtagttggtctccagttcag

SEQ ID NO: 355078 - DNA, 25 bp, Artificial
  Probe
agttggtctccagttcagatgccct

SEQ ID NO: 355079 - DNA, 25 bp, Artificial
  Probe
caaagcctctcttcctgaattgaag

SEQ ID NO: 355080 - DNA, 25 bp, Artificial
  Probe
tgcctggcccactgtcacaaattaa

SEQ ID NO: 355081 - DNA, 25 bp, Artificial
  Probe
tggtttacctcaaagtcacaaagcc

SEQ ID NO: 355082 - DNA, 25 bp, Artificial
  Probe
tatgtgtgtctgtagttggtctcca

SEQ ID NO: 355083 - DNA, 25 bp, Artificial
  Probe
gtgcctggcccactgtcacaaatta

SEQ ID NO: 355084 - DNA, 25 bp, Artificial
  Probe
tgtgtctgtagttggtctccagttc

SEQ ID NO: 355085 - DNA, 25 bp, Artificial
  Probe
tgtgtgtctgtagttggtctccagt

SEQ ID NO: 355086 - DNA, 25 bp, Artificial
  Probe
cttactagcatatattcccacaggg

SEQ ID NO: 355087 - DNA, 25 bp, Artificial
  Probe
aattgaagtgcctggcccactgtca

SEQ ID NO: 355088 - DNA, 25 bp, Artificial
  Probe
ttggtctccagttcagatgccctta

SEQ ID NO: 355089 - DNA, 25 bp, Artificial
  Probe
aaagcctctcttcctgaattgaagt

SEQ ID NO: 355090 - DNA, 25 bp, Artificial
  Probe
ggtttacctcaaagtcacaaagcct

SEQ ID NO: 355091 - DNA, 25 bp, Artificial
  Probe
tggcccactgtcacaaattaacatg

SEQ ID NO: 355092 - DNA, 25 bp, Artificial
  Probe
taaaggcacatgtggcagtctgctc

SEQ ID NO: 355093 - DNA, 25 bp, Artificial
  Probe
ctcaggacagggttatctgtaaggt

SEQ ID NO: 355094 - DNA, 25 bp, Artificial
  Probe
acccatgtgtgtaatccccaaaccg

SEQ ID NO: 355095 - DNA, 25 bp, Artificial
  Probe
agcatgggatcctgcctgagacccc

SEQ ID NO: 355096 - DNA, 25 bp, Artificial
  Probe
ctggaggcgctgaactcaggcattg

SEQ ID NO: 355097 - DNA, 25 bp, Artificial
  Probe
gctggaggcgctgaactcaggcatt

SEQ ID NO: 355098 - DNA, 25 bp, Artificial
  Probe
cattgggcattgtccggggctcctc

SEQ ID NO: 355099 - DNA, 25 bp, Artificial
  Probe
ttacctcaggacagggttatctgta

SEQ ID NO: 355100 - DNA, 25 bp, Artificial
  Probe
agtgcttaatgcttgtagcacttcc

SEQ ID NO: 355101 - DNA, 25 bp, Artificial
  Probe
gtctgctctttctagtagcaatctt

SEQ ID NO: 355102 - DNA, 25 bp, Artificial
  Probe
gtagcacttcccaatgttacagttc

SEQ ID NO: 355103 - DNA, 25 bp, Artificial
  Probe
ccagccggctggaggcgctgaactc

SEQ ID NO: 355104 - DNA, 25 bp, Artificial
  Probe
gcattgggcattgtccggggctcct

SEQ ID NO: 355105 - DNA, 25 bp, Artificial
  Probe
gttgttctggggagactgaagtcca

SEQ ID NO: 355106 - DNA, 25 bp, Artificial
  Probe
catctcaaaggtagccccctagtgg

SEQ ID NO: 355107 - DNA, 25 bp, Artificial
  Probe
gttatctgtaaggtcacccctagta

SEQ ID NO: 355108 - DNA, 25 bp, Artificial
  Probe
agatgtaaaggcacatgtggcagtc

SEQ ID NO: 355109 - DNA, 25 bp, Artificial
  Probe
gaactcaggcattgggcattgtccg

SEQ ID NO: 355110 - DNA, 25 bp, Artificial
  Probe
ggcacatgtggcagtctgctctttc

SEQ ID NO: 355111 - DNA, 25 bp, Artificial
  Probe
tgggatcctgcctgagaccccaggc

SEQ ID NO: 355112 - DNA, 25 bp, Artificial
  Probe
ctctctgaaaagtgggagctcagtc

SEQ ID NO: 355113 - DNA, 25 bp, Artificial
  Probe
atctgtaaggtcacccctagtagac

SEQ ID NO: 355114 - DNA, 25 bp, Artificial
  Probe
aggtagccccctagtggttgttctg

SEQ ID NO: 355115 - DNA, 25 bp, Artificial
  Probe
ggtcacccctagtagacaatattac

SEQ ID NO: 355116 - DNA, 25 bp, Artificial
  Probe
catactgtctccaagagcaattctg

SEQ ID NO: 355117 - DNA, 25 bp, Artificial
  Probe
tgttctggggagactgaagtccatc

SEQ ID NO: 355118 - DNA, 25 bp, Artificial
  Probe
aggcgctgaactcaggcattgggca

SEQ ID NO: 355119 - DNA, 25 bp, Artificial
  Probe
taaggtcacccctagtagacaatat

SEQ ID NO: 355120 - DNA, 25 bp, Artificial
  Probe
caatattactaagtcaagatgcatg

SEQ ID NO: 355121 - DNA, 25 bp, Artificial
  Probe
tgcttaatgcttgtagcacttccca

SEQ ID NO: 355122 - DNA, 25 bp, Artificial
  Probe
ctgaactcaggcattgggcattgtc

SEQ ID NO: 355123 - DNA, 25 bp, Artificial
  Probe
gagactgaagtccatctctctctta

SEQ ID NO: 355124 - DNA, 25 bp, Artificial
  Probe
ggagactgaagtccatctctctctt

SEQ ID NO: 355125 - DNA, 25 bp, Artificial
  Probe
ttgtccggggctcctctgcctgtgc

SEQ ID NO: 355126 - DNA, 25 bp, Artificial
  Probe
gggatcctgcctgagaccccaggca

SEQ ID NO: 355127 - DNA, 25 bp, Artificial
  Probe
tgttacagttcctctttacctcagg

SEQ ID NO: 355128 - DNA, 25 bp, Artificial
  Probe
tagccccctagtggttgttctgggg

SEQ ID NO: 355129 - DNA, 25 bp, Artificial
  Probe
ccctagtggttgttctggggagact

SEQ ID NO: 355130 - DNA, 25 bp, Artificial
  Probe
tgaaccacagatgtaaaggcacatg

SEQ ID NO: 355131 - DNA, 25 bp, Artificial
  Probe
ccaagagcaattctgtcaggagagg

SEQ ID NO: 355132 - DNA, 25 bp, Artificial
  Probe
aaagtgggagctcagtcatctcaaa

SEQ ID NO: 355133 - DNA, 25 bp, Artificial
  Probe
attgtccggggctcctctgcctgtg

SEQ ID NO: 355134 - DNA, 25 bp, Artificial
  Probe
tactaagtcaagatgcatgtaatac

SEQ ID NO: 355135 - DNA, 25 bp, Artificial
  Probe
ggcgctgaactcaggcattgggcat

SEQ ID NO: 355136 - DNA, 25 bp, Artificial
  Probe
ggaattgaaccacagatgtaaaggc

SEQ ID NO: 355137 - DNA, 25 bp, Artificial
  Probe
ctccctctctgaaaagtgggagctc

SEQ ID NO: 355138 - DNA, 25 bp, Artificial
  Probe
ctgtcctggggctctttgtgctgtg

SEQ ID NO: 355139 - DNA, 25 bp, Artificial
  Probe
caatatgccggaagggaggctgcat

SEQ ID NO: 355140 - DNA, 25 bp, Artificial
  Probe
gggttgttattactggctggtgctc

SEQ ID NO: 355141 - DNA, 25 bp, Artificial
  Probe
tgtgctgtgttggtttcctttccag

SEQ ID NO: 355142 - DNA, 25 bp, Artificial
  Probe
tggagaactccatggggactctgag

SEQ ID NO: 355143 - DNA, 25 bp, Artificial
  Probe
tcctagggaatcaggcaggtgattc

SEQ ID NO: 355144 - DNA, 25 bp, Artificial
  Probe
cccgagaggtgtaccaggcaatatg

SEQ ID NO: 355145 - DNA, 25 bp, Artificial
  Probe
ctggaacgagcgtgccgtggatatt

SEQ ID NO: 355146 - DNA, 25 bp, Artificial
  Probe
cggtggaccggcagatccacaagct

SEQ ID NO: 355147 - DNA, 25 bp, Artificial
  Probe
gcctcaacccgctggtgtacgtgat

SEQ ID NO: 355148 - DNA, 25 bp, Artificial
  Probe
ccatcgggcaggacgactgccgagc

SEQ ID NO: 355149 - DNA, 25 bp, Artificial
  Probe
tcctggggctctttgtgctgtgttg

SEQ ID NO: 355150 - DNA, 25 bp, Artificial
  Probe
ggagagtccgtccagatggagaact

SEQ ID NO: 355151 - DNA, 25 bp, Artificial
  Probe
aagccatcgggcaggacgactgccg

SEQ ID NO: 355152 - DNA, 25 bp, Artificial
  Probe
cctggacacgctgctgcggcttggc

SEQ ID NO: 355153 - DNA, 25 bp, Artificial
  Probe
caagcagtgaacacaagccatcggg

SEQ ID NO: 355154 - DNA, 25 bp, Artificial
  Probe
ctgcatgggagagtccgtccagatg

SEQ ID NO: 355155 - DNA, 25 bp, Artificial
  Probe
tgtacgtgattgtgggcaagcgctt

SEQ ID NO: 355156 - DNA, 25 bp, Artificial
  Probe
ttccgaaagaagtcccgagaggtgt

SEQ ID NO: 355157 - DNA, 25 bp, Artificial
  Probe
gtggatattgtcacccagatcagtt

SEQ ID NO: 355158 - DNA, 25 bp, Artificial
  Probe
ctttccagatcagcaccttcctgga

SEQ ID NO: 355159 - DNA, 25 bp, Artificial
  Probe
ccactgtgctggtgctggctgtcct

SEQ ID NO: 355160 - DNA, 25 bp, Artificial
  Probe
gctgcatgggagagtccgtccagat

SEQ ID NO: 355161 - DNA, 25 bp, Artificial
  Probe
ggtgtaccaggcaatatgccggaag

SEQ ID NO: 355162 - DNA, 25 bp, Artificial
  Probe
tcagcctgggttcaggaaggagctt

SEQ ID NO: 355163 - DNA, 25 bp, Artificial
  Probe
cctacgtggcctatagcaacagctg

SEQ ID NO: 355164 - DNA, 25 bp, Artificial
  Probe
agcttctcagcctgggttcaggaag

SEQ ID NO: 355165 - DNA, 25 bp, Artificial
  Probe
tttccagatcagcaccttcctggac

SEQ ID NO: 355166 - DNA, 25 bp, Artificial
  Probe
aggagcttgaagcatcctagggaat

SEQ ID NO: 355167 - DNA, 25 bp, Artificial
  Probe
accctggagcatagaggggttgtta

SEQ ID NO: 355168 - DNA, 25 bp, Artificial
  Probe
gaatcaggcaggtgattccagtctt

SEQ ID NO: 355169 - DNA, 25 bp, Artificial
  Probe
ccagatggagaactccatggggact

SEQ ID NO: 355170 - DNA, 25 bp, Artificial
  Probe
tcctggacacgctgctgcggcttgg

SEQ ID NO: 355171 - DNA, 25 bp, Artificial
  Probe
agaagtcccgagaggtgtaccaggc

SEQ ID NO: 355172 - DNA, 25 bp, Artificial
  Probe
ttggtttcctttccagatcagcacc

SEQ ID NO: 355173 - DNA, 25 bp, Artificial
  Probe
aggactgctgggacctgagcttctc

SEQ ID NO: 355174 - DNA, 25 bp, Artificial
  Probe
tgctggctgtcctggggctctttgt

SEQ ID NO: 355175 - DNA, 25 bp, Artificial
  Probe
ccctggagcatagaggggttgttat

SEQ ID NO: 355176 - DNA, 25 bp, Artificial
  Probe
aacccgctggtgtacgtgattgtgg

SEQ ID NO: 355177 - DNA, 25 bp, Artificial
  Probe
tctatctcggtggaccggcagatcc

SEQ ID NO: 355178 - DNA, 25 bp, Artificial
  Probe
tgattgtgggcaagcgcttccgaaa

SEQ ID NO: 355179 - DNA, 25 bp, Artificial
  Probe
tctcacggcataagcgtgctgtggg

SEQ ID NO: 355180 - DNA, 25 bp, Artificial
  Probe
attgtcacccagatcagttcctacg

SEQ ID NO: 355181 - DNA, 25 bp, Artificial
  Probe
taccaggcaatatgccggaagggag

SEQ ID NO: 355182 - DNA, 25 bp, Artificial
  Probe
atccacaagctgcaggattgggcgg

SEQ ID NO: 355183 - DNA, 25 bp, Artificial
  Probe
gaacacaagccatcgggcaggacga

SEQ ID NO: 355184 - DNA, 25 bp, Artificial
  Probe
ggagcctaaagctcccaatatctaa

SEQ ID NO: 355185 - DNA, 25 bp, Artificial
  Probe
tttggactgtaatgtcaggttctca

SEQ ID NO: 355186 - DNA, 25 bp, Artificial
  Probe
acccaggtccatgagaccgagcctg

SEQ ID NO: 355187 - DNA, 25 bp, Artificial
  Probe
taatgtcaggttctcaggcccttgg

SEQ ID NO: 355188 - DNA, 25 bp, Artificial
  Probe
tctaatagttctacccaggtccatg

SEQ ID NO: 355189 - DNA, 25 bp, Artificial
  Probe
tgctgccacaggagccaatttggtc

SEQ ID NO: 355190 - DNA, 25 bp, Artificial
  Probe
ctgcccaggttatccatttccactg

SEQ ID NO: 355191 - DNA, 25 bp, Artificial
  Probe
ctgtaatgtcaggttctcaggccct

SEQ ID NO: 355192 - DNA, 25 bp, Artificial
  Probe
gtctctcacacacatggtcagcata

SEQ ID NO: 355193 - DNA, 25 bp, Artificial
  Probe
tgaccgaaaagctcatcaatgacag

SEQ ID NO: 355194 - DNA, 25 bp, Artificial
  Probe
gtaaagatcatcacaggcaatgctc

SEQ ID NO: 355195 - DNA, 25 bp, Artificial
  Probe
ctagccactgtcaagtacacccagt

SEQ ID NO: 355196 - DNA, 25 bp, Artificial
  Probe
atagttctacccaggtccatgagac

SEQ ID NO: 355197 - DNA, 25 bp, Artificial
  Probe
tgctctgtttattgataagaacctt

SEQ ID NO: 355198 - DNA, 25 bp, Artificial
  Probe
tcaacaggccattcctgatagctgt

SEQ ID NO: 355199 - DNA, 25 bp, Artificial
  Probe
tatctctgtggctcccagacattca

SEQ ID NO: 355200 - DNA, 25 bp, Artificial
  Probe
tcaggagcgtttggactgtaatgtc

SEQ ID NO: 355201 - DNA, 25 bp, Artificial
  Probe
ccaaccttcaaactctgattggctg

SEQ ID NO: 355202 - DNA, 25 bp, Artificial
  Probe
cagctagcttccagcagcctcgtgt

SEQ ID NO: 355203 - DNA, 25 bp, Artificial
  Probe
agggatgtcttctcccaacaggctg

SEQ ID NO: 355204 - DNA, 25 bp, Artificial
  Probe
ggaactggtctcaggcctgaaagag

SEQ ID NO: 355205 - DNA, 25 bp, Artificial
  Probe
atgctctgtttattgataagaacct

SEQ ID NO: 355206 - DNA, 25 bp, Artificial
  Probe
tcattaaccccgtgggagcctaaag

SEQ ID NO: 355207 - DNA, 25 bp, Artificial
  Probe
gccattcctgatagctgtctctcac

SEQ ID NO: 355208 - DNA, 25 bp, Artificial
  Probe
cttccagcagcctcgtgtgaccgaa

SEQ ID NO: 355209 - DNA, 25 bp, Artificial
  Probe
cattagggatgtcttctcccaacag

SEQ ID NO: 355210 - DNA, 25 bp, Artificial
  Probe
tgattgtgtggttcaacaggccatt

SEQ ID NO: 355211 - DNA, 25 bp, Artificial
  Probe
ggatctctgtgtataacccaacctt

SEQ ID NO: 355212 - DNA, 25 bp, Artificial
  Probe
gccacaggagccaatttggtcccac

SEQ ID NO: 355213 - DNA, 25 bp, Artificial
  Probe
caatttggtcccacgtagtggaagg

SEQ ID NO: 355214 - DNA, 25 bp, Artificial
  Probe
atccaggaactggtctcaggcctga

SEQ ID NO: 355215 - DNA, 25 bp, Artificial
  Probe
tagtggaaggccacctatgattgtg

SEQ ID NO: 355216 - DNA, 25 bp, Artificial
  Probe
acatggtcagcatatcctctttatg

SEQ ID NO: 355217 - DNA, 25 bp, Artificial
  Probe
tctgtggctcccagacattcaggag

SEQ ID NO: 355218 - DNA, 25 bp, Artificial
  Probe
tcgactatctctgtggctcccagac

SEQ ID NO: 355219 - DNA, 25 bp, Artificial
  Probe
ggttatccatttccactgactatag

SEQ ID NO: 355220 - DNA, 25 bp, Artificial
  Probe
cgtttggactgtaatgtcaggttct

SEQ ID NO: 355221 - DNA, 25 bp, Artificial
  Probe
ctgatagctgtctctcacacacatg

SEQ ID NO: 355222 - DNA, 25 bp, Artificial
  Probe
gctgctgccacaggagccaatttgg

SEQ ID NO: 355223 - DNA, 25 bp, Artificial
  Probe
gcatatcctctttatggccaaagtc

SEQ ID NO: 355224 - DNA, 25 bp, Artificial
  Probe
caaccttcaaactctgattggctgt

SEQ ID NO: 355225 - DNA, 25 bp, Artificial
  Probe
cagacattcaggagcgtttggactg

SEQ ID NO: 355226 - DNA, 25 bp, Artificial
  Probe
cccgtgggagcctaaagctcccaat

SEQ ID NO: 355227 - DNA, 25 bp, Artificial
  Probe
cattcaggagcgtttggactgtaat

SEQ ID NO: 355228 - DNA, 25 bp, Artificial
  Probe
ccacgtagtggaaggccacctatga

SEQ ID NO: 355229 - DNA, 25 bp, Artificial
  Probe
catgtggatctctgtgtataaccca

SEQ ID NO: 355230 - DNA, 25 bp, Artificial
  Probe
tgcaggtcccagaggcccagttggt

SEQ ID NO: 355231 - DNA, 25 bp, Artificial
  Probe
catattacggggatgatccaatgga

SEQ ID NO: 355232 - DNA, 25 bp, Artificial
  Probe
ggatctgagggctcgcccggtcacc

SEQ ID NO: 355233 - DNA, 25 bp, Artificial
  Probe
cctgcaggtcccagaggcccagttg

SEQ ID NO: 355234 - DNA, 25 bp, Artificial
  Probe
gtgcagttggtagtccaggccctgc

SEQ ID NO: 355235 - DNA, 25 bp, Artificial
  Probe
ggcccagttggtccacatggacctc

SEQ ID NO: 355236 - DNA, 25 bp, Artificial
  Probe
aagtctggcggcttttcaccatatt

SEQ ID NO: 355237 - DNA, 25 bp, Artificial
  Probe
tggacatccaggtcccattggacca

SEQ ID NO: 355238 - DNA, 25 bp, Artificial
  Probe
gtggacatccaggtcccattggacc

SEQ ID NO: 355239 - DNA, 25 bp, Artificial
  Probe
agatcatgtcttcactcaagtctgt

SEQ ID NO: 355240 - DNA, 25 bp, Artificial
  Probe
ttacggggatgatccaatggatttc

SEQ ID NO: 355241 - DNA, 25 bp, Artificial
  Probe
cctgaagatgtccttgatgtacagc

SEQ ID NO: 355242 - DNA, 25 bp, Artificial
  Probe
atgatccaatggatttcaagatcaa

SEQ ID NO: 355243 - DNA, 25 bp, Artificial
  Probe
tttcaccatattacggggatgatcc

SEQ ID NO: 355244 - DNA, 25 bp, Artificial
  Probe
aattgcagagacctgaaattctgcc

SEQ ID NO: 355245 - DNA, 25 bp, Artificial
  Probe
tgatccaatggatttcaagatcaac

SEQ ID NO: 355246 - DNA, 25 bp, Artificial
  Probe
gtacagctggccttcctcagacttc

SEQ ID NO: 355247 - DNA, 25 bp, Artificial
  Probe
tttcagttcagctatggcaatcctg

SEQ ID NO: 355248 - DNA, 25 bp, Artificial
  Probe
ttgatgtacagctggccttcctcag

SEQ ID NO: 355249 - DNA, 25 bp, Artificial
  Probe
gttctcccggtgctgctggacacca

SEQ ID NO: 355250 - DNA, 25 bp, Artificial
  Probe
attgcagagacctgaaattctgcca

SEQ ID NO: 355251 - DNA, 25 bp, Artificial
  Probe
atcaaaggacatcgaggattccctg

SEQ ID NO: 355252 - DNA, 25 bp, Artificial
  Probe
ctcccggtgctgctggacaccaggg

SEQ ID NO: 355253 - DNA, 25 bp, Artificial
  Probe
atcagccctgatggttctagaaaaa

SEQ ID NO: 355254 - DNA, 25 bp, Artificial
  Probe
ggatttcaagatcaacactgaggag

SEQ ID NO: 355255 - DNA, 25 bp, Artificial
  Probe
tatgacattggtggtcctgatcaag

SEQ ID NO: 355256 - DNA, 25 bp, Artificial
  Probe
tcccgcggaagcactggtggacaga

SEQ ID NO: 355257 - DNA, 25 bp, Artificial
  Probe
aggagatcatgtcttcactcaagtc

SEQ ID NO: 355258 - DNA, 25 bp, Artificial
  Probe
tcccagaggcccagttggtccacat

SEQ ID NO: 355259 - DNA, 25 bp, Artificial
  Probe
atccaggtcccattggaccaccagg

SEQ ID NO: 355260 - DNA, 25 bp, Artificial
  Probe
cccgcggaagcactggtggacagat

SEQ ID NO: 355261 - DNA, 25 bp, Artificial
  Probe
cataaatgccagtcccatgactgtc

SEQ ID NO: 355262 - DNA, 25 bp, Artificial
  Probe
gacaccagggtgcagttggtagtcc

SEQ ID NO: 355263 - DNA, 25 bp, Artificial
  Probe
agttggtagtccaggccctgcaggt

SEQ ID NO: 355264 - DNA, 25 bp, Artificial
  Probe
gaaacatgcataaatgccagtccca

SEQ ID NO: 355265 - DNA, 25 bp, Artificial
  Probe
gtcccatgactgtcccgcggaagca

SEQ ID NO: 355266 - DNA, 25 bp, Artificial
  Probe
tccaggtcccattggaccaccaggg

SEQ ID NO: 355267 - DNA, 25 bp, Artificial
  Probe
ctgatcttcctgaagatgtccttga

SEQ ID NO: 355268 - DNA, 25 bp, Artificial
  Probe
tcttatcagccctgatggttctaga

SEQ ID NO: 355269 - DNA, 25 bp, Artificial
  Probe
ttcctcagacttctttccagccggg

SEQ ID NO: 355270 - DNA, 25 bp, Artificial
  Probe
tggccttcctcagacttctttccag

SEQ ID NO: 355271 - DNA, 25 bp, Artificial
  Probe
caccagggtgcagttggtagtccag

SEQ ID NO: 355272 - DNA, 25 bp, Artificial
  Probe
aacatgcataaatgccagtcccatg

SEQ ID NO: 355273 - DNA, 25 bp, Artificial
  Probe
gacatcgaggattccctggcaatcc

SEQ ID NO: 355274 - DNA, 25 bp, Artificial
  Probe
cagtcccatgactgtcccgcggaag

SEQ ID NO: 355275 - DNA, 25 bp, Artificial
  Probe
caacactgaggagatcatgtcttca

SEQ ID NO: 355276 - DNA, 25 bp, Artificial
  Probe
ttccacggctagccaagagagaaaa

SEQ ID NO: 355277 - DNA, 25 bp, Artificial
  Probe
caatggcatgaacgtgggctaggaa

SEQ ID NO: 355278 - DNA, 25 bp, Artificial
  Probe
ccccgaggaggtgttccacggctag

SEQ ID NO: 355279 - DNA, 25 bp, Artificial
  Probe
gcatgaacgtgggctaggaaccccc

SEQ ID NO: 355280 - DNA, 25 bp, Artificial
  Probe
ccacggctagccaagagagaaaagc

SEQ ID NO: 355281 - DNA, 25 bp, Artificial
  Probe
gaaaagcaatgctcaggtgagacac

SEQ ID NO: 355282 - DNA, 25 bp, Artificial
  Probe
catgaacgtgggctaggaacccccg

SEQ ID NO: 355283 - DNA, 25 bp, Artificial
  Probe
tgggctaggaacccccgaggaggtg

SEQ ID NO: 355284 - DNA, 25 bp, Artificial
  Probe
aggtgttccacggctagccaagaga

SEQ ID NO: 355285 - DNA, 25 bp, Artificial
  Probe
acggctagccaagagagaaaagcaa

SEQ ID NO: 355286 - DNA, 25 bp, Artificial
  Probe
tgttccacggctagccaagagagaa

SEQ ID NO: 355287 - DNA, 25 bp, Artificial
  Probe
agaaaagcaatgctcaggtgagaca

SEQ ID NO: 355288 - DNA, 25 bp, Artificial
  Probe
gcaatggcatgaacgtgggctagga

SEQ ID NO: 355289 - DNA, 25 bp, Artificial
  Probe
aaaagcaatgctcaggtgagacaca

SEQ ID NO: 355290 - DNA, 25 bp, Artificial
  Probe
tggcatgaacgtgggctaggaaccc

SEQ ID NO: 355291 - DNA, 25 bp, Artificial
  Probe
gtgttccacggctagccaagagaga

SEQ ID NO: 355292 - DNA, 25 bp, Artificial
  Probe
atggcatgaacgtgggctaggaacc

SEQ ID NO: 355293 - DNA, 25 bp, Artificial
  Probe
ggtgttccacggctagccaagagag

SEQ ID NO: 355294 - DNA, 25 bp, Artificial
  Probe
gaggtgttccacggctagccaagag

SEQ ID NO: 355295 - DNA, 25 bp, Artificial
  Probe
tgaacgtgggctaggaacccccgag

SEQ ID NO: 355296 - DNA, 25 bp, Artificial
  Probe
aggaggtgttccacggctagccaag

SEQ ID NO: 355297 - DNA, 25 bp, Artificial
  Probe
cacggctagccaagagagaaaagca

SEQ ID NO: 355298 - DNA, 25 bp, Artificial
  Probe
cccgaggaggtgttccacggctagc

SEQ ID NO: 355299 - DNA, 25 bp, Artificial
  Probe
gttccacggctagccaagagagaaa

SEQ ID NO: 355300 - DNA, 25 bp, Artificial
  Probe
aatggcatgaacgtgggctaggaac

SEQ ID NO: 355301 - DNA, 25 bp, Artificial
  Probe
ggcatgaacgtgggctaggaacccc

SEQ ID NO: 355302 - DNA, 25 bp, Artificial
  Probe
ggaggtgttccacggctagccaaga

SEQ ID NO: 355303 - DNA, 25 bp, Artificial
  Probe
tccacggctagccaagagagaaaag

SEQ ID NO: 355304 - DNA, 25 bp, Artificial
  Probe
tctggcagctgatgagaagatatac

SEQ ID NO: 355305 - DNA, 25 bp, Artificial
  Probe
acccttaatgttatggaagatcttg

SEQ ID NO: 355306 - DNA, 25 bp, Artificial
  Probe
tccctgaagaccttgtggaagtaaa

SEQ ID NO: 355307 - DNA, 25 bp, Artificial
  Probe
tggaaagtcaacttctattcagagt

SEQ ID NO: 355308 - DNA, 25 bp, Artificial
  Probe
gaccttgtgaagactggaaatctaa

SEQ ID NO: 355309 - DNA, 25 bp, Artificial
  Probe
aaagcaactgatgacatcattgtaa

SEQ ID NO: 355310 - DNA, 25 bp, Artificial
  Probe
cacaataacgccaagtatgcagtgt

SEQ ID NO: 355311 - DNA, 25 bp, Artificial
  Probe
agccagagtgtatgctctccctgaa

SEQ ID NO: 355312 - DNA, 25 bp, Artificial
  Probe
tgaagaccttgtggaagtaaaaccg

SEQ ID NO: 355313 - DNA, 25 bp, Artificial
  Probe
aagctgggtgccaacatgaaaaagt

SEQ ID NO: 355314 - DNA, 25 bp, Artificial
  Probe
catcattgtaaactgggtcaatgga

SEQ ID NO: 355315 - DNA, 25 bp, Artificial
  Probe
aggacaagacgatcagctccagttt

SEQ ID NO: 355316 - DNA, 25 bp, Artificial
  Probe
agaataggagccagagtgtatgctc

SEQ ID NO: 355317 - DNA, 25 bp, Artificial
  Probe
catacccaaagctgggtgccaacat

SEQ ID NO: 355318 - DNA, 25 bp, Artificial
  Probe
aaactgcaactatgcagttgaatta

SEQ ID NO: 355319 - DNA, 25 bp, Artificial
  Probe
ctatgaccttgtgaagactggaaat

SEQ ID NO: 355320 - DNA, 25 bp, Artificial
  Probe
ataggagccagagtgtatgctctcc

SEQ ID NO: 355321 - DNA, 25 bp, Artificial
  Probe
gttagaaaactgcaactatgcagtt

SEQ ID NO: 355322 - DNA, 25 bp, Artificial
  Probe
agacaagcacaataacgccaagtat

SEQ ID NO: 355323 - DNA, 25 bp, Artificial
  Probe
aagatggtcatgaccgtgtttgcct

SEQ ID NO: 355324 - DNA, 25 bp, Artificial
  Probe
cttctattcagagttttaaggacaa

SEQ ID NO: 355325 - DNA, 25 bp, Artificial
  Probe
tggtcatgaccgtgtttgcctgttt

SEQ ID NO: 355326 - DNA, 25 bp, Artificial
  Probe
accgaagatggtcatgaccgtgttt

SEQ ID NO: 355327 - DNA, 25 bp, Artificial
  Probe
attctccttggttggcattggagga

SEQ ID NO: 355328 - DNA, 25 bp, Artificial
  Probe
gaaagtcaacttctattcagagttt

SEQ ID NO: 355329 - DNA, 25 bp, Artificial
  Probe
gaatcaggctaaattctccttggtt

SEQ ID NO: 355330 - DNA, 25 bp, Artificial
  Probe
gctgggtgccaacatgaaaaagtta

SEQ ID NO: 355331 - DNA, 25 bp, Artificial
  Probe
ttgatgccatccagccaggctgcat

SEQ ID NO: 355332 - DNA, 25 bp, Artificial
  Probe
acaagcacaataacgccaagtatgc

SEQ ID NO: 355333 - DNA, 25 bp, Artificial
  Probe
gagtgtatgctctccctgaagacct

SEQ ID NO: 355334 - DNA, 25 bp, Artificial
  Probe
ttaactatgaccttgtgaagactgg

SEQ ID NO: 355335 - DNA, 25 bp, Artificial
  Probe
gtatgctctccctgaagaccttgtg

SEQ ID NO: 355336 - DNA, 25 bp, Artificial
  Probe
tgccatccagccaggctgcattaac

SEQ ID NO: 355337 - DNA, 25 bp, Artificial
  Probe
cctgtggactggagtaaagttaaca

SEQ ID NO: 355338 - DNA, 25 bp, Artificial
  Probe
tatacccttaatgttatggaagatc

SEQ ID NO: 355339 - DNA, 25 bp, Artificial
  Probe
caagtatgcagtgtcgatggctaga

SEQ ID NO: 355340 - DNA, 25 bp, Artificial
  Probe
ctccagtttggcagttgtggattta

SEQ ID NO: 355341 - DNA, 25 bp, Artificial
  Probe
ctgcaactatgcagttgaattaggg

SEQ ID NO: 355342 - DNA, 25 bp, Artificial
  Probe
ttaattgatgccatccagccaggct

SEQ ID NO: 355343 - DNA, 25 bp, Artificial
  Probe
gccaggctgcattaactatgacctt

SEQ ID NO: 355344 - DNA, 25 bp, Artificial
  Probe
cttggttggcattggaggacaagac

SEQ ID NO: 355345 - DNA, 25 bp, Artificial
  Probe
ttggctgtagtctggcagctgatga

SEQ ID NO: 355346 - DNA, 25 bp, Artificial
  Probe
tgatgggaacccaaccttgaccttg

SEQ ID NO: 355347 - DNA, 25 bp, Artificial
  Probe
caaccttgaccttggctgtagtctg

SEQ ID NO: 355348 - DNA, 25 bp, Artificial
  Probe
ctgtagtctggcagctgatgagaag

SEQ ID NO: 355349 - DNA, 25 bp, Artificial
  Probe
ctccatacccaaagctgggtgccaa

SEQ ID NO: 355350 - DNA, 25 bp, Artificial
  Probe
gagactcaaaacatacaaaggatgt

SEQ ID NO: 355351 - DNA, 25 bp, Artificial
  Probe
tgtcctcattgtgatgaccatacta

SEQ ID NO: 355352 - DNA, 25 bp, Artificial
  Probe
gggtctacatccatggattcaaaca

SEQ ID NO: 355353 - DNA, 25 bp, Artificial
  Probe
attgtgatgaccatactacctactg

SEQ ID NO: 355354 - DNA, 25 bp, Artificial
  Probe
gatgtttactgagcatgatcttttc

SEQ ID NO: 355355 - DNA, 25 bp, Artificial
  Probe
aaagggtctacatccatggattcaa

SEQ ID NO: 355356 - DNA, 25 bp, Artificial
  Probe
aagggtctacatccatggattcaaa

SEQ ID NO: 355357 - DNA, 25 bp, Artificial
  Probe
atgtttactgagcatgatcttttct

SEQ ID NO: 355358 - DNA, 25 bp, Artificial
  Probe
acaatttttgcatgaaagagactca

SEQ ID NO: 355359 - DNA, 25 bp, Artificial
  Probe
agggtctacatccatggattcaaac

SEQ ID NO: 355360 - DNA, 25 bp, Artificial
  Probe
tccagaaacctaacgttgttctaga

SEQ ID NO: 355361 - DNA, 25 bp, Artificial
  Probe
gaccatactacctactgtgttactg

SEQ ID NO: 355362 - DNA, 25 bp, Artificial
  Probe
ctaacgttgttctagaaggcaaagt

SEQ ID NO: 355363 - DNA, 25 bp, Artificial
  Probe
tgtttactgagcatgatcttttcta

SEQ ID NO: 355364 - DNA, 25 bp, Artificial
  Probe
agactcaaaacatacaaaggatgtt

SEQ ID NO: 355365 - DNA, 25 bp, Artificial
  Probe
ccaaaaagggtctacatccatggat

SEQ ID NO: 355366 - DNA, 25 bp, Artificial
  Probe
acccaaaaagggtctacatccatgg

SEQ ID NO: 355367 - DNA, 25 bp, Artificial
  Probe
tctactcggggcattgattagaata

SEQ ID NO: 355368 - DNA, 25 bp, Artificial
  Probe
taattactcatcatagaacatggtg

SEQ ID NO: 355369 - DNA, 25 bp, Artificial
  Probe
ttcaaccaatctactcggggcattg

SEQ ID NO: 355370 - DNA, 25 bp, Artificial
  Probe
aattactcatcatagaacatggtgg

SEQ ID NO: 355371 - DNA, 25 bp, Artificial
  Probe
tgtgatgaccatactacctactgtg

SEQ ID NO: 355372 - DNA, 25 bp, Artificial
  Probe
gtggtatatatccacacagcatttc

SEQ ID NO: 355373 - DNA, 25 bp, Artificial
  Probe
ctcatcatagaacatggtggtatat

SEQ ID NO: 355374 - DNA, 25 bp, Artificial
  Probe
gtttactgagcatgatcttttctac

SEQ ID NO: 355375 - DNA, 25 bp, Artificial
  Probe
tcaaccaatctactcggggcattga

SEQ ID NO: 355376 - DNA, 25 bp, Artificial
  Probe
actgagcatgatcttttctaccatg

SEQ ID NO: 355377 - DNA, 25 bp, Artificial
  Probe
actcatcatagaacatggtggtata

SEQ ID NO: 355378 - DNA, 25 bp, Artificial
  Probe
cctaacgttgttctagaaggcaaag

SEQ ID NO: 355379 - DNA, 25 bp, Artificial
  Probe
caaacaatttttgcatgaaagagac

SEQ ID NO: 355380 - DNA, 25 bp, Artificial
  Probe
ctactcggggcattgattagaatat

SEQ ID NO: 355381 - DNA, 25 bp, Artificial
  Probe
ttccagaaacctaacgttgttctag

SEQ ID NO: 355382 - DNA, 25 bp, Artificial
  Probe
caaccaatctactcggggcattgat

SEQ ID NO: 355383 - DNA, 25 bp, Artificial
  Probe
gatgaccatactacctactgtgtta

SEQ ID NO: 355384 - DNA, 25 bp, Artificial
  Probe
cagaaacctaacgttgttctagaag

SEQ ID NO: 355385 - DNA, 25 bp, Artificial
  Probe
tccttcaaccaatctactcggggca

SEQ ID NO: 355386 - DNA, 25 bp, Artificial
  Probe
ttccttcaaccaatctactcggggc

SEQ ID NO: 355387 - DNA, 25 bp, Artificial
  Probe
ggtctacatccatggattcaaacaa

SEQ ID NO: 355388 - DNA, 25 bp, Artificial
  Probe
caatttttgcatgaaagagactcaa

SEQ ID NO: 355389 - DNA, 25 bp, Artificial
  Probe
ctgagcatgatcttttctaccatga

SEQ ID NO: 355390 - DNA, 25 bp, Artificial
  Probe
gactcaaaacatacaaaggatgttt

SEQ ID NO: 355391 - DNA, 25 bp, Artificial
  Probe
gattccttcaaccaatctactcggg

SEQ ID NO: 355392 - DNA, 25 bp, Artificial
  Probe
tgatgaccatactacctactgtgtt

SEQ ID NO: 355393 - DNA, 25 bp, Artificial
  Probe
gagcatgatcttttctaccatgatt

SEQ ID NO: 355394 - DNA, 25 bp, Artificial
  Probe
attactcatcatagaacatggtggt

SEQ ID NO: 355395 - DNA, 25 bp, Artificial
  Probe
ttgtgatgaccatactacctactgt

SEQ ID NO: 355396 - DNA, 25 bp, Artificial
  Probe
aacctcaacctcagggaaggtgtag

SEQ ID NO: 355397 - DNA, 25 bp, Artificial
  Probe
gcaataaacctcaacctcagggaag

SEQ ID NO: 355398 - DNA, 25 bp, Artificial
  Probe
acatataggtgtttctaagactctg

SEQ ID NO: 355399 - DNA, 25 bp, Artificial
  Probe
ccaagccccctgttgtgacatatag

SEQ ID NO: 355400 - DNA, 25 bp, Artificial
  Probe
gaattcctcctggagaggatgagtg

SEQ ID NO: 355401 - DNA, 25 bp, Artificial
  Probe
gtgtttctaagactctgagctattt

SEQ ID NO: 355402 - DNA, 25 bp, Artificial
  Probe
ttctcagttggttggcggcagttgt

SEQ ID NO: 355403 - DNA, 25 bp, Artificial
  Probe
taaatagaattcctcctggagagga

SEQ ID NO: 355404 - DNA, 25 bp, Artificial
  Probe
acactccatagactaggctgcccta

SEQ ID NO: 355405 - DNA, 25 bp, Artificial
  Probe
gactgtgtgtgctccgtgggaccca

SEQ ID NO: 355406 - DNA, 25 bp, Artificial
  Probe
gcgacacaggcttgggtgttagctt

SEQ ID NO: 355407 - DNA, 25 bp, Artificial
  Probe
aggatgagtgtccagcttggttctc

SEQ ID NO: 355408 - DNA, 25 bp, Artificial
  Probe
tcctcctggagaggatgagtgtcca

SEQ ID NO: 355409 - DNA, 25 bp, Artificial
  Probe
tagaattcctcctggagaggatgag

SEQ ID NO: 355410 - DNA, 25 bp, Artificial
  Probe
ctcctggagaggatgagtgtccagc

SEQ ID NO: 355411 - DNA, 25 bp, Artificial
  Probe
tgggcaataaacctcaacctcaggg

SEQ ID NO: 355412 - DNA, 25 bp, Artificial
  Probe
tgtccagcttggttctcagttggtt

SEQ ID NO: 355413 - DNA, 25 bp, Artificial
  Probe
agcgacacaggcttgggtgttagct

SEQ ID NO: 355414 - DNA, 25 bp, Artificial
  Probe
cagatttataaccatttgccagctg

SEQ ID NO: 355415 - DNA, 25 bp, Artificial
  Probe
accgcctggcagaggggcagattta

SEQ ID NO: 355416 - DNA, 25 bp, Artificial
  Probe
actcacactccatagactaggctgc

SEQ ID NO: 355417 - DNA, 25 bp, Artificial
  Probe
aggctacaagcgacacaggcttggg

SEQ ID NO: 355418 - DNA, 25 bp, Artificial
  Probe
taggtgtttctaagactctgagcta

SEQ ID NO: 355419 - DNA, 25 bp, Artificial
  Probe
cagcttggttctcagttggttggcg

SEQ ID NO: 355420 - DNA, 25 bp, Artificial
  Probe
cctgttgtgacatataggtgtttct

SEQ ID NO: 355421 - DNA, 25 bp, Artificial
  Probe
caataaacctcaacctcagggaagg

SEQ ID NO: 355422 - DNA, 25 bp, Artificial
  Probe
gatgagtgtccagcttggttctcag

SEQ ID NO: 355423 - DNA, 25 bp, Artificial
  Probe
cttggttctcagttggttggcggca

SEQ ID NO: 355424 - DNA, 25 bp, Artificial
  Probe
ccagcttggttctcagttggttggc

SEQ ID NO: 355425 - DNA, 25 bp, Artificial
  Probe
gcggcagttgtaaggccaggacatt

SEQ ID NO: 355426 - DNA, 25 bp, Artificial
  Probe
taaacctcaacctcagggaaggtgt

SEQ ID NO: 355427 - DNA, 25 bp, Artificial
  Probe
caccgcctggcagaggggcagattt

SEQ ID NO: 355428 - DNA, 25 bp, Artificial
  Probe
agccccctgttgtgacatataggtg

SEQ ID NO: 355429 - DNA, 25 bp, Artificial
  Probe
ggttcctaaatagaattcctcctgg

SEQ ID NO: 355430 - DNA, 25 bp, Artificial
  Probe
agtgtccagcttggttctcagttgg

SEQ ID NO: 355431 - DNA, 25 bp, Artificial
  Probe
aatagaattcctcctggagaggatg

SEQ ID NO: 355432 - DNA, 25 bp, Artificial
  Probe
attcctcctggagaggatgagtgtc

SEQ ID NO: 355433 - DNA, 25 bp, Artificial
  Probe
tgacatataggtgtttctaagactc

SEQ ID NO: 355434 - DNA, 25 bp, Artificial
  Probe
tacaagcgacacaggcttgggtgtt

SEQ ID NO: 355435 - DNA, 25 bp, Artificial
  Probe
tccagcttggttctcagttggttgg

SEQ ID NO: 355436 - DNA, 25 bp, Artificial
  Probe
gttcctaaatagaattcctcctgga

SEQ ID NO: 355437 - DNA, 25 bp, Artificial
  Probe
tcaacctcagggaaggtgtagtttg

SEQ ID NO: 355438 - DNA, 25 bp, Artificial
  Probe
ccatggaggctacaagcgacacagg

SEQ ID NO: 355439 - DNA, 25 bp, Artificial
  Probe
ccctgttgtgacatataggtgtttc

SEQ ID NO: 355440 - DNA, 25 bp, Artificial
  Probe
gtgtgtgctccgtgggacccaagcc

SEQ ID NO: 355441 - DNA, 25 bp, Artificial
  Probe
caacctcagggaaggtgtagtttga

SEQ ID NO: 355442 - DNA, 25 bp, Artificial
  Probe
tggtaccaacagttccagggacaaa

SEQ ID NO: 355443 - DNA, 25 bp, Artificial
  Probe
tctgtagttctggaaccgggacagg

SEQ ID NO: 355444 - DNA, 25 bp, Artificial
  Probe
ccgggacaggggtctatgaagccac

SEQ ID NO: 355445 - DNA, 25 bp, Artificial
  Probe
cgggacaggggtctatgaagccacc

SEQ ID NO: 355446 - DNA, 25 bp, Artificial
  Probe
accaggcttttggtaatagaggatc

SEQ ID NO: 355447 - DNA, 25 bp, Artificial
  Probe
ctgaagccacatacgagagtggatt

SEQ ID NO: 355448 - DNA, 25 bp, Artificial
  Probe
acagttccagggacaaaacttgatg

SEQ ID NO: 355449 - DNA, 25 bp, Artificial
  Probe
tcaaagtggaacttcactgaaaatc

SEQ ID NO: 355450 - DNA, 25 bp, Artificial
  Probe
cagggaccaggcttttggtaataga

SEQ ID NO: 355451 - DNA, 25 bp, Artificial
  Probe
gattctccagggaaaagtttccaat

SEQ ID NO: 355452 - DNA, 25 bp, Artificial
  Probe
taccaacagttccagggacaaaact

SEQ ID NO: 355453 - DNA, 25 bp, Artificial
  Probe
acatctgtcaaagtggaacttcact

SEQ ID NO: 355454 - DNA, 25 bp, Artificial
  Probe
gttccagggacaaaacttgatgctc

SEQ ID NO: 355455 - DNA, 25 bp, Artificial
  Probe
acaacgcaagacctgaagacagcag

SEQ ID NO: 355456 - DNA, 25 bp, Artificial
  Probe
acttgatgctcatggcaactgcaaa

SEQ ID NO: 355457 - DNA, 25 bp, Artificial
  Probe
atggcaactgcaaatgaaggctctg

SEQ ID NO: 355458 - DNA, 25 bp, Artificial
  Probe
gacaaaacttgatgctcatggcaac

SEQ ID NO: 355459 - DNA, 25 bp, Artificial
  Probe
ttctccacactgacagtgaacaacg

SEQ ID NO: 355460 - DNA, 25 bp, Artificial
  Probe
ccacatacgagagtggattctccag

SEQ ID NO: 355461 - DNA, 25 bp, Artificial
  Probe
ggctctgaagccacatacgagagtg

SEQ ID NO: 355462 - DNA, 25 bp, Artificial
  Probe
tcaagttgctttgatgttctggtac

SEQ ID NO: 355463 - DNA, 25 bp, Artificial
  Probe
aagccacatacgagagtggattctc

SEQ ID NO: 355464 - DNA, 25 bp, Artificial
  Probe
tgctcatggcaactgcaaatgaagg

SEQ ID NO: 355465 - DNA, 25 bp, Artificial
  Probe
aagtggaacttcactgaaaatccag

SEQ ID NO: 355466 - DNA, 25 bp, Artificial
  Probe
gtctatgaagccaccttcggcccag

SEQ ID NO: 355467 - DNA, 25 bp, Artificial
  Probe
gacagcagtgtctatttctgtagtt

SEQ ID NO: 355468 - DNA, 25 bp, Artificial
  Probe
ttctccagggaaaagtttccaatca

SEQ ID NO: 355469 - DNA, 25 bp, Artificial
  Probe
tttctgtagttctggaaccgggaca

SEQ ID NO: 355470 - DNA, 25 bp, Artificial
  Probe
aaacttgatgctcatggcaactgca

SEQ ID NO: 355471 - DNA, 25 bp, Artificial
  Probe
tatttctgtagttctggaaccggga

SEQ ID NO: 355472 - DNA, 25 bp, Artificial
  Probe
tcggcccagggaccaggcttttggt

SEQ ID NO: 355473 - DNA, 25 bp, Artificial
  Probe
gatgctcatggcaactgcaaatgaa

SEQ ID NO: 355474 - DNA, 25 bp, Artificial
  Probe
ttcggcccagggaccaggcttttgg

SEQ ID NO: 355475 - DNA, 25 bp, Artificial
  Probe
cagtgtctatttctgtagttctgga

SEQ ID NO: 355476 - DNA, 25 bp, Artificial
  Probe
tgaaggctctgaagccacatacgag

SEQ ID NO: 355477 - DNA, 25 bp, Artificial
  Probe
ttgatgttctggtaccaacagttcc

SEQ ID NO: 355478 - DNA, 25 bp, Artificial
  Probe
atgaagccaccttcggcccagggac

SEQ ID NO: 355479 - DNA, 25 bp, Artificial
  Probe
ctgacagtgaacaacgcaagacctg

SEQ ID NO: 355480 - DNA, 25 bp, Artificial
  Probe
tggaacttcactgaaaatccagtgt

SEQ ID NO: 355481 - DNA, 25 bp, Artificial
  Probe
caaatgaaggctctgaagccacata

SEQ ID NO: 355482 - DNA, 25 bp, Artificial
  Probe
caactgcaaatgaaggctctgaagc

SEQ ID NO: 355483 - DNA, 25 bp, Artificial
  Probe
tacgagagtggattctccagggaaa

SEQ ID NO: 355484 - DNA, 25 bp, Artificial
  Probe
caagacctgaagacagcagtgtcta

SEQ ID NO: 355485 - DNA, 25 bp, Artificial
  Probe
aactgcaaatgaaggctctgaagcc

SEQ ID NO: 355486 - DNA, 25 bp, Artificial
  Probe
cactgaaaatccagtgtgttgttga

SEQ ID NO: 355487 - DNA, 25 bp, Artificial
  Probe
cgagagtggattctccagggaaaag

SEQ ID NO: 355488 - DNA, 25 bp, Artificial
  Probe
actcaccagtgtttgcattgtgacc

SEQ ID NO: 355489 - DNA, 25 bp, Artificial
  Probe
ttctctcggttcatacaaaggacct

SEQ ID NO: 355490 - DNA, 25 bp, Artificial
  Probe
attctctcggttcatacaaaggacc

SEQ ID NO: 355491 - DNA, 25 bp, Artificial
  Probe
tctctcggttcatacaaaggacctt

SEQ ID NO: 355492 - DNA, 25 bp, Artificial
  Probe
tcatacaaaggaccttccatttagg

SEQ ID NO: 355493 - DNA, 25 bp, Artificial
  Probe
ggttcatacaaaggaccttccattt

SEQ ID NO: 355494 - DNA, 25 bp, Artificial
  Probe
attgcagatccgtttgtactaagtc

SEQ ID NO: 355495 - DNA, 25 bp, Artificial
  Probe
gtgtttgcattgtgaccacaagagt

SEQ ID NO: 355496 - DNA, 25 bp, Artificial
  Probe
ttgcagatccgtttgtactaagtcg

SEQ ID NO: 355497 - DNA, 25 bp, Artificial
  Probe
aaactcaccagtgtttgcattgtga

SEQ ID NO: 355498 - DNA, 25 bp, Artificial
  Probe
aagattgcagatccgtttgtactaa

SEQ ID NO: 355499 - DNA, 25 bp, Artificial
  Probe
gcaaaactcaccagtgtttgcattg

SEQ ID NO: 355500 - DNA, 25 bp, Artificial
  Probe
gcgataaaggctttcacaggccttc

SEQ ID NO: 355501 - DNA, 25 bp, Artificial
  Probe
ctcggttcatacaaaggaccttcca

SEQ ID NO: 355502 - DNA, 25 bp, Artificial
  Probe
accagtgtttgcattgtgaccacaa

SEQ ID NO: 355503 - DNA, 25 bp, Artificial
  Probe
tcaccagtgtttgcattgtgaccac

SEQ ID NO: 355504 - DNA, 25 bp, Artificial
  Probe
ctcaccagtgtttgcattgtgacca

SEQ ID NO: 355505 - DNA, 25 bp, Artificial
  Probe
tttgcattgtgaccacaagagttca

SEQ ID NO: 355506 - DNA, 25 bp, Artificial
  Probe
gctcttatccatcaagagagcaaaa

SEQ ID NO: 355507 - DNA, 25 bp, Artificial
  Probe
gaaacatgtggctgcccacaagggt

SEQ ID NO: 355508 - DNA, 25 bp, Artificial
  Probe
agagagcaaaactcaccagtgtttg

SEQ ID NO: 355509 - DNA, 25 bp, Artificial
  Probe
gagagcaaaactcaccagtgtttgc

SEQ ID NO: 355510 - DNA, 25 bp, Artificial
  Probe
agtgtttgcattgtgaccacaagag

SEQ ID NO: 355511 - DNA, 25 bp, Artificial
  Probe
caccagtgtttgcattgtgaccaca

SEQ ID NO: 355512 - DNA, 25 bp, Artificial
  Probe
cgataaaggctttcacaggccttca

SEQ ID NO: 355513 - DNA, 25 bp, Artificial
  Probe
gtttgcattgtgaccacaagagttc

SEQ ID NO: 355514 - DNA, 25 bp, Artificial
  Probe
ctctcggttcatacaaaggaccttc

SEQ ID NO: 355515 - DNA, 25 bp, Artificial
  Probe
ctttaagattgcagatccgtttgta

SEQ ID NO: 355516 - DNA, 25 bp, Artificial
  Probe
tacaaaggaccttccatttaggtgt

SEQ ID NO: 355517 - DNA, 25 bp, Artificial
  Probe
cggttcatacaaaggaccttccatt

SEQ ID NO: 355518 - DNA, 25 bp, Artificial
  Probe
aactcaccagtgtttgcattgtgac

SEQ ID NO: 355519 - DNA, 25 bp, Artificial
  Probe
tgtttgcattgtgaccacaagagtt

SEQ ID NO: 355520 - DNA, 25 bp, Artificial
  Probe
tttaagattgcagatccgtttgtac

SEQ ID NO: 355521 - DNA, 25 bp, Artificial
  Probe
cagtgtttgcattgtgaccacaaga

SEQ ID NO: 355522 - DNA, 25 bp, Artificial
  Probe
agagcaaaactcaccagtgtttgca

SEQ ID NO: 355523 - DNA, 25 bp, Artificial
  Probe
gcattgtgaccacaagagttcaaac

SEQ ID NO: 355524 - DNA, 25 bp, Artificial
  Probe
ccagtgtttgcattgtgaccacaag

SEQ ID NO: 355525 - DNA, 25 bp, Artificial
  Probe
ttcatacaaaggaccttccatttag

SEQ ID NO: 355526 - DNA, 25 bp, Artificial
  Probe
ggtgcaacaacatgctcttatccat

SEQ ID NO: 355527 - DNA, 25 bp, Artificial
  Probe
taagattgcagatccgtttgtacta

SEQ ID NO: 355528 - DNA, 25 bp, Artificial
  Probe
tgcgataaaggctttcacaggcctt

SEQ ID NO: 355529 - DNA, 25 bp, Artificial
  Probe
taagtgtgacatgtgcgataaaggc

SEQ ID NO: 355530 - DNA, 25 bp, Artificial
  Probe
tgcattgtgaccacaagagttcaaa

SEQ ID NO: 355531 - DNA, 25 bp, Artificial
  Probe
ttaagattgcagatccgtttgtact

SEQ ID NO: 355532 - DNA, 25 bp, Artificial
  Probe
aagagagcaaaactcaccagtgttt

SEQ ID NO: 355533 - DNA, 25 bp, Artificial
  Probe
ttgcattgtgaccacaagagttcaa

SEQ ID NO: 355534 - DNA, 25 bp, Artificial
  Probe
catcctgtcatgctgggccttcatt

SEQ ID NO: 355535 - DNA, 25 bp, Artificial
  Probe
gacatgaatggctttgaggggctct

SEQ ID NO: 355536 - DNA, 25 bp, Artificial
  Probe
gccttcatttgatctgggacatagc

SEQ ID NO: 355537 - DNA, 25 bp, Artificial
  Probe
gctgtaggccccaggttccctagca

SEQ ID NO: 355538 - DNA, 25 bp, Artificial
  Probe
gtgtattctggttgacacaccatgg

SEQ ID NO: 355539 - DNA, 25 bp, Artificial
  Probe
atcctgtcatgctgggccttcattt

SEQ ID NO: 355540 - DNA, 25 bp, Artificial
  Probe
attgttacttgtagcggcctgttgt

SEQ ID NO: 355541 - DNA, 25 bp, Artificial
  Probe
tggttgacacaccatggcgcttccc

SEQ ID NO: 355542 - DNA, 25 bp, Artificial
  Probe
caactgtgttctgttagttatcaat

SEQ ID NO: 355543 - DNA, 25 bp, Artificial
  Probe
ccaaagggccaaaggctggtggatc

SEQ ID NO: 355544 - DNA, 25 bp, Artificial
  Probe
cttgtagcggcctgttgtgcatgcc

SEQ ID NO: 355545 - DNA, 25 bp, Artificial
  Probe
ccctgctggggatcatcctgtcatg

SEQ ID NO: 355546 - DNA, 25 bp, Artificial
  Probe
ccctgtgacatgaatggctttgagg

SEQ ID NO: 355547 - DNA, 25 bp, Artificial
  Probe
ggctttgtgtattctggttgacaca

SEQ ID NO: 355548 - DNA, 25 bp, Artificial
  Probe
tttgtgtattctggttgacacacca

SEQ ID NO: 355549 - DNA, 25 bp, Artificial
  Probe
ccgcaatgctgtaggccccaggttc

SEQ ID NO: 355550 - DNA, 25 bp, Artificial
  Probe
tcccaaccaggcaggacccttgagg

SEQ ID NO: 355551 - DNA, 25 bp, Artificial
  Probe
taatgtaaagccagccgcaatgctg

SEQ ID NO: 355552 - DNA, 25 bp, Artificial
  Probe
tattctggttgacacaccatggcgc

SEQ ID NO: 355553 - DNA, 25 bp, Artificial
  Probe
ctgctggggatcatcctgtcatgct

SEQ ID NO: 355554 - DNA, 25 bp, Artificial
  Probe
ctggttgacacaccatggcgcttcc

SEQ ID NO: 355555 - DNA, 25 bp, Artificial
  Probe
tgctggggatcatcctgtcatgctg

SEQ ID NO: 355556 - DNA, 25 bp, Artificial
  Probe
atcaatattgttacttgtagcggcc

SEQ ID NO: 355557 - DNA, 25 bp, Artificial
  Probe
gtattctggttgacacaccatggcg

SEQ ID NO: 355558 - DNA, 25 bp, Artificial
  Probe
tgaggcgtcccaaccaggcaggacc

SEQ ID NO: 355559 - DNA, 25 bp, Artificial
  Probe
gccgcaatgctgtaggccccaggtt

SEQ ID NO: 355560 - DNA, 25 bp, Artificial
  Probe
atcatcctgtcatgctgggccttca

SEQ ID NO: 355561 - DNA, 25 bp, Artificial
  Probe
gggatcatcctgtcatgctgggcct

SEQ ID NO: 355562 - DNA, 25 bp, Artificial
  Probe
cctgtgacatgaatggctttgaggg

SEQ ID NO: 355563 - DNA, 25 bp, Artificial
  Probe
ggttgacacaccatggcgcttccca

SEQ ID NO: 355564 - DNA, 25 bp, Artificial
  Probe
tgccctgtgacatgaatggctttga

SEQ ID NO: 355565 - DNA, 25 bp, Artificial
  Probe
tgggccttcatttgatctgggacat

SEQ ID NO: 355566 - DNA, 25 bp, Artificial
  Probe
taggccccaggttccctagcaagct

SEQ ID NO: 355567 - DNA, 25 bp, Artificial
  Probe
caaccaggcaggacccttgagggct

SEQ ID NO: 355568 - DNA, 25 bp, Artificial
  Probe
tcatgctgggccttcatttgatctg

SEQ ID NO: 355569 - DNA, 25 bp, Artificial
  Probe
aagccagccgcaatgctgtaggccc

SEQ ID NO: 355570 - DNA, 25 bp, Artificial
  Probe
tgctgggccttcatttgatctggga

SEQ ID NO: 355571 - DNA, 25 bp, Artificial
  Probe
acatgaatggctttgaggggctctg

SEQ ID NO: 355572 - DNA, 25 bp, Artificial
  Probe
tggctttgtgtattctggttgacac

SEQ ID NO: 355573 - DNA, 25 bp, Artificial
  Probe
aaagccagccgcaatgctgtaggcc

SEQ ID NO: 355574 - DNA, 25 bp, Artificial
  Probe
aatattgttacttgtagcggcctgt

SEQ ID NO: 355575 - DNA, 25 bp, Artificial
  Probe
caatattgttacttgtagcggcctg

SEQ ID NO: 355576 - DNA, 25 bp, Artificial
  Probe
cagccgcaatgctgtaggccccagg

SEQ ID NO: 355577 - DNA, 25 bp, Artificial
  Probe
tatcaatattgttacttgtagcggc

SEQ ID NO: 355578 - DNA, 25 bp, Artificial
  Probe
cttcatttgatctgggacatagcat

SEQ ID NO: 355579 - DNA, 25 bp, Artificial
  Probe
ccaaccaggcaggacccttgagggc

SEQ ID NO: 355580 - DNA, 25 bp, Artificial
  Probe
tcagggcacaatatggccaccagag

SEQ ID NO: 355581 - DNA, 25 bp, Artificial
  Probe
catactgctttcattctgatgactg

SEQ ID NO: 355582 - DNA, 25 bp, Artificial
  Probe
agagtgaccaggaactcagctacct

SEQ ID NO: 355583 - DNA, 25 bp, Artificial
  Probe
cagcacactcagtccctggaagttc

SEQ ID NO: 355584 - DNA, 25 bp, Artificial
  Probe
ccaggcgtgcaagcagaactcgcac

SEQ ID NO: 355585 - DNA, 25 bp, Artificial
  Probe
taagctcccagctgcgggcagtcct

SEQ ID NO: 355586 - DNA, 25 bp, Artificial
  Probe
tgcaagcagaactcgcacagccatg

SEQ ID NO: 355587 - DNA, 25 bp, Artificial
  Probe
agctcgagagtgaccaggaactcag

SEQ ID NO: 355588 - DNA, 25 bp, Artificial
  Probe
ctgatgactgcctcagggcacaata

SEQ ID NO: 355589 - DNA, 25 bp, Artificial
  Probe
cattctgatgactgcctcagggcac

SEQ ID NO: 355590 - DNA, 25 bp, Artificial
  Probe
ccagctgcgggcagtcctctaggct

SEQ ID NO: 355591 - DNA, 25 bp, Artificial
  Probe
tggccaccagagctccagacctggt

SEQ ID NO: 355592 - DNA, 25 bp, Artificial
  Probe
cacaatatggccaccagagctccag

SEQ ID NO: 355593 - DNA, 25 bp, Artificial
  Probe
tcactggatcagctcgagagtgacc

SEQ ID NO: 355594 - DNA, 25 bp, Artificial
  Probe
tacattccaggcagaagaaaagagg

SEQ ID NO: 355595 - DNA, 25 bp, Artificial
  Probe
cagagctccagacctggtgactaca

SEQ ID NO: 355596 - DNA, 25 bp, Artificial
  Probe
agtcctctaggctgtcctaaggaga

SEQ ID NO: 355597 - DNA, 25 bp, Artificial
  Probe
gaaatcccagaaactcatgaagttc

SEQ ID NO: 355598 - DNA, 25 bp, Artificial
  Probe
tctccaagttccaggcgtgcaagca

SEQ ID NO: 355599 - DNA, 25 bp, Artificial
  Probe
ggatcagctcgagagtgaccaggaa

SEQ ID NO: 355600 - DNA, 25 bp, Artificial
  Probe
atgaagttctatttatctttccggc

SEQ ID NO: 355601 - DNA, 25 bp, Artificial
  Probe
tggaagttcagagtcactggatcag

SEQ ID NO: 355602 - DNA, 25 bp, Artificial
  Probe
tgaagttctatttatctttccggcc

SEQ ID NO: 355603 - DNA, 25 bp, Artificial
  Probe
tccctggaagttcagagtcactgga

SEQ ID NO: 355604 - DNA, 25 bp, Artificial
  Probe
agcccttagacgatctgccctctaa

SEQ ID NO: 355605 - DNA, 25 bp, Artificial
  Probe
ccctttatcatatggcaaagagaga

SEQ ID NO: 355606 - DNA, 25 bp, Artificial
  Probe
gggggcaactcaacagccagccctt

SEQ ID NO: 355607 - DNA, 25 bp, Artificial
  Probe
ctaaggagatctccaagttccaggc

SEQ ID NO: 355608 - DNA, 25 bp, Artificial
  Probe
accagagctccagacctggtgacta

SEQ ID NO: 355609 - DNA, 25 bp, Artificial
  Probe
aggcgtgcaagcagaactcgcacag

SEQ ID NO: 355610 - DNA, 25 bp, Artificial
  Probe
aacagccagcccttagacgatctgc

SEQ ID NO: 355611 - DNA, 25 bp, Artificial
  Probe
ctgcctcagggcacaatatggccac

SEQ ID NO: 355612 - DNA, 25 bp, Artificial
  Probe
gggcaactcaacagccagcccttag

SEQ ID NO: 355613 - DNA, 25 bp, Artificial
  Probe
acagccatgcgacagcacactcagt

SEQ ID NO: 355614 - DNA, 25 bp, Artificial
  Probe
ggccccctttatcatatggcaaaga

SEQ ID NO: 355615 - DNA, 25 bp, Artificial
  Probe
agcagaactcgcacagccatgcgac

SEQ ID NO: 355616 - DNA, 25 bp, Artificial
  Probe
cagaactcgcacagccatgcgacag

SEQ ID NO: 355617 - DNA, 25 bp, Artificial
  Probe
atgcgacagcacactcagtccctgg

SEQ ID NO: 355618 - DNA, 25 bp, Artificial
  Probe
gggcagtcctctaggctgtcctaag

SEQ ID NO: 355619 - DNA, 25 bp, Artificial
  Probe
gaactcagctaccttgtcgtatctc

SEQ ID NO: 355620 - DNA, 25 bp, Artificial
  Probe
gatgactgcctcagggcacaatatg

SEQ ID NO: 355621 - DNA, 25 bp, Artificial
  Probe
aagttccaggcgtgcaagcagaact

SEQ ID NO: 355622 - DNA, 25 bp, Artificial
  Probe
tagaaatcccagaaactcatgaagt

SEQ ID NO: 355623 - DNA, 25 bp, Artificial
  Probe
ctagaaatcccagaaactcatgaag

SEQ ID NO: 355624 - DNA, 25 bp, Artificial
  Probe
acactcagtccctggaagttcagag

SEQ ID NO: 355625 - DNA, 25 bp, Artificial
  Probe
gtgactacattccaggcagaagaaa

SEQ ID NO: 355626 - DNA, 25 bp, Artificial
  Probe
tggcactggccgtcgttttacaacg

SEQ ID NO: 355627 - DNA, 25 bp, Artificial
  Probe
tttagcttggcactggccgtcgttt

SEQ ID NO: 355628 - DNA, 25 bp, Artificial
  Probe
ggcggccgcaagcttattcccttta

SEQ ID NO: 355629 - DNA, 25 bp, Artificial
  Probe
gacggttgcttgaacttcattgagg

SEQ ID NO: 355630 - DNA, 25 bp, Artificial
  Probe
gtgcagctcattaagaacggcaaga

SEQ ID NO: 355631 - DNA, 25 bp, Artificial
  Probe
ggtgcagctcattaagaacggcaag

SEQ ID NO: 355632 - DNA, 25 bp, Artificial
  Probe
cggttgcttgaacttcattgaggaa

SEQ ID NO: 355633 - DNA, 25 bp, Artificial
  Probe
atgacggttgcttgaacttcattga

SEQ ID NO: 355634 - DNA, 25 bp, Artificial
  Probe
ggcactggccgtcgttttacaacgt

SEQ ID NO: 355635 - DNA, 25 bp, Artificial
  Probe
cagctcattaagaacggcaagaaga

SEQ ID NO: 355636 - DNA, 25 bp, Artificial
  Probe
gcccaatgacggttgcttgaacttc

SEQ ID NO: 355637 - DNA, 25 bp, Artificial
  Probe
cttttggctctgtacaaaggcaaga

SEQ ID NO: 355638 - DNA, 25 bp, Artificial
  Probe
ttagcttggcactggccgtcgtttt

SEQ ID NO: 355639 - DNA, 25 bp, Artificial
  Probe
aatggcggccgcaagcttattccct

SEQ ID NO: 355640 - DNA, 25 bp, Artificial
  Probe
gcagctcattaagaacggcaagaag

SEQ ID NO: 355641 - DNA, 25 bp, Artificial
  Probe
acggttgcttgaacttcattgagga

SEQ ID NO: 355642 - DNA, 25 bp, Artificial
  Probe
gccgcaagcttattccctttagtga

SEQ ID NO: 355643 - DNA, 25 bp, Artificial
  Probe
ccaatgacggttgcttgaacttcat

SEQ ID NO: 355644 - DNA, 25 bp, Artificial
  Probe
tcgtgcccaatgacggttgcttgaa

SEQ ID NO: 355645 - DNA, 25 bp, Artificial
  Probe
cggccgcaagcttattccctttagt

SEQ ID NO: 355646 - DNA, 25 bp, Artificial
  Probe
tcttttggctctgtacaaaggcaag

SEQ ID NO: 355647 - DNA, 25 bp, Artificial
  Probe
ttcgtgcccaatgacggttgcttga

SEQ ID NO: 355648 - DNA, 25 bp, Artificial
  Probe
ggccgcaagcttattccctttagtg

SEQ ID NO: 355649 - DNA, 25 bp, Artificial
  Probe
atggcggccgcaagcttattccctt

SEQ ID NO: 355650 - DNA, 25 bp, Artificial
  Probe
tgcagctcattaagaacggcaagaa

SEQ ID NO: 355651 - DNA, 25 bp, Artificial
  Probe
tggcggccgcaagcttattcccttt

SEQ ID NO: 355652 - DNA, 25 bp, Artificial
  Probe
ttttagcttggcactggccgtcgtt

SEQ ID NO: 355653 - DNA, 25 bp, Artificial
  Probe
ggggtgcctctcacgcaaagggaat

SEQ ID NO: 355654 - DNA, 25 bp, Artificial
  Probe
gcggccgcaagcttattccctttag

SEQ ID NO: 355655 - DNA, 25 bp, Artificial
  Probe
cccaatgacggttgcttgaacttca

SEQ ID NO: 355656 - DNA, 25 bp, Artificial
  Probe
tgacggttgcttgaacttcattgag

SEQ ID NO: 355657 - DNA, 25 bp, Artificial
  Probe
agctcattaagaacggcaagaagat

SEQ ID NO: 355658 - DNA, 25 bp, Artificial
  Probe
ccgcaagcttattccctttagtgag

SEQ ID NO: 355659 - DNA, 25 bp, Artificial
  Probe
agatcattgatgatcacagagctgg

SEQ ID NO: 355660 - DNA, 25 bp, Artificial
  Probe
tgtggagtcccgagtgtcccacgcg

SEQ ID NO: 355661 - DNA, 25 bp, Artificial
  Probe
gccctgcagcttctcgtgtctgcgg

SEQ ID NO: 355662 - DNA, 25 bp, Artificial
  Probe
gcagcttctcgtgtctgcgggtgct

SEQ ID NO: 355663 - DNA, 25 bp, Artificial
  Probe
tgctctcaagagcatcaacaacgcg

SEQ ID NO: 355664 - DNA, 25 bp, Artificial
  Probe
tccaaagtcatcgttcggttcctaa

SEQ ID NO: 355665 - DNA, 25 bp, Artificial
  Probe
aacgccaggtcctcatcaggccgtg

SEQ ID NO: 355666 - DNA, 25 bp, Artificial
  Probe
ggccgtgttccaaagtcatcgttcg

SEQ ID NO: 355667 - DNA, 25 bp, Artificial
  Probe
aattcgagatcattgatgatcacag

SEQ ID NO: 355668 - DNA, 25 bp, Artificial
  Probe
attgttgtgaacctcacaggaaggt

SEQ ID NO: 355669 - DNA, 25 bp, Artificial
  Probe
agcttctcgtgtctgcgggtgctgt

SEQ ID NO: 355670 - DNA, 25 bp, Artificial
  Probe
ctctcaagagcatcaacaacgcgga

SEQ ID NO: 355671 - DNA, 25 bp, Artificial
  Probe
caaagtcatcgttcggttcctaact

SEQ ID NO: 355672 - DNA, 25 bp, Artificial
  Probe
ggcaaacgccaggtcctcatcaggc

SEQ ID NO: 355673 - DNA, 25 bp, Artificial
  Probe
gctacattggtgaattcgagatcat

SEQ ID NO: 355674 - DNA, 25 bp, Artificial
  Probe
cctcacaggaaggttgaacaagtgt

SEQ ID NO: 355675 - DNA, 25 bp, Artificial
  Probe
atgctctcaagagcatcaacaacgc

SEQ ID NO: 355676 - DNA, 25 bp, Artificial
  Probe
ttccaaagtcatcgttcggttccta

SEQ ID NO: 355677 - DNA, 25 bp, Artificial
  Probe
aggccgtgttccaaagtcatcgttc

SEQ ID NO: 355678 - DNA, 25 bp, Artificial
  Probe
caggtcctcatcaggccgtgttcca

SEQ ID NO: 355679 - DNA, 25 bp, Artificial
  Probe
catcaggccgtgttccaaagtcatc

SEQ ID NO: 355680 - DNA, 25 bp, Artificial
  Probe
tcattgatgatcacagagctgggaa

SEQ ID NO: 355681 - DNA, 25 bp, Artificial
  Probe
aaagcctctgtggactgtgaaaaaa

SEQ ID NO: 355682 - DNA, 25 bp, Artificial
  Probe
gttgtgaacctcacaggaaggttga

SEQ ID NO: 355683 - DNA, 25 bp, Artificial
  Probe
ggccctgcagcttctcgtgtctgcg

SEQ ID NO: 355684 - DNA, 25 bp, Artificial
  Probe
tcacggcagtttggtttcattgtgc

SEQ ID NO: 355685 - DNA, 25 bp, Artificial
  Probe
tgaattcgagatcattgatgatcac

SEQ ID NO: 355686 - DNA, 25 bp, Artificial
  Probe
tgttgtgaacctcacaggaaggttg

SEQ ID NO: 355687 - DNA, 25 bp, Artificial
  Probe
gaagcatggctacattggtgaattc

SEQ ID NO: 355688 - DNA, 25 bp, Artificial
  Probe
ggggcaaacgccaggtcctcatcag

SEQ ID NO: 355689 - DNA, 25 bp, Artificial
  Probe
cacggcagtttggtttcattgtgct

SEQ ID NO: 355690 - DNA, 25 bp, Artificial
  Probe
aaacgccaggtcctcatcaggccgt

SEQ ID NO: 355691 - DNA, 25 bp, Artificial
  Probe
ctcatcaggccgtgttccaaagtca

SEQ ID NO: 355692 - DNA, 25 bp, Artificial
  Probe
cctgcagcttctcgtgtctgcgggt

SEQ ID NO: 355693 - DNA, 25 bp, Artificial
  Probe
gcgtgggccctgcagcttctcgtgt

SEQ ID NO: 355694 - DNA, 25 bp, Artificial
  Probe
ctacattggtgaattcgagatcatt

SEQ ID NO: 355695 - DNA, 25 bp, Artificial
  Probe
caggccgtgttccaaagtcatcgtt

SEQ ID NO: 355696 - DNA, 25 bp, Artificial
  Probe
tggctacattggtgaattcgagatc

SEQ ID NO: 355697 - DNA, 25 bp, Artificial
  Probe
catggctacattggtgaattcgaga

SEQ ID NO: 355698 - DNA, 25 bp, Artificial
  Probe
aagcatggctacattggtgaattcg

SEQ ID NO: 355699 - DNA, 25 bp, Artificial
  Probe
tgtgaacctcacaggaaggttgaac

SEQ ID NO: 355700 - DNA, 25 bp, Artificial
  Probe
tggagtcccgagtgtcccacgcggc

SEQ ID NO: 355701 - DNA, 25 bp, Artificial
  Probe
acctcacaggaaggttgaacaagtg

SEQ ID NO: 355702 - DNA, 25 bp, Artificial
  Probe
gttccaaagtcatcgttcggttcct

SEQ ID NO: 355703 - DNA, 25 bp, Artificial
  Probe
gtgggccctgcagcttctcgtgtct

SEQ ID NO: 355704 - DNA, 25 bp, Artificial
  Probe
gccaggtcctcatcaggccgtgttc

SEQ ID NO: 355705 - DNA, 25 bp, Artificial
  Probe
ctcagcgctgcgaagcaatcagttg

SEQ ID NO: 355706 - DNA, 25 bp, Artificial
  Probe
ctcacgtgggccagggctgcaagtt

SEQ ID NO: 355707 - DNA, 25 bp, Artificial
  Probe
atacacacgggcaaggaagtgattt

SEQ ID NO: 355708 - DNA, 25 bp, Artificial
  Probe
caccctgaccacgataggttccatg

SEQ ID NO: 355709 - DNA, 25 bp, Artificial
  Probe
gcccttggcttagatgcagcaccac

SEQ ID NO: 355710 - DNA, 25 bp, Artificial
  Probe
gattgacattgacgttggctttgac

SEQ ID NO: 355711 - DNA, 25 bp, Artificial
  Probe
gcagtggtgcccttgagcggcccta

SEQ ID NO: 355712 - DNA, 25 bp, Artificial
  Probe
cagcgccaaggacctggtggagaac

SEQ ID NO: 355713 - DNA, 25 bp, Artificial
  Probe
tggatcgtatcttcctagtatcgcc

SEQ ID NO: 355714 - DNA, 25 bp, Artificial
  Probe
catgttttcttgcaatagcttggga

SEQ ID NO: 355715 - DNA, 25 bp, Artificial
  Probe
ctcatcaagcccagggtcacagaag

SEQ ID NO: 355716 - DNA, 25 bp, Artificial
  Probe
ccacaagacctatgaggtgccatct

SEQ ID NO: 355717 - DNA, 25 bp, Artificial
  Probe
atttgggcaagactgtttacaaaca

SEQ ID NO: 355718 - DNA, 25 bp, Artificial
  Probe
ccagtgctcttcgaagagaagaacc

SEQ ID NO: 355719 - DNA, 25 bp, Artificial
  Probe
aatgagctagccttcctgagccgag

SEQ ID NO: 355720 - DNA, 25 bp, Artificial
  Probe
atgaccagctcatggcctcggaggc

SEQ ID NO: 355721 - DNA, 25 bp, Artificial
  Probe
cttgcaatagcttgggaaagttggc

SEQ ID NO: 355722 - DNA, 25 bp, Artificial
  Probe
gagcccagctcatcaagcccagggt

SEQ ID NO: 355723 - DNA, 25 bp, Artificial
  Probe
gtgctcttcgaagagaagaaccagt

SEQ ID NO: 355724 - DNA, 25 bp, Artificial
  Probe
cttgagcggccctacagacgggagt

SEQ ID NO: 355725 - DNA, 25 bp, Artificial
  Probe
gcccatcaccatcttgcacgagatt

SEQ ID NO: 355726 - DNA, 25 bp, Artificial
  Probe
agacctatgaggtgccatctacacc

SEQ ID NO: 355727 - DNA, 25 bp, Artificial
  Probe
attgatgaggccagcccactgtttg

SEQ ID NO: 355728 - DNA, 25 bp, Artificial
  Probe
actggaccagattgacattgacgtt

SEQ ID NO: 355729 - DNA, 25 bp, Artificial
  Probe
cagccctcagcctgagcatgacttt

SEQ ID NO: 355730 - DNA, 25 bp, Artificial
  Probe
cttgcacgagattgatgaggccagc

SEQ ID NO: 355731 - DNA, 25 bp, Artificial
  Probe
tctttctgctatgagaatgagctag

SEQ ID NO: 355732 - DNA, 25 bp, Artificial
  Probe
tttgggcaagactgtttacaaacaa

SEQ ID NO: 355733 - DNA, 25 bp, Artificial
  Probe
caggacctcgagacggacgactttg

SEQ ID NO: 355734 - DNA, 25 bp, Artificial
  Probe
acaagttccttctgcccagtgccaa

SEQ ID NO: 355735 - DNA, 25 bp, Artificial
  Probe
cttcctgagccgagatgaggaggat

SEQ ID NO: 355736 - DNA, 25 bp, Artificial
  Probe
ctacagacgggagtcagagatttga

SEQ ID NO: 355737 - DNA, 25 bp, Artificial
  Probe
tcagcgctgcgaagcaatcagttgt

SEQ ID NO: 355738 - DNA, 25 bp, Artificial
  Probe
agaaccagtacaagattgactactc

SEQ ID NO: 355739 - DNA, 25 bp, Artificial
  Probe
tgggccagggctgcaagttgtcatt

SEQ ID NO: 355740 - DNA, 25 bp, Artificial
  Probe
tgcccagtgccaactctttctgcta

SEQ ID NO: 355741 - DNA, 25 bp, Artificial
  Probe
cacaatgccgtggtggctctgcgtg

SEQ ID NO: 355742 - DNA, 25 bp, Artificial
  Probe
tacagaccgggatggccgcagccct

SEQ ID NO: 355743 - DNA, 25 bp, Artificial
  Probe
ggcctcggaggctgatgtatacaca

SEQ ID NO: 355744 - DNA, 25 bp, Artificial
  Probe
atcccactggaccagattgacattg

SEQ ID NO: 355745 - DNA, 25 bp, Artificial
  Probe
tggagaacaagttccttctgcccag

SEQ ID NO: 355746 - DNA, 25 bp, Artificial
  Probe
ctgtgtatgtacacttcattggttt

SEQ ID NO: 355747 - DNA, 25 bp, Artificial
  Probe
ttcatgttttcttgcaatagcttgg

SEQ ID NO: 355748 - DNA, 25 bp, Artificial
  Probe
gccagaatgaccagctcatggcctc

SEQ ID NO: 355749 - DNA, 25 bp, Artificial
  Probe
cagagatttgagtgcccttggctta

SEQ ID NO: 355750 - DNA, 25 bp, Artificial
  Probe
gtcacagactcagtaacatcttagt

SEQ ID NO: 355751 - DNA, 25 bp, Artificial
  Probe
aggagaccaatcttagcaagttggt

SEQ ID NO: 355752 - DNA, 25 bp, Artificial
  Probe
tctttttcggtatcccagctgtact

SEQ ID NO: 355753 - DNA, 25 bp, Artificial
  Probe
gtatgagtttcagtatcgcccaagc

SEQ ID NO: 355754 - DNA, 25 bp, Artificial
  Probe
gaatcttacagaggaaactgcacaa

SEQ ID NO: 355755 - DNA, 25 bp, Artificial
  Probe
tctctgccagcctcagtaccagagg

SEQ ID NO: 355756 - DNA, 25 bp, Artificial
  Probe
ccaatcttagcaagttggtgatgaa

SEQ ID NO: 355757 - DNA, 25 bp, Artificial
  Probe
aagttctgggccaactttgctcgaa

SEQ ID NO: 355758 - DNA, 25 bp, Artificial
  Probe
cagggagaccatggtgatgaaatct

SEQ ID NO: 355759 - DNA, 25 bp, Artificial
  Probe
atcttacagaggaaactgcacaatt

SEQ ID NO: 355760 - DNA, 25 bp, Artificial
  Probe
tagcctcagagatgccggagcgccc

SEQ ID NO: 355761 - DNA, 25 bp, Artificial
  Probe
gacagttcagggagaccatggtgat

SEQ ID NO: 355762 - DNA, 25 bp, Artificial
  Probe
agaagtggctttctggactgagctc

SEQ ID NO: 355763 - DNA, 25 bp, Artificial
  Probe
cagttcagggagaccatggtgatga

SEQ ID NO: 355764 - DNA, 25 bp, Artificial
  Probe
tcagggagaccatggtgatgaaatc

SEQ ID NO: 355765 - DNA, 25 bp, Artificial
  Probe
cccagacagttcagggagaccatgg

SEQ ID NO: 355766 - DNA, 25 bp, Artificial
  Probe
tcccagctgtactcatgtcccgtag

SEQ ID NO: 355767 - DNA, 25 bp, Artificial
  Probe
tcagtaccagaggagcaaagatggg

SEQ ID NO: 355768 - DNA, 25 bp, Artificial
  Probe
ctcatgtcccgtagcctcagagatg

SEQ ID NO: 355769 - DNA, 25 bp, Artificial
  Probe
ctttgctcgaaatgggaacccaaat

SEQ ID NO: 355770 - DNA, 25 bp, Artificial
  Probe
gtgatgaagttctgggccaactttg

SEQ ID NO: 355771 - DNA, 25 bp, Artificial
  Probe
atgaaatcttctctgtatttgggac

SEQ ID NO: 355772 - DNA, 25 bp, Artificial
  Probe
tgggtctctgccagcctcagtacca

SEQ ID NO: 355773 - DNA, 25 bp, Artificial
  Probe
caagcccagaaactgaaaggagaag

SEQ ID NO: 355774 - DNA, 25 bp, Artificial
  Probe
actcatgtcccgtagcctcagagat

SEQ ID NO: 355775 - DNA, 25 bp, Artificial
  Probe
cagctgtactcatgtcccgtagcct

SEQ ID NO: 355776 - DNA, 25 bp, Artificial
  Probe
tcagtatcgcccaagcttcgtgtct

SEQ ID NO: 355777 - DNA, 25 bp, Artificial
  Probe
ttccacaaaggatggctatttgcca

SEQ ID NO: 355778 - DNA, 25 bp, Artificial
  Probe
tggctatttgccaaagatgaatctt

SEQ ID NO: 355779 - DNA, 25 bp, Artificial
  Probe
ctacatgtatgagtttcagtatcgc

SEQ ID NO: 355780 - DNA, 25 bp, Artificial
  Probe
caactttgctcgaaatgggaaccca

SEQ ID NO: 355781 - DNA, 25 bp, Artificial
  Probe
tttcggtatcccagctgtactcatg

SEQ ID NO: 355782 - DNA, 25 bp, Artificial
  Probe
ggaaactgcacaattgtacagttgg

SEQ ID NO: 355783 - DNA, 25 bp, Artificial
  Probe
gctttctggactgagctcttggcta

SEQ ID NO: 355784 - DNA, 25 bp, Artificial
  Probe
gtctgaccagagaccccagacagtt

SEQ ID NO: 355785 - DNA, 25 bp, Artificial
  Probe
aagatggggctattccacaaaggat

SEQ ID NO: 355786 - DNA, 25 bp, Artificial
  Probe
tgtcccgtagcctcagagatgccgg

SEQ ID NO: 355787 - DNA, 25 bp, Artificial
  Probe
agggcgcctcagaagaggagaccaa

SEQ ID NO: 355788 - DNA, 25 bp, Artificial
  Probe
gcccacctacatgtatgagtttcag

SEQ ID NO: 355789 - DNA, 25 bp, Artificial
  Probe
tttgccaaagatgaatcttacagag

SEQ ID NO: 355790 - DNA, 25 bp, Artificial
  Probe
accagagaccccagacagttcaggg

SEQ ID NO: 355791 - DNA, 25 bp, Artificial
  Probe
cccagcaagcccagaaactgaaagg

SEQ ID NO: 355792 - DNA, 25 bp, Artificial
  Probe
tctgtatttgggactccatttttaa

SEQ ID NO: 355793 - DNA, 25 bp, Artificial
  Probe
tgagtttcagtatcgcccaagcttc

SEQ ID NO: 355794 - DNA, 25 bp, Artificial
  Probe
cgcctcagaagaggagaccaatctt

SEQ ID NO: 355795 - DNA, 25 bp, Artificial
  Probe
cttctctgtatttgggactccattt

SEQ ID NO: 355796 - DNA, 25 bp, Artificial
  Probe
gctgtactcatgtcccgtagcctca

SEQ ID NO: 355797 - DNA, 25 bp, Artificial
  Probe
catgccctacacttccatcccctga

SEQ ID NO: 355798 - DNA, 25 bp, Artificial
  Probe
cccctgacccagattagagccctcc

SEQ ID NO: 355799 - DNA, 25 bp, Artificial
  Probe
cccagattagagccctccttacagg

SEQ ID NO: 355800 - DNA, 25 bp, Artificial
  Probe
tcccctgacccagattagagccctc

SEQ ID NO: 355801 - DNA, 25 bp, Artificial
  Probe
agagctacatgccctacacttccat

SEQ ID NO: 355802 - DNA, 25 bp, Artificial
  Probe
gtccagagctacatgccctacactt

SEQ ID NO: 355803 - DNA, 25 bp, Artificial
  Probe
tacatgccctacacttccatcccct

SEQ ID NO: 355804 - DNA, 25 bp, Artificial
  Probe
cagtccagagctacatgccctacac

SEQ ID NO: 355805 - DNA, 25 bp, Artificial
  Probe
cagagctacatgccctacacttcca

SEQ ID NO: 355806 - DNA, 25 bp, Artificial
  Probe
ctgacccagattagagccctcctta

SEQ ID NO: 355807 - DNA, 25 bp, Artificial
  Probe
ttagagccctccttacaggtcaaaa

SEQ ID NO: 355808 - DNA, 25 bp, Artificial
  Probe
agattagagccctccttacaggtca

SEQ ID NO: 355809 - DNA, 25 bp, Artificial
  Probe
agtccagagctacatgccctacact

SEQ ID NO: 355810 - DNA, 25 bp, Artificial
  Probe
tgacccagattagagccctccttac

SEQ ID NO: 355811 - DNA, 25 bp, Artificial
  Probe
gattagagccctccttacaggtcaa

SEQ ID NO: 355812 - DNA, 25 bp, Artificial
  Probe
ccctgacccagattagagccctcct

SEQ ID NO: 355813 - DNA, 25 bp, Artificial
  Probe
ccagattagagccctccttacaggt

SEQ ID NO: 355814 - DNA, 25 bp, Artificial
  Probe
attagagccctccttacaggtcaaa

SEQ ID NO: 355815 - DNA, 25 bp, Artificial
  Probe
tccagagctacatgccctacacttc

SEQ ID NO: 355816 - DNA, 25 bp, Artificial
  Probe
agctacatgccctacacttccatcc

SEQ ID NO: 355817 - DNA, 25 bp, Artificial
  Probe
acccagattagagccctccttacag

SEQ ID NO: 355818 - DNA, 25 bp, Artificial
  Probe
atcccctgacccagattagagccct

SEQ ID NO: 355819 - DNA, 25 bp, Artificial
  Probe
tagagccctccttacaggtcaaaaa

SEQ ID NO: 355820 - DNA, 25 bp, Artificial
  Probe
cagattagagccctccttacaggtc

SEQ ID NO: 355821 - DNA, 25 bp, Artificial
  Probe
ccagagctacatgccctacacttcc

SEQ ID NO: 355822 - DNA, 25 bp, Artificial
  Probe
gagctacatgccctacacttccatc

SEQ ID NO: 355823 - DNA, 25 bp, Artificial
  Probe
cctgacccagattagagccctcctt

SEQ ID NO: 355824 - DNA, 25 bp, Artificial
  Probe
gacccagattagagccctccttaca

SEQ ID NO: 355825 - DNA, 25 bp, Artificial
  Probe
acagtccagagctacatgccctaca

SEQ ID NO: 355826 - DNA, 25 bp, Artificial
  Probe
tgttttatcagtgactgtctctgta

SEQ ID NO: 355827 - DNA, 25 bp, Artificial
  Probe
attgggcccaagctgcctaggaaca

SEQ ID NO: 355828 - DNA, 25 bp, Artificial
  Probe
gtctctgtagtcagctcacacttcc

SEQ ID NO: 355829 - DNA, 25 bp, Artificial
  Probe
ttgctcaagagacatttgggaaaca

SEQ ID NO: 355830 - DNA, 25 bp, Artificial
  Probe
agagtatcgggcagctccctggaca

SEQ ID NO: 355831 - DNA, 25 bp, Artificial
  Probe
tgctcaagagacatttgggaaacag

SEQ ID NO: 355832 - DNA, 25 bp, Artificial
  Probe
gtatcgggcagctccctggacagga

SEQ ID NO: 355833 - DNA, 25 bp, Artificial
  Probe
cttagtcgcctcagagtatcgggca

SEQ ID NO: 355834 - DNA, 25 bp, Artificial
  Probe
attgagactgcctcctcgctccaga

SEQ ID NO: 355835 - DNA, 25 bp, Artificial
  Probe
aattcagatttggaaccacatgttt

SEQ ID NO: 355836 - DNA, 25 bp, Artificial
  Probe
gcagctccctggacaggaaggaatt

SEQ ID NO: 355837 - DNA, 25 bp, Artificial
  Probe
cgtgttttgctcaagagacatttgg

SEQ ID NO: 355838 - DNA, 25 bp, Artificial
  Probe
gcccaagctgcctaggaacatgttt

SEQ ID NO: 355839 - DNA, 25 bp, Artificial
  Probe
aacatgttttatcagtgactgtctc

SEQ ID NO: 355840 - DNA, 25 bp, Artificial
  Probe
ggaaccacatgttttgaaatctgaa

SEQ ID NO: 355841 - DNA, 25 bp, Artificial
  Probe
tccctggacaggaaggaattcagat

SEQ ID NO: 355842 - DNA, 25 bp, Artificial
  Probe
tcagtgagcacacactgtattgata

SEQ ID NO: 355843 - DNA, 25 bp, Artificial
  Probe
ttggaaccacatgttttgaaatctg

SEQ ID NO: 355844 - DNA, 25 bp, Artificial
  Probe
cccttagtcgcctcagagtatcggg

SEQ ID NO: 355845 - DNA, 25 bp, Artificial
  Probe
taccttaccaggaaatttgaatgtt

SEQ ID NO: 355846 - DNA, 25 bp, Artificial
  Probe
cagatttggaaccacatgttttgaa

SEQ ID NO: 355847 - DNA, 25 bp, Artificial
  Probe
tttgctcaagagacatttgggaaac

SEQ ID NO: 355848 - DNA, 25 bp, Artificial
  Probe
tacgtgttttgctcaagagacattt

SEQ ID NO: 355849 - DNA, 25 bp, Artificial
  Probe
tcgcctcagagtatcgggcagctcc

SEQ ID NO: 355850 - DNA, 25 bp, Artificial
  Probe
ccacatgttttgaaatctgaatgga

SEQ ID NO: 355851 - DNA, 25 bp, Artificial
  Probe
tcttccctggattgggcccaagctg

SEQ ID NO: 355852 - DNA, 25 bp, Artificial
  Probe
gatagttctggctgctcttccctgg

SEQ ID NO: 355853 - DNA, 25 bp, Artificial
  Probe
cagctccctggacaggaaggaattc

SEQ ID NO: 355854 - DNA, 25 bp, Artificial
  Probe
tattgatagttctggctgctcttcc

SEQ ID NO: 355855 - DNA, 25 bp, Artificial
  Probe
cactgtattgatagttctggctgct

SEQ ID NO: 355856 - DNA, 25 bp, Artificial
  Probe
cttcatcccttagtcgcctcagagt

SEQ ID NO: 355857 - DNA, 25 bp, Artificial
  Probe
agttctggctgctcttccctggatt

SEQ ID NO: 355858 - DNA, 25 bp, Artificial
  Probe
tgtattgatagttctggctgctctt

SEQ ID NO: 355859 - DNA, 25 bp, Artificial
  Probe
acgtgttttgctcaagagacatttg

SEQ ID NO: 355860 - DNA, 25 bp, Artificial
  Probe
agtgactgtctctgtagtcagctca

SEQ ID NO: 355861 - DNA, 25 bp, Artificial
  Probe
ctgcctaggaacatgttttatcagt

SEQ ID NO: 355862 - DNA, 25 bp, Artificial
  Probe
tgactgtctctgtagtcagctcaca

SEQ ID NO: 355863 - DNA, 25 bp, Artificial
  Probe
ttgggcccaagctgcctaggaacat

SEQ ID NO: 355864 - DNA, 25 bp, Artificial
  Probe
tctggctgctcttccctggattggg

SEQ ID NO: 355865 - DNA, 25 bp, Artificial
  Probe
ttcatcccttagtcgcctcagagta

SEQ ID NO: 355866 - DNA, 25 bp, Artificial
  Probe
gctgctcttccctggattgggccca

SEQ ID NO: 355867 - DNA, 25 bp, Artificial
  Probe
tggattgggcccaagctgcctagga

SEQ ID NO: 355868 - DNA, 25 bp, Artificial
  Probe
atttggaaccacatgttttgaaatc

SEQ ID NO: 355869 - DNA, 25 bp, Artificial
  Probe
tgtagtcagctcacacttcctcctg

SEQ ID NO: 355870 - DNA, 25 bp, Artificial
  Probe
cttaccaggaaatttgaatgttact

SEQ ID NO: 355871 - DNA, 25 bp, Artificial
  Probe
tttatcagtgactgtctctgtagtc

SEQ ID NO: 355872 - DNA, 25 bp, Artificial
  Probe
ggaaaacagtttacctgtgtccata

SEQ ID NO: 355873 - DNA, 25 bp, Artificial
  Probe
ctgttaacagctgcatggttcctgc

SEQ ID NO: 355874 - DNA, 25 bp, Artificial
  Probe
ctgcttcttgtgtccagtatctttg

SEQ ID NO: 355875 - DNA, 25 bp, Artificial
  Probe
tattcagacaacagagtggatgcaa

SEQ ID NO: 355876 - DNA, 25 bp, Artificial
  Probe
aacagtttacctgtgtccatatgtg

SEQ ID NO: 355877 - DNA, 25 bp, Artificial
  Probe
gcttcttgtgtccagtatctttgct

SEQ ID NO: 355878 - DNA, 25 bp, Artificial
  Probe
catggttcctgcttcttgtgtccag

SEQ ID NO: 355879 - DNA, 25 bp, Artificial
  Probe
aattggattacaacccttggcaaag

SEQ ID NO: 355880 - DNA, 25 bp, Artificial
  Probe
gctgttaacagctgcatggttcctg

SEQ ID NO: 355881 - DNA, 25 bp, Artificial
  Probe
cctgcttcttgtgtccagtatcttt

SEQ ID NO: 355882 - DNA, 25 bp, Artificial
  Probe
tcctgcttcttgtgtccagtatctt

SEQ ID NO: 355883 - DNA, 25 bp, Artificial
  Probe
ttaacagctgcatggttcctgcttc

SEQ ID NO: 355884 - DNA, 25 bp, Artificial
  Probe
atggttcctgcttcttgtgtccagt

SEQ ID NO: 355885 - DNA, 25 bp, Artificial
  Probe
tgttaacagctgcatggttcctgct

SEQ ID NO: 355886 - DNA, 25 bp, Artificial
  Probe
attcagacaacagagtggatgcaat

SEQ ID NO: 355887 - DNA, 25 bp, Artificial
  Probe
ttagcctgtgctgttaacagctgca

SEQ ID NO: 355888 - DNA, 25 bp, Artificial
  Probe
tttttagcctgtgctgttaacagct

SEQ ID NO: 355889 - DNA, 25 bp, Artificial
  Probe
ttttttagcctgtgctgttaacagc

SEQ ID NO: 355890 - DNA, 25 bp, Artificial
  Probe
cttcttgtgtccagtatctttgcta

SEQ ID NO: 355891 - DNA, 25 bp, Artificial
  Probe
agtttacctgtgtccatatgtgtca

SEQ ID NO: 355892 - DNA, 25 bp, Artificial
  Probe
tacctgtgtccatatgtgtcagctt

SEQ ID NO: 355893 - DNA, 25 bp, Artificial
  Probe
tagcctgtgctgttaacagctgcat

SEQ ID NO: 355894 - DNA, 25 bp, Artificial
  Probe
taacagctgcatggttcctgcttct

SEQ ID NO: 355895 - DNA, 25 bp, Artificial
  Probe
ctgtgctgttaacagctgcatggtt

SEQ ID NO: 355896 - DNA, 25 bp, Artificial
  Probe
ataattggattacaacccttggcaa

SEQ ID NO: 355897 - DNA, 25 bp, Artificial
  Probe
gctgcatggttcctgcttcttgtgt

SEQ ID NO: 355898 - DNA, 25 bp, Artificial
  Probe
aacagctgcatggttcctgcttctt

SEQ ID NO: 355899 - DNA, 25 bp, Artificial
  Probe
agcctgtgctgttaacagctgcatg

SEQ ID NO: 355900 - DNA, 25 bp, Artificial
  Probe
ttacctgtgtccatatgtgtcagct

SEQ ID NO: 355901 - DNA, 25 bp, Artificial
  Probe
acagctgcatggttcctgcttcttg

SEQ ID NO: 355902 - DNA, 25 bp, Artificial
  Probe
gttcctgcttcttgtgtccagtatc

SEQ ID NO: 355903 - DNA, 25 bp, Artificial
  Probe
taattggattacaacccttggcaaa

SEQ ID NO: 355904 - DNA, 25 bp, Artificial
  Probe
acagtttacctgtgtccatatgtgt

SEQ ID NO: 355905 - DNA, 25 bp, Artificial
  Probe
tttacctgtgtccatatgtgtcagc

SEQ ID NO: 355906 - DNA, 25 bp, Artificial
  Probe
tttagcctgtgctgttaacagctgc

SEQ ID NO: 355907 - DNA, 25 bp, Artificial
  Probe
cagtttacctgtgtccatatgtgtc

SEQ ID NO: 355908 - DNA, 25 bp, Artificial
  Probe
atattcagacaacagagtggatgca

SEQ ID NO: 355909 - DNA, 25 bp, Artificial
  Probe
ttttagcctgtgctgttaacagctg

SEQ ID NO: 355910 - DNA, 25 bp, Artificial
  Probe
tggttcctgcttcttgtgtccagta

SEQ ID NO: 355911 - DNA, 25 bp, Artificial
  Probe
gcatggttcctgcttcttgtgtcca

SEQ ID NO: 355912 - DNA, 25 bp, Artificial
  Probe
ttcctgcttcttgtgtccagtatct

SEQ ID NO: 355913 - DNA, 25 bp, Artificial
  Probe
tgcatggttcctgcttcttgtgtcc

SEQ ID NO: 355914 - DNA, 25 bp, Artificial
  Probe
ctgcatggttcctgcttcttgtgtc

SEQ ID NO: 355915 - DNA, 25 bp, Artificial
  Probe
cagctgcatggttcctgcttcttgt

SEQ ID NO: 355916 - DNA, 25 bp, Artificial
  Probe
tgtgctgttaacagctgcatggttc

SEQ ID NO: 355917 - DNA, 25 bp, Artificial
  Probe
tgctgttaacagctgcatggttcct

SEQ ID NO: 355918 - DNA, 25 bp, Artificial
  Probe
gaaccatgttataatcttcaaggag

SEQ ID NO: 355919 - DNA, 25 bp, Artificial
  Probe
gaccatctatacagattccagttag

SEQ ID NO: 355920 - DNA, 25 bp, Artificial
  Probe
atatccagccttgtgagaagacaca

SEQ ID NO: 355921 - DNA, 25 bp, Artificial
  Probe
gaatttccctcaggaaccatgttat

SEQ ID NO: 355922 - DNA, 25 bp, Artificial
  Probe
aagcttgtgtcaagagattaaaccc

SEQ ID NO: 355923 - DNA, 25 bp, Artificial
  Probe
agtattcagaaattcactgaacagg

SEQ ID NO: 355924 - DNA, 25 bp, Artificial
  Probe
ctatcctcttcatcggaaccctgag

SEQ ID NO: 355925 - DNA, 25 bp, Artificial
  Probe
gaaatggcagcacaagctattattt

SEQ ID NO: 355926 - DNA, 25 bp, Artificial
  Probe
atatgattcttgtggaccatctata

SEQ ID NO: 355927 - DNA, 25 bp, Artificial
  Probe
tctagagttctatcaatagaaactg

SEQ ID NO: 355928 - DNA, 25 bp, Artificial
  Probe
aaccctgagtactggctagagcctg

SEQ ID NO: 355929 - DNA, 25 bp, Artificial
  Probe
tgattcaaaccagaagaaccgagtg

SEQ ID NO: 355930 - DNA, 25 bp, Artificial
  Probe
catttttgggggttatgatgccaca

SEQ ID NO: 355931 - DNA, 25 bp, Artificial
  Probe
gtttcacagaacaccagagaattta

SEQ ID NO: 355932 - DNA, 25 bp, Artificial
  Probe
catcagttctgtattctaactgcag

SEQ ID NO: 355933 - DNA, 25 bp, Artificial
  Probe
taatgtatgaactggccactcgccc

SEQ ID NO: 355934 - DNA, 25 bp, Artificial
  Probe
acccagatttggacagtgaatttcc

SEQ ID NO: 355935 - DNA, 25 bp, Artificial
  Probe
ccagaaggacccatcatcctaaagc

SEQ ID NO: 355936 - DNA, 25 bp, Artificial
  Probe
gttagttccatcagttctgtattct

SEQ ID NO: 355937 - DNA, 25 bp, Artificial
  Probe
gatgaatactcagaactccaaaggc

SEQ ID NO: 355938 - DNA, 25 bp, Artificial
  Probe
cctctgaagatcagtaggcaaccaa

SEQ ID NO: 355939 - DNA, 25 bp, Artificial
  Probe
cggtgtatcatctattttatgattc

SEQ ID NO: 355940 - DNA, 25 bp, Artificial
  Probe
aggctagacagagtctcaaaaaagg

SEQ ID NO: 355941 - DNA, 25 bp, Artificial
  Probe
aactccagaatgagattgatagagc

SEQ ID NO: 355942 - DNA, 25 bp, Artificial
  Probe
aagagtcccagaaagctctttctga

SEQ ID NO: 355943 - DNA, 25 bp, Artificial
  Probe
cgattactgagtattcagaaattca

SEQ ID NO: 355944 - DNA, 25 bp, Artificial
  Probe
caatccacaggatcccttcgtgcag

SEQ ID NO: 355945 - DNA, 25 bp, Artificial
  Probe
gtctaagattgtacccaattgctac

SEQ ID NO: 355946 - DNA, 25 bp, Artificial
  Probe
gatcagtaggcaaccaattttccaa

SEQ ID NO: 355947 - DNA, 25 bp, Artificial
  Probe
gcaaccaattttccaaccagaagga

SEQ ID NO: 355948 - DNA, 25 bp, Artificial
  Probe
gagattaaacccagatttggacagt

SEQ ID NO: 355949 - DNA, 25 bp, Artificial
  Probe
ttttcctcgattactgagtattcag

SEQ ID NO: 355950 - DNA, 25 bp, Artificial
  Probe
tctagaaatggcagcacaagctatt

SEQ ID NO: 355951 - DNA, 25 bp, Artificial
  Probe
actccaaaggccaagagtcccagaa

SEQ ID NO: 355952 - DNA, 25 bp, Artificial
  Probe
gtttctctagagttctatcaataga

SEQ ID NO: 355953 - DNA, 25 bp, Artificial
  Probe
aaatcgccttgattcaaaccagaag

SEQ ID NO: 355954 - DNA, 25 bp, Artificial
  Probe
gttatgatgccacaagcacctccat

SEQ ID NO: 355955 - DNA, 25 bp, Artificial
  Probe
atttccttcataatgtatgaactgg

SEQ ID NO: 355956 - DNA, 25 bp, Artificial
  Probe
tggacagtgaatttccctcaggaac

SEQ ID NO: 355957 - DNA, 25 bp, Artificial
  Probe
tacagattccagttagttccatcag

SEQ ID NO: 355958 - DNA, 25 bp, Artificial
  Probe
aggctcagtggctctgcggtgtatc

SEQ ID NO: 355959 - DNA, 25 bp, Artificial
  Probe
ggttatgatgccacaagcacctcca

SEQ ID NO: 355960 - DNA, 25 bp, Artificial
  Probe
gacacagatccctctgaagatcagt

SEQ ID NO: 355961 - DNA, 25 bp, Artificial
  Probe
ctcatcagcatgaaacttgctgtca

SEQ ID NO: 355962 - DNA, 25 bp, Artificial
  Probe
tgagaagacacagatccctctgaag

SEQ ID NO: 355963 - DNA, 25 bp, Artificial
  Probe
ttctgatctagaaatggcagcacaa

SEQ ID NO: 355964 - DNA, 25 bp, Artificial
  Probe
ttgccttgttctatctgtaaactgt

SEQ ID NO: 355965 - DNA, 25 bp, Artificial
  Probe
tatctgtaaactgtggaactatttt

SEQ ID NO: 355966 - DNA, 25 bp, Artificial
  Probe
tggaactattttaccttaaagcctg

SEQ ID NO: 355967 - DNA, 25 bp, Artificial
  Probe
agcctgaaaacagttttgtggatta

SEQ ID NO: 355968 - DNA, 25 bp, Artificial
  Probe
tctgtaaactgtggaactattttac

SEQ ID NO: 355969 - DNA, 25 bp, Artificial
  Probe
ttaaattttcttcatgctgttgtat

SEQ ID NO: 355970 - DNA, 25 bp, Artificial
  Probe
aaattttcttcatgctgttgtattt

SEQ ID NO: 355971 - DNA, 25 bp, Artificial
  Probe
cagacaagcacgagtttctgttgcc

SEQ ID NO: 355972 - DNA, 25 bp, Artificial
  Probe
gacaagcacgagtttctgttgcctt

SEQ ID NO: 355973 - DNA, 25 bp, Artificial
  Probe
aagcctgaaaacagttttgtggatt

SEQ ID NO: 355974 - DNA, 25 bp, Artificial
  Probe
atctgtaaactgtggaactatttta

SEQ ID NO: 355975 - DNA, 25 bp, Artificial
  Probe
tgttgccttgttctatctgtaaact

SEQ ID NO: 355976 - DNA, 25 bp, Artificial
  Probe
cacgagtttctgttgccttgttcta

SEQ ID NO: 355977 - DNA, 25 bp, Artificial
  Probe
ttctgttgccttgttctatctgtaa

SEQ ID NO: 355978 - DNA, 25 bp, Artificial
  Probe
ccttgttctatctgtaaactgtgga

SEQ ID NO: 355979 - DNA, 25 bp, Artificial
  Probe
gttgccttgttctatctgtaaactg

SEQ ID NO: 355980 - DNA, 25 bp, Artificial
  Probe
ctgttgccttgttctatctgtaaac

SEQ ID NO: 355981 - DNA, 25 bp, Artificial
  Probe
gttctatctgtaaactgtggaacta

SEQ ID NO: 355982 - DNA, 25 bp, Artificial
  Probe
cttgttctatctgtaaactgtggaa

SEQ ID NO: 355983 - DNA, 25 bp, Artificial
  Probe
tttctgttgccttgttctatctgta

SEQ ID NO: 355984 - DNA, 25 bp, Artificial
  Probe
cgagtttctgttgccttgttctatc

SEQ ID NO: 355985 - DNA, 25 bp, Artificial
  Probe
tctgttgccttgttctatctgtaaa

SEQ ID NO: 355986 - DNA, 25 bp, Artificial
  Probe
gtttctgttgccttgttctatctgt

SEQ ID NO: 355987 - DNA, 25 bp, Artificial
  Probe
aaagcctgaaaacagttttgtggat

SEQ ID NO: 355988 - DNA, 25 bp, Artificial
  Probe
aagcacgagtttctgttgccttgtt

SEQ ID NO: 355989 - DNA, 25 bp, Artificial
  Probe
caagcacgagtttctgttgccttgt

SEQ ID NO: 355990 - DNA, 25 bp, Artificial
  Probe
tctatctgtaaactgtggaactatt

SEQ ID NO: 355991 - DNA, 25 bp, Artificial
  Probe
acgagtttctgttgccttgttctat

SEQ ID NO: 355992 - DNA, 25 bp, Artificial
  Probe
cttaaagcctgaaaacagttttgtg

SEQ ID NO: 355993 - DNA, 25 bp, Artificial
  Probe
ttgttctatctgtaaactgtggaac

SEQ ID NO: 355994 - DNA, 25 bp, Artificial
  Probe
acaagcacgagtttctgttgccttg

SEQ ID NO: 355995 - DNA, 25 bp, Artificial
  Probe
agcacgagtttctgttgccttgttc

SEQ ID NO: 355996 - DNA, 25 bp, Artificial
  Probe
ttctatctgtaaactgtggaactat

SEQ ID NO: 355997 - DNA, 25 bp, Artificial
  Probe
gccttgttctatctgtaaactgtgg

SEQ ID NO: 355998 - DNA, 25 bp, Artificial
  Probe
gcctgaaaacagttttgtggattaa

SEQ ID NO: 355999 - DNA, 25 bp, Artificial
  Probe
gattaaattttcttcatgctgttgt

SEQ ID NO: 356000 - DNA, 25 bp, Artificial
  Probe
ctatctgtaaactgtggaactattt

SEQ ID NO: 356001 - DNA, 25 bp, Artificial
  Probe
ttaaagcctgaaaacagttttgtgg

SEQ ID NO: 356002 - DNA, 25 bp, Artificial
  Probe
tgttctatctgtaaactgtggaact

SEQ ID NO: 356003 - DNA, 25 bp, Artificial
  Probe
tggattaaattttcttcatgctgtt

SEQ ID NO: 356004 - DNA, 25 bp, Artificial
  Probe
gcacgagtttctgttgccttgttct

SEQ ID NO: 356005 - DNA, 25 bp, Artificial
  Probe
taaattttcttcatgctgttgtatt

SEQ ID NO: 356006 - DNA, 25 bp, Artificial
  Probe
tgccttgttctatctgtaaactgtg

SEQ ID NO: 356007 - DNA, 25 bp, Artificial
  Probe
agacaagcacgagtttctgttgcct

SEQ ID NO: 356008 - DNA, 25 bp, Artificial
  Probe
attttcttcatgctgttgtattttc

SEQ ID NO: 356009 - DNA, 25 bp, Artificial
  Probe
gagtttctgttgccttgttctatct

SEQ ID NO: 356010 - DNA, 25 bp, Artificial
  Probe
aagatcctcactgagcgcgggtact

SEQ ID NO: 356011 - DNA, 25 bp, Artificial
  Probe
ccctttgatttcaccttttaggatg

SEQ ID NO: 356012 - DNA, 25 bp, Artificial
  Probe
gcaacacgaagtttacccaatagat

SEQ ID NO: 356013 - DNA, 25 bp, Artificial
  Probe
gacctcactgactaccttatgaaga

SEQ ID NO: 356014 - DNA, 25 bp, Artificial
  Probe
ttcccgatggccaggtcatcaccat

SEQ ID NO: 356015 - DNA, 25 bp, Artificial
  Probe
tctctggagaagagctacgaacttc

SEQ ID NO: 356016 - DNA, 25 bp, Artificial
  Probe
gactaccttatgaagatcctcactg

SEQ ID NO: 356017 - DNA, 25 bp, Artificial
  Probe
gagggttatgccttaccccatgcca

SEQ ID NO: 356018 - DNA, 25 bp, Artificial
  Probe
aaccacaggcattgttctggattct

SEQ ID NO: 356019 - DNA, 25 bp, Artificial
  Probe
agaccttcaatgtgcctgccatgta

SEQ ID NO: 356020 - DNA, 25 bp, Artificial
  Probe
gggttatgccttaccccatgccatc

SEQ ID NO: 356021 - DNA, 25 bp, Artificial
  Probe
agctggtcgggacctcactgactac

SEQ ID NO: 356022 - DNA, 25 bp, Artificial
  Probe
cttcctcctctctggagaagagcta

SEQ ID NO: 356023 - DNA, 25 bp, Artificial
  Probe
gattcatgtggcattgaactgaact

SEQ ID NO: 356024 - DNA, 25 bp, Artificial
  Probe
agttacagagctaccctttgatttc

SEQ ID NO: 356025 - DNA, 25 bp, Artificial
  Probe
tctatgagggttatgccttacccca

SEQ ID NO: 356026 - DNA, 25 bp, Artificial
  Probe
gtgactcataacgtccccatctatg

SEQ ID NO: 356027 - DNA, 25 bp, Artificial
  Probe
gaaattgtccgagacatcaaagaaa

SEQ ID NO: 356028 - DNA, 25 bp, Artificial
  Probe
tttccgctgtcctgagactctcttc

SEQ ID NO: 356029 - DNA, 25 bp, Artificial
  Probe
cgacggtgtgactcataacgtcccc

SEQ ID NO: 356030 - DNA, 25 bp, Artificial
  Probe
acgaacttcccgatggccaggtcat

SEQ ID NO: 356031 - DNA, 25 bp, Artificial
  Probe
tcatgtggcattgaactgaactagg

SEQ ID NO: 356032 - DNA, 25 bp, Artificial
  Probe
ggccaaccgtgagaagatgacacag

SEQ ID NO: 356033 - DNA, 25 bp, Artificial
  Probe
accccaaggccaaccgtgagaagat

SEQ ID NO: 356034 - DNA, 25 bp, Artificial
  Probe
cgaagtttacccaatagattcatgt

SEQ ID NO: 356035 - DNA, 25 bp, Artificial
  Probe
ggatctagctggtcgggacctcact

SEQ ID NO: 356036 - DNA, 25 bp, Artificial
  Probe
agaagagctacgaacttcccgatgg

SEQ ID NO: 356037 - DNA, 25 bp, Artificial
  Probe
tgtcaccaccgctgaacgtgaaatt

SEQ ID NO: 356038 - DNA, 25 bp, Artificial
  Probe
cattgaactgaactaggagttacag

SEQ ID NO: 356039 - DNA, 25 bp, Artificial
  Probe
agatgacacagatcatgtttgagac

SEQ ID NO: 356040 - DNA, 25 bp, Artificial
  Probe
cataacgtccccatctatgagggtt

SEQ ID NO: 356041 - DNA, 25 bp, Artificial
  Probe
cgaacttcccgatggccaggtcatc

SEQ ID NO: 356042 - DNA, 25 bp, Artificial
  Probe
caatagattcatgtggcattgaact

SEQ ID NO: 356043 - DNA, 25 bp, Artificial
  Probe
aactgaactaggagttacagagcta

SEQ ID NO: 356044 - DNA, 25 bp, Artificial
  Probe
gcattgaactgaactaggagttaca

SEQ ID NO: 356045 - DNA, 25 bp, Artificial
  Probe
cccatgccatcatgcgtctggatct

SEQ ID NO: 356046 - DNA, 25 bp, Artificial
  Probe
gagctacgaacttcccgatggccag

SEQ ID NO: 356047 - DNA, 25 bp, Artificial
  Probe
ccatccaggcggtgctgtccctgta

SEQ ID NO: 356048 - DNA, 25 bp, Artificial
  Probe
ttaccccatgccatcatgcgtctgg

SEQ ID NO: 356049 - DNA, 25 bp, Artificial
  Probe
aggagttacagagctaccctttgat

SEQ ID NO: 356050 - DNA, 25 bp, Artificial
  Probe
tgaacgtgaaattgtccgagacatc

SEQ ID NO: 356051 - DNA, 25 bp, Artificial
  Probe
gcaacgagcgtttccgctgtcctga

SEQ ID NO: 356052 - DNA, 25 bp, Artificial
  Probe
accgctgaacgtgaaattgtccgag

SEQ ID NO: 356053 - DNA, 25 bp, Artificial
  Probe
gagcgtttccgctgtcctgagactc

SEQ ID NO: 356054 - DNA, 25 bp, Artificial
  Probe
agcaacacgaagtttacccaataga

SEQ ID NO: 356055 - DNA, 25 bp, Artificial
  Probe
tgaaattgtccgagacatcaaagaa

SEQ ID NO: 356056 - DNA, 25 bp, Artificial
  Probe
cacctgatgaccaagcctctttcag

SEQ ID NO: 356057 - DNA, 25 bp, Artificial
  Probe
gaaagaccagtgtttgtgtcttccc

SEQ ID NO: 356058 - DNA, 25 bp, Artificial
  Probe
acgctgctttactccatgacacctg

SEQ ID NO: 356059 - DNA, 25 bp, Artificial
  Probe
gaatctctgtacttcacattccggt

SEQ ID NO: 356060 - DNA, 25 bp, Artificial
  Probe
tcctagcagaaatgatgctgatggt

SEQ ID NO: 356061 - DNA, 25 bp, Artificial
  Probe
aagcccagtcgctcatgtctgccaa

SEQ ID NO: 356062 - DNA, 25 bp, Artificial
  Probe
tccatgacacctgatgaccaagcct

SEQ ID NO: 356063 - DNA, 25 bp, Artificial
  Probe
agatgggaatctctgtacttcacat

SEQ ID NO: 356064 - DNA, 25 bp, Artificial
  Probe
cagaaacctggagctcagtgttccc

SEQ ID NO: 356065 - DNA, 25 bp, Artificial
  Probe
gagaagcatccctttcagattctgc

SEQ ID NO: 356066 - DNA, 25 bp, Artificial
  Probe
gatgaccaagcctctttcagatgtt

SEQ ID NO: 356067 - DNA, 25 bp, Artificial
  Probe
cctgcattatatggagacgaaagac

SEQ ID NO: 356068 - DNA, 25 bp, Artificial
  Probe
acctgatgaccaagcctctttcaga

SEQ ID NO: 356069 - DNA, 25 bp, Artificial
  Probe
tattaccgaccgtcctagcagaaat

SEQ ID NO: 356070 - DNA, 25 bp, Artificial
  Probe
ttctgtgactccacaaacagcattg

SEQ ID NO: 356071 - DNA, 25 bp, Artificial
  Probe
ggagctcagtgttccctgaaccccg

SEQ ID NO: 356072 - DNA, 25 bp, Artificial
  Probe
ttcaccttgaaccaagagcatcctg

SEQ ID NO: 356073 - DNA, 25 bp, Artificial
  Probe
cagtcgctcatgtctgccaaacact

SEQ ID NO: 356074 - DNA, 25 bp, Artificial
  Probe
gacacctgatgaccaagcctctttc

SEQ ID NO: 356075 - DNA, 25 bp, Artificial
  Probe
acgaaagaccagtgtttgtgtcttc

SEQ ID NO: 356076 - DNA, 25 bp, Artificial
  Probe
gaccttcaccttgaaccaagagcat

SEQ ID NO: 356077 - DNA, 25 bp, Artificial
  Probe
aatgtcaatgaggacactcttcaca

SEQ ID NO: 356078 - DNA, 25 bp, Artificial
  Probe
agtgtttgtgtcttcccagagatgg

SEQ ID NO: 356079 - DNA, 25 bp, Artificial
  Probe
gtcgctcatgtctgccaaacacttc

SEQ ID NO: 356080 - DNA, 25 bp, Artificial
  Probe
agcccagtcgctcatgtctgccaaa

SEQ ID NO: 356081 - DNA, 25 bp, Artificial
  Probe
tactccatgacacctgatgaccaag

SEQ ID NO: 356082 - DNA, 25 bp, Artificial
  Probe
ctcagaaatgcattttgggtatttc

SEQ ID NO: 356083 - DNA, 25 bp, Artificial
  Probe
tcttcccagagatgggaatctctgt

SEQ ID NO: 356084 - DNA, 25 bp, Artificial
  Probe
tcagagacggccaagcccagtcgct

SEQ ID NO: 356085 - DNA, 25 bp, Artificial
  Probe
cagtgttccctgaaccccgtcttgt

SEQ ID NO: 356086 - DNA, 25 bp, Artificial
  Probe
agattctgccccttatgtttcctgg

SEQ ID NO: 356087 - DNA, 25 bp, Artificial
  Probe
ttgtgtcttcccagagatgggaatc

SEQ ID NO: 356088 - DNA, 25 bp, Artificial
  Probe
tctttcagatgttcagatgtcagag

SEQ ID NO: 356089 - DNA, 25 bp, Artificial
  Probe
ggccaagcccagtcgctcatgtctg

SEQ ID NO: 356090 - DNA, 25 bp, Artificial
  Probe
tttgaccttcaccttgaaccaagag

SEQ ID NO: 356091 - DNA, 25 bp, Artificial
  Probe
tgccccttatgtttcctgggtcttt

SEQ ID NO: 356092 - DNA, 25 bp, Artificial
  Probe
gaagcatccctttcagattctgccc

SEQ ID NO: 356093 - DNA, 25 bp, Artificial
  Probe
gaaacctggagctcagtgttccctg

SEQ ID NO: 356094 - DNA, 25 bp, Artificial
  Probe
atggttggtgcagaagctgttgacc

SEQ ID NO: 356095 - DNA, 25 bp, Artificial
  Probe
gactccacaaacagcattgcctagt

SEQ ID NO: 356096 - DNA, 25 bp, Artificial
  Probe
ctttctcagaaatgcattttgggta

SEQ ID NO: 356097 - DNA, 25 bp, Artificial
  Probe
tcagtgttccctgaaccccgtcttg

SEQ ID NO: 356098 - DNA, 25 bp, Artificial
  Probe
gctttactccatgacacctgatgac

SEQ ID NO: 356099 - DNA, 25 bp, Artificial
  Probe
tctttattaccgaccgtcctagcag

SEQ ID NO: 356100 - DNA, 25 bp, Artificial
  Probe
ccatctgtccattccagaaacctgg

SEQ ID NO: 356101 - DNA, 25 bp, Artificial
  Probe
cagatgtcagagacggccaagccca

SEQ ID NO: 356102 - DNA, 25 bp, Artificial
  Probe
actttatgtgatctgctctcctaag

SEQ ID NO: 356103 - DNA, 25 bp, Artificial
  Probe
tcttgactatactttatgtgatctg

SEQ ID NO: 356104 - DNA, 25 bp, Artificial
  Probe
aatgatgccctgcttcacgagaatt

SEQ ID NO: 356105 - DNA, 25 bp, Artificial
  Probe
tttttatccacaaccggctcgaaga

SEQ ID NO: 356106 - DNA, 25 bp, Artificial
  Probe
acaaccggctcgaagatacaataat

SEQ ID NO: 356107 - DNA, 25 bp, Artificial
  Probe
ggtgcggacaattccacactttatt

SEQ ID NO: 356108 - DNA, 25 bp, Artificial
  Probe
ccagcttactaactaaaggggcatt

SEQ ID NO: 356109 - DNA, 25 bp, Artificial
  Probe
cttcacgagaattctgaggtaatga

SEQ ID NO: 356110 - DNA, 25 bp, Artificial
  Probe
cccagcttactaactaaaggggcat

SEQ ID NO: 356111 - DNA, 25 bp, Artificial
  Probe
accggctcgaagatacaataatggc

SEQ ID NO: 356112 - DNA, 25 bp, Artificial
  Probe
ttgaccccagcttactaactaaagg

SEQ ID NO: 356113 - DNA, 25 bp, Artificial
  Probe
ccctgcttcacgagaattctgaggt

SEQ ID NO: 356114 - DNA, 25 bp, Artificial
  Probe
tgaccccagcttactaactaaaggg

SEQ ID NO: 356115 - DNA, 25 bp, Artificial
  Probe
aattcataagcgtgcacaaagattg

SEQ ID NO: 356116 - DNA, 25 bp, Artificial
  Probe
caaccggctcgaagatacaataatg

SEQ ID NO: 356117 - DNA, 25 bp, Artificial
  Probe
tcttgtgagtctttgggcagctgtt

SEQ ID NO: 356118 - DNA, 25 bp, Artificial
  Probe
gccctgcttcacgagaattctgagg

SEQ ID NO: 356119 - DNA, 25 bp, Artificial
  Probe
tctttgggcagctgtttgaccccag

SEQ ID NO: 356120 - DNA, 25 bp, Artificial
  Probe
aactaaaggggcattgtccactggg

SEQ ID NO: 356121 - DNA, 25 bp, Artificial
  Probe
ctaaaggggcattgtccactgggtg

SEQ ID NO: 356122 - DNA, 25 bp, Artificial
  Probe
gtctttgggcagctgtttgacccca

SEQ ID NO: 356123 - DNA, 25 bp, Artificial
  Probe
gcttcacgagaattctgaggtaatg

SEQ ID NO: 356124 - DNA, 25 bp, Artificial
  Probe
gtgcggacaattccacactttattt

SEQ ID NO: 356125 - DNA, 25 bp, Artificial
  Probe
ggcagctgtttgaccccagcttact

SEQ ID NO: 356126 - DNA, 25 bp, Artificial
  Probe
atttttatccacaaccggctcgaag

SEQ ID NO: 356127 - DNA, 25 bp, Artificial
  Probe
tgtgatctgctctcctaagtccaac

SEQ ID NO: 356128 - DNA, 25 bp, Artificial
  Probe
gcttactaactaaaggggcattgtc

SEQ ID NO: 356129 - DNA, 25 bp, Artificial
  Probe
cttgactatactttatgtgatctgc

SEQ ID NO: 356130 - DNA, 25 bp, Artificial
  Probe
aaatgatgccctgcttcacgagaat

SEQ ID NO: 356131 - DNA, 25 bp, Artificial
  Probe
attcataagcgtgcacaaagattga

SEQ ID NO: 356132 - DNA, 25 bp, Artificial
  Probe
tgatgccctgcttcacgagaattct

SEQ ID NO: 356133 - DNA, 25 bp, Artificial
  Probe
gactatactttatgtgatctgctct

SEQ ID NO: 356134 - DNA, 25 bp, Artificial
  Probe
ttatgtgatctgctctcctaagtcc

SEQ ID NO: 356135 - DNA, 25 bp, Artificial
  Probe
ttttcttgtgagtctttgggcagct

SEQ ID NO: 356136 - DNA, 25 bp, Artificial
  Probe
atgatgccctgcttcacgagaattc

SEQ ID NO: 356137 - DNA, 25 bp, Artificial
  Probe
tgggcagctgtttgaccccagctta

SEQ ID NO: 356138 - DNA, 25 bp, Artificial
  Probe
cataagcgtgcacaaagattgaaaa

SEQ ID NO: 356139 - DNA, 25 bp, Artificial
  Probe
taaaggggcattgtccactgggtgc

SEQ ID NO: 356140 - DNA, 25 bp, Artificial
  Probe
tccacaaccggctcgaagatacaat

SEQ ID NO: 356141 - DNA, 25 bp, Artificial
  Probe
ttgactatactttatgtgatctgct

SEQ ID NO: 356142 - DNA, 25 bp, Artificial
  Probe
ctttgggcagctgtttgaccccagc

SEQ ID NO: 356143 - DNA, 25 bp, Artificial
  Probe
gagcaattcataagcgtgcacaaag

SEQ ID NO: 356144 - DNA, 25 bp, Artificial
  Probe
gagtctttgggcagctgtttgaccc

SEQ ID NO: 356145 - DNA, 25 bp, Artificial
  Probe
tatgtgatctgctctcctaagtcca

SEQ ID NO: 356146 - DNA, 25 bp, Artificial
  Probe
cttgtgagtctttgggcagctgttt

SEQ ID NO: 356147 - DNA, 25 bp, Artificial
  Probe
ttcacgagaattctgaggtaatgac

SEQ ID NO: 356148 - DNA, 25 bp, Artificial
  Probe
gccacaatactatgtactggtacaa

SEQ ID NO: 356149 - DNA, 25 bp, Artificial
  Probe
aacggcttcaagtcgcttcttgcct

SEQ ID NO: 356150 - DNA, 25 bp, Artificial
  Probe
tcttcaagtgtgatcagactctggg

SEQ ID NO: 356151 - DNA, 25 bp, Artificial
  Probe
tcaagtgtgatcagactctgggcca

SEQ ID NO: 356152 - DNA, 25 bp, Artificial
  Probe
cggctgttttccagactccaaagta

SEQ ID NO: 356153 - DNA, 25 bp, Artificial
  Probe
cgtgtcacacaggtgggaaatgaag

SEQ ID NO: 356154 - DNA, 25 bp, Artificial
  Probe
ctctaagcaattgctgaaggttatg

SEQ ID NO: 356155 - DNA, 25 bp, Artificial
  Probe
ttcttgcctcagtcttcagataaag

SEQ ID NO: 356156 - DNA, 25 bp, Artificial
  Probe
tactggtacaagcaagactctaagc

SEQ ID NO: 356157 - DNA, 25 bp, Artificial
  Probe
gtatcgtgtcacacaggtgggaaat

SEQ ID NO: 356158 - DNA, 25 bp, Artificial
  Probe
aagtgtgatcagactctgggccaca

SEQ ID NO: 356159 - DNA, 25 bp, Artificial
  Probe
gactctaagcaattgctgaaggtta

SEQ ID NO: 356160 - DNA, 25 bp, Artificial
  Probe
agtcttcagataaagctcatttgaa

SEQ ID NO: 356161 - DNA, 25 bp, Artificial
  Probe
agactctgggccacaatactatgta

SEQ ID NO: 356162 - DNA, 25 bp, Artificial
  Probe
tcgcttcttgcctcagtcttcagat

SEQ ID NO: 356163 - DNA, 25 bp, Artificial
  Probe
tcttgcctcagtcttcagataaagc

SEQ ID NO: 356164 - DNA, 25 bp, Artificial
  Probe
agccgggtgactctgctgtgtatct

SEQ ID NO: 356165 - DNA, 25 bp, Artificial
  Probe
ctctgggccacaatactatgtactg

SEQ ID NO: 356166 - DNA, 25 bp, Artificial
  Probe
tatgtactggtacaagcaagactct

SEQ ID NO: 356167 - DNA, 25 bp, Artificial
  Probe
catttgaatcttcgtatcaagtctg

SEQ ID NO: 356168 - DNA, 25 bp, Artificial
  Probe
cgtatcaagtctgtagagccgggtg

SEQ ID NO: 356169 - DNA, 25 bp, Artificial
  Probe
aagtgttcttcaagtgtgatcagac

SEQ ID NO: 356170 - DNA, 25 bp, Artificial
  Probe
ctccaaagtatcgtgtcacacaggt

SEQ ID NO: 356171 - DNA, 25 bp, Artificial
  Probe
agctcatttgaatcttcgtatcaag

SEQ ID NO: 356172 - DNA, 25 bp, Artificial
  Probe
aagactctaagcaattgctgaaggt

SEQ ID NO: 356173 - DNA, 25 bp, Artificial
  Probe
gaatcttcgtatcaagtctgtagag

SEQ ID NO: 356174 - DNA, 25 bp, Artificial
  Probe
gctcatttgaatcttcgtatcaagt

SEQ ID NO: 356175 - DNA, 25 bp, Artificial
  Probe
gcctcagtcttcagataaagctcat

SEQ ID NO: 356176 - DNA, 25 bp, Artificial
  Probe
tcaagtctgtagagccgggtgactc

SEQ ID NO: 356177 - DNA, 25 bp, Artificial
  Probe
gcttcaagtcgcttcttgcctcagt

SEQ ID NO: 356178 - DNA, 25 bp, Artificial
  Probe
tcagtcttcagataaagctcatttg

SEQ ID NO: 356179 - DNA, 25 bp, Artificial
  Probe
tgcctcagtcttcagataaagctca

SEQ ID NO: 356180 - DNA, 25 bp, Artificial
  Probe
aaatgaaacggcttcaagtcgcttc

SEQ ID NO: 356181 - DNA, 25 bp, Artificial
  Probe
aaagtatcgtgtcacacaggtggga

SEQ ID NO: 356182 - DNA, 25 bp, Artificial
  Probe
tactatgtactggtacaagcaagac

SEQ ID NO: 356183 - DNA, 25 bp, Artificial
  Probe
ttcaagtcgcttcttgcctcagtct

SEQ ID NO: 356184 - DNA, 25 bp, Artificial
  Probe
acaagcaagactctaagcaattgct

SEQ ID NO: 356185 - DNA, 25 bp, Artificial
  Probe
actctaagcaattgctgaaggttat

SEQ ID NO: 356186 - DNA, 25 bp, Artificial
  Probe
atgtactggtacaagcaagactcta

SEQ ID NO: 356187 - DNA, 25 bp, Artificial
  Probe
caagtcgcttcttgcctcagtcttc

SEQ ID NO: 356188 - DNA, 25 bp, Artificial
  Probe
tgtttagctacaacaataagcaacg

SEQ ID NO: 356189 - DNA, 25 bp, Artificial
  Probe
aagcaagactctaagcaattgctga

SEQ ID NO: 356190 - DNA, 25 bp, Artificial
  Probe
gtttagctacaacaataagcaacgc

SEQ ID NO: 356191 - DNA, 25 bp, Artificial
  Probe
tagagccgggtgactctgctgtgta

SEQ ID NO: 356192 - DNA, 25 bp, Artificial
  Probe
gcttcttgcctcagtcttcagataa

SEQ ID NO: 356193 - DNA, 25 bp, Artificial
  Probe
tgttttccagactccaaagtatcgt

SEQ ID NO: 356194 - DNA, 25 bp, Artificial
  Probe
caatgttctggtaccgacaagatcc

SEQ ID NO: 356195 - DNA, 25 bp, Artificial
  Probe
agcgatcttcaaaaaggcgacctat

SEQ ID NO: 356196 - DNA, 25 bp, Artificial
  Probe
accgacaagatccagggaaaggact

SEQ ID NO: 356197 - DNA, 25 bp, Artificial
  Probe
ccaaattcctgattggtcatgaagg

SEQ ID NO: 356198 - DNA, 25 bp, Artificial
  Probe
aaatctgcccagaagaggcagatgg

SEQ ID NO: 356199 - DNA, 25 bp, Artificial
  Probe
ctgaaggctacgatgcctctcgaaa

SEQ ID NO: 356200 - DNA, 25 bp, Artificial
  Probe
cgacctatctgaaggctacgatgcc

SEQ ID NO: 356201 - DNA, 25 bp, Artificial
  Probe
ggtgccattactcagacacccaaat

SEQ ID NO: 356202 - DNA, 25 bp, Artificial
  Probe
agctgaccttgaaatgtaaacagaa

SEQ ID NO: 356203 - DNA, 25 bp, Artificial
  Probe
gagctgaccttgaaatgtaaacaga

SEQ ID NO: 356204 - DNA, 25 bp, Artificial
  Probe
ctacgatgcctctcgaaaggagaag

SEQ ID NO: 356205 - DNA, 25 bp, Artificial
  Probe
ttcaatgttctggtaccgacaagat

SEQ ID NO: 356206 - DNA, 25 bp, Artificial
  Probe
ggctacgatgcctctcgaaaggaga

SEQ ID NO: 356207 - DNA, 25 bp, Artificial
  Probe
aggcgacctatctgaaggctacgat

SEQ ID NO: 356208 - DNA, 25 bp, Artificial
  Probe
ggcatctttttctctcactgtgaaa

SEQ ID NO: 356209 - DNA, 25 bp, Artificial
  Probe
cgatcttcaaaaaggcgacctatct

SEQ ID NO: 356210 - DNA, 25 bp, Artificial
  Probe
gtggtgccattactcagacacccaa

SEQ ID NO: 356211 - DNA, 25 bp, Artificial
  Probe
actgaaagcgatcttcaaaaaggcg

SEQ ID NO: 356212 - DNA, 25 bp, Artificial
  Probe
aaaggcgacctatctgaaggctacg

SEQ ID NO: 356213 - DNA, 25 bp, Artificial
  Probe
cctctcgaaaggagaaggcatcttt

SEQ ID NO: 356214 - DNA, 25 bp, Artificial
  Probe
gcctctcgaaaggagaaggcatctt

SEQ ID NO: 356215 - DNA, 25 bp, Artificial
  Probe
gagaaggcatctttttctctcactg

SEQ ID NO: 356216 - DNA, 25 bp, Artificial
  Probe
cactgtgaaatctgcccagaagagg

SEQ ID NO: 356217 - DNA, 25 bp, Artificial
  Probe
gaaagcgatcttcaaaaaggcgacc

SEQ ID NO: 356218 - DNA, 25 bp, Artificial
  Probe
agaaggcatctttttctctcactgt

SEQ ID NO: 356219 - DNA, 25 bp, Artificial
  Probe
tgaaggctacgatgcctctcgaaag

SEQ ID NO: 356220 - DNA, 25 bp, Artificial
  Probe
tgaaatctgcccagaagaggcagat

SEQ ID NO: 356221 - DNA, 25 bp, Artificial
  Probe
taactgaaagcgatcttcaaaaagg

SEQ ID NO: 356222 - DNA, 25 bp, Artificial
  Probe
ctcagacacccaaattcctgattgg

SEQ ID NO: 356223 - DNA, 25 bp, Artificial
  Probe
ggcaagagctgaccttgaaatgtaa

SEQ ID NO: 356224 - DNA, 25 bp, Artificial
  Probe
ttcaaaaaggcgacctatctgaagg

SEQ ID NO: 356225 - DNA, 25 bp, Artificial
  Probe
ggtaccgacaagatccagggaaagg

SEQ ID NO: 356226 - DNA, 25 bp, Artificial
  Probe
tatctgaaggctacgatgcctctcg

SEQ ID NO: 356227 - DNA, 25 bp, Artificial
  Probe
ctgattggtcatgaagggcaagagc

SEQ ID NO: 356228 - DNA, 25 bp, Artificial
  Probe
aagggcaagagctgaccttgaaatg

SEQ ID NO: 356229 - DNA, 25 bp, Artificial
  Probe
cctgattggtcatgaagggcaagag

SEQ ID NO: 356230 - DNA, 25 bp, Artificial
  Probe
cgatgcctctcgaaaggagaaggca

SEQ ID NO: 356231 - DNA, 25 bp, Artificial
  Probe
cccaaattcctgattggtcatgaag

SEQ ID NO: 356232 - DNA, 25 bp, Artificial
  Probe
gttctggtaccgacaagatccaggg

SEQ ID NO: 356233 - DNA, 25 bp, Artificial
  Probe
ttctggtaccgacaagatccaggga

SEQ ID NO: 356234 - DNA, 25 bp, Artificial
  Probe
tcaatgttctggtaccgacaagatc

SEQ ID NO: 356235 - DNA, 25 bp, Artificial
  Probe
tgcctctcgaaaggagaaggcatct

SEQ ID NO: 356236 - DNA, 25 bp, Artificial
  Probe
aggcatctttttctctcactgtgaa

SEQ ID NO: 356237 - DNA, 25 bp, Artificial
  Probe
tcaaaaaggcgacctatctgaaggc

SEQ ID NO: 356238 - DNA, 25 bp, Artificial
  Probe
ctatctgaaggctacgatgcctctc

SEQ ID NO: 356239 - DNA, 25 bp, Artificial
  Probe
ttctctcactgtgaaatctgcccag

SEQ ID NO: 356240 - DNA, 25 bp, Artificial
  Probe
atttcaaacctagaaggctgacatg

SEQ ID NO: 356241 - DNA, 25 bp, Artificial
  Probe
ttttctgaaactcagctggtacatg

SEQ ID NO: 356242 - DNA, 25 bp, Artificial
  Probe
catatacttttgctgggccttactt

SEQ ID NO: 356243 - DNA, 25 bp, Artificial
  Probe
gctgacatgtatagccttcaagaag

SEQ ID NO: 356244 - DNA, 25 bp, Artificial
  Probe
ataacatgatttcaaacctagaagg

SEQ ID NO: 356245 - DNA, 25 bp, Artificial
  Probe
actaacatatacttttgctgggcct

SEQ ID NO: 356246 - DNA, 25 bp, Artificial
  Probe
tgatttcaaacctagaaggctgaca

SEQ ID NO: 356247 - DNA, 25 bp, Artificial
  Probe
ggaattttctgaaactcagctggta

SEQ ID NO: 356248 - DNA, 25 bp, Artificial
  Probe
actcagctggtacatgtaactaaaa

SEQ ID NO: 356249 - DNA, 25 bp, Artificial
  Probe
cttcaagaagcagatgtgctccttg

SEQ ID NO: 356250 - DNA, 25 bp, Artificial
  Probe
tttcaaacctagaaggctgacatgt

SEQ ID NO: 356251 - DNA, 25 bp, Artificial
  Probe
atagccttcaagaagcagatgtgct

SEQ ID NO: 356252 - DNA, 25 bp, Artificial
  Probe
aagcagatgtgctccttgaaattca

SEQ ID NO: 356253 - DNA, 25 bp, Artificial
  Probe
acatatacttttgctgggccttact

SEQ ID NO: 356254 - DNA, 25 bp, Artificial
  Probe
agaagcagatgtgctccttgaaatt

SEQ ID NO: 356255 - DNA, 25 bp, Artificial
  Probe
acatgatttcaaacctagaaggctg

SEQ ID NO: 356256 - DNA, 25 bp, Artificial
  Probe
gccttcaagaagcagatgtgctcct

SEQ ID NO: 356257 - DNA, 25 bp, Artificial
  Probe
tgtatagccttcaagaagcagatgt

SEQ ID NO: 356258 - DNA, 25 bp, Artificial
  Probe
aacatgatttcaaacctagaaggct

SEQ ID NO: 356259 - DNA, 25 bp, Artificial
  Probe
ctgaaactcagctggtacatgtaac

SEQ ID NO: 356260 - DNA, 25 bp, Artificial
  Probe
ctaacatatacttttgctgggcctt

SEQ ID NO: 356261 - DNA, 25 bp, Artificial
  Probe
gcagatgtgctccttgaaattcact

SEQ ID NO: 356262 - DNA, 25 bp, Artificial
  Probe
acctagaaggctgacatgtatagcc

SEQ ID NO: 356263 - DNA, 25 bp, Artificial
  Probe
aactcagctggtacatgtaactaaa

SEQ ID NO: 356264 - DNA, 25 bp, Artificial
  Probe
gaaactcagctggtacatgtaacta

SEQ ID NO: 356265 - DNA, 25 bp, Artificial
  Probe
gatgtgctccttgaaattcactaac

SEQ ID NO: 356266 - DNA, 25 bp, Artificial
  Probe
gaagcagatgtgctccttgaaattc

SEQ ID NO: 356267 - DNA, 25 bp, Artificial
  Probe
agcagatgtgctccttgaaattcac

SEQ ID NO: 356268 - DNA, 25 bp, Artificial
  Probe
acatgtatagccttcaagaagcaga

SEQ ID NO: 356269 - DNA, 25 bp, Artificial
  Probe
ttcactaacatatacttttgctggg

SEQ ID NO: 356270 - DNA, 25 bp, Artificial
  Probe
aacatatacttttgctgggccttac

SEQ ID NO: 356271 - DNA, 25 bp, Artificial
  Probe
tggaattttctgaaactcagctggt

SEQ ID NO: 356272 - DNA, 25 bp, Artificial
  Probe
cactaacatatacttttgctgggcc

SEQ ID NO: 356273 - DNA, 25 bp, Artificial
  Probe
tcagctggtacatgtaactaaaata

SEQ ID NO: 356274 - DNA, 25 bp, Artificial
  Probe
tgaaactcagctggtacatgtaact

SEQ ID NO: 356275 - DNA, 25 bp, Artificial
  Probe
gtatagccttcaagaagcagatgtg

SEQ ID NO: 356276 - DNA, 25 bp, Artificial
  Probe
atgatttcaaacctagaaggctgac

SEQ ID NO: 356277 - DNA, 25 bp, Artificial
  Probe
atgtatagccttcaagaagcagatg

SEQ ID NO: 356278 - DNA, 25 bp, Artificial
  Probe
ccttcaagaagcagatgtgctcctt

SEQ ID NO: 356279 - DNA, 25 bp, Artificial
  Probe
attttctgaaactcagctggtacat

SEQ ID NO: 356280 - DNA, 25 bp, Artificial
  Probe
aattttctgaaactcagctggtaca

SEQ ID NO: 356281 - DNA, 25 bp, Artificial
  Probe
atatacttttgctgggccttacttt

SEQ ID NO: 356282 - DNA, 25 bp, Artificial
  Probe
ttcaaacctagaaggctgacatgta

SEQ ID NO: 356283 - DNA, 25 bp, Artificial
  Probe
aacctagaaggctgacatgtatagc

SEQ ID NO: 356284 - DNA, 25 bp, Artificial
  Probe
aggctgacatgtatagccttcaaga

SEQ ID NO: 356285 - DNA, 25 bp, Artificial
  Probe
ctcagctggtacatgtaactaaaat

SEQ ID NO: 356286 - DNA, 25 bp, Artificial
  Probe
ccagtctgtggagagtgacattcat

SEQ ID NO: 356287 - DNA, 25 bp, Artificial
  Probe
ccagttctgggttgactgtggaagt

SEQ ID NO: 356288 - DNA, 25 bp, Artificial
  Probe
atgcgccagtctgtggagagtgaca

SEQ ID NO: 356289 - DNA, 25 bp, Artificial
  Probe
ctcagattgccagttctgggttgac

SEQ ID NO: 356290 - DNA, 25 bp, Artificial
  Probe
tcgaagcgctcaaggaggagctgct

SEQ ID NO: 356291 - DNA, 25 bp, Artificial
  Probe
caacatcacgaggttgcagctggag

SEQ ID NO: 356292 - DNA, 25 bp, Artificial
  Probe
gttgactgtggaagtggatgctccc

SEQ ID NO: 356293 - DNA, 25 bp, Artificial
  Probe
agctgctgttcatgaagaagaatca

SEQ ID NO: 356294 - DNA, 25 bp, Artificial
  Probe
ccatgcgccagtctgtggagagtga

SEQ ID NO: 356295 - DNA, 25 bp, Artificial
  Probe
ttctgtggacaatgcccgcatcgtc

SEQ ID NO: 356296 - DNA, 25 bp, Artificial
  Probe
agatcatggcggacatccgtgccca

SEQ ID NO: 356297 - DNA, 25 bp, Artificial
  Probe
ggaagctcagattgccagttctggg

SEQ ID NO: 356298 - DNA, 25 bp, Artificial
  Probe
tggaagtggatgctcccaaatctca

SEQ ID NO: 356299 - DNA, 25 bp, Artificial
  Probe
tcagcaagatcatggcggacatccg

SEQ ID NO: 356300 - DNA, 25 bp, Artificial
  Probe
tcaaggaggagctgctgttcatgaa

SEQ ID NO: 356301 - DNA, 25 bp, Artificial
  Probe
cgcatcgtcttgcagatcgacaatg

SEQ ID NO: 356302 - DNA, 25 bp, Artificial
  Probe
ttgactgtggaagtggatgctccca

SEQ ID NO: 356303 - DNA, 25 bp, Artificial
  Probe
ctttgcgaattctgtggacaatgcc

SEQ ID NO: 356304 - DNA, 25 bp, Artificial
  Probe
gctcagattgccagttctgggttga

SEQ ID NO: 356305 - DNA, 25 bp, Artificial
  Probe
gacagaaatcgaagcgctcaaggag

SEQ ID NO: 356306 - DNA, 25 bp, Artificial
  Probe
atcgaagacctgagggctcagatct

SEQ ID NO: 356307 - DNA, 25 bp, Artificial
  Probe
gtatgagacggaactggccatgcgc

SEQ ID NO: 356308 - DNA, 25 bp, Artificial
  Probe
agtgacattcatggactccgcaagg

SEQ ID NO: 356309 - DNA, 25 bp, Artificial
  Probe
acctcagcaagatcatggcggacat

SEQ ID NO: 356310 - DNA, 25 bp, Artificial
  Probe
ccgctgatgactttagagtcaagta

SEQ ID NO: 356311 - DNA, 25 bp, Artificial
  Probe
gagctgctgttcatgaagaagaatc

SEQ ID NO: 356312 - DNA, 25 bp, Artificial
  Probe
tccaaggcctggaagctcagattgc

SEQ ID NO: 356313 - DNA, 25 bp, Artificial
  Probe
cagatctttgcgaattctgtggaca

SEQ ID NO: 356314 - DNA, 25 bp, Artificial
  Probe
gttgcagctggagacagaaatcgaa

SEQ ID NO: 356315 - DNA, 25 bp, Artificial
  Probe
agacctgagggctcagatctttgcg

SEQ ID NO: 356316 - DNA, 25 bp, Artificial
  Probe
ccgtcttgccgctgatgactttaga

SEQ ID NO: 356317 - DNA, 25 bp, Artificial
  Probe
atcacgaggttgcagctggagacag

SEQ ID NO: 356318 - DNA, 25 bp, Artificial
  Probe
cgaattctgtggacaatgcccgcat

SEQ ID NO: 356319 - DNA, 25 bp, Artificial
  Probe
aagcgctcaaggaggagctgctgtt

SEQ ID NO: 356320 - DNA, 25 bp, Artificial
  Probe
ggctcagatctttgcgaattctgtg

SEQ ID NO: 356321 - DNA, 25 bp, Artificial
  Probe
acatcacgaggttgcagctggagac

SEQ ID NO: 356322 - DNA, 25 bp, Artificial
  Probe
gtggatgacaccaacatcacgaggt

SEQ ID NO: 356323 - DNA, 25 bp, Artificial
  Probe
acaccaacatcacgaggttgcagct

SEQ ID NO: 356324 - DNA, 25 bp, Artificial
  Probe
atgagacggaactggccatgcgcca

SEQ ID NO: 356325 - DNA, 25 bp, Artificial
  Probe
acattcatggactccgcaaggtggt

SEQ ID NO: 356326 - DNA, 25 bp, Artificial
  Probe
gattgccagttctgggttgactgtg

SEQ ID NO: 356327 - DNA, 25 bp, Artificial
  Probe
aaatcgaagcgctcaaggaggagct

SEQ ID NO: 356328 - DNA, 25 bp, Artificial
  Probe
gcgccagtctgtggagagtgacatt

SEQ ID NO: 356329 - DNA, 25 bp, Artificial
  Probe
tgcgaattctgtggacaatgcccgc

SEQ ID NO: 356330 - DNA, 25 bp, Artificial
  Probe
caatgcccgcatcgtcttgcagatc

SEQ ID NO: 356331 - DNA, 25 bp, Artificial
  Probe
accaacatcacgaggttgcagctgg

SEQ ID NO: 356332 - DNA, 25 bp, Artificial
  Probe
actggtaccagaagcagggacccgg

SEQ ID NO: 356333 - DNA, 25 bp, Artificial
  Probe
ggcgccaccattgagaactccaaga

SEQ ID NO: 356334 - DNA, 25 bp, Artificial
  Probe
cgttgaacacccaggtcgctgtcca

SEQ ID NO: 356335 - DNA, 25 bp, Artificial
  Probe
aggacttgcgcgacaacatccttgg

SEQ ID NO: 356336 - DNA, 25 bp, Artificial
  Probe
gagacgttgaacacccaggtcgctg

SEQ ID NO: 356337 - DNA, 25 bp, Artificial
  Probe
tggctgcagatgacttgcggaccaa

SEQ ID NO: 356338 - DNA, 25 bp, Artificial
  Probe
cgcctggctgcagatgacttgcgga

SEQ ID NO: 356339 - DNA, 25 bp, Artificial
  Probe
gtgattacagccagtacttcaagac

SEQ ID NO: 356340 - DNA, 25 bp, Artificial
  Probe
gctgcagatgacttgcggaccaagt

SEQ ID NO: 356341 - DNA, 25 bp, Artificial
  Probe
gaggtggattccacaccaggcattg

SEQ ID NO: 356342 - DNA, 25 bp, Artificial
  Probe
ggcccttccgtgattacagccagta

SEQ ID NO: 356343 - DNA, 25 bp, Artificial
  Probe
caagaccatcgaggacttgcgcgac

SEQ ID NO: 356344 - DNA, 25 bp, Artificial
  Probe
cgggcccttccgtgattacagccag

SEQ ID NO: 356345 - DNA, 25 bp, Artificial
  Probe
tccttggcgccaccattgagaactc

SEQ ID NO: 356346 - DNA, 25 bp, Artificial
  Probe
ttgagacagaacagggcctgcgcat

SEQ ID NO: 356347 - DNA, 25 bp, Artificial
  Probe
ctccaagatagtcctacagatcgac

SEQ ID NO: 356348 - DNA, 25 bp, Artificial
  Probe
agaaccacgaggaggaaattagtgc

SEQ ID NO: 356349 - DNA, 25 bp, Artificial
  Probe
ccgcctggctgcagatgacttgcgg

SEQ ID NO: 356350 - DNA, 25 bp, Artificial
  Probe
atgacttgcggaccaagtttgagac

SEQ ID NO: 356351 - DNA, 25 bp, Artificial
  Probe
acttgcgcgacaacatccttggcgc

SEQ ID NO: 356352 - DNA, 25 bp, Artificial
  Probe
agaactccaagatagtcctacagat

SEQ ID NO: 356353 - DNA, 25 bp, Artificial
  Probe
ccatcgaggacttgcgcgacaacat

SEQ ID NO: 356354 - DNA, 25 bp, Artificial
  Probe
ccattgagaactccaagatagtcct

SEQ ID NO: 356355 - DNA, 25 bp, Artificial
  Probe
ccaagatcctgagtgagatgagaag

SEQ ID NO: 356356 - DNA, 25 bp, Artificial
  Probe
gtggattccacaccaggcattgacc

SEQ ID NO: 356357 - DNA, 25 bp, Artificial
  Probe
ccaagatagtcctacagatcgacaa

SEQ ID NO: 356358 - DNA, 25 bp, Artificial
  Probe
atccttggcgccaccattgagaact

SEQ ID NO: 356359 - DNA, 25 bp, Artificial
  Probe
ttgcgcgacaacatccttggcgcca

SEQ ID NO: 356360 - DNA, 25 bp, Artificial
  Probe
gccaagatcctgagtgagatgagaa

SEQ ID NO: 356361 - DNA, 25 bp, Artificial
  Probe
gacccgggcccttccgtgattacag

SEQ ID NO: 356362 - DNA, 25 bp, Artificial
  Probe
accattgagaactccaagatagtcc

SEQ ID NO: 356363 - DNA, 25 bp, Artificial
  Probe
gcccgcctggctgcagatgacttgc

SEQ ID NO: 356364 - DNA, 25 bp, Artificial
  Probe
atgagacgttgaacacccaggtcgc

SEQ ID NO: 356365 - DNA, 25 bp, Artificial
  Probe
ttgagaactccaagatagtcctaca

SEQ ID NO: 356366 - DNA, 25 bp, Artificial
  Probe
cttggcgccaccattgagaactcca

SEQ ID NO: 356367 - DNA, 25 bp, Artificial
  Probe
tgcggaccaagtttgagacagaaca

SEQ ID NO: 356368 - DNA, 25 bp, Artificial
  Probe
ttccgtgattacagccagtacttca

SEQ ID NO: 356369 - DNA, 25 bp, Artificial
  Probe
aagaccatcgaggacttgcgcgaca

SEQ ID NO: 356370 - DNA, 25 bp, Artificial
  Probe
agatagtcctacagatcgacaatgc

SEQ ID NO: 356371 - DNA, 25 bp, Artificial
  Probe
aagtttgagacagaacagggcctgc

SEQ ID NO: 356372 - DNA, 25 bp, Artificial
  Probe
tgagacgttgaacacccaggtcgct

SEQ ID NO: 356373 - DNA, 25 bp, Artificial
  Probe
cttgcggaccaagtttgagacagaa

SEQ ID NO: 356374 - DNA, 25 bp, Artificial
  Probe
accatcgaggacttgcgcgacaaca

SEQ ID NO: 356375 - DNA, 25 bp, Artificial
  Probe
tacgcagatccagataaacaagact

SEQ ID NO: 356376 - DNA, 25 bp, Artificial
  Probe
cgccaccattgagaactccaagata

SEQ ID NO: 356377 - DNA, 25 bp, Artificial
  Probe
gacttgcggaccaagtttgagacag

SEQ ID NO: 356378 - DNA, 25 bp, Artificial
  Probe
gcccttggtgttgccttggggcatc

SEQ ID NO: 356379 - DNA, 25 bp, Artificial
  Probe
gcagcccttggtgttgccttggggc

SEQ ID NO: 356380 - DNA, 25 bp, Artificial
  Probe
ttggggcatctagtcagtcacacag

SEQ ID NO: 356381 - DNA, 25 bp, Artificial
  Probe
acagaccttgaacggtatcaactct

SEQ ID NO: 356382 - DNA, 25 bp, Artificial
  Probe
gttgccttggggcatctagtcagtc

SEQ ID NO: 356383 - DNA, 25 bp, Artificial
  Probe
tcacacagaccttgaacggtatcaa

SEQ ID NO: 356384 - DNA, 25 bp, Artificial
  Probe
gaccttgaacggtatcaactctttc

SEQ ID NO: 356385 - DNA, 25 bp, Artificial
  Probe
cacagaccttgaacggtatcaactc

SEQ ID NO: 356386 - DNA, 25 bp, Artificial
  Probe
tctagtcagtcacacagaccttgaa

SEQ ID NO: 356387 - DNA, 25 bp, Artificial
  Probe
tgccttggggcatctagtcagtcac

SEQ ID NO: 356388 - DNA, 25 bp, Artificial
  Probe
gaacggtatcaactctttcttttat

SEQ ID NO: 356389 - DNA, 25 bp, Artificial
  Probe
tggggcatctagtcagtcacacaga

SEQ ID NO: 356390 - DNA, 25 bp, Artificial
  Probe
cttggggcatctagtcagtcacaca

SEQ ID NO: 356391 - DNA, 25 bp, Artificial
  Probe
agaccttgaacggtatcaactcttt

SEQ ID NO: 356392 - DNA, 25 bp, Artificial
  Probe
ttgccttggggcatctagtcagtca

SEQ ID NO: 356393 - DNA, 25 bp, Artificial
  Probe
gcatctagtcagtcacacagacctt

SEQ ID NO: 356394 - DNA, 25 bp, Artificial
  Probe
agtcacacagaccttgaacggtatc

SEQ ID NO: 356395 - DNA, 25 bp, Artificial
  Probe
tcaactctttcttttataagtgctt

SEQ ID NO: 356396 - DNA, 25 bp, Artificial
  Probe
gtatcaactctttcttttataagtg

SEQ ID NO: 356397 - DNA, 25 bp, Artificial
  Probe
ctagtcagtcacacagaccttgaac

SEQ ID NO: 356398 - DNA, 25 bp, Artificial
  Probe
ggggcatctagtcagtcacacagac

SEQ ID NO: 356399 - DNA, 25 bp, Artificial
  Probe
tggtgttgccttggggcatctagtc

SEQ ID NO: 356400 - DNA, 25 bp, Artificial
  Probe
ccttggtgttgccttggggcatcta

SEQ ID NO: 356401 - DNA, 25 bp, Artificial
  Probe
caactctttcttttataagtgcttt

SEQ ID NO: 356402 - DNA, 25 bp, Artificial
  Probe
ggcatctagtcagtcacacagacct

SEQ ID NO: 356403 - DNA, 25 bp, Artificial
  Probe
cagcccttggtgttgccttggggca

SEQ ID NO: 356404 - DNA, 25 bp, Artificial
  Probe
acacagaccttgaacggtatcaact

SEQ ID NO: 356405 - DNA, 25 bp, Artificial
  Probe
ccttggggcatctagtcagtcacac

SEQ ID NO: 356406 - DNA, 25 bp, Artificial
  Probe
ggtatcaactctttcttttataagt

SEQ ID NO: 356407 - DNA, 25 bp, Artificial
  Probe
agcccttggtgttgccttggggcat

SEQ ID NO: 356408 - DNA, 25 bp, Artificial
  Probe
gccttggggcatctagtcagtcaca

SEQ ID NO: 356409 - DNA, 25 bp, Artificial
  Probe
atcaactctttcttttataagtgct

SEQ ID NO: 356410 - DNA, 25 bp, Artificial
  Probe
cttggtgttgccttggggcatctag

SEQ ID NO: 356411 - DNA, 25 bp, Artificial
  Probe
gtcagtcacacagaccttgaacggt

SEQ ID NO: 356412 - DNA, 25 bp, Artificial
  Probe
cacacagaccttgaacggtatcaac

SEQ ID NO: 356413 - DNA, 25 bp, Artificial
  Probe
accttgaacggtatcaactctttct

SEQ ID NO: 356414 - DNA, 25 bp, Artificial
  Probe
tgaacggtatcaactctttctttta

SEQ ID NO: 356415 - DNA, 25 bp, Artificial
  Probe
gggcatctagtcagtcacacagacc

SEQ ID NO: 356416 - DNA, 25 bp, Artificial
  Probe
catctagtcagtcacacagaccttg

SEQ ID NO: 356417 - DNA, 25 bp, Artificial
  Probe
gtcacacagaccttgaacggtatca

SEQ ID NO: 356418 - DNA, 25 bp, Artificial
  Probe
atctagtcagtcacacagaccttga

SEQ ID NO: 356419 - DNA, 25 bp, Artificial
  Probe
ttggtgttgccttggggcatctagt

SEQ ID NO: 356420 - DNA, 25 bp, Artificial
  Probe
tcagtcacacagaccttgaacggta

SEQ ID NO: 356421 - DNA, 25 bp, Artificial
  Probe
tagtcagtcacacagaccttgaacg

SEQ ID NO: 356422 - DNA, 25 bp, Artificial
  Probe
agtcagtcacacagaccttgaacgg

SEQ ID NO: 356423 - DNA, 25 bp, Artificial
  Probe
cggtatcaactctttcttttataag

SEQ ID NO: 356424 - DNA, 25 bp, Artificial
  Probe
acccctgttgtcgaagaagaaagct

SEQ ID NO: 356425 - DNA, 25 bp, Artificial
  Probe
acattcagtgggtatggctttcgtg

SEQ ID NO: 356426 - DNA, 25 bp, Artificial
  Probe
cagaatgccttattttgtagttcta

SEQ ID NO: 356427 - DNA, 25 bp, Artificial
  Probe
aatactgaaaacctcaaaggttatg

SEQ ID NO: 356428 - DNA, 25 bp, Artificial
  Probe
ggctttcgtgggatacacagctagg

SEQ ID NO: 356429 - DNA, 25 bp, Artificial
  Probe
ccctgttgtcgaagaagaaagctga

SEQ ID NO: 356430 - DNA, 25 bp, Artificial
  Probe
accaatgcatagttttcttctatgg

SEQ ID NO: 356431 - DNA, 25 bp, Artificial
  Probe
gttgctacaggatttgaacttctgt

SEQ ID NO: 356432 - DNA, 25 bp, Artificial
  Probe
gctgtttacattcagtgggtatggc

SEQ ID NO: 356433 - DNA, 25 bp, Artificial
  Probe
ctgtttacattcagtgggtatggct

SEQ ID NO: 356434 - DNA, 25 bp, Artificial
  Probe
ttttcaaggataaaccaatgcatag

SEQ ID NO: 356435 - DNA, 25 bp, Artificial
  Probe
caggatttgaacttctgtggtacag

SEQ ID NO: 356436 - DNA, 25 bp, Artificial
  Probe
gataaacccctgttgtcgaagaaga

SEQ ID NO: 356437 - DNA, 25 bp, Artificial
  Probe
tgggtatggctttcgtgggatacac

SEQ ID NO: 356438 - DNA, 25 bp, Artificial
  Probe
tgaaaaagataaacccctgttgtcg

SEQ ID NO: 356439 - DNA, 25 bp, Artificial
  Probe
acttctgtggtacagttaagagagc

SEQ ID NO: 356440 - DNA, 25 bp, Artificial
  Probe
gctgatggtgcgtctgttatgcagt

SEQ ID NO: 356441 - DNA, 25 bp, Artificial
  Probe
gtctgttatgcagtagggaccataa

SEQ ID NO: 356442 - DNA, 25 bp, Artificial
  Probe
aacatgtatctttaaagcagtttgc

SEQ ID NO: 356443 - DNA, 25 bp, Artificial
  Probe
cacagctagggtttgtgaattcttt

SEQ ID NO: 356444 - DNA, 25 bp, Artificial
  Probe
acacagctagggtttgtgaattctt

SEQ ID NO: 356445 - DNA, 25 bp, Artificial
  Probe
caatgcatagttttcttctatgggg

SEQ ID NO: 356446 - DNA, 25 bp, Artificial
  Probe
cgtgggatacacagctagggtttgt

SEQ ID NO: 356447 - DNA, 25 bp, Artificial
  Probe
ctacaggatttgaacttctgtggta

SEQ ID NO: 356448 - DNA, 25 bp, Artificial
  Probe
ctgaaaacctcaaaggttatgttga

SEQ ID NO: 356449 - DNA, 25 bp, Artificial
  Probe
aaacctcaaaggttatgttgattct

SEQ ID NO: 356450 - DNA, 25 bp, Artificial
  Probe
cattcagtgggtatggctttcgtgg

SEQ ID NO: 356451 - DNA, 25 bp, Artificial
  Probe
agcagaatgccttattttgtagttc

SEQ ID NO: 356452 - DNA, 25 bp, Artificial
  Probe
agataaacccctgttgtcgaagaag

SEQ ID NO: 356453 - DNA, 25 bp, Artificial
  Probe
ttttatgacatgtaagcagaatgcc

SEQ ID NO: 356454 - DNA, 25 bp, Artificial
  Probe
gaccataactgctgtttacattcag

SEQ ID NO: 356455 - DNA, 25 bp, Artificial
  Probe
ccataactgctgtttacattcagtg

SEQ ID NO: 356456 - DNA, 25 bp, Artificial
  Probe
gaatgccttattttgtagttctaac

SEQ ID NO: 356457 - DNA, 25 bp, Artificial
  Probe
aacctcaaaggttatgttgattctt

SEQ ID NO: 356458 - DNA, 25 bp, Artificial
  Probe
gtgcgtctgttatgcagtagggacc

SEQ ID NO: 356459 - DNA, 25 bp, Artificial
  Probe
ctgttatgcagtagggaccataact

SEQ ID NO: 356460 - DNA, 25 bp, Artificial
  Probe
agtagggaccataactgctgtttac

SEQ ID NO: 356461 - DNA, 25 bp, Artificial
  Probe
cttttatgacatgtaagcagaatgc

SEQ ID NO: 356462 - DNA, 25 bp, Artificial
  Probe
ctgatggtgcgtctgttatgcagta

SEQ ID NO: 356463 - DNA, 25 bp, Artificial
  Probe
gtatggctttcgtgggatacacagc

SEQ ID NO: 356464 - DNA, 25 bp, Artificial
  Probe
gtagttctaacttgttgctacagga

SEQ ID NO: 356465 - DNA, 25 bp, Artificial
  Probe
ctgctgtttacattcagtgggtatg

SEQ ID NO: 356466 - DNA, 25 bp, Artificial
  Probe
gcatgcctattacttttatgacatg

SEQ ID NO: 356467 - DNA, 25 bp, Artificial
  Probe
cttctgtggtacagttaagagagct

SEQ ID NO: 356468 - DNA, 25 bp, Artificial
  Probe
ggataaaccaatgcatagttttctt

SEQ ID NO: 356469 - DNA, 25 bp, Artificial
  Probe
gcctattacttttatgacatgtaag

SEQ ID NO: 356470 - DNA, 25 bp, Artificial
  Probe
agatgcagtcacacacatagggagg

SEQ ID NO: 356471 - DNA, 25 bp, Artificial
  Probe
tccttgataacattagtgattctga

SEQ ID NO: 356472 - DNA, 25 bp, Artificial
  Probe
atcttttgatgactacagtgatgac

SEQ ID NO: 356473 - DNA, 25 bp, Artificial
  Probe
cattcgcctttgtcttgtacttctg

SEQ ID NO: 356474 - DNA, 25 bp, Artificial
  Probe
tagtgtgtccacatcccaatcaaag

SEQ ID NO: 356475 - DNA, 25 bp, Artificial
  Probe
tgtttaagaagacaccttctgagta

SEQ ID NO: 356476 - DNA, 25 bp, Artificial
  Probe
cttgctgatggctgctagatgttaa

SEQ ID NO: 356477 - DNA, 25 bp, Artificial
  Probe
agaacgtgcatttctgtcaccttag

SEQ ID NO: 356478 - DNA, 25 bp, Artificial
  Probe
actccatgcaggagcggatttgctg

SEQ ID NO: 356479 - DNA, 25 bp, Artificial
  Probe
agtgtgtccacatcccaatcaaaga

SEQ ID NO: 356480 - DNA, 25 bp, Artificial
  Probe
cccagaacccacagatgtgttcctg

SEQ ID NO: 356481 - DNA, 25 bp, Artificial
  Probe
catccaagtgttgctaagatataag

SEQ ID NO: 356482 - DNA, 25 bp, Artificial
  Probe
actacagtgatgacgtgtgtggagc

SEQ ID NO: 356483 - DNA, 25 bp, Artificial
  Probe
cgcaatcgagattgggagctgaacc

SEQ ID NO: 356484 - DNA, 25 bp, Artificial
  Probe
gttatcagtcccacgcagacacagc

SEQ ID NO: 356485 - DNA, 25 bp, Artificial
  Probe
cttttgatgactacagtgatgacgt

SEQ ID NO: 356486 - DNA, 25 bp, Artificial
  Probe
aagatctggttttgttccactccat

SEQ ID NO: 356487 - DNA, 25 bp, Artificial
  Probe
agcaaccttctgttttctgtcacag

SEQ ID NO: 356488 - DNA, 25 bp, Artificial
  Probe
tgcctttccacagtattcgaaaaag

SEQ ID NO: 356489 - DNA, 25 bp, Artificial
  Probe
cacgcaatcgagattgggagctgaa

SEQ ID NO: 356490 - DNA, 25 bp, Artificial
  Probe
ttctgtcacagcattgtccttgctg

SEQ ID NO: 356491 - DNA, 25 bp, Artificial
  Probe
acagctacaaagagcggctccacca

SEQ ID NO: 356492 - DNA, 25 bp, Artificial
  Probe
agtctaagtacagctttctagcaac

SEQ ID NO: 356493 - DNA, 25 bp, Artificial
  Probe
aagagaagtctcattcgcctttgtc

SEQ ID NO: 356494 - DNA, 25 bp, Artificial
  Probe
cacagatgtgttcctggcccgctct

SEQ ID NO: 356495 - DNA, 25 bp, Artificial
  Probe
aacattggtgaaggatccaggacta

SEQ ID NO: 356496 - DNA, 25 bp, Artificial
  Probe
ccttattggagaatcttttgatgac

SEQ ID NO: 356497 - DNA, 25 bp, Artificial
  Probe
cctccgaagatagtgattggttatc

SEQ ID NO: 356498 - DNA, 25 bp, Artificial
  Probe
tccaggactatgacagaaaggtgga

SEQ ID NO: 356499 - DNA, 25 bp, Artificial
  Probe
tagagttaccacgacacacacttgc

SEQ ID NO: 356500 - DNA, 25 bp, Artificial
  Probe
caaagagcggctccaccactaaaaa

SEQ ID NO: 356501 - DNA, 25 bp, Artificial
  Probe
tccaccactaaaaataggtttgttg

SEQ ID NO: 356502 - DNA, 25 bp, Artificial
  Probe
tcaccttagcaggaaaagatctggt

SEQ ID NO: 356503 - DNA, 25 bp, Artificial
  Probe
gtacagctttctagcaaccttctgt

SEQ ID NO: 356504 - DNA, 25 bp, Artificial
  Probe
agtggactgcactgaagctgactcc

SEQ ID NO: 356505 - DNA, 25 bp, Artificial
  Probe
aggttaggacttcctccgaagatag

SEQ ID NO: 356506 - DNA, 25 bp, Artificial
  Probe
ggagctgaaccaaagcctcatcaaa

SEQ ID NO: 356507 - DNA, 25 bp, Artificial
  Probe
tgattggttatcagtcccacgcaga

SEQ ID NO: 356508 - DNA, 25 bp, Artificial
  Probe
ctacagtgatgacgtgtgtggagct

SEQ ID NO: 356509 - DNA, 25 bp, Artificial
  Probe
gcactgaagctgactccatccaagt

SEQ ID NO: 356510 - DNA, 25 bp, Artificial
  Probe
agattgggagctgaaccaaagcctc

SEQ ID NO: 356511 - DNA, 25 bp, Artificial
  Probe
aacagagatgcagtcacacacatag

SEQ ID NO: 356512 - DNA, 25 bp, Artificial
  Probe
gtctcattcgcctttgtcttgtact

SEQ ID NO: 356513 - DNA, 25 bp, Artificial
  Probe
gagttaccacgacacacacttgcct

SEQ ID NO: 356514 - DNA, 25 bp, Artificial
  Probe
gcttccctccttgataacattagtg

SEQ ID NO: 356515 - DNA, 25 bp, Artificial
  Probe
attcctaactagaattagttgtctg

SEQ ID NO: 356516 - DNA, 25 bp, Artificial
  Probe
cagcacatcttcattgcagctggag

SEQ ID NO: 356517 - DNA, 25 bp, Artificial
  Probe
cttcattgcagctggagacgacctg

SEQ ID NO: 356518 - DNA, 25 bp, Artificial
  Probe
tgcagcacatcttcattgcagctgg

SEQ ID NO: 356519 - DNA, 25 bp, Artificial
  Probe
ctctgggtacaccaaccgaagaaca

SEQ ID NO: 356520 - DNA, 25 bp, Artificial
  Probe
gaccaagtacttcagtaatcgtcca

SEQ ID NO: 356521 - DNA, 25 bp, Artificial
  Probe
aatatttgaaactctgggtacacca

SEQ ID NO: 356522 - DNA, 25 bp, Artificial
  Probe
ctgggtacaccaaccgaagaacagt

SEQ ID NO: 356523 - DNA, 25 bp, Artificial
  Probe
ttcagtaatcgtccagggccaacac

SEQ ID NO: 356524 - DNA, 25 bp, Artificial
  Probe
catcttcattgcagctggagacgac

SEQ ID NO: 356525 - DNA, 25 bp, Artificial
  Probe
cctgcttgagctcatacaaggcttg

SEQ ID NO: 356526 - DNA, 25 bp, Artificial
  Probe
tatttgaaactctgggtacaccaac

SEQ ID NO: 356527 - DNA, 25 bp, Artificial
  Probe
tcgtccagggccaacacctggatgc

SEQ ID NO: 356528 - DNA, 25 bp, Artificial
  Probe
acagtggcctgacatgtgtagtctt

SEQ ID NO: 356529 - DNA, 25 bp, Artificial
  Probe
ttgcagctggagacgacctgcttga

SEQ ID NO: 356530 - DNA, 25 bp, Artificial
  Probe
aaggcttgttcttattcaacccatg

SEQ ID NO: 356531 - DNA, 25 bp, Artificial
  Probe
ggcttgttcttattcaacccatgta

SEQ ID NO: 356532 - DNA, 25 bp, Artificial
  Probe
tcagtaatcgtccagggccaacacc

SEQ ID NO: 356533 - DNA, 25 bp, Artificial
  Probe
cagcttccaagaccaaactgtccag

SEQ ID NO: 356534 - DNA, 25 bp, Artificial
  Probe
gtggcctgacatgtgtagtcttcca

SEQ ID NO: 356535 - DNA, 25 bp, Artificial
  Probe
agaacagtggcctgacatgtgtagt

SEQ ID NO: 356536 - DNA, 25 bp, Artificial
  Probe
acctggatgccagcttccaagacca

SEQ ID NO: 356537 - DNA, 25 bp, Artificial
  Probe
tgccagcttccaagaccaaactgtc

SEQ ID NO: 356538 - DNA, 25 bp, Artificial
  Probe
acttcagtaatcgtccagggccaac

SEQ ID NO: 356539 - DNA, 25 bp, Artificial
  Probe
cagggccaacacctggatgccagct

SEQ ID NO: 356540 - DNA, 25 bp, Artificial
  Probe
tccagggccaacacctggatgccag

SEQ ID NO: 356541 - DNA, 25 bp, Artificial
  Probe
gtccagggccaacacctggatgcca

SEQ ID NO: 356542 - DNA, 25 bp, Artificial
  Probe
aagtacttcagtaatcgtccagggc

SEQ ID NO: 356543 - DNA, 25 bp, Artificial
  Probe
ctggatgccagcttccaagaccaaa

SEQ ID NO: 356544 - DNA, 25 bp, Artificial
  Probe
cagctggagacgacctgcttgagct

SEQ ID NO: 356545 - DNA, 25 bp, Artificial
  Probe
tgaaactctgggtacaccaaccgaa

SEQ ID NO: 356546 - DNA, 25 bp, Artificial
  Probe
tagaattacagcttcacaggcgttg

SEQ ID NO: 356547 - DNA, 25 bp, Artificial
  Probe
gaaactctgggtacaccaaccgaag

SEQ ID NO: 356548 - DNA, 25 bp, Artificial
  Probe
ctggagacgacctgcttgagctcat

SEQ ID NO: 356549 - DNA, 25 bp, Artificial
  Probe
agcttccaagaccaaactgtccagt

SEQ ID NO: 356550 - DNA, 25 bp, Artificial
  Probe
tgagctcatacaaggcttgttctta

SEQ ID NO: 356551 - DNA, 25 bp, Artificial
  Probe
acgacctgcttgagctcatacaagg

SEQ ID NO: 356552 - DNA, 25 bp, Artificial
  Probe
tgcttgagctcatacaaggcttgtt

SEQ ID NO: 356553 - DNA, 25 bp, Artificial
  Probe
agaattacagcttcacaggcgttga

SEQ ID NO: 356554 - DNA, 25 bp, Artificial
  Probe
cagtaatcgtccagggccaacacct

SEQ ID NO: 356555 - DNA, 25 bp, Artificial
  Probe
agaatatttgaaactctgggtacac

SEQ ID NO: 356556 - DNA, 25 bp, Artificial
  Probe
gcttgagctcatacaaggcttgttc

SEQ ID NO: 356557 - DNA, 25 bp, Artificial
  Probe
tactagaattacagcttcacaggcg

SEQ ID NO: 356558 - DNA, 25 bp, Artificial
  Probe
cctggatgccagcttccaagaccaa

SEQ ID NO: 356559 - DNA, 25 bp, Artificial
  Probe
tgtactagaattacagcttcacagg

SEQ ID NO: 356560 - DNA, 25 bp, Artificial
  Probe
gggccaacacctggatgccagcttc

SEQ ID NO: 356561 - DNA, 25 bp, Artificial
  Probe
gatgccagcttccaagaccaaactg

SEQ ID NO: 356562 - DNA, 25 bp, Artificial
  Probe
tgctgtaggctttttggactccctt

SEQ ID NO: 356563 - DNA, 25 bp, Artificial
  Probe
tgacgtgccaccggtgggggtgggc

SEQ ID NO: 356564 - DNA, 25 bp, Artificial
  Probe
ttgctggctgtctgacgtgccaccg

SEQ ID NO: 356565 - DNA, 25 bp, Artificial
  Probe
cagcccccgggctggggcgtgcgga

SEQ ID NO: 356566 - DNA, 25 bp, Artificial
  Probe
ctggctgtctgacgtgccaccggtg

SEQ ID NO: 356567 - DNA, 25 bp, Artificial
  Probe
aggcaggacgcgacgactttcttag

SEQ ID NO: 356568 - DNA, 25 bp, Artificial
  Probe
gctctctgtcgtctgggctctgggc

SEQ ID NO: 356569 - DNA, 25 bp, Artificial
  Probe
caggctcttggggcttgtcggcgag

SEQ ID NO: 356570 - DNA, 25 bp, Artificial
  Probe
aaaggctggcactcacaggctgggc

SEQ ID NO: 356571 - DNA, 25 bp, Artificial
  Probe
gaataccgggtgctgtaggcttttt

SEQ ID NO: 356572 - DNA, 25 bp, Artificial
  Probe
cttgctggctgtctgacgtgccacc

SEQ ID NO: 356573 - DNA, 25 bp, Artificial
  Probe
gctcttggggcttgtcggcgagggc

SEQ ID NO: 356574 - DNA, 25 bp, Artificial
  Probe
ggcaggcaggcaggcagcccccggg

SEQ ID NO: 356575 - DNA, 25 bp, Artificial
  Probe
ataccgggtgctgtaggctttttgg

SEQ ID NO: 356576 - DNA, 25 bp, Artificial
  Probe
aaggcaggacgcgacgactttctta

SEQ ID NO: 356577 - DNA, 25 bp, Artificial
  Probe
cctgcgtggggaaaggctggcactc

SEQ ID NO: 356578 - DNA, 25 bp, Artificial
  Probe
aggagagacctctgcgcatcctgcg

SEQ ID NO: 356579 - DNA, 25 bp, Artificial
  Probe
ggctctgggctctgggctggggact

SEQ ID NO: 356580 - DNA, 25 bp, Artificial
  Probe
aggctgggcccgtgttccatccagg

SEQ ID NO: 356581 - DNA, 25 bp, Artificial
  Probe
taccgggtgctgtaggctttttgga

SEQ ID NO: 356582 - DNA, 25 bp, Artificial
  Probe
tgtaggctttttggactcccttttg

SEQ ID NO: 356583 - DNA, 25 bp, Artificial
  Probe
gggctctctgtcgtctgggctctgg

SEQ ID NO: 356584 - DNA, 25 bp, Artificial
  Probe
ggcttgctggctgtctgacgtgcca

SEQ ID NO: 356585 - DNA, 25 bp, Artificial
  Probe
gcaggacgcgacgactttcttaggt

SEQ ID NO: 356586 - DNA, 25 bp, Artificial
  Probe
gctggctgtctgacgtgccaccggt

SEQ ID NO: 356587 - DNA, 25 bp, Artificial
  Probe
gtgctgtaggctttttggactccct

SEQ ID NO: 356588 - DNA, 25 bp, Artificial
  Probe
tgctggctgtctgacgtgccaccgg

SEQ ID NO: 356589 - DNA, 25 bp, Artificial
  Probe
gcgggcctggcgggcggctgagcga

SEQ ID NO: 356590 - DNA, 25 bp, Artificial
  Probe
ctctctgtcgtctgggctctgggct

SEQ ID NO: 356591 - DNA, 25 bp, Artificial
  Probe
gggcccgtgttccatccagggcggg

SEQ ID NO: 356592 - DNA, 25 bp, Artificial
  Probe
gctgtaggctttttggactcccttt

SEQ ID NO: 356593 - DNA, 25 bp, Artificial
  Probe
gcttgctggctgtctgacgtgccac

SEQ ID NO: 356594 - DNA, 25 bp, Artificial
  Probe
aggctggcactcacaggctgggccc

SEQ ID NO: 356595 - DNA, 25 bp, Artificial
  Probe
tgggctctctgtcgtctgggctctg

SEQ ID NO: 356596 - DNA, 25 bp, Artificial
  Probe
ggcaggacgcgacgactttcttagg

SEQ ID NO: 356597 - DNA, 25 bp, Artificial
  Probe
gccctcgtctacggccataccaccc

SEQ ID NO: 356598 - DNA, 25 bp, Artificial
  Probe
ccgggtgctgtaggctttttggact

SEQ ID NO: 356599 - DNA, 25 bp, Artificial
  Probe
ggtgctgtaggctttttggactccc

SEQ ID NO: 356600 - DNA, 25 bp, Artificial
  Probe
cgtctacggccataccaccctgaac

SEQ ID NO: 356601 - DNA, 25 bp, Artificial
  Probe
gactcgggactcgggactcgggact

SEQ ID NO: 356602 - DNA, 25 bp, Artificial
  Probe
aaggctggcactcacaggctgggcc

SEQ ID NO: 356603 - DNA, 25 bp, Artificial
  Probe
aataccgggtgctgtaggctttttg

SEQ ID NO: 356604 - DNA, 25 bp, Artificial
  Probe
gggcctggcgggcggctgagcgagc

SEQ ID NO: 356605 - DNA, 25 bp, Artificial
  Probe
ctgggcccgtgttccatccagggcg

SEQ ID NO: 356606 - DNA, 25 bp, Artificial
  Probe
gctggggaggctgtaggccacgcga

SEQ ID NO: 356607 - DNA, 25 bp, Artificial
  Probe
gcgcggaaggcaggacgcgacgact

SEQ ID NO: 356608 - DNA, 25 bp, Artificial
  Probe
agcagtcataacaatgacttgaccg

SEQ ID NO: 356609 - DNA, 25 bp, Artificial
  Probe
tcccgagttccactgagttcccaag

SEQ ID NO: 356610 - DNA, 25 bp, Artificial
  Probe
cactgagttcccaagcagtcataac

SEQ ID NO: 356611 - DNA, 25 bp, Artificial
  Probe
ccctctgacaaaacagggcagaagg

SEQ ID NO: 356612 - DNA, 25 bp, Artificial
  Probe
gagcaatgcaataactctgggagag

SEQ ID NO: 356613 - DNA, 25 bp, Artificial
  Probe
cgagttccactgagttcccaagcag

SEQ ID NO: 356614 - DNA, 25 bp, Artificial
  Probe
aacctctccgagctgctgaagggcc

SEQ ID NO: 356615 - DNA, 25 bp, Artificial
  Probe
ttcgggaccaatatattgtgggtac

SEQ ID NO: 356616 - DNA, 25 bp, Artificial
  Probe
aaggactctgtttgagccagtttct

SEQ ID NO: 356617 - DNA, 25 bp, Artificial
  Probe
cccaagcagtcataacaatgacttg

SEQ ID NO: 356618 - DNA, 25 bp, Artificial
  Probe
tgacttgaccgcaagacatttgctg

SEQ ID NO: 356619 - DNA, 25 bp, Artificial
  Probe
tgtggagtttcacgtgccaccggga

SEQ ID NO: 356620 - DNA, 25 bp, Artificial
  Probe
tctgtttgagccagtttcttccctt

SEQ ID NO: 356621 - DNA, 25 bp, Artificial
  Probe
aaaggactctgtttgagccagtttc

SEQ ID NO: 356622 - DNA, 25 bp, Artificial
  Probe
agttccactgagttcccaagcagtc

SEQ ID NO: 356623 - DNA, 25 bp, Artificial
  Probe
gagccagtttcttcccttgcctgtt

SEQ ID NO: 356624 - DNA, 25 bp, Artificial
  Probe
tatcttgtaaatagacccagagcag

SEQ ID NO: 356625 - DNA, 25 bp, Artificial
  Probe
gttcccaagcagtcataacaatgac

SEQ ID NO: 356626 - DNA, 25 bp, Artificial
  Probe
gtttcacgtgccaccgggacgacac

SEQ ID NO: 356627 - DNA, 25 bp, Artificial
  Probe
ggactctgtttgagccagtttcttc

SEQ ID NO: 356628 - DNA, 25 bp, Artificial
  Probe
actgatggacgaagccagtgttggt

SEQ ID NO: 356629 - DNA, 25 bp, Artificial
  Probe
tcataacaatgacttgaccgcaaga

SEQ ID NO: 356630 - DNA, 25 bp, Artificial
  Probe
ccgttcgggaccaatatattgtggg

SEQ ID NO: 356631 - DNA, 25 bp, Artificial
  Probe
tgtttgagccagtttcttcccttgc

SEQ ID NO: 356632 - DNA, 25 bp, Artificial
  Probe
caagcagtcataacaatgacttgac

SEQ ID NO: 356633 - DNA, 25 bp, Artificial
  Probe
cctctgacaaaacagggcagaaggg

SEQ ID NO: 356634 - DNA, 25 bp, Artificial
  Probe
ctttcagcactgatggacgaagcca

SEQ ID NO: 356635 - DNA, 25 bp, Artificial
  Probe
ggaaaggactctgtttgagccagtt

SEQ ID NO: 356636 - DNA, 25 bp, Artificial
  Probe
cgttcgggaccaatatattgtgggt

SEQ ID NO: 356637 - DNA, 25 bp, Artificial
  Probe
tttgagccagtttcttcccttgcct

SEQ ID NO: 356638 - DNA, 25 bp, Artificial
  Probe
acctctccgagctgctgaagggcca

SEQ ID NO: 356639 - DNA, 25 bp, Artificial
  Probe
accgcaagacatttgctgaactcag

SEQ ID NO: 356640 - DNA, 25 bp, Artificial
  Probe
ctctgacaaaacagggcagaaggga

SEQ ID NO: 356641 - DNA, 25 bp, Artificial
  Probe
tgaccgcaagacatttgctgaactc

SEQ ID NO: 356642 - DNA, 25 bp, Artificial
  Probe
ttttctagaaacttcgtgcttgaca

SEQ ID NO: 356643 - DNA, 25 bp, Artificial
  Probe
gttccactgagttcccaagcagtca

SEQ ID NO: 356644 - DNA, 25 bp, Artificial
  Probe
gacttgaccgcaagacatttgctga

SEQ ID NO: 356645 - DNA, 25 bp, Artificial
  Probe
ctgagttcccaagcagtcataacaa

SEQ ID NO: 356646 - DNA, 25 bp, Artificial
  Probe
tttttctagaaacttcgtgcttgac

SEQ ID NO: 356647 - DNA, 25 bp, Artificial
  Probe
ttcagcactgatggacgaagccagt

SEQ ID NO: 356648 - DNA, 25 bp, Artificial
  Probe
ctatcttgtaaatagacccagagca

SEQ ID NO: 356649 - DNA, 25 bp, Artificial
  Probe
taacaatgacttgaccgcaagacat

SEQ ID NO: 356650 - DNA, 25 bp, Artificial
  Probe
tggagtttcacgtgccaccgggacg

SEQ ID NO: 356651 - DNA, 25 bp, Artificial
  Probe
cagtcataacaatgacttgaccgca

SEQ ID NO: 356652 - DNA, 25 bp, Artificial
  Probe
ttgagccagtttcttcccttgcctg

SEQ ID NO: 356653 - DNA, 25 bp, Artificial
  Probe
ccgagttccactgagttcccaagca

SEQ ID NO: 356654 - DNA, 25 bp, Artificial
  Probe
tgatgccaaaatcttctgcctggtg

SEQ ID NO: 356655 - DNA, 25 bp, Artificial
  Probe
atgtgatggtggtcatgtcagatcc

SEQ ID NO: 356656 - DNA, 25 bp, Artificial
  Probe
gtctcgcccgctggagtgcgcttgt

SEQ ID NO: 356657 - DNA, 25 bp, Artificial
  Probe
cgcccgctggagtgcgcttgttttc

SEQ ID NO: 356658 - DNA, 25 bp, Artificial
  Probe
tctgctgttcgagagagctacgttc

SEQ ID NO: 356659 - DNA, 25 bp, Artificial
  Probe
ctttacatcaaacacgtatgtgatg

SEQ ID NO: 356660 - DNA, 25 bp, Artificial
  Probe
gagacgctctacaaagcctggtcca

SEQ ID NO: 356661 - DNA, 25 bp, Artificial
  Probe
ggatctggttcaggaagatcaacgt

SEQ ID NO: 356662 - DNA, 25 bp, Artificial
  Probe
attcttggggaacctggtgctgaac

SEQ ID NO: 356663 - DNA, 25 bp, Artificial
  Probe
ctctacaaagcctggtccagcatcg

SEQ ID NO: 356664 - DNA, 25 bp, Artificial
  Probe
agacctgaggcgtttgtctcgcccg

SEQ ID NO: 356665 - DNA, 25 bp, Artificial
  Probe
gtcgtgtctggaagccatcctccag

SEQ ID NO: 356666 - DNA, 25 bp, Artificial
  Probe
taaattggccgcttctttccagagc

SEQ ID NO: 356667 - DNA, 25 bp, Artificial
  Probe
cacgtccgattcttggggaacctgg

SEQ ID NO: 356668 - DNA, 25 bp, Artificial
  Probe
tggagcactcccacgtccgattctt

SEQ ID NO: 356669 - DNA, 25 bp, Artificial
  Probe
atattgcgcgcgacaccaggcgcct

SEQ ID NO: 356670 - DNA, 25 bp, Artificial
  Probe
gacataatgccaaatgctctttagt

SEQ ID NO: 356671 - DNA, 25 bp, Artificial
  Probe
tgtgatggtggtcatgtcagatcca

SEQ ID NO: 356672 - DNA, 25 bp, Artificial
  Probe
cgcctgggtgccaccatcgacgtgg

SEQ ID NO: 356673 - DNA, 25 bp, Artificial
  Probe
cgcttgttttcgaacgtccatctgg

SEQ ID NO: 356674 - DNA, 25 bp, Artificial
  Probe
cctaaggaattttgcccagattatt

SEQ ID NO: 356675 - DNA, 25 bp, Artificial
  Probe
acctgatgccaaaatcttctgcctg

SEQ ID NO: 356676 - DNA, 25 bp, Artificial
  Probe
ccacgtccgattcttggggaacctg

SEQ ID NO: 356677 - DNA, 25 bp, Artificial
  Probe
gctgttcgagagagctacgttcttg

SEQ ID NO: 356678 - DNA, 25 bp, Artificial
  Probe
gtgccaccatcgacgtggagcactc

SEQ ID NO: 356679 - DNA, 25 bp, Artificial
  Probe
cgccggcaggtgatgccaaatacag

SEQ ID NO: 356680 - DNA, 25 bp, Artificial
  Probe
tcgaacgtccatctgggatgagacg

SEQ ID NO: 356681 - DNA, 25 bp, Artificial
  Probe
tcagcagctggagatgaacctaagg

SEQ ID NO: 356682 - DNA, 25 bp, Artificial
  Probe
acctaaggaattttgcccagattat

SEQ ID NO: 356683 - DNA, 25 bp, Artificial
  Probe
ctcagctatccagtagagatcctca

SEQ ID NO: 356684 - DNA, 25 bp, Artificial
  Probe
gagatcctcaagacggcctttatga

SEQ ID NO: 356685 - DNA, 25 bp, Artificial
  Probe
tgacataatgccaaatgctctttag

SEQ ID NO: 356686 - DNA, 25 bp, Artificial
  Probe
ctcaagacggcctttatgaaaagtt

SEQ ID NO: 356687 - DNA, 25 bp, Artificial
  Probe
cgtccatctgggatgagacgctcta

SEQ ID NO: 356688 - DNA, 25 bp, Artificial
  Probe
caaagcctggtccagcatcgtctat

SEQ ID NO: 356689 - DNA, 25 bp, Artificial
  Probe
attggccgcttctttccagagcatg

SEQ ID NO: 356690 - DNA, 25 bp, Artificial
  Probe
cgattcttggggaacctggtgctga

SEQ ID NO: 356691 - DNA, 25 bp, Artificial
  Probe
gccatcctccagaattcacctgatg

SEQ ID NO: 356692 - DNA, 25 bp, Artificial
  Probe
gctggagtgcgcttgttttcgaacg

SEQ ID NO: 356693 - DNA, 25 bp, Artificial
  Probe
tgaggcgtttgtctcgcccgctgga

SEQ ID NO: 356694 - DNA, 25 bp, Artificial
  Probe
atctggttcaggaagatcaacgtga

SEQ ID NO: 356695 - DNA, 25 bp, Artificial
  Probe
agagagccgcgaactggaaaaagat

SEQ ID NO: 356696 - DNA, 25 bp, Artificial
  Probe
cacgtatgtgatggtggtcatgtca

SEQ ID NO: 356697 - DNA, 25 bp, Artificial
  Probe
tacgttcttggtgatttcccactac

SEQ ID NO: 356698 - DNA, 25 bp, Artificial
  Probe
atatgcattattatcagtcgtgtct

SEQ ID NO: 356699 - DNA, 25 bp, Artificial
  Probe
ctacgtgtttgacgtagagagccgc

SEQ ID NO: 356700 - DNA, 25 bp, Artificial
  Probe
ggaagcagcaagcacatcactgcag

SEQ ID NO: 356701 - DNA, 25 bp, Artificial
  Probe
caggcaacgtagctcatgcctgtga

SEQ ID NO: 356702 - DNA, 25 bp, Artificial
  Probe
gccgtcagagagatgcagggaaaac

SEQ ID NO: 356703 - DNA, 25 bp, Artificial
  Probe
cagcaagcacatcactgcagctagg

SEQ ID NO: 356704 - DNA, 25 bp, Artificial
  Probe
tcaaaagaatcatcgcagatgtcag

SEQ ID NO: 356705 - DNA, 25 bp, Artificial
  Probe
aggtccaggccaagcatatatcaag

SEQ ID NO: 356706 - DNA, 25 bp, Artificial
  Probe
gtattactgttttctcagcatgaat

SEQ ID NO: 356707 - DNA, 25 bp, Artificial
  Probe
actgtcatcaaaagaatcatcgcag

SEQ ID NO: 356708 - DNA, 25 bp, Artificial
  Probe
tcatcaaaagaatcatcgcagatgt

SEQ ID NO: 356709 - DNA, 25 bp, Artificial
  Probe
atcagctagtacacttcttagtatg

SEQ ID NO: 356710 - DNA, 25 bp, Artificial
  Probe
agctcatgcctgtgaccccagcagt

SEQ ID NO: 356711 - DNA, 25 bp, Artificial
  Probe
agcacatcactgcagctaggaagac

SEQ ID NO: 356712 - DNA, 25 bp, Artificial
  Probe
gaggtccaggccaagcatatatcaa

SEQ ID NO: 356713 - DNA, 25 bp, Artificial
  Probe
tgtcatcaaaagaatcatcgcagat

SEQ ID NO: 356714 - DNA, 25 bp, Artificial
  Probe
tagctcatgcctgtgaccccagcag

SEQ ID NO: 356715 - DNA, 25 bp, Artificial
  Probe
agagtgtttcatatcatcggccgtc

SEQ ID NO: 356716 - DNA, 25 bp, Artificial
  Probe
gtgaccccagcagttgagaagcaga

SEQ ID NO: 356717 - DNA, 25 bp, Artificial
  Probe
tattccgtaactcaaccaggcaacg

SEQ ID NO: 356718 - DNA, 25 bp, Artificial
  Probe
aagactgtcatcaaaagaatcatcg

SEQ ID NO: 356719 - DNA, 25 bp, Artificial
  Probe
attccgtaactcaaccaggcaacgt

SEQ ID NO: 356720 - DNA, 25 bp, Artificial
  Probe
tcactgcagctaggaagactgtcat

SEQ ID NO: 356721 - DNA, 25 bp, Artificial
  Probe
tcatcggccgtcagagagatgcagg

SEQ ID NO: 356722 - DNA, 25 bp, Artificial
  Probe
gcaacgtagctcatgcctgtgaccc

SEQ ID NO: 356723 - DNA, 25 bp, Artificial
  Probe
gatccaccatctgaatcagctagta

SEQ ID NO: 356724 - DNA, 25 bp, Artificial
  Probe
aaccaggcaacgtagctcatgcctg

SEQ ID NO: 356725 - DNA, 25 bp, Artificial
  Probe
ctgcagctaggaagactgtcatcaa

SEQ ID NO: 356726 - DNA, 25 bp, Artificial
  Probe
tagatccaccatctgaatcagctag

SEQ ID NO: 356727 - DNA, 25 bp, Artificial
  Probe
gcctgtgaccccagcagttgagaag

SEQ ID NO: 356728 - DNA, 25 bp, Artificial
  Probe
agtgtttcatatcatcggccgtcag

SEQ ID NO: 356729 - DNA, 25 bp, Artificial
  Probe
catagggaggtccaggccaagcata

SEQ ID NO: 356730 - DNA, 25 bp, Artificial
  Probe
ccgtaactcaaccaggcaacgtagc

SEQ ID NO: 356731 - DNA, 25 bp, Artificial
  Probe
cgtaactcaaccaggcaacgtagct

SEQ ID NO: 356732 - DNA, 25 bp, Artificial
  Probe
tgtgaccccagcagttgagaagcag

SEQ ID NO: 356733 - DNA, 25 bp, Artificial
  Probe
ccgtcagagagatgcagggaaaacc

SEQ ID NO: 356734 - DNA, 25 bp, Artificial
  Probe
tgtttcatatcatcggccgtcagag

SEQ ID NO: 356735 - DNA, 25 bp, Artificial
  Probe
tcatcgcagatgtcagtgatcgagt

SEQ ID NO: 356736 - DNA, 25 bp, Artificial
  Probe
aaccaggaggaagcagcaagcacat

SEQ ID NO: 356737 - DNA, 25 bp, Artificial
  Probe
agaatcatcgcagatgtcagtgatc

SEQ ID NO: 356738 - DNA, 25 bp, Artificial
  Probe
atagggaggtccaggccaagcatat

SEQ ID NO: 356739 - DNA, 25 bp, Artificial
  Probe
cacatcactgcagctaggaagactg

SEQ ID NO: 356740 - DNA, 25 bp, Artificial
  Probe
tatcatcggccgtcagagagatgca

SEQ ID NO: 356741 - DNA, 25 bp, Artificial
  Probe
atcgcagatgtcagtgatcgagtgg

SEQ ID NO: 356742 - DNA, 25 bp, Artificial
  Probe
actcaaccaggcaacgtagctcatg

SEQ ID NO: 356743 - DNA, 25 bp, Artificial
  Probe
aggccaagcatatatcaagatcttg

SEQ ID NO: 356744 - DNA, 25 bp, Artificial
  Probe
ctgaatcagctagtacacttcttag

SEQ ID NO: 356745 - DNA, 25 bp, Artificial
  Probe
gaatcagctagtacacttcttagta

SEQ ID NO: 356746 - DNA, 25 bp, Artificial
  Probe
ggcttcaaagactgggagatcccct

SEQ ID NO: 356747 - DNA, 25 bp, Artificial
  Probe
ctttgaagccagctgtgtatggtgt

SEQ ID NO: 356748 - DNA, 25 bp, Artificial
  Probe
gctggctgggcctctgagacctttg

SEQ ID NO: 356749 - DNA, 25 bp, Artificial
  Probe
acctctgcccatttctacctgtgag

SEQ ID NO: 356750 - DNA, 25 bp, Artificial
  Probe
taggacagagttgttcatggctctg

SEQ ID NO: 356751 - DNA, 25 bp, Artificial
  Probe
agggagtctgccatctgacctccag

SEQ ID NO: 356752 - DNA, 25 bp, Artificial
  Probe
ccgcagggagtctgccatctgacct

SEQ ID NO: 356753 - DNA, 25 bp, Artificial
  Probe
gacatcaggacaagccttccactct

SEQ ID NO: 356754 - DNA, 25 bp, Artificial
  Probe
cctgttgactgcagggcccaggact

SEQ ID NO: 356755 - DNA, 25 bp, Artificial
  Probe
tctatccctgaaagagcctctgcca

SEQ ID NO: 356756 - DNA, 25 bp, Artificial
  Probe
tgtgctcttgactctcttttgtaaa

SEQ ID NO: 356757 - DNA, 25 bp, Artificial
  Probe
tcaggacaagccttccactcttagg

SEQ ID NO: 356758 - DNA, 25 bp, Artificial
  Probe
atggagacacaagtccacctctgcc

SEQ ID NO: 356759 - DNA, 25 bp, Artificial
  Probe
tgagacctttgaagccagctgtgta

SEQ ID NO: 356760 - DNA, 25 bp, Artificial
  Probe
ggggcttcaaagactgggagatccc

SEQ ID NO: 356761 - DNA, 25 bp, Artificial
  Probe
ggatgtaccccttctactctcagga

SEQ ID NO: 356762 - DNA, 25 bp, Artificial
  Probe
catttctacctgtgagacagagaga

SEQ ID NO: 356763 - DNA, 25 bp, Artificial
  Probe
ttcatggctctgtggacctggagga

SEQ ID NO: 356764 - DNA, 25 bp, Artificial
  Probe
ctgtgctcttgactctcttttgtaa

SEQ ID NO: 356765 - DNA, 25 bp, Artificial
  Probe
catggctctgtggacctggaggaat

SEQ ID NO: 356766 - DNA, 25 bp, Artificial
  Probe
cctgaaagagcctctgccaggggtg

SEQ ID NO: 356767 - DNA, 25 bp, Artificial
  Probe
actgacccttcaaggatgtacccct

SEQ ID NO: 356768 - DNA, 25 bp, Artificial
  Probe
tgggacatcaggacaagccttccac

SEQ ID NO: 356769 - DNA, 25 bp, Artificial
  Probe
cccaggtactcagtcctgatggcct

SEQ ID NO: 356770 - DNA, 25 bp, Artificial
  Probe
ggactgggaaggacccaggtactca

SEQ ID NO: 356771 - DNA, 25 bp, Artificial
  Probe
cagagttgttcatggctctgtggac

SEQ ID NO: 356772 - DNA, 25 bp, Artificial
  Probe
gacccttcaaggatgtaccccttct

SEQ ID NO: 356773 - DNA, 25 bp, Artificial
  Probe
tcccactgacccttcaaggatgtac

SEQ ID NO: 356774 - DNA, 25 bp, Artificial
  Probe
tactcagtcctgatggcctgggccc

SEQ ID NO: 356775 - DNA, 25 bp, Artificial
  Probe
tcttttggatgactgtggtctgtgc

SEQ ID NO: 356776 - DNA, 25 bp, Artificial
  Probe
acctgtgagacagagagaggccgcc

SEQ ID NO: 356777 - DNA, 25 bp, Artificial
  Probe
acctttgaagccagctgtgtatggt

SEQ ID NO: 356778 - DNA, 25 bp, Artificial
  Probe
ggagtctgccatctgacctccaggc

SEQ ID NO: 356779 - DNA, 25 bp, Artificial
  Probe
ctcagacgtgggatgagtaccccct

SEQ ID NO: 356780 - DNA, 25 bp, Artificial
  Probe
cttgcagtccccagattgatgatgg

SEQ ID NO: 356781 - DNA, 25 bp, Artificial
  Probe
tatccctgaaagagcctctgccagg

SEQ ID NO: 356782 - DNA, 25 bp, Artificial
  Probe
tcttaggacagagttgttcatggct

SEQ ID NO: 356783 - DNA, 25 bp, Artificial
  Probe
ttgttcatggctctgtggacctgga

SEQ ID NO: 356784 - DNA, 25 bp, Artificial
  Probe
tacccagctggctgggcctctgaga

SEQ ID NO: 356785 - DNA, 25 bp, Artificial
  Probe
aggtactcagtcctgatggcctggg

SEQ ID NO: 356786 - DNA, 25 bp, Artificial
  Probe
tcctctatccctgaaagagcctctg

SEQ ID NO: 356787 - DNA, 25 bp, Artificial
  Probe
aggatgtaccccttctactctcagg

SEQ ID NO: 356788 - DNA, 25 bp, Artificial
  Probe
cctcctgttgactgcagggcccagg

SEQ ID NO: 356789 - DNA, 25 bp, Artificial
  Probe
gcctctgagacctttgaagccagct

SEQ ID NO: 356790 - DNA, 25 bp, Artificial
  Probe
ggtctgtgctcttgactctcttttg

SEQ ID NO: 356791 - DNA, 25 bp, Artificial
  Probe
gggaaggacccaggtactcagtcct

SEQ ID NO: 356792 - DNA, 25 bp, Artificial
  Probe
cttaaaaagcaatccatgacctggg

SEQ ID NO: 356793 - DNA, 25 bp, Artificial
  Probe
gagaaaccacttggtgttacaggcc

SEQ ID NO: 356794 - DNA, 25 bp, Artificial
  Probe
tcttaaaaagcaatccatgacctgg

SEQ ID NO: 356795 - DNA, 25 bp, Artificial
  Probe
ccacttggtgttacaggcctcacct

SEQ ID NO: 356796 - DNA, 25 bp, Artificial
  Probe
gctgagcttcctgcagtccaggctg

SEQ ID NO: 356797 - DNA, 25 bp, Artificial
  Probe
ccatgacttcagagaaaccacttgg

SEQ ID NO: 356798 - DNA, 25 bp, Artificial
  Probe
cagagaaaccacttggtgttacagg

SEQ ID NO: 356799 - DNA, 25 bp, Artificial
  Probe
attccctgagtaaaggcatttcctt

SEQ ID NO: 356800 - DNA, 25 bp, Artificial
  Probe
agcaatccatgacctgggcagtctg

SEQ ID NO: 356801 - DNA, 25 bp, Artificial
  Probe
accacttggtgttacaggcctcacc

SEQ ID NO: 356802 - DNA, 25 bp, Artificial
  Probe
gtcttaaaaagcaatccatgacctg

SEQ ID NO: 356803 - DNA, 25 bp, Artificial
  Probe
agtccaggctggatccctttccagg

SEQ ID NO: 356804 - DNA, 25 bp, Artificial
  Probe
cttcagagaaaccacttggtgttac

SEQ ID NO: 356805 - DNA, 25 bp, Artificial
  Probe
gcactacccatgacttcagagaaac

SEQ ID NO: 356806 - DNA, 25 bp, Artificial
  Probe
agattccctgagtaaaggcatttcc

SEQ ID NO: 356807 - DNA, 25 bp, Artificial
  Probe
aggagattccctgagtaaaggcatt

SEQ ID NO: 356808 - DNA, 25 bp, Artificial
  Probe
tactctgaccacgtgaaagaggagg

SEQ ID NO: 356809 - DNA, 25 bp, Artificial
  Probe
tgcagtccaggctggatccctttcc

SEQ ID NO: 356810 - DNA, 25 bp, Artificial
  Probe
gagattccctgagtaaaggcatttc

SEQ ID NO: 356811 - DNA, 25 bp, Artificial
  Probe
ggcactacccatgacttcagagaaa

SEQ ID NO: 356812 - DNA, 25 bp, Artificial
  Probe
cccatgacttcagagaaaccacttg

SEQ ID NO: 356813 - DNA, 25 bp, Artificial
  Probe
acttggtgttacaggcctcacctgc

SEQ ID NO: 356814 - DNA, 25 bp, Artificial
  Probe
tcagagaaaccacttggtgttacag

SEQ ID NO: 356815 - DNA, 25 bp, Artificial
  Probe
agagaaaccacttggtgttacaggc

SEQ ID NO: 356816 - DNA, 25 bp, Artificial
  Probe
gagacttctctaatttggtcttaaa

SEQ ID NO: 356817 - DNA, 25 bp, Artificial
  Probe
ttaaaaagcaatccatgacctgggc

SEQ ID NO: 356818 - DNA, 25 bp, Artificial
  Probe
ggatactctgaccacgtgaaagagg

SEQ ID NO: 356819 - DNA, 25 bp, Artificial
  Probe
gagcttcctgcagtccaggctggat

SEQ ID NO: 356820 - DNA, 25 bp, Artificial
  Probe
aaaccacttggtgttacaggcctca

SEQ ID NO: 356821 - DNA, 25 bp, Artificial
  Probe
ttcagagaaaccacttggtgttaca

SEQ ID NO: 356822 - DNA, 25 bp, Artificial
  Probe
gacttcagagaaaccacttggtgtt

SEQ ID NO: 356823 - DNA, 25 bp, Artificial
  Probe
gattccctgagtaaaggcatttcct

SEQ ID NO: 356824 - DNA, 25 bp, Artificial
  Probe
agagacttctctaatttggtcttaa

SEQ ID NO: 356825 - DNA, 25 bp, Artificial
  Probe
cctggatactctgaccacgtgaaag

SEQ ID NO: 356826 - DNA, 25 bp, Artificial
  Probe
ttcctgcagtccaggctggatccct

SEQ ID NO: 356827 - DNA, 25 bp, Artificial
  Probe
ctgctgagcttcctgcagtccaggc

SEQ ID NO: 356828 - DNA, 25 bp, Artificial
  Probe
ggtctccctgaaagctcgcttcttg

SEQ ID NO: 356829 - DNA, 25 bp, Artificial
  Probe
gatactctgaccacgtgaaagagga

SEQ ID NO: 356830 - DNA, 25 bp, Artificial
  Probe
atactctgaccacgtgaaagaggag

SEQ ID NO: 356831 - DNA, 25 bp, Artificial
  Probe
ctggatactctgaccacgtgaaaga

SEQ ID NO: 356832 - DNA, 25 bp, Artificial
  Probe
aaagcaatccatgacctgggcagtc

SEQ ID NO: 356833 - DNA, 25 bp, Artificial
  Probe
catgacttcagagaaaccacttggt

SEQ ID NO: 356834 - DNA, 25 bp, Artificial
  Probe
tggatactctgaccacgtgaaagag

SEQ ID NO: 356835 - DNA, 25 bp, Artificial
  Probe
gaaaccacttggtgttacaggcctc

SEQ ID NO: 356836 - DNA, 25 bp, Artificial
  Probe
cacttggtgttacaggcctcacctg

SEQ ID NO: 356837 - DNA, 25 bp, Artificial
  Probe
gtccaggctggatccctttccaggc

SEQ ID NO: 356838 - DNA, 25 bp, Artificial
  Probe
cgaccaacaggatcgggatggcgat

SEQ ID NO: 356839 - DNA, 25 bp, Artificial
  Probe
ccaaccgcgaccaacaggatcggga

SEQ ID NO: 356840 - DNA, 25 bp, Artificial
  Probe
gtgtcctgagaatgcggagatcacc

SEQ ID NO: 356841 - DNA, 25 bp, Artificial
  Probe
cattttggacaactgtccccgagtt

SEQ ID NO: 356842 - DNA, 25 bp, Artificial
  Probe
gggatggccaccaggacagcacaga

SEQ ID NO: 356843 - DNA, 25 bp, Artificial
  Probe
tccctgtggcacacaggggacacca

SEQ ID NO: 356844 - DNA, 25 bp, Artificial
  Probe
agatgacgactatgccggctttatt

SEQ ID NO: 356845 - DNA, 25 bp, Artificial
  Probe
gttggggactcctgtgacaccaacc

SEQ ID NO: 356846 - DNA, 25 bp, Artificial
  Probe
ttccacgtaaacacccagacagatg

SEQ ID NO: 356847 - DNA, 25 bp, Artificial
  Probe
tcaggctgctgtggaaggactccag

SEQ ID NO: 356848 - DNA, 25 bp, Artificial
  Probe
tgaagtctaaaactggcccagggga

SEQ ID NO: 356849 - DNA, 25 bp, Artificial
  Probe
tggcccagacaactgcaggcttgtt

SEQ ID NO: 356850 - DNA, 25 bp, Artificial
  Probe
acaggggacaccagcgaccaggtca

SEQ ID NO: 356851 - DNA, 25 bp, Artificial
  Probe
acgacaccataccagaggacttcca

SEQ ID NO: 356852 - DNA, 25 bp, Artificial
  Probe
ataatgacggcatgccagacctgtt

SEQ ID NO: 356853 - DNA, 25 bp, Artificial
  Probe
agctcaaggccgtgaagtctaaaac

SEQ ID NO: 356854 - DNA, 25 bp, Artificial
  Probe
ggccaccaggacagcacagacaact

SEQ ID NO: 356855 - DNA, 25 bp, Artificial
  Probe
tagacaccaccatgcgcggaggccg

SEQ ID NO: 356856 - DNA, 25 bp, Artificial
  Probe
acaccgacaaggacgggattggcga

SEQ ID NO: 356857 - DNA, 25 bp, Artificial
  Probe
tgcagtagcagaacctggtattcag

SEQ ID NO: 356858 - DNA, 25 bp, Artificial
  Probe
agacatactggcaggctacgccatt

SEQ ID NO: 356859 - DNA, 25 bp, Artificial
  Probe
agatatctgtgaagctgacttcgac

SEQ ID NO: 356860 - DNA, 25 bp, Artificial
  Probe
actgggtggtcctgaaccagggcat

SEQ ID NO: 356861 - DNA, 25 bp, Artificial
  Probe
gtcctggaccctgaaggggatgccc

SEQ ID NO: 356862 - DNA, 25 bp, Artificial
  Probe
cgatgaatgcgatgacgatgacgat

SEQ ID NO: 356863 - DNA, 25 bp, Artificial
  Probe
ttaacagcgcccagctggacaccga

SEQ ID NO: 356864 - DNA, 25 bp, Artificial
  Probe
agactgtggtcctggaccctgaagg

SEQ ID NO: 356865 - DNA, 25 bp, Artificial
  Probe
aacattttggacaactgtccccgag

SEQ ID NO: 356866 - DNA, 25 bp, Artificial
  Probe
ccagcccaggaagatagcaacaatg

SEQ ID NO: 356867 - DNA, 25 bp, Artificial
  Probe
accgtcattaacagcgcccagctgg

SEQ ID NO: 356868 - DNA, 25 bp, Artificial
  Probe
tggcccaggggaacatctccgaaac

SEQ ID NO: 356869 - DNA, 25 bp, Artificial
  Probe
accaaccaagacagtgatggggatg

SEQ ID NO: 356870 - DNA, 25 bp, Artificial
  Probe
ctgtgatgacgacatggatggagac

SEQ ID NO: 356871 - DNA, 25 bp, Artificial
  Probe
ccagtcggatgtggataacgatctg

SEQ ID NO: 356872 - DNA, 25 bp, Artificial
  Probe
agattgtgcagaccatgaacagtga

SEQ ID NO: 356873 - DNA, 25 bp, Artificial
  Probe
acacggcatttaatggagttgactt

SEQ ID NO: 356874 - DNA, 25 bp, Artificial
  Probe
gtcggagacgcctgtgacagctgtc

SEQ ID NO: 356875 - DNA, 25 bp, Artificial
  Probe
cgggtacacggcatttaatggagtt

SEQ ID NO: 356876 - DNA, 25 bp, Artificial
  Probe
atgcgatgacgatgacgataatgac

SEQ ID NO: 356877 - DNA, 25 bp, Artificial
  Probe
gaacagtgaccctggcctagcagtc

SEQ ID NO: 356878 - DNA, 25 bp, Artificial
  Probe
agaatgcggagatcaccctgactga

SEQ ID NO: 356879 - DNA, 25 bp, Artificial
  Probe
atgacgataatgacggcatgccaga

SEQ ID NO: 356880 - DNA, 25 bp, Artificial
  Probe
ccagacaactgcaggcttgttccca

SEQ ID NO: 356881 - DNA, 25 bp, Artificial
  Probe
ggcacacaggggacaccagcgacca

SEQ ID NO: 356882 - DNA, 25 bp, Artificial
  Probe
ctgactccggggtcactatagacac

SEQ ID NO: 356883 - DNA, 25 bp, Artificial
  Probe
caaggccgtgaagtctaaaactggc

SEQ ID NO: 356884 - DNA, 25 bp, Artificial
  Probe
tcttccaccaaagactgattgcaag

SEQ ID NO: 356885 - DNA, 25 bp, Artificial
  Probe
gcaaggctactgaacttagagatta

SEQ ID NO: 356886 - DNA, 25 bp, Artificial
  Probe
tgcaggcctcggtaatttgggatta

SEQ ID NO: 356887 - DNA, 25 bp, Artificial
  Probe
aagactgattgcaagcaaggctact

SEQ ID NO: 356888 - DNA, 25 bp, Artificial
  Probe
ctgattgcaagcaaggctactgaac

SEQ ID NO: 356889 - DNA, 25 bp, Artificial
  Probe
gatgctagtcagtactccttagttt

SEQ ID NO: 356890 - DNA, 25 bp, Artificial
  Probe
aatgtgattctattttgcaaaagca

SEQ ID NO: 356891 - DNA, 25 bp, Artificial
  Probe
ttccaccaaagactgattgcaagca

SEQ ID NO: 356892 - DNA, 25 bp, Artificial
  Probe
gattgcaagcaaggctactgaactt

SEQ ID NO: 356893 - DNA, 25 bp, Artificial
  Probe
agactgattgcaagcaaggctactg

SEQ ID NO: 356894 - DNA, 25 bp, Artificial
  Probe
ttgcaagcaaggctactgaacttag

SEQ ID NO: 356895 - DNA, 25 bp, Artificial
  Probe
caggcctcggtaatttgggattatg

SEQ ID NO: 356896 - DNA, 25 bp, Artificial
  Probe
tgctagtcagtactccttagttttc

SEQ ID NO: 356897 - DNA, 25 bp, Artificial
  Probe
ttttctctatccagagcatttgcta

SEQ ID NO: 356898 - DNA, 25 bp, Artificial
  Probe
aagacaaattatatactcttccacc

SEQ ID NO: 356899 - DNA, 25 bp, Artificial
  Probe
atgctagtcagtactccttagtttt

SEQ ID NO: 356900 - DNA, 25 bp, Artificial
  Probe
agcaaggctactgaacttagagatt

SEQ ID NO: 356901 - DNA, 25 bp, Artificial
  Probe
tgattgcaagcaaggctactgaact

SEQ ID NO: 356902 - DNA, 25 bp, Artificial
  Probe
tagttttctctatccagagcatttg

SEQ ID NO: 356903 - DNA, 25 bp, Artificial
  Probe
tccaccaaagactgattgcaagcaa

SEQ ID NO: 356904 - DNA, 25 bp, Artificial
  Probe
ttttaataatcaagattctattttt

SEQ ID NO: 356905 - DNA, 25 bp, Artificial
  Probe
tttttgcaggcctcggtaatttggg

SEQ ID NO: 356906 - DNA, 25 bp, Artificial
  Probe
aagcaaggctactgaacttagagat

SEQ ID NO: 356907 - DNA, 25 bp, Artificial
  Probe
caagcaaggctactgaacttagaga

SEQ ID NO: 356908 - DNA, 25 bp, Artificial
  Probe
aagatgctagtcagtactccttagt

SEQ ID NO: 356909 - DNA, 25 bp, Artificial
  Probe
aaagactgattgcaagcaaggctac

SEQ ID NO: 356910 - DNA, 25 bp, Artificial
  Probe
tatccagagcatttgctatattatt

SEQ ID NO: 356911 - DNA, 25 bp, Artificial
  Probe
cttccaccaaagactgattgcaagc

SEQ ID NO: 356912 - DNA, 25 bp, Artificial
  Probe
caaggctactgaacttagagattat

SEQ ID NO: 356913 - DNA, 25 bp, Artificial
  Probe
agattctatttttgagtttcaaaga

SEQ ID NO: 356914 - DNA, 25 bp, Artificial
  Probe
accaaagactgattgcaagcaaggc

SEQ ID NO: 356915 - DNA, 25 bp, Artificial
  Probe
gcaagcaaggctactgaacttagag

SEQ ID NO: 356916 - DNA, 25 bp, Artificial
  Probe
agttttctctatccagagcatttgc

SEQ ID NO: 356917 - DNA, 25 bp, Artificial
  Probe
ccaccaaagactgattgcaagcaag

SEQ ID NO: 356918 - DNA, 25 bp, Artificial
  Probe
tgcaagcaaggctactgaacttaga

SEQ ID NO: 356919 - DNA, 25 bp, Artificial
  Probe
ctcttccaccaaagactgattgcaa

SEQ ID NO: 356920 - DNA, 25 bp, Artificial
  Probe
caccaaagactgattgcaagcaagg

SEQ ID NO: 356921 - DNA, 25 bp, Artificial
  Probe
aaggctactgaacttagagattatt

SEQ ID NO: 356922 - DNA, 25 bp, Artificial
  Probe
ctatttttgagtttcaaagacaaat

SEQ ID NO: 356923 - DNA, 25 bp, Artificial
  Probe
agatgctagtcagtactccttagtt

SEQ ID NO: 356924 - DNA, 25 bp, Artificial
  Probe
actgattgcaagcaaggctactgaa

SEQ ID NO: 356925 - DNA, 25 bp, Artificial
  Probe
gttttctctatccagagcatttgct

SEQ ID NO: 356926 - DNA, 25 bp, Artificial
  Probe
gcaggcctcggtaatttgggattat

SEQ ID NO: 356927 - DNA, 25 bp, Artificial
  Probe
gctagtcagtactccttagttttct

SEQ ID NO: 356928 - DNA, 25 bp, Artificial
  Probe
tgcaaaagcaattcaattttaataa

SEQ ID NO: 356929 - DNA, 25 bp, Artificial
  Probe
gcctcggtaatttgggattatgaat

SEQ ID NO: 356930 - DNA, 25 bp, Artificial
  Probe
ccagattggtgctgcaggtttgagt

SEQ ID NO: 356931 - DNA, 25 bp, Artificial
  Probe
aagcatggaatggttcgccgtcatt

SEQ ID NO: 356932 - DNA, 25 bp, Artificial
  Probe
catccttgtgaaggaaatcattgag

SEQ ID NO: 356933 - DNA, 25 bp, Artificial
  Probe
ctgtaaatctggtgattcctttcca

SEQ ID NO: 356934 - DNA, 25 bp, Artificial
  Probe
gagaatgttgctctaacatggacac

SEQ ID NO: 356935 - DNA, 25 bp, Artificial
  Probe
tattctcagcccatccttgtgaagg

SEQ ID NO: 356936 - DNA, 25 bp, Artificial
  Probe
cccacggatgcaaagatctttgtac

SEQ ID NO: 356937 - DNA, 25 bp, Artificial
  Probe
tccagaaggccgacaagaaaagcat

SEQ ID NO: 356938 - DNA, 25 bp, Artificial
  Probe
caagacccaagttcaccatcactgg

SEQ ID NO: 356939 - DNA, 25 bp, Artificial
  Probe
caaagatctttgtacgcgtgaaggc

SEQ ID NO: 356940 - DNA, 25 bp, Artificial
  Probe
accaccaaaggatgatgggaatgct

SEQ ID NO: 356941 - DNA, 25 bp, Artificial
  Probe
aggaaatcattgagccaccaaagat

SEQ ID NO: 356942 - DNA, 25 bp, Artificial
  Probe
ctctgtgacaatgaagtggaggccc

SEQ ID NO: 356943 - DNA, 25 bp, Artificial
  Probe
aaacgcctcgatcgacatccagatc

SEQ ID NO: 356944 - DNA, 25 bp, Artificial
  Probe
actgacctggaagaaggacggtgca

SEQ ID NO: 356945 - DNA, 25 bp, Artificial
  Probe
aaagcagagcgcagccactcaggca

SEQ ID NO: 356946 - DNA, 25 bp, Artificial
  Probe
cggatcgacaagacccaagttcacc

SEQ ID NO: 356947 - DNA, 25 bp, Artificial
  Probe
acatccagatcgttgaccgcccagg

SEQ ID NO: 356948 - DNA, 25 bp, Artificial
  Probe
actggtctgcccacggatgcaaaga

SEQ ID NO: 356949 - DNA, 25 bp, Artificial
  Probe
gaagtacatcagcaaaacagtctaa

SEQ ID NO: 356950 - DNA, 25 bp, Artificial
  Probe
gaaccaatgccaccattaccgagct

SEQ ID NO: 356951 - DNA, 25 bp, Artificial
  Probe
ctgcaggtttgagtggctatgtgct

SEQ ID NO: 356952 - DNA, 25 bp, Artificial
  Probe
gataccatcatattcattaggaaag

SEQ ID NO: 356953 - DNA, 25 bp, Artificial
  Probe
gagaccaagtactattctcagccca

SEQ ID NO: 356954 - DNA, 25 bp, Artificial
  Probe
caccccaggctgtgactattgaaga

SEQ ID NO: 356955 - DNA, 25 bp, Artificial
  Probe
aggctgcgaatgatctaccagctga

SEQ ID NO: 356956 - DNA, 25 bp, Artificial
  Probe
acgacctggaggtcaaggtggataa

SEQ ID NO: 356957 - DNA, 25 bp, Artificial
  Probe
gcaactcagagactgataccatcat

SEQ ID NO: 356958 - DNA, 25 bp, Artificial
  Probe
accccaggctgtgactattgaagat

SEQ ID NO: 356959 - DNA, 25 bp, Artificial
  Probe
ccagtgagaccaagtactattctca

SEQ ID NO: 356960 - DNA, 25 bp, Artificial
  Probe
accattaccgagctggtcataggaa

SEQ ID NO: 356961 - DNA, 25 bp, Artificial
  Probe
cagcaaaacagtctaatgaaaatgg

SEQ ID NO: 356962 - DNA, 25 bp, Artificial
  Probe
aagttcaccatcactggtctgccca

SEQ ID NO: 356963 - DNA, 25 bp, Artificial
  Probe
tgcaaagatctttgtacgcgtgaag

SEQ ID NO: 356964 - DNA, 25 bp, Artificial
  Probe
gtggaggcccccagaccagattggt

SEQ ID NO: 356965 - DNA, 25 bp, Artificial
  Probe
gctggggccagtgagaccaagtact

SEQ ID NO: 356966 - DNA, 25 bp, Artificial
  Probe
atgatgggaatgctgccatcacagg

SEQ ID NO: 356967 - DNA, 25 bp, Artificial
  Probe
ttgtacgcgtgaaggctattaacgc

SEQ ID NO: 356968 - DNA, 25 bp, Artificial
  Probe
ttgagcattaccaccgaaccaatgc

SEQ ID NO: 356969 - DNA, 25 bp, Artificial
  Probe
caaagattcgcatcccaaggcacct

SEQ ID NO: 356970 - DNA, 25 bp, Artificial
  Probe
ccagaaggccgacaagaaaagcatg

SEQ ID NO: 356971 - DNA, 25 bp, Artificial
  Probe
aatgccaccattaccgagctggtca

SEQ ID NO: 356972 - DNA, 25 bp, Artificial
  Probe
taaacattcgcaactcagagactga

SEQ ID NO: 356973 - DNA, 25 bp, Artificial
  Probe
atattcattaggaaagcagagcgca

SEQ ID NO: 356974 - DNA, 25 bp, Artificial
  Probe
catccgtagagttggagaagctgta

SEQ ID NO: 356975 - DNA, 25 bp, Artificial
  Probe
gactgataccatcatattcattagg

SEQ ID NO: 356976 - DNA, 25 bp, Artificial
  Probe
gctaaatacaaacaccgtgtgccca

SEQ ID NO: 356977 - DNA, 25 bp, Artificial
  Probe
gaccataggcccacactgcatcagg

SEQ ID NO: 356978 - DNA, 25 bp, Artificial
  Probe
agctcctgcatcagaaagtggaaga

SEQ ID NO: 356979 - DNA, 25 bp, Artificial
  Probe
tgcatcagggccttcaacgagtgtt

SEQ ID NO: 356980 - DNA, 25 bp, Artificial
  Probe
gagttgcccgggtgaccataggccc

SEQ ID NO: 356981 - DNA, 25 bp, Artificial
  Probe
gctgctaaatacaaacaccgtgtgc

SEQ ID NO: 356982 - DNA, 25 bp, Artificial
  Probe
agctgctaaatacaaacaccgtgtg

SEQ ID NO: 356983 - DNA, 25 bp, Artificial
  Probe
atacaaacaccgtgtgcccaagaaa

SEQ ID NO: 356984 - DNA, 25 bp, Artificial
  Probe
accgtgtgcccaagaaatgctgtta

SEQ ID NO: 356985 - DNA, 25 bp, Artificial
  Probe
caccacaaaggcatgctgttgggaa

SEQ ID NO: 356986 - DNA, 25 bp, Artificial
  Probe
ctgttatgatggagcccgagaaaac

SEQ ID NO: 356987 - DNA, 25 bp, Artificial
  Probe
tgcccaagaaatgctgttatgatgg

SEQ ID NO: 356988 - DNA, 25 bp, Artificial
  Probe
tcagggccttcaacgagtgttgtac

SEQ ID NO: 356989 - DNA, 25 bp, Artificial
  Probe
cagggccttcaacgagtgttgtact

SEQ ID NO: 356990 - DNA, 25 bp, Artificial
  Probe
gtactattgcggataagatccgaaa

SEQ ID NO: 356991 - DNA, 25 bp, Artificial
  Probe
accacaaaggcatgctgttgggaag

SEQ ID NO: 356992 - DNA, 25 bp, Artificial
  Probe
ctattgcggataagatccgaaaaga

SEQ ID NO: 356993 - DNA, 25 bp, Artificial
  Probe
caagctgctaaatacaaacaccgtg

SEQ ID NO: 356994 - DNA, 25 bp, Artificial
  Probe
tacaaacaccgtgtgcccaagaaat

SEQ ID NO: 356995 - DNA, 25 bp, Artificial
  Probe
aatgctgttatgatggagcccgaga

SEQ ID NO: 356996 - DNA, 25 bp, Artificial
  Probe
aagccaccacaaaggcatgctgttg

SEQ ID NO: 356997 - DNA, 25 bp, Artificial
  Probe
tcctgcatcagaaagtggaagaaca

SEQ ID NO: 356998 - DNA, 25 bp, Artificial
  Probe
tgcagctcctgcatcagaaagtgga

SEQ ID NO: 356999 - DNA, 25 bp, Artificial
  Probe
gcatcagggccttcaacgagtgttg

SEQ ID NO: 357000 - DNA, 25 bp, Artificial
  Probe
actattgcggataagatccgaaaag

SEQ ID NO: 357001 - DNA, 25 bp, Artificial
  Probe
ctgcagctcctgcatcagaaagtgg

SEQ ID NO: 357002 - DNA, 25 bp, Artificial
  Probe
gaaatgctgttatgatggagcccga

SEQ ID NO: 357003 - DNA, 25 bp, Artificial
  Probe
tgctgttatgatggagcccgagaaa

SEQ ID NO: 357004 - DNA, 25 bp, Artificial
  Probe
gggccttcaacgagtgttgtactat

SEQ ID NO: 357005 - DNA, 25 bp, Artificial
  Probe
ttgcccgggtgaccataggcccaca

SEQ ID NO: 357006 - DNA, 25 bp, Artificial
  Probe
ttcaacgagtgttgtactattgcgg

SEQ ID NO: 357007 - DNA, 25 bp, Artificial
  Probe
cgtgtgcccaagaaatgctgttatg

SEQ ID NO: 357008 - DNA, 25 bp, Artificial
  Probe
caaatacgaaacctgtgagcagcga

SEQ ID NO: 357009 - DNA, 25 bp, Artificial
  Probe
catcagggccttcaacgagtgttgt

SEQ ID NO: 357010 - DNA, 25 bp, Artificial
  Probe
tcaacgagtgttgtactattgcgga

SEQ ID NO: 357011 - DNA, 25 bp, Artificial
  Probe
gacctgcagctcctgcatcagaaag

SEQ ID NO: 357012 - DNA, 25 bp, Artificial
  Probe
ggccttcaacgagtgttgtactatt

SEQ ID NO: 357013 - DNA, 25 bp, Artificial
  Probe
aatacgaaacctgtgagcagcgagt

SEQ ID NO: 357014 - DNA, 25 bp, Artificial
  Probe
caccgtgtgcccaagaaatgctgtt

SEQ ID NO: 357015 - DNA, 25 bp, Artificial
  Probe
aaacctgtgagcagcgagttgcccg

SEQ ID NO: 357016 - DNA, 25 bp, Artificial
  Probe
accataggcccacactgcatcaggg

SEQ ID NO: 357017 - DNA, 25 bp, Artificial
  Probe
taggcccacactgcatcagggcctt

SEQ ID NO: 357018 - DNA, 25 bp, Artificial
  Probe
cctgcatcagaaagtggaagaacaa

SEQ ID NO: 357019 - DNA, 25 bp, Artificial
  Probe
gctgttatgatggagcccgagaaaa

SEQ ID NO: 357020 - DNA, 25 bp, Artificial
  Probe
gaaagccaccacaaaggcatgctgt

SEQ ID NO: 357021 - DNA, 25 bp, Artificial
  Probe
cgaaacctgtgagcagcgagttgcc

SEQ ID NO: 357022 - DNA, 25 bp, Artificial
  Probe
gcagcatcgaccaggctgctttctt

SEQ ID NO: 357023 - DNA, 25 bp, Artificial
  Probe
tgtggccccaggtgtcaaaaatgtc

SEQ ID NO: 357024 - DNA, 25 bp, Artificial
  Probe
tagccgggagtgtctcattccttca

SEQ ID NO: 357025 - DNA, 25 bp, Artificial
  Probe
gacaaggttgccaagtgcaaaattg

SEQ ID NO: 357026 - DNA, 25 bp, Artificial
  Probe
ggctgctttctttgtgtgtggcccc

SEQ ID NO: 357027 - DNA, 25 bp, Artificial
  Probe
tcaaaaatgtcaccagctgtctgta

SEQ ID NO: 357028 - DNA, 25 bp, Artificial
  Probe
gtattagacaaggttgccaagtgca

SEQ ID NO: 357029 - DNA, 25 bp, Artificial
  Probe
attagacaaggttgccaagtgcaaa

SEQ ID NO: 357030 - DNA, 25 bp, Artificial
  Probe
ctttctttgtgtgtggccccaggtg

SEQ ID NO: 357031 - DNA, 25 bp, Artificial
  Probe
agccgggagtgtctcattccttcag

SEQ ID NO: 357032 - DNA, 25 bp, Artificial
  Probe
aagactgattcaactttgcgtatag

SEQ ID NO: 357033 - DNA, 25 bp, Artificial
  Probe
gcctacccaagcagggactggacct

SEQ ID NO: 357034 - DNA, 25 bp, Artificial
  Probe
gtcaaaaatgtcaccagctgtctgt

SEQ ID NO: 357035 - DNA, 25 bp, Artificial
  Probe
tgaagactgattcaactttgcgtat

SEQ ID NO: 357036 - DNA, 25 bp, Artificial
  Probe
tcaccagctgtctgtattagacaag

SEQ ID NO: 357037 - DNA, 25 bp, Artificial
  Probe
gctgtctgtattagacaaggttgcc

SEQ ID NO: 357038 - DNA, 25 bp, Artificial
  Probe
cagctgtctgtattagacaaggttg

SEQ ID NO: 357039 - DNA, 25 bp, Artificial
  Probe
caaggttgccaagtgcaaaattggt

SEQ ID NO: 357040 - DNA, 25 bp, Artificial
  Probe
gtgtgtggccccaggtgtcaaaaat

SEQ ID NO: 357041 - DNA, 25 bp, Artificial
  Probe
ccagcctacccaagcagggactgga

SEQ ID NO: 357042 - DNA, 25 bp, Artificial
  Probe
caggctgctttctttgtgtgtggcc

SEQ ID NO: 357043 - DNA, 25 bp, Artificial
  Probe
tgctttctttgtgtgtggccccagg

SEQ ID NO: 357044 - DNA, 25 bp, Artificial
  Probe
ctgtctgtattagacaaggttgcca

SEQ ID NO: 357045 - DNA, 25 bp, Artificial
  Probe
tcattccttcagtttctcttgggca

SEQ ID NO: 357046 - DNA, 25 bp, Artificial
  Probe
agcagggactggacctccatccaga

SEQ ID NO: 357047 - DNA, 25 bp, Artificial
  Probe
tctcattccttcagtttctcttggg

SEQ ID NO: 357048 - DNA, 25 bp, Artificial
  Probe
ccgggagtgtctcattccttcagtt

SEQ ID NO: 357049 - DNA, 25 bp, Artificial
  Probe
acccaagcagggactggacctccat

SEQ ID NO: 357050 - DNA, 25 bp, Artificial
  Probe
agggactggacctccatccagatag

SEQ ID NO: 357051 - DNA, 25 bp, Artificial
  Probe
tccttcagtttctcttgggcagcat

SEQ ID NO: 357052 - DNA, 25 bp, Artificial
  Probe
gccccaggtgtcaaaaatgtcacca

SEQ ID NO: 357053 - DNA, 25 bp, Artificial
  Probe
aaatgtcaccagctgtctgtattag

SEQ ID NO: 357054 - DNA, 25 bp, Artificial
  Probe
gtgtcaaaaatgtcaccagctgtct

SEQ ID NO: 357055 - DNA, 25 bp, Artificial
  Probe
ttcaactttgcgtatagtggagcca

SEQ ID NO: 357056 - DNA, 25 bp, Artificial
  Probe
gagtgtctcattccttcagtttctc

SEQ ID NO: 357057 - DNA, 25 bp, Artificial
  Probe
cgaccaggctgctttctttgtgtgt

SEQ ID NO: 357058 - DNA, 25 bp, Artificial
  Probe
gtctcattccttcagtttctcttgg

SEQ ID NO: 357059 - DNA, 25 bp, Artificial
  Probe
ggccccaggtgtcaaaaatgtcacc

SEQ ID NO: 357060 - DNA, 25 bp, Artificial
  Probe
ctgattcaactttgcgtatagtgga

SEQ ID NO: 357061 - DNA, 25 bp, Artificial
  Probe
tttctcttgggcagcatcgaccagg

SEQ ID NO: 357062 - DNA, 25 bp, Artificial
  Probe
caagcagggactggacctccatcca

SEQ ID NO: 357063 - DNA, 25 bp, Artificial
  Probe
actgattcaactttgcgtatagtgg

SEQ ID NO: 357064 - DNA, 25 bp, Artificial
  Probe
ttcagtttctcttgggcagcatcga

SEQ ID NO: 357065 - DNA, 25 bp, Artificial
  Probe
ctggacctccatccagatagagggt

SEQ ID NO: 357066 - DNA, 25 bp, Artificial
  Probe
gggagtgtctcattccttcagtttc

SEQ ID NO: 357067 - DNA, 25 bp, Artificial
  Probe
tttctttgtgtgtggccccaggtgt

SEQ ID NO: 357068 - DNA, 25 bp, Artificial
  Probe
aggacccacagcaaggccgcctgtg

SEQ ID NO: 357069 - DNA, 25 bp, Artificial
  Probe
caaacctgagtttgctacttttagc

SEQ ID NO: 357070 - DNA, 25 bp, Artificial
  Probe
agcaaggccgcctgtgatagcaact

SEQ ID NO: 357071 - DNA, 25 bp, Artificial
  Probe
ccgaagtgagcgttggcctcagctt

SEQ ID NO: 357072 - DNA, 25 bp, Artificial
  Probe
ggacccacagcaaggccgcctgtga

SEQ ID NO: 357073 - DNA, 25 bp, Artificial
  Probe
agctcccatgccatcctgtgcagga

SEQ ID NO: 357074 - DNA, 25 bp, Artificial
  Probe
ccacgtgaggcctgatgcgctcgaa

SEQ ID NO: 357075 - DNA, 25 bp, Artificial
  Probe
tgtccggagaaccaggctgagcagt

SEQ ID NO: 357076 - DNA, 25 bp, Artificial
  Probe
cgatcaacacgctcgagtccacgtg

SEQ ID NO: 357077 - DNA, 25 bp, Artificial
  Probe
ggccagattgcctcaagctttccaa

SEQ ID NO: 357078 - DNA, 25 bp, Artificial
  Probe
ttttagcaggtaaatccgagctccc

SEQ ID NO: 357079 - DNA, 25 bp, Artificial
  Probe
tgtgcaggacccacagcaaggccgc

SEQ ID NO: 357080 - DNA, 25 bp, Artificial
  Probe
gtgatagcaacttggccagattgcc

SEQ ID NO: 357081 - DNA, 25 bp, Artificial
  Probe
tcgaataggcgcagcaccagggtct

SEQ ID NO: 357082 - DNA, 25 bp, Artificial
  Probe
agcaacttggccagattgcctcaag

SEQ ID NO: 357083 - DNA, 25 bp, Artificial
  Probe
ctggcttgaagaacccacagatgtc

SEQ ID NO: 357084 - DNA, 25 bp, Artificial
  Probe
atccgagctccctggagcagtgttc

SEQ ID NO: 357085 - DNA, 25 bp, Artificial
  Probe
atgccatcctgtgcaggacccacag

SEQ ID NO: 357086 - DNA, 25 bp, Artificial
  Probe
atgtcacctgtgtccggagaaccag

SEQ ID NO: 357087 - DNA, 25 bp, Artificial
  Probe
agcagtggccgagctcccatgccat

SEQ ID NO: 357088 - DNA, 25 bp, Artificial
  Probe
gtaaatccgagctccctggagcagt

SEQ ID NO: 357089 - DNA, 25 bp, Artificial
  Probe
tgagcgttggcctcagcttgcagac

SEQ ID NO: 357090 - DNA, 25 bp, Artificial
  Probe
gagcagtggccgagctcccatgcca

SEQ ID NO: 357091 - DNA, 25 bp, Artificial
  Probe
aaccaggctgagcagtggccgagct

SEQ ID NO: 357092 - DNA, 25 bp, Artificial
  Probe
atgcgctcgaataggcgcagcacca

SEQ ID NO: 357093 - DNA, 25 bp, Artificial
  Probe
cagtgttcaggctctccttggtttt

SEQ ID NO: 357094 - DNA, 25 bp, Artificial
  Probe
ggcccagccaatctggcaattttta

SEQ ID NO: 357095 - DNA, 25 bp, Artificial
  Probe
tcagcttgcagacttgtggcttggg

SEQ ID NO: 357096 - DNA, 25 bp, Artificial
  Probe
acatgttgccgaagtgagcgttggc

SEQ ID NO: 357097 - DNA, 25 bp, Artificial
  Probe
cgtgaggcctgatgcgctcgaatag

SEQ ID NO: 357098 - DNA, 25 bp, Artificial
  Probe
cctggagcagtgttcaggctctcct

SEQ ID NO: 357099 - DNA, 25 bp, Artificial
  Probe
agacatatccacaaacctgagtttg

SEQ ID NO: 357100 - DNA, 25 bp, Artificial
  Probe
taggcgcagcaccagggtctcccag

SEQ ID NO: 357101 - DNA, 25 bp, Artificial
  Probe
gatggcccagccaatctggcaattt

SEQ ID NO: 357102 - DNA, 25 bp, Artificial
  Probe
caggtaaatccgagctccctggagc

SEQ ID NO: 357103 - DNA, 25 bp, Artificial
  Probe
ccattctgctgatggcccagccaat

SEQ ID NO: 357104 - DNA, 25 bp, Artificial
  Probe
gacatatccacaaacctgagtttgc

SEQ ID NO: 357105 - DNA, 25 bp, Artificial
  Probe
tgctgccccttctggcttgaagaac

SEQ ID NO: 357106 - DNA, 25 bp, Artificial
  Probe
acttggccagattgcctcaagcttt

SEQ ID NO: 357107 - DNA, 25 bp, Artificial
  Probe
cgagtccacgtgaggcctgatgcgc

SEQ ID NO: 357108 - DNA, 25 bp, Artificial
  Probe
tgccccaggacatccattctgctga

SEQ ID NO: 357109 - DNA, 25 bp, Artificial
  Probe
acctgtgtccggagaaccaggctga

SEQ ID NO: 357110 - DNA, 25 bp, Artificial
  Probe
ggcctgatgcgctcgaataggcgca

SEQ ID NO: 357111 - DNA, 25 bp, Artificial
  Probe
tccaagacatgttgccgaagtgagc

SEQ ID NO: 357112 - DNA, 25 bp, Artificial
  Probe
cccttctggcttgaagaacccacag

SEQ ID NO: 357113 - DNA, 25 bp, Artificial
  Probe
caggctgagcagtggccgagctccc

SEQ ID NO: 357114 - DNA, 25 bp, Artificial
  Probe
ttccacccattttctgggaagtgga

SEQ ID NO: 357115 - DNA, 25 bp, Artificial
  Probe
gtggaccccatctagttcctgcgct

SEQ ID NO: 357116 - DNA, 25 bp, Artificial
  Probe
tgagattcgtatttagcctttaaca

SEQ ID NO: 357117 - DNA, 25 bp, Artificial
  Probe
ggcgtttcctagtgggcttctcgac

SEQ ID NO: 357118 - DNA, 25 bp, Artificial
  Probe
aacgctgctctcagtgtttctcaag

SEQ ID NO: 357119 - DNA, 25 bp, Artificial
  Probe
gaagaaccatgcatggcgtttccta

SEQ ID NO: 357120 - DNA, 25 bp, Artificial
  Probe
aagtgaatttctctttctctgttgg

SEQ ID NO: 357121 - DNA, 25 bp, Artificial
  Probe
tcccttaagaccacaccgggacagt

SEQ ID NO: 357122 - DNA, 25 bp, Artificial
  Probe
tatctacctgcctctgagattcgta

SEQ ID NO: 357123 - DNA, 25 bp, Artificial
  Probe
ggcaaacgctgctctcagtgtttct

SEQ ID NO: 357124 - DNA, 25 bp, Artificial
  Probe
gagattcgtatttagcctttaacac

SEQ ID NO: 357125 - DNA, 25 bp, Artificial
  Probe
gtaaccggtatgattaggattccat

SEQ ID NO: 357126 - DNA, 25 bp, Artificial
  Probe
actctaagcctttcctctgtgtggg

SEQ ID NO: 357127 - DNA, 25 bp, Artificial
  Probe
acctctgatcctcagctctgtggtt

SEQ ID NO: 357128 - DNA, 25 bp, Artificial
  Probe
actattatctgacacactggtgcta

SEQ ID NO: 357129 - DNA, 25 bp, Artificial
  Probe
gacatttggcccttagctccaagtc

SEQ ID NO: 357130 - DNA, 25 bp, Artificial
  Probe
caattttgtactttgcgtagcgggg

SEQ ID NO: 357131 - DNA, 25 bp, Artificial
  Probe
tctgtggttcccttaagaccacacc

SEQ ID NO: 357132 - DNA, 25 bp, Artificial
  Probe
ccactctaagcctttcctctgtgtg

SEQ ID NO: 357133 - DNA, 25 bp, Artificial
  Probe
taaccggtatgattaggattccata

SEQ ID NO: 357134 - DNA, 25 bp, Artificial
  Probe
tcagctctgtggttcccttaagacc

SEQ ID NO: 357135 - DNA, 25 bp, Artificial
  Probe
atgtaaccggtatgattaggattcc

SEQ ID NO: 357136 - DNA, 25 bp, Artificial
  Probe
acactatgcaattttgtactttgcg

SEQ ID NO: 357137 - DNA, 25 bp, Artificial
  Probe
ctctgagattcgtatttagccttta

SEQ ID NO: 357138 - DNA, 25 bp, Artificial
  Probe
agatgtgacatttggcccttagctc

SEQ ID NO: 357139 - DNA, 25 bp, Artificial
  Probe
cagtgtttctcaaggccgtggaccc

SEQ ID NO: 357140 - DNA, 25 bp, Artificial
  Probe
ccattttctgggaagtggatgtaac

SEQ ID NO: 357141 - DNA, 25 bp, Artificial
  Probe
tcgacctctgatcctcagctctgtg

SEQ ID NO: 357142 - DNA, 25 bp, Artificial
  Probe
gatcctcagctctgtggttccctta

SEQ ID NO: 357143 - DNA, 25 bp, Artificial
  Probe
ttcaaaacacatcattgttggccag

SEQ ID NO: 357144 - DNA, 25 bp, Artificial
  Probe
accccatctagttcctgcgctttgt

SEQ ID NO: 357145 - DNA, 25 bp, Artificial
  Probe
atttggcccttagctccaagtctct

SEQ ID NO: 357146 - DNA, 25 bp, Artificial
  Probe
tcaaggccgtggaccccatctagtt

SEQ ID NO: 357147 - DNA, 25 bp, Artificial
  Probe
gaaactattatctgacacactggtg

SEQ ID NO: 357148 - DNA, 25 bp, Artificial
  Probe
ttcctagtgggcttctcgacctctg

SEQ ID NO: 357149 - DNA, 25 bp, Artificial
  Probe
ttcccttaagaccacaccgggacag

SEQ ID NO: 357150 - DNA, 25 bp, Artificial
  Probe
cattttctgggaagtggatgtaacc

SEQ ID NO: 357151 - DNA, 25 bp, Artificial
  Probe
ccatgcatggcgtttcctagtgggc

SEQ ID NO: 357152 - DNA, 25 bp, Artificial
  Probe
ttctcaaggccgtggaccccatcta

SEQ ID NO: 357153 - DNA, 25 bp, Artificial
  Probe
cagctctgtggttcccttaagacca

SEQ ID NO: 357154 - DNA, 25 bp, Artificial
  Probe
ctctttctctgttggagagagatgt

SEQ ID NO: 357155 - DNA, 25 bp, Artificial
  Probe
gcccttagctccaagtctcttctga

SEQ ID NO: 357156 - DNA, 25 bp, Artificial
  Probe
agtgggcttctcgacctctgatcct

SEQ ID NO: 357157 - DNA, 25 bp, Artificial
  Probe
ttctctttctctgttggagagagat

SEQ ID NO: 357158 - DNA, 25 bp, Artificial
  Probe
gggcttctcgacctctgatcctcag

SEQ ID NO: 357159 - DNA, 25 bp, Artificial
  Probe
tcaaaacacatcattgttggccaga

SEQ ID NO: 357160 - DNA, 25 bp, Artificial
  Probe
tcatgtgccccatctgcctggacat

SEQ ID NO: 357161 - DNA, 25 bp, Artificial
  Probe
catgtgccccatctgcctggacatg

SEQ ID NO: 357162 - DNA, 25 bp, Artificial
  Probe
tttctcagagcttgcctctaaagtc

SEQ ID NO: 357163 - DNA, 25 bp, Artificial
  Probe
tcttacgtttctcagagcttgcctc

SEQ ID NO: 357164 - DNA, 25 bp, Artificial
  Probe
ggttctgctcggactgcatcgtcac

SEQ ID NO: 357165 - DNA, 25 bp, Artificial
  Probe
tcatttttggtcagcgtggctgtcc

SEQ ID NO: 357166 - DNA, 25 bp, Artificial
  Probe
cctgctaatgaggaagccatcatgg

SEQ ID NO: 357167 - DNA, 25 bp, Artificial
  Probe
cggtcactgcattcggagctcatgt

SEQ ID NO: 357168 - DNA, 25 bp, Artificial
  Probe
ccccatctgcctggacatgctgaaa

SEQ ID NO: 357169 - DNA, 25 bp, Artificial
  Probe
ccatcatttttggtcagcgtggctg

SEQ ID NO: 357170 - DNA, 25 bp, Artificial
  Probe
acaatgaccaccaaggaatgttgcc

SEQ ID NO: 357171 - DNA, 25 bp, Artificial
  Probe
cgtggctgtccaggttcttacgttt

SEQ ID NO: 357172 - DNA, 25 bp, Artificial
  Probe
gtttctcagagcttgcctctaaagt

SEQ ID NO: 357173 - DNA, 25 bp, Artificial
  Probe
aatgttgccacaggttctgctcgga

SEQ ID NO: 357174 - DNA, 25 bp, Artificial
  Probe
atgtgccccatctgcctggacatgc

SEQ ID NO: 357175 - DNA, 25 bp, Artificial
  Probe
gccacaggttctgctcggactgcat

SEQ ID NO: 357176 - DNA, 25 bp, Artificial
  Probe
tttcgccccggtcactgcattcgga

SEQ ID NO: 357177 - DNA, 25 bp, Artificial
  Probe
cactgcattcggagctcatgtgccc

SEQ ID NO: 357178 - DNA, 25 bp, Artificial
  Probe
ctgaaaaacacaatgaccaccaagg

SEQ ID NO: 357179 - DNA, 25 bp, Artificial
  Probe
ccatctgcctggacatgctgaaaaa

SEQ ID NO: 357180 - DNA, 25 bp, Artificial
  Probe
tctgcctggacatgctgaaaaacac

SEQ ID NO: 357181 - DNA, 25 bp, Artificial
  Probe
cccgcctgctaatgaggaagccatc

SEQ ID NO: 357182 - DNA, 25 bp, Artificial
  Probe
aggaatgttgccacaggttctgctc

SEQ ID NO: 357183 - DNA, 25 bp, Artificial
  Probe
ttttggtcagcgtggctgtccaggt

SEQ ID NO: 357184 - DNA, 25 bp, Artificial
  Probe
cggagattgctgtttcgccccggtc

SEQ ID NO: 357185 - DNA, 25 bp, Artificial
  Probe
ttcggagctcatgtgccccatctgc

SEQ ID NO: 357186 - DNA, 25 bp, Artificial
  Probe
agcgtggctgtccaggttcttacgt

SEQ ID NO: 357187 - DNA, 25 bp, Artificial
  Probe
cgcctgctaatgaggaagccatcat

SEQ ID NO: 357188 - DNA, 25 bp, Artificial
  Probe
tgtccaggttcttacgtttctcaga

SEQ ID NO: 357189 - DNA, 25 bp, Artificial
  Probe
tgcctggacatgctgaaaaacacaa

SEQ ID NO: 357190 - DNA, 25 bp, Artificial
  Probe
acggagattgctgtttcgccccggt

SEQ ID NO: 357191 - DNA, 25 bp, Artificial
  Probe
aatgaggaagccatcatggacggga

SEQ ID NO: 357192 - DNA, 25 bp, Artificial
  Probe
gagcttgcctctaaagtccctcttc

SEQ ID NO: 357193 - DNA, 25 bp, Artificial
  Probe
tcagagcttgcctctaaagtccctc

SEQ ID NO: 357194 - DNA, 25 bp, Artificial
  Probe
accaaggaatgttgccacaggttct

SEQ ID NO: 357195 - DNA, 25 bp, Artificial
  Probe
cacaggttctgctcggactgcatcg

SEQ ID NO: 357196 - DNA, 25 bp, Artificial
  Probe
atgaccaccaaggaatgttgccaca

SEQ ID NO: 357197 - DNA, 25 bp, Artificial
  Probe
atgaggaagccatcatggacgggac

SEQ ID NO: 357198 - DNA, 25 bp, Artificial
  Probe
aacacaatgaccaccaaggaatgtt

SEQ ID NO: 357199 - DNA, 25 bp, Artificial
  Probe
aagccatcatggacgggacggagat

SEQ ID NO: 357200 - DNA, 25 bp, Artificial
  Probe
ggtcagcgtggctgtccaggttctt

SEQ ID NO: 357201 - DNA, 25 bp, Artificial
  Probe
acgtttctcagagcttgcctctaaa

SEQ ID NO: 357202 - DNA, 25 bp, Artificial
  Probe
cccggtcactgcattcggagctcat

SEQ ID NO: 357203 - DNA, 25 bp, Artificial
  Probe
ccggtcactgcattcggagctcatg

SEQ ID NO: 357204 - DNA, 25 bp, Artificial
  Probe
ttcgccccggtcactgcattcggag

SEQ ID NO: 357205 - DNA, 25 bp, Artificial
  Probe
gagattgctgtttcgccccggtcac

SEQ ID NO: 357206 - DNA, 25 bp, Artificial
  Probe
ccctttccacagtacctgctgcagt

SEQ ID NO: 357207 - DNA, 25 bp, Artificial
  Probe
tgggctgcatggtttttgccctgga

SEQ ID NO: 357208 - DNA, 25 bp, Artificial
  Probe
ggtgctgggctgcatggtttttgcc

SEQ ID NO: 357209 - DNA, 25 bp, Artificial
  Probe
cagtacctgctgcagtcagactgaa

SEQ ID NO: 357210 - DNA, 25 bp, Artificial
  Probe
ttcacttgcacataaagtcgctttc

SEQ ID NO: 357211 - DNA, 25 bp, Artificial
  Probe
gggctctgccttcctcatcttccct

SEQ ID NO: 357212 - DNA, 25 bp, Artificial
  Probe
cctttccacagtacctgctgcagtc

SEQ ID NO: 357213 - DNA, 25 bp, Artificial
  Probe
gcccccaagccggtggtcttgggag

SEQ ID NO: 357214 - DNA, 25 bp, Artificial
  Probe
ctttccacagtacctgctgcagtca

SEQ ID NO: 357215 - DNA, 25 bp, Artificial
  Probe
tgccctggatctcttttgggggggg

SEQ ID NO: 357216 - DNA, 25 bp, Artificial
  Probe
ctgcatggtttttgccctggatctc

SEQ ID NO: 357217 - DNA, 25 bp, Artificial
  Probe
gggctgcatggtttttgccctggat

SEQ ID NO: 357218 - DNA, 25 bp, Artificial
  Probe
tccctcccatctttcacttgcacat

SEQ ID NO: 357219 - DNA, 25 bp, Artificial
  Probe
gtgctgggctgcatggtttttgccc

SEQ ID NO: 357220 - DNA, 25 bp, Artificial
  Probe
gctcttccctaatcctcagcgcagc

SEQ ID NO: 357221 - DNA, 25 bp, Artificial
  Probe
tccacagtacctgctgcagtcagac

SEQ ID NO: 357222 - DNA, 25 bp, Artificial
  Probe
tcggacagcccttcagcctcccagg

SEQ ID NO: 357223 - DNA, 25 bp, Artificial
  Probe
gtacctgctgcagtcagactgaaga

SEQ ID NO: 357224 - DNA, 25 bp, Artificial
  Probe
gcaggcccccaagccggtggtcttg

SEQ ID NO: 357225 - DNA, 25 bp, Artificial
  Probe
ggtcttgggagggagcagggctcgg

SEQ ID NO: 357226 - DNA, 25 bp, Artificial
  Probe
cttccctaatcctcagcgcagctag

SEQ ID NO: 357227 - DNA, 25 bp, Artificial
  Probe
tgctgggctgcatggtttttgccct

SEQ ID NO: 357228 - DNA, 25 bp, Artificial
  Probe
ccaagccggtggtcttgggagggag

SEQ ID NO: 357229 - DNA, 25 bp, Artificial
  Probe
ggctgcatggtttttgccctggatc

SEQ ID NO: 357230 - DNA, 25 bp, Artificial
  Probe
tgttgtggggcaggcccccaagccg

SEQ ID NO: 357231 - DNA, 25 bp, Artificial
  Probe
tttccacagtacctgctgcagtcag

SEQ ID NO: 357232 - DNA, 25 bp, Artificial
  Probe
ccatctttcacttgcacataaagtc

SEQ ID NO: 357233 - DNA, 25 bp, Artificial
  Probe
ttccacagtacctgctgcagtcaga

SEQ ID NO: 357234 - DNA, 25 bp, Artificial
  Probe
ttccctaatcctcagcgcagctagt

SEQ ID NO: 357235 - DNA, 25 bp, Artificial
  Probe
ccacagtacctgctgcagtcagact

SEQ ID NO: 357236 - DNA, 25 bp, Artificial
  Probe
gagaatgtggggtggccagcctgca

SEQ ID NO: 357237 - DNA, 25 bp, Artificial
  Probe
tttgccctggatctcttttgggggg

SEQ ID NO: 357238 - DNA, 25 bp, Artificial
  Probe
ccggtggtcttgggagggagcaggg

SEQ ID NO: 357239 - DNA, 25 bp, Artificial
  Probe
agatgggtgctgggctgcatggttt

SEQ ID NO: 357240 - DNA, 25 bp, Artificial
  Probe
gtttttgccctggatctcttttggg

SEQ ID NO: 357241 - DNA, 25 bp, Artificial
  Probe
cacagtacctgctgcagtcagactg

SEQ ID NO: 357242 - DNA, 25 bp, Artificial
  Probe
agtacctgctgcagtcagactgaag

SEQ ID NO: 357243 - DNA, 25 bp, Artificial
  Probe
ggtttttgccctggatctcttttgg

SEQ ID NO: 357244 - DNA, 25 bp, Artificial
  Probe
ttttgccctggatctcttttggggg

SEQ ID NO: 357245 - DNA, 25 bp, Artificial
  Probe
tgtctgggctctgccttcctcatct

SEQ ID NO: 357246 - DNA, 25 bp, Artificial
  Probe
ctgggctgcatggtttttgccctgg

SEQ ID NO: 357247 - DNA, 25 bp, Artificial
  Probe
gctgcatggtttttgccctggatct

SEQ ID NO: 357248 - DNA, 25 bp, Artificial
  Probe
tgcatggtttttgccctggatctct

SEQ ID NO: 357249 - DNA, 25 bp, Artificial
  Probe
gctgggctgcatggtttttgccctg

SEQ ID NO: 357250 - DNA, 25 bp, Artificial
  Probe
tttttgccctggatctcttttgggg

SEQ ID NO: 357251 - DNA, 25 bp, Artificial
  Probe
ggagaatgtggggtggccagcctgc

SEQ ID NO: 357252 - DNA, 25 bp, Artificial
  Probe
tagtggtgccttaccggggatccgc

SEQ ID NO: 357253 - DNA, 25 bp, Artificial
  Probe
taccctctgtacagcgcgcgaatta

SEQ ID NO: 357254 - DNA, 25 bp, Artificial
  Probe
ggaacaactagatgcggggactttc

SEQ ID NO: 357255 - DNA, 25 bp, Artificial
  Probe
agctaccaaccgaggaacccaacat

SEQ ID NO: 357256 - DNA, 25 bp, Artificial
  Probe
ggtgctctaccctcgagtggtgagt

SEQ ID NO: 357257 - DNA, 25 bp, Artificial
  Probe
atttccagccctgtgcagccaactg

SEQ ID NO: 357258 - DNA, 25 bp, Artificial
  Probe
cctcgagtggtgagtatcgcccgag

SEQ ID NO: 357259 - DNA, 25 bp, Artificial
  Probe
ctcgagcctttgaacctgacctcgg

SEQ ID NO: 357260 - DNA, 25 bp, Artificial
  Probe
ccctggctccggaggatgctaccag

SEQ ID NO: 357261 - DNA, 25 bp, Artificial
  Probe
gactttcgtctgacgtttccctctt

SEQ ID NO: 357262 - DNA, 25 bp, Artificial
  Probe
cgtgcgtccgaacacttctcgcggg

SEQ ID NO: 357263 - DNA, 25 bp, Artificial
  Probe
tagaaaatgggcagccaaggctccg

SEQ ID NO: 357264 - DNA, 25 bp, Artificial
  Probe
gtacagcgcgcgaattatgtgccat

SEQ ID NO: 357265 - DNA, 25 bp, Artificial
  Probe
tgctcgccatcatcttctgccagat

SEQ ID NO: 357266 - DNA, 25 bp, Artificial
  Probe
ctcttttctctgctcaggtccggcg

SEQ ID NO: 357267 - DNA, 25 bp, Artificial
  Probe
tccgaacacttctcgcgggcacgga

SEQ ID NO: 357268 - DNA, 25 bp, Artificial
  Probe
cgtaccctctgtacagcgcgcgaat

SEQ ID NO: 357269 - DNA, 25 bp, Artificial
  Probe
agtatcgcccgagtgggcagcaaga

SEQ ID NO: 357270 - DNA, 25 bp, Artificial
  Probe
ccatgactggcctgagggctccggc

SEQ ID NO: 357271 - DNA, 25 bp, Artificial
  Probe
tttgcttcctccttggaatttccag

SEQ ID NO: 357272 - DNA, 25 bp, Artificial
  Probe
caactgctccctagctgcgaagggc

SEQ ID NO: 357273 - DNA, 25 bp, Artificial
  Probe
tttctctgctcaggtccggcgccag

SEQ ID NO: 357274 - DNA, 25 bp, Artificial
  Probe
tggggcacctagaaaatgggcagcc

SEQ ID NO: 357275 - DNA, 25 bp, Artificial
  Probe
catcttctgccagattttgatggct

SEQ ID NO: 357276 - DNA, 25 bp, Artificial
  Probe
gagtttcccggctctataagtagtg

SEQ ID NO: 357277 - DNA, 25 bp, Artificial
  Probe
gacgggtgctctaccctcgagtggt

SEQ ID NO: 357278 - DNA, 25 bp, Artificial
  Probe
ggcagccaaggctccgcctacattt

SEQ ID NO: 357279 - DNA, 25 bp, Artificial
  Probe
ctccacaccatgactggcctgaggg

SEQ ID NO: 357280 - DNA, 25 bp, Artificial
  Probe
agcaagaggtcgagtcgccccggaa

SEQ ID NO: 357281 - DNA, 25 bp, Artificial
  Probe
aaggtgtgtcgcaggccctggctcc

SEQ ID NO: 357282 - DNA, 25 bp, Artificial
  Probe
ctgccagattttgatggctgaagaa

SEQ ID NO: 357283 - DNA, 25 bp, Artificial
  Probe
agaggatcctctttctcctgctcgc

SEQ ID NO: 357284 - DNA, 25 bp, Artificial
  Probe
cgcctacattttgcttcctccttgg

SEQ ID NO: 357285 - DNA, 25 bp, Artificial
  Probe
gcctacattttgcttcctccttgga

SEQ ID NO: 357286 - DNA, 25 bp, Artificial
  Probe
ctataagtagtggtgccttaccggg

SEQ ID NO: 357287 - DNA, 25 bp, Artificial
  Probe
ctgctccctagctgcgaagggcgga

SEQ ID NO: 357288 - DNA, 25 bp, Artificial
  Probe
cacggaaaacgcagccgacgggtgc

SEQ ID NO: 357289 - DNA, 25 bp, Artificial
  Probe
gaggatgctaccagcgccatatcac

SEQ ID NO: 357290 - DNA, 25 bp, Artificial
  Probe
cttctcgcgggcacggaaaacgcag

SEQ ID NO: 357291 - DNA, 25 bp, Artificial
  Probe
ctagatgcggggactttcgtctgac

SEQ ID NO: 357292 - DNA, 25 bp, Artificial
  Probe
cagcaagaggtcgagtcgccccgga

SEQ ID NO: 357293 - DNA, 25 bp, Artificial
  Probe
ggaacctttgggaacaactagatgc

SEQ ID NO: 357294 - DNA, 25 bp, Artificial
  Probe
ccgaggaacccaacattgccaagag

SEQ ID NO: 357295 - DNA, 25 bp, Artificial
  Probe
tgtgcagccaactgctccctagctg

SEQ ID NO: 357296 - DNA, 25 bp, Artificial
  Probe
attatgtgccattcgcgtaaccacc

SEQ ID NO: 357297 - DNA, 25 bp, Artificial
  Probe
cgtttccctcttttctctgctcagg

SEQ ID NO: 357298 - DNA, 25 bp, Artificial
  Probe
tttataaacacctacctcgcagggt

SEQ ID NO: 357299 - DNA, 25 bp, Artificial
  Probe
cctgctgtgatccaagctggagagg

SEQ ID NO: 357300 - DNA, 25 bp, Artificial
  Probe
tagtaggcgcccaataaatctactc

SEQ ID NO: 357301 - DNA, 25 bp, Artificial
  Probe
gggtttataaacacctacctcgcag

SEQ ID NO: 357302 - DNA, 25 bp, Artificial
  Probe
gcttggaacacttttaggcctgccc

SEQ ID NO: 357303 - DNA, 25 bp, Artificial
  Probe
agaggcttttgaacctagtgaccta

SEQ ID NO: 357304 - DNA, 25 bp, Artificial
  Probe
actcaagagtcagtttcagggaaag

SEQ ID NO: 357305 - DNA, 25 bp, Artificial
  Probe
acgcagacggtatggcccaccggat

SEQ ID NO: 357306 - DNA, 25 bp, Artificial
  Probe
cctgttcccttgagacagaggagag

SEQ ID NO: 357307 - DNA, 25 bp, Artificial
  Probe
tataaagcgtcttgcacagtgcctg

SEQ ID NO: 357308 - DNA, 25 bp, Artificial
  Probe
gctccccaaagcagggcaagataaa

SEQ ID NO: 357309 - DNA, 25 bp, Artificial
  Probe
tccaactctgccactgacttagctg

SEQ ID NO: 357310 - DNA, 25 bp, Artificial
  Probe
aacgagggaactgactcaagagtca

SEQ ID NO: 357311 - DNA, 25 bp, Artificial
  Probe
ggtagccaatgaatcagcttggaac

SEQ ID NO: 357312 - DNA, 25 bp, Artificial
  Probe
tcttttgtccctagaattttgtgaa

SEQ ID NO: 357313 - DNA, 25 bp, Artificial
  Probe
tgctggtgctcgagtgcccctacac

SEQ ID NO: 357314 - DNA, 25 bp, Artificial
  Probe
ttgagggttcttacccacttctgcc

SEQ ID NO: 357315 - DNA, 25 bp, Artificial
  Probe
atttgagggttcttacccacttctg

SEQ ID NO: 357316 - DNA, 25 bp, Artificial
  Probe
tggatcccttatttcccggcgccgg

SEQ ID NO: 357317 - DNA, 25 bp, Artificial
  Probe
tccctagaattttgtgaacgagcga

SEQ ID NO: 357318 - DNA, 25 bp, Artificial
  Probe
cgcgccgagcccttctttgtattaa

SEQ ID NO: 357319 - DNA, 25 bp, Artificial
  Probe
cacttctgccatcctcagttcggaa

SEQ ID NO: 357320 - DNA, 25 bp, Artificial
  Probe
cacacctgctacattcggtgtggaa

SEQ ID NO: 357321 - DNA, 25 bp, Artificial
  Probe
cattcggtgtggaactgttcagaga

SEQ ID NO: 357322 - DNA, 25 bp, Artificial
  Probe
taccggtttgagactgacattcaag

SEQ ID NO: 357323 - DNA, 25 bp, Artificial
  Probe
tccctggcaggagaggaaaagtaac

SEQ ID NO: 357324 - DNA, 25 bp, Artificial
  Probe
taaaggtccggtcactgcctctggc

SEQ ID NO: 357325 - DNA, 25 bp, Artificial
  Probe
gatactcgctgtagccactacgggg

SEQ ID NO: 357326 - DNA, 25 bp, Artificial
  Probe
gcgatttctgcctcccattcttttg

SEQ ID NO: 357327 - DNA, 25 bp, Artificial
  Probe
ggcaaagggcttctattccaatttc

SEQ ID NO: 357328 - DNA, 25 bp, Artificial
  Probe
gccatgtgaccttggccaaatcact

SEQ ID NO: 357329 - DNA, 25 bp, Artificial
  Probe
gtaaaacgagcgatttctgcctccc

SEQ ID NO: 357330 - DNA, 25 bp, Artificial
  Probe
gtccctggcaggagaggaaaagtaa

SEQ ID NO: 357331 - DNA, 25 bp, Artificial
  Probe
tgtgggtgtgatactcgctgtagcc

SEQ ID NO: 357332 - DNA, 25 bp, Artificial
  Probe
ctagtgcaggagacagagggctttt

SEQ ID NO: 357333 - DNA, 25 bp, Artificial
  Probe
tgtgtctgccacttactagccatgt

SEQ ID NO: 357334 - DNA, 25 bp, Artificial
  Probe
gagcccttctttgtattaatccacg

SEQ ID NO: 357335 - DNA, 25 bp, Artificial
  Probe
ctacaccagcactgccagttatctg

SEQ ID NO: 357336 - DNA, 25 bp, Artificial
  Probe
cgggcatcagggactaatgtaaatg

SEQ ID NO: 357337 - DNA, 25 bp, Artificial
  Probe
cctccatctccgtgtccttagtgat

SEQ ID NO: 357338 - DNA, 25 bp, Artificial
  Probe
gctctcctagatgttacaactcaag

SEQ ID NO: 357339 - DNA, 25 bp, Artificial
  Probe
tggaaaacagccaggcaaggaggaa

SEQ ID NO: 357340 - DNA, 25 bp, Artificial
  Probe
cagtcagggttttcagatttaaacg

SEQ ID NO: 357341 - DNA, 25 bp, Artificial
  Probe
atgcagaatgcatacactcaaccag

SEQ ID NO: 357342 - DNA, 25 bp, Artificial
  Probe
caaattggcaagagggctctcctag

SEQ ID NO: 357343 - DNA, 25 bp, Artificial
  Probe
cccccggttgctggtgctcgagtgc

SEQ ID NO: 357344 - DNA, 25 bp, Artificial
  Probe
ccctgtctgggcaggacactaatgg

SEQ ID NO: 357345 - DNA, 25 bp, Artificial
  Probe
agctgtaccctgacgccacctatgt

SEQ ID NO: 357346 - DNA, 25 bp, Artificial
  Probe
agaagtctggtgtccaccttacccg

SEQ ID NO: 357347 - DNA, 25 bp, Artificial
  Probe
taatggcagcgctgtgcctctctct

SEQ ID NO: 357348 - DNA, 25 bp, Artificial
  Probe
tggtgcctaaggtgcctcattcctg

SEQ ID NO: 357349 - DNA, 25 bp, Artificial
  Probe
ctaagcctcctgtgggaagcccaca

SEQ ID NO: 357350 - DNA, 25 bp, Artificial
  Probe
actgtccccttgtgcccgagtctgt

SEQ ID NO: 357351 - DNA, 25 bp, Artificial
  Probe
cccttgtgcccgagtctgtccaggg

SEQ ID NO: 357352 - DNA, 25 bp, Artificial
  Probe
gccttactctgacagatcccgggag

SEQ ID NO: 357353 - DNA, 25 bp, Artificial
  Probe
taccctgacgccacctatgtttggc

SEQ ID NO: 357354 - DNA, 25 bp, Artificial
  Probe
ccttgtgcccgagtctgtccagggg

SEQ ID NO: 357355 - DNA, 25 bp, Artificial
  Probe
catggcctcttttctctttccagag

SEQ ID NO: 357356 - DNA, 25 bp, Artificial
  Probe
gcaggacactaatggccgtggtcag

SEQ ID NO: 357357 - DNA, 25 bp, Artificial
  Probe
tagtcttacttcaatctgtcgccag

SEQ ID NO: 357358 - DNA, 25 bp, Artificial
  Probe
gcctaaggtgcctcattcctgcctg

SEQ ID NO: 357359 - DNA, 25 bp, Artificial
  Probe
tactctgacagatcccgggagctcc

SEQ ID NO: 357360 - DNA, 25 bp, Artificial
  Probe
ggcatccagtggtgcctaaggtgcc

SEQ ID NO: 357361 - DNA, 25 bp, Artificial
  Probe
atggccgtggtcagccctaatggtg

SEQ ID NO: 357362 - DNA, 25 bp, Artificial
  Probe
acagatcccgggagctccctagtct

SEQ ID NO: 357363 - DNA, 25 bp, Artificial
  Probe
gctaaccttgcttagcaactgtccc

SEQ ID NO: 357364 - DNA, 25 bp, Artificial
  Probe
ccttcaagctgctaaccttgcttag

SEQ ID NO: 357365 - DNA, 25 bp, Artificial
  Probe
ggtctcatggcctcttttctctttc

SEQ ID NO: 357366 - DNA, 25 bp, Artificial
  Probe
tgcttagcaactgtccccttgtgcc

SEQ ID NO: 357367 - DNA, 25 bp, Artificial
  Probe
aagtctggtgtccaccttacccgct

SEQ ID NO: 357368 - DNA, 25 bp, Artificial
  Probe
aaagctgtaccctgacgccacctat

SEQ ID NO: 357369 - DNA, 25 bp, Artificial
  Probe
cacaaccctgtctgggcaggacact

SEQ ID NO: 357370 - DNA, 25 bp, Artificial
  Probe
tacttcaatctgtcgccagaaagct

SEQ ID NO: 357371 - DNA, 25 bp, Artificial
  Probe
tggctggtctcatggcctcttttct

SEQ ID NO: 357372 - DNA, 25 bp, Artificial
  Probe
tccagtggtgcctaaggtgcctcat

SEQ ID NO: 357373 - DNA, 25 bp, Artificial
  Probe
gtgactaatggcagcgctgtgcctc

SEQ ID NO: 357374 - DNA, 25 bp, Artificial
  Probe
ggagctccctagtcttacttcaatc

SEQ ID NO: 357375 - DNA, 25 bp, Artificial
  Probe
caatctgtcgccagaaagctgtacc

SEQ ID NO: 357376 - DNA, 25 bp, Artificial
  Probe
ggacagaggccttactctgacagat

SEQ ID NO: 357377 - DNA, 25 bp, Artificial
  Probe
ccatgcctggctggtctcatggcct

SEQ ID NO: 357378 - DNA, 25 bp, Artificial
  Probe
gccacctatgtttggccgagctgct

SEQ ID NO: 357379 - DNA, 25 bp, Artificial
  Probe
tgggaagcccacaaccctgtctggg

SEQ ID NO: 357380 - DNA, 25 bp, Artificial
  Probe
tatgtttggccgagctgctgctcta

SEQ ID NO: 357381 - DNA, 25 bp, Artificial
  Probe
aatggtgactaatggcagcgctgtg

SEQ ID NO: 357382 - DNA, 25 bp, Artificial
  Probe
cactaatggccgtggtcagccctaa

SEQ ID NO: 357383 - DNA, 25 bp, Artificial
  Probe
ctgctctaagcctcctgtgggaagc

SEQ ID NO: 357384 - DNA, 25 bp, Artificial
  Probe
gccagaaagctgtaccctgacgcca

SEQ ID NO: 357385 - DNA, 25 bp, Artificial
  Probe
tgaccccttcaagctgctaaccttg

SEQ ID NO: 357386 - DNA, 25 bp, Artificial
  Probe
ctctttccagaggtgagcagtgtgg

SEQ ID NO: 357387 - DNA, 25 bp, Artificial
  Probe
cgtggtcagccctaatggtgactaa

SEQ ID NO: 357388 - DNA, 25 bp, Artificial
  Probe
aactgtccccttgtgcccgagtctg

SEQ ID NO: 357389 - DNA, 25 bp, Artificial
  Probe
tgtgggaagcccacaaccctgtctg

SEQ ID NO: 357390 - DNA, 25 bp, Artificial
  Probe
agccagtgggatagtcgtgttatca

SEQ ID NO: 357391 - DNA, 25 bp, Artificial
  Probe
tccgaatcagtgttcagaaatttaa

SEQ ID NO: 357392 - DNA, 25 bp, Artificial
  Probe
ctcccctggctggtaaattgctcga

SEQ ID NO: 357393 - DNA, 25 bp, Artificial
  Probe
acagctgcttatctgcacaccaaag

SEQ ID NO: 357394 - DNA, 25 bp, Artificial
  Probe
gaagtattagcagtctcctctttga

SEQ ID NO: 357395 - DNA, 25 bp, Artificial
  Probe
ccgtatgctaaggacaaaggagtgg

SEQ ID NO: 357396 - DNA, 25 bp, Artificial
  Probe
ctagcccattcctacacagctttgg

SEQ ID NO: 357397 - DNA, 25 bp, Artificial
  Probe
tatattcttggctccgtatgctaag

SEQ ID NO: 357398 - DNA, 25 bp, Artificial
  Probe
atcaacagcagaaaagattaatcgg

SEQ ID NO: 357399 - DNA, 25 bp, Artificial
  Probe
ctgcaacaaaagatcgcaaacagta

SEQ ID NO: 357400 - DNA, 25 bp, Artificial
  Probe
aggattttagctgcaacaaaagatc

SEQ ID NO: 357401 - DNA, 25 bp, Artificial
  Probe
tgttgcccagttcttttcggccctc

SEQ ID NO: 357402 - DNA, 25 bp, Artificial
  Probe
gttcactggcatatgccatctcctc

SEQ ID NO: 357403 - DNA, 25 bp, Artificial
  Probe
tgcactcctgtgtggccgggtgcct

SEQ ID NO: 357404 - DNA, 25 bp, Artificial
  Probe
acaagtctcatctccgaatcagtgt

SEQ ID NO: 357405 - DNA, 25 bp, Artificial
  Probe
ctttgagcagatctaaacaggacga

SEQ ID NO: 357406 - DNA, 25 bp, Artificial
  Probe
ggcctttttacacatagaggatttt

SEQ ID NO: 357407 - DNA, 25 bp, Artificial
  Probe
ggattaatagccaacactagcttaa

SEQ ID NO: 357408 - DNA, 25 bp, Artificial
  Probe
ggtatcttcctcaatgacgaactaa

SEQ ID NO: 357409 - DNA, 25 bp, Artificial
  Probe
aagatcgcaaacagtaacgaaactg

SEQ ID NO: 357410 - DNA, 25 bp, Artificial
  Probe
tataaatacctgtacatagccagtg

SEQ ID NO: 357411 - DNA, 25 bp, Artificial
  Probe
gcatttacctactgatttgcaatgc

SEQ ID NO: 357412 - DNA, 25 bp, Artificial
  Probe
caggcatccaaagaaatggaggctt

SEQ ID NO: 357413 - DNA, 25 bp, Artificial
  Probe
ttcaaggttcatttttcgtcggata

SEQ ID NO: 357414 - DNA, 25 bp, Artificial
  Probe
tagcttaatccgtccacgaatccag

SEQ ID NO: 357415 - DNA, 25 bp, Artificial
  Probe
gctataaactatagacttctcgaga

SEQ ID NO: 357416 - DNA, 25 bp, Artificial
  Probe
gtatcaacagcagaaaagattaatc

SEQ ID NO: 357417 - DNA, 25 bp, Artificial
  Probe
atctaaacaggacgatgttactgtg

SEQ ID NO: 357418 - DNA, 25 bp, Artificial
  Probe
gtgctgtggggctcgtcactatcgt

SEQ ID NO: 357419 - DNA, 25 bp, Artificial
  Probe
ttttagggatgtttgcccctattat

SEQ ID NO: 357420 - DNA, 25 bp, Artificial
  Probe
cctcagacagggacaaagaaagtag

SEQ ID NO: 357421 - DNA, 25 bp, Artificial
  Probe
tgctcgatataactggacaatataa

SEQ ID NO: 357422 - DNA, 25 bp, Artificial
  Probe
ctatagacttctcgagaaggaaagg

SEQ ID NO: 357423 - DNA, 25 bp, Artificial
  Probe
taaggttggctcaagacaagattca

SEQ ID NO: 357424 - DNA, 25 bp, Artificial
  Probe
tggccgggtgcctcatgagacctgt

SEQ ID NO: 357425 - DNA, 25 bp, Artificial
  Probe
gatagtcgtgttatcatcaggcatt

SEQ ID NO: 357426 - DNA, 25 bp, Artificial
  Probe
ttggctcaagacaagattcaagtac

SEQ ID NO: 357427 - DNA, 25 bp, Artificial
  Probe
gatgactataattcagctttcttgc

SEQ ID NO: 357428 - DNA, 25 bp, Artificial
  Probe
tagatttcggcctttttacacatag

SEQ ID NO: 357429 - DNA, 25 bp, Artificial
  Probe
tttagggatgtttgcccctattata

SEQ ID NO: 357430 - DNA, 25 bp, Artificial
  Probe
gccttcggtaggattaatagccaac

SEQ ID NO: 357431 - DNA, 25 bp, Artificial
  Probe
cagctttggtggtctacgttatatt

SEQ ID NO: 357432 - DNA, 25 bp, Artificial
  Probe
caccaaagctgtgatgaaaatgaat

SEQ ID NO: 357433 - DNA, 25 bp, Artificial
  Probe
aatcagcctcgcaggcatccaaaga

SEQ ID NO: 357434 - DNA, 25 bp, Artificial
  Probe
ggttggagcctccaggttctccagt

SEQ ID NO: 357435 - DNA, 25 bp, Artificial
  Probe
cgtgctgcgaagtctaaaagtaagg

SEQ ID NO: 357436 - DNA, 25 bp, Artificial
  Probe
aagtccttttggaacgcattgctct

SEQ ID NO: 357437 - DNA, 25 bp, Artificial
  Probe
tgcaaaggcctcatggggcagacag

SEQ ID NO: 357438 - DNA, 25 bp, Artificial
  Probe
ctagtcaggactccagatggatggt

SEQ ID NO: 357439 - DNA, 25 bp, Artificial
  Probe
gaggaccagcagagcagagcagaac

SEQ ID NO: 357440 - DNA, 25 bp, Artificial
  Probe
gagcagaaccacgtcatgcttggga

SEQ ID NO: 357441 - DNA, 25 bp, Artificial
  Probe
aaatgagcctgaggttctgtgcaaa

SEQ ID NO: 357442 - DNA, 25 bp, Artificial
  Probe
ggaccagcagagcagagcagaacca

SEQ ID NO: 357443 - DNA, 25 bp, Artificial
  Probe
tttaaatgagcctgaggttctgtgc

SEQ ID NO: 357444 - DNA, 25 bp, Artificial
  Probe
gcctcatggggcagacaggaagaaa

SEQ ID NO: 357445 - DNA, 25 bp, Artificial
  Probe
accacgtcatgcttgggagcctctg

SEQ ID NO: 357446 - DNA, 25 bp, Artificial
  Probe
ccgataagctagtcaggactccaga

SEQ ID NO: 357447 - DNA, 25 bp, Artificial
  Probe
aagctagtcaggactccagatggat

SEQ ID NO: 357448 - DNA, 25 bp, Artificial
  Probe
ttccgataagctagtcaggactcca

SEQ ID NO: 357449 - DNA, 25 bp, Artificial
  Probe
gctagtcaggactccagatggatgg

SEQ ID NO: 357450 - DNA, 25 bp, Artificial
  Probe
accagcagagcagagcagaaccacg

SEQ ID NO: 357451 - DNA, 25 bp, Artificial
  Probe
gataagctagtcaggactccagatg

SEQ ID NO: 357452 - DNA, 25 bp, Artificial
  Probe
aaattccgataagctagtcaggact

SEQ ID NO: 357453 - DNA, 25 bp, Artificial
  Probe
taagctagtcaggactccagatgga

SEQ ID NO: 357454 - DNA, 25 bp, Artificial
  Probe
gaaattccgataagctagtcaggac

SEQ ID NO: 357455 - DNA, 25 bp, Artificial
  Probe
agtccttttggaacgcattgctctt

SEQ ID NO: 357456 - DNA, 25 bp, Artificial
  Probe
tagtcaggactccagatggatggtg

SEQ ID NO: 357457 - DNA, 25 bp, Artificial
  Probe
agagcagagcagaaccacgtcatgc

SEQ ID NO: 357458 - DNA, 25 bp, Artificial
  Probe
agagcagaaccacgtcatgcttggg

SEQ ID NO: 357459 - DNA, 25 bp, Artificial
  Probe
tgtgcaaaggcctcatggggcagac

SEQ ID NO: 357460 - DNA, 25 bp, Artificial
  Probe
agcagagcagaaccacgtcatgctt

SEQ ID NO: 357461 - DNA, 25 bp, Artificial
  Probe
cttgggagcctctgttcttgaaagg

SEQ ID NO: 357462 - DNA, 25 bp, Artificial
  Probe
gaaccacgtcatgcttgggagcctc

SEQ ID NO: 357463 - DNA, 25 bp, Artificial
  Probe
gagaaattccgataagctagtcagg

SEQ ID NO: 357464 - DNA, 25 bp, Artificial
  Probe
gggagcctctgttcttgaaaggctt

SEQ ID NO: 357465 - DNA, 25 bp, Artificial
  Probe
gcctgaggttctgtgcaaaggcctc

SEQ ID NO: 357466 - DNA, 25 bp, Artificial
  Probe
gaagtccttttggaacgcattgctc

SEQ ID NO: 357467 - DNA, 25 bp, Artificial
  Probe
agcctgaggttctgtgcaaaggcct

SEQ ID NO: 357468 - DNA, 25 bp, Artificial
  Probe
atgagcctgaggttctgtgcaaagg

SEQ ID NO: 357469 - DNA, 25 bp, Artificial
  Probe
ttaaatgagcctgaggttctgtgca

SEQ ID NO: 357470 - DNA, 25 bp, Artificial
  Probe
aatgagcctgaggttctgtgcaaag

SEQ ID NO: 357471 - DNA, 25 bp, Artificial
  Probe
gtcatgcttgggagcctctgttctt

SEQ ID NO: 357472 - DNA, 25 bp, Artificial
  Probe
cttttggaacgcattgctctttgtt

SEQ ID NO: 357473 - DNA, 25 bp, Artificial
  Probe
cagaaccacgtcatgcttgggagcc

SEQ ID NO: 357474 - DNA, 25 bp, Artificial
  Probe
gcagaaccacgtcatgcttgggagc

SEQ ID NO: 357475 - DNA, 25 bp, Artificial
  Probe
tgcttgggagcctctgttcttgaaa

SEQ ID NO: 357476 - DNA, 25 bp, Artificial
  Probe
cagagcagagcagaaccacgtcatg

SEQ ID NO: 357477 - DNA, 25 bp, Artificial
  Probe
tgggagcctctgttcttgaaaggct

SEQ ID NO: 357478 - DNA, 25 bp, Artificial
  Probe
gaggttctgtgcaaaggcctcatgg

SEQ ID NO: 357479 - DNA, 25 bp, Artificial
  Probe
ccacgtcatgcttgggagcctctgt

SEQ ID NO: 357480 - DNA, 25 bp, Artificial
  Probe
gagcagagcagaaccacgtcatgct

SEQ ID NO: 357481 - DNA, 25 bp, Artificial
  Probe
aggttctgtgcaaaggcctcatggg

SEQ ID NO: 357482 - DNA, 25 bp, Artificial
  Probe
ccctatctttactgaaatataccat

SEQ ID NO: 357483 - DNA, 25 bp, Artificial
  Probe
atctttactgaaatataccattttt

SEQ ID NO: 357484 - DNA, 25 bp, Artificial
  Probe
ttttatctgtaagttgtttctaaca

SEQ ID NO: 357485 - DNA, 25 bp, Artificial
  Probe
aaagcaaatgcctccaaaggccaac

SEQ ID NO: 357486 - DNA, 25 bp, Artificial
  Probe
tgcctccaaaggccaacttttttat

SEQ ID NO: 357487 - DNA, 25 bp, Artificial
  Probe
tttatctgtaagttgtttctaacaa

SEQ ID NO: 357488 - DNA, 25 bp, Artificial
  Probe
ctatctttactgaaatataccattt

SEQ ID NO: 357489 - DNA, 25 bp, Artificial
  Probe
gcaaatgcctccaaaggccaacttt

SEQ ID NO: 357490 - DNA, 25 bp, Artificial
  Probe
tactgaaatataccatttttcttaa

SEQ ID NO: 357491 - DNA, 25 bp, Artificial
  Probe
ctttactgaaatataccatttttct

SEQ ID NO: 357492 - DNA, 25 bp, Artificial
  Probe
agcaaatgcctccaaaggccaactt

SEQ ID NO: 357493 - DNA, 25 bp, Artificial
  Probe
tatctttactgaaatataccatttt

SEQ ID NO: 357494 - DNA, 25 bp, Artificial
  Probe
ttactcccctatctttactgaaata

SEQ ID NO: 357495 - DNA, 25 bp, Artificial
  Probe
ttgaaagcaaatgcctccaaaggcc

SEQ ID NO: 357496 - DNA, 25 bp, Artificial
  Probe
ttatctgtaagttgtttctaacaac

SEQ ID NO: 357497 - DNA, 25 bp, Artificial
  Probe
ttactgaaatataccatttttctta

SEQ ID NO: 357498 - DNA, 25 bp, Artificial
  Probe
tcccctatctttactgaaatatacc

SEQ ID NO: 357499 - DNA, 25 bp, Artificial
  Probe
tgaaagcaaatgcctccaaaggcca

SEQ ID NO: 357500 - DNA, 25 bp, Artificial
  Probe
gaaagcaaatgcctccaaaggccaa

SEQ ID NO: 357501 - DNA, 25 bp, Artificial
  Probe
actcccctatctttactgaaatata

SEQ ID NO: 357502 - DNA, 25 bp, Artificial
  Probe
ctccaaaggccaacttttttatctg

SEQ ID NO: 357503 - DNA, 25 bp, Artificial
  Probe
ctgaaatataccatttttcttaaat

SEQ ID NO: 357504 - DNA, 25 bp, Artificial
  Probe
ctcccctatctttactgaaatatac

SEQ ID NO: 357505 - DNA, 25 bp, Artificial
  Probe
tagaattactcccctatctttactg

SEQ ID NO: 357506 - DNA, 25 bp, Artificial
  Probe
tttactgaaatataccatttttctt

SEQ ID NO: 357507 - DNA, 25 bp, Artificial
  Probe
caaatgcctccaaaggccaactttt

SEQ ID NO: 357508 - DNA, 25 bp, Artificial
  Probe
tgaaatataccatttttcttaaata

SEQ ID NO: 357509 - DNA, 25 bp, Artificial
  Probe
tccaaaggccaacttttttatctgt

SEQ ID NO: 357510 - DNA, 25 bp, Artificial
  Probe
ttagaattactcccctatctttact

SEQ ID NO: 357511 - DNA, 25 bp, Artificial
  Probe
tttgaaagcaaatgcctccaaaggc

SEQ ID NO: 357512 - DNA, 25 bp, Artificial
  Probe
agaattactcccctatctttactga

SEQ ID NO: 357513 - DNA, 25 bp, Artificial
  Probe
cctatctttactgaaatataccatt

SEQ ID NO: 357514 - DNA, 25 bp, Artificial
  Probe
cccctatctttactgaaatatacca

SEQ ID NO: 357515 - DNA, 25 bp, Artificial
  Probe
tatctgtaagttgtttctaacaacc

SEQ ID NO: 357516 - DNA, 25 bp, Artificial
  Probe
tctttactgaaatataccatttttc

SEQ ID NO: 357517 - DNA, 25 bp, Artificial
  Probe
tactcccctatctttactgaaatat

SEQ ID NO: 357518 - DNA, 25 bp, Artificial
  Probe
aagcaaatgcctccaaaggccaact

SEQ ID NO: 357519 - DNA, 25 bp, Artificial
  Probe
gccaacttttttatctgtaagttgt

SEQ ID NO: 357520 - DNA, 25 bp, Artificial
  Probe
ggccaacttttttatctgtaagttg

SEQ ID NO: 357521 - DNA, 25 bp, Artificial
  Probe
aagccacccgagctctcattctgtt

SEQ ID NO: 357522 - DNA, 25 bp, Artificial
  Probe
gaaccatagatataaccacattggg

SEQ ID NO: 357523 - DNA, 25 bp, Artificial
  Probe
ctgtatctgcatctgtctgtggaca

SEQ ID NO: 357524 - DNA, 25 bp, Artificial
  Probe
gctctctgtgtaacccagtataacc

SEQ ID NO: 357525 - DNA, 25 bp, Artificial
  Probe
aggattaccagtatgcacgccaggc

SEQ ID NO: 357526 - DNA, 25 bp, Artificial
  Probe
agcctgtatctgcatctgtctgtgg

SEQ ID NO: 357527 - DNA, 25 bp, Artificial
  Probe
attaccagtatgcacgccaggctga

SEQ ID NO: 357528 - DNA, 25 bp, Artificial
  Probe
agccacccgagctctcattctgttt

SEQ ID NO: 357529 - DNA, 25 bp, Artificial
  Probe
cctgtatctgcatctgtctgtggac

SEQ ID NO: 357530 - DNA, 25 bp, Artificial
  Probe
atctgtctgtggacatgtacacaca

SEQ ID NO: 357531 - DNA, 25 bp, Artificial
  Probe
gtatctgcatctgtctgtggacatg

SEQ ID NO: 357532 - DNA, 25 bp, Artificial
  Probe
ccagcctgtatctgcatctgtctgt

SEQ ID NO: 357533 - DNA, 25 bp, Artificial
  Probe
cagcctgtatctgcatctgtctgtg

SEQ ID NO: 357534 - DNA, 25 bp, Artificial
  Probe
tatctgcatctgtctgtggacatgt

SEQ ID NO: 357535 - DNA, 25 bp, Artificial
  Probe
atctgcatctgtctgtggacatgta

SEQ ID NO: 357536 - DNA, 25 bp, Artificial
  Probe
aaccatagatataaccacattggga

SEQ ID NO: 357537 - DNA, 25 bp, Artificial
  Probe
gcatctgtctgtggacatgtacaca

SEQ ID NO: 357538 - DNA, 25 bp, Artificial
  Probe
ttgtgaaattgcacacataacttga

SEQ ID NO: 357539 - DNA, 25 bp, Artificial
  Probe
tcaaaccaggattaccagtatgcac

SEQ ID NO: 357540 - DNA, 25 bp, Artificial
  Probe
gccacccgagctctcattctgtttt

SEQ ID NO: 357541 - DNA, 25 bp, Artificial
  Probe
catctgtctgtggacatgtacacac

SEQ ID NO: 357542 - DNA, 25 bp, Artificial
  Probe
aaagccacccgagctctcattctgt

SEQ ID NO: 357543 - DNA, 25 bp, Artificial
  Probe
accaggattaccagtatgcacgcca

SEQ ID NO: 357544 - DNA, 25 bp, Artificial
  Probe
acctcaaaccaggattaccagtatg

SEQ ID NO: 357545 - DNA, 25 bp, Artificial
  Probe
ccaggattaccagtatgcacgccag

SEQ ID NO: 357546 - DNA, 25 bp, Artificial
  Probe
agagctctctgtgtaacccagtata

SEQ ID NO: 357547 - DNA, 25 bp, Artificial
  Probe
gagctctcattctgtttttcaacag

SEQ ID NO: 357548 - DNA, 25 bp, Artificial
  Probe
gcctgtatctgcatctgtctgtgga

SEQ ID NO: 357549 - DNA, 25 bp, Artificial
  Probe
gaaattgcacacataacttgattag

SEQ ID NO: 357550 - DNA, 25 bp, Artificial
  Probe
gagctctctgtgtaacccagtataa

SEQ ID NO: 357551 - DNA, 25 bp, Artificial
  Probe
ttaccagtatgcacgccaggctgag

SEQ ID NO: 357552 - DNA, 25 bp, Artificial
  Probe
caaaccaggattaccagtatgcacg

SEQ ID NO: 357553 - DNA, 25 bp, Artificial
  Probe
tctgcatctgtctgtggacatgtac

SEQ ID NO: 357554 - DNA, 25 bp, Artificial
  Probe
tagagctctctgtgtaacccagtat

SEQ ID NO: 357555 - DNA, 25 bp, Artificial
  Probe
cgattacagatgaaccatagatata

SEQ ID NO: 357556 - DNA, 25 bp, Artificial
  Probe
caggattaccagtatgcacgccagg

SEQ ID NO: 357557 - DNA, 25 bp, Artificial
  Probe
ggattaccagtatgcacgccaggct

SEQ ID NO: 357558 - DNA, 25 bp, Artificial
  Probe
agtatgcacgccaggctgagagttc

SEQ ID NO: 357559 - DNA, 25 bp, Artificial
  Probe
accatagatataaccacattgggat

SEQ ID NO: 357560 - DNA, 25 bp, Artificial
  Probe
ctcaaaccaggattaccagtatgca

SEQ ID NO: 357561 - DNA, 25 bp, Artificial
  Probe
gcacacataacttgattagattaag

SEQ ID NO: 357562 - DNA, 25 bp, Artificial
  Probe
catagatataaccacattgggatat

SEQ ID NO: 357563 - DNA, 25 bp, Artificial
  Probe
tgtggacatgtacacacacgtaata

SEQ ID NO: 357564 - DNA, 25 bp, Artificial
  Probe
agctctctgtgtaacccagtataac

SEQ ID NO: 357565 - DNA, 25 bp, Artificial
  Probe
aaaccaggattaccagtatgcacgc

SEQ ID NO: 357566 - DNA, 25 bp, Artificial
  Probe
aaccaggattaccagtatgcacgcc

SEQ ID NO: 357567 - DNA, 25 bp, Artificial
  Probe
cgtcagcatggatgatatgatgctg

SEQ ID NO: 357568 - DNA, 25 bp, Artificial
  Probe
gcctgcagtgcgtgaaatacatcga

SEQ ID NO: 357569 - DNA, 25 bp, Artificial
  Probe
cttttttaagtgctggagtctgaac

SEQ ID NO: 357570 - DNA, 25 bp, Artificial
  Probe
aacacccgaggcagggcagcatctt

SEQ ID NO: 357571 - DNA, 25 bp, Artificial
  Probe
tcaaggatccacaggtggtgtgcga

SEQ ID NO: 357572 - DNA, 25 bp, Artificial
  Probe
ttagatcagcagctggtgctggtgc

SEQ ID NO: 357573 - DNA, 25 bp, Artificial
  Probe
gcccggaagggcttcagagcacaca

SEQ ID NO: 357574 - DNA, 25 bp, Artificial
  Probe
atgatgctggagatgctctgtgcaa

SEQ ID NO: 357575 - DNA, 25 bp, Artificial
  Probe
tatctgaaggggaccgtgcttttta

SEQ ID NO: 357576 - DNA, 25 bp, Artificial
  Probe
gaactctttttcaggcccatcattg

SEQ ID NO: 357577 - DNA, 25 bp, Artificial
  Probe
gttgcctccgacacgcccgtgagag

SEQ ID NO: 357578 - DNA, 25 bp, Artificial
  Probe
caagagcagccgagggccccctggt

SEQ ID NO: 357579 - DNA, 25 bp, Artificial
  Probe
gttgggcgcccctactcatgcttga

SEQ ID NO: 357580 - DNA, 25 bp, Artificial
  Probe
tacccgaggcacatcgcggaggcga

SEQ ID NO: 357581 - DNA, 25 bp, Artificial
  Probe
cgagtggtggcagctgtcctactgt

SEQ ID NO: 357582 - DNA, 25 bp, Artificial
  Probe
caggccatggcgttcctgtaccgta

SEQ ID NO: 357583 - DNA, 25 bp, Artificial
  Probe
accgctgctgcttctgcggaaaaaa

SEQ ID NO: 357584 - DNA, 25 bp, Artificial
  Probe
ttcagagcacacaggccatggcgtt

SEQ ID NO: 357585 - DNA, 25 bp, Artificial
  Probe
gcaggagaccgaaggcccagagccc

SEQ ID NO: 357586 - DNA, 25 bp, Artificial
  Probe
ctggttgccttgtgaagaaaagcat

SEQ ID NO: 357587 - DNA, 25 bp, Artificial
  Probe
agtacccgaggcacatcgcggaggc

SEQ ID NO: 357588 - DNA, 25 bp, Artificial
  Probe
agagcagccacagacggtgtctgcg

SEQ ID NO: 357589 - DNA, 25 bp, Artificial
  Probe
cacttcgagatgatggagatttccg

SEQ ID NO: 357590 - DNA, 25 bp, Artificial
  Probe
caggccacagagcagccacagacgg

SEQ ID NO: 357591 - DNA, 25 bp, Artificial
  Probe
ggtccaggccatcaagagtttcttt

SEQ ID NO: 357592 - DNA, 25 bp, Artificial
  Probe
tgaaatacatcgagagtcttcagtg

SEQ ID NO: 357593 - DNA, 25 bp, Artificial
  Probe
ttttaacccagacctgcctggcctg

SEQ ID NO: 357594 - DNA, 25 bp, Artificial
  Probe
gctgggcacgtgctctcagtcgctg

SEQ ID NO: 357595 - DNA, 25 bp, Artificial
  Probe
agagtaccagatcagatcggctgaa

SEQ ID NO: 357596 - DNA, 25 bp, Artificial
  Probe
cactaatgcccaacaaacgcacgtg

SEQ ID NO: 357597 - DNA, 25 bp, Artificial
  Probe
cattttactacacatggagaaaggg

SEQ ID NO: 357598 - DNA, 25 bp, Artificial
  Probe
gaccgtgctttttaacccagacctg

SEQ ID NO: 357599 - DNA, 25 bp, Artificial
  Probe
ccctggtgggacacctcctctggtg

SEQ ID NO: 357600 - DNA, 25 bp, Artificial
  Probe
tgaatagtgcccttttcctgctgag

SEQ ID NO: 357601 - DNA, 25 bp, Artificial
  Probe
atcggctgaactgaatagtgccctt

SEQ ID NO: 357602 - DNA, 25 bp, Artificial
  Probe
tcaggctgatgcaaagagagtacca

SEQ ID NO: 357603 - DNA, 25 bp, Artificial
  Probe
gtgttatactatgctaacaagctaa

SEQ ID NO: 357604 - DNA, 25 bp, Artificial
  Probe
cgtcggctggcctattgaagaccct

SEQ ID NO: 357605 - DNA, 25 bp, Artificial
  Probe
aatgctcaccaccaggcggcaggag

SEQ ID NO: 357606 - DNA, 25 bp, Artificial
  Probe
cgtgtctcgggaagtacccgaggca

SEQ ID NO: 357607 - DNA, 25 bp, Artificial
  Probe
cctctgctccatactggttgccttg

SEQ ID NO: 357608 - DNA, 25 bp, Artificial
  Probe
atttccgagcccaacctgatgcacg

SEQ ID NO: 357609 - DNA, 25 bp, Artificial
  Probe
gcagcatcttatacagcttgctcac

SEQ ID NO: 357610 - DNA, 25 bp, Artificial
  Probe
acctgcctggcctgcagtgcgtgaa

SEQ ID NO: 357611 - DNA, 25 bp, Artificial
  Probe
ctgtcctactgtacccacaatgtgg

SEQ ID NO: 357612 - DNA, 25 bp, Artificial
  Probe
gaccgaaggcccagagcccgcagat

SEQ ID NO: 357613 - DNA, 25 bp, Artificial
  Probe
atgaggtgcctgatgatgagaccgt

SEQ ID NO: 357614 - DNA, 25 bp, Artificial
  Probe
tcacgtaagcgtaagcgagacagcg

SEQ ID NO: 357615 - DNA, 25 bp, Artificial
  Probe
cttccatcctggatcatcaaggatg

SEQ ID NO: 357616 - DNA, 25 bp, Artificial
  Probe
tagactacagcgactcactgacaga

SEQ ID NO: 357617 - DNA, 25 bp, Artificial
  Probe
caaccagatgattgcccggcacgaa

SEQ ID NO: 357618 - DNA, 25 bp, Artificial
  Probe
caagcggaagccacgcctgatggaa

SEQ ID NO: 357619 - DNA, 25 bp, Artificial
  Probe
cagaagaaatcttcacgtaagcgta

SEQ ID NO: 357620 - DNA, 25 bp, Artificial
  Probe
accgccggcgtgaagaagcccgcaa

SEQ ID NO: 357621 - DNA, 25 bp, Artificial
  Probe
caccgcaaggaggtagactacagcg

SEQ ID NO: 357622 - DNA, 25 bp, Artificial
  Probe
ttgacctcttcatgcgcatggactt

SEQ ID NO: 357623 - DNA, 25 bp, Artificial
  Probe
tgcctgatgatgagaccgtcaacca

SEQ ID NO: 357624 - DNA, 25 bp, Artificial
  Probe
tgattgcccggcacgaagaagaatt

SEQ ID NO: 357625 - DNA, 25 bp, Artificial
  Probe
gaaatcttcacgtaagcgtaagcga

SEQ ID NO: 357626 - DNA, 25 bp, Artificial
  Probe
tctcgccaccgcaaggaggtagact

SEQ ID NO: 357627 - DNA, 25 bp, Artificial
  Probe
ctcttcatgcgcatggacttggacc

SEQ ID NO: 357628 - DNA, 25 bp, Artificial
  Probe
taagcgtaagcgagacagcgaggcc

SEQ ID NO: 357629 - DNA, 25 bp, Artificial
  Probe
agatgaggtgcctgatgatgagacc

SEQ ID NO: 357630 - DNA, 25 bp, Artificial
  Probe
acagcgactcactgacagagaagca

SEQ ID NO: 357631 - DNA, 25 bp, Artificial
  Probe
agaagcagtggctcaaggctatcga

SEQ ID NO: 357632 - DNA, 25 bp, Artificial
  Probe
gtggttctcgccaccgcaaggaggt

SEQ ID NO: 357633 - DNA, 25 bp, Artificial
  Probe
agccacgcctgatggaagaggatga

SEQ ID NO: 357634 - DNA, 25 bp, Artificial
  Probe
gaagaaatcttcacgtaagcgtaag

SEQ ID NO: 357635 - DNA, 25 bp, Artificial
  Probe
acgcctgatggaagaggatgagctt

SEQ ID NO: 357636 - DNA, 25 bp, Artificial
  Probe
aatcttcacgtaagcgtaagcgaga

SEQ ID NO: 357637 - DNA, 25 bp, Artificial
  Probe
aggtgcctgatgatgagaccgtcaa

SEQ ID NO: 357638 - DNA, 25 bp, Artificial
  Probe
cactgacagagaagcagtggctcaa

SEQ ID NO: 357639 - DNA, 25 bp, Artificial
  Probe
ttcacgtaagcgtaagcgagacagc

SEQ ID NO: 357640 - DNA, 25 bp, Artificial
  Probe
gaccgccggcgtgaagaagcccgca

SEQ ID NO: 357641 - DNA, 25 bp, Artificial
  Probe
agcgagacagcgaggccggctcctc

SEQ ID NO: 357642 - DNA, 25 bp, Artificial
  Probe
agaatttgacctcttcatgcgcatg

SEQ ID NO: 357643 - DNA, 25 bp, Artificial
  Probe
agcagtggctcaaggctatcgagga

SEQ ID NO: 357644 - DNA, 25 bp, Artificial
  Probe
gaagaatttgacctcttcatgcgca

SEQ ID NO: 357645 - DNA, 25 bp, Artificial
  Probe
tgcccggcacgaagaagaatttgac

SEQ ID NO: 357646 - DNA, 25 bp, Artificial
  Probe
gaagccacgcctgatggaagaggat

SEQ ID NO: 357647 - DNA, 25 bp, Artificial
  Probe
agaggatgagcttccatcctggatc

SEQ ID NO: 357648 - DNA, 25 bp, Artificial
  Probe
ctacagcgactcactgacagagaag

SEQ ID NO: 357649 - DNA, 25 bp, Artificial
  Probe
tgttcggccgtggttctcgccaccg

SEQ ID NO: 357650 - DNA, 25 bp, Artificial
  Probe
agaagaatttgacctcttcatgcgc

SEQ ID NO: 357651 - DNA, 25 bp, Artificial
  Probe
aggaggtccggcagaagaaatcttc

SEQ ID NO: 357652 - DNA, 25 bp, Artificial
  Probe
atgatgagaccgtcaaccagatgat

SEQ ID NO: 357653 - DNA, 25 bp, Artificial
  Probe
atgcgcatggacttggaccgccggc

SEQ ID NO: 357654 - DNA, 25 bp, Artificial
  Probe
atcctggatcatcaaggatgatgca

SEQ ID NO: 357655 - DNA, 25 bp, Artificial
  Probe
catcctggatcatcaaggatgatgc

SEQ ID NO: 357656 - DNA, 25 bp, Artificial
  Probe
aggtccggcagaagaaatcttcacg

SEQ ID NO: 357657 - DNA, 25 bp, Artificial
  Probe
gatgttcggccgtggttctcgccac

SEQ ID NO: 357658 - DNA, 25 bp, Artificial
  Probe
tgaggtgcctgatgatgagaccgtc

SEQ ID NO: 357659 - DNA, 25 bp, Artificial
  Probe
tgaacaaagcccaggaagacagcaa

SEQ ID NO: 357660 - DNA, 25 bp, Artificial
  Probe
ctctaaccccgagctcataggaacg

SEQ ID NO: 357661 - DNA, 25 bp, Artificial
  Probe
ttctgcaaatggtcccatgagccca

SEQ ID NO: 357662 - DNA, 25 bp, Artificial
  Probe
tctatgacatcatggccagcatcta

SEQ ID NO: 357663 - DNA, 25 bp, Artificial
  Probe
gctgtacagtggtccgtggaatctg

SEQ ID NO: 357664 - DNA, 25 bp, Artificial
  Probe
gacatcatggccagcatctatccca

SEQ ID NO: 357665 - DNA, 25 bp, Artificial
  Probe
aatatggctgtacagtggtccgtgg

SEQ ID NO: 357666 - DNA, 25 bp, Artificial
  Probe
tcctctgaacaaagcccaggaagac

SEQ ID NO: 357667 - DNA, 25 bp, Artificial
  Probe
aatggtcccatgagcccagctctaa

SEQ ID NO: 357668 - DNA, 25 bp, Artificial
  Probe
gatggtgggcagctttgagcaatac

SEQ ID NO: 357669 - DNA, 25 bp, Artificial
  Probe
tgaggagccagaacattctgcaaat

SEQ ID NO: 357670 - DNA, 25 bp, Artificial
  Probe
ggtaaagtctctacgcaaagcacgg

SEQ ID NO: 357671 - DNA, 25 bp, Artificial
  Probe
gcaaatggtcccatgagcccagctc

SEQ ID NO: 357672 - DNA, 25 bp, Artificial
  Probe
gattcgagtgggacaacgcaaaatg

SEQ ID NO: 357673 - DNA, 25 bp, Artificial
  Probe
cgagctcataggaacggattcgagt

SEQ ID NO: 357674 - DNA, 25 bp, Artificial
  Probe
attcgagtgggacaacgcaaaatgt

SEQ ID NO: 357675 - DNA, 25 bp, Artificial
  Probe
ggcagctttgagcaataccagttcc

SEQ ID NO: 357676 - DNA, 25 bp, Artificial
  Probe
tggacggagccaagcaggacgcaaa

SEQ ID NO: 357677 - DNA, 25 bp, Artificial
  Probe
aagtctctacgcaaagcacggccgg

SEQ ID NO: 357678 - DNA, 25 bp, Artificial
  Probe
tcataggaacggattcgagtgggac

SEQ ID NO: 357679 - DNA, 25 bp, Artificial
  Probe
ctgtgttcagccagctgatcctctg

SEQ ID NO: 357680 - DNA, 25 bp, Artificial
  Probe
agtggtaaagtctctacgcaaagca

SEQ ID NO: 357681 - DNA, 25 bp, Artificial
  Probe
tttttcaagtggtaaagtctctacg

SEQ ID NO: 357682 - DNA, 25 bp, Artificial
  Probe
ttctgaggagccagaacattctgca

SEQ ID NO: 357683 - DNA, 25 bp, Artificial
  Probe
tggtgggcagctttgagcaatacca

SEQ ID NO: 357684 - DNA, 25 bp, Artificial
  Probe
aacggattcgagtgggacaacgcaa

SEQ ID NO: 357685 - DNA, 25 bp, Artificial
  Probe
caagtggttctgaggagccagaaca

SEQ ID NO: 357686 - DNA, 25 bp, Artificial
  Probe
tttgagcaataccagttcctctatg

SEQ ID NO: 357687 - DNA, 25 bp, Artificial
  Probe
gaacggattcgagtgggacaacgca

SEQ ID NO: 357688 - DNA, 25 bp, Artificial
  Probe
taggaacggattcgagtgggacaac

SEQ ID NO: 357689 - DNA, 25 bp, Artificial
  Probe
agcttcagagcctgcaagtggttct

SEQ ID NO: 357690 - DNA, 25 bp, Artificial
  Probe
aatttcataacgaagtggacggagc

SEQ ID NO: 357691 - DNA, 25 bp, Artificial
  Probe
aagcccaggaagacagcaaagaagt

SEQ ID NO: 357692 - DNA, 25 bp, Artificial
  Probe
gagcaataccagttcctctatgaca

SEQ ID NO: 357693 - DNA, 25 bp, Artificial
  Probe
agcccaggaagacagcaaagaagtt

SEQ ID NO: 357694 - DNA, 25 bp, Artificial
  Probe
caagcaggacgcaaactgtgttcag

SEQ ID NO: 357695 - DNA, 25 bp, Artificial
  Probe
tacagtggtccgtggaatctgtgtt

SEQ ID NO: 357696 - DNA, 25 bp, Artificial
  Probe
taccagttcctctatgacatcatgg

SEQ ID NO: 357697 - DNA, 25 bp, Artificial
  Probe
cagctttgagcaataccagttcctc

SEQ ID NO: 357698 - DNA, 25 bp, Artificial
  Probe
ccacccagaatggacaagtgaagaa

SEQ ID NO: 357699 - DNA, 25 bp, Artificial
  Probe
gagccaagcaggacgcaaactgtgt

SEQ ID NO: 357700 - DNA, 25 bp, Artificial
  Probe
agtctctacgcaaagcacggccggg

SEQ ID NO: 357701 - DNA, 25 bp, Artificial
  Probe
aagttggagcttcagagcctgcaag

SEQ ID NO: 357702 - DNA, 25 bp, Artificial
  Probe
cataacgaagtggacggagccaagc

SEQ ID NO: 357703 - DNA, 25 bp, Artificial
  Probe
caaactgtgttcagccagctgatcc

SEQ ID NO: 357704 - DNA, 25 bp, Artificial
  Probe
ttggagcttcagagcctgcaagtgg

SEQ ID NO: 357705 - DNA, 25 bp, Artificial
  Probe
tgtcccttaaggaacataacaactg

SEQ ID NO: 357706 - DNA, 25 bp, Artificial
  Probe
tcttataggcgcagtgtggagcagc

SEQ ID NO: 357707 - DNA, 25 bp, Artificial
  Probe
gagaatgttaccaagctgagaggtc

SEQ ID NO: 357708 - DNA, 25 bp, Artificial
  Probe
ggctccagtacctggcaagcagcaa

SEQ ID NO: 357709 - DNA, 25 bp, Artificial
  Probe
aatgtttgtcccagggtcttggcca

SEQ ID NO: 357710 - DNA, 25 bp, Artificial
  Probe
cctatttcaggcttagaggagaatg

SEQ ID NO: 357711 - DNA, 25 bp, Artificial
  Probe
cctccgaaggaggacaaggaagctt

SEQ ID NO: 357712 - DNA, 25 bp, Artificial
  Probe
aatgtaaaacacagagaccgtttga

SEQ ID NO: 357713 - DNA, 25 bp, Artificial
  Probe
aaggaacataacaactgttgtggct

SEQ ID NO: 357714 - DNA, 25 bp, Artificial
  Probe
cataacaactgttgtggctgatttt

SEQ ID NO: 357715 - DNA, 25 bp, Artificial
  Probe
gatttttgccaaaccgaatgtccct

SEQ ID NO: 357716 - DNA, 25 bp, Artificial
  Probe
aactgttgtggctgatttttgccaa

SEQ ID NO: 357717 - DNA, 25 bp, Artificial
  Probe
gacctcagccctgacagacaaaatg

SEQ ID NO: 357718 - DNA, 25 bp, Artificial
  Probe
aggtattacaggtttccaggtacag

SEQ ID NO: 357719 - DNA, 25 bp, Artificial
  Probe
taatgacttcagaaatgcctgcggc

SEQ ID NO: 357720 - DNA, 25 bp, Artificial
  Probe
ctaacagatggctagtgagttgcaa

SEQ ID NO: 357721 - DNA, 25 bp, Artificial
  Probe
cctggcaagcagcaaggactgagtg

SEQ ID NO: 357722 - DNA, 25 bp, Artificial
  Probe
attggcagctagcaagagagaaggc

SEQ ID NO: 357723 - DNA, 25 bp, Artificial
  Probe
ggatcagctgccaccacatcatcat

SEQ ID NO: 357724 - DNA, 25 bp, Artificial
  Probe
ttggcagctagcaagagagaaggca

SEQ ID NO: 357725 - DNA, 25 bp, Artificial
  Probe
ctccccaagtctgtgggaagaggaa

SEQ ID NO: 357726 - DNA, 25 bp, Artificial
  Probe
tcacaagaggctaggacatgattgg

SEQ ID NO: 357727 - DNA, 25 bp, Artificial
  Probe
caataggacctcagccctgacagac

SEQ ID NO: 357728 - DNA, 25 bp, Artificial
  Probe
cacctccgaaggaggacaaggaagc

SEQ ID NO: 357729 - DNA, 25 bp, Artificial
  Probe
tacaggtttccaggtacagggagga

SEQ ID NO: 357730 - DNA, 25 bp, Artificial
  Probe
ttcaggcttagaggagaatgttacc

SEQ ID NO: 357731 - DNA, 25 bp, Artificial
  Probe
gtcccttaaggaacataacaactgt

SEQ ID NO: 357732 - DNA, 25 bp, Artificial
  Probe
tccccaagtctgtgggaagaggaag

SEQ ID NO: 357733 - DNA, 25 bp, Artificial
  Probe
gaagcttaatgtttgtcccagggtc

SEQ ID NO: 357734 - DNA, 25 bp, Artificial
  Probe
gactgagtgcatgctccgatggatg

SEQ ID NO: 357735 - DNA, 25 bp, Artificial
  Probe
ctcctgaggtattacaggtttccag

SEQ ID NO: 357736 - DNA, 25 bp, Artificial
  Probe
atcatgttccactgacactcctgag

SEQ ID NO: 357737 - DNA, 25 bp, Artificial
  Probe
aaatgtcacaagaggctaggacatg

SEQ ID NO: 357738 - DNA, 25 bp, Artificial
  Probe
ccaagctgagaggtcaatggctcta

SEQ ID NO: 357739 - DNA, 25 bp, Artificial
  Probe
gaggtcaatggctctacccatcatg

SEQ ID NO: 357740 - DNA, 25 bp, Artificial
  Probe
ggctctacccatcatgttccactga

SEQ ID NO: 357741 - DNA, 25 bp, Artificial
  Probe
ccagtacctggcaagcagcaaggac

SEQ ID NO: 357742 - DNA, 25 bp, Artificial
  Probe
tgtaaaacacagagaccgtttgaac

SEQ ID NO: 357743 - DNA, 25 bp, Artificial
  Probe
ttcagaaatgcctgcggctgacacg

SEQ ID NO: 357744 - DNA, 25 bp, Artificial
  Probe
gccaaaccgaatgtccctatttcag

SEQ ID NO: 357745 - DNA, 25 bp, Artificial
  Probe
gcacccagtaagcaatagaaaagca

SEQ ID NO: 357746 - DNA, 25 bp, Artificial
  Probe
atcatggtggatacacacagctgtc

SEQ ID NO: 357747 - DNA, 25 bp, Artificial
  Probe
cccatttcttataggcgcagtgtgg

SEQ ID NO: 357748 - DNA, 25 bp, Artificial
  Probe
caagcagcaaggactgagtgcatgc

SEQ ID NO: 357749 - DNA, 25 bp, Artificial
  Probe
ataccgaacccatttcttataggcg

SEQ ID NO: 357750 - DNA, 25 bp, Artificial
  Probe
atggtggatggcacgcaataggacc

SEQ ID NO: 357751 - DNA, 25 bp, Artificial
  Probe
tgagcccccagaagtcgtgggctat

SEQ ID NO: 357752 - DNA, 25 bp, Artificial
  Probe
gtttgccagctttgaggctcagggt

SEQ ID NO: 357753 - DNA, 25 bp, Artificial
  Probe
tgcattggctaatatagctgtggac

SEQ ID NO: 357754 - DNA, 25 bp, Artificial
  Probe
agcccccagaagtcgtgggctatca

SEQ ID NO: 357755 - DNA, 25 bp, Artificial
  Probe
atagctgtggacaaagctaacctgg

SEQ ID NO: 357756 - DNA, 25 bp, Artificial
  Probe
caaagctaacctggacatcatgata

SEQ ID NO: 357757 - DNA, 25 bp, Artificial
  Probe
ttgccagctttgaggctcagggtgc

SEQ ID NO: 357758 - DNA, 25 bp, Artificial
  Probe
cagctttgaggctcagggtgcattg

SEQ ID NO: 357759 - DNA, 25 bp, Artificial
  Probe
gcattggctaatatagctgtggaca

SEQ ID NO: 357760 - DNA, 25 bp, Artificial
  Probe
ggctcagggtgcattggctaatata

SEQ ID NO: 357761 - DNA, 25 bp, Artificial
  Probe
acaccatcatccaggcggagttcta

SEQ ID NO: 357762 - DNA, 25 bp, Artificial
  Probe
gacaaagctaacctggacatcatga

SEQ ID NO: 357763 - DNA, 25 bp, Artificial
  Probe
tgaggctcagggtgcattggctaat

SEQ ID NO: 357764 - DNA, 25 bp, Artificial
  Probe
cattggctaatatagctgtggacaa

SEQ ID NO: 357765 - DNA, 25 bp, Artificial
  Probe
ctcagggtgcattggctaatatagc

SEQ ID NO: 357766 - DNA, 25 bp, Artificial
  Probe
agtttgccagctttgaggctcaggg

SEQ ID NO: 357767 - DNA, 25 bp, Artificial
  Probe
tttgccagctttgaggctcagggtg

SEQ ID NO: 357768 - DNA, 25 bp, Artificial
  Probe
atgagcccccagaagtcgtgggcta

SEQ ID NO: 357769 - DNA, 25 bp, Artificial
  Probe
tcatccaggcggagttctatctttc

SEQ ID NO: 357770 - DNA, 25 bp, Artificial
  Probe
gaggagcacaccatcatccaggcgg

SEQ ID NO: 357771 - DNA, 25 bp, Artificial
  Probe
gctcagggtgcattggctaatatag

SEQ ID NO: 357772 - DNA, 25 bp, Artificial
  Probe
cccgaccaaaatggagagttcatgt

SEQ ID NO: 357773 - DNA, 25 bp, Artificial
  Probe
taatatagctgtggacaaagctaac

SEQ ID NO: 357774 - DNA, 25 bp, Artificial
  Probe
aaagctaacctggacatcatgataa

SEQ ID NO: 357775 - DNA, 25 bp, Artificial
  Probe
gagcccccagaagtcgtgggctatc

SEQ ID NO: 357776 - DNA, 25 bp, Artificial
  Probe
agaggagcacaccatcatccaggcg

SEQ ID NO: 357777 - DNA, 25 bp, Artificial
  Probe
ggacaaagctaacctggacatcatg

SEQ ID NO: 357778 - DNA, 25 bp, Artificial
  Probe
gcacaccatcatccaggcggagttc

SEQ ID NO: 357779 - DNA, 25 bp, Artificial
  Probe
agcacaccatcatccaggcggagtt

SEQ ID NO: 357780 - DNA, 25 bp, Artificial
  Probe
atccaggcggagttctatctttccc

SEQ ID NO: 357781 - DNA, 25 bp, Artificial
  Probe
tggacaaagctaacctggacatcat

SEQ ID NO: 357782 - DNA, 25 bp, Artificial
  Probe
aggctcagggtgcattggctaatat

SEQ ID NO: 357783 - DNA, 25 bp, Artificial
  Probe
ctaatatagctgtggacaaagctaa

SEQ ID NO: 357784 - DNA, 25 bp, Artificial
  Probe
catccaggcggagttctatctttcc

SEQ ID NO: 357785 - DNA, 25 bp, Artificial
  Probe
atatagctgtggacaaagctaacct

SEQ ID NO: 357786 - DNA, 25 bp, Artificial
  Probe
aggagcacaccatcatccaggcgga

SEQ ID NO: 357787 - DNA, 25 bp, Artificial
  Probe
ggagcacaccatcatccaggcggag

SEQ ID NO: 357788 - DNA, 25 bp, Artificial
  Probe
tccaggcggagttctatctttcccc

SEQ ID NO: 357789 - DNA, 25 bp, Artificial
  Probe
aagctaacctggacatcatgataaa

SEQ ID NO: 357790 - DNA, 25 bp, Artificial
  Probe
gaggctcagggtgcattggctaata

SEQ ID NO: 357791 - DNA, 25 bp, Artificial
  Probe
ctgtggacaaagctaacctggacat

SEQ ID NO: 357792 - DNA, 25 bp, Artificial
  Probe
aatatagctgtggacaaagctaacc

SEQ ID NO: 357793 - DNA, 25 bp, Artificial
  Probe
tatagctgtggacaaagctaacctg

SEQ ID NO: 357794 - DNA, 25 bp, Artificial
  Probe
gtggacaaagctaacctggacatca

SEQ ID NO: 357795 - DNA, 25 bp, Artificial
  Probe
gagcacaccatcatccaggcggagt

SEQ ID NO: 357796 - DNA, 25 bp, Artificial
  Probe
cacaccatcatccaggcggagttct

SEQ ID NO: 357797 - DNA, 25 bp, Artificial
  Probe
agacgtggtcctagggctaatcagc

SEQ ID NO: 357798 - DNA, 25 bp, Artificial
  Probe
agcgcaacctctgaaggttcctcgc

SEQ ID NO: 357799 - DNA, 25 bp, Artificial
  Probe
cctggccctcctgagaatgcagcag

SEQ ID NO: 357800 - DNA, 25 bp, Artificial
  Probe
ctccaggcggaagaacagaaggcac

SEQ ID NO: 357801 - DNA, 25 bp, Artificial
  Probe
aagtcgtcctctacgtcctgactca

SEQ ID NO: 357802 - DNA, 25 bp, Artificial
  Probe
agaacagaaggcacagccagggctc

SEQ ID NO: 357803 - DNA, 25 bp, Artificial
  Probe
gggctcccacagtgacgcagcgcaa

SEQ ID NO: 357804 - DNA, 25 bp, Artificial
  Probe
gcgctgcatgagactacagaggcac

SEQ ID NO: 357805 - DNA, 25 bp, Artificial
  Probe
gaaggcacagccagggctcccacag

SEQ ID NO: 357806 - DNA, 25 bp, Artificial
  Probe
tgccagcggtactggccaagcatcc

SEQ ID NO: 357807 - DNA, 25 bp, Artificial
  Probe
gacctggtgcgctgcatgagactac

SEQ ID NO: 357808 - DNA, 25 bp, Artificial
  Probe
cctgagaatgcagcagctgaagggc

SEQ ID NO: 357809 - DNA, 25 bp, Artificial
  Probe
tctctgacctggtgcgctgcatgag

SEQ ID NO: 357810 - DNA, 25 bp, Artificial
  Probe
tggtcctagggctaatcagccaaga

SEQ ID NO: 357811 - DNA, 25 bp, Artificial
  Probe
gatctcgaattcgacatctctgacc

SEQ ID NO: 357812 - DNA, 25 bp, Artificial
  Probe
tggtgcgctgcatgagactacagag

SEQ ID NO: 357813 - DNA, 25 bp, Artificial
  Probe
gtgcgctgcatgagactacagaggc

SEQ ID NO: 357814 - DNA, 25 bp, Artificial
  Probe
cgcagcgcaacctctgaaggttcct

SEQ ID NO: 357815 - DNA, 25 bp, Artificial
  Probe
gtgacgcagcgcaacctctgaaggt

SEQ ID NO: 357816 - DNA, 25 bp, Artificial
  Probe
gtcgggcccggtcatcacacactgt

SEQ ID NO: 357817 - DNA, 25 bp, Artificial
  Probe
ctagggctaatcagccaagatctcg

SEQ ID NO: 357818 - DNA, 25 bp, Artificial
  Probe
tctcgaattcgacatctctgacctg

SEQ ID NO: 357819 - DNA, 25 bp, Artificial
  Probe
agggctcccacagtgacgcagcgca

SEQ ID NO: 357820 - DNA, 25 bp, Artificial
  Probe
aggtgcgacatatttctcatctgaa

SEQ ID NO: 357821 - DNA, 25 bp, Artificial
  Probe
ggctaatcagccaagatctcgaatt

SEQ ID NO: 357822 - DNA, 25 bp, Artificial
  Probe
acctccaggcggaagaacagaaggc

SEQ ID NO: 357823 - DNA, 25 bp, Artificial
  Probe
gtgcgacatatttctcatctgaatt

SEQ ID NO: 357824 - DNA, 25 bp, Artificial
  Probe
ctgcatgagactacagaggcacggc

SEQ ID NO: 357825 - DNA, 25 bp, Artificial
  Probe
cctgactcacctccaggcggaagaa

SEQ ID NO: 357826 - DNA, 25 bp, Artificial
  Probe
gtcctgactcacctccaggcggaag

SEQ ID NO: 357827 - DNA, 25 bp, Artificial
  Probe
catgagactacagaggcacggcatg

SEQ ID NO: 357828 - DNA, 25 bp, Artificial
  Probe
aacagaaggcacagccagggctccc

SEQ ID NO: 357829 - DNA, 25 bp, Artificial
  Probe
aatgcagcagctgaagggcttcgtg

SEQ ID NO: 357830 - DNA, 25 bp, Artificial
  Probe
gtcttttgctatcaagtcgtcctct

SEQ ID NO: 357831 - DNA, 25 bp, Artificial
  Probe
agggtcagtatgtcttttgctatca

SEQ ID NO: 357832 - DNA, 25 bp, Artificial
  Probe
ggacgatcaggaaccctcatttgca

SEQ ID NO: 357833 - DNA, 25 bp, Artificial
  Probe
ccctcctgagaatgcagcagctgaa

SEQ ID NO: 357834 - DNA, 25 bp, Artificial
  Probe
gccaagatctcgaattcgacatctc

SEQ ID NO: 357835 - DNA, 25 bp, Artificial
  Probe
gactacagaggcacggcatggtgca

SEQ ID NO: 357836 - DNA, 25 bp, Artificial
  Probe
ctcctgagaatgcagcagctgaagg

SEQ ID NO: 357837 - DNA, 25 bp, Artificial
  Probe
ttttgctatcaagtcgtcctctacg

SEQ ID NO: 357838 - DNA, 25 bp, Artificial
  Probe
atgagactacagaggcacggcatgg

SEQ ID NO: 357839 - DNA, 25 bp, Artificial
  Probe
aagatctcgaattcgacatctctga

SEQ ID NO: 357840 - DNA, 25 bp, Artificial
  Probe
gcccggtcatcacacactgtagtgc

SEQ ID NO: 357841 - DNA, 25 bp, Artificial
  Probe
tgactcacctccaggcggaagaaca

SEQ ID NO: 357842 - DNA, 25 bp, Artificial
  Probe
gatcaggaaccctcatttgcataga

SEQ ID NO: 357843 - DNA, 25 bp, Artificial
  Probe
gcaaagcctgatgactctccatcca

SEQ ID NO: 357844 - DNA, 25 bp, Artificial
  Probe
gtctgccttctccttgagacctaat

SEQ ID NO: 357845 - DNA, 25 bp, Artificial
  Probe
accagggcgactctctactgagacc

SEQ ID NO: 357846 - DNA, 25 bp, Artificial
  Probe
gctgagtcagacctgatgtggcagt

SEQ ID NO: 357847 - DNA, 25 bp, Artificial
  Probe
cctctcctttgatggagacagatgc

SEQ ID NO: 357848 - DNA, 25 bp, Artificial
  Probe
actgagacccagcagccactgcagt

SEQ ID NO: 357849 - DNA, 25 bp, Artificial
  Probe
ccttgagacctaattctccctctgg

SEQ ID NO: 357850 - DNA, 25 bp, Artificial
  Probe
ctgggcaaagcctgatgactctcca

SEQ ID NO: 357851 - DNA, 25 bp, Artificial
  Probe
tttgctggcttcaacattatccctg

SEQ ID NO: 357852 - DNA, 25 bp, Artificial
  Probe
atagacgctgagtcagacctgatgt

SEQ ID NO: 357853 - DNA, 25 bp, Artificial
  Probe
tcagacctgatgtggcagtatgaag

SEQ ID NO: 357854 - DNA, 25 bp, Artificial
  Probe
ctctcctttgatggagacagatgct

SEQ ID NO: 357855 - DNA, 25 bp, Artificial
  Probe
aggcctgagcccagcattcccaagg

SEQ ID NO: 357856 - DNA, 25 bp, Artificial
  Probe
tacccattttatctccaggctgctg

SEQ ID NO: 357857 - DNA, 25 bp, Artificial
  Probe
tgctggcttcaacattatccctgcc

SEQ ID NO: 357858 - DNA, 25 bp, Artificial
  Probe
aagggagagccacctgtcctgggca

SEQ ID NO: 357859 - DNA, 25 bp, Artificial
  Probe
gtggctatgcatagatcctacgaat

SEQ ID NO: 357860 - DNA, 25 bp, Artificial
  Probe
gaatttgctggcttcaacattatcc

SEQ ID NO: 357861 - DNA, 25 bp, Artificial
  Probe
gcgactctctactgagacccagcag

SEQ ID NO: 357862 - DNA, 25 bp, Artificial
  Probe
gcagtaccatagacgctgagtcaga

SEQ ID NO: 357863 - DNA, 25 bp, Artificial
  Probe
cctgtcctgggcaaagcctgatgac

SEQ ID NO: 357864 - DNA, 25 bp, Artificial
  Probe
agatgctggcaccagactgggcaca

SEQ ID NO: 357865 - DNA, 25 bp, Artificial
  Probe
ctgtgggctagttaccagggcgact

SEQ ID NO: 357866 - DNA, 25 bp, Artificial
  Probe
ctacgaatttgctggcttcaacatt

SEQ ID NO: 357867 - DNA, 25 bp, Artificial
  Probe
agccacctgtcctgggcaaagcctg

SEQ ID NO: 357868 - DNA, 25 bp, Artificial
  Probe
gctggcaccagactgggcacacatc

SEQ ID NO: 357869 - DNA, 25 bp, Artificial
  Probe
tgtcctgggcaaagcctgatgactc

SEQ ID NO: 357870 - DNA, 25 bp, Artificial
  Probe
ggcctgagcccagcattcccaaggg

SEQ ID NO: 357871 - DNA, 25 bp, Artificial
  Probe
cctgagcccagcattcccaagggat

SEQ ID NO: 357872 - DNA, 25 bp, Artificial
  Probe
ccagcattcccaagggattccctag

SEQ ID NO: 357873 - DNA, 25 bp, Artificial
  Probe
cccaagaagctgtgggctagttacc

SEQ ID NO: 357874 - DNA, 25 bp, Artificial
  Probe
gggctagttaccagggcgactctct

SEQ ID NO: 357875 - DNA, 25 bp, Artificial
  Probe
agccactgcagtaccatagacgctg

SEQ ID NO: 357876 - DNA, 25 bp, Artificial
  Probe
cattggtctgccttctccttgagac

SEQ ID NO: 357877 - DNA, 25 bp, Artificial
  Probe
ccagcagccactgcagtaccataga

SEQ ID NO: 357878 - DNA, 25 bp, Artificial
  Probe
tgagcccagcattcccaagggattc

SEQ ID NO: 357879 - DNA, 25 bp, Artificial
  Probe
ccatagacgctgagtcagacctgat

SEQ ID NO: 357880 - DNA, 25 bp, Artificial
  Probe
ttgatggagacagatgctggcacca

SEQ ID NO: 357881 - DNA, 25 bp, Artificial
  Probe
cagggcgactctctactgagaccca

SEQ ID NO: 357882 - DNA, 25 bp, Artificial
  Probe
ttgagacctaattctccctctggcc

SEQ ID NO: 357883 - DNA, 25 bp, Artificial
  Probe
acagatgctggcaccagactgggca

SEQ ID NO: 357884 - DNA, 25 bp, Artificial
  Probe
taccatagacgctgagtcagacctg

SEQ ID NO: 357885 - DNA, 25 bp, Artificial
  Probe
ccacccaagaagctgtgggctagtt

SEQ ID NO: 357886 - DNA, 25 bp, Artificial
  Probe
gttaccagggcgactctctactgag

SEQ ID NO: 357887 - DNA, 25 bp, Artificial
  Probe
gagtcagacctgatgtggcagtatg

SEQ ID NO: 357888 - DNA, 25 bp, Artificial
  Probe
tgagtgtggctatgcatagatccta

SEQ ID NO: 357889 - DNA, 25 bp, Artificial
  Probe
agatcaagggggacacagtggcccc

SEQ ID NO: 357890 - DNA, 25 bp, Artificial
  Probe
gtgcacaacgccagcctggccttgt

SEQ ID NO: 357891 - DNA, 25 bp, Artificial
  Probe
ttgtctgccaacatcggtcgtgtgc

SEQ ID NO: 357892 - DNA, 25 bp, Artificial
  Probe
tggttcatgagatcaagggggacac

SEQ ID NO: 357893 - DNA, 25 bp, Artificial
  Probe
ggcgcctgaacctggcgagaacact

SEQ ID NO: 357894 - DNA, 25 bp, Artificial
  Probe
taccctggagaagacattgccacag

SEQ ID NO: 357895 - DNA, 25 bp, Artificial
  Probe
agctcattgcccaggcccggagtgc

SEQ ID NO: 357896 - DNA, 25 bp, Artificial
  Probe
ctcaagttctacatccagagcccag

SEQ ID NO: 357897 - DNA, 25 bp, Artificial
  Probe
ccagtttggccacatgtctgtcacg

SEQ ID NO: 357898 - DNA, 25 bp, Artificial
  Probe
acatcggtcgtgtgcgcaagctcat

SEQ ID NO: 357899 - DNA, 25 bp, Artificial
  Probe
gaccctccagtttggccacatgtct

SEQ ID NO: 357900 - DNA, 25 bp, Artificial
  Probe
agccgtcagcattgacaggaccctc

SEQ ID NO: 357901 - DNA, 25 bp, Artificial
  Probe
ttgttctgtacatggggagccgcca

SEQ ID NO: 357902 - DNA, 25 bp, Artificial
  Probe
caaactgagccgtctggagaaccga

SEQ ID NO: 357903 - DNA, 25 bp, Artificial
  Probe
actggggaccgctttgttctgtaca

SEQ ID NO: 357904 - DNA, 25 bp, Artificial
  Probe
ggtcgtgtgcgcaagctcattgccc

SEQ ID NO: 357905 - DNA, 25 bp, Artificial
  Probe
aactgagccgtctggagaaccgagg

SEQ ID NO: 357906 - DNA, 25 bp, Artificial
  Probe
tggcgagaacactggggaccgcttt

SEQ ID NO: 357907 - DNA, 25 bp, Artificial
  Probe
atcaagggggacacagtggcccctg

SEQ ID NO: 357908 - DNA, 25 bp, Artificial
  Probe
cgtaatcagaaggtgcactgggtgt

SEQ ID NO: 357909 - DNA, 25 bp, Artificial
  Probe
agtttgcagccgtcagcattgacag

SEQ ID NO: 357910 - DNA, 25 bp, Artificial
  Probe
ggagggactactcaacctgcatcct

SEQ ID NO: 357911 - DNA, 25 bp, Artificial
  Probe
ggagcagtttgcagccgtcagcatt

SEQ ID NO: 357912 - DNA, 25 bp, Artificial
  Probe
acaggttaggtgaggctggccccac

SEQ ID NO: 357913 - DNA, 25 bp, Artificial
  Probe
ctgtacatggggagccgccaggcca

SEQ ID NO: 357914 - DNA, 25 bp, Artificial
  Probe
atcagaaggtgcactgggtgtacag

SEQ ID NO: 357915 - DNA, 25 bp, Artificial
  Probe
ccaccggggactacatgggagtgtc

SEQ ID NO: 357916 - DNA, 25 bp, Artificial
  Probe
tgccggcgcctgaacctggcgagaa

SEQ ID NO: 357917 - DNA, 25 bp, Artificial
  Probe
cccacaactctcagcattgacgaga

SEQ ID NO: 357918 - DNA, 25 bp, Artificial
  Probe
ctgtcacggtggagaagcatatggt

SEQ ID NO: 357919 - DNA, 25 bp, Artificial
  Probe
agcctggccttgtctgccaacatcg

SEQ ID NO: 357920 - DNA, 25 bp, Artificial
  Probe
ttctacatccagagcccagtgccgg

SEQ ID NO: 357921 - DNA, 25 bp, Artificial
  Probe
ttcatgagatcaagggggacacagt

SEQ ID NO: 357922 - DNA, 25 bp, Artificial
  Probe
ctggccaaactgagccgtctggaga

SEQ ID NO: 357923 - DNA, 25 bp, Artificial
  Probe
gaagacattgccacagctgctggcc

SEQ ID NO: 357924 - DNA, 25 bp, Artificial
  Probe
cattgacgagaacattggggagcag

SEQ ID NO: 357925 - DNA, 25 bp, Artificial
  Probe
gaacattggggagcagtttgcagcc

SEQ ID NO: 357926 - DNA, 25 bp, Artificial
  Probe
gagacctcgctgaccttgctgccta

SEQ ID NO: 357927 - DNA, 25 bp, Artificial
  Probe
tgccaacatcggtcgtgtgcgcaag

SEQ ID NO: 357928 - DNA, 25 bp, Artificial
  Probe
ccatgaagttcaacgggcgttcggg

SEQ ID NO: 357929 - DNA, 25 bp, Artificial
  Probe
cagctgctggccaaactgagccgtc

SEQ ID NO: 357930 - DNA, 25 bp, Artificial
  Probe
cagcattgacaggaccctccagttt

SEQ ID NO: 357931 - DNA, 25 bp, Artificial
  Probe
tgccacagctgctggccaaactgag

SEQ ID NO: 357932 - DNA, 25 bp, Artificial
  Probe
cggagtgccgccaacaaggtcaagg

SEQ ID NO: 357933 - DNA, 25 bp, Artificial
  Probe
tacaggttaggtgaggctggcccca

SEQ ID NO: 357934 - DNA, 25 bp, Artificial
  Probe
tgtgcgcaagctcattgcccaggcc

SEQ ID NO: 357935 - DNA, 25 bp, Artificial
  Probe
caacagtcaccgagtggagaacgtt

SEQ ID NO: 357936 - DNA, 25 bp, Artificial
  Probe
ctgactttggcaagacatggagggt

SEQ ID NO: 357937 - DNA, 25 bp, Artificial
  Probe
cctgtctctcttcaactggacctag

SEQ ID NO: 357938 - DNA, 25 bp, Artificial
  Probe
acctagacaagaggatgcagcttca

SEQ ID NO: 357939 - DNA, 25 bp, Artificial
  Probe
caagaactggcaggacgtccggtgc

SEQ ID NO: 357940 - DNA, 25 bp, Artificial
  Probe
cccttgtcccagaggcctaatgggc

SEQ ID NO: 357941 - DNA, 25 bp, Artificial
  Probe
tcttcaggccccatgcgctggtggc

SEQ ID NO: 357942 - DNA, 25 bp, Artificial
  Probe
tggacctagacaagaggatgcagct

SEQ ID NO: 357943 - DNA, 25 bp, Artificial
  Probe
ttgattgagcgctcttctgactttg

SEQ ID NO: 357944 - DNA, 25 bp, Artificial
  Probe
agaacgttgtatcgtcttcaggccc

SEQ ID NO: 357945 - DNA, 25 bp, Artificial
  Probe
actacaacagtcaccgagtggagaa

SEQ ID NO: 357946 - DNA, 25 bp, Artificial
  Probe
cagcttcaggacataatgatggatt

SEQ ID NO: 357947 - DNA, 25 bp, Artificial
  Probe
tcaccgagtggagaacgttgtatcg

SEQ ID NO: 357948 - DNA, 25 bp, Artificial
  Probe
cttcaggccccatgcgctggtggca

SEQ ID NO: 357949 - DNA, 25 bp, Artificial
  Probe
ccaagaactggcaggacgtccggtg

SEQ ID NO: 357950 - DNA, 25 bp, Artificial
  Probe
gggtctcatgccagctggcatgttg

SEQ ID NO: 357951 - DNA, 25 bp, Artificial
  Probe
tgtatcgtcttcaggccccatgcgc

SEQ ID NO: 357952 - DNA, 25 bp, Artificial
  Probe
aggctgcctcgcaactacaacagtc

SEQ ID NO: 357953 - DNA, 25 bp, Artificial
  Probe
tgtaccagtacctggcgacagactg

SEQ ID NO: 357954 - DNA, 25 bp, Artificial
  Probe
aagtgtgactccaggctgcctcgca

SEQ ID NO: 357955 - DNA, 25 bp, Artificial
  Probe
cgatgtgagccctgtctctcttcaa

SEQ ID NO: 357956 - DNA, 25 bp, Artificial
  Probe
ggcccttgtcccagaggcctaatgg

SEQ ID NO: 357957 - DNA, 25 bp, Artificial
  Probe
gagccctgtctctcttcaactggac

SEQ ID NO: 357958 - DNA, 25 bp, Artificial
  Probe
ggcgacagactgtgccagcaccttt

SEQ ID NO: 357959 - DNA, 25 bp, Artificial
  Probe
acaagaggatgcagcttcaggacat

SEQ ID NO: 357960 - DNA, 25 bp, Artificial
  Probe
atgccagctggcatgttgattgagc

SEQ ID NO: 357961 - DNA, 25 bp, Artificial
  Probe
ggctgcctcgcaactacaacagtca

SEQ ID NO: 357962 - DNA, 25 bp, Artificial
  Probe
ctcgcaactacaacagtcaccgagt

SEQ ID NO: 357963 - DNA, 25 bp, Artificial
  Probe
gtggcagtcccagaacgatgtgagc

SEQ ID NO: 357964 - DNA, 25 bp, Artificial
  Probe
cagaacgatgtgagccctgtctctc

SEQ ID NO: 357965 - DNA, 25 bp, Artificial
  Probe
gagggtgtaccagtacctggcgaca

SEQ ID NO: 357966 - DNA, 25 bp, Artificial
  Probe
ttaagggtctcatgccagctggcat

SEQ ID NO: 357967 - DNA, 25 bp, Artificial
  Probe
cagtacctggcgacagactgtgcca

SEQ ID NO: 357968 - DNA, 25 bp, Artificial
  Probe
tctgactttggcaagacatggaggg

SEQ ID NO: 357969 - DNA, 25 bp, Artificial
  Probe
cgctggtggcagtcccagaacgatg

SEQ ID NO: 357970 - DNA, 25 bp, Artificial
  Probe
tgcgctggtggcagtcccagaacga

SEQ ID NO: 357971 - DNA, 25 bp, Artificial
  Probe
ctcttctgactttggcaagacatgg

SEQ ID NO: 357972 - DNA, 25 bp, Artificial
  Probe
gcatgttgattgagcgctcttctga

SEQ ID NO: 357973 - DNA, 25 bp, Artificial
  Probe
cagggccagcccaagaactggcagg

SEQ ID NO: 357974 - DNA, 25 bp, Artificial
  Probe
ccagaggcctaatgggcatctgact

SEQ ID NO: 357975 - DNA, 25 bp, Artificial
  Probe
cccatgcgctggtggcagtcccaga

SEQ ID NO: 357976 - DNA, 25 bp, Artificial
  Probe
gtgactccaggctgcctcgcaacta

SEQ ID NO: 357977 - DNA, 25 bp, Artificial
  Probe
cctaatgggcatctgactgggggaa

SEQ ID NO: 357978 - DNA, 25 bp, Artificial
  Probe
gtcccagaggcctaatgggcatctg

SEQ ID NO: 357979 - DNA, 25 bp, Artificial
  Probe
cagcccaagaactggcaggacgtcc

SEQ ID NO: 357980 - DNA, 25 bp, Artificial
  Probe
ggattttaagggtctcatgccagct

SEQ ID NO: 357981 - DNA, 25 bp, Artificial
  Probe
tgggcattcagacagctgccacacc

SEQ ID NO: 357982 - DNA, 25 bp, Artificial
  Probe
acacctctgctgacttcagtgtcca

SEQ ID NO: 357983 - DNA, 25 bp, Artificial
  Probe
cgccatcaggatgtatttagttctg

SEQ ID NO: 357984 - DNA, 25 bp, Artificial
  Probe
aaattgggcgcctgcaaaactccac

SEQ ID NO: 357985 - DNA, 25 bp, Artificial
  Probe
tctgctatgggcattcagacagctg

SEQ ID NO: 357986 - DNA, 25 bp, Artificial
  Probe
ttctgcccgaagatcagacccagtc

SEQ ID NO: 357987 - DNA, 25 bp, Artificial
  Probe
ggcgcctgcaaaactccactggtca

SEQ ID NO: 357988 - DNA, 25 bp, Artificial
  Probe
gtcaccgcgccatcaggatgtattt

SEQ ID NO: 357989 - DNA, 25 bp, Artificial
  Probe
ggtcaccgcgccatcaggatgtatt

SEQ ID NO: 357990 - DNA, 25 bp, Artificial
  Probe
gatgtatttagttctgcccgaagat

SEQ ID NO: 357991 - DNA, 25 bp, Artificial
  Probe
acccgccaaatttctcggtaatcag

SEQ ID NO: 357992 - DNA, 25 bp, Artificial
  Probe
tagttctgcccgaagatcagaccca

SEQ ID NO: 357993 - DNA, 25 bp, Artificial
  Probe
gctgacttcagtgtccacaaaatca

SEQ ID NO: 357994 - DNA, 25 bp, Artificial
  Probe
tgagttacgggcagagcctgtcttt

SEQ ID NO: 357995 - DNA, 25 bp, Artificial
  Probe
acctctgctgacttcagtgtccaca

SEQ ID NO: 357996 - DNA, 25 bp, Artificial
  Probe
gacccagtctatttcgtggcacccg

SEQ ID NO: 357997 - DNA, 25 bp, Artificial
  Probe
agcaagtgagttacgggcagagcct

SEQ ID NO: 357998 - DNA, 25 bp, Artificial
  Probe
ctgctatgggcattcagacagctgc

SEQ ID NO: 357999 - DNA, 25 bp, Artificial
  Probe
tgccacacctctgctgacttcagtg

SEQ ID NO: 358000 - DNA, 25 bp, Artificial
  Probe
taatcagcaagtgagttacgggcag

SEQ ID NO: 358001 - DNA, 25 bp, Artificial
  Probe
gcccgaagatcagacccagtctatt

SEQ ID NO: 358002 - DNA, 25 bp, Artificial
  Probe
cccagtgtttctgctatgggcattc

SEQ ID NO: 358003 - DNA, 25 bp, Artificial
  Probe
ctcaactttcaatcaggatgaagat

SEQ ID NO: 358004 - DNA, 25 bp, Artificial
  Probe
tcagcaagtgagttacgggcagagc

SEQ ID NO: 358005 - DNA, 25 bp, Artificial
  Probe
acgggcagagcctgtcttttgacta

SEQ ID NO: 358006 - DNA, 25 bp, Artificial
  Probe
gggcattcagacagctgccacacct

SEQ ID NO: 358007 - DNA, 25 bp, Artificial
  Probe
aagatcagacccagtctatttcgtg

SEQ ID NO: 358008 - DNA, 25 bp, Artificial
  Probe
aatttctcggtaatcagcaagtgag

SEQ ID NO: 358009 - DNA, 25 bp, Artificial
  Probe
acctcaactttcaatcaggatgaag

SEQ ID NO: 358010 - DNA, 25 bp, Artificial
  Probe
tttctcggtaatcagcaagtgagtt

SEQ ID NO: 358011 - DNA, 25 bp, Artificial
  Probe
atgtatttagttctgcccgaagatc

SEQ ID NO: 358012 - DNA, 25 bp, Artificial
  Probe
tgtatttagttctgcccgaagatca

SEQ ID NO: 358013 - DNA, 25 bp, Artificial
  Probe
caaatttctcggtaatcagcaagtg

SEQ ID NO: 358014 - DNA, 25 bp, Artificial
  Probe
tctcggtaatcagcaagtgagttac

SEQ ID NO: 358015 - DNA, 25 bp, Artificial
  Probe
ctatgggcattcagacagctgccac

SEQ ID NO: 358016 - DNA, 25 bp, Artificial
  Probe
ctctgctgacttcagtgtccacaaa

SEQ ID NO: 358017 - DNA, 25 bp, Artificial
  Probe
gatcagacccagtctatttcgtggc

SEQ ID NO: 358018 - DNA, 25 bp, Artificial
  Probe
agcctgtcttttgactaccgcgtgg

SEQ ID NO: 358019 - DNA, 25 bp, Artificial
  Probe
cccgaagatcagacccagtctattt

SEQ ID NO: 358020 - DNA, 25 bp, Artificial
  Probe
agttacgggcagagcctgtcttttg

SEQ ID NO: 358021 - DNA, 25 bp, Artificial
  Probe
ctgctgacttcagtgtccacaaaat

SEQ ID NO: 358022 - DNA, 25 bp, Artificial
  Probe
ccgccaaatttctcggtaatcagca

SEQ ID NO: 358023 - DNA, 25 bp, Artificial
  Probe
gccacacctctgctgacttcagtgt

SEQ ID NO: 358024 - DNA, 25 bp, Artificial
  Probe
cctcaactttcaatcaggatgaaga

SEQ ID NO: 358025 - DNA, 25 bp, Artificial
  Probe
gtgtttctgctatgggcattcagac

SEQ ID NO: 358026 - DNA, 25 bp, Artificial
  Probe
cgcgccatcaggatgtatttagttc

SEQ ID NO: 358027 - DNA, 25 bp, Artificial
  Probe
aagactgattacaccgtgcctatga

SEQ ID NO: 358028 - DNA, 25 bp, Artificial
  Probe
tattttgtaatgaacgcatggactc

SEQ ID NO: 358029 - DNA, 25 bp, Artificial
  Probe
aacgcatggactcgagccttaactc

SEQ ID NO: 358030 - DNA, 25 bp, Artificial
  Probe
cattgtattctcgagactgtatttt

SEQ ID NO: 358031 - DNA, 25 bp, Artificial
  Probe
aatgccattgtattctcgagactgt

SEQ ID NO: 358032 - DNA, 25 bp, Artificial
  Probe
atgaacgcatggactcgagccttaa

SEQ ID NO: 358033 - DNA, 25 bp, Artificial
  Probe
tggactcgagccttaactcttgtta

SEQ ID NO: 358034 - DNA, 25 bp, Artificial
  Probe
tgccattgtattctcgagactgtat

SEQ ID NO: 358035 - DNA, 25 bp, Artificial
  Probe
gttttatgatactcaatgccattgt

SEQ ID NO: 358036 - DNA, 25 bp, Artificial
  Probe
gtaatgaacgcatggactcgagcct

SEQ ID NO: 358037 - DNA, 25 bp, Artificial
  Probe
aatgaacgcatggactcgagcctta

SEQ ID NO: 358038 - DNA, 25 bp, Artificial
  Probe
atgccattgtattctcgagactgta

SEQ ID NO: 358039 - DNA, 25 bp, Artificial
  Probe
cgcatggactcgagccttaactctt

SEQ ID NO: 358040 - DNA, 25 bp, Artificial
  Probe
ctatgaagccctccagaattgaaaa

SEQ ID NO: 358041 - DNA, 25 bp, Artificial
  Probe
ctgattacaccgtgcctatgaagcc

SEQ ID NO: 358042 - DNA, 25 bp, Artificial
  Probe
ggactcgagccttaactcttgttat

SEQ ID NO: 358043 - DNA, 25 bp, Artificial
  Probe
tattctactggcttaaataagaagc

SEQ ID NO: 358044 - DNA, 25 bp, Artificial
  Probe
gactcgagccttaactcttgttatc

SEQ ID NO: 358045 - DNA, 25 bp, Artificial
  Probe
taaagactgattacaccgtgcctat

SEQ ID NO: 358046 - DNA, 25 bp, Artificial
  Probe
acgcatggactcgagccttaactct

SEQ ID NO: 358047 - DNA, 25 bp, Artificial
  Probe
gaacgcatggactcgagccttaact

SEQ ID NO: 358048 - DNA, 25 bp, Artificial
  Probe
taatgaacgcatggactcgagcctt

SEQ ID NO: 358049 - DNA, 25 bp, Artificial
  Probe
tgaagccctccagaattgaaaagaa

SEQ ID NO: 358050 - DNA, 25 bp, Artificial
  Probe
tgtaatgaacgcatggactcgagcc

SEQ ID NO: 358051 - DNA, 25 bp, Artificial
  Probe
tactcaatgccattgtattctcgag

SEQ ID NO: 358052 - DNA, 25 bp, Artificial
  Probe
ttctactggcttaaataagaagctt

SEQ ID NO: 358053 - DNA, 25 bp, Artificial
  Probe
tcaatgccattgtattctcgagact

SEQ ID NO: 358054 - DNA, 25 bp, Artificial
  Probe
tatgaagccctccagaattgaaaag

SEQ ID NO: 358055 - DNA, 25 bp, Artificial
  Probe
ctcaatgccattgtattctcgagac

SEQ ID NO: 358056 - DNA, 25 bp, Artificial
  Probe
attttgtaatgaacgcatggactcg

SEQ ID NO: 358057 - DNA, 25 bp, Artificial
  Probe
tctactggcttaaataagaagcttt

SEQ ID NO: 358058 - DNA, 25 bp, Artificial
  Probe
tgaacgcatggactcgagccttaac

SEQ ID NO: 358059 - DNA, 25 bp, Artificial
  Probe
ccattgtattctcgagactgtattt

SEQ ID NO: 358060 - DNA, 25 bp, Artificial
  Probe
atgaagccctccagaattgaaaaga

SEQ ID NO: 358061 - DNA, 25 bp, Artificial
  Probe
ccgtgcctatgaagccctccagaat

SEQ ID NO: 358062 - DNA, 25 bp, Artificial
  Probe
accgtgcctatgaagccctccagaa

SEQ ID NO: 358063 - DNA, 25 bp, Artificial
  Probe
actcaatgccattgtattctcgaga

SEQ ID NO: 358064 - DNA, 25 bp, Artificial
  Probe
attctactggcttaaataagaagct

SEQ ID NO: 358065 - DNA, 25 bp, Artificial
  Probe
ttcttgcaacttgaagaaaatgacc

SEQ ID NO: 358066 - DNA, 25 bp, Artificial
  Probe
caatgccattgtattctcgagactg

SEQ ID NO: 358067 - DNA, 25 bp, Artificial
  Probe
ctcgagactgtattttgtaatgaac

SEQ ID NO: 358068 - DNA, 25 bp, Artificial
  Probe
cctatgaagccctccagaattgaaa

SEQ ID NO: 358069 - DNA, 25 bp, Artificial
  Probe
gccattgtattctcgagactgtatt

SEQ ID NO: 358070 - DNA, 25 bp, Artificial
  Probe
tataaagactgattacaccgtgcct

SEQ ID NO: 358071 - DNA, 25 bp, Artificial
  Probe
tttcttgcaacttgaagaaaatgac

SEQ ID NO: 358072 - DNA, 25 bp, Artificial
  Probe
acactacgtgagtaagctatagccc

SEQ ID NO: 358073 - DNA, 25 bp, Artificial
  Probe
tttaaattgccctgactagccttga

SEQ ID NO: 358074 - DNA, 25 bp, Artificial
  Probe
tagactccaggcaacaaataagcac

SEQ ID NO: 358075 - DNA, 25 bp, Artificial
  Probe
agtctagccatggactcctcctgtg

SEQ ID NO: 358076 - DNA, 25 bp, Artificial
  Probe
tagccatggactcctcctgtgatca

SEQ ID NO: 358077 - DNA, 25 bp, Artificial
  Probe
ccctgactagccttgagcccaggat

SEQ ID NO: 358078 - DNA, 25 bp, Artificial
  Probe
gccttgagcccaggatgctcacgga

SEQ ID NO: 358079 - DNA, 25 bp, Artificial
  Probe
cagagaacccaggtctcgagggaac

SEQ ID NO: 358080 - DNA, 25 bp, Artificial
  Probe
cttttcaaaaatggtattcgacaga

SEQ ID NO: 358081 - DNA, 25 bp, Artificial
  Probe
ggtattcgacagaacccaacatatc

SEQ ID NO: 358082 - DNA, 25 bp, Artificial
  Probe
ggaacccggggctcacggatacact

SEQ ID NO: 358083 - DNA, 25 bp, Artificial
  Probe
actgtgcacggcttacacgataaaa

SEQ ID NO: 358084 - DNA, 25 bp, Artificial
  Probe
tgagtaagctatagccctagactcc

SEQ ID NO: 358085 - DNA, 25 bp, Artificial
  Probe
tctgaggcagccttggcctcgttgc

SEQ ID NO: 358086 - DNA, 25 bp, Artificial
  Probe
ctgaggcagccttggcctcgttgcc

SEQ ID NO: 358087 - DNA, 25 bp, Artificial
  Probe
ccagaggtcgagactgtagacctgt

SEQ ID NO: 358088 - DNA, 25 bp, Artificial
  Probe
aagctatagccctagactccaggca

SEQ ID NO: 358089 - DNA, 25 bp, Artificial
  Probe
aggtcgagactgtagacctgtgcta

SEQ ID NO: 358090 - DNA, 25 bp, Artificial
  Probe
tgcccggacctatcctttatttctg

SEQ ID NO: 358091 - DNA, 25 bp, Artificial
  Probe
tatttgagacaaagtccatgtaggc

SEQ ID NO: 358092 - DNA, 25 bp, Artificial
  Probe
gcccggacctatcctttatttctgc

SEQ ID NO: 358093 - DNA, 25 bp, Artificial
  Probe
gtgattctctttaaattgccctgac

SEQ ID NO: 358094 - DNA, 25 bp, Artificial
  Probe
aggtaacagagaacccaggtctcga

SEQ ID NO: 358095 - DNA, 25 bp, Artificial
  Probe
ggatgctcacggatgctgagattat

SEQ ID NO: 358096 - DNA, 25 bp, Artificial
  Probe
aacagagaacccaggtctcgaggga

SEQ ID NO: 358097 - DNA, 25 bp, Artificial
  Probe
gccctagactccaggcaacaaataa

SEQ ID NO: 358098 - DNA, 25 bp, Artificial
  Probe
tcctcctgtgatcatcctccagagg

SEQ ID NO: 358099 - DNA, 25 bp, Artificial
  Probe
tcaggtaacagagaacccaggtctc

SEQ ID NO: 358100 - DNA, 25 bp, Artificial
  Probe
cggggctcacggatacactacgtga

SEQ ID NO: 358101 - DNA, 25 bp, Artificial
  Probe
attgccctgactagccttgagccca

SEQ ID NO: 358102 - DNA, 25 bp, Artificial
  Probe
cctagtgatgacgtctaggggtcag

SEQ ID NO: 358103 - DNA, 25 bp, Artificial
  Probe
tctaggggtcaggtaacagagaacc

SEQ ID NO: 358104 - DNA, 25 bp, Artificial
  Probe
acgtctaggggtcaggtaacagaga

SEQ ID NO: 358105 - DNA, 25 bp, Artificial
  Probe
catgtaggctagtctagccatggac

SEQ ID NO: 358106 - DNA, 25 bp, Artificial
  Probe
atggtattcgacagaacccaacata

SEQ ID NO: 358107 - DNA, 25 bp, Artificial
  Probe
caaagtccatgtaggctagtctagc

SEQ ID NO: 358108 - DNA, 25 bp, Artificial
  Probe
gtccatgtaggctagtctagccatg

SEQ ID NO: 358109 - DNA, 25 bp, Artificial
  Probe
tgtcttttcaaaaatggtattcgac

SEQ ID NO: 358110 - DNA, 25 bp, Artificial
  Probe
cctgactagccttgagcccaggatg

SEQ ID NO: 358111 - DNA, 25 bp, Artificial
  Probe
gtaggctagtctagccatggactcc

SEQ ID NO: 358112 - DNA, 25 bp, Artificial
  Probe
tttttctgaggcagccttggcctcg

SEQ ID NO: 358113 - DNA, 25 bp, Artificial
  Probe
atggactcctcctgtgatcatcctc

SEQ ID NO: 358114 - DNA, 25 bp, Artificial
  Probe
gatgctcacggatgctgagattata

SEQ ID NO: 358115 - DNA, 25 bp, Artificial
  Probe
tagacctgtgctaccatgcccggac

SEQ ID NO: 358116 - DNA, 25 bp, Artificial
  Probe
gaacccggggctcacggatacacta

SEQ ID NO: 358117 - DNA, 25 bp, Artificial
  Probe
cagtgtctaggcagatacacctagt

SEQ ID NO: 358118 - DNA, 25 bp, Artificial
  Probe
ctgagtctcctgtctcccgtggagt

SEQ ID NO: 358119 - DNA, 25 bp, Artificial
  Probe
gtaacctctaggagatgcccggaat

SEQ ID NO: 358120 - DNA, 25 bp, Artificial
  Probe
aaacctggcttatgtggcgttggga

SEQ ID NO: 358121 - DNA, 25 bp, Artificial
  Probe
ctgagctgctgagtctcctgtctcc

SEQ ID NO: 358122 - DNA, 25 bp, Artificial
  Probe
ggtaccccaggctaacactgagctg

SEQ ID NO: 358123 - DNA, 25 bp, Artificial
  Probe
agctgctgagtctcctgtctcccgt

SEQ ID NO: 358124 - DNA, 25 bp, Artificial
  Probe
gctgctgagtctcctgtctcccgtg

SEQ ID NO: 358125 - DNA, 25 bp, Artificial
  Probe
gtctcccgtggagtttgcatcacgg

SEQ ID NO: 358126 - DNA, 25 bp, Artificial
  Probe
gagctgctgagtctcctgtctcccg

SEQ ID NO: 358127 - DNA, 25 bp, Artificial
  Probe
gagtctcctgtctcccgtggagttt

SEQ ID NO: 358128 - DNA, 25 bp, Artificial
  Probe
aaatgtaacctctaggagatgcccg

SEQ ID NO: 358129 - DNA, 25 bp, Artificial
  Probe
caaagattttaccacatccacggag

SEQ ID NO: 358130 - DNA, 25 bp, Artificial
  Probe
ccccaggctaacactgagctgctga

SEQ ID NO: 358131 - DNA, 25 bp, Artificial
  Probe
tctcccgtggagtttgcatcacggc

SEQ ID NO: 358132 - DNA, 25 bp, Artificial
  Probe
taccccaggctaacactgagctgct

SEQ ID NO: 358133 - DNA, 25 bp, Artificial
  Probe
ccaggctaacactgagctgctgagt

SEQ ID NO: 358134 - DNA, 25 bp, Artificial
  Probe
ggtaggtaccccaggctaacactga

SEQ ID NO: 358135 - DNA, 25 bp, Artificial
  Probe
caggctaacactgagctgctgagtc

SEQ ID NO: 358136 - DNA, 25 bp, Artificial
  Probe
tcccgtggagtttgcatcacggcat

SEQ ID NO: 358137 - DNA, 25 bp, Artificial
  Probe
ccgtggagtttgcatcacggcatgc

SEQ ID NO: 358138 - DNA, 25 bp, Artificial
  Probe
ctaacactgagctgctgagtctcct

SEQ ID NO: 358139 - DNA, 25 bp, Artificial
  Probe
ctcccgtggagtttgcatcacggca

SEQ ID NO: 358140 - DNA, 25 bp, Artificial
  Probe
tcctgtctcccgtggagtttgcatc

SEQ ID NO: 358141 - DNA, 25 bp, Artificial
  Probe
aagattttaccacatccacggagat

SEQ ID NO: 358142 - DNA, 25 bp, Artificial
  Probe
aacctctaggagatgcccggaattt

SEQ ID NO: 358143 - DNA, 25 bp, Artificial
  Probe
accccaggctaacactgagctgctg

SEQ ID NO: 358144 - DNA, 25 bp, Artificial
  Probe
gcaaagattttaccacatccacgga

SEQ ID NO: 358145 - DNA, 25 bp, Artificial
  Probe
gctgagtctcctgtctcccgtggag

SEQ ID NO: 358146 - DNA, 25 bp, Artificial
  Probe
actgagctgctgagtctcctgtctc

SEQ ID NO: 358147 - DNA, 25 bp, Artificial
  Probe
cctgtctcccgtggagtttgcatca

SEQ ID NO: 358148 - DNA, 25 bp, Artificial
  Probe
cactgagctgctgagtctcctgtct

SEQ ID NO: 358149 - DNA, 25 bp, Artificial
  Probe
tgtaacctctaggagatgcccggaa

SEQ ID NO: 358150 - DNA, 25 bp, Artificial
  Probe
agcaaagattttaccacatccacgg

SEQ ID NO: 358151 - DNA, 25 bp, Artificial
  Probe
taacctctaggagatgcccggaatt

SEQ ID NO: 358152 - DNA, 25 bp, Artificial
  Probe
ctgctgagtctcctgtctcccgtgg

SEQ ID NO: 358153 - DNA, 25 bp, Artificial
  Probe
aggctaacactgagctgctgagtct

SEQ ID NO: 358154 - DNA, 25 bp, Artificial
  Probe
taacactgagctgctgagtctcctg

SEQ ID NO: 358155 - DNA, 25 bp, Artificial
  Probe
cccaggctaacactgagctgctgag

SEQ ID NO: 358156 - DNA, 25 bp, Artificial
  Probe
atgtaacctctaggagatgcccgga

SEQ ID NO: 358157 - DNA, 25 bp, Artificial
  Probe
ggctaacactgagctgctgagtctc

SEQ ID NO: 358158 - DNA, 25 bp, Artificial
  Probe
tgctgagtctcctgtctcccgtgga

SEQ ID NO: 358159 - DNA, 25 bp, Artificial
  Probe
ctgtctcccgtggagtttgcatcac

SEQ ID NO: 358160 - DNA, 25 bp, Artificial
  Probe
tgagtctcctgtctcccgtggagtt

SEQ ID NO: 358161 - DNA, 25 bp, Artificial
  Probe
cccgtggagtttgcatcacggcatg

SEQ ID NO: 358162 - DNA, 25 bp, Artificial
  Probe
cctgctgtcctctgctctgtgtggc

SEQ ID NO: 358163 - DNA, 25 bp, Artificial
  Probe
ccctgctgtcctctgctctgtgtgg

SEQ ID NO: 358164 - DNA, 25 bp, Artificial
  Probe
gttagttttccctgcctctgagagt

SEQ ID NO: 358165 - DNA, 25 bp, Artificial
  Probe
cattatcttgggtgccaaccttcca

SEQ ID NO: 358166 - DNA, 25 bp, Artificial
  Probe
gaactgtgcgattccgccgtctcat

SEQ ID NO: 358167 - DNA, 25 bp, Artificial
  Probe
gagtatcggactgagactcacgagt

SEQ ID NO: 358168 - DNA, 25 bp, Artificial
  Probe
ggtcaaccacctagggcttcccagt

SEQ ID NO: 358169 - DNA, 25 bp, Artificial
  Probe
ttgggctgacacaggggaccctcga

SEQ ID NO: 358170 - DNA, 25 bp, Artificial
  Probe
cggcacgttctgaaagatgtaaatc

SEQ ID NO: 358171 - DNA, 25 bp, Artificial
  Probe
ttatacagaactgtgcgattccgcc

SEQ ID NO: 358172 - DNA, 25 bp, Artificial
  Probe
cctttccgccattctactagggagg

SEQ ID NO: 358173 - DNA, 25 bp, Artificial
  Probe
agctgggttagttttccctgcctct

SEQ ID NO: 358174 - DNA, 25 bp, Artificial
  Probe
ccctaacacctgaattttgagtctg

SEQ ID NO: 358175 - DNA, 25 bp, Artificial
  Probe
agactcacgagtgtgcgagggctcc

SEQ ID NO: 358176 - DNA, 25 bp, Artificial
  Probe
accttccatatttggcagcattggt

SEQ ID NO: 358177 - DNA, 25 bp, Artificial
  Probe
tcgtaactgaattctcggtgtgatc

SEQ ID NO: 358178 - DNA, 25 bp, Artificial
  Probe
cgtagggaggccatagccacgtttg

SEQ ID NO: 358179 - DNA, 25 bp, Artificial
  Probe
cggaggctcggtgtcttgccctgtt

SEQ ID NO: 358180 - DNA, 25 bp, Artificial
  Probe
cagaccggatttgctttggacgtgg

SEQ ID NO: 358181 - DNA, 25 bp, Artificial
  Probe
tgtcttgccctgttcacagaccgga

SEQ ID NO: 358182 - DNA, 25 bp, Artificial
  Probe
aaaggctcggacagtgcctttataa

SEQ ID NO: 358183 - DNA, 25 bp, Artificial
  Probe
tatttggcagcattggtcaaccacc

SEQ ID NO: 358184 - DNA, 25 bp, Artificial
  Probe
tttcctgtgcgctccttcttcggcg

SEQ ID NO: 358185 - DNA, 25 bp, Artificial
  Probe
tggctccaagtagagattgtgctta

SEQ ID NO: 358186 - DNA, 25 bp, Artificial
  Probe
ctcccattatcttgggtgccaacct

SEQ ID NO: 358187 - DNA, 25 bp, Artificial
  Probe
tcgggctttttacacgttcgcctct

SEQ ID NO: 358188 - DNA, 25 bp, Artificial
  Probe
ggagactttccttaactggggcttg

SEQ ID NO: 358189 - DNA, 25 bp, Artificial
  Probe
tggagtgttgcgttgttgcccgcac

SEQ ID NO: 358190 - DNA, 25 bp, Artificial
  Probe
tttgagtctgtctgttatacagaac

SEQ ID NO: 358191 - DNA, 25 bp, Artificial
  Probe
cgcagcagtgactacccagtcaaaa

SEQ ID NO: 358192 - DNA, 25 bp, Artificial
  Probe
tcggttcgtgtctgccatgtgagcc

SEQ ID NO: 358193 - DNA, 25 bp, Artificial
  Probe
actgtggtggagtcgtttggcttca

SEQ ID NO: 358194 - DNA, 25 bp, Artificial
  Probe
cacaggggaccctcgatgatgcgaa

SEQ ID NO: 358195 - DNA, 25 bp, Artificial
  Probe
actgactccggcacgttctgaaaga

SEQ ID NO: 358196 - DNA, 25 bp, Artificial
  Probe
ggctccaagtagagattgtgcttaa

SEQ ID NO: 358197 - DNA, 25 bp, Artificial
  Probe
aggcacaaaacctcactgactccgg

SEQ ID NO: 358198 - DNA, 25 bp, Artificial
  Probe
gactttccttaactggggcttgtct

SEQ ID NO: 358199 - DNA, 25 bp, Artificial
  Probe
gaaccggtggacaggactaaaagag

SEQ ID NO: 358200 - DNA, 25 bp, Artificial
  Probe
gagtcgtttggcttcagcgtgtgct

SEQ ID NO: 358201 - DNA, 25 bp, Artificial
  Probe
ccgcaccagaatctagaatcctgaa

SEQ ID NO: 358202 - DNA, 25 bp, Artificial
  Probe
ttggcttcagcgtgtgctatgctgg

SEQ ID NO: 358203 - DNA, 25 bp, Artificial
  Probe
gtgactacccagtcaaaaatctgat

SEQ ID NO: 358204 - DNA, 25 bp, Artificial
  Probe
ttgagtctgtctgttatacagaact

SEQ ID NO: 358205 - DNA, 25 bp, Artificial
  Probe
ggtaggcacaaaacctcactgactc

SEQ ID NO: 358206 - DNA, 25 bp, Artificial
  Probe
aaggctcggacagtgcctttataat

SEQ ID NO: 358207 - DNA, 25 bp, Artificial
  Probe
gccatccaggaatgggaacagaaca

SEQ ID NO: 358208 - DNA, 25 bp, Artificial
  Probe
tgctgggctaaactcgggcttttta

SEQ ID NO: 358209 - DNA, 25 bp, Artificial
  Probe
ctagggcttcccagtagccatgaca

SEQ ID NO: 358210 - DNA, 25 bp, Artificial
  Probe
ctgtggcactttgaagaattgtaca

SEQ ID NO: 358211 - DNA, 25 bp, Artificial
  Probe
catgtcgtgccgactgaagtccaaa

SEQ ID NO: 358212 - DNA, 25 bp, Artificial
  Probe
aggccaaggagaatctgtggcaacg

SEQ ID NO: 358213 - DNA, 25 bp, Artificial
  Probe
accggttaatgtactctgtagaaag

SEQ ID NO: 358214 - DNA, 25 bp, Artificial
  Probe
gaccccatgtcgtgccgactgaagt

SEQ ID NO: 358215 - DNA, 25 bp, Artificial
  Probe
gccttccaggccaaggagaatctgt

SEQ ID NO: 358216 - DNA, 25 bp, Artificial
  Probe
ccaggacttgcctatggaaagacaa

SEQ ID NO: 358217 - DNA, 25 bp, Artificial
  Probe
tcagggcaagccttctgctacagtg

SEQ ID NO: 358218 - DNA, 25 bp, Artificial
  Probe
gtctccaggacttgcctatggaaag

SEQ ID NO: 358219 - DNA, 25 bp, Artificial
  Probe
actgtggcactttgaagaattgtac

SEQ ID NO: 358220 - DNA, 25 bp, Artificial
  Probe
agaagaagccttccaggccaaggag

SEQ ID NO: 358221 - DNA, 25 bp, Artificial
  Probe
ataatcaatgcatgaacttgctcgg

SEQ ID NO: 358222 - DNA, 25 bp, Artificial
  Probe
actgaagtccaaagccgtgtgtggc

SEQ ID NO: 358223 - DNA, 25 bp, Artificial
  Probe
gtgtccctgacacgttcgcacgcaa

SEQ ID NO: 358224 - DNA, 25 bp, Artificial
  Probe
acgttcgcacgcaacgggcagtact

SEQ ID NO: 358225 - DNA, 25 bp, Artificial
  Probe
ttactgtgtccctgacacgttcgca

SEQ ID NO: 358226 - DNA, 25 bp, Artificial
  Probe
agcttccttcgcatgctatgaagag

SEQ ID NO: 358227 - DNA, 25 bp, Artificial
  Probe
cacgcaacgggcagtactgcgactc

SEQ ID NO: 358228 - DNA, 25 bp, Artificial
  Probe
aacacaagaccttgaatgtctccag

SEQ ID NO: 358229 - DNA, 25 bp, Artificial
  Probe
cggttaatgtactctgtagaaagtc

SEQ ID NO: 358230 - DNA, 25 bp, Artificial
  Probe
acgcttactgtgtccctgacacgtt

SEQ ID NO: 358231 - DNA, 25 bp, Artificial
  Probe
tgctgtgaccccatgtcgtgccgac

SEQ ID NO: 358232 - DNA, 25 bp, Artificial
  Probe
agcttggatgacttcaaatacctgt

SEQ ID NO: 358233 - DNA, 25 bp, Artificial
  Probe
tgaacgagcagtgtgactgtggcac

SEQ ID NO: 358234 - DNA, 25 bp, Artificial
  Probe
tgtgagaggagcttccttcgcatgc

SEQ ID NO: 358235 - DNA, 25 bp, Artificial
  Probe
tggatgacttcaaatacctgtcaac

SEQ ID NO: 358236 - DNA, 25 bp, Artificial
  Probe
ggatgacttcaaatacctgtcaaca

SEQ ID NO: 358237 - DNA, 25 bp, Artificial
  Probe
agtccaaagccgtgtgtggctccgg

SEQ ID NO: 358238 - DNA, 25 bp, Artificial
  Probe
tgtcaacacaagaccttgaatgtct

SEQ ID NO: 358239 - DNA, 25 bp, Artificial
  Probe
cgttcgcacgcaacgggcagtactg

SEQ ID NO: 358240 - DNA, 25 bp, Artificial
  Probe
cggaaatgacgcttactgtgtccct

SEQ ID NO: 358241 - DNA, 25 bp, Artificial
  Probe
cgactcagggcaagccttctgctac

SEQ ID NO: 358242 - DNA, 25 bp, Artificial
  Probe
aatgaacgagcagtgtgactgtggc

SEQ ID NO: 358243 - DNA, 25 bp, Artificial
  Probe
cttgcctatggaaagacaaaagaag

SEQ ID NO: 358244 - DNA, 25 bp, Artificial
  Probe
aacgggcagtactgcgactcagggc

SEQ ID NO: 358245 - DNA, 25 bp, Artificial
  Probe
gaagaagccttccaggccaaggaga

SEQ ID NO: 358246 - DNA, 25 bp, Artificial
  Probe
ctacagtggtctttgtatgacgagt

SEQ ID NO: 358247 - DNA, 25 bp, Artificial
  Probe
gtgaaggacttcagtacttgtagct

SEQ ID NO: 358248 - DNA, 25 bp, Artificial
  Probe
gcccaaggcaatatattctgggggt

SEQ ID NO: 358249 - DNA, 25 bp, Artificial
  Probe
aagagttcaattccagaaacgatag

SEQ ID NO: 358250 - DNA, 25 bp, Artificial
  Probe
gtactgcgactcagggcaagccttc

SEQ ID NO: 358251 - DNA, 25 bp, Artificial
  Probe
gcatgaacttgctcgggaaatatgt

SEQ ID NO: 358252 - DNA, 25 bp, Artificial
  Probe
ttcgcatgctatgaagagttcaatt

SEQ ID NO: 358253 - DNA, 25 bp, Artificial
  Probe
acctgtcaacacaagaccttgaatg

SEQ ID NO: 358254 - DNA, 25 bp, Artificial
  Probe
gcgactcagggcaagccttctgcta

SEQ ID NO: 358255 - DNA, 25 bp, Artificial
  Probe
tggtcaggactgcaaggtaaaaccg

SEQ ID NO: 358256 - DNA, 25 bp, Artificial
  Probe
tctctgttaccctggaaacgcttta

SEQ ID NO: 358257 - DNA, 25 bp, Artificial
  Probe
gtgctctaatctctctgttaccctg

SEQ ID NO: 358258 - DNA, 25 bp, Artificial
  Probe
agtgcgtgctctaatctctctgtta

SEQ ID NO: 358259 - DNA, 25 bp, Artificial
  Probe
agggcaactcactgccccgtaaatc

SEQ ID NO: 358260 - DNA, 25 bp, Artificial
  Probe
tggaaacgctttaggtctcagactt

SEQ ID NO: 358261 - DNA, 25 bp, Artificial
  Probe
taatctctctgttaccctggaaacg

SEQ ID NO: 358262 - DNA, 25 bp, Artificial
  Probe
ggaagtgcgtgctctaatctctctg

SEQ ID NO: 358263 - DNA, 25 bp, Artificial
  Probe
tctgttaccctggaaacgctttagg

SEQ ID NO: 358264 - DNA, 25 bp, Artificial
  Probe
aacgctttaggtctcagacttttgg

SEQ ID NO: 358265 - DNA, 25 bp, Artificial
  Probe
gccccgtaaatctgctgaagaggtt

SEQ ID NO: 358266 - DNA, 25 bp, Artificial
  Probe
aaacgctttaggtctcagacttttg

SEQ ID NO: 358267 - DNA, 25 bp, Artificial
  Probe
ctggaaacgctttaggtctcagact

SEQ ID NO: 358268 - DNA, 25 bp, Artificial
  Probe
cgtaaatctgctgaagaggttagca

SEQ ID NO: 358269 - DNA, 25 bp, Artificial
  Probe
aggaagtgcgtgctctaatctctct

SEQ ID NO: 358270 - DNA, 25 bp, Artificial
  Probe
gaaacgctttaggtctcagactttt

SEQ ID NO: 358271 - DNA, 25 bp, Artificial
  Probe
aagtgcgtgctctaatctctctgtt

SEQ ID NO: 358272 - DNA, 25 bp, Artificial
  Probe
tgagggcaactcactgccccgtaaa

SEQ ID NO: 358273 - DNA, 25 bp, Artificial
  Probe
tgcgtgctctaatctctctgttacc

SEQ ID NO: 358274 - DNA, 25 bp, Artificial
  Probe
ctgccccgtaaatctgctgaagagg

SEQ ID NO: 358275 - DNA, 25 bp, Artificial
  Probe
acgctttaggtctcagacttttgga

SEQ ID NO: 358276 - DNA, 25 bp, Artificial
  Probe
ccgtaaatctgctgaagaggttagc

SEQ ID NO: 358277 - DNA, 25 bp, Artificial
  Probe
agatgagggcaactcactgccccgt

SEQ ID NO: 358278 - DNA, 25 bp, Artificial
  Probe
ttagcagtggatggaccaaaggagg

SEQ ID NO: 358279 - DNA, 25 bp, Artificial
  Probe
aagatgagggcaactcactgccccg

SEQ ID NO: 358280 - DNA, 25 bp, Artificial
  Probe
ggaaacgctttaggtctcagacttt

SEQ ID NO: 358281 - DNA, 25 bp, Artificial
  Probe
gaagtgcgtgctctaatctctctgt

SEQ ID NO: 358282 - DNA, 25 bp, Artificial
  Probe
cgctttaggtctcagacttttggaa

SEQ ID NO: 358283 - DNA, 25 bp, Artificial
  Probe
cccgtaaatctgctgaagaggttag

SEQ ID NO: 358284 - DNA, 25 bp, Artificial
  Probe
cactgccccgtaaatctgctgaaga

SEQ ID NO: 358285 - DNA, 25 bp, Artificial
  Probe
actgccccgtaaatctgctgaagag

SEQ ID NO: 358286 - DNA, 25 bp, Artificial
  Probe
gtgcgtgctctaatctctctgttac

SEQ ID NO: 358287 - DNA, 25 bp, Artificial
  Probe
aatctctctgttaccctggaaacgc

SEQ ID NO: 358288 - DNA, 25 bp, Artificial
  Probe
ccctggaaacgctttaggtctcaga

SEQ ID NO: 358289 - DNA, 25 bp, Artificial
  Probe
gctctaatctctctgttaccctgga

SEQ ID NO: 358290 - DNA, 25 bp, Artificial
  Probe
tgctctaatctctctgttaccctgg

SEQ ID NO: 358291 - DNA, 25 bp, Artificial
  Probe
ctctgttaccctggaaacgctttag

SEQ ID NO: 358292 - DNA, 25 bp, Artificial
  Probe
tgccccgtaaatctgctgaagaggt

SEQ ID NO: 358293 - DNA, 25 bp, Artificial
  Probe
gagggcaactcactgccccgtaaat

SEQ ID NO: 358294 - DNA, 25 bp, Artificial
  Probe
gctttaggtctcagacttttggaaa

SEQ ID NO: 358295 - DNA, 25 bp, Artificial
  Probe
ccccgtaaatctgctgaagaggtta

SEQ ID NO: 358296 - DNA, 25 bp, Artificial
  Probe
cctggaaacgctttaggtctcagac

SEQ ID NO: 358297 - DNA, 25 bp, Artificial
  Probe
tcactgccccgtaaatctgctgaag
